(19) United States
(12) Patent Application Publication
(10) Pub. No.: US 2001/0051335 A1
(43) Pub. Date: Dec. 13, 2001

(54) POLYNUCLEOTIDES AND POLYPEPTIDES DERIVED FROM CORN TASSEL

(76) Inventors: RAGHUNATH V. LALGUDI, CLAYTON, MO (US); LAURA Y. ITO, PLEASANTON, CA (US); BRADLEY K. SHERMAN, OAKLAND, CA (US)

Correspondence Address: Christopher Turner, LEGAL DEPARTMENT, INCYTE GENOMICS, INC., 3160 PORTER DRIVE, PALO ALTO, CA, 94304, US

(21) Appl. No.: 09/294,093

(22) Filed: Apr. 16, 1999

Related U.S. Application Data
(60) Provisional application No. 60/082,567, filed on Apr. 21, 1998.

(51) Int. Cl. C12Q 1/68; C12P 21/06

(52) U.S. Cl. 435/6; 435/69.1

(57) ABSTRACT

The present invention provides purified, corn tassel-derived polynucleotides (cdps) which encode corn tassel-derived polypeptides (CDPs). The invention also provides for the use of cdps or their complements, oligonucleotides, or fragments in methods for determining altered gene expression, to recover regulatory elements, and to follow inheritance of desirable characteristics through hybrid breeding programs. The invention further provides for vectors and host cells containing cdps for the expression of CDPs. The invention additionally provides for (i) use of isolated and purified CDPs to induce antibodies and to screen libraries of compounds and (ii) use of anti-CDP antibodies in diagnostic assays.

[0001] This application claims the benefit of U.S. Provisional Application No. 60/082,567, our Docket No. PL-0009 P, filed on Apr. 21, 1998.

[0002] A portion of the disclosure of this patent document contains material which is subject to copyright protection. The copyright owner has no objection to the facsimile reproduction by anyone of the patent document or the patent disclosure, as it appears in the Patent and Trademark Office patent file or records, but otherwise reserves all copyright rights whatsoever.

### FIELD OF THE INVENTION

[0003] The present invention relates to nucleic and amino acid sequences derived from corn tassel and to the use of these sequences in the identification, evaluation, and alteration of desired characteristics associated with growth and development, disease resistance, environmental adaptability, quality, and yield.

### BACKGROUND OF THE INVENTION

[0004] The field of plant breeding deals with the manipulation of plant genomes with the purpose of improving characteristics of the plant. Plant breeders use data and methodology from plant physiology, genetics, biochemistry, pathology, statistics, and molecular biology. One of the most improved hybrid crops is corn, Zea mays (L.). Corn is presently the second-most economically important crop in the United States. Acreage of field corn (used for livestock feed, corn starch, corn syrup, fuel ethanol, and oil) and sweet corn (used fresh or processed for human consumption) exceeds that of any other agronomic crop. Annual losses, reduction in quality and yield, due to diseases and infestation may range from 7 to 17%. Studies of corn may be used as a model for other economically important agronomic grasses.

[0005] Corn is a monocotyledonous plant which has one seed leaf, uses the C₄ photosynthetic pathway, and has scattered vascular bundles. The mature plant is made up of roots, stem, leaves, and reproductive structures. The root system functions to anchor the plant and to absorb water and nutrients. The corn stem consists of a series of nodes, each bearing one bladelike leaf with parallel veins, and internodes, elongated stem sections. The stem and its leaves are commonly referred to as a stalk. Leaves arise alternately and are arranged in two rows along either side of the stem. The male reproductive structure is the tassel, and its flowers produce pollen. The female reproductive structure is the ear, and its flowers each have a silk for pollination. When a pollen grain is shed onto a silk and germinates, a pollen tube grows down the silk and delivers two sperm to the female gametophyte. Within the gametophyte, one sperm fertilizes the egg, and the other, two polar nuclei. The embryo and endosperm produced by this double fertilization develop into the seed which matures in about two months.

[0006] The vegetative (V) and reproductive (R) stages of growth for a corn plant are as follows: VE-emergence from the soil of the seedling leaf; V1-first true leaf; V2-second leaf; . . . V(n)-nth leaf; VT-tasseling stage; and reproductive stages, R1-silking; R2-blister; R3-milk; R4-dough; R5-dent; and R6-physiological maturity (Ritchie, S. W. et al. (1986) How a Corn Plant Develops, Iowa State University Cooperative Extension Service, Ames IA 48:1-21).

[0007] Corn Tassel

[0008] The tassel is initiated early in corn plant development. By the V5 stage, the microscopic tassel is present at the tip of the stem apex; by V6, it is above ground; by V9, it begins rapid development; and by V17, it is visible emerging from the top of the plant. At VT, the last branch of the tassel is completely visible, and silks have not yet emerged from the ear. When the male flowers mature at R0; anthers emerge from the spikelet, open, and release pollen which is dispersed by wind or insects. Depending on environmental conditions, an individual tassel may take as long as seven days to finish shedding pollen, and a whole field may take as long as 14 days to complete pollen shed.

[0009] Male flowers contain stamens; each composed of a filament which bears a bilobate anther. The filament contains a single vascular bundle for conducting water and nutrients to the lobes of the anther. Each lobe has two locules or cavities where the microsporangia or pollen are formed. The cell layers of the anther are epidermis, endothecium, and tapetum, a nutritive tissue of multinucleate cells which contribute to pollen development.

[0010] Microspore mother cells are closely packed within the locules and each microspore mother cell undergoes meiosis to produce four haploid microspores which are subsequently walled off as individual pollen grains. Within each pollen grain, the haploid nucleus undergoes mitosis to produce the pollen tube nucleus which guides pollen tube germination and growth through the silk to the egg, and two sperm nuclei which carry out the double fertilization of the egg and endosperm.

[0011] Problems Of Corn Tassels

[0012] All parts of the corn plant are susceptible to diseases, insect infestations, and stress. These conditions are usually diagnosed by their above-ground leaf, stem, fruit and/or seed symptoms and are caused by fungi, bacteria, mycoplasmas and related organisms, viruses, nematodes, parasitic seed plants, and abnormal environmental conditions.

[0013] Stewart's bacterial wilt caused by Erwinia stewartii is common in eastern North America and has been reported in eastern Europe and Italy. Field corn is genetically more resistant to bacterial wilt than sweet corn. Infected sweet corn hybrids wilt rapidly and their leaves show pale green to yellow streaks with irregular margins which soon become dry and brown. The bacteria which may spread to all parts of the plant may produce premature, bleached, and dead tassels which gravely affect yield. E. stewartii is identified in the field by plant symptoms and the yellow ooze which comes from cut ends of infected stems or leaves. E. stewartii is spread by beetles; however, only the corn flea beetle (Chaetocnema pulicaria) overwinters and spreads the bacteria the next growing season. Mineral nutrition also influences susceptibility to infection; nitrogen in the form of ammonium and phosphorus increase susceptibility, and high calcium and potassium levels decrease susceptibility. Disease severity may also be aggravated by high temperatures.

[0014] Fungal diseases are spread by spores that germinate under favorable conditions of temperature and moisture. Spores germinate to produce branched threads called hyphae that infect plants by direct penetration of the epidermis or through natural openings or wounds. Resting bodies (chlamydospores, sclerotia) allow fungi to survive under unfavorable conditions for long periods in the soil or in plant debris.

[0015] Crazy Top is caused by the downy mildew, Sclerophthora macrospora (Phytophthora macrospora), and is widespread in the US. Although symptoms vary greatly, tassels (and ears) generally develop a mass of leafy structures (“crazy top”), and no pollen is formed In addition, severely infected plants may be stunted, have excessive suckering and display narrow straplike leaves with yellow stripes. Motile spores of the fungus germinate in water-saturated soils, penetrate corn tissues, and form abundant mycelium in the meristems. New fungal fruiting bodies are produced by infected tissues and overwinter in soil and infected debris. Crazy Top may cause substantial losses in localized areas. Other important fungal diseases of corn include tassel rots, stock rots, anthracnose, smuts, rusts, Helminthosporium (Bipolaris) leaf spots and blights, and other downy mildews.

[0016] Viruses are submicroscopic particles composed of nucleic acid and protein which are transmitted by biological vectors, e.g., aphids, leafhoppers, planthoppers, beetles, and other insects. A few corn viruses are seed-transmitted or overwinter in weed and crop plants or insect bodies. Viruses induce a variety of local or systematic symptoms (e.g., mosaic patterns, yellowing or reddening of the foliage, stunting, ringspots, and necrosis) which may be exacerbated by environmental conditions. Viruses which affect field and sweet corn include maize chlorotic dwarf; maize chlorotic mottle; maize dwarf mosaic; and corn lethal necrosis (a complex of maize chlorotic mottle virus and maize dwarf mosaic).

[0017] Maize Dwarf Mosaic Virus (MDMV) is a long, flexuous, rod-shaped virus. It is transmitted on seed or by over 20 species of aphids which acquire the virus from other grasses and transmit it to corn. Plants may be slightly stunted, and reduction in ear size and seed set may occur. MDMV symptoms are highly variable and include narrow, light green or yellowish streaks along the leaf veins and/or dark green “islands” on a yellow background. Symptoms may be present on all leaves and husks that develop following infection. Both environmental conditions and the developmental stage at which the plant is infected may cause a reduction in yield; infection of young plants early in the season causes the most significant losses. In addition, early infection may predispose corn to root and stalk rots and premature death.

[0018] Corn lethal necrosis, found in Kansas and Nebraska, results from the synergistic interaction of maize chlorotic mottle virus (MCMV) in combination with either MDMV strain-A or -B or wheat streak mosaic virus (WSMV). Yield loss greatly exceeds that predicted from the cumulative effects of the individual viruses and may approach 100%. Symptoms include severe mottling, browning of the tassel and leaves, and early death of the plant. Late infections cause ears to fill incompletely and husks to dry prematurely. Potential vectors of these viruses may be: corn rootworm beetles (Diabrotica spp.) for MCMV, greenbug (Schizaphi graminum) and aphids (Rhopalosiphum maidis) for MDMV, and wheat curl mite (Eriophyes tulipae) for WSMV.

[0019] Mycoplasmas and spiroplasmas are minute, pleomorphic organisms that lack a rigid cell wall and are related to gram-positive bacteria. Evidence from electron microscopy and administration of antibiotics indicates that organisms closely resembling mycoplasmas are involved in many plant diseases. These mycoplasma-like organisms (MLO) have not been completely characterized; however, most diseases now thought to be caused by MLO or spiroplasmas are yellows-type diseases. Like some viruses, they occur only in the phloem of diseased plants and are transmitted by leafhoppers, dodder (Cuscuta spp), grafting, and propagation of infected plant parts. MLO and spiroplasmas produce viruslike symptoms including chlorosis or yellowing, stunting, phyllody, proliferation of axillary shoots, and sterility (e.g., corn stunt). Unlike viruses, these organisms are sensitive to the tetracyclines. Characteristic symptoms include yellowing, shortening of the internodes, phyllody, a bushy morphology, sterility, virescence, and reduction of root growth. An example of an MLO-associated disease is Maize Bushy Stunt. This disease was first described in the southern USA where it is spread by leafhoppers. Symptoms include yellowing or reddening, tearing, twisting, and shortening of leaves. The numerous shoots which develop at the leaf nodes and base of the plant give the plant a stunted, bushy morphology.

[0020] Important pests of corn include European corn, southwestern corn, and common stalk borers; corn tasselworm; chinch bug; corn ear worm; armyworm; grasshoppers; corn leaf aphid; corn flea, dusky sap, and Japanese beetles; and spider mites. The Dusky Sap Beetle (Carpophilus luqubris) is dark gray or brown, oblong to oval in shape, has club-like antennae and is between 3 and 4 mm long. It is particularly common along the Atlantic coast of the US. Sap beetles are attracted to sweet corn as it tassels, and they feed on both the tassels and on ripening pollen. Later the beetles move to leaf axils where pollen has fallen and collected and lay eggs in the developing ear kernels. At least three or four generations of the beetles occur each year, and more generations are possible if beetles overwinter in decaying vegetation or debris buried in the soil.

[0021] Environmental conditions also affect growth, development, and yield by altering pathogen activity or host physiology. The severity of the excess, deficiency, or imbalance of soil nutrients or water; extreme soil acidity or alkalinity; very high or low temperatures; air pollutants; or mechanical, pesticide, or other injury varies with the stage of plant maturity during which the disturbance occurs and the plant organ involved. Extended periods of hot, dry winds may cause tassel blasting and loss of pollen.

[0022] Corn Disease Control

[0023] To control corn diseases, it is necessary to disrupt disease development. Intervention requires understanding the pathogens, the spread of pathogens, disease cycles, and plant resistance. Disease control may be achieved by a single procedure (chemical sprays) or by the integrated use of environmental, genetic, and chemical factors. Successful, long-term disease control generally includes planting disease-resistant varieties, applying chemical control, and implementing sanitary cultural methods.

### SUMMARY OF THE INVENTION

[0024] The present invention provides nucleic acid sequences comprising corn tassel-derived polynucleotides (cdps) as presented in the Sequence Listing. Some of the cdps uniquely identify structural, functional, and regulatory genes of the corn tassel. The invention encompasses oligonucleotides, fragments, and derivatives of the cdps and provides nucleic acid sequences complementary to the nucleic acid sequences listed in the Sequence Listing.

[0025] The present invention further provides the following cdps of particular interest as identified by SEQ ID NO: 1615 (700344704H1), SEQ ID NO: 2691 (700346502H1), SEQ ID NO: 2813 (700346702H1), SEQ ID NO: 3616 (700380601H1), SEQ ID NO: 3681 (700380774H1), SEQ ID NO: 233 (700342388H1), SEQ ID NO: 2060 (700345470H1), SEQ ID NO: 964 (700343568H1), SEQ ID NO: 2811 (700346695H1), SEQ ID NO: 2519 (700346233H1), SEQ ID NO: 2083 (700345510H1), SEQ ID NO: 1101 (700343780H1), SEQ ID NO: 1847 (700345052H1), SEQ ID NO: 1777 (700344946H1), SEQ ID NO: 1780 (700344949H1), SEQ ID NO: 1733 (700344870H1), SEQ ID NO: 3018 (700347036H1), SEQ ID NO: 3158 (700347281H1), SEQ ID NO: 2220 (700345749H1), SEQ ID NO: 165 (700342268H1), SEQ ID NO: 139 (700342223H1), SEQ ID NO: 2823 (700346721H1), SEQ ID NO: 2065 (700345477H1), SEQ ID NO: 605 (700343040H1), SEQ ID NO: 3618 (700380603H1), SEQ ID NO: 1537 (700344525H1), SEQ ID NO: 469 (700342790H1), SEQ ID NO: 3344 (700379867H1), SEQ ID NO: 180 (700342291H1), SEQ ID NO: 303 (700342521H1), SEQ ID NO: 1249 (700344013H1), SEQ ID NO: 1036 (700343679H1), SEQ ID NO: 2920 (700346877H1), SEQ ID NO: 3619 (700380604H1), SEQ ID NO: 1061 (700343721H1), SEQ ID NO: 1589 (700344654H1), SEQ ID NO: 3100 (700347193H1), SEQ ID NO: 2182 (700345675H1), SEQ ID NO: 2218 (700345743H1), SEQ ID NO: 398 (700342679H1), SEQ ID NO: 175 (700342283H1), SEQ ID NO: 3533 (700380411H1), SEQ ID NO: 3615 (700380596H1), SEQ ID NO: 89 (700281941H2), SEQ ID NO: 3530 (700380405H1), SEQ ID NO: 3023 (700347043H1), SEQ ID NO: 3185 (700347339H1), SEQ ID NO: 3062 (700347112H1), SEQ ID NO: 1082 (700343752H1), SEQ ID NO: 55 (700281888H2), SEQ ID NO: 2955 (700346930H1), SEQ ID NO: 1032 (700343674H1), SEQ ID NO: 163 (700342263H1), SEQ ID NO: 2864 (700346807H1), SEQ ID NO: 1286 (700344069H1), SEQ ID NO: 2560 (700346291H1), SEQ ID NO: 742 (700343247H1), SEQ ID NO: 1731 (700344866H1), SEQ ID NO: 370 (700342630H1), SEQ ID NO: 1167 (700343872H1), SEQ ID NO: 715 (700343202H1), SEQ ID NO: 3314 (700379793H1), SEQ ID NO: 2156 (700345638H1), SEQ ID NO: 624 (700343071H1), SEQ ID NO: 545 (700342924H1), SEQ ID NO: 2855 (700346794H1), SEQ ID NO: 850 (700343408H1), SEQ ID NO: 1557 (700344614H1), SEQ ID NO: 1872 (700345114H1), SEQ ID NO: 1000 (700343626H1), SEQ ID NO: 1045 (700343695H1), SEQ ID NO: 2753 (700346604H1), SEQ ID NO: 70 (70028191(H1), SEQ ID NO: 1235 (700343988H1), SEQ ID NO: 389 (700342664H1), SEQ ID NO: 486 (700342817H1), SEQ ID NO: 766 (700343281H1), SEQ ID NO: 1310 (700344105H1), SEQ ID NO: 3202 (700347368H1), SEQ ID NO: 1941 (700345253H1), SEQ ID NO: 6 (700281814H2), SEQ ID NO: 1884 (700345138H1), SEQ ID NO: 2316 (700345916H1), SEQ ID NO: 1948 (700345263H1), SEQ ID NO: 2277 (700345849H1), SEQ ID llO: 2019 (700345394H1), SEQ ID NO: 1696 (700344820H1), SEQ ID NO: 226 (700342373H11), SEQ ID NO: 262 (700342448H1), SEQ ID NO: 1377 (700344208H1), SEQ ID NO: 1279 (700344059H1), SEQ ID NO: 1770 (700344935H1), SEQ ID NO: 532 (700342903H1), SEQ ID NO: 843 (700343396H1), SEQ ID NO: 360 (700342616H1), SEQ ID NO: 540 (700342915H1), SEQ ID NO: 413 (700342708H1), SEQ ID NO: 1252 (700344017H1), SEQ ID NO: 1560 (700344618H1), SEQ ID NO: 3541 (700380432H1), SEQ ID NO: 243 (700342413H1), SEQ ID NO: 1938 (700345249H1), SEQ ID NO: 1127 (700343816H1), SEQ ID NO: 1545 (700344541H1), SEQ ID NO: 1946 (700345258H1), SEQ ID NO: 298 (700342510H1), SEQ ID NO: 2906 (700346860H1), SEQ ID NO: 783 (700343310H1), SEQ ID NO: 616 (700343060H1), SEQ ID NO: 2097 (700345529H1), SEQ ID NO: 2393 (700346036H1), SEQ ID NO: 860 (700343420H1), SEQ ID NO: 2196 (700345705H1), SEQ ID NO: 2403 (700346049H1), SEQ ID NO: 2309 (700345906H1), SEQ ID NO: 1963 (700345289H1), SEQ ID NO: 1383 (700344218H1), SEQ ID NO: 3201 (700347367H1), SEQ ID NO: 3589 (700380530H1), SEQ ID NO: 660 (700343124H1), SEQ ID NO: 2254 (700345807H1), SEQ ID NO: 2689 (700346496H1), SEQ ID NO: 3166 (700347296H1), SEQ ID NO: 2023 (700345404H1), SEQ ID NO: 726 (700343218H1), SEQ ID NC: 363 (700342620H1), SEQ ID NO: 2968 (700346951H1), SEQ ID NO: 2214 (700345737H1), SEQ ID NO: 989 (700343607H1), SEQ ID NO: 2642 (700346426H1), SEQ ID NO: 2741 (700346581H1), SEQ ID NO: 1321 (700344122H1), SEQ ID NO: 1255 (700344022H1), SEQ ID NO: 2311 (700345908H1), SEQ ID NO: 1857 (700345075H1), SEQ ID NO: 2571 (700346316H1), SEQ ID NO: 3063 (700347116H1), SEQ ID NO: 1649 (700344750H1), SEQ ID NO: 1653 (700344754H1), SEQ ID NO: 1762 (700344924H1), SEQ ID NO: 1985 (700345329H1), SEQ ID NO: 2382 (700346023H1), SEQ ID NO: 2468 (700346152H1), SEQ ID NO: 1567 (700344628H1), SEQ ID NO: 991 (700343609H1), SEQ ID NO: 2124 (700345577H1), SEQ ID NO: 829 (700343377H1), SEQ ID NO: 3623 (700380616H1), SEQ ID NO: 725 (700343216H1), SEQ ID NO: 1676 (700344785H1), SEQ ID NO: 399 (700342680H1), SEQ ID NO: 2790 (700346658H1), SEQ ID NO: 2284 (700345859H1), SEQ ID NO: 2838 (700346745H1), SEQ ID NO: 757 (700343266H1), SEQ ID NO: 1251 (700344016H1), SEQ ID NO: 207 (700342338H1), SEQ ID NO: 3515 (700380270H1), SEQ ID NO: 3224 (700379610H1), SEQ ID NO: 2958 (700346935H1), SEQ ID NO: 1861 (700345079H1), SEQ ID NO: 3052 (700347092H1), SEQ ID NO: 2542 (700346264H1), SEQ ID NO: 3602 (700380571H1), SEQ ID NO: 2788 (700346656H1), SEQ ID NO: 1966 (700345293H1), SEQ ID NO: 1813 (700345004H1), SEQ ID NO: 573 (700342936H11), SEQ ID NO: 3572 (700380488H1), SEQ ID NO: 1368 (700344191H1), SEQ ID NO: 774 (700343291H1), SEQ ID NO: 443 (700342747H1), SEQ ID NO: 1083 (700343755H1), SEQ ID NO: 110 (700281973H1), SEQ ID NO: 118 (700281986H2), SEQ ID NO: 2088 (700345516H1), SEQ ID NO: 2932 (700346894H1), SEQ ID NO: 2815 (700346704H1), SEQ ID NO: 1112 (700343793H1), SEQ ID NO: 3131 (700347236H1), SEQ ID NO: 682 (700343154H1), SEQ ID NO: 1965 (700345291H1), SEQ ID NO: 1866 (700345094H1), SEQ ID NO: 898 (700343475H1), SEQ ID NO: 3582 (700380514H1), SEQ ID NO: 916 (700343509H1), SEQ ID NO: 188 (700342309H1), SEQ ID NO: 1364 (700344L86H1), SEQ ID NO: 1421 (700344295H1), SEQ ID NO: 3685 (700380786H1), SEQ ID NO: 2404 (700346050H1), SEQ ID NO: 3246 (700379650H1), SEQ ID NO: 1673 (700344782H1), SEQ ID NO: 953 (700343552H1), SEQ ID NO: 2216 (700345739H1), SEQ ID NO: 1232 (700343985H1), SEQ ID NO: 775 (700343292H1), SEQ ID NO: 869 (700343431H1), SEQ ID NO: 145 (700342231H1), SEQ ID NO: 2927 (700346887H1), SEQ ID NO: 1820 (700345013H1), SEQ ID NO: 2244 (700345785H1), SEQ ID NO: 1078 (700343746H1), SEQ ID NO: 2965 (700346943H1), SEQ ID NO: 1085 (700343757H1), SEQ ID NO: 730 (700343225H1), SEQ ID NO: 792 (700343325H1), SEQ ID NO: 3218 (700347395H1), SEQ ID NO: 3033 (700347064H1), SEQ ID NO: 1058 (700343715H1), SEQ ID NO: 302 (700342515H1), SEQ ID NO: 2384 (700346026H1), SEQ ID NO: 1220 (700343965H1), SEQ ID NO: 1883 (700345136H1), SEQ ID NO: 1928 (700345235H1), SEQ ID NO: 2598 (700346351H1), SEQ ID NO: 315 (700342543H1), SEQ ID NO: 1405 (700344265H1), SEQ ID NO: 3128 (700347232H1), SEQ ID NO: 942 (700343540H1), SEQ ID NO: 1109 (700343790H1), SEQ ID NO: 1490 (700344425H1), SEQ ID NO: 3040 (700347072H1), SEQ ID NO: 2411 (700346060H1), SEQ ID NO: 2477 (700346167H1), SEQ ID NO: 446 (700342755H1), SEQ ID NO: 3026 (700347050H1), SEQ ID NO: 3554 (700380452H1), SEQ ID NO: 3465 (700380146H1), SEQ ID NO: 143 (700342228H1), SEQ ID NO: 867 (700343428H1), SEQ ID NO: 1139 (700343832H1), SEQ ID NO: 3067 (700347126H1), SEQ ID NO: 799 (700343333H1), SEQ ID NO: 2059 (700345469H1), SEQ ID NO: 2120 (700345571H1), SEQ ID NO: 2179 (700345671H1), SEQ ID NO: 2707 (700346525H1), SEQ ID NO: 967 (700343572H1), SEQ ID NO: 1356 (700344174H1), SEQ ID NO: 2896 (700346848H1), SEQ ID NO: 304 (700342523H1), SEQ ID NO: 1063 (700343723H1), SEQ ID NO: 560 (700342959H1), SEQ ID NO: 2625 (700346389H1), SEQ ID NO: 2501 (700346210H1), SEQ ID NO: 319 (700342551H1), SEQ ID NO: 3173 (700347308H1), SEQ ID NO: 2313 (700345910H1), SEQ ID NO: 2022 (700345403H1), SEQ ID NO: 1076 (700343742H1), SEQ ID NO: 3025 (700347049H1), SEQ ID NO: 1719 (700344849H1), SEQ ID NO: 3342 (700379862H1), SEQ ID NO: 643 (700343103H1), SEQ ID NO: 3649 (700380682H1), SEQ ID NO: 3613 (700380589H1), SEQ ID NO: 807 (700343342H1), SEQ ID NO: 1760 (700344920H1), SEQ ID NO: 2558 (700346288H1), SEQ ID NO: 492 (700342832H1), SEQ ID NO: 504 (700342846H1), SEQ ID NO: 172 (700342278H1), SEQ ID NO: 1738 (700344878H1), SEQ ID NO: 2014 (700345384H1), SEQ ID NO: 390 (700342666H1), SEQ ID NO: 401 (700342682H1), SEQ ID NO: 3512 (700380263H1), SEQ ID NO: 3441 (700380096H1), SEQ ID NO: 2370 (700346008H1), SEQ ID ND: 1323 (700344124H1), SEQ ID NO: 634 (700343087H1), SEQ ID NO: 1986 (700345330H1), SEQ ID NO: 238 (700342403H1), SEQ ID NO: 987 (700343603H1), SEQ ID NO: 273 (700342463H1), SEQ ID NO: 208 (700342340H1), SEQ ID NO: 2674 (700346475H1), SEQ ID NO: 3119 (700347222H1), SEQ ID NO: 2203 (700345716H1), SEQ ID NO: 2186 (700345686H1), SEQ ID NO: 1307 (700344096H1), SEQ ID NO: 1372 (700344196H1), SEQ ID NO: 3053 (700347093H1), SEQ ID NO: 2507 (700346218H1), SEQ ID NO: 1049 (700343703H1), SEQ ID NO: 391 (700342667H1), SEQ ID NO: 3092 (700347176H1), SEQ ID NO: 3389 (700379975H1), SEQ ID NO: 326 (700342560H1), SEQ ID NO: 3605 (700380575H1), SEQ ID NO: 2946 (700346918H1), SEQ ID NO: 907 (700343487H1), SEQ ID NO: 3366 (700379925H1), SEQ ID NO: 1237 (700343991H1), SEQ ID NO: 3610 (700380584H1), SEQ ID NO: 2464 (700346146H1), SEQ ID NO: 3650 (700380683H1), SEQ ID NO: 2024 (700345405H1) SEQ ID NO: 1145 (700343841H1), SEQ ID NO: 1590 (700344655H1), SEQ ID NO: 2219 (700345747H1), SEQ ID NO: 224 (700342363H1), SEQ ID NO: 1108 (700343789H1), SEQ ID NO: 344 (700342589H1), SEQ ID NO: 2995 (700346996H1), SEQ ID NO: 3282 (700379719H1), SEQ ID NO: 1826 (700345020H1), SEQ ID NO: 1443 (700344334H1), SEQ ID NO: 3021 (700347040H1), SEQ ID NO: 558 (700342952H1), SEQ ID NO: 2292 (700345873H1), SEQ ID NO: 2030 (700345412H1), SEQ ID NO: 1005 (700343632H1), SEQ ID NO: 254 (700342432H1), SEQ ID NC): 1506 (700344454H1), SEQ ID NO: 1146 (700343842H1), SEQ ID NO: 1756 (700344911H1), SEQ ID NO: 2471 (700346157H1), SEQ ID NO: 1170 (700343875H1), SEQ ID NO: 1765 (700344928H1), SEQ ID NO: 1585 (700344649H1), SEQ ID NO: 495 (700342835H1), SEQ ID NO: 392 (700342670H1), SEQ ID NO: 5179 (700355947H1), SEQ ID NO: 4225 (700353526H1), SEQ ID NO: 5639 (700382063H1), SEQ ID NO: 3797 (700352605H1), SEQ ID NO: 4188 (700353271H1), SEQ ID NO: 5940 (700382691H1), SEQ ID NO: 4388 (700353955H1), SEQ ID NO: 5962 (700382739H1), SEQ ID NO: 6034 (700382890H1), SEQ ID NO: 4988 (700355520H1), SEQ ID NO: 5105 (700355788H1), SEQ ID NO: 5943 (700382702H1), SEQ ID NO: 4276 (700353625H1), SEQ ID NO: 5267 (700356140H1), SEQ ID NO: 3698 (700282414H2), SEQ ID NO: 4942 (700355431H1), SEQ ID NO: 4803 (700355029H1), SEQ ID NO: 5171 (700355925H1), SEQ ID NO: 5366 (700356466H1), SEQ ID NO: 4940 (700355428H1), SEQ ID NO: 5895 (700382605H1), SEQ ID NO: 4403 (700354129H1), SEQ ID NO: 4830 (700355088H1), SEQ ID NO: 5695 (700382183H1), SEQ ID NO: 5440 (700356708H1), SEQ ID NO: 5526 (700357108H1), SEQ ID NO: 5529 (700357122H1), SEQ ID NO: 5371 (700356474H1), SEQ ID NO: 4029 (700353005H1), SEQ ID NO: 5099 (700355779H1), SEQ ID NO: 4100 (700353128H1), SEQ ID NO: 3790 (700282575H2), SEQ ID NO: 3835 (700352675H1), SEQ ID NO: 3943 (700352843H1), SEQ ID NO: 3856 (700352709H1), SEQ ID NO: 3874 (700352735H1), SEQ ID NO: 4959 (700355462H1), SEQ ID NO: 5010 (700355558H1), SEQ ID NO: 4336 (700353828H1), SEQ ID NO: 5420 (700356627H1), SEQ ID NO: 5751 (700382275H1), SEQ ID NO: 5301 (700356219H1), SEQ ID NO: 6184 (700383158H1), SEQ ID NO: 5003 (700355547H1), SEQ ID NO: 4800 (700355026H1), SEQ ID NO: 4610 (700354647H1), SEQ ID NO: 4789 (700355009H1), SEQ ID NO: 4466 (700354337H1), SEQ ID NO: 5278 (700356158H1), SEQ ID NO: 4742 (700354908H1), SEQ ID NO: 5260 (700356129H1), SEQ ID NO: 5661 (700382106H1), SEQ ID NO: 3806 (700352616H1), SEQ ID NO: 4555 (700354518H1), SEQ ID NO: 5232 (700356066H1), SEQ ID NO: 5216 (700356023H1), SEQ ID NO: 6002 (700382827H1), SEQ ID NO: 4217 (700353446H1), SEQ ID NO: 4793 (700355016H1), SEQ ID NO: 4204 (700353409H1), SEQ ID NO: 6178 (700383149H1), SEQ ID NO: 6083 (700382979H1), SEQ ID NO: 4876 (700355249H1), SEQ ID NO: 4031 (700353007H1), SEQ ID NO: 6098 (700383013H1), SEQ ID NO: 6102 (700383021H1), SEQ ID NO: 4421 (700354239H1), SEQ ID NO: 5946 (700382708H1), SEQ ID NO: 5214 (700356()20H1), SEQ ID NO: 5703 (700382195H1), SEQ ID NO: 3750 (700282503H2), SEQ ID NO: 4212 (700353432H1), SEQ ID NO: 6090 (700382995H1), SEQ ID NO: 4713 (700354850H1), SEQ ID NO: 4197 (700353284H1), SEQ ID NO: 5692 (700382179H1), SEQ ID NO: 4727 (700354875H1), SEQ ID NO: 5924 (700382668H1), SEQ ID NO: 4052 (700353052H1), SEQ ID NO: 4111 (700353142H1), SEQ ID NO: 4043 (700353028H1), SEQ ID NO: 5723 (700382229H1), SEQ ID NO: 5560 (700357402H1), SEQ ID NO: 5603 (700357489H1), SEQ ID NO: 5700 (700382191H1), SEQ ID NO: 5875 (700382543H1), SEQ ID NO: 3811 (700352625H1), SEQ ID NO: 6081 (700382975H1), SEQ ID NO: 5186 (700355963H1), SEQ ID NO: 5813 (700382392H1), SEQ ID NO: 5155 (700355889H1), SEQ ID NO: 4632 (700354689H1), SEQ ID NO: 5674 (700382139H1), SEQ ID NO: 4279 (700353629H1), SEQ ID NO: 4625 (700354676H1), SEQ ID NO: 5586 (700357445H1), SEQ ID NO: 4054 (700353057H1), SEQ ID NO: 5724 (700382230H1), SEQ ID NO: 5699 (700382190H1), SEQ ID NO: 6181 (700383154H1), SEQ ID NO: 3982 (700352912H1), SEQ ID NO: 4654 (700354742H1), SEQ ID NO: 4737 (700354895H1), SEQ ID NO: 4321 (700353779H1), SEQ ID NO: 4934 (700355415H1), SEQ ID NO: 5543 (700357160H1), SEQ ID NO: 4933 (700355414H1), SEQ ID NO: 3713 (700282435H1), SEQ ID NO: 3787 (700282569H2), SEQ ID NO: 3789 (700282571H2), SEQ ID NO: 4814 (700355053H1), SEQ ID NO: 5555 (700357189H1), SEQ ID NO: 3876 (700352737H1), SEQ ID NO: 4208 (700353424H1), SEQ ID NO: 3827 (700352654H1), SEQ ID NO: 3863 (700352719H1), SEQ ID NO: 6130 (700383062H1), SEQ ID NO: 4041 (700353023H1), SEQ ID NO: 5101 (700355781H1), SEQ ID NO: 5792 (700382353H1), SEQ ID NO: 4983 (700355513H1), SEQ ID NO: 4089 (700353114H1), SEQ ID NO: 4348 (700353853H1), SEQ ID NO: 6182 (700383155H1), SEQ ID NO: 5716 (700382218H1), SEQ ID NO: 5102 (700355783H1), SEQ ID NO: 5859 (700382507H1), SEQ ID NO: 5442 (700356725H1), SEQ ID NO: 5998 (700382817H1), SEQ ID NO: 4037 (700353014H1), SEQ ID NO: 4404 (700354142H1), SEQ ID NO: 5734 (700382245H1), SEQ ID NO: 5392 (700356534H1), SEQ ID NO: 5675 (700382140H1), SEQ ID NO: 5746 (700382267H1), SEQ ID NO: 4102 (700353130H1), SEQ ID NO: 4536 (700354478H1), SEQ ID NO: 4219 (700353509H1), SEQ ID NO: 5151 (700355885H1), SEQ ID NO: 4268 (700353612H1), SEQ ID NO: 3774 (700282549H2), SEQ ID NO: 3772 (700282547H2), SEQ ID NO: 5283 (700356171H1), SEQ ID NO: 5647 (700382075H1), SEQ ID NO: 5778 (700382330H1), SEQ ID NO: 5014 (700355577H1), SEQ ID ND: 5825 (700382426H1), SEQ ID NO: 5866 (700382525H1), SEQ ID NO: 4556 (700354519H1), SEQ ID NO: 3821 (700352645H1), SEQ ID NO: 4762 (700354942H1), SEQ ID NO: 4981 (700355507H1), SEQ ID NO: 5540 (700357155H1), SEQ ID NO: 5476 (700356835H1), SEQ ID NO: 5650 (700382078H1), SEQ ID NO: 5750 (700382273H1), SEQ ID NO: 5100 (700355780H1), SEQ ID NO: 4553 (700354516H1), SEQ ID NO: 4923 (700355345H1), SEQ ID NO: 4922 (700355344H1), SEQ ID NO: 3773 (700282548H2), SEQ ID NO: 3715 (700282438H2), SEQ ID NO: 5022 (700355594H1), SEQ ID NO: 5516 (700356974H1), SEQ ID NO: 4451 (700354305H1), SEQ ID NO: 4938 (700355422H1), SEQ ID NO: 5436 (700356695H1), SEQ ID NO: 5742 (700382260H1), SEQ ID NO: 5242 (700356081H1), SEQ ID NO: 4766 (700354954H1), SEQ ID NO: 3792 (700282584H2), SEQ ID NO: 3795 (700282592H2), SEQ ID NO: 5569 (700357415H1), SEQ ID NO: 5142 (700355871H11), SEQ ID NO: 4305 (700353713H1), SEQ ID NO: 4559 (700354534H1), SEQ ID NO: 5188 (700355966H1), SEQ ID NO: 5088 (700355766H1), SEQ ID NO: 5286 (700356177H1), SEQ ID NO: 5294 (700356193H1), SEQ ID NO: 3995 (700352935H1), SEQ ID NO: 4615 (700354658H1), SEQ ID NO: 5453 (700356767H1), SEQ ID NO: 4667 (700354769H1), SEQ ID NO: 5832 (700382439H1), SEQ ID NO: 5839 (700382450H1), SEQ ID NO: 6101 (700383019H1), SEQ ID NO: 6097 (700383011H1), SEQ ID NO: 4951 (700355447H1), SEQ ID NO: 4423 (700354247H1), SEQ ID NO: 4672 (700354777H1), SEQ ID NO: 4682 (700354793H1), SEQ ID NO: 5395 (700356541H1), SEQ ID NO: 5311 (700356241H1), SEQ ID NO: 4522 (700354446H1), SEQ ID NO: 4460 (700354326H1), SEQ ID NO: 5493 (700356901H1), SEQ ID NO: 5507 (700356933H1), SEQ ID NO: 4512 (700354425H1), SEQ ID NO: 5217 (700356025H1), SEQ ID NO: 4159 (700353215H1), SEQ ID NO: 5480 (700356847H1), SEQ ID NO: 6123 (700383051H1), SEQ ID NO: 4452 (700354310H1), SEQ ID NO: 4499 (700354409H1), SEQ ID NO: 4808 (700355040H1), SEQ ID NO: 5800 (700382365H1), SEQ ID NO: 5710 (700382210H1), SEQ ID NO: 6030 (700382882H1), SEQ ID NO: 5461 (700356796H1), SEQ ID NO: 5548 (700357173H1), SEQ ID NO: 4790 (700355011H1), SEQ ID NO: 5201 (700355989H1), SEQ ID NO: 4286 (700353653H1), SEQ ID NO: 6103 (700383023H1), SEQ ID NO: 6099 (700383015H1), SEQ ID NO: 5317 (700356252H1), SEQ ID NO: 5399 (700356551H1), SEQ ID NO: 5667 (700382123H1), SEQ ID NO: 6176 (700383147H1), SEQ ID NO: 5084 (700355758H1), SEQ ID NO: 4566 (700354558H1), SEQ ID NO: 4845 (700355173H1), SEQ ID NO: 4819 (700355067H1), SEQ ID NO: 3775 (700282550H2), SEQ ID NO: 5273 (700356152H1), SEQ ID NO: 6111 (700383037H1), SEQ ID NO: 3984 (700352916H1), SEQ ID NO: 5481 (700356848H1), SEQ ID NO: 5309 (700356236H1), SEQ ID NO: 4456 (700354317H1), SEQ ID NO: 4824 (700355077H1), SEQ ID NO: 5240 (700356076H1), SEQ ID NO: 5121 (700355829H1), SEQ ID NO: 5418 (700356624H1), SEQ ID NO: 4603 (700354637H1), SEQ ID ND: 5718 (700382220H1), SEQ ID NO: 5747 (700382268H1), SEQ ID NO: 6189 (700383166H1), SEQ ID NO: 6129 (700383061H1), SEQ ID NO: 5494 (700356903H1), SEQ ID ND: 5508 (700356935H1), SEQ ID NO: 4797 (700355022H1), SEQ ID NO: 5691 (700382176H1), SEQ ID NO: 5862 (700382513H1), SEQ ID NO: 5917 (700382654H1), SEQ ID NO: 5328 (700356273H1), SEQ ID NO: 3971 (700352891H1), SEQ ID NO: 5463 (700356802H1), SEQ ID NO: 4588 (700354606H1), SEQ ID NO: 4342 (700353839H1), SEQ ID NO: 5376 (700356483H1), SEQ ID NO: 5136 (700355856H1), SEQ ID NO: 5154 (7003558,38H1), SEQ ID NO: 5916 (700382649H1), SEQ ID NO: 5869 (700382537H1), SEQ ID NO: 5231 (700356062H1), SEQ ID NO: 4194 (700353279H1), SEQ ID NO: 4978 (700355496H1), SEQ ID NO: 5923 (700382665H1), SEQ ID NO: 4755 (700354930H1), SEQ ID NO: 4008 (700352961H1), SEQ ID NO: 5424 (700356644H1), SEQ ID NO: 4035 (700353012H1), SEQ ID NO: 5323 (700356265H1), SEQ ID NO: 4818 (700355065H1), SEQ ID NO: 5367 (700356468H1), SEQ ID NO: 5888 (700382579H1), SEQ ID NO: 3690 (7002824(1H2), SEQ ID NO: 3794 (700282591H2), SEQ ID NO: 3764 (700282522H2), SEQ ID NO: 3758 (700282514H2), SEQ ID NO: 5128 (700355842H1), SEQ ID NO: 3818 (7003526.36H1), SEQ ID NO: 3781 (700282561H2), SEQ ID NO: 3782 (700282562H2), SEQ ID NO: 4889 (700355286H1), SEQ ID NO: 6104 (700383026H1), SEQ ID NO: 5138 (700355861H11), SEQ ID NO: 5140 (700355866H1), SEQ ID NO: 6006 (700382834H1), SEQ ID 1NO: 5880 (700382554H1), SEQ ID NO: 6116 (700383043H1), SEQ ID NO: 5774 (700382324H1), SEQ ID NO: 4024 (700352993H1), SEQ ID NO: 4820 (7003550701), SEQ ID NO: 5438 (700356702H1), SEQ ID NO: 4150 (700353201H1), SEQ ID NO: 5909 (700382636H1), SEQ ID NO: 5551 (700357183H1), SEQ ID NO: 5055 (700355708H1), SEQ ID NO: 4551 (700354508H1), SEQ ID NO: 3975 (700352903H1), SEQ ID NO: 5793 (700382354H1), SEQ ID NO: 5823 (700382424H1), SEQ ID NO: 3915 (700352802H1), SEQ ID NO: 5146 (700355877H1), SEQ ID NO: 5879 (700382550H1), SEQ ID NO: 5627 (700382041l1), SEQ ID NO: 4211 (700353431H1), SEQ ID NO: 5894 (700382604H1), SEQ ID NO: 5806 (700382377H1), SEQ ID NO: 5558 (700357194H1), SEQ ID NO: 5396 (700356542H1), SEQ ID NO: 3892 (700352760H1), SEQ ID NO: 5211 (700356015H1), SEQ ID NO: 4011 (700352967H1), SEQ ID NO: 5282 (700356167H1), SEQ ID NO: 5978 (700382173H1), SEQ ID NO: 4898 (700355307H1), SEQ ID NO: 5522 (700356984H1), SEQ ID NO: 5226 (700356047H1), SEQ ID NO: 3777 (700282554H2), SEQ ID NO: 3776 (700282553H2), SEQ ID NO: 5817 (700382401H1), SEQ ID NO: 5858 (700382494H1), SEQ ID NO: 4627 (700354678H1), SEQ ID NO: 5411 (700356591H1), SEQ ID NO: 4257 (700353590H1), SEQ ID NO: 4833 (700355093H1), SEQ ID NO: 4148 (700353195H1), SEQ ID NO: 5210 (700356014H1), SEQ ID NO: 4422 (700354244H1), SEQ ID NO: 4949 (700355444H1), SEQ ID NO: 4481 (700354371H1), SEQ ID NO: 6095 (700383009H1), SEQ ID NO: 4670 (700354774H1), SEQ ID NO: 4680 (700354790H1). These selected cdps represent unique, corn tassel-specific polynucleotides which are used to produce a tassel-specific profile of gene transcription, a transcript image.

[0026] The cdps are also used as a composition in methods to detect altered gene expression in inbred or hybrid plants. Such methods employ the cdps of the Sequence Listing, oligonucleotides, fragments, derivatives, or complementary sequences in hybridization technologies. The invention provides a method for detecting polynucleotides in a biological sample, the method comprising the steps of hybridizing a cdp to at least one of the nucleic acids in the biological sample, thereby forming a hybridization complex, and detecting the hybridization complex, wherein the presence of the complex correlates with the presence of the polynucleotide in the sample. An additional method provides for amplification of the nucleic acids of the biological sample prior to hybridization. The invention provides a method of screening a plurality of molecules for specific binding to a polynucleotide, the method comprising the steps of providing the plurality of molecules; combining the polynucleotide with each of the plurality of molecules for a time sufficient to allow binding under suitable conditions; and detecting binding of the polynucleotide to each of the plurality of molecules, thereby identifying the molecules which specifically bind the polynucleotide.

[0027] The invention further provides a method for recovering a regulatory element, the method comprising the steps of designing oligomers to at least one of the cdps, combining the oligomer, with a DNA library under appropriate conditions to amplify the cdp, comparing the cdp with the amplified sequence to identify overlapping areas, identifying additional sequence beyond the overlapping areas, and repeating steps a) through d) until the regulatory element is recovered. The regulatory element is a tassel-specific regulatory element which may be placed in an expression vector which is transformed into a corn plant. The regulatory element is of value in regulating the expression of introduced cdps.

[0028] The invention provides a purified corn tassel-derived polynucleotide capable of expressing a corn tassel-derived polypeptide. In one embodiment, the corn tassel-derived polynucleotide is contained within an expression vector. In a second embodiment, the expression vector is contained within a host cell. The invention also provides a method for producing a corn tassel-derived polypeptide, said method comprising the steps of culturing the host cells containing the tassel-derived polynucleotide under conditions suitable for the expression of a corn tassel-derived polypeptide, and recovering the corn tassel-derived polypeptide from the cell culture.

[0029] The invention provides a purified corn tassel-derived polypeptide (CDP) encoded by at least one of the cdps of the Sequence Listing. The invention also provides an anti-CDP antibody specific for a purified polypeptide encoded by the cdp. Such antibodies may be used for diagnostic purposes for the detection of CDPs in specific plant cells.

[0030] The invention further provides a method for identifying a test compound which specifically binds the CDP, the method comprising the steps of providing a test compound, combining the CDP with the test compound under suitable conditions for a time sufficient to allow binding, and detecting CDP binding to the test compound.

### DESCRIPTION OF THE SEQUENCE LISTING AND TABLES

[0031] A portion of the disclosure of this patent document contains material which is subject to copyright protection. The copyright owner has no objection to the facsimile reproduction by anyone of the patent document or the patent disclosure, as it appears in the Patent and Trademark Office patent file or records, but otherwise reserves all copyright rights whatsoever.

[0032] The Sequence Listing is a compilation of nucleic acid sequences obtained by sequencing clone inserts or isolates of two corn tassel cDNA libraries. Each sequence is identified by a sequence identification number (SEQ ID NO) and by an Incyte Clone number. TABLES 1 and 2 are compilations of Incyte Clones arranged as described below.

[0033] TABLE 1 lists homologous isolates from the two corn tassel cDNA libraries prepared as described in the Examples. The first column contains Incyte Clone numbers. The Incyte Clone number provides a cross reference to the Sequence Listing. The second column contains a relevant GenBank identification number. The third and fourth columns represent product and log-likelihood scores (Karlin, S. and S. F. Altschul (1993) Proc. Nat. Acad. Sci. 90:5873-5877). The fifth column refers to the particular database and release of GenBank against which the Incyte Clone was searched and in which a related sequence was found. The sequences of this invention were compared to sequences in the GenBank plant, eukaryotic and protein databases, and most isolates list homology to sequences in those databases. The last column contains a description of the referenced GenBank sequence.

[0034] TABLE 2 is a compilation representing corn tassel-specific gene activity as illustrated by sets of clustered or related sequences. Each cluster disclosed in the table contains unique or homologous sequences that are specific to the two corn tassel cDNA libraries. The clones in a cluster may contain overlapping sequences or they may be related to or overlap a common reference sequence. Clusters are compiled by naming, matching, and counting all copies of the cdp. The minimum number of clones required to define a cluster is two; clusters containing two clones are found at the bottom of the table. Some clusters are characterized further by the homology of one or more sequences to a reference sequence which has a GenBank identifier (g) and description. Homologous sequences are more fully described in TABLE 1.

### DETAILED DESCRIPTION OF THE INVENTION

[0035] Before the nucleic acid sequences and methods are presented, it is to be understood that this invention is not limited to the particular methodologies, protocols, cell lines, vectors, and reagents described. Although particular embodiments are described, methods and materials similar or equivalent to these embodiments may be used to practice the invention. The preferred methods, devices, and materials set forth are not intended to limit the scope of the invention which is limited only by the appended claims.

[0036] The singular forms “a”, “an”, and “the” include plural reference unless the context clearly dictates otherwise. All technical and scientific terms have the meanings commonly understood by one of ordinary skill in the art. All publications are incorporated by reference for the purpose of describing and disclosing the cell lines, vectors, and methodologies which are presented and which might be used in connection with the invention. Nothing in the specification is to be construed as an admission that the invention is not entitled to antedate such disclosure by virtue of prior invention.

[0037] Definitions

[0038] As used herein, the lower case “cdp” refers to a nucleic acid sequence, while the upper case “CDP” refers to an amino acid sequence. A “full-length” cdp refers to a nucleic acid sequence containing the entire coding region of a gene endogenously expressed in corn.

[0039] “Adjuvants” are materials such as Freund's, mineral gels (aluminum hydroxide), and surface active substances (lysolecithin, pluronic polyols, polyanions, peptides, oil emulsions, keyhole limpet hemocyanin (KLH; Sigma-Aldrich, St. Louis Mo.), and dinitrophenol) which may be administered to increase a host's immunological response.

[0040] “Allele” refers to an alternative form of a nucleic acid sequence. Alleles result from a “mutation”, and any given genome may have none, one, or many allelic forms. Mutations which give rise to alleles are ascribed to deletions, additions or substitutions of nucleotides. Each of these types of changes may occur alone, or in combination with the others, one or more times in a given nucleic acid sequence. The present invention encompasses allelic cdps.

[0041] “Amino acid sequence” refers to an oligopeptide, a peptide, a polypeptide, or a protein of either natural or synthetic origin. The amino acid sequence is not limited to the complete, endogenous amino acid sequence and may be a portion, epitope, variant, or derivative of a protein expressed by a corn nucleic acid sequence.

[0042] “Amplification” refers to the production of additional copies of a sequence and is carried out using polymerase chain reaction (PCR) technologies well known in the art.

[0043] “Antisense” refers to nucleic acid sequences which are complementary to a specific DNA or RNA sequence. The antisense strand (negative or 3′-5′) is that nucleic acid strand that is complementary to the sense strand (positive or 5′-3′).

[0044] “Biologically active” refers to a peptide having a structural, regulatory biochemical, or immunological function of a naturally occurring peptide.

[0045] “Complementary” refers to the natural association of nucleic acid sequences by base-pairing (A-G-T pairs with its complement T-C-A). Complementarity between two single-stranded molecules may be partial or complete. The degree to which two sequences are complementary affects the efficiency of hybridization and amplification reactions.

[0046] “Derivative” refers to the chemical modification of a nucleic acid sequence by replacement of hydrogen by an alkyl, acyl, amino, or other group.

[0047] “Homology” refers to sequence similarity either between a reference nucleic acid sequence and at least a fragment of a cdp or between a reference amino acid sequence and a portion of a CDP.

[0048] “Hybridization” refers to the process by which a strand of nucleic acid joins with a complementary strand through base pairing.

[0049] “Immunogenic” defines the capability of a natural, recombinant or synthetic oligopeptide, or polypeptide, to induce antibody production in appropriate animals or cells.

[0050] “Labeling” refers to the covalent or noncovalent joining of a polynucleotide, polypeptide or antibody with a reporter molecule that provides for a detectable and often measurable signal.

[0051] “Linkers” are short stretches of nucleotide sequence which may be added onto a vector or a cdp to create restriction endonuclease sites for ease in cloning. “Polylinkers” are engineered to include multiple restriction enzyme sites and provide for the use of both those enzymes which leave 5′ and 3′ overhangs (such as BamHI, EcoRI, and HindIII) or which provide a blunt end (such as EcoRV, SnaBI, and StuI).

[0052] “Naturally occurring” refers to an endogenous polynucleotide or polypeptide that may be isolated from viruses or prokaryotic or eukaryotic cells.

[0053] “Nucleic acid sequence” refers to an oligomer, oligonucleotide, nucleotide or polynucleotide, and its fragments, and to DNA or RNA of genomic or synthetic origin which may be single- or double-stranded and represent the sense or complementary (antisense) strand.

[0054] “Oligomer” refers to a nucleic acid sequence of at least about 10 nucleotides and as many as about 60 nucleotides, preferably about 15 to 30 nucleotides, that may be used as a primer or amplimer in amplification technologies. Oligomers are usually chemically synthesized.

[0055] “Peptide nucleic acid” (PNA) refers to an oligomer of at least six nucleotides to which an amino acid residue, such as lysine, and an amino group have been added. PNAs, also designated antigene agents, stop transcript elongation by binding to their complementary strand of nucleic acid.

[0056] “Plant sample” refers to a cell, chromosomes isolated from a cell, genomic DNA, RNA, or cDNA in solution or bound to a substrate; an extract from plant cells, a cleared tissue, a blot or imprint from the cut edge of a plant part, or the like.

[0057] A “portion” of an CDP may be selected based upon retention of biological or immunological characteristics shared with naturally occurring polypeptides derived from corn tassel. For example, an antigenic portion of a CDP may be used to induce antibody in an appropriate host.

[0058] “Post-translational modification” of a CDP may involve lipidation, glycosylation, phosphorylation, acetylation, racemization, proteolytic cleavage, and the like. These processes may occur synthetically or biochemically. Biochemical modifications will vary by cell type depending on the enzymatic milieu and the CDP.

[0059] “Probe” refers to cdps or fragments thereof, which are used to detect identical, allelic or related nucleic acid sequences.

[0060] “Purified” refers to molecules, either polynucleotides or polypeptides that are isolated or separated from their natural environment and are at least 60% free, preferably 75% free, and most preferably 90% free from other compounds with which they are naturally associated.

[0061] “Regulatory element” refers to a nucleic acid sequence from nontranslated regions of a gene such as enhancers, promoters, introns, and 3′ untranslated regions which interact with host proteins to carry out transcription or translation.

[0062] “Reporter” molecules are chemical or biochemical moieties used for labeling a nucleic acid, an amino acid, or an antibody. They include radionuclides; enzymes; fluorescent, chemiluminescent, or chromogenic agents; substrates; cofactors; inhibitors; magnetic particles; and the like.

[0063] “Substrate” refers to any suitable rigid or semi-rigid support including membranes, filters, chips, slides, wafers, fibers, magnetic or nonmagnetic beads, gels, capillaries or other tubing, plates, polymers, and microparticles. The substrate can have a variety of surface forms, such as wells, trenches, pins, channels and pores, to which the polynucleotides are bound.

[0064] “Transformation” refers to a process by which exogenous DNA enters and changes a recipient cell. It may occur under natural or artificial conditions using various methods well known in the art. Transformation may rely on any known method for the insertion of foreign nucleic acid sequences into a prokaryotic or eukaryotic host cell. The method is selected based on the host cell being transformed. Transformants include stably transformed cells in which the inserted DNA is capable of replication either as an autonomously replicating plasmid or as part of the host chromosome, as well as cells which transiently express the inserted DNA or RNA.

[0065] “Variant” refers to an amino acid sequence which differs from another sequence by at least one amino acid. The variant may have “conservative” changes (e.g. replacement of leucine with isoleucine), which does not affect structural or chemical properties; or more rarely, “nonconservative” changes (e.g. replacement of glycine with tryptophan), which may affect structural and/or chemical properties.

### THE INVENTION

[0066] In a particular embodiment, mRNA was isolated from corn tassel and used to construct the SATMON021 and SATMON024 cDNA libraries. The invention relates to nucleic acid sequences comprising corn tassel-derived polynucleotides (cdps) as presented in the Sequence Listing and to the use of these nucleic acid sequences. A “corn tassel-derived polynucleotide” refers to a cdp which may be naturally occurring, recombinant, synthetic, or semi-synthetic. A subset of clustered tassel-specific cdps is given in TABLE 2. The cdps may be used to identify, isolate, or extend identical or related corn tassel nucleic acid sequences from DNA libraries for the purpose of producing an entire coding region or recovering a regulatory element. The cdps may also be used in nucleic acid hybridization cr amplification technologies to follow expression of desirable traits through plant breeding programs. The present invention provides for expression vectors and host cells containing nucleic acid sequences that encode CDPs or portions thereof and regulatory elements obtained using methods described herein. The CDPs may possess biological or immunological activity, or both. The invention provides for the use of purified CDPs to induce antibodies for diagnostic use and to identify test compounds which specifically bind the CDP.

[0067] Specifically, the present invention relates to the following subset of unique and tassel-specific cdps whose transcripts occurred more than once in thetwo corn tassel cDNA libraries. They are SEQ ID NO: 1615 (700344704H1), SEQ ID NO: 2691 (700346502H1), SEQ ID NO: 2813 (700346702H1), SEQ ID NO: 3616 (700380601H1), SEQ ID NO: 3681 (700380774H1), SEQ ID NO: 233 (700342388H1), SEQ ID NO: 2060 (700345470H1), SEQ ID NO: 964 (700343568H1), SEQ ID NO: 2811 (700346695H1), SEQ ID NO: 2519 (700346233H1), SEQ ID NO: 2083 (70034551051), SEQ ID NO: 1101 (70034378051), SEQ ID NO: 1847 (700345052H1), SEQ ID NO: 1777 (700344946H1), SEQ ID NO: 1780 (700344949H1), SEQ ID NO: 1733 (700344870H1), SEQ ID NO: 3018 (700347036H1), SEQ ID NO: 3158 (700347281H1), SEQ ID NO: 2220 (700345749H1), SEQ ID NO: 165 (700342268H1), SEQ ID NO: 139 (700342223H1), SEQ ID NO: 2823 (700346721H1), SEQ ID NO: 2065 (700345477H1), SEQ ID NO: 605 (700343040H1), SEQ ID NO: 3618 (700380603H1), SEQ ID NO: 1537 (700344525H1), SEQ ID NO: 469 (700342790H1), SEQ ID NO: 3344 (700379867H1), SEQ ID NO: 180 (700342291H1), SEQ ID NO: 303 (700342521H1), SEQ ID NO: 1249 (700344013H1), SEQ ID NO: 1036 (700343679H1), SEQ ID NO: 2920 (700346877H1), SEQ ID NO: 3619 (700380604H1), SEQ ID NO: 1061 (700343721H1), SEQ ID NO: 1589 (700344654H1), SEQ ID NO: 3100 (700347193H1), SEQ ID NO: 2182 (700345675H1), SEQ ID NO: 2218 (700345743H1), SEQ ID NO: 398 (700342679H1), SEQ ID NO: 175 (700342283H1), SEQ ID NO: 3533 (700380411H1), SEQ ID NO: 3615 (700380596H1), SEQ ID NO: 89 (700281941H2), SEQ ID NO: 3530 (700380405H1), SEQ ID NO: 3023 (700347043H1), SEQ ID NO: 3185 (700347339H1), SEQ ID NO: 3062 (700347112H1), SEQ ID NO: 1082 (700343752H1), SEQ ID NO: 55 (700281888H2), SEQ ID NO: 2955 (700346930H1), SEQ ID NO: 1032 (700343674H1), SEQ ID NO: 163 (700342263H1), SEQ ID NO: 2864 (700346807H1), SEQ ID NO: 1286 (700344069H1), SEQ ID NO: 2560 (700346291H1), SEQ ID NO: 742 (700343247H1), SEQ ID NO: 1731 (700344866H1), SEQ ID NO: 370 (700342630H1), SEQ ID NO: 1167 (700343872H1), SEQ ID NO: 715 (700343202H1), SEQ ID NO: 3314 (700379793H1), SEQ ID NO: 2156 (700345638H1), SEQ ID NO: 624 (700343071H1), SEQ ID NO: 545 (700342924H1), SEQ ID NO: 2855 (700346794H1), SEQ ID NO: 850 (700343408H1), SEQ ID NO: 1557 (700344614H1), SEQ ID NO: 1872 (700345114H1), SEQ ID NO: 1000 (700343626H1), SEQ ID NO: 1045 (700343695H1), SEQ ID NO: 2753 (700346604H1), SEQ ID NO: 70 (700281910H1), SEQ ID NO: 1235 (700343988H1), SEQ ID NO: 389 (700342664H1), SEQ ID NO: 486 (700342817H1), SEQ ID NO: 766 (700343281H1), SEQ ID NO: 1310 (700344105H1), SEQ ID NO: 3202 (700347368H1), SEQ ID NO: 1941 (700345253H1), SEQ ID NO: 6 (700281814H2), SEQ ID NO: 1884 (700345138H1), SEQ ID NO: 2316 (700345916H1), SEQ ID NO: 1948 (700345263H1), SEQ ID NO: 2277 (700345849H1), SEQ ID NO: 2019 (700345394H1), SEQ ID NO: 1696 (700344820H1), SEQ ID NO: 226 (700342373H1), SEQ ID NO: 262 (700342448H1), SEQ ID NO: 1377 (700344208H1), SEQ ID NO: 1279 (700344059H1), SEQ ID NO: 1770 (700344935H1), SEQ ID NO: 532 (700342903H1), SEQ ID NO: 843 (700343396H1), SEQ ID NO: 360 (700342616H1), SEQ ID NO: 540 (700342915H1), SEQ ID NO: 413 (700342708H1), SEQ ID NO: 1252 (700344017H1), SEQ ID NO: 1560 (700344618H1), SEQ ID NO: 3541 (700380432H1), SEQ ID NO: 243 (700342413H1), SEQ ID NO: 1938 (700345249H1), SEQ ID NO: 1127 (700343816H1), SEQ ID NO: 1545 (700344541H1), SEQ ID NO: 1946 (700345258H1), SEQ ID NO: 298 (700342510H1), SEQ ID NO: 2906 (700346860H1), SEQ ID NO: 783 (700343310H1), SEQ ID NO: 616 (700343060H1), SEQ ID NO: 2097 (700345529H1), SEQ ID NO: 2393 (700346036H1), SEQ ID NO: 860 (700343420H1), SEQ ID NO: 2196 (700345705H1), SEQ ID NO: 2403 (700346049H1), SEQ ID NO: 2309 (700345906H1), SEQ ID NO: 1963 (700345289H1), SEQ ID NO: 1383 (700344218H1), SEQ ID NO: 3201 (700347367H1), SEQ ID NO: 3589 (700380530H1), SEQ ID NO: 660 (7003431241H1), SEQ ID NO: 2254 (700345807H1), SEQ ID NO: 2689 (700346496H1), SEQ ID NO: 3166 (700347296H1), SEQ ID NO: 2023 (700345404H1), SEQ ID NO: 726 (700343218H1), SEQ ID NO: 363 (700342620H1), SEQ ID NO: 2968 (700346951H1), SEQ ID NO: 2214 (700345737H1), SEQ ID NO: 989 (700343607H1), SEQ ID NO: 2642 (700346426H1), SEQ ID NO: 2741 (700346581H1), SEQ ID NO: 1321 (700344122H1), SEQ ID NO: 1255 (700344022H1), SEQ ID NO: 2311 (700345908H1), SEQ ID NO: 1857 (700345075H1), SEQ ID NO: 2571 (700346316H1), SEQ ID NO: 3063 (700347116H1), SEQ ID NO: 1649 (700344750H1), SEQ ID NO: 1653 (700344754H1), SEQ ID NO: 1762 (700344924H1), SEQ ID NO: 1985 (700345329H1), SEQ ID NO: 2382 (700346023H1), SEQ ID NO: 2468 (700346152H1), SEQ ID NO: 1567 (700344628H1), SEQ ID NO: 991 (700343609H1), SEQ ID NO: 2124 (700345577H1), SEQ ID NO: 829 (700343377H1), SEQ ID NC: 3623 (700380616H1), SEQ ID NO: 725 (700343216H1), SEQ ID NO: 1676 (700344785H1), SEQ ID NO: 399 (700342680H1), SEQ ID NO: 2790 (700346658H1), SEQ ID NO: 2284 (700345859H1), SEQ ID NO: 2838 (700346745H1), SEQ ID NO: 757 (700343266H1), SEQ ID NO: 1251 (700344016H1), SEQ ID NO: 207 (700342338H1), SEQ ID NC: 3515 (700380270H1), SEQ ID NO: 3224 (700379610H1), SEQ ID NO: 2958 (700346935H1), SEQ ID NO: 1861 (700345079H1), SEQ ID NO: 3052 (700347092H1), SEQ ID NO: 2542 (700346264H1), SEQ ID NO: 3602 (700380571H1), SEQ ID NO: 2788 (700346656H1), SEQ ID NO: 1966 (700345293H1), SEQ ID NO: 1813 (700345004H1), SEQ ID NO: 573 (700342986H1), SEQ ID NO: 3572 (700380488H1), SEQ ID NO: 1368 (700344191H1), SEQ ID NO: 774 (700343291H1), SEQ ID NO: 443 (700342747H1), SEQ ID NO: 1083 (700343755H1), SEQ ID NO: 110 (700281973H1), SEQ ID NO: 118 (700281986H2), SEQ ID NO: 2088 (700345516H1), SEQ ID NO: 2932 (700346894H1), SEQ ID NO: 2815 (700346704H1), SEQ ID NO: 1112 (700343793H1), SEQ ID NO: 3131 (700347236H1), SEQ ID NO: 682 (700343154H1), SEQ ID NO: 1965 (700345291H1), SEQ ID NO: 1866 (700345094H1), SEQ ID NO: 898 (700343475H1), SEQ ID NO: 3582 (700380514H1), SEQ ID NO: 916 (700343509H1), SEQ ID NO: 188 (700342309H1), SEQ ID NO: 1364 (700344186H1), SEQ ID NO: 1421 (700344295H1), SEQ ID NO: 3685 (700380786H1), SEQ ID NO: 2404 (700346050H1), SEQ ID NO: 3246 (700379650H1), SEQ ID NO: 1673 (700344782H1), SEQ ID NO: 953 (700343552H1), SEQ ID NO: 2216 (700345739H1), SEQ ID NO: 1232 (700343985H1), SEQ ID NO: 775 (700343292H1), SEQ ID NO: 869 (700343431H1), SEQ ID NO: 145 (700342231H1), SEQ ID NO: 2927 (700346887H1), SEQ ID NO: 1820 (700345013H1), SEQ ID NO: 2244 (700345785H1), SEQ ID NO: 1078 (700343746H1), SEQ ID NO: 2965 (700346943H1), SEQ ID NO: 1085 (700343757H1), SEQ ID NO: 730 (700343225H1), SEQ ID NO: 792 (700343325H1), SEQ ID NO: 3218 (700347395H1), SEQ ID NO: 3033 (700347064H1), SEQ ID NO: 1058 (700343715H1), SEQ ID NO: 302 (700342515H1), SEQ ID NO: 2384 (700346026H1), SEQ ID NO: 1220 (700343965H1), SEQ ID NO: 1883 (700345136H1), SEQ ID NO: 1928 (700345235H1), SEQ ID NO: 2598 (700346351H1), SEQ ID NO: 315 (700342543H1), SEQ ID NO: 1405 (700344265H1), SEQ ID NO: 3128 (700347232H1), SEQ ID NO: 942 (700343540H1), SEQ ID NO: 1109 (700343790H1), SEQ ID NO: 1490 (700344425H1), SEQ ID NO: 3040 (700347072H1), SEQ ID NO: 2411 (700346060H1), SEQ ID NO: 2477 (700346167H1), SEQ ID NO: 446 (700342755H1), SEQ ID NO: 3026 (700347050H1), SEQ ID NO: 3554 (700380452H1), SEQ ID NO: 3465 (700380146H1), SEQ ID NO: 143 (700342228H1), SEQ ID NO: 867 (700343428H1), SEQ ID NO: 1139 (700343832H1), SEQ ID NO: 3067 (700347126H1), SEQ ID NO: 799 (700343333H1), SEQ ID NO: 2059 (700345469H1), SEQ ID NO: 2120 (700345571H1), SEQ ID NO: 2179 (700345671H1), SEQ ID NO: 2707 (700346525H1), SEQ ID NO: 967 (700343572H1), SEQ ID NO: 1356 (700344174H1), SEQ ID NO: 2896 (700346848H1), SEQ ID NO: 304 (700342523H1), SEQ ID NO: 1063 (700343723H1), SEQ ID NO: 560 (700342959H1), SEQ ID NO: 2625 (700346389H1), SEQ ID NO: 2501 (700346210H1), SEQ ID NO: 319 (700342551H1), SEQ ID NO: 3173 (700347308H1), SEQ ID NO: 2313 (700345910H1), SEQ ID NO: 2022 (700345403H1), SEQ ID NO: 1076 (700343742H1), SEQ ID NO: 3025 (700347049H1), SEQ ID NO: 1719 (700344849H1), SEQ ID NO: 3342 (700379862H1), SEQ ID NO: 643 (7003431C3H1), SEQ ID NO: 3649 (700380682H1), SEQ ID NO: 3613 (700380589H1), SEQ ID NO: 807 (700343342H1), SEQ ID NO: 1760 (700344920H1), SEQ ID NO: 2558 (700346288H1), SEQ ID NO: 492 (700342832H1), SEQ ID NO: 504 (700342846H1), SEQ ID NO: 172 (700342278H1), SEQ ID NO: 1738 (700344878H1), SEQ ID NO: 2014 (700345384H1), SEQ ID NO: 390 (700342666H1), SEQ ID NO: 401 (700342682H1), SEQ ID NO: 3512 (700380263H1), SEQ ID NO: 3441 (700380096H1), SEQ ID NO: 2370 (700346C08H1), SEQ ID NO: 1323 (700344124H1), SEQ ID NO: 634 (700343087H1), SEQ ID NO: 1986 (700345330H1), SEQ ID NO: 238 (700342403H1), SEQ ID NO: 987 (7003436C3H1), SEQ ID NO: 273 (700342463H1), SEQ ID NO: 208 (700342340H1), SEQ ID NO: 2674 (700346475H1), SEQ ID NO: 3119 (700347222H1), SEQ ID NO: 2203 (700345716H1), SEQ ID NO: 2186 (700345686H1), SEQ ID NO: 1307 (700344096H1), SEQ ID NO: 1372 (700344196H1), SEQ ID NO: 3053 (700347093H1), SEQ ID NO: 2507 (700346218H1), SEQ ID NO: 1049 (700343703H1), SEQ ID NO: 391 (700342667H1), SEQ ID NO: 3092 (700347176H1), SEQ ID NO: 3389 (700379975H1), SEQ ID NO: 326 (700342560H1), SEQ ID NO: 3605 (700380575H1), SEQ ID NO: 2946 (700346918H1), SEQ ID NO: 907 (700343487H1), SEQ ID NO: 3366 (700379925H1), SEQ ID NO: 1237 (700343991H1), SEQ ID NO: 3610 (700380584H1), SEQ ID NO: 2464 (700346146H1), SEQ ID NO: 3650 (700380683H1), SEQ ID NO: 2024 (700345405H1), SEQ ID NO: 1145 (700343841H1), SEQ ID NO: 1590 (700344655H1), SEQ ID NO: 2219 (700345747H1), SEQ ID NO: 224 (700342363H1), SEQ ID NO: 1108 (700343789H1), SEQ ID NO: 344 (700342589H1), SEQ ID NO: 2995 (700346996H1), SEQ ID NO: 3282 (700379719H1), SEQ ID NO: 1826 (700345020H1), SEQ ID NO: 1443 (700344334H1), SEQ ID NO: 3021 (700347040H1), SEQ ID NO: 558 (700342952H1), SEQ ID NO: 2292 (700345873H1), SEQ ID NO: 2030 (700345412H1), SEQ ID NO: 1005 (700343632H1), SEQ ID NO: 254 (700342432H1), SEQ ID NO: 1506 (700344454H1), SEQ ID NO: 1146 (700343842H1), SEQ ID NO: 1756 (700344911H1), SEQ ID NO: 2471 (700346157H1), SEQ ID NO: 1170 (700343875H1), SEQ ID NO: 1765 (700344928H1), SEQ ID NO: 1585 (700344649H1), SEQ ID NO: 495 (700342835H1), SEQ ID NO: 392 (700342670H1), SEQ ID NO: 5179 (700355947H1), SEQ ID NO: 4225 (700353526H1), SEQ ID NO: 5639 (700382063H1), SEQ ID NO: 3797 (700352605H1), SEQ ID NO: 4188 (700353271H1), SEQ ID NO: 5940 (700382691H1), SEQ ID NO: 4388 (700353955H1), SEQ ID NO: 5962 (700382739H1), SEQ ID NO: 6034 (700382890H1), SEQ ID NO: 4988 (700355520H1), SEQ ID NO: 5105 (700355788H1), SEQ ID NO: 5943 (700382702H1), SEQ ID NO: 4276 (700353625H1), SEQ ID NO: 5267 (700356140H1), SEQ ID NO: 3698 (700282414H2), SEQ ID NO: 4942 (700355431H1), SEQ ID NO: 4803 (700355029H1), SEQ ID NO: 5171 (700355925H1), SEQ ID NO: 5366 (700356466H1), SEQ ID NO: 4940 (700355428H1), SEQ ID NO: 5895 (700382605H1), SEQ ID NO: 4403 (700354129H1), SEQ ID NO: 4830 (700355088H1), SEQ ID NO: 5695 (700382183H1), SEQ ID NO: 5440 (700356708H1), SEQ ID NO: 5526 (700357108H1), SEQ ID NO: 5529 (700357122H1), SEQ ID NO: 5371 (700356474H1), SEQ ID NO: 4029 (700353005H1), SEQ ID NO: 5099 (700355779H1), SEQ ID NO: 4100 (700353128H1), SEQ ID NO: 3790 (700282575H2), SEQ ID NO: 3835 (700352675H1), SEQ ID NO: 3943 (700352843H1), SEQ ID NO: 3856 (700352709H1), SEQ ID NO: 3874 (700352735H1), SEQ ID NO: 4959 (700355462H1), SEQ ID NO: 5010 (700355558H1), SEQ ID NO: 4336 (700353828H1), SEQ ID NO: 5420 (700356627H1), SEQ ID NO: 5751 (700382275H1), SEQ ID NO: 5301 (700356219H1), SEQ ID NO: 6184 (700383158H1), SEQ ID NO: 5003 (700355547H1), SEQ ID NO: 4800 (700355026H1), SEQ ID NO: 4610 (700354647H1), SEQ ID NO: 4789 (700355009H1), SEQ ID NO: 4466 (700354337H1), SEQ ID NO: 5278 (700356158H1), SEQ ID NO: 4742 (700354908H1), SEQ ID NO: 5260 (700356129H1), SEQ ID NO: 5661 (700382106H1), SEQ ID NO: 3806 (700352616H1), SEQ ID NO: 4555 (700354518H1), SEQ ID NO: 5232 (700356066H1), SEQ ID NO: 5216 (700356023H1), SEQ ID NO: 6002 (700382827H1), SEQ ID NO: 4217 (700353446H1), SEQ ID NO: 4793 (700355016H1), SEQ ID NO: 4204 (700353409H1), SEQ ID NO: 6178 (700383149H1), SEQ ID NO: 6083 (700382979H1), SEQ ID NO: 4876 (700355249H1), SEQ ID NO: 4031 (700353007H1), SEQ ID NO: 6098 (700383013H1), SEQ ID NO: 6102 (700383021H1), SEQ ID NO: 4421 (700354239H1), SEQ ID NO: 5946 (700382708H1), SEQ ID NO: 5214 (700356020H1), SEQ ID NO: 5703 (700382195H1), SEQ ID NO: 3750 (700282503H2), SEQ ID NO: 4212 (700353432H1), SEQ ID NO: 6090 (700382995H1), SEQ ID NO: 4713 (700354850H1), SEQ ID NO: 4197 (700353284H1), SEQ ID NO: 5692 (700382179H1), SEQ ID NO: 4727 (700354875H1), SEQ ID NO: 5924 (700382668H1), SEQ ID NO: 4052 (700353052H1), SEQ ID NO: 4111 (700353142H1), SEQ ID NO: 4043 (700353028H1), SEQ ID NO: 5723 (700382229H1), SEQ ID NO: 5560 (700357402H1), SEQ ID NO: 5603 (700357489H1), SEQ ID NO: 5700 (700382191H1), SEQ ID NO: 5875 (700382543H1), SEQ ID NO: 3811 (700352625H1), SEQ ID NO: 6081 (700382975H1), SEQ ID NO: 5186 (700355963H1), SEQ ID NO: 5813 (700382392H1), SEQ ID NO: 5155 (700355889H1), SEQ ID NO: 4632 (700354689H1), SEQ ID NO: 5674 (700382139H1), SEQ ID NO: 4279 (700353629H1), SEQ ID NO: 4625 (700354676H1), SEQ ID NO: 5586 (700357445H1), SEQ ID NO: 4054 (700353057H1), SEQ ID NO: 5724 (700382230H1), SEQ ID NO: 5699 (700382190H1), SEQ ID NO: 6181 (700383154H1), SEQ ID NO: 3982 (700352912H1), SEQ ID NO: 4654 (700354742H1), SEQ ID NO: 4737 (700354895H1), SEQ ID NO: 4321 (700353779H1), SEQ ID NO: 4934 (700355415H1), SEQ ID NO: 5543 (700357160H1), SEQ ID NO: 4933 (700355414H1), SEQ ID NO: 3713 (700282435H1), SEQ ID NO: 3787 (700282569H2), SEQ ID NO: 3789 (700282571H2), SEQ ID NO: 4814 (700355053H1), SEQ ID NO: 5555 (700357189H1), SEQ ID NO: 3876 (700352737H1), SEQ ID NO: 4208 (700353424H1), SEQ ID NO: 3827 (700352654H1), SEQ ID NO: 3863 (700352719H1), SEQ ID NO: 6130 (700383062H1), SEQ ID NO: 4041 (700353023H1), SEQ ID NO: 5101 (700355781H1), SEQ ID NO: 5792 (700382353H1), SEQ ID NO: 4983 (700355513H1), SEQ ID NO: 4089 (700353114H1), SEQ ID NO: 4348 (700353853H1), SEQ ID NO: 6182 (700383155H1), SEQ ID NO: 5716 (700382218H1), SEQ ID NO: 5102 (700355783H1), SEQ ID NO: 5859 (700382507H1), SEQ ID NO: 5442 (700356725H1), SEQ ID NO: 5998 (700382817H1), SEQ ID NO: 4037 (700353014H1), SEQ ID NO: 4404 (700354142H1), SEQ ID NO: 5734 (700382245H1), SEQ ID NO: 5392 (700356534H1), SEQ ID NO: 5675 (700382140H1), SEQ ID NO: 5746 (700382267H1), SEQ ID NO: 4102 (700353130H1), SEQ ID NO: 4536 (700354478H1), SEQ ID NO: 4219 (700353509H1), SEQ ID NO: 5151 (700355885H1), SEQ ID NO: 4268 (700353612H1), SEQ ID NO: 3774 (700282549H2), SEQ ID NO: 3772 (700282547H2), SEQ ID NO: 5283 (700356171H1), SEQ ID NO: 5647 (700382075H1), SEQ ID NO: 5778 (700382330H1), SEQ ID NO: 5014 (700355577H1), SEQ ID NO: 5825 (700382426H1), SEQ ID NO: 5866 (700382525H1), SEQ ID NO: 4556 (700354519H1), SEQ ID NO: 3821 (700352645H1), SEQ ID NO: 4762 (700354942H1), SEQ ID NO: 4981 (700355507H1), SEQ ID NO: 5540 (700357155H1), SEQ ID NO: 5476 (700356835H1), SEQ ID NO: 5650 (700382078H1), SEQ ID NO: 5750 (700382273H1), SEQ ID NO: 5100 (700355780H1), SEQ ID NO: 4553 (700354516H1), SEQ ID NO: 4923 (700355345H1), SEQ ID NO: 4922 (700355344H1), SEQ ID NO: 3773 (700282548H2), SEQ ID NO: 3715 (700282438H2), SEQ ID NO: 5022 (700355594H1), SEQ ID NO: 5516 (700356974H1), SEQ ID NO: 4451 (700354305H1), SEQ ID NO: 4938 (700355422H1), SEQ ID NO: 5436 (700356695H1), SEQ ID NO: 5742 (700382260H1), SEQ ID NO: 5242 (700356081H1), SEQ ID NO: 4766 (700354954H1), SEQ ID NO: 3792 (700282584H2), SEQ ID NO: 3795 (700282592H2), SEQ ID NO: 5569 (700357415H1), SEQ ID NO: 5142 (700355871H1), SEQ ID NO: 4305 (700353713H1), SEQ ID NO: 4559 (700354534H1), SEQ ID NO: 5188 (700355966H1), SEQ ID NO: 5088 (700355766H1), SEQ ID NO: 5286 (700356177H1), SEQ ID NO: 5294 (700356193H1), SEQ ID NO: 3995 (700352935H1), SEQ ID NO: 4615 (700354658H1), SEQ ID NO: 5453 (700356767H1), SEQ ID NO: 4667 (700354769H1), SEQ ID NO: 5832 (700382439H1), SEQ ID NO: 5839 (700382450H1), SEQ ID NO: 6101 (700383019H1), SEQ ID NO: 6097 (700383011H1), SEQ ID NO: 4951 (700355447H1), SEQ ID NO: 4423 (700354247H1), SEQ ID NO: 4672 (700354777H1), SEQ ID NO: 4682 (700354793H1), SEQ ID NO: 5395 (700356541H1), SEQ ID NO: 5311 (700356241H1), SEQ ID NO: 4522 (700354446H1), SEQ ID NO: 4460 (700354326H1), SEQ ID NO: 5493 (700356901H1), SEQ ID NO: 5507 (700356933H1), SEQ ID NO: 4512 (700354425H1), SEQ ID NO: 5217 (700356025H1), SEQ ID NO: 4159 (700353215H1), SEQ ID NO: 5480 (700356847H1), SEQ ID NO: 6123 (700383051H1), SEQ ID NO: 4452 (700354310H1), SEQ ID NO: 4499 (700354409H1), SEQ ID NO: 4808 (700355040H1), SEQ ID NO: 5800 (700382365H1), SEQ ID NO: 5710 (700382210H1), SEQ ID NO: 6030 (700382882H1), SEQ ID NO: 5461 (700356796H1), SEQ ID NO: 5548 (700357173H1), SEQ ID NO: 4790 (700355011H1), SEQ ID NO: 5201 (700355989H1), SEQ ID NO: 4286 (700353653H1), SEQ ID NO: 6103 (700383023H1), SEQ ID NO: 6099 (700383015H1), SEQ ID NO: 5317 (700356252H1), SEQ ID NO: 5399 (700356551H1), SEQ ID NO: 5667 (700382123H1), SEQ ID NO: 6176 (700383147H1), SEQ ID NO: 5084 (700355758H1), SEQ ID NO: 4566 (700354558H1), SEQ ID NO: 4845 (700355173H1), SEQ ID ND: 4819 (700355067H1), SEQ ID NO: 3775 (700282550H2), SEQ ID NO: 5273 (700356152H1), SEQ ID NO: 6111 (700383037H1), SEQ ID NO: 3984 (700352916H1), SEQ ID NO: 5481 (700356848H1), SEQ ID NO: 5309 (700356236H1), SEQ ID NO: 4456 (700354317H1), SEQ ID NO: 4824 (700355077H1), SEQ ID NO: 5240 (700356076H1), SEQ ID NO: 5121 (700355829H1), SEQ ID NO: 5418 (700356624H1), SEQ ID NO: 4603 (700354637H1), SEQ ID NO: 5718 (700382220H1), SEQ ID NO: 5747 (700382268H1), SEQ ID NO: 6189 (700383166H1), SEQ ID NO: 6129 (700383061H1), SEQ ID NO: 5494 (700356903H1), SEQ ID NO: 5508 (700356935H1), SEQ ID NO: 4797 (700355022H1), SEQ ID NO: 5691 (700382176H1), SEQ ID NO: 5862 (700382513H1), SEQ ID NO: 5917 (700382654H1), SEQ ID NO: 5328 (700356273H1), SEQ ID NO: 3971 (700352891H1), SEQ ID NO: 5463 (700356802H1), SEQ ID NO: 4588 (700354606H1), SEQ ID NO: 4342 (700353839H1), SEQ ID NO: 5376 (700356483H1), SEQ ID NO: 5136 (700355856H1), SEQ ID NO: 5154 (700355888H1), SEQ ID NO: 5916 (700382649H1), SEQ ID NO: 5869 (700382537H1), SEQ ID NO: 5231 (700356062H1), SEQ ID NO: 4194 (700353279H1), SEQ ID NO: 4978 (700355496H1), SEQ ID NO: 5923 (700382665H1), SEQ ID NO: 4755 (7003549301), SEQ ID NO: 4008 (700352961H1), SEQ ID NO: 5424 (700356644H1), SEQ ID NO: 4035 (700353012H1), SEQ ID NO: 5323 (700356265H1), SEQ ID NO: 4818 (700355065H1), SEQ ID NO: 5367 (700356468H1), SEQ ID NO: 5888 (700382579H1), SEQ ID NO: 3690 (700282401H2), SEQ ID NO: 3794 (700282591H2), SEQ ID NO: 3764 (700282522H2), SEQ ID NO: 3758 (700282514H2), SEQ ID NO: 5128 (700355842H1), SEQ ID NO: 3818 (700352636H1), SEQ ID NO: 3781 (700282561H2), SEQ ID NO: 3782 (700282562H2), SEQ ID NO: 4889 (700355286H1), SEQ ID NO: 6104 (700383026H1), SEQ ID NO: 5138 (700355861H1), SEQ ID NO: 5140 (700355866H1), SEQ ID NO: 6006 (700382834H1), SEQ ID NO: 5880 (700382554H1), SEQ ID NO: 6116 (700383043H1), SEQ ID NO: 5774 (700382324H1), SEQ ID NO: 4024 (700352993H1, SEQ ID NO: 4820 (700355070H1), SEQ ID NO: 5438 (700356702H1), SEQ ID NO: 4150 (700353201H1), SEQ ID NO: 5909 (700382636H1), SEQ ID NO: 5551 (700357183H1), SEQ ID NO: 5055 (700355708H1), SEQ ID NO: 4551 (700354508H1), SEQ ID NO: 3975 (700352903H1), SEQ ID NO: 5793 (700382354H1), SEQ ID NO: 5823 (700382424H1), SEQ ID NO: 3915 (700352802H1), SEQ ID NO: 5146 (700355877H1), SEQ ID NO: 5879 (700382550H1), SEQ ID NO: 5627 (700382041H1), SEQ ID NO: 4211 (700353431H1), SEQ ID NO: 5894 (700382604H1), SEQ ID NO: 5806 (700382377H1), SEQ ID NO: 5558 (700357194H1), SEQ ID NO: 5396 (700356542H1), SEQ ID NO: 3892 (700352760H1), SEQ ID NO: 5211 (700356015H1), SEQ ID NO: 4011 (700352967H1), SEQ ID NO: 5282 (700356167H1), SEQ ID NO: 5978 (700382773H1), SEQ ID NO: 4898 (700355307H1), SEQ ID NO: 5522 (700356984H1), SEQ ID NO: 5226 (700356047H1), SEQ ID NO: 3777 (700282554H2), SEQ ID NO: 3776 (700282553H2), SEQ ID NO: 5817 (700382401H1), SEQ ID NO: 5858 (700382494H1), SEQ ID NO: 4627 (700354678H1), SEQ ID NO: 5411 (700356591H1), SEQ ID NO: 4257 (70035359051), SEQ ID NO: 4833 (700355093H1), SEQ ID NO: 4148 (700353195H1), SEQ ID NO: 5210 (700356014H1), SEQ ID NO: 4422 (700354244H1), SEQ ID NO: 4949 (700355444H1), SEQ ID NO: 4481 (700354371H1), SEQ ID NO: 6095 (700383009H1), SEQ ID NO: 4670 (700354774H1), SEQ ID NO: 4680 (700354790H1).

[0068] Analogous to the nucleic acid sequences, a CDP may have an amino acid sequence which is naturally occurring, synthetic, or variant. Guidance in determining which amino acid residues may be substituted, inserted, or deleted without abolishing biological or immunological activity may be found using computer programs such as LASERGENE Navigator (DNASTAR, Madison Wis.) which are well known in the art.

[0069] Derivation of Nucleic Acid Sequences

[0070] In the present embodiment, mRNA was isolated from corn tassel and used to construct the SATMON021 and SATMON024 cDNA libraries. Random CDNA isolates were sequenced in part and analyzed using the homology programs described below. The sequences of the isolates are disclosed in the Sequence Listing. These cdps may contain either a partial or a full length open reading frame, or they may contain all or part of a regulatory element for a particular gene. This variation is attributed to the fact that many genes are several hundred, and sometimes several thousand, bases in length. With current technology, large genes cannot be cloned in their entirety because of vector limitations, incomplete reverse transcription of the first strand, or incomplete replication of the second strand. This is particularly common in libraries generated by random priming, since first strand synthesis may begin anywhere within the transcript. Contiguous, secondary clones containing additional nucleotide sequences may be obtained using a variety of methods known to those of skill in the art.

[0071] Sequencing of the cDNAs

[0072] Methods for DNA sequencing are well known in the art. Conventional enzymatic methods employ DNA polymerase, Klenow fragment, THERMO SEQUENASE DNA polymerase (Amersham Pharmacia Biotech, Piscataway N.J.), or Taq DNA polymerase (Amersham Pharmacia Biotech) to extend the nucleic acid sequence from an oligonucleotide primer annealed to the DNA template of interest. Methods have been developed for the use of both single-stranded and double-stranded templates. Chain termination reaction products may be electrophoresed on urea-polyacrylamide gels and detected either by autoradiography (for radionucleotide-labeled nucleotides) or by fluorescence (for fluorescent-labeled nucleotides). Recent improvements in mechanized reaction preparation, sequencing, and analysis using the fluorescent detection method have permitted expansion in the number of inserts that may be sequenced per day using machines such as the ABI 377 DNA Sequencer (Perkin Elmer, Norwalk Conn.).

[0073] Reading Frame Determinations

[0074] The reading frame of the nucleotide sequence may be ascertained by several types of analyses. First, reading frames contained within the coding sequence may be analyzed for the presence of start (ATG, GTG, etc.) and stop codons (TGA, TAA, TAG). Typically, one reading frame will continue throughout the major portion of a cDNA sequence while the other two reading frames tend to contain numerous stop codons. For more difficult cases, algorithms have been created to analyze the occurrence of individual nucleotide bases at each putative codon triplet (Fickett, J. W. (1982) Nucl. Acids Res. 10:5303-5318). Coding sequences for particular organisms (bacteria, plants, and animals) tend to contain certain triplet periodicities, such as a significant preference for pyrimidines in the third codon position. These preferences have been incorporated into widely available software which may be used to determine the coding potential and frame of a given stretch of DNA. Coding preferences and start/stop codon information may be used to determine proper frame with a high degree of certainty which, in turn, permits cloning of the sequence in the correct frame.

[0075] The nucleotide sequences of the Sequence Listing have been prepared by current, state-of-the-art, automated methods and, as such, may contain occasional sequencing errors and unidentified nucleotides. Such unidentified nucleotides are designated by an N. The infrequent sequencing errors or N's in the nucleotide sequences of the Sequence Listing do not present a problem to those skilled in the art who wish to practice the invention. Several methods employing standard recombinant techniques, described in Ausubel, F. M. et al. (1997; Short Protocols in Molecular Biology, John Wiley & Sons, New York N.Y.), Sambrook, J. et al. (1989; Molecular Cloning, A Laboratory Manual, Cold Spring Harbor Press, Plainview N.Y.), or periodic updates thereof, may be used to correct errors and complete the missing sequence information. The same techniques used for obtaining a full-length sequence may be used to obtain a complete and accurate nucleotide sequence.

[0076] Homology Searches

[0077] The nucleic acid sequences of the Sequence Listing were used as query sequences against GenBank, or other databases available to the public, to determine homology to known sequences. Illustrative of computer programs known to those of skill in the art for performing computer-assisted nucleic acid or amino acid homology searches is the program Basic Local Alignment Search Tool or BLAST (Altschul, S. F. (1993) J. Mol. Evol. 36:290-300; Altschul, et al. (1990) J. Mol. Biol. 215:403-410). BLAST produces alignments of both nucleotide and amino acid sequences to determine sequence similarity. BLAST is especially useful in determining exact matches or homology. GenBank databases may be searched for sequences containing regions of homology to a query cdp of the present invention. Other databases (such as SwissProt, BLOCKS, or Pima II) may be searched for regions of amino acid sequence homology corresponding to the deduced CDP.

[0078] As described in Karlin (supra), the fundamental unit of BLAST algorithm output is the High-scoring Segment Pair (HSP). An HSP consists of two sequence fragments of arbitrary, but equal lengths, whose alignment is locally maximal and for which the alignment score meets or exceeds a threshold or cutoff score set by the user. The parameter E establishes the statistically significant threshold for reporting database sequence matches. E is interpreted as the upper bound of the expected frequency of chance occurrence of an HSP (or set of HSPs) within the context of the entire database search. Any database sequence whose match satisfies E is reported in the BLAST program output.

[0079] BLAST may be used with any of the cdps of the present invention to search for HSPs between a query sequence and sequences in a reference nucleotide or protein database. The statistical significance of any matches is evaluated, and those matches that satisfy the user-selected threshold of significance are reported.

[0080] Homologous sequences, as determined by a BLAST search, may include prokaryotic (bacterial) or eukaryotic (animal, fungal, or plant) sequences. Where a cdp represents only part of a cene, the degree of homology is based only on the partial sequence disclosed in the Sequence Listing. When sequences have sufficiently long regiors of agreement or sufficiently high overall agreement, the score of the cdp is considered to be a nearly exact match. Allelic sequences fit this category when they only differ by about three nucleotides per 100. Homologous matches between the cdps provided in the Sequence Listing and the GenBank databases are reported in TABLES 1 and 2.

[0081] Corn Tassel-Derived Sequences

[0082] The cdps of the present inventior may serve to identify, evaluate, alter, or follow the inheritance of desired characteristics associated with growth and development, disease resistance, environmental adaptability, quality, and yield of corn. In particular, cdps are useful as molecular markers for studying inheritance of multigene traits in a plant breeding program.

[0083] Hybridization and Genetic Analysis

[0084] The cdps, their oligonucleotides, fragments, or complementary sequences, may be used to identify the presence of and/or to determine the degree of similarity between two (or more) nucleic acid sequences. The cdps may be hybridized to naturally occurring or recombinant nucleic acid sequences under appropriately selected temperatures anct salt concentrations. Hybridization with a probe based on the nucleic acid sequence of at least one of the cdps allows for the detection of nucleic acid sequences, including genomic sequences, which are identical or closely homologous to the cdps of the Sequence Listing. Probes may be selected from non-conserved or unique regions of the cdps of interest and pretested for their ability to identify or amplify the target nucleic acid sequence using standard protocols. Optimization of the protocol, e.g. increasing stringency to reduce the frequency of false positives or avoiding polyadenylated or other regions predicted to provide secondary structure to reduce false negatives, should provide the desired results. A labeled probe may be used to detect or quantify cDNAs, endogenous corn transcripts, or genes. As will be understood by those of skill in the art, hybridization conditions, probe length and labeling will vary depending upon the intended use. Hybridization conditions, based on the melting temperature (Tm) of the probe and on the salt concentrations under which hybridization and subsequent washes are carried out are well known in the art and are taught in Sambrook (supra) and Ausubel (supra).

[0085] A probe for use in Southern or northern hybridization may be a cdp sequence or its complement that is up to several hundred nucleotides long and either single-stranded or double-stranded. Such probes may be hybridized in solution to biological materials such as plasmids, bacterial or yeast artificial chromosomes, cleared plant tissues, etc. or to artificial substrates containing cdps. Microarrays are particularly suitable for identifying the presence and detecting the level of gene expression of multiple desired traits by examining gene expression of selected inbreds and hybrids at various stages of development. An array analogous to a dot or slot blot may be used to arrange and link the cDNA fragments or oligonucleotides to the surface of a substrate using one or more of the following: mechanical (vacuum), chemical, thermal, or UV bonding procedures. Such an array may contain any number of cdps and may be produced by hand or by using available devices, materials, and machines.

[0086] Probes may be labeled by either PCR or enzymatic techniques using a variety of reporter molecules. Commercial kits are available for radioactive labeling and probe cleanup from Amersham Pharmacia Biotech, for alkaline phosphatase labeling from Life Technologies (Rockville Md.), for chemiluminescent labeling from Lumigen (Southfield Mich.), etc. Alternatively, cdps may be cloned into commercially available vectors for the production of RNA probes. Such probes may be transcribed in the presence of at least one labeled nucleotide (e.g. [α-³²P] CTP, Amersham Pharmacia Biotech).

[0087] Genetic maps, based upon molecular markers (restriction fragment length polymorphisms, RFLPs) are being assembled for several grains including rice, corn, barley, and wheat. These maps have improved understanding and manipulation of both single and multigene traits. Even when the genes involved are unknown, the ability to show the presence of the associated marker and the desired characteristics in inbred or hybrid corn plants and to follow segregation in a breeding program make the marker valuable as a diagnostic. Moreover, continuous variation within a segregating family may often be resolved into a handful of major gene effects associated with molecular markers. As genetic maps merge with physical maps, it becomes possible to walk along the chromosome and clone virtually any gene. Hybridization and newer technologies such as random amplified polymorphic DNA (RAPD) analysis, microsatellites and amplified fragment length polymorphisms (AFLP) make it easier to isolate the actual genes which interact and are responsible for a desired trait.

[0088] Diagnostic Uses

[0089] Diagnostic assays known to those of skill in the art may be used to detect or confirm conditions or diseases associated with abnormal levels of cdp expression. Labeled probes developed from the nucleotide sequence encoding a cdp are added to a plant sample under amplifying or hybridizing conditions. The complex between the naturally occurring sequence and the labeled probe is quantified and compared with a standard for that cell or tissue. If cdp expression varies significantly from the standard, the assay indicates the presence of the condition or disease. Qualitative or quantitative diagnostic methods may include northern, dot blot, or other membrane or dip-stick based technologies or multiple-sample format technologies such as PCR, ELISA-like, pin, or chip-based assays. The determination of whether cdp expression in a sample varies significantly from a standard is determined by methods of statistical analyses well known to those of skill in the art.

[0090] Accordingly, the invention provides a method for assessing disease resistance or other conditions using a panel of probes. A candidate probe is identified from CDPs which are specific to corn tissue and have not been observed in GenBank or other Incyte-sequenced cDNA libraries. The usefulness of the probe may be tested by quantifying its hybridization across tissues which are normal versus diseased. Once an increase (or decrease) in expression level is related to a trait such as fungal resistance, the probe can be used to monitor ability of a particular inbred or hybrid corn line to withstand fungal infection.

[0091] Transcriot Imaging

[0092] Another embodiment relates to development of diagnostic or treatment methods based on specific imaging of the cdps of the present invention. The profile of nucleic acid sequences which reflect gene transcription activity in a particular cell type, tissue, or plant at a particular time, is defined as a “transcript image”. Such profiles are generated by naming, matching, and counting all copies of related clones and arranging them in order of abundance.

[0093] Clones may also be arranged in clusters in descending order of abundance. The minimum number of clones necessary to constitute a cluster, as illustrated at the bottom of TABLE 2, is two. All clones in TABLE 2 are tassel specific although individual clusters may consist of either unique cdps or cdps that are homologous to known sequences. An alternative presentation of this data might involve a spreadsheet which contains cluster abundance data as well as some descriptive information for the homologous clones.

[0094] Subtractions, or subsetting, among transcript images may be used to discern various differences in gene expression and cellular activities. For example, subsetting may be used with the PHYTOSEQ database (Incyte Pharmaceuticals, Palo Alto Calif.) to show differences between: a) organs of two different developmental stages; b) two different organs, such as leaves and roots; c) organs from two different species; or d) normal and diseased or stressed plant tissues.

[0095] Large numbers of mRNA transcripts, as represented by their respective cDNA clones, may be compared using computational methods rather than analogous laboratory methods, such as northern blot analysis. For example, electronic subtraction between any two transcript images parallels hybrid subtraction between any two cDNA libraries (cf. Sambrook, supra) . The information produced by the subtraction of transcript images between different libraries may be used to select single or multiple cdps which may be used to predict yield.

[0096] A cdp identified through transcript imaging, or other means, may also be used to clone regulatory elements for use in transformation vectors. Expression may be quantified using amplification or microarray technologies which are well known in the art.

[0097] Complementary Strand

[0098] The cdp, or any part thereof, may be used as a tool in technologies for altering gene expression. To inhibit in vivo or in vitro cdp transcription, a PNA (Nielsen, P. E. et al. (1993) Anticancer Drug Des. 8:53-63) or an oligonucleotide based on the sequence of a cdp is designed using OLIGO 4.06 software (National Biosciences, Plymouth Minn.) or LASERGENE Navigator (DNASTAR). Alternatively, a fragment of a cdp is cloned into an expression vector which is transformed into a host cell to express the complementary strand. An analogous molecule may be designed to inhibit promoter binding in the upstream nontranslated leader or at various sites along the 5′ coding region of the cdp. Alternatively, complementary molecules may be designed to inhibit translation of an mRNA by preparing an oligomer or fragment which binds to the transcript preventing its association with the ribosomal machinery.

[0099] Complementary molecules may also be designed to disrupt genomic sequences (such as enhancers, introns) preventing the normal activity of these regulatory elements. Similarly, complementary strands may be used in a process known as “triple helix” base pairing to inhibit replication. These molecules compromise the ability of the double helix to open and bind to polymerases and transcription factors necessary for replication.

[0100] Stable transformation of appropriate dividing cells with an expression vector encoding the complement of a cdp may produce a transgenic cell line, tissue, or organism. Those cells which assimilate, replicate, and express the nucleic acid sequence in sufficient quantities may compromise or entirely eliminate the natural activity of the cdp. Frequently, the function of a cdp may be ascertained by observing lethality, loss of physiological activity, changes in morphology, etc. at the cellular, tissue, organ, or organismal level.

[0101] Expression

[0102] The cdps may be used in recombinant vectors to express a polypeptide. It may be advantageous to design nucleic acid sequences possessing the GC ratio of codons preferred by a particular prokaryotic or eukaryotic host (Murray, E. et al. (1989) Nuc. Acids Res. 17:477-508). In addition, 3′ terminators, such as bacterial nopalene synthase or octapine synthase, may be modified, or substituted into vectors, to produce transcripts having more desirable properties, such as a longer half-life, than transcripts produced from the naturally occurring sequence (Sullivan, M. L. and Green, P. J. (1993) Plant Mol. Biol. 23:1091-1104; Silva, E. M. et al. (1987) J. Cell Biol. 105:245). The cdps may also be altered by site-directed mutagenesis to insert new restriction sites and to modify the peptide by glycosylation, phosphorylation, acetylation, etc.

[0103] The cdp may be ligated to a heterologous sequence to create a chimeric or fusion protein. For ease of purification, it may be useful to produce a fusion protein that is recognized by a commercially available antibody. In addition, the sequence may be engineered to introduce a cleavage site between the peptide of interest and the heterologous protein sequence, so that the peptide may be cleaved from the heterologous moiety and purified.

[0104] Alternately, the peptide may be synthesized, whole or in part, using chemical methods well known in the art. For example, peptides may be synthesized using various solid-phase techniques (Roberge, J. Y. et al. (1995) Science 269:202-204) or an Peptide Synthesizer Model 431A (Perkin Elmer) using instructions provided by the manufacturer. Once synthesized, the peptide may be purified by preparative high performance liquid chromatography, and composition confirmed by amino acid sequencing (Ausubel (supra) p. 10.82f).

[0105] Expression Systems

[0106] For protein expression, the nucleic acid sequence may be inserted into an expression vector which contains the necessary elements for appropriate transcription and translation. Methods which are well known to those skilled in the art may be used to construct such vectors. These methods include in vitro recombinant DNA techniques, synthetic techniques, in vivo recombination, or genetic recombination. Such techniques are described in Sambrook (supra) and Ausubel (supra). One of the advantages of producing the CDPs by recombinant DNA technology is the ability to obtain highly-enriched sources of the polypeptides that simplify purification procedures.

[0107] The cdps may be engineered into a variety of expression vectors and host cells. These include, but are not limited to, microorganisms such as bacteria transformed with recombinant bacteriophage, plasmid or cosmid DNA expression vectors; yeast transformed with yeast expression vectors; insect cell systems infected with virus expression vectors (e.g. baculovirus); plant cells transfected with expression vectors containing viral, bacterial, or eukaryotic elements (e.g. cauliflower mosaic virus, CaMV; Ti or pBR322 plasmids; and cell or tassel-specific, constitutive or inducible, monocot or corn elements).

[0108] The regulatory elements of vectors vary in their strength and specificities and are those nontranslated regions such as enhancers, promoters, introns, and 3′ untranslated regions which interact with host proteins to carry out transcription and translation. Depending on the vector and host, any number of suitable transcription and translation elements may be used. For example, promoters or enhancers derived from the genomes of plant cells (e.g. heat shock, RUBISCO; and storage protein genes) or from plant viruses (e.g. viral promoters or leader sequences) may be cloned into the vector containing an appropriate selectable marker. In fact, the cdps of this invention may be used to clone upstream, tissue-specific or inducible regulatory elements for purposes of engineering and expressing heterologous genes in corn.

[0109] In a bacterial system, an expression vector may be selected to direct a high level expression of a fusion protein. Commercial vectors include, but are not limited to, the multifunctional E. coli cloning and expression vectors, PBLUESCRIPT (Stratagene, La Jolla Calif.) and PSPORT (Life Technologies). Using either of these vectors, the nucleic acid sequence may be ligated into the vector in-frame with sequences for the amino-terminal Met and the subsequent 7 residues of β-galactosidase so that a chimeric protein is produced. PGEX vectors (Amersham Pharmacia Biotech) may also be used to express peptides by ligating the nucleic acid sequence to glutathione S-transferase (GST). In general, such fusion proteins are soluble and may easily be purified from lysed cells by adsorption to glutathione-agarose beads followed by elution in the presence of free glutathione. Proteins made in such systems are designed to include heparin, thrombin, or factor X_{A} protease cleavage sites so that the peptide of interest may be released from the GST moiety at will.

[0110] In plants, the expression of nucleic acid sequences may be driven by any of a number of promoters. Viral promoters such as the 35S and 19S promoters of CaMV may be used alone or in combination with the omega leader sequence from TMV (Takamatsu, N. et al. (1987) EMBO J. 6:307-311). Alternatively, plant promoters such as the small subunit of RUBISCO (Coruzzi, G. et al. (1984) EMBO J. 3:1671-1680; Broglie, R. et al. (1984) Science 224:838-843); or heat shock promoters (Winter, J. and Sinibaldi, R. M. (1991) Results Probl. Cell Differ. 17:85-105) may be used. Preferably, the cdps of the invention may be used to identify clones containing full length genes by hybridization or to clone full length genes or regulatory elements for use in expression vectors by PCR.

[0111] X-Ray Crystallography

[0112] Expression of the recombinant CDP in sufficient amounts may make analytical studies such as X-ray crystallography possible. In the alternative, knowledge of the amino acid sequence deduced from the nucleic acid sequence may provide guidance to those employing computer modeling techniques in place of or in addition to X-ray crystallography.

[0113] Antibodies

[0114] Anti-CDP antibodies may be produced to use in assays of protein expression. Such antibodies include, but are not limited to, polyclonal, monoclonal, chimeric, single chain, Fab fragments and fragments produced by a Fab expression library. Neutralizing antibodies, i.e., those which inhibit dimer formation, are especially useful for diagnostics.

[0115] The amino acid sequence encoded by the cdps of the Sequence Listing may be analyzed by appropriate software (e.g. LASERGENE Navigator, DNASTAR) to determine regions of high immunogenicity. The optimal sequences for immunization are selected from the C-terminus, the N-terminus, and those intervening, hydrophilic regions of the peptide which are likely to be exposed to the external environment when the peptide is in its natural conformation. Analysis used to select appropriate epitopes is also described by Ausubel (supra, unit 11-7). Peptides used for antibody induction do not need to have biological activity; however, they must be antigenic. Peptides used to induce specific antibodies may have an amino acid sequence consisting of at least five amino acids, and preferably at least 10 amino acids. An oligopeptide should mimic an antigenic portion of the natural peptide and may be fused with another protein such as KLH (Sigma-Aldrich) for antibody production. An oligopeptide or peptide encompassing an antigenic region may be expressed from the nucleic acid sequence, synthesized, or purified from corn.

[0116] Procedures well known in the art may be used for the production of antibodies. Various hosts including mice, goats, and rabbits, may be immunized by injection with a peptide or oligopeptide. Depending on the host species, various adjuvants may be used to increase immunological response.

[0117] In one procedure, oligopeptides about 15 residues in length may be synthesized using a Peptide Synthesizer Model 431A (Perkin Elmer) using Fmoc-chemistry and coupled to KLH (Sigma-Aldrich) by reaction with M-maleimidobenzoyl-N-hydroxysuccinimide ester (Ausubel, supra) . If necessary, a cysteine may be introduced at the N-terminus of the oligopeptide to permit coupling to KLH. Rabbits are immunized with the oligopeptide-KLH complex in complete Freund's adjuvant. The resulting antisera are tested for antipeptide activity by binding the peptide to plastic, blocking with 1% BSA, reacting with rabbit antisera, washing, and reacting with radioiodinated goat anti-rabbit IgG.

[0118] In another procedure, the peptide, in quantities up to 75 mg, may be used to immunize mice or rabbits. About 100 μg are used to immunize a mouse, while up to 1 mg is used to immunize a rabbit. Subsequently, the peptide is radioiodinated and used to screen the B-lymphocyte cells from the immunized animal for production of hybridomas using standard techniques. About 20 mg of protein are sufficient for labeling and screening several thousand clones.

[0119] Hybridomas may also be prepared and screened using standard techniques. Hybridomas of interest are detected by screening with radioiodinated peptide to identify those fusions producing peptide-specific monoclonal antibody. In a typical protocol, wells of microtiter plates are coated with affinity-purified, specific rabbit-anti-mouse (or suitable anti-species IgG) antibodies at 10 mg/ml. The coated wells are blocked with 1% BSA and washed and exposed to supernatants from hybridomas. After incubation, the wells are exposed to radiolabeled peptide at 1 mg/ml. Clones producing antibodies bind a quantity of labeled peptide that is detectable above background.

[0120] Such clones are expanded and subjected to 2 cycles of cloning at 1 cell/3 wells. Cloned hybridomas are injected into pristane-treated mice to produce ascites, and monoclonal antibody is purified from the ascitic fluid by affinity chromatography on Protein A (Amersham Pharmacia Biotech). Monoclonal antibodies with affinities of at least 10⁸ M⁻¹, preferably 10⁹ M⁻¹ to 10¹⁰ M⁻¹ or greater, are made by standard procedures as described in Harlow (1988; Antibodies: A Laboratory Manual, Cold Spring Harbor Laboratory, Cold Spring Harbor N.Y.) and Goding (1986; Monoclonal Antibodies: Principles and Practice, Academic Press, New York N.Y.).

[0121] Antibody fragments which contain specific binding sites for an epitope may also be generated. For example, such fragments include, but are not limited to, the F(ab′)2 fragments which may be produced by pepsin digestion of the antibody molecule and the Fab fragments which may be generated by reducing the disulfide bridges of the F(ab′)2 fragments. Alternatively, Fab expression libraries may be constructed to allow rapid and easy identification of monoclonal Fab fragments with the desired specificity (Huse, W. D. et al. (1989) Science 256:1275-1281).

[0122] Assays Using Antibodies

[0123] Anti-CDP antibodies may be used to determine the amount of CDP found in a particular cell of a corn inbred line or hybrid under various environmental or disease conditions. Assays for such peptides include methods utilizing the antibody and a label to detect expression in plant extracts, cells, or tissues. The peptides and antibodies of the invention may be used with or without modification. Frequently, the peptides and antibodies will be labeled by joining them, either covalently or noncovalently, with a reporter molecule.

[0124] Protocols for detecting and measuring protein expression using either polyclonal or monoclonal antibodies, are known in the art. Examples include enzyme-linked immunosorbent assay (ELISA), radioimmunoassay (RIA) and fluorescent activated cell sorting (FACS). A two-site, monoclonal-based immunoassay utilizing monoclonal antibodies reactive to two non-interfering epitopes on a peptide is preferred, but a competitive binding assay may be employed. Such immunoassays typically involve the formation of complexes between the CDP and its specific antibody and the measurement of such complexes. These and other assays are described, among other places, in Hampton, R. et al. (1990, Serological Methods, a Laboratory Manual, APS Press, St Paul Minn.) and Maddox, D. E. et al. (1983, J. Exp. Med. 158:1211-1226).

[0125] Screening for Useful Compounds

[0126] The cdps or CDPs are particularly useful for screening libraries of molecules or test compounds for identification of those molecules which bind specifically to them. For example, a cdp or fragment thereof may be combined with a plurality of natural, synthetic, or inorganic molecules to screen for molecules that bind to them and function as transcription factors, enhancers, or other cellular elements which contribute to gene expression. Similarly, a CDP or portion thereof may be combined with a plurality of molecules to screen for molecules which bind to them. Molecules identified by screening with cdps or CDPs preferably affect growth and development, disease resistance, environmental adaptability, quality, or yield.

[0127] Technologies with multiple-sample format, ELISA-like, capillary, or chip-based assays, are well known in the art and allow large-scale screening. These methods use complex formation, quantification, and comparison with a standard to detect molecules which specifically bind the cdps or CDPs. In the assay, the cdp or CDP may be free in solution, affixed to a substrate, borne on a cell surface, or located intracellularly. For example, prokaryotic host cells which are stably transformed with recombinant nucleic acids that express and position a CDP on the cell surface can be used to screen for molecules which specifically bind the CDP. Viable or fixed cells are screened against a plurality of test compounds and the specificity of binding or formation of complexes between an expressed CDP and the test compound is measured.

[0128] Transformation

[0129] Bacterial and plant transformation systems are well known in the art. Expression vectors may be introduced into suitable E. coli cells by electroporation, heat shock or other means as described in Ausubel (supra) for the purpose of expressing a plant protein. Expression vectors may also be introduced into plant cells by direct transfer of DNA or pathogen-mediated transfection. For reviews, see McGraw Hill Yearbook of Science and Technology (1992; McGraw Hill New York N.Y., pp 191-196); or Weissbach, A. and Weissbach, H. (1988; Methods Enzymol. 118:421-463). Direct transfer of DNA into plant protoplasts or cells is one approach for transforming plants genetically. DNA uptake by protoplasts may be promoted chemically with polyethylene glycol or electrically with a high-voltage pulse. Both of these methods depend upon a cell culture system to recover plants from a single transformed cell (Rhodes, C. A. et al. (1988) Biotechnology 6:56-60; Morocz, S. (1991) Theor. Appl. Genet. 80:721-726). Regeneration of transformed, fertile plants has been demonstrated in several cereals including rice (Zhang, H. M. (1988) Plant Cell Rep. 7:379-384).

[0130] Electroporation, lipofection, microinjection, particle bombardment, vacuum infiltration, and electrotransformation may be used to transform corn cells and embryos. Gordon-Kamm, W. J. et al. (1992; Plant Mol. Biol. 18:201-210) used particle bombardment to transform embryogenic, suspension culture cells; Murry, L. E. et al. (In: Bajaj, Y. P. S. (1994) Biotechnology in Agriculture and Forestry 25:252-261) used continuous, low voltage electric current to transform embryos; and Rhodes, C. A. et al. (1995; Methods Mol. Biol. 55:121-131) describe the electroporation of embryos. Stable transformation requires the use of an expression vector which contains an appropriate origin of replication and gene cassettes containing viral or plant expression elements, a selectable or visible marker, and a gene of interest. Following the introduction of the vector, cells may be allowed to grow for 1-2 days in an enriched media. If the vector contains a selectable marker, the cells are switched to selective media. The selectable marker confers resistance to selective agents and allows growth and recovery of those cells which successfully express the introduced sequences.

[0131] Any number of selection systems may be used to recover transformed cell lines. Antimetabolite, antibiotic or herbicide resistance may be used as the basis for selection using genes such as dhfr, which confers resistance to methotrexate (Wigler, M. et al. (1980) Proc. Natl. Acad. Sci. 77:3567-3570); npt, which confers resistance to the aminoglycosides, neomycin and G-418 (Colbere-Garapin, F. et al. (1981) J. Mol. Biol. 150:1-14); and als or pat, which confer resistance to chlorsulfuron and phosphinotricin acetyltransferase, respectively (McGraw Hill Yearbook of Science and Technology, supra). Recently, the use of visible markers has gained popularity with such markers as anthocyanins, β glucuronidase and its substrate, GUS, luciferase and its substrate, luciferin, and green fluorescent protein, GFP, being widely used not only to identify transformants, but also to quantify the amount of transient or stable protein expression attributable to a specific vector system (Rhodes (1995) supra; Haseloff, J. and Amos, B. (1995) Trends Genet. 11:328-329). Plant expression vectors contain 5′ promoters, enhancers and 3′ terminators that will function in the plant cell.

[0132] Identification of Transformants

[0133] Although the presence/absence of marker gene expression suggests that the gene of interest is also present, its expression should be confirmed. For example, if the sequence is inserted within a marker gene sequence, cells containing the recombinant sequence may be identified by the absence of marker gene function. Alternatively, a marker gene may be placed in tandem with the nucleic acid sequence under the control of a single promoter. Expression of the marker gene in response to induction or selection may indicate the presence and expression of the tandem sequence as well.

[0134] Alternatively, host cells which contain the introduced nucleic acid sequence may be identified by a variety of procedures known to those of skill in the art. These procedures include, but are not limited to, DNA-DNA or DNA-RNA hybridization and protein bioassay or immunoassay techniques which include membrane, solution, gel, or chip based technologies for the detection and/or quantification of the nucleic or amino acids and any of the molecules to which they bind.

[0135] The presence of the nucleic acid sequence may be detected by DNA-DNA or DNA-RNA hybridization or amplification using probes comprising all or a portion of a nucleic acid sequence. Nucleic acid amplification based assays involve the use of oligonucleotides or oligomers based on the nucleic acid sequence to detect transformants containing the introduced DNA.

[0136] A wide variety of labels and conjugation techniques are known by those skilled in the art and may be used in various nucleic acid and amino acid assays. Means for producing labeled hybridization or PCR probes for detecting related sequences include oligolabeling, nick translation, end-labeling or PCR amplification and are well known in the art. Alternatively, the nucleic acid sequence may be cloned into a vector for the production of an mRNA probe. Such vectors are known in the art, are commercially available, and may be used to synthesize RNA probes in vitro by addition of an appropriate RNA polymerase such as T7, T3 or SP6 and labeled nucleotides. A number of companies (e.g., Amersham Pharmacia Biotech and Life Technologies) supply commercial kits, reporter molecules, and protocols for these procedures.

### EXAMPLES

### Isolation, Sequence Analysis and Use of Corn Sequences

[0137] I Growth Conditions

[0138] The corn cDNA libraries, SATMON021 and SATMON024, were constructed from corn tassel grown and prepared as follows. Seeds were planted 3 cm deep in soil in 2″-3″ peat pots containing Metro-Mix 200 growing medium (The Scotts Company, Marysville Ohio). After 2-3 weeks, the plants were transplanted into 10″ pots. After transplant, PETERS 15-16-17 fertilizer (The Scotts Company) at a strength of 150 ppm nitrogen was applied ˜3× per week. Iron (total ˜900 mg) was added to each pot two to three times between transplanting and flowering of the plant. Corn plants were grown in a greenhouse in 27° C./21° C., 15 hr day/9 hr night cycles. Lighting was provided by 1000 W sodium vapor lamps. For SATMON021, a corn plant was grown to the V8 stage at which time the tassel was 15 to 20 cm long. The tassel was harvested, frozen in liquid nitrogen, and stored at −80° C. For SATMON024, a corn plant was grown to the V9 stage. The rapidly developing tassel was harvested when 37 cm long with its concomitant glume, anthers and pollen. The tissue was frozen in liquid nitrogen and stored at −80° C.

[0139] II cDNA Library Construction

[0140] The mRNA was handled according to the recommended protocols in the SuperScript Plasmid System for cDNA synthesis and plasmid cloning (Life Technologies). The cDNAs were fractionated on a SEPHAROSE CL-4B column (Amersham Pharmacia Biotech). The cDNAs for SATMON021 and SATMON024 were ligated into the NotI and EcoRI sites of the pINCY plasmid (Incyte Pharmaceuticals). The plasmid pINCY was subsequently transformed into DH10B competent cells (Life Technologies).

[0141] III Isolation and Sequencing of cDNA Clones

[0142] The plasmid DNA was released from the cells and purified using the R.E.A.L. Prep 96 plasmid kit (Qiagen, Valencia Calif.). This kit enabled the simultaneous purification of 96 samples in a 96-well block using multi-channel reagent dispensers. The recommended protocol was employed except for the following changes: 1) the bacteria were cultured in 1 ml of sterile Terrific Broth (Life Technologies) with carbenicillin at 25 mg/l and glycerol at 0.4%; 2) after inoculation, the cultures were incubated for 19 hours and at the end of incubation, the cells were lysed with 0.3 ml of lysis buffer; and 3) following isopropanol precipitation, the plasmid DNA pellet was resuspended in 0.1 ml of distilled water. After the last step in the protocol, samples were transferred to a 96-well block for storage at 4° C.

[0143] In the alternative, DNA was isolated using the following protocols. Single bacterial colonies were transferred into individual wells of the 384-well plates (Genetix, Christchurch UK) using sterile toothpicks. The wells contained 1 ml of sterile Terrific Broth (Life Technologies) with 25 mg/l carbenicillin and 0.4% glycerol (v/v). The plates were covered and placed in a THERMODYNE incubator (Thermodyne Corp, Newtown Square Pa.) at 37° C. for 8-10 hours prior to use. Plasmid DNA was released from the cells and amplified using direct link PCR (Rao, V. B. (1994) Anal. Biochem. 216:1-14) as follows.

[0144] The direct link PCR solution included 30 ml of NUCLEIX PLUS PCR nucleotide mix (Amersham Pharmacia Biotech) and 300 μl of Taq DNA polymerase (Amersham Pharmacia Biotech) with or without 12 μl Pfu DNA polymerase (Stratagene). Five microliters of the PCR solution were added to each of the 384 wells using the Hydra-96 microdispenser (Hamilton, Reno Nev.); plates were centrifuged at 1000 rpm for 20 seconds and refrigerated until use. A 384 pin tool (V&P Scientific, San Diego Calif.) was used to transfer bacterial cells from the incubation plate into the plate containing the PCR solution where the component 0.1% Tween 20 (polyoxyethylene(20)sorbitan monolaurate) caused the cells to undergo lysis and release the plasmid DNA. After lysis, the plates were centrifuged up to 500 rpm, covered with a cycle sealer, and cycled using a 384-well Peltier Thermal Cycler (PCT-200; M J Research, Watertown Mass.) using the program dPCR30 with the following parameters: Step 1) 95° C., 1 minute; Step 2) 94° C., 30 seconds; Step 3) 55° C., 30 seconds; Step 4) 72° C., 2 minutes; Step 5) steps 2, 3, and 4 repeated 29 times; Step 6) 72° C., 10 minutes; and Step 7) storage at 4° C.

[0145] The concentration of DNA in each well was determined by dispensing 100 μl PICOGREEN quantitation reagent (Molecular Probes, Eugene Oreg.) (0.25% reagent dissolved in 10 mM TrisHCl, pH 7.5, 1 mM ethylenediamine tetraacetic acid (EDTA) (1× TE, v/v), and 0.5 μl of undiluted PCR product into each well of an opaque fluorimeter plate (Corning Costar, Acton Mass.) and allowing the DNA to bind to the reagent. The plate was scanned in a Fluoroskan II (Labsystems Oy, Helsinki, Finland) to measure the fluorescence of the sample and to quantify the concentration of DNA.

[0146] The cDNAs were prepared and sequenced by the method of Sanger, F. and A. R. Coulson (1975; J. Mol. Biol. 94:441-448), using either a MICROLAB 2200 system (Hamilton) or a HYDRA microdispenser (Robbins Scientific, Sunnyvale Calif.) in combination with PTC-200 cyclers (M J Research) and ABI PRISM 377 DNA sequencing systems (Perkin Elmer). Most of the isolates were sequenced according to standard PE protocols and kits (Cat. #79345, 79339, 79340, 79357, 79355). The solution volumes were used at 0.25×-1.0× concentrations. In the alternative, cDNAs may have been sequenced using solutions and dyes from Amersham Pharmacia Biotech.

[0147] IV Homology Searching of cDNA Clones and Their Deduced Proteins

[0148] After the reading frame was determined, the nucleotide sequences of the Sequence Listing or their deduced amino acid sequences were queried against databases such as GenBank, SwissProt, BLOCKS, and Pima II. These databases which contain annotated sequences were searched for regions of homology (similarity) using BLAST (Altschul (1993) supra; Altschul (1990) supra).

[0149] BLAST produced alignments of both nucleic and amino acid sequences to determine sequence similarity. Because of the local nature of the alignments, BLAST was especially useful in determining exact matches or in identifying homologs of viral, prokaryotic, or eukaryotic origin. Other algorithms such as the one described in Smith, T. F. (1992; Protein Engineering 5:35-51) could have been used to deal with primary sequence patterns and secondary structure gap penalties. The sequences disclosed in this application have lengths of at least 49 nucleotides, and no more than 12% uncalled bases (where N is recorded rather than A, C, G, or T).

[0150] SATMON021 and SATMON024 nucleotide sequences were searched, as described in Karlin (supra), against the GenBank plant (pln) and eukaryote (eukp) databases, and deduced amino acid sequences from the same clones were then searched against GenBank functional protein databases (allp). The relevant database for a particular match was reported in column 5 of TABLE 1. In TABLE 1 column 3, the product score is calculated as follows: the % nucleotide or amino acid identity [between the query and reference sequences] in BLAST is multiplied by the % maximum possible BLAST score [based on the lengths of query and reference sequences] and then divided by 100. In an analogy to the hybridization procedures used in the laboratory, the electronic stringency for an exact match was set at 70, and the conservative lower limit for an exact match was set at approximately 40 (with 1-2% error due to uncalled bases). Column 4 provides log-likelihood where the value=log (probability÷threshold) and the threshold for exact matches was set at 10-25 for nucleotides and 10⁻⁴ for peptides. Column 6 contains a GenBank description of the protein; some of the GenBank descriptions were standardized with respect to abbreviations and spelling.

[0151] V Gene Transcript Analysis

[0152] The abundance sort program of the invention described in U.S. Pat. No. 5,840,484 entitled “Comparative Gene Transcript Analysis”, incorporated herein by reference, tabulates and sorts by frequency the mRNA transcripts corresponding to each gene identified in a database. The process for obtaining this data set, the profile of corn tassel gene activity or transcript image, is referred to as “gene transcript analysis”.

[0153] A transcript analysis summarizes the presence and abundance of exact, unique, and homologous transcripts which are tassel specific. A transcript image may be assembled using TABLE 1, TABLE 2, and the Sequence Listing. Such a collection of sequences is used to characterize minimally active, active, or highly active cdps. Comparisons among normal, diseased, or immature tassel are used to identify those sequences of particular use in predicting yield or in recovering regulatory elements to be used in vectors for genetic engineering. The entire set, or a selected subset, of tassel-specific, unique, or homologous cDNAs may be useful in membrane-based or PCR-based diagnostic technologies.

[0154] VI Library Comparisons, Subsetting

[0155] LIFESEQ database (Incyte Pharmaceuticals) software is used to compare sets of transcript images for PHYTOSEQ database (Incyte Pharmaceuticals) cDNA libraries. The cdps are filtered by selecting desired values for relative abundance, stringency, and/or product score (described infra). For any particular library, only the subset of cdps that meet the selected values is included in the comparison. Additional filters, such as those to exclude common genes, such as ribosomal proteins, elongation factor, etc. may be used in the search operation. The subsetting of thousands of corn sequences from the transcript images of callus, ear, embryo, endosperm, leaf, meristem, root, seed, seedling, stem, and tassel libraries is used to identify cdps which are of interest.

[0156] VII. Extension of cDNA Sequences

[0157] The nucleic acid sequence was extended using an Incyte cDNA clone and oligonucleotide primers. One primer was synthesized to initiate 5′ extension of the known fragment, and the other, to initiate 3′ extension of the known fragment. The initial primers were designed using OLIGO 4.06 software (National Biosciences), or another appropriate program, to be about 22 to 30 nucleotides in length, to have a GC content of about 50% or more, and to anneal to the target sequence at temperatures of about 68° C. to about 72° C. Any stretch of nucleotides which would result in hairpin structures and primer-primer dimerizations was avoided.

[0158] Selected plant cDNA libraries were used to extend the sequence. If more than one extension was necessary or desired, additional or nested sets of primers were designed. Preferred libraries are ones that have been size-selected to include larger cDNAs. Also, random primed libraries are preferred because they will contain more sequences with the 5′ and upstream regions of genes. A randomly primed library may be particularly useful if an oligo d(T) library does not yield a full-length cDNA. Genomic libraries are useful for extension 5′ of the promoter binding region in obtaining regulatory elements.

[0159] High fidelity amplification was obtained by PCR using methods well known in the art. PCR was performed in 96-well plates using the PTC-200 cycler (M J Research). The reaction mix contained DNA template, 200 nmol of each primer, reaction buffer containing Mg²⁺, (NH₄)₂SO₄, and β-mercaptoethanol, Taq DNA polymerase (Amersham Pharmacia Biotech), ELONGASE enzyme (Life Technologies), and Pfu DNA polymerase (Stratagene), with the following parameters for primer pair PCI A and PCI B: Step 1: 94° C., 3 min; Step 2: 94° C., 15 sec; Step 3: 60° C., 1 min; Step 4: 68° C., 2 min; Step 5: Steps 2, 3, and 4 repeated 20 times; Step 6: 68° C., 5 min; Step 7: storage at 4° C. In the alternative, the parameters for primer pair T7 and SK+ were as follows: Step 1: 94° C., 3 min; Step 2: 94° C., 15 sec; Step 3: 57° C., 1 min; Step 4: 68° C., 2 min; Step 5: Steps 2, 3, and 4 repeated 20 times; Step 6: 68° C., 5 min; Step 7: storage at 4° C.

[0160] The concentration of DNA in each well was determined by dispensing 100 μl PICOGREEN quantitation reagent (0.25% v/v; Molecular Probes) dissolved in 1× TE and 0.5 μl of undiluted PCR product into each well of an opaque fluorimeter plate (Corning Costar, Acton Mass.) and allowing the DNA to bind to the reagent. The plate was scanned in a Fluoroskan II (Labsystems Oy) to measure the fluorescence of the sample and to quantify the concentration of DNA. A 5 μl to 10 μl aliquot of the reaction mixture was analyzed by electrophoresis on a 1% agarose mini-gel to determine which reactions were successful in extending the sequence.

[0161] The extended nucleotides were desalted and concentrated, transferred to 384-well plates, digested with CviJI cholera virus endonuclease (Molecular Biology Research, Madison Wis.), and sonicated or sheared prior to religation into pUC18 vector (Amersham Pharmacia Biotech). For shotgun sequencing, the digested nucleotides were separated on low concentration (0.6 to 0.8%) agarose gels, fragments were excised, and agar digested with AGARACE enzyme (Promega, Madison Wis.). Extended clones were relegated using T4 DNA ligase (New England Biolabs, Beverly Mass.) into pUC18 vector (Amersham Pharmacia Biotech), treated with Pfu DNA polymerase (Stratagene) to fill-in restriction site overhangs, and transfected into competent E. coli cells. Transformed cells were selected on antibiotic-containing media, and individual colonies were picked and cultured overnight at 37° C. in 384-well plates in LB/2× carbenicillin liquid media.

[0162] The cells were lysed, and DNA was amplified by PCR using Taq DNA polymerase (Amersham Pharmacia Biotech) and Pfu DNA polymerase (Stratagene) with the following parameters: Step 1: 94° C., 3 min; Step 2: 94° C., 15 sec; Step 3: 60° C., 1 min; Step 4: 72° C., 2 min; Step 5: steps 2, 3, and 4 repeated 29 times; Step 6: 72° C., 5 min; Step 7: storage at 4° C. DNA was quantified using PICOGREEN reagent (Molecular Probes) as described above. Samples with low DNA recoveries were reamplified using the same conditions described above. Samples were diluted with 20% dimethylsulfoxide (DMSO) (1:2, v/v), and sequenced using DYENAMIC energy transfer sequencing primers and the DYENAMIC DIRECT cycle sequencing kit (Amersham Pharmacia Biotech) or the ABI PRISM BIGDYE Terminator cycle sequencing kit (Perkin-Elmer).

[0163] VIII Labeling of Probes and Hybridization Analyses

[0164] Blotting

[0165] Target nucleic acids are isolated from a biological source and applied to a solid matrix (a blot) suitable for standard nucleic acid hybridization protocols by one of the following methods. A mixture of target nucleic acids, a restriction digest of genomic DNA, is fractionated by electrophoresis through an 0.7% agarose gel in 1× TAE (40 mM Tris acetate, ˜pH 8.5, 2 mM EDTA) running buffer and transferred to a nylon membrane by capillary transfer using 20× saline sodium citrate (SSC). Alternatively, the target nucleic acids are individually ligated to a vector and inserted into bacterial host cells to form a library. Target nucleic acids are then arranged on a blot by one of the following methods. In the first method, bacterial cells containing individual clones are robotically picked and arranged on a nylon membrane. The membrane is placed on bacterial growth medium, LB agar containing carbenicillin, and incubated at 37° C. for 16 hours. Bacterial colonies are denatured, neutralized, and digested with proteinase K. Nylon membranes are exposed to UV irradiation in a STRATALINKER UV-crosslinker (Stratagene) to cross-link DNA to the membrane.

[0166] In the second method, target nucleic acids are amplified from bacterial cells by thirty cycles of PCR using primers complementary to vector sequences flanking the insert. Amplified target nucleic acids are purified using SEPHACRYL-400 (Amersham Pharmacia Biotech). Purified target nucleic acids are robotically arrayed onto a glass microscope slide (Corning Science Products, Corning N.Y.). The slide was previously coated with 0.05% aminopropyl silane (Sigma-Aldrich, St. Louis Mo.) and cured at 110° C. The arrayed glass slide (microarray) is exposed to UV irradiation in a STRATALINKER UV-crosslinker (Stratagene).

[0167] Probe Preparation

[0168] cDNA probes are made from mRNA templates. Five micrograms of mRNA is mixed with 1 μg random primer (Life Technologies), incubated at 70° C. for 10 minutes, and lyophilized. The lyophilized sample is resuspended in 50 μl of 1× first strand buffer (cDNA synthesis system; Life Technologies) containing a dNTP mix, [α-³²P]dCTP, dithiothreitol, and MMLV reverse transcriptase (Stratagene), and incubated at 42° C. for 1-2 hours. After incubation, the probe is diluted with 42 μl dH₂O, heated to 95° C. for 3 minutes, and cooled on ice. mRNA in the probe is removed by alkaline degradation. The probe is neutralized, and degraded mRNA and unincorporated nucleotides are removed using a PROBEQUANT G-50 Micro Column (Amersham Pharmacia Biotech). Probes can be labeled with fluorescent markers, Cy3-dCTP or Cy5-dCTP (Amersham Pharmacia Biotech), in place of the radionuclide [³²P]dCTP.

[0169] Hybridization

[0170] Hybridization is carried out at 65° C. in a hybridization buffer containing 0.5 M sodium phosphate (pH 7.2), 7% SDS, and 1 mM EDTA. After the blot is incubated in hybridization buffer at 65° C. for at least 2 hours, the buffer is replaced with 10 ml of fresh buffer containing the probe. After incubation at 65° C. for 18 hours, the hybridization buffer is removed, and the blot is washed sequentially under increasingly stringent conditions, up to 40 mM sodium phosphate, 1% SDS, 1 mM EDTA at 65° C. To detect signal produced by a radiolabeled probe hybridized on a membrane, the blot is exposed to a PHOSPHORIMAGER cassette (Molecular Dynamics, Sunnyvale Calif.), and the image is analyzed using IMAGEQUANT data analysis software (Molecular Dynamics). To detect signals produced by a fluorescent probe hybridized on a microarray, the blot is examined by confocal laser microscopy, and images are collected and analyzed using GEMTOOLS gene expression analysis software (Incyte Pharmaceuticals).

[0171] X Restriction Fragment Length Polymorphisms

[0172] Restriction fragment length polymorphisms (RFLPs) are created by using one or more restriction enzymes to cut DNA into fragments at specific recognition sites. The fragments and molecular size standards are separated using gel electrophoresis. Ethidium bromide staining is used to reveal the fragments under UV (260 nm) illumination. Fragment size differences between samples result from mutations or sequence rearrangements within restriction enzyme recognition sites. RFLP markers are selected by examining these differences (Paterson, A. H. et al. (1988) Nature 335:721-726). Alternative DNA fragments include RAPDs (Welsh, J. and McClelland, M. (1990) Nucleic Acids Res. 18:7213-7218), microsatellites (also called simple sequence repeats; Akkaya, M. S. et al. (1992) Genetics 132:1131-1139) or amplified fragment length polymorphisms (AFLPs; Nandi, S. et al. (1997); Mol. Gen. Genet. 255:1-8). Any of these DNA fragments may be mapped onto a chromosomal map, and all are chosen and used to study multigene traits or quantitative trait loci (QTL) at the intraspecific level or among closely related taxa.

[0173] XI Peptide Expression

[0174] Expression of a corn peptide is accomplished by transforming the multifunctional vector, PSPORT (Life Technologies) or pINCY (Incyte Pharmaceuticals), containing the sequence encoding the peptide into E. coli. A transfected colony is cultured and induced with isopropyl beta-D-thiogalactopyranoside (IPTG) using standard methods. The signal sequence resident in the vector directs the secretion of the peptide into the bacterial growth media. Purification of the peptide using polyacrylamide gel electrophoresis will provide peptide for antibody induction or for use in various assays.

[0175] XII Production of Antibodies

[0176] The amino acid sequence encoded by a cdp is analyzed using LASERGENE Navigator (DNASTAR) to determine regions of high immunogenicity. An oligopeptide of about 15 residues is synthesized using a Peptide Synthesizer Model 431A (Perkin Elmer) using Fmoc-chemistry and coupled to KLH (Sigma-Aldrich) by reaction with M-maleimidobenzoyl-N-hydroxysuccinimide ester (Ausubel, supra) . If necessary, a cysteine may be introduced at the N-terminus of the oligopeptide to permit coupling to KLH. Rabbits are immunized with the oligopeptide-KLH complex in complete Freund's adjuvant. The resulting antisera are tested for antipeptide activity, for example, by binding the peptide to plastic, blocking with 1% BSA, reacting with rabbit antisera, washing, and reacting with radioiodinated goat anti-rabbit IgG.

[0177] XIII Two-Hybrid Screen

[0178] A yeast two-hybrid system such as MATCHMAKER LexA Two-Hybrid system (Clontech Laboratories, Palo Alto Calif.) is used to screen for peptides which bind CDPs. A nucleotide encoding a CDP is inserted into the multiple cloning site of a pLexA vector, ligated, and transformed into E. coli. cDNA, prepared from mRNA, is directionally inserted into the multiple cloning site of a pB42AD vector, ligated, and transformed into E. coli to construct a cDNA library. The pLexA plasmid and pB42AD-cDNA library constructs are isolated from E. coli and used in a 2:1 ratio to co-transform competent yeast EGY48[p8op-lacZ] using a polyethylene glycol/lithium acetate protocol. The transformed yeast cells are plated on synthetic dropout (SD) media lacking histidine (-His), tryptophan (-Trp), and uracil (-Ura), and incubated at 30° C. until colonies may be easily counted. The colonies are pooled in a minimal volume of 1× TE (pH 7.5), replated on SD/-His/-Leu/-Trp/-Ura media supplemented with 2% galactose (Gal), 1% raffinose (Raf), and 80 mg/ml X-Gal (X-Gal), and subsequently examined for growth of blue colonies. Interaction between expressed CDP and cDNA fusion proteins activates expression of a LEU2 reporter gene in EGY48 and produces colony growth on media lacking leucine (-Leu). Interaction also activates expression of β-galactosidase from the p8op-lacZ reporter construct which produces blue color in colonies grown on X-Gal.

[0179] Positive interactions between expressed CDP and cDNA fusion proteins can be verified by isolating individual positive colonies and growing them in SD/-Trp/-Ura liquid medium for 1-2 days at 30° C. A sample of the culture is plated on SD/-Trp/-Ura media and incubated at 30° C. until colonies appear. A sample of 20-30 colonies is identically arranged on SD/-Trp/-Ura and SD/-His/-Trp/-Ura plates. Colonies that grow on SD containing histidine but not on media lacking histidine have lost the pLexA plasmid. The histidine-requiring colonies are grown on SD/Gal/Raf/X-Gal/-Trp/-Ura, and white colonies are isolated and propagated. The pB42AD-cDNA plasmid, which contains a polynucleotide encoding a protein which physically interacts with a CDP, can be isolated from the yeast cells and characterized.

[0180] XIV Significant Sequences and Their Uses

[0181] The biological activity of polypeptides encoded by the cdps is based in part on a comparison between nucleic acid sequences in the Sequence Listing and reference or homologous sequences from GenBank which encode polypeptides of known function or activity. The biological properties and potential uses of polypeptides encoded by the cdps are based in part upon the biological properties of their known homologs.

[0182] Incyte Clone No. 700345457H1 is a nonexact homolog of GenBank GI No. g939780, which encodes ZAG5, a MADS-box protein in maize (Mena, M. et al. (1995) Plant J. 8:845-854).

[0183] The MADS domain (MCM1, AGAMOUS, IDEFICIENS, and SRF, serum response factor) is a conserved DNA-binding/dimerization region present in a variety of transcription factors from different kingdoms. MADS box genes represent a large multigene family in vascular plants. In angiosperms, many of the genes of the MADS family are involved in different steps of flower development, most notably in the determination of floral meristem and organ identity (Riechmann, J. L. and Meyerowitz, E. M. (1997) Biol Chem 378:1079-101).

[0184] As part of an effort to understand how such genes may have been recruited during the evolution of flowers two members of this gene family, ZAG1 and ZAG2, were characterized in maize (Schmidt, R. J. et al. (1993) Plant Cell 7:729-737). In a subsequent study, Mena, M. et al. described the isolation and characterization of four new members of the family, designated ZAP1, ZAG3, ZAG4 and ZAG5. They mapped these four and 28 additional maize MADS-box genes. The first new member of this family, designated ZAP1, appeared to be the Zea mays ortholog of the floral homeotic gene APETALA1 (AP1). The deduced protein sequence of one of these genes, ZAG4, included the MADS domain but lacked the K-domain characteristically present in this family. In addition, copy number and expression of ZAG4 varied among different inbred lines. A large number of maize MADS-box genes, including ZAG3 and ZAG5, map to duplicate regions of the genome. These data underscore the complexity of the MADS-box family in maize and of the regulation of floral organ morphogenesis among the grasses.

[0185] Incyte Clone No. 700345457H1 is defined as a nonexact but functionally related homolog based on a product score of 20 and a log-likelihood value of −13 as shown in TABLE 1. Incyte Clone No. 700345457H1 can be used as a marker to follow inheritance in a corn breeding program, as an element in an array to monitor the effects of the application of agrichemicals, or as a tool to investigate the regulation of floral morphogenesis.

[0186] All publications and patents mentioned in the above specification are herein incorporated by reference. Various modifications and variations of the described method and system of the invention will be apparent to those skilled in the art without departing from the scope and spirit of the invention. Although the invention has been described in connection with specific preferred embodiments, it should be understood that the invention as claimed should not be unduly limited to such specific embodiments. Indeed, various modifications of the above-described modes for carrying out the invention which are obvious to those skilled in the field of molecular biology or related fields are intended to be within the scope of the following claims.

TABLE 1
LIST OF INCYTE CLONES DERIVED FROM SATMON021024
COPYRIGHT 1998 INCYTE PHARMACEUTICALS, INC.

| | | | | | | |
|---|---|---|---|---|---|---|
| 700345225H1 | g683501 | 28 | −9 | gb105pln | A. thaliana mRNA for 65 kDa regulatory subunit of protein phosphatase 2A. | |
| 700343709H1 | g167109 | 30 | −12 | gb105pln | Hordeum vulgare vacuolar ATPase B subunit mRNA, complete cds. | |
| 700343622H1 | g1658314 | 26 | −2 | gb105pln | O. sativa osr40g3 gene. | |
| 700342637H1 | g1777386 | 9 | 7 | gb105allp | caffeic acid O-methyltransferase | |
| 700342455H1 | g2668743 | 63 | −46 | gb105pln | Zea mays ubiquitin conjugating enzyme (UBC) mRNA, complete cds. | |
| 700346284H1 | g1546918 | 34 | −62 | gb105pln | Z. mays mRNA for translation initiation factor 5A. | |
| 700344743H1 | g198576 | 8 | 3 | gb105allp | hydrophilic protein | |
| 700346601H1 | g1556430 | 40 | −32 | gb105pln | Populus hybrid mRNA for citrate synthase. | |
| 700343489H1 | g998429 | 88 | −55 | gb105pln | GRF1 = general regulatory factor [Zea mays, XL80, Genomic, 5348 nt]. | |
| 700342946H1 | g218241 | 20 | −34 | gb105pln | Rice mRNA for ribosomal protein L3 (T82 gene), partial sequence. | |
| 700344014H1 | g2829882 | 55 | 0 | gb105eukp | F3I6.30; beta-oxoacyl-(acyl carrier protein) reductase; EC 1.1.1.100 | |
| 700342243H1 | g2244837 | 21 | 1 | gb105allp | proteasome chain protein | |
| 700346337H1 | g473986 | 15 | −13 | gb105pln | Rice mRNA, partial homologous to histone H2B gene. | |
| 700343215H1 | g2662346 | 60 | −43 | gb105pln | Oryza sativa mRNA for EF-1 alpha, complete cds. | |
| 700344166H1 | g728698 | 20 | −3 | gb105pln | Yeast (Saccharomyces cerevisiae) DNA from left arm of chromosome X. | |
| 700346020H1 | g1370155 | 22 | −7 | gb105pln | L. japonicus mRNA for small GTP-binding protein, RAB11H. | |
| 700345572H1 | g303852 | 43 | −53 | gb105pln | Rice mRNA for ribosomal protein L3, complete cds. | |
| 700346091H1 | g1235572 | 34 | −20 | gb105pln | P. curvicolla EF1-alpha gene. | |
| 700379754H1 | g1922277 | 24 | 13 | gb105pln | Fragaria x ananassa mRNA for TCTP protein. | |
| 700345550H1 | g2832664 | 7 | 7 | gb105eukp | F28J12.250; pollen-specific protein-like | |
| 700344542H1 | g2662153 | 10 | 5 | gb105allp | KIAA0436 | |
| 700344387H1 | g1871360 | 13 | −3 | gb105eukp | glutamyl-prolyl-tRNA synthetase | |
| 700343710H1 | g1184773 | 62 | −54 | gb105pln | Zea mays glyceraldehyde-3-phosphate dehydrogenase GAPC3 (gpc3) mRNA, | |
| | | | | | complete cds. | |
| 700346408H1 | g395071 | 18 | −9 | gb105pln | V. faba guanine nucleotide regulatory protein mRNA, complete CDS. | |
| 700344952H1 | g313266 | 36 | −19 | gb105pln | T. aestivum gene for phosphoglycerate kinase. | |
| 700345682H1 | g300082 | 48 | −4 | gb105pln | hsp82 = 82 kda heat shock protein [Zea mays, seedling, leaves, Genomic, 3468 nt]. | |
| 700344543H1 | g2330817 | 27 | −5 | gb105pln | Yeast (Saccharomyces pombe) chromosome I cosmid c4F8. | |
| 700343777H1 | g2244834 | 42 | −18 | gb105eukp | hypothetical protein | |
| 700342769H1 | g1788865 | 6 | 2 | gb105allp | hypothetical 43.1 kD protein in ndk-gcpE intergenic region | |
| 700380696H1 | g602252 | 100 | −87 | gb105pln | Zea mays enolase (eno2) mRNA, complete cds. | |
| 700346044H1 | g2808637 | 31 | −17 | gb105pln | Daucus carota mRNA for Rab8-like small GTP-binding protein. | |
| 700380075H1 | g21800 | 19 | −24 | gb105pln | T. aestivum L mRNA for histone H2B. | |
| 700344370H1 | g16291 | 13 | 12 | gb105pln | A. thaliana mRNA for glycine-rich RNA-binding protein. | |
| 700281843H2 | g507825 | 11 | 7 | gb105eukp | Putrescine N-Methyltransferase; EC 2.1.1.53 | |
| 700345821H1 | g1196896 | 44 | −30 | gb105pln | Glycine max acidic ribosomal protein P0 mRNA, complete cds. | |
| 700345723H1 | g1498052 | 72 | −82 | gb105pln | Zea mays ribosomal protein S8 mRNA, complete cds. | |
| 700346083H1 | g218132 | 10 | 16 | gb105pln | Rice mRNA for Heat shock protein 83. | |
| 700345836H1 | g644491 | 73 | −57 | gb105pln | Corn mRNA for elongation factor 1A. | |
| 700345431H1 | g551482 | 14 | −1 | gb105pln | Zea mays ABA- and ripening-inducible-like protein mRNA, complete cds. | |
| 700346904H1 | g780371 | 67 | −57 | gb105pln | Oryza sativa enolase mRNA, complete cds. | |
| 700346902H1 | g790507 | 60 | −45 | gb105pln | Z. mays mRNA for 60S acidic ribosomal protein. | |
| 700346162H1 | g642130 | 11 | −4 | gb105eukp | AME1; protein kinase | |
| 700345439H1 | g173231 | 18 | 3 | gb105pln | Yeast (Saccharomyces cerevisiae) ribosomal 5S RNA-binding protein (YL3) gene, 5′ cds. | |
| 700346889H1 | g829221 | 27 | −1 | gb105eukp | histone H2 A.F/Z | |
| 700344102H1 | g1001532 | 40 | −17 | gb105allp | hypothetical protein | |
| 700379931H1 | g485952 | 51 | −40 | gb105pln | O. sativa mRNA for glutaredoxin. | |
| 700346181H1 | g170746 | 48 | 14 | gb105pln | Wheat histone H4 TH091 gene, complete cds. | |
| 700345518H1 | g20237 | 18 | −2 | gb105pln | O. sativa (rice) constitutive GOS2 gene. | |
| 700347133H1 | g2149051 | 51 | 0 | gb105eukp | Ran3; small Ras-like GTP-binding protein | |
| 700344902H1 | g600386 | 28 | −15 | gb105pln | A. thaliana mRNA for proteasome subunit. | |
| 700380685H1 | g2529668 | 8 | 3 | gb105eukp | T30B22.11; putative photolyase/blue-light receptor | |
| 700343763H1 | g2145358 | 9 | −1 | gb105eukp | ATHB-9; transcription factor; HD-Zip protein | |
| 700342558H1 | g2444276 | 53 | −46 | gb105pln | Arabidopsis thaliana GSK3/shaggy-like protein kinase (GSK1) mRNA, complete cds. | |
| 700379996H1 | g312732 | 15 | 4 | gb105allp | beta prime cop | |
| 700379841H1 | g2462760 | 11 | 6 | gb105eukp | F8A5.19 | |
| 700346223H1 | g2264319 | 20 | −2 | gb105pln | Arabidopsis thaliana genomic DNA, chromosome 5, P1 clone: MXA21, | |
| | | | | | complete sequence. | |
| 700345766H1 | g4590 | 30 | 1 | gb105pln | Yeast (Saccharomyces cerevisiae) SUG1 gene. | |
| 700343339H1 | g2425030 | 17 | 5 | gb105allp | perchloric acid soluble protein | |
| 700380162H1 | g2662344 | 41 | −31 | gb105pln | Oryza sativa mRNA for EF-1 alpha, complete cds. | |
| 700345123H1 | g2599103 | 19 | 1 | gb105pln | Dunaliella salina 60S ribosomal protein (DSRP1) mRNA, complete cds. | |
| 700343289H1 | g2651294 | 16 | 13 | gb105pln | Arabidopsis thaliana chromosome II BAC T2P4 genomic sequence, complete sequence. | |
| 700344384H1 | g2464894 | 13 | 13 | gb105pln | Arabidopsis thaliana DNA chromosome 4, ESSA I AP2 contig fragment No. 2. | |
| 700343363H1 | g2791947 | 14 | 15 | gb105pln | Lupinus luteus mRNA for ribosomal protein L13a. | |
| 700380284H1 | g432367 | 28 | −11 | gb105pln | Rice mRNA for elongation factor 1 beta, complete cds. | |
| 700346456H1 | g312602 | 17 | 15 | gb105pln | P. obtusangulum 26S rRNA (partial). | |
| 700343433H1 | g559395 | 16 | −2 | gb105eukp | dihydrolipoamide acetyltransferase (E2) subunit of PDC | |
| 700344302H1 | g21800 | 20 | −28 | gb105pln | T. aestivum L mRNA for histone H2B. | |
| 700343113H1 | g2351070 | 37 | −16 | gb105pln | Arabidopsis thaliana genomic DNA, chromosome 5, P1 clone: MTH12. | |
| 700347238H1 | g553063 | 21 | −4 | gb105eukp | GST2; glutathione s-transferase | |
| 700344486H1 | g886024 | 10 | 6 | gb105allp | protein kinase PkwA | |
| 700342307H1 | g602398 | 30 | −15 | gb105eukp | SPF1; P-type ATPase | |
| 700343331H1 | g1495259 | 15 | 1 | gb105allp | orf04 | |
| 700344032H1 | g2244928 | 32 | 6 | gb105eukp | hypothetical protein | |
| 700346601H1 | g1556379 | 36 | −27 | gb105pln | B. vulgaris mRNA for citrate synthase. | |
| 700344971H1 | g304108 | 23 | −2 | gb105pln | Arabidopsis thaliana poly(A)-binding protein mRNA, complete cds. | |
| 700345170H1 | g1107460 | 28 | −12 | gb105pln | Rice mRNA for aspartate kinase-homoserine dehydrogenase, complete cds. | |
| 700343996H1 | g435542 | 78 | −75 | gb105pln | Z. mays mRNA for calmodulin. | |
| 700342952H1 | g1458096 | 16 | 1 | gb105allp | enterocyte differentiation promoting factor | |
| 700342334H1 | g452473 | 86 | −72 | gb105pln | Zea mays Black Mexican Sweet alpha-tubulin mRNA, complete cds. | |
| 700344212H1 | g2651294 | 15 | 3 | gb105pln | Arabidopsis thaliana chromosome II BAC T2P4 genomic sequence, complete sequence. | |
| 700343661H1 | g960356 | 25 | −15 | gb105pln | Barley mRNA for S-adenosylmethionine sythetase, complete cds. | |
| 700379966H1 | g19500 | 44 | −36 | gb105pln | Lupinus polyphyllus lupin-specific pPLZ12 mRNA. | |
| 700343384H1 | g168421 | 77 | −59 | gb105pln | Maize auxin-binding protein (ABP) mRNA, complete cds. | |
| 700342705H1 | g1778373 | 22 | −11 | gb105pln | Pisum sativum glycine-rich RNA-binding protein PsGRBP mRNA, complete cds. | |
| 700345876H1 | g2244767 | 22 | −6 | gb105eukp | COP9 protein | |
| 700343719H1 | g1246841 | 30 | −12 | gb105eukp | G2827 | |
| 700347294H1 | g1184771 | 82 | −79 | gb105pln | Zea mays glyceraldehyde-3-phosphate dehydrogenase GAPC2 (gpc2) mRNA, | |
| | | | | | complete cds. | |
| 700344632H1 | g488198 | 20 | −3 | gb105eukp | ZC155.1 | |
| 700346915H1 | g1147599 | 7 | 4 | gb105eukp | dod; dodo | |
| 700345244H1 | g1916867 | 11 | 6 | gb105eukp | who; muscle development; WHO | |
| 700342529H1 | g22324 | 69 | −55 | gb105pln | Z. mays mRNA for H2B histone (clone cH2B221). | |
| 700380634H1 | g2306767 | 16 | 6 | gb105pln | Triticum aestivum eIF-2 beta subunit mRNA, complete cds. | |
| 700344884H1 | g289658 | 46 | −27 | gb105eukp | C50C3.6 protein | |
| 700347051H1 | g170343 | 12 | 4 | gb105pln | Nicotiana tabacum translation elongation factor EF-Tu gene, complete cds. | |
| 700380670H1 | g644492 | 58 | −58 | gb105pln | Corn elongation factor 1alpha gene, complete cds. | |
| 700342672H1 | g1322276 | 23 | −10 | gb105pln | Triticum aestivum histone H2A gene, complete cds. | |
| 700343564H1 | g1167953 | 8 | −1 | gb105eukp | putative 32.6 kDa jasmonate-induced protein | |
| 700380110H1 | g1397320 | 23 | −8 | gb105eukp | R08C7.3 | |
| 700346207H1 | g304153 | 13 | 3 | gb105allp | sorbitol dehydrogenase | |
| 700345346H1 | g529355 | 10 | 5 | gb105eukp | T12A2.4 | |
| 700342489H1 | g2662536 | 12 | 2 | gb105eukp | C05B10.1 | |
| 700346464H1 | g2081612 | 13 | 5 | gb105allp | deltal-pyrroline-5-carboxylate synthetase | |
| 700342934H1 | g2196671 | 62 | −49 | gb105pln | Z. mays mRNA for HMG protein. | |
| 700380180H1 | g1731990 | 21 | −11 | gb105eukp | Cxp; 2; serine carboxypeptidase II, CP-MII | |
| 700347227H1 | g451193 | 15 | −9 | gb105eukp | wali7 | |
| 700345819H1 | g1899026 | 24 | −35 | gb105pln | Zea mays superoxide dismutase 4A (sod4A) gene, complete cds. | |
| 700344370H1 | g2624327 | 35 | −22 | gb105pln | Oryza sativa mRNA for glycine rich RNA-binding protein 2 (OsGRP2). | |
| 700380434H1 | g166858 | 9 | −1 | gb105eukp | ribosomal protein | |
| 700344794H1 | g22328 | 31 | −24 | gb105pln | Maize mRNA for a high mobility group protein. | |
| 700347351H1 | g2341060 | 44 | −62 | gb105pln | Zea mays translational initiation factor eIF-4A (tif-4A3) mRNA, complete cds. | |
| 700344019H1 | g1737219 | 35 | −27 | gb105pln | Arabidopsis thaliana vacuolar sorting receptor homolog mRNA, complete cds. | |
| 700345876H1 | g530870 | 22 | −6 | gb105eukp | COP9 | |
| 700342531H1 | g1335861 | 35 | −20 | gb105pln | Glycine max clathrin heavy chain mRNA, complete cds. | |
| 700346048H1 | g304037 | 6 | 6 | gb105eukp | ENOD8; early nodulin | |
| 700343030H1 | g498774 | 42 | −47 | gb105pln | Z. mays (cv DH5xDH7) hsp70-5 mRNA for heat shock protein 70. | |
| 700342952H1 | g2689608 | 16 | 0 | gb105allp | UEV1Bs | |
| 700347238H1 | g167970 | 18 | −0 | gb105eukp | GST1 | |
| 700380563H1 | g2274983 | 26 | −32 | gb105pln | Hordeum vulgare mRNA for expressed sequence tag. | |
| 700380216H1 | g288062 | 30 | −22 | gb105pln | A. thaliana mRNA for ketol-acid reductoisomerase subunit. | |
| 700343406H1 | g939778 | 28 | −20 | gb105pln | Zea mays MADS-box protein (ZAG3) mRNA, complete cds. | |
| 700346201H1 | g22237 | 70 | −85 | gb105pln | Maize mRNA for cytosolic GAPDH (GapC) glyceraldehyde-3-phosphate dehydrogenase. | |
| 700343843H1 | g2330856 | 19 | −3 | gb105eukp | SPAC6F12.09; hypothetical protein | |
| 700343828H1 | g747916 | 98 | −86 | gb105pln | Z. mays CaM2 mRNA for calmodulin. | |
| 700346135H1 | g1136422 | 59 | −28 | gb105allp | KIAA0181 | |
| 700343652H1 | g493622 | 28 | −9 | gb105eukp | ACA1; chloroplast envelope Ca2+−ATPase precursor | |
| 700344145H1 | g169818 | 39 | −55 | gb105pln | Rice 25S ribosomal RNA gene. | |
| 700343953H1 | g968901 | 35 | −43 | gb105pln | Rice mRNA for ribosomal protein S8, complete cds. | |
| 700347075H1 | g2264302 | 11 | 14 | gb105pln | Arabidopsis thaliana genomic DNA, chromosome 5, P1 clone: MAC12, | |
| | | | | | complete sequence. | |
| 700342483H1 | g1066996 | 34 | −19 | gb105eukp | K03H1.2 | |
| 700344248H1 | g2708314 | 30 | −12 | gb105eukp | PDI; involved in the redox-regulated binding of chloroplast translational | |
| | | | | | activation; protein disulfide isomerase RB60; EC 5.3.4.1 | |
| 700346091H1 | g1136786 | 34 | −20 | gb105pln | Fission Yeast mRNA for elongation factor 1 alpha-C, complete cds. | |
| 700344358H1 | g2262105 | 21 | −8 | gb105eukp | T19F06.8 | |
| 700344220H1 | g22116 | 60 | −66 | gb105pln | Z. mays ZMACK2 mRNA for casein kinase II alpha subunit. | |
| 700342577H1 | g1405747 | 17 | −0 | gb105allp | PR264/SC35 | |
| 700380144H1 | g1881692 | 80 | −74 | gb105pln | Zea mays phosphoglucomutase mRNA, partial cds. | |
| 700343888H1 | g172559 | 11 | −4 | gb105eukp | Sec13; Sec13p | |
| 700346688H1 | g732814 | 48 | −33 | gb105pln | L. esculentum LeMA-1 mRNA for putative Mg-dependent ATPase 1. | |
| 700380653H1 | g168500 | 44 | −34 | gb105pln | Maize (Zea mays) histone H4 gene (H4C14), complete cds. | |
| 700342744H1 | g2791947 | 22 | −3 | gb105pln | Lupinus luteus mRNA for ribosomal protein L13a. | |
| 700344884H1 | g395157 | 6 | 7 | gb105eukp | PRP8; pre-mRNA splicing factor, U5 snRNP protein; PRP8 | |
| 700342583H1 | g1432053 | 56 | −45 | gb105pln | Oryza sativa asparagine synthetase mRNA, complete cds. | |
| 700347063H1 | g603808 | 38 | −24 | gb105eukp | STT3; STT3 protein | |
| 700345264H1 | g2706449 | 33 | −17 | gb105pln | Solanum tuberosum mRNA for magnesium dependent soluble inorganic pyrophosphatase. | |
| 700380449H1 | g1665777 | 8 | 7 | gb105allp | Similar to S. cerevisiae EMP70 protein precursor (S25110) | |
| 700347240H1 | g218088 | 59 | −61 | gb105pln | Rice mRNA for ribosomal protein 117 (249 gene), partial sequence. | |
| 700343328H1 | g2191188 | 28 | −1 | gb105eukp | A_TM021B04.12 | |
| 700345093H1 | g951335 | 75 | −65 | gb105pln | Oryza sativa protein phosphatase 1 mRNA, complete cds. | |
| 700380665H1 | g2145472 | 23 | −8 | gb105pln | S. tuberosum mRNA for aconitase/aconitate hydratase. | |
| 700347024H1 | g22106 | 74 | −67 | gb107pln | Maize mRNA for putative auxin binding protein. | |
| 700344314H1 | g2160155 | 32 | −19 | gb105pln | Sequence of BAC F21M12 from Arabidopsis thaliana chromosome 1, complete | |
| | | | | | sequence. | |
| 700344283H1 | g1022804 | 48 | −31 | gb105pln | Arabidopsis thaliana phosphoglycerate kinase mRNA, partial cds. | |
| 700379794H1 | g22324 | 43 | −4 | gb105pln | Z. mays mRNA for H2B histone (clone cH2B221). | |
| 700344273H1 | g1388084 | 14 | −5 | gb105eukp | TRX5; thioredoxin h | |
| 700343541H1 | g2832745 | 12 | 4 | gb105eukp | SPAC23H3.08c; hypothetical protein | |
| 700343041H1 | g450548 | 40 | −39 | gb105pln | O. sativa (pRSAM-1) gene for S-adenosyl methionine synthetase. | |
| 700342491H1 | g2108344 | 43 | −43 | gb105pln | Brassica campestris small GTP-binding protein Bsar1a (bsar1a) mRNA, complete cds. | |
| 700346851H1 | g313151 | 12 | 17 | gb105pln | A. thaliana ribosomal protein S15 mRNA, complete CDS. | |
| 700346436H1 | g557470 | 36 | 5 | gb105allp | similar to S. cerevisiae PMS1 Swiss-Prot Accession Number P14242, S. cerevisiae | |
| | | | | | MLH1 GenBank Accession Number U07187, E. coli MUTL Swiss-Prot Accession | |
| | | | | | Number P23367, Salmonella typhimurium MUTL Swiss-Prot Accession Number | |
| | | | | | P14161, Streptococcu> | |
| 700344740H1 | g303855 | 13 | −7 | gb105eukp | ribosomal protein L7A | |
| 700343377H1 | g825783 | 22 | 7 | gb105pln | Nicotiana tabacum ribosomal protein L41 mRNA, complete cds. | |
| 700345695H1 | g2662344 | 69 | −63 | gb105pln | Oryza sativa mRNA for EF-1 alpha, complete cds. | |
| 700281915H1 | g290275 | 30 | −5 | gb105eukp | M(3)95A; multifunctional activity and location; ribosomal protein S3/AP endonuclease | |
| | | | | | DNA repair protein | |
| 700347031H1 | g514945 | 96 | −42 | gb105pln | Zea mays sucrose synthase (Sus1) mRNA, complete cds. | |
| 700345418H1 | g1129084 | 27 | −11 | gb105pln | Wheat mRNA for protein H2A, complete cds, clone wcH2A-3. | |
| 700344337H1 | g2343181 | 19 | −6 | gb105eukp | MDL3; catalyzes dissociation of (R)-mandelonitrile to hydrogen cyanide and | |
| | | | | | benzaldehyde; (R)-(+)-mandelonitrile lyase isoform MDL3 precursor; EC 4.1.2.10 | |
| 700346017H1 | g2582061 | 65 | 2 | gb105allp | NADH dehydrogenase subunit 2 | |
| 700344147H1 | g2257480 | 21 | −7 | gb105pln | Yeast (Schizosaccharomyces pombe) 38 kb genomic DNA, clone 1750. | |
| 700343362H1 | g2109293 | 13 | 7 | gb105eukp | serine/threonine protein kinase | |
| 700342491H1 | g1549221 | 40 | −39 | gb105pln | Tobacco mRNA for NtSar1 protein, complete cds. | |
| 700342377H1 | g1008880 | 53 | −50 | gb105pln | Phaseolus vulgaris eukaryotic initiation factor 5 (eIF-5) gene, complete cds. | |
| 700342409H1 | g473604 | 87 | −80 | gb105pln | Zea mays W-22 histone H2B mRNA, complete cds. | |
| 700379682H1 | g2293565 | 31 | −13 | gb105pln | Oryza sativa ADP-ribosylation factor 1 (Os-ARF1) mRNA, complete cds. | |
| 700346263H1 | g1931636 | 16 | 1 | gb105pln | Arabidopsis thaliana BAC T19D16 genomic sequence. | |
| 700345614H1 | g2668747 | 56 | −49 | gb105pln | Zea mays ribosomal protein L17 (rp117) mRNA, complete cds. | |
| 700346435H1 | g1931655 | 7 | −1 | gb105eukp | T19D16.21; receptor-kinase isolog | |
| 700380548H1 | g1254995 | 19 | −1 | gb105pln | Arabidopsis thaliana serine/threonine protein phosphatase type 2A regulatory | |
| | | | | | subunit A mRNA, complete cds. | |
| 700344851H1 | g577818 | 14 | 1 | gb105pln | Z. mays gene for H2B histone (gH2B4). | |
| 700346944H1 | g927323 | 30 | −11 | gb105eukp | UBA2; Uba2p | |
| 700345948H1 | g2262135 | 23 | −2 | gb105pln | Arabidopsis thaliana BAC T10P11, complete sequence. | |
| 700281952H2 | g169792 | 41 | −46 | gb105pln | Rice histone 3 gene, complete cds. | |
| 700346795H1 | g857573 | 36 | −23 | gb105pln | Oryza sativa vacuolar H+-ATPase (vatp-P1) mRNA, complete cds. | |
| 700343710H1 | g312180 | 32 | −57 | gb105pln | Z. mays GapC4 gene. | |
| 700344743H1 | g2648022 | 8 | 4 | gb105allp | HKE2 | |
| 700342888H1 | g999189 | 44 | −32 | gb105pln | dihydrofolate reductase-thymidylate synthase = bifunctional enzyme [Glycine max, | |
| | | | | | seedling, mRNA, 1794 nt]. | |
| 700342483H1 | g1439562 | 20 | −8 | gb105eukp | cdc28; RNA-dependent ATPase/helicase; Cdc28p | |
| 700346252H1 | g899609 | 57 | −66 | gb105pln | Zea mays acidic ribosomal protein P2 (RPA-2A1) mRNA, complete cds. | |
| 700343951H1 | g2828147 | 8 | 7 | gb105allp | BC-2 protein | |
| 700345044H1 | g902524 | 86 | −14 | gb105pln | Zea mays clone MubG10 ubiquitin fusion protein gene, complete cds. | |
| 700343352H1 | g169363 | 26 | −7 | gb105eukp | PVPR3 | |
| 700342479H1 | g309418 | 17 | −4 | gb105allp | androgen-regulated protein | |
| 700346501H1 | g1129083 | 33 | −21 | gb105pln | Wheat mRNA for protein H2A, complete cds, clone wcH2A-2. | |
| 700342216H1 | g313135 | 24 | −4 | gb105pln | Z. mays mRNA for porin. | |
| 700344655H1 | g2394226 | 21 | 15 | gb105pln | Lycopersicon esculentum WD-40 repeat protein (LeMSI1) mRNA, complete cds. | |
| 700344162H1 | g2511530 | 21 | 5 | gb105pln | Eleusine indica alpha tubulin 1 (TUA1) mRNA, complete cds. | |
| 700347350H1 | g173231 | 18 | 2 | gb105pln | Yeast (Saccharomyces cerevisiae) ribosomal 5S RNA-binding protein (YL3) gene, 5′ cds. | |
| 700346607H1 | g2408094 | 8 | 2 | gb105allp | hypothetical protein | |
| 700342376H1 | g490094 | 62 | −34 | gb105allp | TIMP gene product | |
| 700344736H1 | g1203905 | 33 | −316 | gb105eukp | M(1)15D; M(1)15D | |
| 700346634H1 | g218088 | 38 | −28 | gb105pln | Rice mRNA for ribosomal protein 117 (249 gene), partial sequence. | |
| 700345391H1 | g170703 | 32 | −42 | gb105pln | Wheat gibberellin responsive protein gene, complete cds. | |
| 700344903H1 | g172235 | 12 | −2 | gb105eukp | PR12 | |
| 700343202H1 | g19867 | 6 | 7 | gb105eukp | extension (AA 1-620) | |
| 700342267H1 | g1184773 | 96 | −84 | gb105pln | Zea mays glyceraldehyde-3-phosphate dehydrogenase GAPC3 (gpc3) mRNA, | |
| | | | | | complete cds. | |
| 700346058H1 | g790507 | 91 | −80 | gb105pln | Z. mays mRNA for 60S acidic ribosomal protein. | |
| 700346017H1 | g2052363 | 65 | 2 | gb105allp | protein 2 | |
| 700345943H1 | g2582413 | 14 | 3 | gb105allp | STE20-like kinase 3 | |
| 700345637H1 | g172423 | 23 | −6 | gb105pln | Yeast (Saccharomyces cerevisiae) ribosomal protein L1 gene, complete cds. | |
| 700345286H1 | g22292 | 88 | −73: | gb105pln | Z. mays mRNA for glycine-rich protein. | |
| 700343655H1 | g463856 | 32 | −23 | gb105pln | Chlamydomonas reinhardtii 21 gr ribosomal protein S14 (CRY1) gene, complete cds. | |
| 700379970H1 | g170746 | 40 | −6 | gb105pln | Wheat histone H4 TH091 gene, complete cds. | |
| 700345462H1 | g311906 | 29 | −16 | gb105pln | N. tabacum mRNA for ras-related GTP-binding protein. | |
| 700346541H1 | g488574 | 29 | —13 | gb105pln | Medicago sativa Regen S clone pH3c130 histone H3.2 mRNA, complete cds. | |
| 700346446H1 | g17738 | 16 | −4 | gb105eukp | beta-1,3-glucanase homologue | |
| 700346196H1 | g1136119 | 77 | −64 | gb105pln | O. sativa mRNA for alpha-tubulin (clone OSTA-111). | |
| 700344859H1 | g2351560 | 11 | 8 | gb105allp | spindle assembly checkpoint protein Mad2p | |
| 700343858H1 | g1857256 | 10 | 4 | gb105eukp | mudrAzc; MURAZC | |
| 700380093H1 | g1045304 | 26 | −20 | gb105pln | Zea mays acetyl-coenzyme A carboxylase mRNA, complete cds. | |
| 700342577H1 | g455419 | 17 | 1 | gb105allp | PR264/SC35 | |
| 700346952H1 | g2760173 | 18 | −3 | gb105pln | Arabidopsis thaliana genomic DNA, chromosome 5, P1 clone: MYH19, complete | |
| | | | | | sequence. | |
| 700345168H1 | g2467274 | 8 | 6 | gb105eukp | SPBC16E9.12c; rna binding protein | |
| 700344443H1 | g2641637 | 10 | 16 | gb105pln | Arabidopsis thaliana DnaJ homolog AtJ3 (ATJ3) gene, complete cds. | |
| 700344032H1 | g2245031 | 22 | 17 | gb105pln | Arabidopsis thaliana DNA chromosome 4, ESSA I contig fragment No. 7. | |
| 700379782H1 | g2264307 | 17 | 14 | gb105pln | Arabidopsis thaliana genomic DNA, chromosome 5, P1 clone: MED24, | |
| | | | | | complete sequence. | |
| 700346305H1 | g287628 | 48 | −8 | gb105eukp | YS29A; ribosomal protein YS29 | |
| 700346718H1 | g19280 | 40 | −32 | gb105pln | L. esculentum mRNA for enolase. | |
| 700342420H1 | g169792 | 32 | −44 | gb105pln | Rice histone 3 gene, complete cds. | |
| 700346066H1 | g976256 | 57 | −45 | gb105pln | Rice mRNA stearyl-ACP desaturase, complete cds. | |
| 700344527H1 | g872116 | 29 | −8 | gb105eukp | sti; sti (stress inducible protein) | |
| 700343316H1 | g163103 | 45 | −21 | gb105allp | glutaminyl cyclase | |
| 700343921H1 | g2828278 | 18 | −16 | gb105pln | Arabidopsis thaliana DNA chromosome 4, BAC clone T18B16 (ESSAII project). | |
| 700344193H1 | g204070 | 14 | 5 | gb105allp | electron transfer flavoprotein alpha-subunit | |
| 700342640H1 | g157944 | 43 | −19 | gb105eukp | Mhc | |
| 700379925H1 | g2264302 | 10 | 16 | gb105pln | Arabidopsis thaliana genomic DNA, chromosome 5, P1 clone: MAC12, complete | |
| | | | | | sequence. | |
| 700346723H1 | g466687 | 19 | −1 | gb105pln | Arabidopsis thaliana genomic DNA, chromosome 5, P1 clone: MAC12, complete | |
| | | | | | sequence. | |
| 700345538H1 | g218099 | 25 | −10 | gb105pln | Rice mRNA for ribosomal protein S12 (320 gene), partial sequence. | |
| 700345772H1 | g699510 | 13 | −4 | gb105eukp | M(1)1B; minute(1)1B protein; minute(1)1B | |
| 700347383H1 | g992962 | 21 | −2 | gb105eukp | thioredoxin | |
| 700345824H1 | g599624 | 46 | −34 | gb105pln | A. thaliana mRNA for aconitase (ZAPII). | |
| 700345262H1 | g168460 | 63 | −51 | gb105pln | Zea mays cyclophilin (CyP) mRNA, complete cds. | |
| 700380535H1 | g310932 | 45 | −43 | gb105pln | Nicotiana tabacum ribosomal protein L17 mRNA, complete cds. | |
| 700379760H1 | g2494128 | 14 | −10 | gb105eukp | T1G11.12 | |
| 700346073H1 | g1928865 | 45 | −29 | gb105pln | Triticum aestivum root abundant protein mRNA, complete cds. | |
| 700344038H1 | g218133 | 19 | 6 | gb105pln | Rice mRNA for Ribosomal protein L32. | |
| 700346623H1 | g556685 | 35 | −14 | gb105pln | Z. mays mRNA for ADP-ribosylation factor. | |
| 700346703H1 | g514319 | 24 | −8 | gb105pln | Arabidopsis thaliana RNA polymerase II third largest subunit gene, | |
| | | | | | complete cds. | |
| 700344138H1 | g2193870 | 11 | 7 | gb105allp | reverse transcriptase | |
| 700346243H1 | g31415 | 25 | −9 | gb105allp | fibulin-1 A | |
| 700344036H1 | g514945 | 100 | −34 | gb105pln | Zea mays sucrose synthase (Sus1) mRNA, complete cds. | |
| 700343654H1 | g142464 | 12 | 3 | gb105allp | ribosomal protein L17 | |
| 700379937H1 | g248338 | 98 | −85 | gb105pln | polyubiquitin [maize, Genomic, 3439 nt]. | |
| 700379658H1 | g2739218 | 52 | −37 | gb105pln | Hordeum vulgare S28 ribosomal protein. | |
| 700347254H1 | g170746 | 50 | −50 | gb105pln | Wheat histone H4 TH091 gene, complete cds. | |
| 700342844H1 | g18140 | 14 | 13 | gb105pln | C. rubrum mRNA for light-induced 34 kD protein. | |
| 700342237H1 | g1906600 | 10 | −4 | gb105eukp | mepB; MepB | |
| 700379902H1 | g1016347 | 23 | 2 | gb105eukp | DCUP; uroporphyrinogen decarboxylase; EC 4.1.1.37 | |
| 700344653H1 | g1325967 | 32 | 11 | gb105pln | T. aestivum histone H2A gene (clone TH274). | |
| 700342736H1 | g2564336 | 24 | −5 | gb105pln | Brassica campestris mRNA for Tat binding protein 1, complete cds. | |
| 700346641H1 | g2276367 | 14 | 0 | gb105allp | 60s ribosomal protein | |
| 700281848H2 | g218130 | 38 | −11 | gb105pln | Rice mRNA for Ribosomal protein S15. | |
| 700346872H1 | g1184107 | 15 | 3 | gb105allp | DNA replication initiator protein | |
| 700345668H1 | g1045254 | 20 | −7 | gb105eukp | RPL30B | |
| 700342651H1 | g1402874 | 27 | −0 | gb105pln | A. thaliana 81 kb genomic sequence. | |
| 700342216H1 | g1256258 | 21 | 1 | gb105pln | Spinacia oleracea voltage-dependent anion channel protein (SVDAC1) mRNA, | |
| | | | | | complete cds. | |
| 700380432H1 | g2264305 | 12 | 15 | gb105pln | Arabidopsis thaliana genomic DNA, chromosome 5, P1 clone: MBK23, complete | |
| | | | | | sequence. | |
| 700344133H1 | g22314 | 82 | −85 | gb105pln | Maize mRNA for GSH gluthathione S-transferase I (GST; EC 2.5.1.18). | |
| 700343440H1 | g2245113 | 40 | −18 | gb105eukp | glycerol-3-phosphate permease homolog | |
| 700345959H1 | g1675393 | 24 | −24 | gb105pln | Oryza sativa class III ADH enzyme (AdhIII) gene, complete cds. | |
| 700342529H1 | g577824 | 40 | −41 | gb105pln | Z. mays gene for H2B histone (gH2B3). | |
| 700345562H1 | g493590 | 61 | −55 | gb105pln | Hordeum vulgare disulfide isomerase (PDI) mRNA, 3′ end. | |
| 700346211H1 | g453692 | 11 | 0 | gb105allp | AT hook 1 from AA 98-106, AT hook 2 from AA 129-137, AT hook 3 from AA | |
| | | | | | 154-162, AT hook 4 from AA 192-200 | |
| 700345460H1 | g545211 | 41 | −18 | gb105eukp | nda4+ | |
| 700281828H2 | g248336 | 37 | −64 | gb105pln | polyubiquitin [maize, Genomic, 3841 nt]. | |
| 700343485H1 | g1181672 | 62 | −35 | gb105pln | Sorghum bicolor heat shock protein 70n cognate (hsc70) mRNA, partial cds. | |
| 700380064H1 | g387908 | 38 | −22 | gb105pln | Brassica rapa S-phase-specific (BIS289) mRNA, complete cds. | |
| 700343320H1 | g1230676 | 15 | 12 | gb105pln | Yeast (Saccharomyces cerevisiae) chromosome XVI cosmid 9513. | |
| 700281846H2 | g2414629 | 12 | 4 | gb105eukp | SPAC2C4.18; hypothetical protein | |
| 700347246H1 | g286001 | 9 | 3 | gb105allp | KIAA0005 | |
| 700346494H1 | g2342735 | 24 | −13 | gb105eukp | T14G11.28 | |
| 700344228H1 | g1325967 | 13 | 4 | gb105pln | T. aestivum histone H2A gene (clone TH274). | |
| 700344052H1 | g486248 | 22 | −9 | gb105pln | Yeast (Saccharomyces cerevisiae) chromosome XI reading frame ORF YKL145w. | |
| 700343982H1 | g1326067 | 33 | 0 | gb105allp | MaxiK potassium channel beta subunit | |
| 700344916H1 | g310932 | 35 | −26 | gb105pln | Nicotiana tabacum ribosomal protein L17 mRNA, complete cds. | |
| 700343122H1 | g777757 | 63 | −33 | gb105pln | Saccharum hybrid (clone SCUBI561) polyubiquitin mRNA, complete cds. | |
| 700379629H1 | g416256 | 15 | 12 | gb105pln | Rice mRNA for H+-ATPase, partial sequence. | |
| 700344637H1 | g2190276 | 26 | −10 | gb105eukp | alpha-glucosidase; EC 3.2.1.20 | |
| 700347336H1 | g2149018 | 19 | −1 | gb105pln | Oryza sativa putative ADP-glucose pyrophosphorylase subunit SH2 and | |
| | | | | | putative NADPH-dependent reductase A1 genes, complete cds. | |
| 700345527H1 | g21794 | 66 | −54 | gb105pln | Wheat histone H4 gene. | |
| 700347353H1 | g2511530 | 76 | −72 | gb105pln | Eleusine indica alpha tubulin 1 (TUA1) mRNA, complete cds. | |
| 700346111H1 | g2511573 | 16 | −23 | gb105pln | Arabidopsis thaliana mRNA for proteasome subunit prc3. | |
| 700342384H1 | g1685071 | 20 | 0 | gb105allp | ribosomal protein S5 | |
| 700342465H1 | g466439 | 26 | −4 | gb105allp | 40 kDa ribosomal protein | |
| 700379754H1 | g17484 | 11 | 8 | gb105allp | Tumor protein | |
| 700343901H1 | g2662313 | 68 | −65 | gb105pln | Hordeum vulgare mRNA for bpw3, complete cds. | |
| 700345476H1 | g2276367 | 25 | −10 | gb105eukp | SPBC30D10.18c; 60s ribosomal protein | |
| 700343165H1 | g1786197 | 13 | 2 | gb105allp | DnaJ protein | |
| 700345087H1 | g1872162 | 40 | −29 | gb105pln | Arabidopsis thaliana DnaJ homolog (atj) mRNA, complete cds. | |
| 700344865H1 | g2511530 | 42 | −33 | gb105pln | Eleusine indica alpha tubulin 1 (TUA1) mRNA, complete cds. | |
| 700346017H1 | g2582057 | 65 | 2 | gb105allp | NADH dehydrogenase subunit 2 | |
| 700345490H1 | g1419459 | 18 | −14 | gb105eukp | mei-1; T01G9.5 | |
| 700343719H1 | g595415 | 30 | −12 | gb105eukp | sec27; betaprime COP | |
| 700342733H1 | g547390 | 33 | −26 | gb105pln | Arabidopsis thaliana TRAP mRNA, partial cds. | |
| 700342459H1 | g644492 | 74 | −66 | gb105pln | Corn elongation factor 1alpha gene, complete cds. | |
| 700344147H1 | g4899 | 21 | −7 | gb105pln | Yeast (Schizosaccharomyces pombe) act1 gene for actin. | |
| 700342296H1 | g36049 | 24 | −1 | gb105allp | precursor | |
| 700347076H1 | g529357 | 22 | −14 | gb105eukp | T12A2.2 | |
| 700344374H1 | g168423 | 56 | −55 | gb105pln | Zea mays polypeptide chain-binding protein mRNA, 3′ end. | |
| 700343176H1 | g2760325 | 9 | 6 | gb105eukp | F1N21.10 | |
| 700345875H1 | g1435156 | 50 | −35 | gb105pln | L. esculentum mRNA for histone H3 variant H3.3. | |
| 700347009H1 | g166680 | 15 | 5 | gb105allp | protein kinase | |
| 700344093H1 | g310322 | 26 | −37 | gb105pln | Oryza sativa triosephosphate isomerase (Rictipi2) gene, exons 1-9. | |
| 700345454H1 | g1405747 | 10 | 5 | gb105allp | PR264/SC35 | |
| 700344805H1 | g2570506 | 47 | −35 | gb105pln | Oryza sativa ribosomal protein mRNA, complete cds. | |
| 700342238H1 | g2264306 | 13 | 16 | gb105pln | Arabidopsis thaliana genomic DNA, chromosome 5, P1 clone: MBK 5, complete | |
| | | | | | sequence. | |
| 700346388H1 | g168508 | 16 | 11 | tgb105pln | Maize oleosin KD18 (KD18; L2) gene, complete cds. | |
| 700346290H1 | g170455 | 47 | −31 | gb105pln | Tomato heat shock cognate protein 80 gene, 3′ end. | |
| 700345178H1 | g1617015 | 19 | 8 | gb105eukp | ribonucleotide reductase RNR1 like protein | |
| 700345677H1 | g2827001 | 56 | −42 | gb105pln | Triticum aestivum 70 kDa heat shock protein (TaHSP70d) mRNA, complete cds. | |
| 700344859H1 | g1806617 | 12 | 6 | gb10allp | spindle assembly checkpoint component | |
| 700343477H1 | g2352928 | 33 | −10 | gb105pln | Petroselinum crispum plastidic chorismate mutase 1 (pCM1) mRNA, nuclear gene | |
| | | | | | encoding plastid protein, partial cds. | |
| 700344687H1 | g1431629 | 26 | −16 | gb105eukp | pectinacetylesterase precursor | |
| 700343829H1 | g22328 | 55 | −39 | gb105pln | Maize mRNA for a high mobility group protein. | |
| 700346012H1 | g498761 | 26 | −3 | gb105eukp | YBR0320 | |
| 700345807H1 | g2230869 | 91 | 5 | gb105allp | ferritin L-chain | |
| 700343150H1 | g1045057 | 6 | 7 | gb105allp | ch-TOG | |
| 700347130H1 | g2293568 | 43 | 2 | gb105eukp | HvB12D homolog | |
| 700344204H1 | g2645162 | 18 | −1 | gb105pln | Oryza sativa mRNA, similar to initiation factor eIF-4c. | |
| 700344001H1 | g21800 | 42 | 11 | gb105pln | T. aestivum L mRNA for histone H2B. | |
| 700346845H1 | g2564003 | 22 | 0 | gb105allp | proteasome p45/SUG | |
| 700342427H1 | g303856 | 46 | −27 | gb105pln | Rice mRNA for ubiquitin protein fused to a ribosomal protein, complete cds. | |
| 700380712H1 | g21800 | 40 | −39 | gb105pln | T. aestivum L mRNA for histone H2B. | |
| 700380518H1 | g1906825 | 27 | −13 | gb105pln | A. thaliana hsp81.2 gene. | |
| 700347132H1 | g644491 | 77 | −16 | gb105pln | Corn mRNA for elongation factor 1A. | |
| 700345410H1 | g2505874 | 50 | −26 | gb105eukp | putative kinase | |
| 700347257H1 | g303858 | 49 | −41 | gb105pln | Rice mRNA for brain specific protein (S94 gene), complete cds. | |
| 700347040H1 | g2317855 | 15 | 3 | gb105eukp | MMS2; provides resistance to DNA damaging agents; Mms2p | |
| 700344195H1 | g1663702 | 25 | 7 | gb105allp | KIAA0243 | |
| 700343925H1 | g6634 | 16 | 5 | gb105eukp | B0464.1 | |
| 700343863H1 | g1122316 | 41 | −2 | gb105pln | P. glaucum mRNA for heat shock protein, HSP 17.9. | |
| 700342583H1 | g984261 | 89 | −74 | gb105pln | Z. mays mRNA for aspargine synthetase. | |
| 700342858H1 | g2429087 | 9 | −3 | gb105eukp | LoxC; lipoxygenase 2; EC 1.13.11.12 | |
| 700345556H1 | g1160445 | 6 | 6 | gb105allp | ribosomal protein S7 | |
| 700343778H1 | g170373 | 24 | −23 | gb105pln | Tomato 5-enolpyruvylshikimate-3-phosphate synthase mRNA, complete cds. | |
| 700346013H1 | g497629 | 15 | 4 | gb105allp | ERD1 protein | |
| 700343942H1 | g515376 | 67 | −60 | gb105pln | L. temulentum mRNA for histone H4. | |
| 700343142H1 | g2832611 | 27 | −3 | gb105pln | Arabidopsis thaliana DNA chromosome 4, BAC clone F13C5 (ESSAII project). | |
| 700346426H1 | g1134968 | 10 | 6 | gb105eukp | protein disulphide isomerase PDI; EC 5.3.4.1 | |
| 700343158H1 | g2351062 | 21 | 13 | gb105pln | Arabidopsis thaliana genomic DNA, chromosome 5, P1 clone: MAH20. | |
| 700343495H1 | g1519248 | 22 | −4 | gb105pln | Oryza sativa GF14-b protein mRNA, complete cds. | |
| 700343131H1 | g1561732 | 9 | 6 | gb105eukp | Reg-2; Dreg-2 protein | |
| 700343804H1 | g556872 | 9 | 1 | gb105eukp | sen3 | |
| 700346056H1 | g1707641 | 28 | −13 | gb105pln | O. sativa mRNA for leucine rich repeat receptor-like kinase. | |
| 700343928H1 | g1469218 | 45 | −36 | gb105pln | B. oleracea mRNA (unknown). | |
| 700343684H1 | g1122778 | 9 | −1 | gb105eukp | C10C5.5 | |
| 700346979H1 | g409072 | 18 | 2 | gb105allp | HBp15/L22 | |
| 700342862H1 | g168460 | 77 | −13 | gb105pln | Zea mays cyclophilin (CyP) mRNA, complete cds. | |
| 700345459H1 | g2760844 | 14 | 8 | gb105eukp | F18A8.14 | |
| 700346427H1 | g2829889 | 20 | −7 | gb105eukp | F3I6.29 | |
| 700343516H1 | g780371 | 51 | −56 | gb105pln | Oryza sativa enolase mRNA, complete cds. | |
| 700347326H1 | g780371 | 54 | −43 | gb105pln | Oryza sativa enolase mRNA, complete cds. | |
| 700346944H1 | g1835684 | 30 | −11 | gb105eukp | PIP2; Pip2p | |
| 700344961H1 | g2244785 | 31 | −8 | gb105eukp | hypothetical protein | |
| 700345333H1 | g1928865 | 38 | −14 | gb105pln | Triticum aestivum root abundant protein mRNA, complete cds. | |
| 700343543H1 | g2194125 | 34 | −19 | gb105eukp | F20P5.12 | |
| 700281860H2 | g886737 | 57 | −10 | gb105pln | Z. mays histone H3 gene. | |
| 700343430H1 | g899609 | 68 | −78 | gb105pln | Zea mays acidic ribosomal protein P2 (RPA-2A1) mRNA, complete cds. | |
| 700345668H1 | g1644321 | 28 | −11 | gb105eukp | SPAC6G9.09c; hypothetical protein | |
| 700344095H1 | g1041767 | 50 | −45 | gb105pln | Acer pseudoplatanus V-ATPase 66 kDa subunit mRNA, partial cds. | |
| 700344276H1 | g565064 | 27 | −7 | gb105pln | Arabidopsis thaliana pyruvate dehydrogenase E1 beta subunit mRNA, complete cds. | |
| 700343804H1 | g763271 | 9 | 1 | gb105eukp | SEN3; Sen3p | |
| 700345087H1 | g454913 | 41 | −31 | gb105pln | A. porrum LDJ2 mRNA. | |
| 700342537H1 | g2662346 | 77 | −65 | gb105pln | Oryza sativa mRNA for EF-1 alpha, complete cds. | |
| 700345588H1 | g22681 | 43 | −33 | gb105pln | L. usitatissimum mRNA for Stearoyl-(acyl-carrier-protein)desaturase. | |
| 700379660H1 | g798817 | 26 | −16 | gb105pln | A. thaliana mRNA for ribosomal protein L2. | |
| 700343012H1 | g21800 | 41 | −41 | gb105pln | T. aestivum L mRNA for histone H2B. | |
| 700346413H1 | g836939 | 17 | −14 | gb105pln | Arabidopsis thaliana calcium-dependent protein kinase (CDPK6) mRNA, complete cds. | |
| 700343836H1 | g289658 | 54 | −29 | gb105eukp | C50C3.6 protein | |
| 700342738H1 | g2239150 | 37 | −49 | gb105pln | N. tabacum mRNA for CHLD magnesium chelatase subunit. | |
| 700342393H1 | g30377 | 43 | −31 | gb105allp | cytokeratin 13 | |
| 700342321H1 | g1256265 | 25 | −11 | gb105allp | protein kinase C inhibitor | |
| 700343350H1 | g531055 | 38 | −22 | gb105pln | Wheat mRNA for protein H2B-6, complete cds. | |
| 700343020H1 | g1575548 | 11 | −4 | gb105allp | methoxy mycolic acid synthase 3 | |
| 700344951H1 | g1519248 | 53 | −48 | gb105pln | Oryza sativa GF14-b protein mRNA, complete cds. | |
| 700281817H2 | g 602761 | 10 | 3 | gb105allp | RecA protein | |
| 700380417H1 | g600115 | 11 | 7 | gb105pln | Z. mays apx gene encoding cytosolic ascorbate peroxidase. | |
| 700380043H1 | g2244901 | 12 | 13 | gb105pln | Arabidopsis thaliana DNA chromosome 4, ESSA I contig fragment No. 4. | |
| 700346045H1 | g167116 | 24 | −21 | gb105pln | B. napus plastid 60- kDa chaperonin-60 beta-polypeptide (cpn-60 beta) mRNA, | |
| | | | | | partial cds. | |
| 700379982H1 | g1395177 | 19 | 6 | gb105allp | proteasomal ATPase (rat SUG1) | |
| 700379957H1 | g940843 | 14 | −1 | gb105eukp | orf 06116 | |
| 700343253H1 | g1546918 | 70 | −80 | gb105pln | Z. mays mRNA for translation initiation factor 5A. | |
| 700347254H1 | g21794 | 47 | −48 | gb105pln | Wheat histone H4 gene. | |
| 700345454H1 | g63752 | 10 | 6 | gb105allp | PR 264 | |
| 700343489H1 | g168602 | 74 | −45 | gb105pln | Zea mays regulatory protein GF14-12 mRNA, complete cds. | |
| 700347121H1 | g469147 | 54 | −52 | gb105pln | H. vulgare mRNA for alanine aminotransferase. | |
| 700344805H1 | g463251 | 28 | −10 | gb105pln | M. sativa (Nagyszenasi) mRNA for ribosomal protein RL5. | |
| 700346057H1 | g22324 | 68 | −57 | gb105pln | Z. mays mRNA for H2B histone (clone cH2B221). | |
| 700281810H2 | g2529427 | 24 | 0 | gb105eukp | rpc10+; rpc10; EC 2.7.7.6 | |
| 700346469H1 | g22324 | 51 | −44 | gb105pln | Z. mays mRNA for H2B histone (clone cH2B221). | |
| 700343233H1 | g2388937 | 23 | −8 | gb105eukp | SPAC23H4.18c; hypothetical protein | |
| 700379926H1 | g218000 | 32 | −33 | gb105pln | Potato mRNA for UDP-glucose pyrophosphorylase (EC 2.7.7.9). | |
| 700343651H1 | g1498052 | 60 | −56 | gb105pln | Zea mays ribosomal protein S8 mRNA, complete cds. | |
| 700343740H1 | g1769895 | 11 | −1 | gb105eukp | CaLB protein | |
| 700346342H1 | g489431 | 13 | 4 | gb105allp | PP4X | |
| 700346421H1 | g473604 | 24 | −14 | gb105pln | Zea mays W-22 histone H2B mRNA, complete cds. | |
| 700343233H1 | g2388937 | 23 | −8 | gb105eukp | SPAC23H4.18c; hypothetical protein | |
| 700379926H1 | g218000 | 32 | −33 | gb105pln | Potato mRNA for UDP-glucose pyrophosphorylase (EC 2.7.7.9). | |
| 700343651H1 | g1498052 | 60 | −56 | gb105pln | Zea mays ribosomal protein S8 mRNA, complete cds. | |
| 700343740H1 | g1769895 | 11 | −1 | gb105eukp | CaLB protein | |
| 700346342H1 | g489431 | 13 | 4 | gb105allp | PP4X | |
| 700346421H1 | g473604 | 24 | −14 | gb105pln | Zea mays W-22 histone H2B mRNA, complete cds. | |
| 700344366H1 | g557681 | 59 | −48 | gb105pln | Z. mays mRNA for ribosomal protein S28. | |
| 700346364H1 | g217973 | 33 | −56 | gb105pln | Zea mays gene for triosephosphate isomerase, complete cds. | |
| 700343550H1 | g886450 | 14 | 5 | gb105allp | F54C9.5 | |
| 700343649H1 | g168490 | 59 | −54 | gb105pln | Maize glutathione S-transferase (GST-I) mRNA, complete cds. | |
| 700342582H1 | g2326453 | 15 | 1 | gb105eukp | GPxha-1; glutathione peroxidase; EC 1.11.1.9 | |
| 700342545H1 | g2351689 | 18 | −5 | gb105eukp | ap51-3; cytoadherence to epithelial cell surface; adhesin protein AP51-3 | |
| 700346785H1 | g1542940 | 27 | −27 | gb105pln | R. sativus L. (Saxa knacker) AACT mRNA. | |
| 700343562H1 | g683683 | 18 | −6 | gb105eukp | NOP1; nucleolar protein NOP1 (J05230); D2870 | |
| 700379854H1 | g2264312 | 17 | 5 | gb105pln | Arabidopsis thaliana genomic DNA, chromosome 5, P1 clone: MOK16, | |
| | | | | | complete sequence. | |
| 700344330H1 | g1255448 | 25 | −7 | gb105eukp | ATMEKK1; mitogen-activated protein kinase | |
| 700343363H1 | g2791948 | 21 | −8 | gb105eukp | rp113a; ribosomal protein L13a | |
| 700344794H1 | g397395 | 33 | −25 | gb105pln | Z. mays MNB1b mRNA for DNA-binding protein. | |
| 700380220H1 | g456671 | 40 | −30 | gb105pln | T. aestivum VDAC 1 mRNA. | |
| 700343584H1 | g1181332 | 46 | −44 | gb105pln | Z. mays CRH mRNA. | |
| 700343836H1 | g395157 | 6 | 7 | gb105eukp | PRP8; pre-mRNA splicing factor, U5 snRNP protein; PRP8 | |
| 700343156H1 | g35087 | 8 | 7 | gb105allp | neurite outgrowth-promoting protein | |
| 700343035H1 | g817954 | 13 | 7 | gb105allp | DMR-N9 | |
| 700345251H1 | g1272409 | 23 | −2 | gb105pln | Vicia faba immunophilin precursor (FKBP15) mRNA, complete cds. | |
| 700343562H1 | g1495012 | 20 | −6 | gb105eukp | T01C3.7 | |
| 700379601H1 | g20255 | 42 | −20 | gb105pln | O. sativa gene for heat shock protein 82 HSP82. | |
| 700345452H1 | g1064884 | 34 | −21 | gb105pln | A. thaliana mRNA for phosphoribosyl pyrophosphate synthetase II. | |
| 700347011H1 | g2326453 | 17 | 7 | gb105allp | glutathione peroxidase | |
| 700343686H1 | g2078349 | 30 | −24 | gb105pln | Solanum tuberosum transaldolase (PotTall) mRNA, complete cds. | |
| 700379932H1 | g2827529 | 29 | −6 | gb105eukp | F8F16.160; putative protein | |
| 700345425H1 | g22119 | 84 | −25 | gb105pln | Maize Adh1-F mRNA for alcohol dehydrogenase. | |
| 700344903H1 | g2760323 | 57 | −34 | gb105eukp | F1N21.8 | |
| 700281960H2 | g2398526 | 20 | −4 | gb105pln | Arabidopsis thaliana mRNA for Hap3a transcription factor. | |
| 700380440H1 | g1463028 | 21 | 6 | gb105allp | voltage dependent anion channel 3 | |
| 700343928H1 | g2584827 | 28 | −7 | gb105pln | Sequence of BAC F12F1 from Arabidopsis thaliana chromosome 1, complete | |
| | | | | | sequence. | |
| 70034388H1 | g1277236 | 13 | −5 | gb105eukp | SEC13; Sec13p | |
| 700343842H1 | g189306 | 7 | 6 | gb105allp | nucleolin | |
| 700344231H1 | g168502 | 47 | −38 | gb105pln | Maize (Zea mays) histone H4 gene (H4C7), complete cds. | |
| 700347240H1 | g310932 | 43 | −29 | gb105pln | Nicotiana tabacum ribosomal protein L17 mRNA, complete cds. | |
| 700345257H1 | g297172 | 13 | 6 | gb105allp | ribosomal protein S7 | |
| 700342308H1 | g1498385 | 82 | −73 | gb105pln | Zea mays actin (Maz87) gene, partial cds. | |
| 700344746H1 | g1244565 | 23 | −30 | gb105pln | Triticum aestivum acetyl-CoA carboxylase gene, exons 1-30, complete cds. | |
| 700380443H1 | g435648 | 34 | −43 | gb105pln | Rice mRNA for gamma-Tip, complete cds. | |
| 700346005H1 | g57710 | 28 | 3 | gb105allp | ribosomal phosphoprotein P1 (AA 1-114) | |
| 700342288H1 | g2463332 | 17 | −6 | gb105pln | Oryza sativa mRNA for M79 protein. | |
| 700346875H1 | g2098816 | 17 | 8 | gb105pln | Arabidopsis thaliana BAC F19G10, complete sequence. | |
| 700380479H1 | g311297 | 14 | 8 | gb105allp | ribosomal protein S24 | |
| 700346069H1 | g292443 | 40 | −9 | gb105allp | ribosomal protein S20 | |
| 700345334H1 | g968901 | 23 | 7 | gb105pln | Rice mRNA for ribosomal protein S8, complete cds. | |
| 700345103H1 | g485952 | 39 | −40 | gb105pln | O. sativa mRNA for glutaredoxin | |
| 700379829H1 | g303852 | 64 | −61 | gb105pln | Rice mRNA for ribosomal protein L3, complete cds. | |
| 700379665H1 | g600115 | 30 | −12 | gb105pln | Z. mays apx gene encoding cytosolic ascorbate peroxidase. | |
| 700346902H1 | g899609 | 60 | −44 | gb105pln | Zea mays acidic ribosomal protein P2 (RPA-2A1) mRNA, complete cds. | |
| 700344648H1 | g506470 | 39 | −28 | gb105pln | N. tabacum mRNA pNLA-35. | |
| 700343016H1 | g303499 | 19 | −3 | gb105pln | Arabidopsis thaliana Atpk7 gene encoding serine/threonine protein kinase. | |
| 700379974H1 | g927571 | 93 | −78 | gb105pln | Z. mays mRNA for calreticulin precursor. | |
| 700379985H1 | g218160 | 35 | −17 | gb105pln | Oryza sativa mRNA for elongation factor 1 beta′. | |
| 700346636H1 | g577824 | 24 | −25 | gb105pln | Z. mays gene for H2B histone (gH2B3). | |
| 700345741H1 | g32101 | 71 | −20 | gb105allp | hinge protein precursor (AA-13 to 78) | |
| 700343295H1 | g2842492 | 15 | −1 | gb105eukp | F21O9.180; protein kinase Xa21 homolog | |
| 700346621H1 | g2627180 | 28 | −29 | gb105pln | Pisum sativum mRNA for cycloartenol synthase, complete cds. | |
| 700345281H1 | g168460 | 68 | −61 | gb105pln | Zea mays cyclophilin (CyP) mRNA, complete cds. | |
| 700343920H1 | g625108 | 48 | −8 | gb105eukp | YLR388W; Ylr388wp | |
| 700346645H1 | g623207 | 12 | −1 | gb105eukp | mrp-3; ribosomal protein | |
| 700344742H1 | g293888 | 75 | −69 | gb105pln | Zea mays, glyceraldehyde-3-phosphate dehydrogenase mRNA, 3′ end (clone GAPC2). | |
| 700344702H1 | g416146 | 79 | “67 | gb105pln | Zea mays beta-6 tubulin (tub6) gene and mRNA, complete cds. | |
| 700347351H1 | g397632 | 37 | −33 | gb105pln | T. aestivum translation initiation factor 4A. | |
| 700344742H1 | g22302 | 47 | −76 | gb105pln | Maize Gpcl gene for glyceraldehyde-3-phosphate dehydrogenase (GADPH) subunit C. | |
| 700347171H1 | g1420235 | 16 | 5 | gb105allp | ORF YOR077w | |
| 700345696H1 | g717191 | 64 | 2 | gb105allp | RNA polymerase II subunit | |
| 700344840H1 | g1899026 | 24 | −35 | gb105pln | Zea mays superoxide dismutase 4A (sod4A) gene, complete cds. | |
| 700347034H1 | g1568479 | 12 | 15 | gb105pln | B. vulgaris partial cdc2-related protein kinase gene. | |
| 700343559H1 | g440952 | 23 | −10 | gb105pln | cytochrome cl [Solanum tuberosum = potatoes, Desiree, monohaploid line AM 80/5793, | |
| | | | | | Genomic, 6007 nt]. | |
| 700379985H1 | g218340 | 37 | −19 | gb105pln | Triticum aestivum mRNA for elongation factor 1 beta′. | |
| 700380481H1 | g2276360 | 10 | 4 | gb105allp | Gpilp | |
| 700347327H1 | g2702261 | 12 | 13 | gb105pln | Arabidopsis thaliana chromosome II BAC T21L14 genomic sequence, complete | |
| | | | | | sequence. | |
| 700344893H1 | g2331133 | 6 | 6 | gb105allp | glycine-rich protein | |
| 700281841H2 | g2511530 | 67 | −70 | gb105pln | Eleusine indica alpha tubulin 1 (TUA1) mRNA, complete cds. | |
| 700346250H1 | g683475 | 19 | −22 | gb105pln | H. vulgare mRNA for NADPH-protochlorophyllide oxidoreducatase. | |
| 700345508H1 | g1208445 | 18 | 15 | gb105pln | Rice (YK426) mRNA, complete cds. | |
| 700345988H1 | g1632830 | 31 | −5 | gb105pln | R. communis mRNA (unknown). | |
| 700344542H1 | g551625 | 7 | 6 | gb105allp | protease II | |
| 700346067H1 | g349403 | 15 | 17 | gb105pln | Brassica campestris (clone lambda CGN1-2) napin gene, complete cds. | |
| 700343248H1 | g722325 | 26 | 2 | gb105pln | Zea mays clone Zm-Rab2-A GTP binding protein (rab2) mRNA, complete cds. | |
| 700346664H1 | g20255 | 70 | −57 | gb105pln | O. sativa gene for heat shock protein 82 HSP82. | |
| 700344430H1 | g577824 | 26 | −27 | gb105pln | Z. mays gene for H2B histone (gH2B3). | |
| 700342230H1 | g758339 | 34 | −16 | gb105pln | S. tuberosum mRNA for 76 kDa mitochondrial complex I subunit. | |
| 700380552H1 | g182514 | 26 | 1 | gb105allp | ferritin light chain | |
| 700343045H1 | g1850559 | 12 | 4 | gb105allp | macrophage migration inhibitory factor | |
| 700342420H1 | g21796 | 34 | −44 | gb105pln | Wheat histone H3 gene. | |
| 700380280H1 | g536073 | 12 | −8 | gb105eukp | ORF YBL049w | |
| 700346634H1 | g310932 | 35 | −24 | gb105pln | Nicotiana tabacum ribosomal protein L17 mRNA, complete cds. | |
| 700344925H1 | g450292 | 91 | −75 | gb105pln | Zea mays alpha-tubulin mRNA, complete cds. | |
| 700343339H1 | g1177435 | 18 | 4 | gb105allp | 14.5 kDa translational inhibitor protein, p14.5 | |
| 700342208H1 | g790507 | 17 | −14 | gb105pln | Z. mays mRNA for 60S acidic ribosomal protein. | |
| 700346380H1 | g2182266 | 21 | 5 | gb105pln | Hordeum vulgare lipoxygenase (LoxB) mRNA, complete cds. | |
| 700343542H1 | g1652223 | 6 | 8 | gb105allp | ABC1-like | |
| 700343834H1 | g1100222 | 34 | −18 | gb105pln | Pinus sylvestris chloroplast AND+-dependent glyceraldehyde-3-phosphate dehydrogenase | |
| | | | | | mRNA, complete cds. | |
| 700344184H1 | g606969 | 31 | −15 | gb105pln | Arabidopsis thaliana cytoplasmic ribosomal protein L18 mRNA, complete cds. | |
| 700342724H1 | g2104681 | 13 | 4 | gb105allp | transcription factor | |
| 700346988H1 | g171596 | 15 | 0 | gb105eukp | D-fructose-6-phosphate amidotransferase (EC 2.6.1.16) | |
| 700344273H1 | g992962 | 13 | −5 | gb105eukp | thioredoxin | |
| 700343165H1 | g216441 | 13 | 2 | gb105allp | dnaJ protein | |
| 700346475H1 | g170107 | 15 | 8 | gb105eukp | CPN10; chaperonin 10 | |
| 700344396H1 | g415316 | 30 | −6 | gb105pln | Rice mRNA for acidic ribosomal protein PO, complete cds. | |
| 700343919H1 | g577824 | 69 | −81 | gb105pln | Z. mays gene for H2B histone (gH2B3). | |
| 700343330H1 | g218180 | 54 | −43 | gb105pln | Rice mRNA for oryzain alpha (EC 3.4.22). | |
| 700380171H1 | g293902 | 11 | −1 | gb105eukp | Zea mI | |
| 700343550H1 | g173232 | 13 | 5 | gb105eukp | YL3; 5S ribosomal RNA binding-protein | |
| 700346117H1 | g2814799 | 27 | −14 | gb105eukp | ZK858.6 | |
| 700345577H1 | g407800 | 24 | 6 | gb105pln | G. hirsutum mRNA for ribosomal protein 41, large subunit (RL41). | |
| 700346655H1 | g1703576 | 7 | 7 | gb105eukp | C43E11.1 | |
| 700346080H1 | g8394 | 10 | 0 | gb105eukp | pum | |
| 700344205H1 | g218088 | 37 | −67 | gb105pln | Rice mRNA for ribosomal protein 117 (249 gene), partial sequence. | |
| 700343645H1 | g22651 | 39 | −26 | gb105pln | H. vulgare mRNA for GRP94 homologue. | |
| 700380194H1 | g829024 | 25 | −6 | gb105allp | ATPase | |
| 700345346H1 | g189979 | 6 | 8 | gb105allp | protein kinase C alpha-polypeptide | |
| 700343918H1 | g493590 | 59 | −53 | gb105pln | Hordeum vulgare disulfide isomerase (PDI) mRNA, 3′ end. | |
| 700342440H1 | g2606079 | 25 | −27 | gb105eukp | ribosomal L15 (YL10) protein homologue | |
| 700342858H1 | g532572 | 11 | −1 | gb105eukp | LoxA; lipoxygenase 1; EC 1.13.11.12; linoleate:oxygen oxioreductase, lipoxidase, | |
| | | | | | carotene oxidase | |
| 700345913H1 | g4392 | 14 | −1 | gb105eukp | RPL37A; ribosomal protein L37a | |
| 700344274H1 | g1652418 | 9 | 5 | gb105allp | 30S ribosomal protein S17 | |
| 700342350H1 | g1429215 | 12 | 6 | gb105eukp | peroxidase ATP6a; EC 1.11.1.7 | |
| 700347166H1 | g1107484 | 20 | 1 | gb105pln | A. thaliana mRNA for 40S ribosomal protein S15. | |
| 700346101H1 | g551482 | 12 | 7 | gb105pln | Zea mays ABA- and ripening-inducible-like protein mRNA, complete cds. | |
| 700344977H1 | g1321740 | 17 | 7 | gb105eukp | B0035.3 | |
| 700343587H1 | g21234 | 21 | −8 | gb105eukp | AHRI; acetohydroxy acid reductoisomerase; EC 1.1.1.86 | |
| 700344527H1 | g172766 | 15 | 0 | gb105eukp | heat shock protein STGI1 | |
| 700342367H1 | g902583 | 35 | −47 | gb105pln | Zea mays clone MubG1 ubiquitin gene, complete cds. | |
| 700379908H1 | g642243 | 19 | −2 | gb105pln | H. vulgare cdr29 gene. | |
| 700345771H1 | g2444419 | 35 | −21 | gb105pln | Glycine max ribosome-associated protein p40 mRNA, complete cds. | |
| 700379782H1 | g2739218 | 39 | −10 | gb105pln | Hordeum vulgare S28 ribosomal protein. | |
| 700346629H1 | g218180 | 21 | −13 | gb105pln | Rice mRNA for oryzain alpha (EC 3.4.22). | |
| 700346571H1 | g1292907 | 25 | −11 | gb105pln | Arabidopsis thaliana GTP binding protein (ARAC1) mRNA, complete cds. | |
| 700343743H1 | g949877 | 34 | −38 | gb105pln | H. vulgare mRNA for elongation factor 1-alpha. | |
| 700281813H2 | g2244971 | 21 | −3 | gb105eukp | hypothetical protein | |
| 700345113H1 | g391875 | 25 | −3 | gb105eukp | 40S subunit ribosomal protein | |
| 700345622H1 | g1420686 | 17 | −4 | gb104eukp | RPL18B | |
| 700345023H1 | g927567 | 17 | −2 | gb105eukp | actin | |
| 700345016H1 | g1806139 | 33 | 3 | gb105pln | M. sativa mRNA for cdc2 kinase homologue, cdc2MsC. | |
| 700345946H1 | g2440191 | 25 | −12 | gb105eukp | hypothetical protein | |
| 700344907H1 | g21800 | 26 | −30 | gb105pln | T. aestivum L mRNA for histone H2B. | |
| 700342886H1 | g1237101 | 27 | −9 | gb105pln | Arabidopsis thaliana calmodulin-binding protein mRNA, complete cds. | |
| 700281887H2 | g1498052 | 72 | −58 | gb105pln | Zea mays ribosomal protein S8 mRNA, complete cds. | |
| 700347158H1 | g857573 | 39 | −16 | gb105pln | Oryza sativa vacuolar H+-ATPase (vatp-P1) mRNA, complete cds. | |
| 700344612H1 | g602605 | 100 | −86 | gb105pln | Zea mays tandem genes for alpha1-tubulin and alpha2-tubulin. | |
| 700346284H1 | g2668737 | 30 | −32 | gb105pln | Zea mays translation initiation factor 5A (TIF5A) mRNA, complete cds. | |
| 700346255H1 | g1065461 | 10 | 8 | gb105eukp | B0403.4 | |
| 700379664H1 | g170053 | 43 | −35 | gb105pln | Soybean ribosomal protein S11 mRNA, 3′ end. | |
| 700345809H1 | g168500 | 12 | 15 | gb105pln | Maize (Zea mays) histone H4 gene (H4C14), complete cds.) | |
| 700344746H1 | g1469247 | 28 | −29 | gb105pln | H. vulgare mRNA for acetyl-CoA carboxylase. | |
| 700344621H1 | g1244773 | 22 | −7 | gb105eukp | RPL37A; Rp137ap: 60S ribosomal protein L37a | |
| 700345943H1 | g2370557 | 15 | 5 | gb105eukp | SPAC9G1.09; serine threonine protein kinase | |
| 700344522H1 | g1419684 | 35 | −19 | gb105pln | M. sativa mRNA for TCTP-like protein. | |
| 700342427H1 | g347063 | 38 | −21 | gb105pln | Brassica rapa ubiquitin/ribosomal protein mRNA, complete cds. | |
| 700379623H1 | g2245073 | 14 | 4 | gb105pln | Arabidopsis thaliana DNA chromosome 4, ESSA I contig fragment No. 8. | |
| 700343411H1 | g2102693 | 17 | −2 | gb105eukp | Frk2; fructokinase; EC 2.7.1.4 | |
| 700343947H1 | g1089832 | 5 | 5 | gb105allp | T05H10.1 | |
| 700342772H1 | g2599103 | 27 | −15 | gb105pln | Dunaliella saline 60S ribosomal protein (DSRP1) mRNA, complete cds. | |
| 700343649H1 | g168486 | 68 | −67 | gb105pln | Maize glutathione S-transferase gene (GST-I), exon 1. | |
| 700343244H1 | g2224750 | 56 | −41 | gb105pln | Arabidopsis thaliana mRNA for ribosomal protein S6. | |
| 700345594H1 | g293886 | 61 | −73 | gb105pln | Zea mays glyceraldehyde-3-phosphate dehydrogenase mRNA, 3′ end, (clone GAPC3). | |
| 700345568H1 | g2244950 | 20 | 0 | gb105pln | Arabidopsis thaliana DNA chromosome 4, ESSA I contig fragment No. 5. | |
| 700343804H1 | g1055066 | 12 | −1 | gb105eukp | C23G10.4b | |
| 700343380H1 | g1915974 | 23 | −6 | gb105eukp | FK; fructokinase; EC 2.7.1.4 | |
| 700343009H1 | g1154953 | 30 | −41 | gb105pln | T. aestivum histone H2A gene. | |
| 700379794H1 | g577824 | 25 | −6 | gb105pln | Z. mays gene for H2B histone (gH2B3). | |
| 700342372H1 | g168496 | 63 | −67 | gb105pln | Maize (Zea mays) histone H3 gene (H3C4), complete cds. | |
| 700342409H1 | g531057 | 51 | −36 | gb105pln | Wheat mRNA for protein H2B-8, complete cds. | |
| 700345862H1 | g1617270 | 20 | −6 | gb105eukp | acyl-CoA synthetase; EC 6.2.1.3 | |
| 700344005H1 | g2827001 | 49 | −24 | gb105pln | Triticum aestivum 70 kDa heat shock protein (TaHSP70d) mRNA, complete cds. | |
| 700343844H1 | g1185553 | 36 | −76 | gb105pln | Zea mays glyceraldehyde-3-phosphate dehydrogenase (gpc2) gene, complete cds. | |
| 700342637H1 | g453244 | 10 | 6 | gb105allp | catechol O-methyltransferase | |
| 700347328H1 | g22328 | 45 | −20 | gb105pln | Maize mRNA for a high mobility group protein. | |
| 700346116H1 | g299814 | 21 | −17 | gb105pln | tuber-induction gene {3′ region} [Solanum tuberosum = potatoes, cv. Desiree, | |
| | | | | | leaves, mRNA Partial, 950 nt]. | |
| 700342841H1 | g1165205 | 36 | −21 | gb105pln | Arabidopsis thaliana multiubiquitin chain binding protein (MBP1) mRNA, complete cds. | |
| 700344710H1 | g2760173 | 34 | −20 | gb105pln | Arabidopsis thaliana genomic DNA, chromosome 5, P1 clone: MYH19, complete sequence. | |
| 700379728H1 | g436782 | 42 | −39 | gb105pln | Rice mRNA for cyc07, complete cds. | |
| 700345556H1 | g551251 | 6 | 6 | gb105allp | ribosomal protein S7 | |
| 700346687H1 | g1843628 | 35 | −10 | gb105eukp | bsh; SNF5 homolog BSH | |
| 700345690H1 | g35597 | 13 | 3 | gb105allp | PR 264 | |
| 700344201H1 | g1143506 | 9 | 6 | gb105pln | L. luteus mRNA for P0 ribosomal protein. | |
| 700342826H1 | g1498052 | 91 | −75 | gb105pln | Zea mays ribosomal protein S8 mRNA, complete cds. | |
| 700344331H1 | g1418971 | 22 | 2 | gb105pln | H. vulgare mRNA for transcription factor EmBP-1. | |
| 700342584H1 | g2632156 | 25 | −18 | gb105pln | Aspergillus niger mRNA for ribosomal protein L15. | |
| 700346682H1 | g20163 | 40 | −21 | gb105pln | O. sativa Rr15 mRNA for 5S ribosomal RNA. | |
| 700344378H1 | g1185553 | 37 | −72 | gb105pln | Zea mays glyceraldehyde-3-phosphate dehydrogenase (gpc2) gene, complete cds. | |
| 700343079H1 | g1945609 | 9 | 7 | gb105allp | 26S proteasome subunit p44.5 | |
| 700346835H1 | g1628588 | 16 | −0 | gb105pln | Yeast (Candida albicans) glyceraldehyde-3-phosphate dehydrogenase (CaGAP) gene, | |
| | | | | | complete cds. | |
| 700346319H1 | g22469 | 66 | −64 | gb105pln | Maize mRNA for cytoplasmic ribosomal protein S11. | |
| 700380780H1 | g1495250 | 20 | −4 | gb105pln | A. thaliana mRNA for heat-shock protein. | |
| 700380547H1 | g1546918 | 54 | −64 | gb105pln | Z. mays mRNA for translation initiation factor 5A. | |
| 700380179H1 | g1129084 | 25 | −7 | gb105pln | Wheat mRNA for protein H2A, complete cds, clone wcH2A-3. | |
| 700346829H1 | g1718497 | 48 | −21 | gb105eukp | ARP3; actin-related protein 3 | |
| 700347001H1 | g1906825 | 55 | −46 | gb105pln | A. thaliana hsp81.2 gene. | |
| 700346325H1 | g2654121 | 36 | −25 | gb105pln | Arabidopsis thaliana ribosomal protein L23a (AtrpL23a) mRNA, complete cds. | |
| 700343515H1 | g2501849 | 43 | −38 | gb105pln | Nicotiana tabacum GDP dissociation inhibitor (GDI) mRNA, complete cds. | |
| 700380181H1 | g289757 | 8 | 5 | gb105eukp | ZK353.1 protein | |
| 700346063H1 | g395071 | 15 | 14 | gb105pln | V. faba guanine nucleotide regulatory protein mRNA, complete CDS. | |
| 700342301H1 | g1747418 | 84 | −87 | gb105pln | Z. mays mRNA for eukaryotic initiation factor-5. | |
| 700344234H1 | g2529657 | 16 | −3 | gb105pln | Arabidopsis thaliana chromosome II BAC T30B22 genomic sequence, complete | |
| | | | | | sequence. | |
| 700343577H1 | g2408043 | 42 | −18 | gb105eukp | SPAC29B12.01; hypothetical protein | |
| 700346831H1 | g1666176 | 23 | −1 | gb105pln | N. tabacum mRNA for subunit of NADH:ubiquinone oxidoreductase complex I. | |
| 700346665H1 | g1895083 | 72 | −58 | gb105pln | Zea mays golgi associated protein se-wap41 mRNA, complete cds. | |
| 700343521H1 | g1161311 | 25 | −27 | gb105pln | Arabidopsis thaliana Columbia myo-inositol-1-phosphate synthase mRNA, complete cds. | |
| 700342668H1 | g2668747 | 67 | −51 | gb105pln | Zea mays ribosomal protein L17 (rp117) mRNA, complete cds. | |
| 700346851H1 | g1107484 | 11 | 17 | gb105pln | A. thaliana mRNA for 40S ribosomal protein S15. | |
| 700379988H1 | g1419367 | 24 | −1 | gb105pln | Z. mays ZmABP2 mRNA for actin depolymerizing factor. | |
| 700346058H1 | g899609 | 93 | −82 | gb105pln | Zea mays acidic ribosomal protein P2 (RPA-2A1) mRNA, complete cds. | |
| 700345524H1 | g170099 | 42 | −30 | gb105pln | Spinach betaine-aldehyde dehydrogenase (BADH) mRNA, complete cds. | |
| 700347358H1 | g312178 | 38 | −79 | gb105pln | Z. mays GapC2 gene. | |
| 700345212H1 | g21624 | 37 | −26 | gb105pln | S. vulgare mRNA for glycine-rich RNA-binding protein (clone S2). | |
| 700281969H2 | g2098816 | 10 | 16 | gb105pln | Arabidopsis thaliana BAC F19G10, complete sequence | |
| 700343050H1 | g2842494 | 49 | −30 | gb105eukp | F21O9.200; prohibitin-like protein | |
| 700380548H1 | g683505 | 19 | −1 | gb105pln | A. thaliana gene for 65 kDa regulatory subunit of protein phosphatase 2A. | |
| 700342366H1 | g1419369 | 68 | −62 | gb105pln | Z. mays ZmABP3 mRNA for actin depolymerizing factor. | |
| 700342722H1 | g474832 | 10 | 16 | gb105pln | S. commersonii mRNA for stearoyl-acyl carrier protein desaturase. | |
| 700346272H1 | g1592812 | 13 | 2 | gb105allp | 22 kDa polypeptide | |
| 700343821H1 | g1255684 | 28 | −12 | gb105pln | Rice mRNA for aspartic protease, complete cds. | |
| 700343142H1 | g2766714 | 25 | −1 | gb105pln | Arabidopsis arenosa isolate Care-1(9509) chromomethylase (CMT1) mRNA, | |
| | | | | | partical cds. | |
| 700344717H1 | g2832679 | 32 | −17 | gb104eukp | T10I14.120; putative protein | |
| 700346327H1 | g639494 | 13 | 3 | gb105pln | Zea mays Mu3 transposon in alcohol dehydrogenase (adh1) gene. | |
| 700345243H1 | g1771779 | 16 | −12 | gb105pln | S. tuberosum mRNA for ubiquitin extension protein. | |
| 700342376H1 | g189382 | 62 | −34 | gb105allp | collagenase inhibitor | |
| 700345805H1 | g1694673 | 16 | 2 | gb105allp | proton-ATPase-like protein | |
| 700347239H1 | g1632830 | 20 | 12 | gb105pln | R. communis mRNA (unknown). | |
| 700343842H1 | g1009363 | 14 | 7 | gb105eukp | RGP-3 | |
| 700345262H1 | g829147 | 72 | −61 | gb105pln | Z. mays gene for cyclophilin. | |
| 700345823H1 | g2511690 | 21 | −1 | gb105pln | Phaseolus vulgaris Moldavian encoding cysteine proteinase precursor (clone cp41). | |
| 700343884H1 | g2760844 | 34 | −18 | gb105eukp | F18A8.14 | |
| 700347048H1 | g312180 | 41 | −14 | gb104pln | Z. mays GapC4 gene. | |
| 700347168H1 | g2160155 | 39 | −23 | gb105pln | Sequence of BAC F21M12 from rabidopsis thaliana chromosome 1, complete sequence. | |
| 700344916H1 | g2459406 | 38 | −29 | gb105pln | Arabidopsis thaliana chromosome II BAC F4P9 genomic sequence, complete sequence. | |
| 700343223H1 | g1841501 | 53 | −68 | gb105pln | Z. mays mRNA for glutathione-dependent formaldehyde dehydrogenase. | |
| 700346914H1 | g22272 | 13 | 3 | gb105pln | Maize mRNA for enolase (2-phospho-D-glycerate hydrolase). | |
| 700347341H1 | g558053 | 24 | −3 | gb105pln | Aox1 = alternative oxidase {alternative pathyway} [Nicotiana tabacum = tobacco, | |
| | | | | | cv Bright Yellow, suspension cells, mRNA, 1408 nt]. | |
| 700379729H1 | g416146 | 46 | −35 | gb105pln | Zea mays beta-6 tubulin (tub6) gene and mRNA, complete cds. | |
| 700343618H1 | g20255 | 47 | −22 | gb105pln | O. sativa gene for heat shock protein 82 HSP82. | |
| 700343401H1 | g169820 | 22 | −20 | gb105pln | Oryza sativa triosephosphate isomerase (Rictpi) mRNA, complete cds. | |
| 700379827H1 | g289212 | 48 | −45 | gb105pln | Atriplex nummularia homologous sequence (ANJ1) mRNA. | |
| 700346970H1 | g507278 | 23 | −11 | gb105eukp | involved in cell wall degradation; EC 2.3.1.23 | |
| 700346506H1 | g1845194 | 23 | −43 | gb105pln | Z. mays mRNA for HMGc1 protein. | |
| 700342503H1 | g1136574 | 34 | −35 | gb105pln | Sorghum bicolor heat shock protein 70 (hsp70) pseudogene. | |
| 700379631H1 | g2253156 | 19 | −7 | gb105allp | Ran_GTP binding protein 5 | |
| 700344627H1 | g1181672 | 76 | −63 | gb105pln | Sorghum bicolor heat shock protein 70 cognate (hsc70) mRNA, partial cds. | |
| 700380044H1 | g2301167 | 9 | 2 | gb105allp | unnamed protein product | |
| 700347095H1 | g532816 | 6 | 7 | gb105allp | similar to S. cerevisiae hypothetical 240.3 kd protein in MSH3 3′ region | |
| 700347066H1 | g1765899 | 19 | 5 | gb105eukp | Spot 3 protein | |
| 700346111H1 | g2570504 | 21 | −38 | gb105pln | Oryza sativa proteasome component mRNA, complete cds. | |
| 700345518H1 | g2852444 | 16 | 11 | gb105pln | Salix bakko mRNA for SUI1 homolog, complete cds. | |
| 700344853H1 | g304153 | 8 | 5 | gb105allp | sorbitol dehydrogenase | |
| 700343543H1 | g2264304 | 14 | 8 | gb105pln | Arabidopsis thaliana genomic DNA, chromosome 5, P1 clone: MBG8, complete sequence. | |
| 700343719H1 | g1167801 | 42 | −25 | gb105eukp | F38E11.5 | |
| 700380141H1 | g306451 | 42 | 2 | gb105allp | alpha-tubulin | |
| 700281928H2 | g1086831 | 15 | −10 | gb105eukp | F10E7.7 | |
| 700342268H1 | g532097 | 5 | 6 | gb105allp | weakly similar to S. cerevisiae hypothetical 24.1 kd protein in APN1 3′ region | |
| 700380186H1 | g218176 | 28 | −35 | gb105pln | Rice mRNA for 21kd polypeptide. | |
| 700344889H1 | g170106 | 12 | 14 | gb105pln | Spinach chaperonin 10 (CPN10) mRNA, complete cds. | |
| 700343624H1 | g22324 | 32 | −30 | gb1054pln | Z. mays mRNA for H2B histone (clone cH2B221). | |
| 700346361H1 | g1841869 | 26 | −13 | gb105pln | Pimpinella brachycarpa elongation factor 1-beta (EF-1-beta) mRNA, complete cds. | |
| 700345644H1 | g22277 | 77 | −64 | gb105pln | Maize mRNA for ferritin (clone FM2). | |
| 700346379H1 | g559004 | 32 | −11 | gb105pln | Nicotiana tabacum ascorbate peroxidase (APX) mRNA, complete cds. | |
| 700343746H1 | g1469187 | 8 | 7 | gb105allp | The KIAA0132 gene product is related to Drosophila melanogaster ring canel protein. | |
| 700281968H2 | g1276967 | 11 | −16 | gb105eukp | putative ribosomal protein | |
| 700345450H1 | g599624 | 30 | −2 | gb105pln | A. thaliana mRNA for aconitase (ZAPII). | |
| 700344132H1 | g405882 | 10 | 3 | gb105allp | yeiK | |
| 700345572H1 | g166857 | 34 | −18 | gb105pln | Arabidopsis thaliana cytoplasmic ribosomal protein mRNA, complete cds. | |
| 700380217H1 | g170432 | 14 | 13 | gb105pln | Tomato ATP-dependent protease (CD4A) gene, complete cds. | |
| 700344613H1 | g1754684 | 37 | 0 | gb105eukp | ribosomal protein S23 | |
| 700342902H1 | g168500 | 41 | −52 | gb105pln | Maize (Zea mays) histone H4 gene (H4C14), complete cds. | |
| 700346064H1 | g2688818 | 10 | 5 | gb105allp | Int-6 | |
| 700344548H1 | g2257755 | 51 | −64 | gb105pln | Zea mays nucleolar histone deacetylase HD2-p39 mRNA, complete cds. | |
| 700281952H2 | g940017 | 41 | −45 | gb105pln | Oryza sativa histone H3 gene, complete cds. | |
| 700380796H1 | g533473 | 40 | −30 | gb105pln | Mesembryanthemum crystallinum 2-phospho-D-glycerate hydrolase, enolase, mRNA, | |
| | | | | | complete cds. | |
| 700379736H1 | g886739 | 16 | −10 | gb105pln | Z. mays histone H4 gene. | |
| 700346981H1 | g398605 | 30 | −13 | gb105pln | A. thaliana gene for elongation factor 1 beta. | |
| 700343365H1 | g2668745 | 57 | −49 | gb105pln | Zea mays inorganic pyrophosphatase (IPP) mRNA, complete cds. | |
| 700342484H1 | g1495213 | 12 | 7 | gb105eukp | L1339/SOF1; L1339/SOF1 protein L18-like | |
| 700343618H1 | g170455 | 46 | −21 | gb105pln | Tomato heat shock cognate protein 80 gene, 3′ end. | |
| 700346430H1 | g1185553 | 19 | 5 | gb105pln | Zea mays glyceraldehyde-3-phosphate dehydrogenase (gpc2) gene, | |
| | | | | | complete cds. | |
| 700345943H1 | g1430822 | 12 | 4 | gb105allp | Ste20-like kinase | |
| 700343159H1 | g2213540 | 36 | −8 | gb105eukp | chloroplast DNA-binding protein PD3 | |
| 700380779H1 | g857573 | 38 | −27 | gb105pln | Oryza sativa vacuolar H+-ATPase (vatp-P1) mRNA, complete cds. | |
| 700346118H1 | g520596 | 15 | 3 | gb105eukp | MRE2; Mre2 protein | |
| 700343713H1 | g732951 | 18 | −4 | gb105eukp | SSM1b | |
| 700342483H1 | g2317715 | 36 | −21 | gb105eukp | helD; HelD | |
| 700344603H1 | g182405 | 80 | −44 | gb105allp | farnesyl pyrophosphate synthetase | |
| 700342830H1 | g1546918 | 78 | −76 | gb105pln | Z. mays mRNA for translation initiation factor 5A. | |
| 700342420H1 | g168505 | 32 | −49 | gb105pln | Zea mays histone H3 gene, complete cds. | |
| 700345391H1 | g1877218 | 60 | −50 | gb105pln | H. vulgare mRNA for serine carboxypeptidase III, CP-MIII. | |
| 700344633H1 | g2114206 | 22 | −44 | gb105pln | Rice DNA for glutaredoxin, complete cds. | |
| 700281986H2 | g1946354 | 8 | 16 | gb105pln | Arabidopsis thaliana chromosome II BAC T06B20 genomic sequence, complete | |
| | | | | | sequence. | |
| 700346048H1 | g1009720 | 6 | 6 | gb105eukp | ENOD8; nodulin | |
| 700346829H1 | g563346 | 42 | −18 | gb105eukp | actin-like protein | |
| 700346719H1 | g2852444 | 17 | −10 | gb105pln | Salix bakko mRNA for SUI1 homolog, complete cds. | |
| 700347031H1 | g459894 | 96 | −42 | gb105pln | Zea mays sus1 gene, complete cds. | |
| 700345564H1 | g1263159 | 23 | −22 | gb105pln | O. sativa DNA for LRK2 gene. | |
| 700344116H1 | g950052 | 22 | −25 | gb105pln | H. vulgare mRNA for HMG1/2-like protein. | |
| 700343713H1 | g1370456 | 18 | −4 | gb105eukp | SSM1 | |
| 700342385H1 | g1632831 | 12 | 7 | gb105eukp | orf | |
| 700281860H2 | g168492 | 63 | 12 | gb105pln | Corn histone H3 (H3C3) gene, complete cds. | |
| 700346535H1 | g1519250 | 46 | −32 | gb105pln | Oryza sativa GF14-c protein mRNA, complete cds. | |
| 700344632H1 | g1199863 | 20 | −3 | gb105eukp | NEX-1; calcium dependent lipid-binding protein; NEX1 annexin | |
| 700343627H1 | g166931 | 22 | 11 | gb105pln | A. thaliana ubiquitin extension protein (UBQ2) gene, complete cds. | |
| 700380168H1 | g2388661 | 49 | −33 | gb105pln | Lolium perenne cinnamyl alcohol dehydrogenase mRNA, complete cds. | |
| 700345605H1 | g2407800 | 26 | −5 | gb105eukp | H2Av; histone H2A.F/Z | |
| 700344696H1 | g205858 | 16 | 8 | gb105allp | CDS is longest ORF of a cDNA clone which hybridizes to a 1.2 kb transcript present | |
| | | | | | at higher levels in the ventral prostate of 3-day castrate than in normal rats | |
| 700346007H1 | g2827552 | 7 | 4 | gb105eukp | T12H17.140; predicted protein | |
| 700346303H1 | g2341023 | 21 | 3 | gb105pln | Sequence of BAC F19P19 from Arabidopsis thaliana chromosome 1, complete sequence. | |
| 700344965H1 | g2465923 | 19 | −4 | gb105eukp | RKF1; receptor-like serine/threonine kinase | |
| 700342556H1 | g1402874 | 11 | 9 | gb105pln | A. thaliana 81 kb genomic sequence. | |
| 700343710H1 | g1184775 | 56 | −42 | gb105pln | Zea mays glyceraldehyde-3-phosphate dehydrogenase GAPC4 (gpc4) mRNA, | |
| | | | | | complete cds. | |
| 700344327H1 | g1747418 | 51 | −71 | gb105pln | Z. mays mRNA for eukaryotic initiation factor-5. | |
| 700379624H1 | g950052 | 25 | −31 | gb105pln | H. vulgare mRNA for HMG1/2-like protein. | |
| 700345312H1 | g1785621 | 18 | −7 | gb105eukp | putative serine/threonine protein kinase; AtPK2324 | |
| 700346839H1 | g1707370 | 17 | 6 | gb105eukp | RSp41; splicing factor | |
| 700346681H1 | g397274 | 19 | 4 | gb105allp | Tonoplast intrinsic protein | |
| 700380593H1 | g168462 | 37 | −40 | gb105pln | Zea mays defective suppressor-mutator from the brittle-1-mutable allele. | |
| 700346025H1 | g1825645 | 38 | −17 | gb105eukp | F46F11.4 | |
| 700345985H1 | g556559 | 33 | −17 | gb105pln | Rice mRNA for homologue of Tat binding protein, complete cds. | |
| 700345946H1 | g289658 | 47 | −26 | gb105eukp | C50C3.6 protein | |
| 700343878H1 | g2668743 | 62 | −29 | gb105pln | Zea mays ubiquitin conjugating enzyme (UBC) mRNA, complete cds. | |
| 700380569H1 | g2407800 | 24 | −1 | gb105eukp | H2Av; histone H2A.F/Z | |
| 700342869H1 | g56492 | 8 | 3 | gb105allp | insulin-degrading enzyme | |
| 700281872H2 | g511665 | 58 | −3 | gb105pln | Rice gene for aspartic protease, complete cds. | |
| 700345785H1 | g1469187 | 7 | 6 | gb105allp | The KIAA0132 gene product is related to Drosophila melanogaster ring canel protein. | |
| 700342554H1 | g1296666 | 22 | 8 | gb105allp | Sec23 protein | |
| 700379824H1 | g1044912 | 27 | 6 | gb105eukp | ribonucleotide reductase R2 | |
| 700342862H1 | g829147 | 96 | −24 | gb105pln | Z. mays gene for cyclophilin. | |
| 700345055H1 | g1041674 | 74 | −40 | gb105pln | Z. mays mRNA for V-type H+-ATPase, clone 16-2. | |
| 700344290H1 | g2345153 | 76 | −73 | gb105pln | Zea mays ribsomal protein S4 (rps4) mRNA, complete cds. | |
| 700343350H1 | g473604 | 27 | −23 | gb105pln | Zea mays W-22 histone H2B mRNA, complete cds. | |
| 700345155H1 | g1498486 | 22 | 6 | gb105allp | thioredoxin reductase | |
| 700379770H1 | g2760173 | 40 | −12 | gb105pln | Arabidopsis thaliana genomic DNA, chromosome 5, P1 clone: MYH19, | |
| | | | | | complete sequence. | |
| 700346549H1 | g2330821 | 13 | 6 | gb105allp | hypothetical protein | |
| 700281968H2 | g1669623 | 15 | −6 | gb105eukp | ribosomal protein L39 | |
| 700342220H1 | g1129084 | 43 | −34 | gb105pln | Wheat mRNA for protein H2A, complete cds, clone wcH2A-3. | |
| 700345821H1 | g1550813 | 86 | −67 | gb105pln | Z. mays mRNA for acidic robosomal protein P0. | |
| 700345008H1 | g1834353 | 10 | 5 | gb105eukp | 194; hypothetical protein 194 | |
| 700346979H1 | g161631 | 14 | 1 | gb105eukp | 217 g protein | |
| 700344804H1 | g463251 | 38 | −24 | gb105pln | M. sativa (Nagyszenasi) mRNA for ribosomal protein RL5. | |
| 700343507H1 | g747914 | 56 | −41 | gb105pln | Z. mays CaM1 mRNA for calmodulin. | |
| 700347206H1 | g168545 | 62 | −23 | gb105pln | Z. mays putative ribosomal protein L19 homolog mRNA, partial cds. | |
| 700281987H2 | g1008880 | 19 | 6 | gb105pln | Phaseolus vulgaris eukaryotic initiation factor 5 (eIF-5) gene, | |
| | | | | | complete cds. | |
| 700379753H1 | g2281115 | 49 | −18 | gb105eukp | T10P11.14.1; putative cullin-like 1 protein | |
| 700342476H1 | g473604 | 35 | −17 | gb105pln | Zea mays W-22 histone H2B mRNA, complete cds. | |
| 700342869H1 | g157168 | 8 | 4 | gb105allp | insulin-degrading enzyme | |
| 700346527H1 | g699510 | 10 | −4 | gb105eukp | M(1)1B; minute(1)1B protein; minute(1)1B | |
| 700345923H1 | g2252639 | 28 | −9 | gb105pln | Genomic sequence of Arabidopsis BAC F8A5, complete sequence. | |
| 700343205H1 | g625146 | 6 | 3 | gb105allp | Ro protein | |
| 700346196H1 | g602605 | 48 | −65 | gb105pln | Zea mays tandem genes for alpha1-tubulin and alpha2-tubulin. | |
| 700345971H1 | g1184773 | 74 | −80 | gb105pln | Zea mays glyceraldehyde-3-phosphate dehydrogenase GAPC3 (gpc3) mRNA, | |
| | | | | | complete cds. | |
| 700345452H1 | g587542 | 12 | 12 | gb105pln | Yeast (Saccharomyces cerevisiae) PRS3 gene for ribose-phosphate pyrophosphokinase. | |
| 700344311H1 | g2760173 | 29 | −7 | gb105pln | Arabidopsis thaliana genomic DNA, chromosome 5, P1 clone: MYH19, complete | |
| | | | | | sequence. | |
| 700347072H1 | g2340104 | 17 | 5 | gb105allp | Very similar and perhaps identical to Hs-CUL-4B.; 80-100% similarity to partial | |
| | | | | | sequence U58091 (PID:g1381150). | |
| 700346344H1 | g2058311 | 18 | −6 | gb105eukp | CCR; cinnamoyl-CoA reductase; EC 1.2.1.44 | |
| 700346340H1 | g1246472 | 20 | 4 | gb105allp | R102.4 | |
| 700347368H1 | g488835 | 8 | 6 | gb105allp | ribosomal protein L28 | |
| 700344876H1 | g2564051 | 15 | 8 | gb105pln | Arabidopsis thaliana genomic DNA, chromosome 5, P1 clone: MWD9, complete | |
| | | | | | sequence. | |
| 700343384H1 | g22174 | 55 | −53 | gb105pln | Maize Aux311 gene for auxin-binding protein. | |
| 700342309H1 | g1151003 | 9 | 5 | gb105allp | hypothetical protein UNF346 | |
| 700344204H1 | g2565420 | 17 | 1 | gb105pln | Onobrychis viciifolia eukaryotic translation initiation factor eIF-1A mRNA, | |
| | | | | | complete cds. | |
| 700346443H1 | g19103 | 28 | −12 | gb105pln | H. vulgare mRNA for ribosomal protein L17-2. | |
| 700343625H1 | g289156 | 21 | −5 | gb105allp | amine oxidase | |
| 700345132H1 | g168543 | 78 | −24 | gb105pln | Zea mays putative ribosomal protein S8 mRNA, partial cds. | |
| 700346114H1 | g294518 | 27 | −10 | gb105allp | annexin II | |
| 700345668H1 | g173317 | 21 | −8 | gb105eukp | RPL30; ribosomal protein L30; L30 | |
| 700344276H1 | g1336096 | 27 | −6 | gb105pln | Pisum sativum pyruvate dehydrogenase E1beta mRNA, nuclear gene encoding | |
| | | | | | mitochondrial protein, complete cds. | |
| 700344173H1 | g312178 | 37 | −65 | gb105pln | Z. mays GapC2 gene. | |
| 700345946H1 | g395157 | 21 | −6 | gb105eukp | PRP8; pre-mRNA splicing factor, U5 snRNP protein; PRP8 | |
| 700344686H1 | g2687685 | 10 | 16 | gb105pln | Arabidopsis thaliana cys gene. | |
| 700343434H1 | g1302303 | 9 | −8 | gb105eukp | ORF YNL255c | |
| 700346353H1 | g2653284 | 26 | −21 | gb105pln | Oryza sativa mRNA for enoyl-ACP reductase. | |
| 700343035H1 | g300249 | 13 | 7 | gb105allp | DMR-N9 {C-terminal} [mice, brain, Peptide Partial, 568 aa] | |
| 700344203H1 | g602302 | 19 | −1 | gb105eukp | DIM; cell elongation; diminuto | |
| 700380088H1 | g1431253 | 29 | −12 | gb105pln | Yeast (Saccharomyces cerevisiae) chromosome IV reading frame ORF YDL160c. | |
| 700380462H1 | g473602 | 47 | −38 | gb105pln | Zea mays W-22 histone H2A mRNA, complete cds. | |
| 700347138H1 | g1136121 | 71 | −61 | gb105pln | O. sativa mRNA for alpha-tubulin (clone OSTA-136). | |
| 700345087H1 | g18259 | 43 | −32 | gb105pln | C. sativus mRNA for cs DnaJ-1. | |
| 700343661H1 | g1778820 | 25 | −19 | gb105pln | Oryza sativa S-adenosyl-L-methionine synthetase (pOS-SAMS2) mRNA, complete cds. | |
| 700343150H1 | g603951 | 6 | 7 | gb105allp | This gene is novel. | |
| 700380138H1 | g1658321 | 24 | −10 | gb105pln | S. tuberosum mRNA for transsketolase. | |
| 700346602H1 | g1154953 | 46 | −55 | gb105pln | T. aestivum histone H2A gene. | |
| 700345489H1 | g405612 | 23 | −20 | gb105pln | A. thaliana ribosomal protein gene S18, complete CDS. | |
| 700344259H1 | g1301977 | 11 | −2 | gb104eukp | PMS1 | |
| 700344036H1 | g459894 | 74 | −30 | gb105pln | Zea mays sus1 gene, complete cds. | |
| 700345422H1 | g2145356 | 19 | −10 | gb105eukp | ATHB-14; HD-Zip protein | |
| 700345225H1 | g683503 | 24 | −3 | gb105pln | A. thaliana mRNA for 65 kDa regulatory subunit of protein phosphatase 2A. | |
| 700344448H1 | g20760 | 18 | 13 | gb105pln | P. sativum gTUB3 mRNA for beta-tubulin 3. | |
| 700343564H1 | g1167955 | 8 | −1 | gb105eukp | putative 32.7 kDa jasmonate-induced protein | |
| 700343701H1 | g21832 | 26 | −15 | gb105pln | Wheat mRNA for chloroplast phosphoglycerate kinase (EC 2.7.2.3). | |
| 700345724H1 | g736271 | 72 | −75 | gb105pln | O. sativa hsp70 gene for heat shock protein 70. | |
| 700342714H1 | g2275006 | 35 | −31 | gb105pln | Hordeum vulgare mRNA for expressed sequence tag. | |
| 700380608H1 | g664900 | 32 | −26 | gb105pln | C. plantagineum tkt3 gene for transketolase. | |
| 700346419H1 | g426441 | 24 | −3 | gb105pln | Rice mRNA for thioredoxin h, complete cds. | |
| 700343439H1 | g168500 | 75 | −59 | gb105pln | Maize (Zea mays) histone H4 gene (H4C14), complete cds. | |
| 700347241H1 | g493709 | 63 | −59 | gb105pln | Rice mRNA for beta-tubulin, complete cds. | |
| 700346110H1 | g17677 | 24 | −11 | gb105pln | Arabidopsis thaliana UBQ4 gene for polyubiquitin. | |
| 700345483H1 | g2058311 | 15 | −1 | gb105eukp | CCR; cinnamoyl-CoA reductase; EC 1.2.1.44 | |
| 700345209H1 | g416146 | 78 | −75 | gb105pln | Zea mays beta-6 tubulin (tub6) gene and mRNA, complete cds. | |
| 700343338H1 | g2392023 | 42 | −20 | gb105allp | Acyl-CoA synthetase | |
| 700345962H1 | g2564044 | 15 | 10 | gb105pln | Arabidopsis thaliana genomic DNA, chromosome 5, TAC clone: K19P17, complete | |
| | | | | | sequence. | |
| 700345488H1 | g2351063 | 19 | −2 | gb105pln | Arabidopsis thaliana genomic DNA, chromosome 5, P1 clone: MCL19. | |
| 700344214H1 | g21834 | 23 | −24 | gb105pln | Wheat mRNA for cytosolic phosphoglycerate kinase (EC 2.7.2.3). | |
| 700342888H1 | g288614 | 48 | −34 | gb105pln | D. carota mRNA for dihydrofolate reductase and thymidylate synthetase. | |
| 700346886H1 | g474009 | 67 | −47 | gb105pln | Rice mRNA, partial homologous to ribosomal protein S19 gene. | |
| 700343702H1 | g1088344 | 8 | 5 | gb105allp | adenylate kinase | |
| 700346630H1 | g1199479 | 14 | 17 | gb105pln | Cucumis sativus mRNA, clone CRR48, homologous to Arabidopsis cDNA clone 3003. | |
| 700345732H1 | g1336096 | 21 | −3 | gb105pln | Pisum sativum pyruvate dehydrogenase Elbeta mRNA, nuclear gene encoding | |
| | | | | | mitochondrial protein, complete cds. | |
| 700344205H1 | g310932 | 24 | −34 | gb105pln | Nicotiana tabacum ribosomal protein L17 mRNA, complete cds. | |
| 700342925H1 | g1049252 | 47 | −5 | gb105pln | Zea mays vacuolar ATPase 69 kDa subunit mRNA, partial cds. | |
| 700347084H1 | g21800 | 35 | −31 | gb105pln | T. aestivum L mRNA for histone H2B. | |
| 700343138H1 | g1064930 | 18 | −6 | gb105pln | N. tabacum mRNA for cyclin A-like protein (clone 59). | |
| 700344259H1 | g791102 | 11 | −2 | gb105eukp | PMS1; DNA mismatch repair protein | |
| 700380266H1 | g639494 | 22 | −6 | gb105pln | Zea mays Mu3 transposon in alcohol dehydrogenase (adh1) gene. | |
| 700345990H1 | g2558938 | 13 | 7 | gb105allp | arm repeat containing protein | |
| 700343318H1 | g171704 | 19 | −3 | gb105eukp | COO1 | |
| 700347263H1 | g606969 | 11 | 17 | gb105pln | Arabidopsis thaliana cytoplasmic gb105eukp | lp-ipmsa; first enzyme in leucine |
| | | | | | biosynthesis which catalyzes condensation of acetyl-CoA and 2-oxoisovalerate to form | |
| | | | | | 2-isopropylmalate synthase; 2-isopropylmalate synthase; EC 4.1.3.12 | |
| 700379935H1 | g550437 | 25 | −8 | gb105pln | Z. mays CYP71C2 mRNA for cytochrome P-450. | |
| 700344711H1 | g2511530 | 46 | −50 | gb105pln | Eleusine indica alpha tubulin 1 (TUA1) mRNA, complete cds. | |
| 700347014H1 | g2662342 | 71 | −25 | gb105pln | Oryza sativa mRNA for EF-1 alpha, complete cds. | |
| 700344536H1 | g2160155 | 13 | 16 | gb105pln | Sequence of BAC F21M12 from Arabidopsis thaliana chromosome 1, complete | |
| | | | | | sequence. | |
| 700344425H1 | g1381148 | 23 | 2 | gb105allp | Hs-CUL-4A | |
| 700380144H1 | g1881694 | 73 | −67 | gb105pln | Zea mays phosphoglucomutase mRNA, partial cds. | |
| 700346096H1 | g21794 | 44 | 6 | gb105pln | Wheat histone H4 gene. | |
| 700343810H1 | g313759 | 100 | −90 | gb105pln | Z. mays hsp 70-1 gene for heat shock protein 70. | |
| 700342782H1 | g1617270 | 39 | −22 | gb105eukp | acyl-CoA synthetase; EC 6.2.1.3 | |
| 700344792H1 | g1174333 | 10 | 4 | gb105allp | w-amino-transferase-like protein | |
| 700343480H1 | g1276967 | 13 | 6 | gb105allp | putative ribosomal protein | |
| 700345969H1 | g644492 | 49 | 13 | gb105pln | Corn elongation factor 1alpha gene, complete cds. | |
| 700343894H1 | g1136119 | 74 | −36 | gb105pln | O. sativa mRNA for alpha-tubulin (clone OSTA-111). | |
| 700342671H1 | g486279 | 12 | 4 | gb105eukp | ORF YKL160w | |
| 700346327H1 | g2317907 | 15 | 3 | gb105allp | Mago Nashi-like protein | |
| 700345334H1 | g968902 | 20 | 7 | gb105eukp | ribosomal protein S8 | |
| 700342869H1 | g2291181 | 9 | 5 | gb105allp | strong similarity to peptidase family M16 or the insulinase family | |
| 700344420H1 | g450548 | 28 | −27 | gb105pln | O. sativa (pRSAM-1) gene for S-adenosyl methionine synthetase. | |
| 700345990H1 | g2462822 | 24 | 3 | gb105eukp | F10G19.3 | |
| 700343761H1 | g2414643 | 29 | −12 | gb105pln | Yeast (Saccharomyces pombe) chromosome I cosmid c3H5. | |
| 700344179H1 | g2347207 | 13 | −2 | gb105eukp | T09D09.3; APG protein isolog | |
| 700343287H1 | g939780 | 49 | −29 | gb105pln | Zea mays MADS-box protein (ZAG5) mRNA, complete cds. | |
| 700347080H1 | g2599092 | 32 | 6 | gb105eukp | MSI4; WD-40 repeat protein MSI4 | |
| 700346811H1 | g303856 | 49 | −32 | gb105pln | Rice mRNA for ubiquitin protein fused to a ribosomal protein, complete cds. | |
| 700346845H1 | g1877414 | 24 | −0 | gb105allp | XSUG1 | |
| 700346726H1 | g854688 | 27 | −6 | gb105eukp | cytochrome c oxidase subunit I | |
| 700343934H1 | g21800 | 37 | −36 | gb105pln | T. aestivum L mRNA for histone H2B. | |
| 700342491H1 | g2108346 | 39 | −36 | gb105pln | Brassica campestris small GTP-binding protein Bsar1b (bsar1b) mRNA, complete cds. | |
| 700379854H1 | g2564045 | 12 | 15 | gb105pln | Arabidopsis thaliana genomic DNA, chromosome 5, TAC clone: K8K14, complete | |
| | | | | | sequence. | |
| 700346720H1 | g2209357 | 21 | −3 | gb105pln | Mangifera indica beta-D-galactosidase (SP26) mRNA, partial cds. | |
| 700345424H1 | g168396 | 25 | −1 | gb105pln | Zea mays auxin-binding protein (abp1) gene, exons 1-5 and complete cds. | |
| 700345337H1 | g218142 | 36 | −25 | gb105pln | Rice mRNA for aspartic proteinase, complete cds. | |
| 700344696H1 | g2459928 | 16 | 8 | gb105allp | rat ventral prostate.1 homolog | |
| 700380638H1 | g1841501 | 66 | −70 | gb105pln | Z. mays mRNA for glutathione-dependent formaldehyde dehydrogenase. | |
| 700345741H1 | g488712 | 9 | 4 | gb105eukp | cr7; ubiquinol-cytochrome c reductase; EC 1.10.2.2 | |
| 700345514H1 | g304153 | 15 | −3 | gb105allp | sorbitol dehydrogenase | |
| 700345281H1 | g829147 | 79 | −72 | gb105pln | Z. mays gene for cyclophilin. | |
| 700342577H1 | g63752 | 17 | 1 | gb105allp | PR 264 | |
| 700346120H1 | g1946668 | 12 | −4 | gb105eukp | COII; cytochrome c oxidase subunit II | |
| 700344689H1 | g475257 | 38 | 4 | gb105allp | similar to ribosomal protein L19 | |
| 700343702H1 | g216516 | 9 | 4 | gb105allp | adenylate kinase | |
| 700346017H1 | g2582063 | 65 | 2 | gb105allp | NADH dehydrogenase subunit 2 | |
| 70345522H1 | g398921 | 23 | −2 | gb105pln | B. napus cold induced protein (BnC24B). | |
| 700343821H1 | g218142 | 41 | −27 | gb105pln | Rice mRNA for aspartic proteinase, complete cds. | |
| 700379606H1 | g1419448 | 10 | 2 | gb105eukp | K04G2.5 | |
| 700346009H1 | g303852 | 61 | −50 | gb105pln | Rice mRNA for ribosomal protein L3, complete cds. | |
| 700345577H1 | g1015315 | 24 | 5 | gb105pln | Pisum sativum (clone PsRCI35-2) ribosomal protein L41 mRNA, complete cds. | |
| 700344759H1 | g2252834 | 8 | 5 | gb105eukp | A_IG005I10.14 | |
| 700345894H1 | g433608 | 28 | −5 | gb105pln | R. communis mRNA for enolase. | |
| 700342829H1 | g2828186 | 26 | −6 | gb105pln | Arabidopsis thaliana genomic DNA, chromosome 5, TAC clone: K18I23, complete | |
| | | | | | sequence. | |
| 700345225H1 | g437900 | 24 | −3 | gb105pln | P. sativum mRNA for phosphoprotein phosphatase 2A 65 kDa regulatory subunit. | |
| 700343582H1 | g22469 | 26 | −15 | gb105pln | Maize mRNA for cytoplasmic ribosomal protein S11. | |
| 700343434H1 | g159342 | 6 | −8 | gb105eukp | HEXBP; HEXBP DNA binding protein | |
| 700346366H1 | g1399567 | 25 | −45 | gb105pln | Podophyllum peltatum nuclear 26S ribosomal RNA gene, partial sequence. | |
| 700346117H1 | g2435604 | 33 | −16 | gb105eukp | F08F1.7 | |
| 700344237H1 | g2276349 | 26 | −3 | gb105pln | Yeast (Saccharomyces pombe) chromosome II cosmid c30D10. | |
| 700379706H1 | g2407800 | 17 | −2 | gb105eukp | H2Av; histone H2A.F/Z | |
| 700346931H1 | g1055130 | 17 | −3 | gb105eukp | ZK622.3 | |
| 700346859H1 | g895891 | 14 | −2 | gb105eukp | RPS5; ribosomal protein S5 | |
| 700345259H1 | g1580810 | 6 | 1 | gb105eukp | Sm10; T-cell-stimulating antigen | |
| 700380244H1 | g508974 | 65 | −59 | gb105pln | Triticum aestivum Chinese spring protein disulfide isomerase (PDI) mRNA, | |
| | | | | | complete cds. | |
| 700345908H1 | g2226414 | 13 | 7 | gb105eukp | SPBC31F10.03; hypothetical protein | |
| 700344438H1 | g536151 | 14 | 17 | gb105pln | Yeast (Saccharomyces cerevisiae) chromosome II reading frame ORF YBL092w. | |
| 700343918H1 | g488779 | 60 | −53 | gb105pln | T. aestivum mRNA for isomerase. | |
| 700380595H1 | g609261 | 68 | −59 | gb105pln | S. cereale (cv. Halo) mRNA for triosephosphate isomerase. | |
| 700345766H1 | g290056 | 32 | −0 | gb105pln | Dictyostelium discoideum HIV1 TAT-binding protein homologue (TBP1O) mRNA, | |
| | | | | | 3′ end. | |
| 700344655H1 | g2394228 | 27 | 11 | gb105pln | Arabidopsis thaliana WD-40 repeat protein (MSI1) mRNA, complete cds. | |
| 700346681H1 | g1632821 | 24 | 3 | gb105pln | O. sativa mRNA for transmembrane protein. | |
| 700345706H1 | g1375075 | 17 | 5 | gb105eukp | glyoxysomal malate dehydrogenase; EC 1.1.137 | |
| 700344162H1 | g2511532 | 29 | −3 | gb105pln | Eleusine indica alpha-tubulin 2 (TUA2) mRNA, complete cds. | |
| 700342644H1 | g1326286 | 7 | 3 | gb105eukp | T27A10.3 | |
| 700380515H1 | g2708493 | 5 | 7 | gb105allp | synaptojanin II | |
| 700345514H1 | g1742885 | 13 | −1 | gb105allp | Sorbitol dehydrogenase (EC 1.1.1.14) (L-iditol 2-dehydrogenase). | |
| 700347127H1 | g20163 | 39 | −5 | gb105pln | O. sativa Rr15 mRNA for 5S ribosomal RNA. | |
| 700344426H1 | g28519 | 32 | −5 | gb105allp | L apoferritin | |
| 700347284H1 | g1372966 | 31 | −5 | gb105eukp | CREB-like protein | |
| 700345077H1 | g168795 | 19 | −2 | gb105pln | Neurospora crassa ribosomal protein gene, complete cds. | |
| 700345427H1 | g2760173 | 29 | −12 | gb105pln | Arabidopsis thaliana genomic DNA, chromosome 5, P1 clone: MYH19, complete | |
| | | | | | sequence. | |
| 700346527H1 | g458972 | 11 | −7 | gb105eukp | F37C12.4 | |
| 700343157H1 | g644491 | 80 | −79 | gb105pln | Corn mRNA for elongation factor 1A. | |
| 700346724H1 | g2827635 | 13 | 6 | gb105eukp | F10N7.170; predicted protein | |
| 700342267H1 | g1184775 | 86 | −76 | gb105pln | Zea mays glyceraldehyde-3-phosphate dehydrogenase GAPC4 (gpc4) mRNA, | |
| | | | | | complete cds. | |
| 700343277H1 | g2511690 | 20 | −1 | gb105pln | Phaseolus vulgaris Moldavian encoding cysteine proteinase precursor (clone cp41). | |
| 700342208H1 | g899609 | 17 | −15 | gb105pln | Zea mays acidic ribosomal protein P2 (RPA-2A1) mRNA, complete cds. | |
| 700345065H1 | g20255 | 55 | −66 | gb105pln | O. sativa gene for heat shock protein 82 HSP82. | |
| 700343253H1 | g2668737 | 60 | −59 | gb105pln | Zea mays translation initiation factor 5A (TIF5A) mRNA, complete cds. | |
| 700342593H1 | g22469 | 66 | −44 | gb105pln | Maize mRNA for cytoplasmic ribosomal protein S11. | |
| 700342482H1 | g169588 | 11 | 13 | gb105pln | Solanum tuberosum spliceosomal protein (U2B) mRNA, complete cds. | |
| 700345667H1 | g2331300 | 56 | −53 | gb105pln | Zea mays ribosomal protein S4 type I (rps4) mRNA, complete cds. | |
| 700380090H1 | g1054718 | 30 | −3 | gb105eukp | coxIII; cytochrome oxidase | |
| 700346819H1 | g2462748 | 20 | −15 | gb105eukp | F8A5.29; putative Clathrin Coat Assembly protein | |
| 700281884H2 | g1185555 | 17 | 17 | gb105pln | Zea mays glyceraldehyde-3-phosphate dehydrogenase (gpc4) gene, partial cds. | |
| 700346229H1 | g166687 | 47 | −39 | gb105pln | A. thaliana 3-deoxy-D-arabino-heptulosonate y-phosphate synthase (DHS1) mRNA, | |
| | | | | | complete cds. | |
| 700345244H1 | g1947005 | 12 | 5 | gb105eukp | T21G5.5 | |
| 700343696H1 | g2239142 | 17 | 5 | gb105allp | polycomb-M33 interacting protein Ring1B | |
| 700379891H1 | g1053052 | 17 | −27 | gb105pln | Hordeum vulgare histone H3 gene, partial cds, clone B1. | |
| 700346875H1 | g2462828 | 23 | −6 | gb105eukp | F19G10.9 | |
| 700345693H1 | g1184773 | 77 | −75 | gb105pln | Zea mays glyceraldehyde-3-phosphate dehydrogenase GAPC3 (gpc3) mRNA, | |
| | | | | | complete cds. | |
| 700346269H1 | g161631 | 8 | −3 | gb105eukp | 217 g protein | |
| 700343108H1 | g218099 | 32 | −44 | gb105pln | Rice mRNA for ribosomal protein S12 (320 gene), partial sequence. | |
| 700281908H2 | g2622711 | 9 | 7 | gb105allp | ferripyochelin binding protein | |
| 700342270H1 | g2286152 | 50 | −34 | gb105pln | Zea mays cytoplasmic malate dehydrogenase mRNA, complete cds. | |
| 700342379H1 | g527680 | 38 | −14 | gb105eukp | ribosomal protein S3 | |
| 700379969H1 | g1488267 | 17 | 6 | gb105eukp | low affinity calcium antiporter CAX2 | |
| 700347051H1 | g1149570 | 17 | −7 | gb105pln | A. thaliana mRNA for mitochondrial elongation factor Tu. | |
| 700346705H1 | g22322 | 22 | −22 | gb105pln | Z. mays mRNA for H2B histone (clone cH2B214). | |
| 700342214H1 | g886679 | 11 | 4 | gb105eukp | LeUBC1; ubiquitin conjugating enzyme | |
| 700346213H1 | g2624200 | 35 | −31 | gb105pln | M. acuminata mRNA; clone pBAN UU91. | |
| 700343567H1 | g2623679 | 21 | −14 | gb105pln | Zea mays calmodulin (Zmrcalm) mRNA, complete cds. | |
| 700346414H1 | g544506 | 7 | 4 | gb105eukp | SIK1; Sik1p | |
| 700347051H1 | g218309 | 12 | 4 | gb105pln | N. sylvestris tufA gene for chloroplast elongation factor TuA (EF-TuA), partial sequence. | |
| 700345438H1 | g2665889 | 45 | −32 | gb105pln | Fragaria x ananassa calcium-dependent protein kinase (MAX17) mRNA, complete cds. | |
| 700344542H1 | g216201 | 7 | 7 | gb105allp | prolyl endopeptidase | |
| 700380031H1 | g166786 | 31 | 8 | gb105eukp | PAB5; poly(A)-binding protein | |
| 700346439H1 | g1431108 | 26 | −11 | gb105eukp | ORF YDL084w | |
| 700343716H1 | g514945 | 87 | −74 | gb105pln | Zea mays sucrose synthase (Sus1) mRNA, complete cds. | |
| 700343128H1 | g1325967 | 16 | 8 | gb105pln | T. aestivum histone H2A gene (clone TH274). | |
| 700346266H1 | g438279 | 14 | 3 | gb105allp | Ribosomal protein L7 | |
| 700342745H1 | g430992 | 20 | −9 | gb105eukp | protein kinase | |
| 700380595H1 | g806311 | 38 | −28 | gb105pln | Spinacia oleracea nuclear encoded triosephosphate isomerase, chloroplast isozyme | |
| | | | | | mRNA, complete cds. | |
| 700346018H1 | g8159 | 29 | −16 | gb105eukp | Kr; Kr polypeptide | |
| 700345164H1 | g1419909 | 10 | 5 | gb105eukp | ORF YOL077c | |
| 700344063H1 | g550543 | 41 | −35 | gb105pln | A. thaliana mRNA for ribosomal protein L16. | |
| 700379706H1 | g2564109 | 7 | 7 | gb105eukp | histone H2A | |
| 700343762H1 | g556018 | 30 | −13 | gb105pln | Barley glutamate 1-semialdehyde aminotransferase (GSA) mRNA, complete cds. | |
| 700343254H1 | g2435511 | 27 | −20 | gb105eukp | A_TM017A05.10 | |
| 700342945H1 | g602302 | 27 | −4 | gb105eukp | DIM; cell elongation; diminuto | |
| 700345760H1 | g2618602 | 28 | 12 | gb105pln | Arabidopsis thaliana genomic DNA, chromosome 5, P1 clone: MSJ1, complete | |
| | | | | | sequence. | |
| 700344609H1 | g1732514 | 10 | 16 | gb105pln | Arabidopsis thaliana myosin heavy chain-like protein mRNA, complete cds. | |
| 700342411H1 | g2330808 | 18 | −10 | gb105eukp | Sum1p | |
| 700347006H1 | g167099 | 18 | 4 | gb105pln | Hordeum vulgare seed imbitition protein (Sip1) gene, complete cds. | |
| 700345986H1 | g2289094 | 15 | 6 | gb105pln | Arabidopsis thaliana WD-40 repeat protein (AtArcA) mRNA, complete cds. | |
| 700344228H1 | g473602 | 61 | −69 | gb105pln | Zea mays W-22 histone H2A mRNA, complete cds. | |
| 700343593H1 | g541611 | 33 | −16 | gb105allp | cytokeratin 13 | |
| 700343291H1 | g2408032 | 11 | 5 | gb105eukp | SPAC17G6.19c; hypothetical protein | |
| 700380261H1 | g510238 | 28 | −13 | gb105eukp | OPT1-1; oligopeptide transporter 1-1 | |
| 700344915H1 | g2505874 | 26 | −12 | gb105eukp | putative kinase | |
| 700342692H1 | g11531 | 34 | −21 | gb105pln | E. gracilis chloroplast gene for elongation factor Tu. | |
| 700346682H1 | g1183936 | 15 | 4 | gb105pln | P. sativum 5S rRNA gene. | |
| 700345302H1 | g914876 | 19 | −1 | gb105eukp | unknown | |
| 700380508H1 | g1841463 | 19 | −2 | gb105pln | N. tabacum mRNA for LIM-domain protein. | |
| 700345525H1 | g2827624 | 15 | 8 | gb105eukp | hypothetical protein | |
| 700343577H1 | g1322734 | 36 | −17 | gb105eukp | ORF YGL150c | |
| 700345984H1 | g886739 | 64 | −12 | gb105pln | Z. mays histone H4 gene. | |
| 700345985H1 | g732814 | 21 | 2 | gb105pln | L. esculentum LeMA-1 mRNA for putative Mg-dependent ATPase 1. | |
| 700345318H1 | g1235680 | 7 | 7 | gb105allp | receptor serine/threonine kinase PR5K | |
| 700342823H1 | g485376 | 78 | −77 | gb105pln | Zea mays alpha-3-tubulin gene, complete cds. | |
| 700346435H1 | g2465923 | 6 | 3 | gb105eukp | RKF1; receptor-like serine/threonine kinase | |
| 700342734H1 | g1841869 | 43 | −38 | gb105pln | Pimpinella brachycarpa elongation factor 1-beta (EF-1-beta) mRNA, complete cds. | |
| 700347177H1 | g2347195 | 9 | 5 | gb105eukp | T09D09.11 | |
| 700344831H1 | g2773184 | 21 | −2 | gb105eukp | F33D11.10 | |
| 700344310H1 | g2464877 | 51 | −25 | gb105eukp | methionyl aminopeptidase homolog | |
| 700345783H1 | g2464854 | 24 | −9 | gb105eukp | Cu2+-transporting ATPase homolog | |
| 700379826H1 | g1049306 | 39 | −25 | gb105pln | Arabidopsis thaliana actin-2 mRNA, complete cds. | |
| 700346945H1 | g20000 | 41 | −29 | gb105pln | N. tabacum RL2 mRNA for 60S ribosomal protein L2. | |
| 700342465H1 | g971862 | 26 | −7 | gb105allp | potential laminin-binding protein | |
| 700379817H1 | g168490 | 26 | 2 | gb105pln | Maize glutathione S-transferase (GST-I) mRNA, complete cds. | |
| 700347376H1 | g1432173 | 15 | −4 | gb105eukp | copB; CopB | |
| 700346947H1 | g1707867 | 83 | −32 | gb105pln | Z. mays mRNA for 40S ribosomal subunit protein S21. | |
| 700346276H1 | g1345132 | 14 | −10 | gb105eukp | ERECTA; ERECTA | |
| 700346909H1 | g218130 | 31 | −29 | gb105pln | Rice mRNA for Ribosomal protein S15. | |
| 700344119H1 | g600768 | 49 | −10 | gb105pln | Oryza sativa cyclophilin 2 (Cyp2) mRNA, complete cds. | |
| 700346123H1 | g2244825 | 35 | −3 | gb105eukp | light induced protein homolog | |
| 700345295H1 | g2511540 | 18 | 9 | gb105pln | Oryza sativa DNA-binding protein GBP16 (Rgbp16) mRNA, complete cds. | |
| 700344887H1 | g2444419 | 28 | −6 | gb105pln | Glycine max ribosome-associated protein p40 mRNA, complete cds. | |
| 700343330H1 | g414340 | 33 | −20 | gb105pln | A. thaliana rd21A gene for thiol protease, complete cds. | |
| 700346309H1 | g1185553 | 32 | −49 | gb105pln | Zea mays glyceraldehyde-3-phosphate dehydrogenase (gpc2) gene, complete cds. | |
| 700343229H1 | g1498052 | 77 | −63 | gb105pln | Zea mays ribosomal protein S8 mRNA, complete cds. | |
| 700347294H1 | g293888 | 82 | −79 | gb105pln | Zea mays, glyceraldehyde-3-phosphate dehydrogenase mRNA, 3′ end (clone GAPC2). | |
| 700345881H1 | g2827618 | 24 | −1 | gb105pln | Arabidopsis thaliana DNA chromosome 4, BAC clone F10N7 (ESSAII project). | |
| 700346714H1 | g1408471 | 13 | 5 | gb105eukp | ADF1; actin depolymerizing factor 1 | |
| 700344384H1 | g2344870 | 26 | −23 | gb105pln | Phaseolus vulgaris mRNA for purple acid phosphatase precursor. | |
| 700343960H1 | g1654186 | 23 | −2 | gb105allp | CTP synthetase homolog | |
| 700343223H1 | g1675393 | 24 | −35 | gb105pln | Oryza sativa class III ADH enzyme (AdhIII) gene, complete cds. | |
| 700343206H1 | g218142 | 20 | 4 | gb105pln | Rice mRNA for aspartic proteinase, complete cds. | |
| 700342524H1 | g170455 | 13 | 3 | gb105pln | Tomato heat shock cognate protein 80 gene, 3′ end. | |
| 700345433H1 | g22324 | 41 | −18 | gb105pln | Z. mays mRNA for H2B histone (clone cH2B221). | |
| 700344107H1 | g2326873 | 20 | −1 | gb105pln | S. tuberosum mRNA for plastidic ATP/ADP-transporter. | |
| 700343086H1 | g804949 | 33 | −26 | gb105pln | A. thaliana mRNA for cysteine synthase. | |
| 700380167H1 | g609289 | 62 | 13 | gb105pln | Z. mays cultivar (LG11) ROA mRNA for replication origin activator protein. | |
| 700346785H1 | g1749575 | 23 | −7 | gb105pln | Fission Yeast mRNA, complete cds. | |
| 700346541H1 | g488576 | 29 | −13 | gb105pln | Medicago sativa Regen S clone pH3c131 histone H3.2 mRNA, complete cds. | |
| 700379661H1 | g1370177 | 23 | −2 | gb105pln | L. japonicus mRNA for small GTP-binding protein, RAB5A. | |
| 700342505H1 | g2150129 | 36 | −22 | gb105pln | Arabidopsis thaliana cytoplasmic ribosomal protein S15a mRNA, complete cds. | |
| 700347201H1 | g1293686 | 7 | 8 | gb105allp | transcription factor C1 (HCF) | |
| 700344001H1 | g473604 | 37 | 12 | gb105pln | Zea mays W-22 histone H2B mRNA, complete cds. | |
| 700346867H1 | g1777706 | 67 | −74 | gb105pln | Zea mays 18S ribosomal RNA gene, partial sequence. | |
| 700380083H1 | g166605 | 42 | −4 | gb105pln | Arabidopsis thaliana anthranilate synthase alpha subunit gene, complete cds. | |
| 700379608H1 | g168500 | 46 | −45 | gb105pln | Maize (Zea mays) histone H4 gene (H4C14), complete cds. | |
| 700342985H1 | g886400 | 49 | −30 | gb105pln | Oryza sativa MADS-box protein (MADS2) mRNA, complete cds. | |
| 700342282H1 | g285951 | 20 | −1 | gb105allp | KIAA0107 | |
| 700345348H1 | g312180 | 32 | −52 | gb105pln | Z. mays GapC4 gene. | |
| 700343434H1 | g1255963 | 9 | −8 | gb105eukp | ORF N0852 | |
| 700342895H1 | g2341023 | 45 | −1 | gb105pln | Sequence of BAC F19P19 from Arabidopsis thaliana chromosome 1, complete sequence. | |
| 700380518H1 | g1906827 | 27 | −14 | gb105pln | A. thaliana hsp81.4 gene. | |
| 700380151H1 | g170772 | 35 | −51 | gb105pln | Triticum aestivum S-adenosyl-L-homocysteine hydrolase (SH6.2) mRNA, complete cds. | |
| 700346436H1 | g535515 | 36 | 5 | gb105allp | homolog of yeast mutL gene | |
| 700347018H1 | g21227 | 18 | 2 | gb105pln | Spinach mRNA for chloroplast 37 kD inner envelope membrane protein. | |
| 700345146H1 | g1147585 | 33 | 7 | gb105eukp | LysRS; ATP + L-LYSYNE + tRNA(LYS = AMP + PYROPHOSPHATE + L- | |
| | | | | | LYSYL-tRNA(LYS); Lysyl-tRNA synthetase; EC 6.1.1.6 | |
| 700343380H1 | g1052973 | 25 | −8 | gb105eukp | fructokinase; EC 2.7.1.4 | |
| 700342638H1 | g313759 | 45 | −31 | gb105pln | Z. mays hsp 70-1 gene for heat shock protein 70. | |
| 700347236H1 | g475212 | 12 | 15 | gb105pln | N. tabacum eIF-4A10 mRNA. | |
| 700343049H1 | g576506 | 14 | 5 | gb105pln | Pisum sativum outer membrane protein (IAP75) mRNA, complete cds. | |
| 700380712H1 | g473604 | 38 | −38 | gb105pln | Zea mays W-22 histone H2B mRNA, complete cds. | |
| 700342353H1 | g1710361 | 10 | −0 | gb105eukp | uaf-1; splicing factor U2AF65 | |
| 700342311H1 | g915193 | 45 | −38 | gb105pln | Chlamydomonas reinhardtii mRNA for actin, complete cds. | |
| 700347001H1 | g20255 | 64 | −54 | gb105pln | O. sativa gene for heat shock protein 82 HSP82. | |
| 700346968H1 | g217910 | 25 | −40 | gb105pln | Carrot mRNA for nuclear antigen 21D7. | |
| 700345522H1 | g398917 | 27 | −7 | gb105pln | B. napus cold induced protein (BnC24A) mRNA. | |
| 700344278H1 | g1574937 | 30 | −54 | gb105pln | Zea mays superoxide dismutase 4 (sod4) gene, partial cds. | |
| 700379967H1 | g21800 | 57 | −50 | gb105pln | T. aestivum L mRNA for histone H2B. | |
| 700346388H1 | g312178 | 17 | 10 | gb105pln | Z. mays GapC2 gene. | |
| 700343360H1 | g2288979 | 22 | −19 | gb105pln | Arabidopsis thaliana chromosome II BAC T01O24 genomic sequence, complete | |
| | | | | | sequence. | |
| 700380763H1 | g452164 | 30 | −22 | gb105pln | Cucumber mRNA for monodehydroascorbate reductase, complete cds. | |
| 700343316H1 | g525241 | 47 | −11 | gb105allp | glutaminyl-peptide cyclotransferase | |
| 700344931H1 | g169792 | 56 | −43 | gb105pln | Rice histone 3 gene, complete cds. | |
| 700342356H1 | g188565 | 82 | −22 | gb105allp | mitochondrial hinge protein precursor | |
| 700380121H1 | g577818 | 18 | −10 | gb105pln | Z. mays gene for H2B histone (gH2B4). | |
| 700379965H1 | g736271 | 65 | −33 | gb105pln | O. sativa hsp70 gene for heat shock protein 70. | |
| 700347125H1 | g623589 | 47 | −39 | gb105pln | Nicotiana tabacum SR1 Nt-rab7b mRNA, complete cds. | |
| 700347070H1 | g1061039 | 26 | −12 | gb105pln | A. thaliana mRNA for sterol-C-methyltransferase. | |
| 700346827H1 | g16876 | 39 | 5 | gb105allp | vacuolar H+-pyrophosphatase | |
| 700342321H1 | g862933 | 25 | −11 | gb105allp | protein kinase C inhitibor-I | |
| 700343446H1 | g2760165 | 22 | −10 | gb105pln | Arabidopsis thaliana genomic DNA, chromosome 5, P1 clone: MAC9, complete | |
| | | | | | sequence. | |
| 700342961H1 | g495697 | 20 | −8 | gb105eukp | F54E7.2 | |
| 700345629H1 | g18329 | 22 | −0 | gb105pln | D. caryophyllus CARSR8 mRNA for glutathione s-transferase. | |
| 700344065H1 | g1235678 | 46 | −4 | gb105allp | cystatin B | |
| 700345631H1 | g19654 | 15 | 4 | gb105eukp | protein disulfide isomerase | |
| 700345158H1 | g1255448 | 13 | 7 | gb105allp | mitogen-activated protein kinase | |
| 700344393H1 | g1049306 | 36 | −16 | gb105pln | Arabidopsis thaliana actin-2 mRNA, complete cds. | |
| 700344889H1 | g170107 | 20 | 1 | gb105allp | chaperonin 10 | |
| 700342213H1 | g22322 | 16 | −8 | gb105pln | Z. mays mRNA for H2B histone (cone cH2B214). | |
| 700347311H1 | g4392 | 13 | 3 | gb105eukp | RPL37A; ribosomal protein L37a | |
| 700345958H1 | g22483 | 28 | −14 | gb105pln | Z. mays RNA for superoxide dismutase Sod4. | |
| 700343843H1 | g1066931 | 22 | −5 | gb105eukp | F10B5.7 | |
| 700346666H1 | g393400 | 80 | −66 | gb105pln | Z. mays mRNA for alpha-tubulin. | |
| 700343263H1 | g520935 | 63 | −57 | gb105pln | H. vulgare mRNA for gamma-TIP-like protein. | |
| 700380756H1 | g22149 | 24 | 10 | gb105pln | Z. mays mRNA for alpha-tubulin 3. | |
| 700380283H1 | g168505 | 58 | −47 | gb105pln | Zea mays histone H3 gene, complete cds. | |
| 700380217H1 | g170433 | 17 | 8 | gb105allp | ATP-dependent protease (CD4A) | |
| 700346715H1 | g22747 | 17 | 3 | gb105pln | L. longiflorum mRNA for actin depolymerizing factor. | |
| 700346229H1 | g410487 | 41 | −32 | gb105pln | L. esculentum DAHP synthase 2 precursor. | |
| 700345214H1 | g506471 | 25 | −10 | gb105eukp | unnamed protein product | |
| 700281886H2 | g22657 | 24 | −7 | gb105pln | A. thaliana mRNA for ubiquitin-conjugating enzyme. | |
| 700344526H1 | g555616 | 12 | −0 | gb105eukp | cim1; cytokinin induced message | |
| 700342935H1 | g1015814 | 4 | 8 | gb105eukp | ORF YJR105w | |
| 700346242H1 | g167961 | 27 | −5 | gb105pln | D. caryophyllus S-adenosylmethionine synthetase (CARSAM2) mRNA, complete cds. | |
| 700380662H1 | g2828278 | 27 | −32 | gb105pln | Arabidopsis thaliana DNA chromosome 4, BAC clone T18B16 (ESSAII project). | |
| 700342712H1 | g313147 | 40 | −55 | gb105pln | A. medicago MSK-3 mRNA for protein kinase. | |
| 700347009H1 | g166682 | 15 | 5 | gb105eukp | CTR1; protein kinase | |
| 700342809H1 | g2808637 | 46 | −36 | gb105pln | Daucus carota mRNA for Rab8-like small GTP-binding protein. | |
| 700344865H1 | g20412 | 43 | −32 | gb105pln | P. amygdalus mRNA for alpha-tubulin. | |
| 700342220H1 | g1129085 | 40 | −32 | gb105pln | Wheat mRNA for protein H2A, complete cds, clone wcH2A-9. | |
| 700342364H1 | g218082 | 21 | 0 | gb105pln | Rice mRNA for initiation factor EIF-4D (225 gene), partial sequence. | |
| 700342313H1 | g2651294 | 15 | −3 | gb105pln | Arabidopsis thaliana chromosome IIBAC T2P4 genomic sequence, complete sequence. | |
| 700343167H1 | g633028 | 23 | −5 | gb105eukp | protein phosphatase 2C | |
| 700281992H2 | g575730 | 22 | −39 | gb105pln | Z. mays mRNA for transmembrane protein. | |
| 700342761H1 | g2149639 | 48 | −37 | gb105pln | Arabidopsis thialiana Argonaute protein (AGO1) mRNA, complete cds. | |
| 700342350H1 | g1402918 | 12 | 6 | gb105allp | peroxidase | |
| 700379829H1 | g166857 | 46 | −40 | gb105pln | Arabidopsis thaliana cytoplasmic robosomal protein mRNA, complete cds. | |
| 700344191H1 | g872116 | 11 | 5 | gb105allp | sti (stress inducible protein) | |
| 700344424H1 | g602757 | 22 | −10 | gb105pln | Lycopersicon esculentum clp-like energy-dependent protease mRNA, complete cds. | |
| 700343484H1 | g2501765 | 32 | −12 | gb105pln | Glycine max calmodulin-like domain protein kinase isoenzyme gamma mRNA, | |
| | | | | | complete cds. | |
| 700346954H1 | g19495 | 14 | −2 | gb105pln | L. perenne RNA for Lol pI gene. | |
| 700380563H1 | g2586150 | 16 | −17 | gb105pln | Musa acuminata ripening-associated protein mRNA, partial cds. | |
| 700346560H1 | g516328 | 12 | −3 | gb105eukp | Su(var)3-9; Su(var)3-9 | |
| 700345573H1 | g563334 | 18 | 6 | gb105pln | B. napus (Naehan) bgb1 mRNA for guanine nucleotide regulatory protein. | |
| 700345169H1 | g20321 | 60 | −49 | gb105pln | Oryza sativa RAc1 mRNA for actin. | |
| 700344283H1 | g21832 | 61 | −48 | gb105pln | Wheat mRNA for chloroplast phosphoplycerate kinase (EC 2.7.2.3). | |
| 700343802H1 | g2821957 | 32 | −19 | gb105eukp | spermidine synthase 2; EC 2.5.1.16 | |
| 700343696H1 | g296064 | 16 | 5 | gb105allp | RING1 gene product | |
| 700379660H1 | g20000 | 26 | −16 | gb105pln | N. tabacum RL2 mRNA for 60S ribosomal protein L2. | |
| 700346947H1 | g1419371 | 23 | 17 | gb105pln | Z. mays mRNA for 40S subunit ribosomal protein S21. | |
| 700346865H1 | g2351061 | 17 | −4 | gb105pln | Arabidopsis thaliana genomic DNA, chromosome 5, P1 clone: MAF19. | |
| 700346722H1 | g2160155 | 14 | 8 | gb105pln | Sequence of BAC F21M12 from Arabidopsis thaliana chromosome 1, complete | |
| | | | | | sequence. | |
| 700346243H1 | g31417 | 25 | −9 | gb105allp | fibulin-1 B | |
| 700379656H1 | g22292 | 57 | −55 | gb105pln | Z. mays for glycine-rich protein. | |
| 700346979H1 | g409074 | 18 | 2 | gb105allp | HBp15/L22 | |
| 700343049H1 | g633607 | 21 | −17 | gb105eukp | chloroplastic outer envelope membrane protein (OEP75) | |
| 700347190H1 | g2326343 | 21 | −5 | gb105eukp | g14587-5 | |
| 700380401H1 | g2773051 | 29 | −15 | gb105pln | Spinacia oleracea heat shock 70 protein (HSC70-11) gene, nuclear gene encoding | |
| | | | | | mitochondrial protein, complete cds. | |
| 700345257H1 | g551251 | 13 | 6 | gb105allp | ribosomal protein S7 | |
| 700345692H1 | g498772 | 47 | −68 | gb105pln | Z. mays (cv DH5xDH7) hsp70-4 mRNA for heat shock protein 70. | |
| 700380574H1 | g2696803 | 39 | −59 | gb105pln | Oryza sativa mRNA for water channel protein, complete cds. | |
| 700346718H1 | g780371 | 58 | −53 | gb105pln | Oryza sativa enolase mRNA, complete cds. | |
| 700345347H1 | g1653442 | 12 | 4 | gb105allp | hypothetical protein | |
| 700345524H1 | g17935 | 39 | −27 | gb105pln | B. vulgaris mRNA for salt-inducible betaine aldehyde dehydrogenase. | |
| 700344323H1 | g22322 | 20 | 3 | gb105pln | Z. mays mRNA for H2B histone (clone cH2B214). | |
| 700342578H1 | g1524382 | 76 | −83 | gb105pln | Z. mays mRNA for EPSP-synthase. | |
| 700380547H1 | g2668737 | 74 | −82 | gb105pln | Z. mays translation initiation factor 5A (TIF5A) mRNA, complete cds. | |
| 700346811H1 | g349054 | 45 | −29 | gb105pln | Solanum tuberosum ubiquitin/ribosomal fusion protein (ubi3) gene, complete cds. | |
| 700346463H1 | g736271 | 41 | −28 | gb105pln | O. sativa hsp70 gene for heat shock protein 70. | |
| 700347294H1 | g1185553 | 34 | −72 | gb105pln | Zea mays glyceraldehyde-3-phosphate dehydrogenase (gpc2) gene, complete cds. | |
| 700346463H1 | g1181672 | 48 | −39 | gb105pln | Sorghum bicolor heat shock protein 70 cognate (hsc70) mRNA, partial cds. | |
| 700344950H1 | g1550813 | 26 | −42 | gb105pln | Z. mays mRNA for acidic ribosomal protein P0. | |
| 700342901H1 | g1345483 | 37 | −0 | gb105allp | Elongation factor 1 beta | |
| 700380244H1 | g625147 | 95 | −86 | gb105pln | Zea mays protein disulfide isomerase (pdi) mRNA, complete cds. | |
| 700379817H1 | g168486 | 34 | −7 | gb105pln | Maize glutathione S-transferase gene (GST-I), exon 1. | |
| 700345549H1 | g22149 | 47 | −35 | gb105pln | Z. mays mRNA for alpha-tubulin 3. | |
| 700347170H1 | g21215 | 24 | −34 | gb105pln | S. guttatum aox1 gene for salicylic acid-inducible alternative oxidase. | |
| 700345744H1 | g168502 | 79 | −79 | gb105pln | Maize (Zea mays) histone H4 gene (H4C7), complete cds. | |
| 700347091H1 | g498741 | 42 | −26 | gb105pln | H. vulgare (pMaW25) mRNA for beta-ketoacyl-ACP synthase. | |
| 700346413H1 | g1399264 | 13 | −4 | gb105pln | Arabidopsis thaliana calmodulin-domain protein kinase CDPK isoform 9 (CPK9) | |
| | | | | | mRNA, complete cds. | |
| 700346251H1 | g2815519 | 17 | −8 | gb105pln | Arabidopsis thaliana BAC T5J8 from chromosome IV, top arm, complete sequence. | |
| 700343054H1 | g458972 | 5 | 7 | gb105eukp | F37C12.4 | |
| 700343219H1 | g551482 | 16 | −12 | gb105pln | Zea mays ABA- and ripening-inducible-like protein mRNA, complete cds. | |
| 700342955H1 | g2463334 | 34 | −41 | gb105pln | Oryza sativa mRNA for ribosomal protein S4. | |
| 700342275H1 | g2789659 | 35 | −24 | gb105pln | Arabidopsis thaliana p105 mRNA, complete cds. | |
| 700379889H1 | g1814402 | 60 | −21 | gb105pln | Mesembryanthemum crystallinum methionine synthase (MetE) mRNA, complete cds. | |
| 700347150H1 | g2828295 | 9 | 7 | gb105eukp | T18B16.170; putative protein | |
| 700281877H2 | g1431621 | 45 | −25 | gb105pln | T. repens mRNA for protein kinase. | |
| 700344254H1 | g2632345 | 9 | −7 | gb105allp | dihydroneopterin aldolase | |
| 700343922H1 | g454913 | 43 | −34 | gb105pln | A. porrum LDJ2 mRNA. | |
| 700345395H1 | g2570119 | 17 | 10 | gb105pln | S. latifolia mRNA, clone CCLS 86.1. | |
| 700343844H1 | g312178 | 35 | −72 | gb105pln | Z. mays GapC2 gene. | |
| 700346147H1 | g463856 | 26 | −4 | gb105pln | Chlamydomonas reinhardtii 21gr ribosomal protein S14 (CRY1) gene, complete cds. | |
| 700343541H1 | g1762984 | 21 | −1 | gb105allp | WD40-repeat type I transmembrane protein A72.5 | |
| 700344914H1 | g303852 | 63 | −56 | gb105pln | Rice mRNA for ribosomal protein L3, complete cds. | |
| 700379653H1 | g168292 | 14 | 2 | gb105eukp | ORF1 | |
| 700346726H1 | g13667 | 27 | −6 | gb105eukp | cytochrome oxidase subunit 1 (AA 1-517) | |
| 700379628H1 | g287834 | 40 | −24 | gb105pln | Z. mays yptm2 cDNA. | |
| 700346745H1 | g577612 | 14 | 6 | gb105eukp | CRT1; calcium sequestration; calcium-binding protein; calreticulin | |
| 700344950H1 | g415316 | 14 | −20 | gb105pln | Rice mRNA for acidic ribosomal protein P0, complete cds. | |
| 700343116H1 | g587074 | 12 | 6 | gb105allp | putative IEF | |
| 700346441H1 | g2282034 | 9 | 1 | gb105allp | p41-Arc | |
| 700345275H1 | g393400 | 46 | −40 | gb105pln | Z. mays mRNA for alpha-tubulin. | |
| 700343558H1 | g1389639 | 28 | −29 | gb105pln | Pea mRNA for PNDKN1, complete cds. | |
| 700346780H1 | g736271 | 53 | −60 | gb105pln | O. sativa hsp70 gene for heat shock protein 70. | |
| 700345518H1 | g2668739 | 25 | −2 | gb105pln | Zea mays translation initiation factor GOS2 (TIF) mRNA, complete cds. | |
| 700344056H1 | g1408277 | 48 | −14 | gb105allp | proline rich protein | |
| 700343762H1 | g642910 | 18 | −7 | gb105pln | Lycopersicon esculentum (clone GFPGSAAM) glutamate 1-semialdehyde 2,1- | |
| | | | | | aminomutase mRNA, complete cds. | |
| 700346361H1 | g432367 | 40 | −27 | gb105pln | Rice mRNA for elongation factor 1 beta, complete cds. | |
| 700344179H1 | g2347208 | 12 | −2 | gb105eukp | T09D09.12; APG protein isolog | |
| 700345355H1 | g1041709 | 23 | −18 | gb105pln | Oryza sativa expansin Os-EXP2 (Os-EXP2) mRNA, complete cds. | |
| 700343523H1 | g415634 | 22 | −5 | gb105eukp | cloned by ability to arrest the cell cycle when expressed in the fission yeast | |
| | | | | | Schizosaccharomyces pombe; homolog of human 40S ribosomal protein S25, | |
| | | | | | Dictyostelium 40S ribosomal protein S31 and Saccharomyces 40S ribosomal protein S31 | |
| 700342960H1 | g2275016 | 55 | −41 | gb105allp | elastase | |
| 700346257H1 | g218178 | 22 | −25 | gb105pln | Rice OSA1 gene for H+-ATPase, complete cds. | |
| 700347258H1 | g1620908 | 22 | −2 | gb105pln | Carrot mRNA for DcARF1, complete cds. | |
| 700345538H1 | g474007 | 38 | −7 | gb105pln | Rice mRNA, partial homologous to ribosomal protein S12 gene. | |
| 700345474H1 | g218132 | 52 | −39 | gb105pln | Rice mRNA for Heat shock protein 83. | |
| 700345080H1 | g2668745 | 76 | −92 | gb105pln | Zea mays inorganic pyrophosphatase (IPP) mRNA, complete cds. | |
| 700346547H1 | g1841307 | 16 | 8 | gb105pln | Fission Yeast mRNA for ribosomal protein S16 homolog, partial cds. | |
| 700345104H1 | g536895 | 65 | −58 | gb105pln | Wheat mRNA for protein H2A, complete cds, clone wcH2A-10. | |
| 700344194H1 | g871985 | 59 | −48 | gb105pln | A. sativa Aspk11 mRNA. | |
| 700345416H1 | g19342 | 33 | −22 | gb105pln | L. esculentum mRNA for ribosomal protein L2. | |
| 700343407H1 | g2583148 | 24 | −7 | gb104eukp | pfk; 6-phospho-1-fructokinase; EC 2.7.1.11 | |
| 700343834H1 | g1100224 | 36 | −20 | gb105pln | Pinus sylvestris chloroplast NAD+-dependent glyceraldehyde-3-phosphate | |
| | | | | | dehydrogenase mRNA, complete cds. | |
| 700380638H1 | g1675393 | 24 | −25 | gb105pln | Oryza sativa class III ADH enzyme (AdhIII) gene, complete cds. | |
| 700379870H1 | g1911165 | 25 | −13 | gb105pln | S. tuberosum mRNA for soluble-starch-synthase. | |
| 700346455H1 | g22312 | 100 | −14 | gb105pln | Maize ABA-inducible gene for glycine-rich protein (ABA = abscisic acid). | |
| 700345055H1 | g857573 | 68 | −46 | gb105pln | Oryza sativa vacuolar H+-ATPase (vatp-P1) mRNA, complete cds. | |
| 700344508H1 | g1149569 | 9 | −1 | gb105eukp | athb-8; HD-zip | |
| 700346544H1 | g498906 | 34 | −12 | gb105eukp | RPL27-5; ribosomal protein L27 homolog | |
| 700345875H1 | g571474 | 51 | −36 | gb105pln | Chlamydomonas reinhardtii histone H3 (ch3-III), histone H4 (ch4-III), histone H2B | |
| | | | | | (ch2b-III) and histone H2A (ch2a-III) genes, complete cds. | |
| 700345535H1 | g2352427 | 7 | 6 | gb105allp | peroxisomal Ca-dependent solute carrier | |
| 700343012H1 | g473604 | 83 | −70 | gb105pln | Zea mays W-22 histone H2B mRNA, complete cds. | |
| 700379614H1 | g2511530 | 60 | −50 | gb105pln | Eleusine indica alpha tubulin 1 (TUA1) mRNA, complete cds. | |
| 700347206H1 | g470126 | 35 | −15 | gb105pln | N. tabacum (cv. Samsun NN) L19 mRNA for ribosomal protein L19. | |
| 700346735H1 | g1136119 | 56 | −56 | gb105pln | O. sativa mRNA for alpha-tubulin (clone OSTA-111). | |
| 700343934H1 | g473986 | 15 | −13 | gb105pln | Rice mRNA, partial homologous to histone H2B gene. | |
| 700345245H1 | g2414648 | 20 | −3 | gb105eukp | rp17-b; 60s ribosomal protein | |
| 700346477H1 | g2244792 | 12 | 7 | gb105allp | ankyrin homolog | |
| 700345308H1 | g2832636 | 13 | 7 | gb105eukp | hypothetical protein | |
| 700345704H1 | g395071 | 40 | −42 | gb105pln | V. faba guanine nucleotide regulatory protein mRNA, complete cds. | |
| 700344319H1 | g2623247 | 26 | −12 | gb105pln | Zea mays SU1 isomylase (sugaryl) gene, complete cds. | |
| 700345362H1 | g557681 | 52 | −32 | gb105pln | Z. mays mRNA for ribosomal protein S28. | |
| 700344996H1 | g2829865 | 46 | −23 | gb105eukp | F3I6.4 | |
| 700343840H1 | g2511530 | 79 | −67 | gb105pln | Eleusine indica alpha tubulin 1 (TUA1) mRNA, complete cds. | |
| 700342780H1 | g620050 | 16 | −11 | gb105eukp | T15H9.1 | |
| 700345826H1 | g902524 | 72 | −75 | gb105pln | Zea mays clone MubG10 ubiquitin fusion protein gene, complete cds. | |
| 700345562H1 | g493588 | 61 | −54 | gb105pln | Hordeum vulgare disulfide isomerase (PDI) mRNA, complete cds. | |
| 700379651H1 | g474003 | 27 | 6 | gb105pln | Rice mRNA, partial homologous to ribosomal protein rp21c gene. | |
| 700344871H1 | g1526426 | 9 | 7 | gb105allp | proteasome subunit p42 | |
| 700344496H1 | g458426 | 9 | 7 | gb105eukp | dihydrolipoamide acetyltransferase | |
| 700281806H2 | g624220 | 64 | −23 | gb105pln | Oryza sativa signal recognition particle 19 kDa protein subunit SRP19 mRNA, | |
| | | | | | complete cds. | |
| 700346719H1 | g2668739 | 95 | −90 | gb105pln | Zea mays translation initiation factor GOS2 (TIF) mRNA, complete cds. | |
| 700345120H1 | g2668749 | 45 | −33 | gb105pln | Zea mays ribosomal protein L30 (rpl30) mRNA, complete cds. | |
| 700343484H1 | g836943 | 19 | −11 | gb105pln | Arabidopsis thaliana calcium-dependent kinase (CDPK6) gene, complete cds. | |
| 700380557H1 | g416252 | 29 | −16 | gb105pln | Rice mRNA for 3-deoxy-D-arabino-heptulosonate 7-phosphate synthase, partial | |
| | | | | | sequence. | |
| 700344155H1 | g498906 | 31 | −29 | gb105eukp | RPL27-5; ribosomal protein L27 homolog | |
| 700346835H1 | g1100222 | 35 | −23 | gb105pln | Pinus sylvestris chloroplast NAD+-dependent glyceraldehyde-3-phosphate | |
| | | | | | dehydrogenase mRNA, complete cds. | |
| 700346790H1 | g509264 | 23 | −13 | gb105pln | B. napus mRNA for acyl-CoA binding protein. | |
| 700343740H1 | g425274 | 7 | 5 | gb105eukp | synaptotagmin, p65 | |
| 700343065H1 | g248338 | 39 | −42 | gb105pln | polyubiquitin [maize, Genomic, 3439 nt]. | |
| 700343038H1 | g904027 | 44 | −33 | gb105pln | Triticum aestivum nucleosome assembly protein I mRNA, partial cds. | |
| 700345539H1 | g22118 | 13 | 16 | gb105pln | Z. mays DNA for Adh1-Cm allele. | |
| 700344895H1 | g387112 | 35 | −26 | gb105allp | 34 kDa beta-galactoside-binding lectin (L-34) | |
| 700281810H2 | g2529253 | 25 | −0 | gb105eukp | rpb12; RNA polymarase II subunit Rpb12; EC 2.7.7.6 | |
| 700342830H1 | g2668737 | 52 | −49 | gb105pln | Zea mays translation initiation factor 5A (TIF5A) mRNA, complete cds. | |
| 700380650H1 | g168500 | 57 | −45 | gb105pln | Maize (Zea mays) histone H4 gene (H4C14), complete cds. | |
| 700346888H1 | g899607 | 68 | −36 | gb105pln | Zea mays polyubiquitin (MubC5) mRNA, complete cds. | |
| 700343322H1 | g1657763 | 13 | 10 | gb105pln | Zea mays retrotransposon Ji-3 5′ LTR and primer binding site DNA sequence. | |
| 700343295H1 | g2760839 | 15 | −2 | gb105eukp | F18A8.10; putative receptor kinase | |
| 700380070H1 | g1435156 | 50 | −6 | gb105pln | L. esculentum mRNA for histone H3 variant H3.3. | |
| 700343623H1 | g1322844 | 22 | −6 | gb105eukp | SPT16 | |
| 700342343H1 | g602398 | 20 | −2 | gb105eukp | SPF1; P-type ATPase | |
| 700343717H1 | g600390 | 17 | −1 | gb105pln | A. thaliana UbcAT4b mRNA for ubiquitin conjugating enzyme E2. | |
| 700281969H2 | g2791884 | 18 | −3 | gb105pln | Arabidopsis thaliana JAB1 (JAB1) mRNA, complete cds. | |
| 700281967H1 | g514945 | 54 | −82 | gb105pln | Zea mays sucrose synthase (Sus1) mRNA, complete cds. | |
| 700347133H1 | g1668706 | 51 | 0 | gb105eukp | atran2 | |
| 700346930H1 | g2827559 | 8 | 8 | gb105eukp | T12H17.210; predicted protein | |
| 700343874H1 | g2827650 | 27 | −13 | gb105eukp | F18F4.60; potassium transporter-like protein | |
| 700344108H1 | g1206016 | 14 | 12 | gb105pln | Yeast (Schizosaccharomyces pombe) ribosomal protein L5 gene, complete cds. | |
| 700346968H1 | g1864002 | 23 | −35 | gb105pln | Nicotiana tabacum mRNA for 21D7, complete cds. | |
| 700346207H1 | g141900 | 8 | 6 | gb105allp | alcohol dehydrogenase (EC 1.1.1.1) | |
| 700281877H2 | g456508 | 47 | −27 | gb105pln | A. thaliana ASK-gamma mRNA. | |
| 700380172H1 | g2414643 | 28 | −15 | gb105pln | Yeast (Saccharomyces pombe) chromosome I cosmid c3H5. | |
| 700346992H1 | g2443472 | 41 | −19 | gb105eukp | SF2; ASF/SF2 homolog | |
| 700346309H1 | g312178 | 32 | −52 | gb105pln | Z. mays GapC2 gene. | |
| 700345729H1 | g1272634 | 13 | 1 | gb105eukp | K07C5.4 | |
| 700344480H1 | g2564051 | 39 | −1 | gb105pln | Arabidopsis thaliana genomic DNA, chromosome 5, P1 clone: MWD9, complete | |
| | | | | | sequence. | |
| 700345085H1 | g1755008 | 76 | −66 | gb105pln | Triticum aestivum calmodulin TaCaM4-1 mRNA, complete cds. | |
| 700343811H1 | g2459531 | 27 | −14 | gb105eukp | Mf-FatB1; acyl-ACP thioesterase | |
| 700342716H1 | g2288886 | 24 | −9 | gb105pln | Arabidopsis thaliana mRNA for mevaolonate diphosphate decarboxylase. | |
| 700345974H1 | g2827001 | 63 | −12 | gb105pln | Triticum aestivum 70 kDa heat shock protein (TaHSP70d) mRNA, complete cds. | |
| 700343574H1 | g2267005 | 35 | −19 | gb105pln | Oryza sativa endosperm lumenal binding protein (BiP) mRNA, complete cds. | |
| 700343059H1 | g577611 | 70 | −83 | gb105pln | Zea mays CRT1 gene for calcium-binding protein. | |
| 700342287H1 | g459017 | 6 | −4 | gb105eukp | atp6; subunit 6 of the ATPase complex | |
| 700342532H1 | g1438971 | 6 | 5 | gb105allp | potassium channel Kv8.1 | |
| 700347070H1 | g2246455 | 19 | −1 | gb105pln | Arabidopsis thaliana S-adenosyl-methionine-sterol-C-methyltransferase mRNA, | |
| | | | | | complete cds. | |
| 700343890H1 | g1845194 | 41 | −59 | gb105pln | Z. mays mRNA for HMGc1 protein. | |
| 700343209H1 | g1770036 | 15 | 1 | gb105allp | hypothetical protein | |
| 700380711H1 | g2827081 | 39 | −37 | gb105pln | Medicago sativa cytosolic malate dehydrogenase (cmdh) mRNA, complete cds. | |
| 700379992H1 | g556409 | 12 | 4 | gb105eukp | RITA-1; transcriptional activator protein | |
| 700344220H1 | g391602 | 34 | −34 | gb105pln | Arabidopsis thaliana mRNA for casein kinase II catalystic subunit. | |
| 700346872H1 | g1245870 | 15 | 3 | gb105allp | replication factors MCM = dpa [Drosophila, Peptide, 866 aa] | |
| 700346067H1 | g349405 | 14 | 17 | gb105pln | Brassica napus (clone BnNa) DNA sequence. | |
| 700344372H1 | g285999 | 18 | 3 | gb105allp | KIAA0017 | |
| 700346883H1 | g2262163 | 34 | −7 | gb105eukp | F5J6.8; hypothetical protein similar to F5J6.10 | |
| 700344784H1 | g1248203 | 14 | 7 | gb105allp | Synthetic mature subtilisin 309 gene | |
| 700344201H1 | g415316 | 22 | −23 | gb105pln | Rice mRNA for acidic ribosomal protein P0, complete cds. | |
| 700344836H1 | g2689242 | 27 | −5 | gb105pln | A. thaliana mRNA for ubiquitin conjugating enzyme UBC2. | |
| 700347390H1 | g2160160 | 44 | −25 | gb105eukp | F21M12.5 | |
| 700342828H1 | g2414643 | 23 | −4 | gb105pln | Yeast (Saccharomyces pombe) chromosome I cosmid c3H5. | |
| 700380444H1 | g643596 | 33 | −9 | gb105pln | Corn mRNA for cysteine proteinase, clone CCP, complete cds. | |
| 700343339H1 | g2736191 | 15 | 5 | gb105allp | DfrA | |
| 700342484H1 | g1360177 | 12 | 7 | gb105allp | ORF YLL011w | |
| 700380569H1 | g8040 | 25 | −0 | gb105eukp | histone H2A variant (AA 1-141) | |
| 700343166H1 | g2351577 | 19 | −2 | gb105pln | Prunus armeniaca adenylate kinase homolog mRNA, complete cds. | |
| 700344091H1 | g1132482 | 38 | −18 | gb105pln | Rice mRNA for ADP-ribosylation factor, complete cds. | |
| 700343229H1 | g168543 | 100 | −36 | gb105pln | Zea mays putative ribosomal protein S8 mRNA, partial cds. | |
| 700343924H1 | g459199 | 18 | 7 | gb105pln | Gossypium hirsutum vacuolar H+-ATPase subunit B mRNA, partial cds. | |
| 700343660H1 | g1009237 | 52 | −53 | gb105pln | Tupeia antarctica (Forst. f.) Chamb. and Schlecht. 18S ribosomal RNA gene, partial | |
| | | | | | sequence. | |
| 700342370H1 | g21796 | 58 | −47 | gb105pln | Wheat histone H3 gene. | |
| 700347302H1 | g2599103 | 7 | 15 | gb105pln | Dunaliella salina 60S ribosomal protein (DSRP1) mRNA, complete cds. | |
| 700343219H1 | g1401233 | 17 | 3 | gb105pln | Pinus taeda water deficit inducible protein LP3-3 (lp3-3) mRNA, partial cds. | |
| 700346088H1 | g1360388 | 6 | 7 | gb105eukp | ORF YLR051c | |
| 700343157H1 | g644492 | 80 | −79 | gb105pln | Corn elongation factor 1alpha gene, complete cds. | |
| 700342896H1 | g1469220 | 35 | −8 | gb105pln | B. oleracea mRNA (unknown). | |
| 700342446H1 | g1051257 | 59 | −48 | gb105pln | Hordeum vulgare vacuolar ATPase catalystic subunit mRNA, partial cds. | |
| 700345652H1 | g203604 | 59 | 2 | gb105allp | contiguous repeat polypeptide | |
| 700344609H1 | g1732515 | 9 | 5 | gb105allp | myosin heavy chain-like protein | |
| 700344191H1 | g2408032 | 11 | 6 | gb105allp | hypothetical protein | |
| 700342352H1 | g2353331 | 25 | −14 | gb105eukp | rpS19; ribosomal protein S19 | |
| 700344194H1 | g508307 | 30 | −17 | gb105pln | Arabidopsis thaliana protein-serine kinase mRNA, complete cds. | |
| 700344010H1 | g473604 | 9 | 14 | gb105pln | Zea mays W-22 histone H2B mRNA, complete cds. | |
| 700347001H1 | g1906827 | 54 | −44 | gb105pln | A. thaliana hsp81.4 gene. | |
| 700344191H1 | g1688076 | 10 | 7 | gb105allp | tetratricopeptide repeat protein | |
| 700342482H1 | g169589 | 13 | 4 | gb105eukp | U2B; U2snRNP-specific protein; spliceosomal protein | |
| 700347067H1 | g1772495 | 6 | 6 | gb105eukp | HMB-CoA synthase; hydroxymethylglutaryl-CoA synthase; EC 4.1.3.5 | |
| 700345565H1 | g1724101 | 58 | −46 | gb105pln | Mesembryanthemum crystallinum S-adenosyl-L-homocystein hydrolase mRNA, | |
| | | | | | complete cds. | |
| 700343332H1 | g603601 | 15 | −0 | gb105eukp | NTF2; Ntf2p: Nuclear Transport Factor 2 | |
| 700379666H1 | g168500 | 25 | −44 | gb105pln | Maize (Zea mays) histone H4 gene (H4C14), complete cds. | |
| 700347314H1 | g533251 | 26 | −19 | gb105pln | Zea mays (clone pSM8) sucrose synthase 2 (Sus1) gene, complete cds. | |
| 700343045H1 | g2190976 | 12 | 4 | gb105allp | macrophage migration inhibitory factor | |
| 700343386H1 | g486551 | 11 | 7 | gb105allp | ORF YKR076w | |
| 700281876H2 | g2414402 | 28 | −17 | gb105eukp | Y57G11C.15 | |
| 700380593H1 | g168639 | 41 | −74 | gb105pln | Zea mays autonomous transposable element En-1 mosaic protein gene, complete cds. | |
| 700343157H1 | g2282583 | 83 | −81 | gb105pln | Zea mays elongation factor 1-alpha (EF1-A) mRNA, complete cds. | |
| 700344005H1 | g736271 | 51 | −25 | gb105pln | O. sativa hsp70 gene for heat shock protein 70. | |
| 700347378H1 | g2668748 | 31 | −19 | gb105eukp | rp117; ribosomal protein L17 | |
| 700346242H1 | g450548 | 36 | −16 | gb105pln | O. sativa (pRSAM-1) gene for S-adenosyl methionine synthetase. | |
| 700379824H1 | g403228 | 19 | 7 | gb105allp | ribonucleotide reductase small subunit | |
| 700346865H1 | g474009 | 65 | −49 | gb105pln | Rice mRNA, partial homologus to ribosomal protein S19 gene. | |
| 700343526H1 | g2244881 | 15 | 3 | gb105eukp | PDR5-like ABC transporter | |
| 700344660H1 | g452712 | 40 | −6 | gb105eukp | beta-galactosidase; EC 3.2.1.23 | |
| 700342367H1 | g902585 | 44 | −64 | gb105pln | Zea mays clone MubG9 ubiquitin gene, complete cds. | |
| 700379726H1 | g496271 | 23 | −2 | gb105pln | Nicotiana tabacum small Ras-like GTP-binding protein (Ran-B1) mRNA, complete cds. | |
| 700343063H1 | g2245029 | 11 | 6 | gb105eukp | limonene cyclase homolog | |
| 700346629H1 | g218182 | 40 | −22 | gb105pln | Rice mRNA for oryzain beta (EC 3.4.22). | |
| 700344132H1 | g1786871 | 8 | 7 | gb105allp | f311; 100 pct identical to fragment YBEK_ECOLI SW: P41409 (123 aa) but contains | |
| | | | | | 188 additional C-ter residues | |
| 700344316H1 | g1420686 | 14 | −2 | gb105eukp | RPL18B | |
| 700345189H1 | g602301 | 13 | 14 | gb105pln | Arabidopsis thaliana diminuto (DIM) mRNA, complete cds. | |
| 700344065H1 | g291927 | 46 | −4 | gb105allp | cystatin B | |
| 700344170H1 | g16086 | 23 | −4 | gb105pln | A. porrum dnaJ mRNA for DNA J protein (partial). | |
| 700343466H1 | g17645 | 49 | −5 | gb105allp | RIBOSOMAL PROTEIN L35a | |
| 700342763H1 | g2689469 | 19 | 3 | gb105eukp | IAA22 | |
| 700346208H1 | g218334 | 34 | −32 | gb105pln | Triticum aestivum mRNA for O-acetylserine (thiol) lyase. | |
| 700343436H1 | g1872521 | 20 | −5 | gb1053eukp | LSD1; negative regulator of cell death; zinc-finger protein Lsd1 | |
| 700379728H1 | g387908 | 36 | −32 | gb105pln | Brassica rapa S-phase-specific (BIS289) mRNA, complete cds. | |
| 700346636H1 | g22324 | 33 | −23 | gb105pln | Z. mays mRNA for H2B histone (clone cH2B221). | |
| 700346165H1 | g1877024 | 68 | −5 | gb105pln | Rice mitochondrial DNA for ribosomal protein L2, ribosomal protein S19, | |
| | | | | | complete cds. | |
| 700343507H1 | g1755008 | 44 | −33 | gb105pln | Triticum aestivum calmodulin TaCaM4-1 mRNA, complete cds. | |
| 700343395H1 | g498741 | 39 | −22 | gb105pln | H. vulgare (pMaW25) mRNA for beta-ketoacyl-ACP synthase. | |
| 700343155H1 | g1263313 | 26 | −8 | gb105pln | Arabidopsis thaliana molybdenum cofactor biosyntheses enzyme (cnx1) mRNA, | |
| | | | | | complete cds. | |
| 700346272H1 | g2764992 | 13 | 3 | gb105allp | plasma membrane polypeptide | |
| 700343966H1 | g2245109 | 17 | −2 | gb105eukp | carboxyl-terminal proteinase homolog | |
| 700343424H1 | g2414643 | 37 | −27 | gb105pln | Yeast (Saccharomyces pombe) chromosome I cosmid c3H5. | |
| 700346313H1 | g57002 | 8 | 6 | gb105allp | pyrimidine binding protein 1 | |
| 700347305H1 | g1314086 | 7 | 6 | gb105eukp | YPR011C; unknown | |
| 700346506H1 | g1845196 | 27 | −24 | gb105pln | Z. mays mRNA for HMGc2 protein. | |
| 700380788H1 | g899607 | 59 | −49 | gb105pln | Zea mays polyubiquitin (MubC5) mRNA, complete cds. | |
| 700380186H1 | g303834 | 31 | −32 | gb105pln | Rice mRNA for 21kd polypeptide, complete cds. | |
| 700344337H1 | g1262279 | 19 | −6 | gb105eukp | MDL3; catalyzes dissociation of (R)-mandelonitrile to hydrogen cyanide and | |
| | | | | | benzaldehyde; (R)-(+)-mandelonitrile lyase isoform precursor; EC 4.1.2.10 | |
| 700346193H1 | g514945 | 43 | −7 | gb105pln | Zea mays sucrose synthase (Sus1) mRNA, complete cds. | |
| 700347163H1 | g2407800 | 16 | 7 | gb105eukp | H2Av; histone H2A.F/Z | |
| 700281828H2 | g902583 | 67 | −60 | gb105pln | Zea mays clone MubG1 ubiquitin gene, complete cds. | |
| 700342650H1 | g927571 | 95 | −51 | gb105pln | Z. mays mRNA for calreticulin precursor. | |
| 700343586H1 | g552530 | 14 | −10 | gb105eukp | cytochrome b | |
| 700344734H1 | g2431768 | 62 | −61 | gb105pln | Zea mays acidic ribosomal protein Pla (rppla) mRNA, complete cds. | |
| 700347107H1 | g218237 | 20 | −11 | gb105pln | Rice mRNA for ribosomal protein S22 (T47 gene), partial sequence. | |
| 700345888H1 | g2352492 | 16 | −4 | gb105eukp | TIR1; transport inhibitor response 1 | |
| 700343162H1 | g395156 | 27 | −11 | gb105pln | Yeast (Saccharomyces cerevisiae) PRP8 gene, complete CDS. | |
| 700346527H1 | g1276967 | 18 | −7 | gb105eukp | putative ribosomal protein | |
| 700343777H1 | g2814254 | 17 | 3 | gb105eukp | JC8.g | |
| 700347033H1 | g2302292 | 14 | 7 | gb105allp | unnamed protein product | |
| 700347003H1 | g1321660 | 32 | −32 | gb105pln | Rice mRNA for ascorbate peroxidase, complete cds. | |
| 700345785H1 | g577276 | 9 | 6 | gb105allp | ring canal protein | |
| 700380179H1 | g1322276 | 28 | −5 | gb105pln | Triticum aestivum histone H2A gene, complete cds. | |
| 700343151H1 | g1502354 | 25 | −10 | gb105pln | Yeast (Saccharomyces cerevisiae) genomic sequence from chromosome VII. | |
| 700379705H1 | g22447 | 13 | 14 | gb105pln | Zea mays ZMPMS2 gene for 19 kDa zein protein. | |
| 700343013H1 | g20163 | 43 | −32 | gb105pln | O. sativa Rr15 mRNA for 5S ribosomal RNA. | |
| 700380670H1 | g2282583 | 58 | −60 | gb105pln | Zea mays elongation factor 1-alpha (EF1-A) mRNA, complete cds. | |
| 700344814H1 | g2285928 | 31 | −13 | gb105eukp | signal transduction; receptor tyrosine kinase | |
| 700281833H2 | g2696803 | 21 | 6 | gb105pln | Oryza sativa mRNA for water channel protein, complete cds. | |
| 700281805H2 | g20255 | 56 | −50 | gb105pln | O. sativa gene for heat shock protein 82 HSP82. | |
| 700343702H1 | g1088350 | 8 | 5 | gb105allp | adenylate kinase | |
| 700342309H1 | g2408032 | 10 | 6 | gb105eukp | SPAC17G6.19c; hypothetical protein | |
| 700346667H1 | g1617270 | 17 | 3 | gb105eukp | acyl-CoA synthetase; EC 6.2.1.3 | |
| 700346210H1 | g1783230 | 12 | 8 | gb105allp | aminopeptidase | |
| 700345305H1 | g1244773 | 14 | 1 | gb105eukp | RPL37A; Rp137ap: 60S ribosomal protein L37a | |
| 700380279H1 | g1666172 | 45 | −39 | gb105pln | N. plumbaginifolia mRNA for BTF3-like transcription factor. | |
| 700346248H1 | g998429 | 36 | −17 | gb105pln | GRF1 = general regulartory factor [Zea mays, XL80, Genomic, 5348 nt]. | |
| 700347121H1 | g296203 | 61 | −60 | gb105pln | P. miliaceum mRNA for alanine aminotransferase. | |
| 700345756H1 | g1946354 | 24 | −26 | gb105pln | Arabidopsis thaliana chromosome II BAC T06B20 genomic sequence, complete | |
| | | | | | sequence. | |
| 700344139H1 | g790969 | 65 | −58 | gb105pln | Rice mRNA for aldolase C-1, complete cds. | |
| 700347084H1 | g577818 | 26 | −19 | gb104pln | Z. mays gene for H2B histone (gH2B4). | |
| 700343001H1 | g50113 | 39 | −16 | gb105eukp | POL3; catalytic subunit DNA polymerase delta | |
| 700346704H1 | g1903420 | 5 | 5 | gb105allp | p71 | |
| 700343950H1 | g167607 | 23 | 4 | gb105eukp | actin 7 | |
| 700346461H1 | g514945 | 83 | −68 | gb105pln | Zea mays sucrose synthase (Sus1) mRNA, complete cds. | |
| 700343017H1 | g1197576 | 40 | −26 | gb105pln | H. vulgare mRNA for serpin. | |
| 700342305H1 | g166820 | 34 | −17 | gb105pln | Arabidopsis thaliana protein phosphatase mRNA, complete cds. | |
| 700380696H1 | g780371 | 75 | −66 | gb105pln | Oryza sativa enolase mRNA, complete cds. | |
| 700344968H1 | g1165205 | 19 | 3 | gb105pln | Arabidopsis thaliana multiubiquitin chain binding protein (MBP1) mRNA, complete cds. | |
| 700343484H1 | g836939 | 34 | −17 | gb105pln | Arabidopsis thaliana calcium-dependent protein kinase (CDPK6) mRNA, complete cds. | |
| 700342512H1 | g2264306 | 37 | −27 | gb105pln | Arabidopsis thaliana genomic DNA, chromosome 5, P1 clone: MBK5, complete | |
| | | | | | sequence. | |
| 700342756H1 | g1049306 | 43 | −4 | gb105pln | Arabidopsis thaliana actin-2 mRNA, complete cds. | |
| 700345862H1 | g1617268 | 14 | −2 | gb105eukp | acyl CoA synthetase; EC 6.2.1.3 | |
| 700344066H1 | g2232174 | 24 | 8 | gb105allp | MLD | |
| 700343495H1 | g998429 | 30 | −42 | gb105pln | GRF1 = general regulatory factor [Zea mays, XL80, Genomic, 5348 nt]. | |
| 700345823H1 | g643596 | 90 | −71 | gb105pln | Corn mRNA for cysteine proteinase, clone CCP, complete cds. | |
| 700344675H1 | g189049 | 14 | 1 | gb105allp | NADH dehydrogenase (ubiquinone) | |
| 700343248H1 | g22192 | 31 | −5 | gb105pln | Z. mays B-I gene for B transcriptional activator. | |
| 700346389H1 | g1749440 | 12 | 7 | gb105eukp | similar to Saccharomyces cerevisiae unknown, EMBL Accession Number Z47815 | |
| 700344637H1 | g2323344 | 28 | −13 | gb105eukp | Aglu1; alpha-glucosidase 1; EC 3.2.1.20 | |
| 700379927H1 | g218241 | 21 | −36 | gb105pln | Rice mRNA for ribosomal protein L3 (T82 gene), partial sequence. | |
| 700379647H1 | g1089850 | 69 | −38 | gb105allp | DAP-3 gene product | |
| 700345537H1 | g171053 | 15 | −0 | gb105eukp | AMP deaminase (EC 3.5.4.6) | |
| 700344182H1 | g169022 | 48 | −38 | gb105pln | Pisum sativum chloroplast stromal 70 kDa heat shock protein (hsp70) mRNA, | |
| | | | | | complete cds. | |
| 700342944H1 | g1360322 | 16 | −4 | gb105eukp | ORF YLR019w | |
| 700346079H1 | g439585 | 33 | −10 | gb105pln | Hordeum vulgare calreticulin (CRH1) mRNA, partial cds. | |
| 700380090H1 | g1054677 | 28 | −3 | gb105eukp | coxIII; cytochrome oxidase | |
| 700346932H1 | g886739 | 51 | −46 | gb105pln | Z. mays histone H4 gene. | |
| 700343049H1 | g576507 | 21 | −17 | gb105eukp | IAP75; component of chloroplast outer membrane protein import machinery; outer | |
| | | | | | membrane protein | |
| 700343076H1 | g1008185 | 7 | 6 | gb105eukp | MTR4 | |
| 700345689H1 | g2780344 | 24 | −3 | gb105pln | Arabidopsis thaliana gene for inorganic phosphate transporter, complete cds. | |
| 700345058H1 | g2073374 | 60 | −56 | gb105pln | Rice mRNA for farnesyl pyrophosphate synthase, complete cds. | |
| 700345696H1 | g717189 | 64 | 2 | gb105allp | RNA polymerase II subunit | |
| 700344182H1 | g1928990 | 41 | −30 | gb105pln | Citrullus lanatus heat shock protein 70 precursor mRNA, complete cds. | |
| 700343113H1 | g2760169 | 28 | −7 | gb105pln | Arabidopsis thaliana genomic DNA, chromosome 5, P1 clone: MFB13, complete | |
| | | | | | sequence. | |
| 700343807H1 | g1841398 | 35 | −25 | gb105pln | A. thaliana mRNA for AtTFIIB2 protein. | |
| 700344369H1 | g971699 | 8 | −2 | gb105allp | ribosomal protein S7 | |
| 700343892H1 | g170746 | 54 | −44 | gb105pln | Wheat histone H4 TH091 gene, complete cds. | |
| 700281960H2 | g2244788 | 21 | −3 | gb105pln | Arabidopsis thaliana DNA chromosome 4, ESSA I contig fragment No. 1. | |
| 700346736H1 | g391605 | 21 | 4 | gb105allp | casein kinase II catalytic subunit | |
| 700343819H1 | g21794 | 57 | −48 | gb105pln | Wheat histone H4 gene. | |
| 700346876H1 | g2224750 | 19 | −13 | gb105pln | Arabidopsis thaliana mRNA for ribosomal protein S6. | |
| 700346020H1 | g5037 | 26 | −4 | gb105pln | Yeast (Schizosaccharomyces pombe) mRNA for a ras-related GTP-binding protein. | |
| 700379729H1 | g416148 | 53 | −40 | gb105pln | Zea mays beta-7 tubulin (tub7) mRNA, complete cds. | |
| 700343432H1 | g2369765 | 42 | −32 | gb105pln | Citrus paradisi mRNA for hypothetical protein. | |
| 700347240H1 | g2459406 | 42 | −29 | gb105pln | Arabidopsis thaliana chromosome II BAC F4P9 genomic sequence, complete sequence. | |
| 700345993H1 | g474002 | 52 | −29 | gb105pln | Rice mRNA, partial homologous to ribosomal protein L39 gene. | |
| 700345077H1 | g2618605 | 34 | −23 | gb105pln | Arabidopsis thaliana genomic DNA, chromosome 5, P1 clone: MUK11, complete | |
| | | | | | sequence. | |
| 700343005H1 | g600768 | 52 | −37 | gb105pln | Oryza sativa cyclophilin 2 (Cyp2) mRNA, complete cds. | |
| 700345557H1 | g2668743 | 39 | −34 | gb105pln | Zea mays ubiquitin conjugating enzyme (UBC) mRNA, complete cds. | |
| 700345123H1 | g20163 | 51 | −46 | gb105pln | O. sativa Rr15 mRNA for 5S ribosomal RNA. | |
| 700345378H1 | g2460124 | 16 | 5 | gb105allp | putative transcription factor CA150 | |
| 700343709H1 | g459197 | 23 | −4 | gb105pln | Gossypium hirsutum vacuolar H+-ATPase subunit B mRNA, complete cds. | |
| 700342754H1 | g1519250 | 55 | −41 | gb105pln | Oryza sativa GF14-c protein mRNA, complete cds. | |
| 700343829H1 | g397395 | 64 | −43 | gb105pln | Z. mays MNB1b mRNA for DNA-binding protein. | |
| 700344840H1 | g22483 | 39 | −43 | gb105pln | Z. mays RNA for superoxide dismutase Sod4. | |
| 700347238H1 | g18330 | 18 | −0 | gb105eukp | CARSR8; glutathione s-transferase | |
| 700344042H1 | g21794 | 69 | −58 | gb105pln | Wheat histone H4 gene. | |
| 700281942H2 | g394754 | 16 | 4 | gb105pln | S. oleracea atpG mRNA for chloroplast CF(o)II ATP synthase subunit 9. | |
| 700379679H1 | g432367 | 60 | −54 | gb105pln | Rice mRNA for elongation factor 1 beta, complete cds. | |
| 700345729H1 | g984964 | 14 | −0 | gb105eukp | SIK1; suppressor of toxicity of GAL4-IKB; Sik1p | |
| 700344212H1 | g971283 | 33 | −14 | gb105pln | Rice mRNA for ribosomal protein S31, complete cds. | |
| 700347018H1 | g21228 | 40 | −15 | gb105eukp | 37 kD inner envelope membrane polypeptide | |
| 700345865H1 | g14199 | 30 | −11 | gb105pln | Petunia sp. mitochondrial rps19 gene for ribosomal protein S19. | |
| 700345971H1 | g1184775 | 60 | −49 | gb105pln | Zea mays glyceraldehyde-3-phosphate dehydrogenase GAPC4 (gpc4) mRNA, | |
| | | | | | complete cds. | |
| 700345575H1 | g602757 | 48 | −38 | gb105pln | Lycopersicon esculentum clp-like energy-dependent protease mRNA, complete cds. | |
| 700343596H1 | g22314 | 98 | −83 | gb105pln | Maize mRNA for GSH gluthatione S-transferase I (GST; EC 2.5.1.18). | |
| 700344163H1 | g2668743 | 70 | −52 | gb105pln | Zea mays ubiquitin conjugating enzyme (UBC) mRNA, complete cds. | |
| 700346344H1 | g2058313 | 18 | −6 | gb105eukp | CCR1; cinnamoyl-CoA reductase; EC 1.2.1.44 | |
| 700380711H1 | g1524120 | 40 | −38 | gb105pln | M. crystallinum mRNA for malate dehydrogenase. | |
| 700380076H1 | g928932 | 46 | −1 | gb105eukp | D18; sugar metabolism; homolog of dTDP-glucose 4-6-dehydratases | |
| 700345975H1 | g436030 | 61 | −4 | gb105eukp | 60S ribosomal protein L34 | |
| 700342384H1 | g972243 | 32 | −0 | gb105allp | ribosomal protein S5 | |
| 700281956H2 | g2274990 | 30 | −22 | gb105pln | Hordeum vulgare mRNA for expressed sequence tag. | |
| 700342732H1 | g1132482 | 72 | −70 | gb105pln | Rice mRNA for ADP-ribosylation factor, complete cds. | |
| 700345908H1 | g2827524 | 31 | −6 | gb105eukp | F8F16.110; predicted protein | |
| 700344132H1 | g1788486 | 10 | 3 | gb105allp | hypothetical 33.7 kD protein in nfo-fruA intergenic region | |
| 700344003H1 | g1360146 | 19 | −3 | gb105pln | Yeast (Saccharomyces cerevisiae) NBP35 gene. | |
| 700347063H1 | g529357 | 53 | −31 | gb105eukp | T12A2.2 | |
| 700346001H1 | g468732 | 33 | −29 | gb105pln | R. sativus (Fakir) APX mRNA for L-ascorbate peroxidase. | |
| 700344903H1 | g666094 | 12 | −2 | gb105eukp | DNA primase large chain (P58) | |
| 700343245H1 | g17935 | 40 | −25 | gb105pln | B. vulgaris mRNA for salt-inducible betaine aldehyde dehydrogenase. | |
| 700343926H1 | g1305457 | 16 | 4 | gb105eukp | ROC2; cytosolic cyclophilin | |
| 700346501H1 | g473602 | 35 | −23 | gb105pln | Zea mays W-22 histone H2A mRNA, complete cds. | |
| 700346621H1 | g455864 | 27 | −28 | gb105pln | CAS1 = cycloartenol synthase [Arabidopsis thaliana, mRNA, 2560 nt]. | |
| 700379919H1 | g168460 | 77 | −72 | gb105pln | Zea mays cyclophilin (CyP) mRNA, complete cds. | |
| 700346661H1 | g485376 | 63 | −60 | gb105pln | Zea mays alpha-3-tubulin gene, complete cds. | |
| 700345549H1 | g602605 | 34 | −12 | gb105pln | Zea mays tandem genes for alpha1-tubulin and alpha2-tubulin. | |
| 700343716H1 | g459894 | 69 | −70 | gb105pln | Zea mays sus1 gene, complete cds. | |
| 700342264H1 | g2641618 | 44 | −27 | gb105pln | Zea mays ubiquitin-conjugating enzyme protein E2 (ubc7) mRNA, complete cds. | |
| 700346319H1 | g454847 | 30 | −39 | gb105pln | Glycine max ribosomal protein S11 gene, complete cds. | |
| 700345013H1 | g1143863 | 23 | 6 | gb105pln | Oryza sativa beta-glucosidase mRNA, nucleaqr gene encoding chloroplast protein, | |
| | | | | | complete cds. | |
| 700380508H1 | g2088638 | 24 | −8 | gb105pln | Arabidopsis thaliana chromosome II BAC T28M21 genomic sequence, complete | |
| | | | | | sequence. | |
| 700346495H1 | g416265 | 17 | −1 | gb105pln | Rice mRNA for ribosomal protein A2, partial sequence. | |
| 700345727H1 | g2258468 | 45 | −56 | gb105pln | Oryza sativa replication protein A1 (Os-RPA1) mRNA, complete cds. | |
| 700343930H1 | g2599103 | 21 | −5 | gb105pln | Dualiella salina 60S ribosomal protein (DSRP1) mRNA, complete cds. | |
| 700346011H1 | g1004231 | 19 | 2 | gb105allp | seryl-tRNA synthetase | |
| 700343131H1 | g726471 | 34 | 0 | gb105eukp | unknown | |
| 700347156H1 | g287628 | 49 | −8 | gb105eukp | YS29A; ribosomal protein YS29 | |
| 700342284H1 | g156372 | 19 | −5 | gb105eukp | mlc-1; myosin light chain 1 | |
| 700347008H1 | g2760173 | 18 | −9 | gb105pln | Arabidopsis thaliana genomic DNA, chromosome 5, P1 clone: MYH19, complete | |
| | | | | | sequence. | |
| 700343144H1 | g1575127 | 87 | −54 | gb105pln | Zea mays lumenal binding protein cBiPe2 mRNA, complete cds. | |
| 700379726H1 | g496267 | 22 | −3 | gb105pln | Nicotiana tabacum GTP-binding protein (Ran-A1) mRNA, complete cds. | |
| 700345422H1 | g2145358 | 21 | −10 | gb105eukp | ATHB-9; transcription factor; HD-Zip protein | |
| 700344088H1 | g2264317 | 21 | −5 | gb105pln | Arabidopsis thaliana genomic DNA, chromosome 5, P1 clone: MUG13, complete | |
| | | | | | sequence. | |
| 700344032H1 | g2244760 | 23 | 8 | gb105allp | selenium-binding protein | |
| 700343859H1 | g2213621 | 37 | −14 | gb105eukp | F21J9.26 | |
| 700345990H1 | g2829887 | 18 | 5 | gb105allp | Hypothetical protein | |
| 700344203H1 | g516043 | 19 | −1 | gb105eukp | DWF1; Dwarf1 | |
| 700281860H2 | g168494 | 39 | 12 | gb105pln | Maize (Zea mays) histone H3 gene (H3C2), complete cds. | |
| 700345483H1 | g2058313 | 15 | −1 | gb105eukp | CCR1; cinnamoyl-CoA reductase; EC 1.2.1.44 | |
| 700346164H1 | g515759 | 15 | −2 | gb105eukp | malate dehydrogenase (NADP+); EC 1.1.1.40 | |
| 700380141H1 | g971830 | 42 | 3 | gb105allp | tubulin alpha-3 chain | |
| 700345223H1 | g4392 | 16 | −2 | gb105eukp | RPL37A; ribosomal protein L37a | |
| 700343508H1 | g2245096 | 13 | −3 | gb105eukp | inositol 2-dehydrogenase homolog | |
| 700345958H1 | g22484 | 32 | 3 | gb105pln | Z. mays RNA for superoxide dismutase Sod4A. | |
| 700345759H1 | g2662340 | 83 | −76 | gb105pln | Oryza sativa mRNA for EF-1 alpha, complete cds. | |
| 700346723H1 | g43030 | 19 | −1 | gb105allp | TAGI (aa 1-187) | |
| 700343702H1 | g1088346 | 8 | 5 | gb105allp | adenylate kinase | |
| 700342946H1 | g303852 | 58 | −47 | gb105pln | Rice mRNA for ribosomal protein L3, complete cds. | |
| 700343960H1 | g30293 | 18 | 2 | gb105allp | CTP synthetase (AA 1-591) | |
| 700343470H1 | g21796 | 65 | −42 | gb105pln | Wheat histone H3 gene. | |
| 700380518H1 | g20255 | 29 | −22 | gb105pln | O. sativa gene for heat shock protein 82 HSP82. | |
| 700346587H1 | g1903032 | 33 | −16 | gb105pln | B. napus mRNA for acyl-CoA synthetase (2360 bp). | |
| 700380781H1 | g21800 | 23 | −45 | gb105pln | T. aestivum L mRNA for histone H2B. | |
| 700346419H1 | g1930071 | 24 | −3 | gb105pln | Oryza sativa thioredoxin h mRNA, complete cds. | |
| 700344709H1 | g620041 | 31 | −34 | gb105pln | A. adeninivorans TEF gene for translation elongation factor EF-1alpha. | |
| 700342823H1 | g1136121 | 63 | −64 | gb105pln | O. sativa mRNA for alpha-tubulin (clone OSTA-136). | |
| 700343305H1 | g1742934 | 16 | 9 | gb105pln | A. bisporus rs13 mRNA for 40S ribosomal protein S13. | |
| 700347284H1 | g217827 | 29 | −5 | gb105eukp | AHBP-1b; AHBP-1b | |
| 700342726H1 | g2252864 | 9 | 2 | gb105allp | Similar to receptor kinase | |
| 700347150H1 | g2828296 | 32 | −10 | gb105eukp | T18B16.180; RNase L inhibitor | |
| 700343925H1 | g203066 | 18 | 4 | gb105allp | aspartyl-tRNA synthetase | |
| 700281852H2 | g2213884 | 25 | 5 | gb105eukp | lp-ipmsb; first enzyme in leucine biosynthesis which catalyzes condensation of acetyl- | |
| | | | | | CoA and 2-oxoisovalerate to form 2-isopropylmalate synthase; 2-isopropylmalate | |
| | | | | | synthase; EC 4.1.3.12 | |
| 700380284H1 | g398605 | 28 | −11 | gb105pln | A. thaliana gene for elongation factor 1 beta. | |
| 700345221H1 | g434905 | 22 | −15 | gb105pln | A. thaliana (Columbia) gene for S18 ribosomal protein (1471 bp). | |
| 700344044H1 | g406733 | 24 | 3 | gb105eukp | RpL18a; ribosomal protein L18a | |
| 700344035H1 | g2641200 | 54 | −26 | gb105pln | Fritillaria agrestis ribosomal protein L23a (rp123a) mRNA, complete cds. | |
| 700343663H1 | g1906812 | 56 | −24 | gb105allp | inducible carbonyl reductase | |
| 700380747H1 | g2293565 | 26 | −5 | gb105pln | Oryza sativa ADP-ribosylation factor 1 (Os-ARF1) mRNA, complete cds. | |
| 700344506H1 | g1255025 | 23 | 5 | gb105allp | FBP 11 | |
| 700342949H1 | g474002 | 46 | −23 | gb105pln | Rice mRNA, partial homologous to ribosomal protein L39 gene. | |
| 700346009H1 | g166857 | 57 | −46 | gb105pln | Arabidopsis thaliana cytoplasmic ribosomal protein mRNA, complete cds. | |
| 700380658H1 | g1143445 | 33 | 7 | gb105allp | cinnamyl alcohol dehydrogenase | |
| 700380490H1 | g168650 | 26 | −4 | gb105pln | Zea mays ubiquitin fusion protein (UBF9) gene, complete cds. | |
| 700346681H1 | g575730 | 24 | 1 | gb105pln | Z. mays mRNA for transmembrane protein. | |
| 700346162H1 | g601789 | 11 | −4 | gb105eukp | AFC2; protein kinase | |
| 700344852H1 | g531055 | 30 | −27 | gb105pln | Wheat mRNA for protein H2B-6, complete cds. | |
| 700379690H1 | g2218151 | 34 | −11 | gb105pln | Vigna unguiculata type IIa membrane protein cp-wap13 mRNA, complete cds. | |
| 700346005H1 | g902558 | 28 | 3 | gb105allp | acidic ribosomal phosphoprotein P1 | |
| 700344150H1 | g1783168 | 48 | −0 | gb105allp | CIRP | |
| 700344144H1 | g398328 | 30 | −10 | gb105pln | H. annuus mRNA for protein phosphatase type 2A. | |
| 700346392H1 | g2183249 | 19 | 2 | gb105eukp | glutathione-S-transferase | |
| 700345257H1 | g2811284 | 13 | 6 | gb105allp | ribosomal protein S7 | |
| 700343012H1 | g22322 | 17 | −16 | gb105pln | Z. mays mRNA for H2B histone (clone cH2B214). | |
| 700380053H1 | g170784 | 20 | 15 | gb105pln | Wheat ubiquitin carrier protein (UBC1) mRNA, complete cds. | |
| 700345320H1 | g1718497 | 26 | −18 | gb105eukp | ARP3; actin-related protein 3 | |
| 700343907H1 | g2435529 | 12 | −3 | gb105eukp | C10E2.3 | |
| 700342567H1 | g2281103 | 14 | 4 | gb105eukp | F18O19.22; Glucan endo-1,3-beta glucosidase isolog | |
| 700344634H1 | g485273 | 28 | −10 | gb105eukp | CDC46; Cdc46p | |
| 700345971H1 | g312180 | 31 | −50 | gb105pln | Z. mays GapC4 gene. | |
| 700346064H1 | g2351382 | 10 | 5 | gb105allp | eIF3-p48 | |
| 700345318H1 | g2832699 | 8 | 8 | gb105eukp | receptor serine/threonine kinase-lie protein | |
| 700342578H1 | g170228 | 32 | −31 | gb105pln | N. tabacum 5-enolpyruvylshikimate-3-phosphate synthase mRNA, complete cds. | |
| 700379915H1 | g442507 | 27 | −11 | gb105pln | Yeast (Saccharomyces pombe) (972) mts2 mRNA for 26S protease subunit. | |
| 700347003H1 | g2274983 | 29 | −27 | gb105pln | Hordeum vulgare mRNA for expressed sequence tag. | |
| 700344151H1 | g1946367 | 7 | 6 | gb105eukp | T06B20.13 | |
| 700343086H1 | g758352 | 74 | −74 | gb105pln | Z. mays mRNA for cysteine synthase. | |
| 700345506H1 | g1375074 | 25 | 0 | gb105pln | Oryza sativa mRNA for glyoxysomal malate dehydrogenase, complete cds. | |
| 700343276H1 | g395156 | 28 | −14 | gb105pln | Yeast (Saccharomyces cerevisiae) PRP8 gene, complete CDS. | |
| 700345535H1 | g1301694 | 12 | 4 | gb105eukp | F55A11.4 | |
| 700342262H1 | g968902 | 13 | −2 | gb105eukp | ribosomal protein S8 | |
| 700342582H1 | g2632109 | 19 | −0 | gb105eukp | phospholipid glutathione peroxidase | |
| 700380574H1 | g2570508 | 32 | −49 | gb105pln | Oryza sativa transmembrane protein mRNA, complete cds. | |
| 700347393H1 | g1619299 | 22 | −12 | gb105pln | L. esculentum LRP gene. | |
| 700342301H1 | g1008880 | 43 | −33 | gb105pln | Phaseolus vulgaris eukaryotic initiation factor 5 (eIF-5) gene, complete cds. | |
| 700346364H1 | g169820 | 56 | −34 | gb105pln | Oryza sativa triosephosphate isomerase (Rictpi) mRNA, complete cds. | |
| 700346181H1 | g21794 | 49 | 14 | gb105pln | Wheat histone H4 gene. | |
| 700342247H1 | g22651 | 21 | −14 | gb105pln | H. vulgare mRNA for GRP94 homologue. | |
| 700346739H1 | g2407273 | 9 | −3 | gb105eukp | lipid transfer protein LPT II | |
| 700347050H1 | g2244788 | 17 | 14 | gb105pln | Arabidopsis thaliana DNA chromosome 4, ESSA I contig fragment No. 1. | |
| 700346159H1 | g1546918 | 22 | −26 | gb105pln | Z. mays mRNA for translation initiation factor 5A. | |
| 700343696H1 | g2388783 | 15 | 6 | gb105allp | DRING protein | |
| 700346276H1 | g2827714 | 12 | 4 | gb105eukp | F6H11.160; receptor protein kinase-like protein | |
| 700346119H1 | g217973 | 32 | −61 | gb105pln | Zea mays gene for triosephosphate isomerase, complete cds. | |
| 700346017H1 | g2582065 | 65 | 2 | gb105allp | NADH dehydrogenase subunit 2 | |
| 700344139H1 | g168419 | 92 | −79 | gb105pln | Maize (Z. mays) aldolase mRNA, complete cds. | |
| 700344143H1 | g535770 | 26 | −5 | gb105pln | Nicotiana tabacum (clone: SP-3) dehydroquinate dehydratase/shikimate dehydrogenase | |
| | | | | | (aroD-E) mRNA, 3′ end. | |
| 700346820H1 | g1724099 | 26 | −4 | gb105pln | Mesembryanthemum crystallinum voltage-dependent anion-selective channel protein | |
| | | | | | porin (VDAC) mRNA, complete cds. | |
| 700343163H1 | g1707009 | 8 | −1 | gb105eukp | T01B08.11; Squamosa-promoter binding protein 1 isolog | |
| 700347192H1 | g1497983 | 44 | −20 | gb105eukp | alien; putative thyroid receptor interacting protein | |
| 700346704H1 | g2062605 | 5 | 5 | gb105allp | brain secretory protein hSec10p | |
| 700343151H1 | g1323459 | 25 | −10 | gb105pln | Yeast (Saccharomyces cerevisiae) chromosome VII reading frame ORF YGR253c. | |
| 700346255H1 | g2702281 | 30 | −20 | gb105eukp | T21L14.14; putative protein disulfide isomerase precursor | |
| 700342652H1 | g2351373 | 60 | −33 | gb105pln | Arabidopsis thaliana putative 26S proteasome subunit athMOV34 mRNA, complete cds. | |
| 700345723H1 | g2274990 | 46 | −60 | gb105pln | Hordeum vulgare mRNA for expressed sequence tag. | |
| 700345693H1 | g312180 | 31 | −44 | gb105pln | Z. mays GapC4 gene. | |
| 700346211H1 | g1483173 | 8 | 5 | gb105eukp | high mobility group protein | |
| 700344516H1 | g2330821 | 17 | −3 | gb105eukp | SPAC4F8.04; hypothetical protein | |
| 700379995H1 | g1931630 | 55 | −31 | gb105pln | Zea mays glutamate dehydrogenase (GDH1) mRNA, complete cds. | |
| 700347252H1 | g20255 | 63 | −57 | gb105pln | O. sativa gene for heat shock protein 82 HSP82. | |
| 700344325H1 | g1653904 | 8 | 5 | gb105allp | tRNA pseudouridine 55 synthase | |
| 700281862H2 | g633940 | 7 | 4 | gb105eukp | PTR2-B; peptide transporter; transport protein | |
| 700346779H1 | g1498257 | 20 | −10 | gb105allp | replication factor C, 36-kKa subunit | |
| 700343946H1 | g2760165 | 26 | −11 | gb105pln | Arabidopsis thaliana genomic DNA, chromosome 5, P1 clone: MAC9, complete | |
| | | | | | sequence. | |
| 700343762H1 | g19874 | 17 | −7 | gb105pln | N. tabacum mRNA for glutamate-1-semialdehyde aminotransferase. | |
| 700343663H1 | g666087 | 56 | −25 | gb105allp | carbonyl reductase (NADPH) | |
| 700343238H1 | g168543 | 72 | −23 | gb105pln | Zea mays putative ribosomal protein S8 mRNA, partial cds. | |
| 700380765H1 | g2511594 | 39 | −9 | gb105eukp | prcd; multicatalytic endopeptidase complex, proteasome precursor, beta subunit, | |
| | | | | | EC 3.4.99.46 | |
| 700347111H1 | g699510 | 25 | 1 | gb105allp | minute(1)1B protein | |
| 700344112H1 | g168494 | 55 | −29 | gb105pln | Maize (Zea mays) histone H3 gene (H3C2), complete cds. | |
| 700342243H1 | g2511590 | 23 | 1 | gb105allp | multicatalytic endopeptidase complex, proteasome component, beta subunit | |
| 700343858H1 | g540581 | 10 | 4 | gb105eukp | mudrA | |
| 700380608H1 | g664902 | 26 | −19 | gb105pln | C. plantagineum tkt7 gene for transketolase. | |
| 700281812H2 | g416150 | 85 | −57 | gg105pln | Zea mays beta-8 tubulin (tub8) mRNA, complete cds. | |
| 700344162H1 | g2511534 | 23 | 3 | gb105pln | Eleusine indica alpha-tubulin 3 (TUA3) mRNA, complete cds. | |
| 700342827H1 | g899235 | 38 | −21 | gb105eukp | F22B5.1 | |
| 700344953H1 | g2511589 | 22 | −0 | gb105pln | Arabidopsis thaliana mRNA for proteasome subunit prgb. | |
| 700344942H1 | g1350507 | 15 | −5 | gb105pln | Picea glauca mitochondria-localized low molecular weight heat shock protein 23.5 | |
| | | | | | (EMB22, SMW HSP23.5) mRNA, complete cds. | |
| 700380220H1 | g313135 | 30 | −18 | gb105pln | Z. mays mRNA for porin. | |
| 700343958H1 | g549975 | 8 | −0 | gb105eukp | nucleosome assembly protein I-like protein; similar to mouse nap I, PIR Accession | |
| | | | | | Number JS0707 | |
| 700346691H1 | g2529657 | 29 | −28 | gb105pln | Arabidopsis thaliana chromosome II BAC T30B22 genomic sequence, complete | |
| | | | | | sequence. | |
| 700344621H1 | g1086831 | 17 | −11 | gb105eukp | F10E7.7 | |
| 700345628H1 | g20255 | 36 | −25 | gb105pln | O. sativa gene for heat shock protein 82 HSP82. | |
| 700345489H1 | g434905 | 23 | −23 | gb105pln | A. thaliana (Columbia) gene for S18 ribosomal protein (1471 bp). | |
| 700346815H1 | g2262141 | 18 | −5 | gb105eukp | T10P11.8; hypothetical protein | |
| 700346018H1 | g1517920 | 27 | −15 | gb105eukp | transcription factor: Kruppel | |
| 700346992H1 | g2443473 | 41 | −19 | gb105eukp | SF2; ASF/SF2 homlog | |
| 700343344H1 | g861009 | 65 | −50 | gb105pln | Hordeum vulgare mRNA for bas1 protein. | |
| 700344418H1 | g16956 | 18 | −0 | gb105allp | 40S ribosomal protein S12 | |
| 700344259H1 | g1403206 | 14 | −6 | gb105eukp | F38B7.7 | |
| 700345755H1 | g1498337 | 54 | −49 | gb105pln | Glycine max actin (Soy119) gene, partial cds. | |
| 700343606H1 | g473986 | 17 | −23 | gb105pln | Rice mRNA, partial homologous to histone H2B gene. | |
| 700347138H1 | g1136119 | 70 | −60 | gb105pln | O. sativa mRNA for alpha-tubulin (clone OSTA-111). | |
| 700342713H1 | g2281081 | 18 | −11 | gb105pln | Arabidopsis thaliana chromosome II BAC F18O19 genomic sequence, complete | |
| | | | | | sequence. | |
| 700344201H1 | g1550813 | 40 | −76 | gb105pln | Z. mays mRNA for acidic ribosomal protein P0. | |
| 700343696H1 | g2239144 | 16 | 5 | gb105allp | transcription repressor Ring1A | |
| 700345693H1 | g1184775 | 64 | −44 | gb105pln | Zea mays glyceraldehyde-3-phosphate dehydrogenase GAPC4 (gpc4) mRNA, | |
| | | | | | complete cds. | |
| 700343256H1 | g2664199 | 21 | −16 | gb105pln | Arabidopsis thaliana GTL2 gene. | |
| 700346708H1 | g21802 | 55 | −59 | gb105pln | T. asestivum mRNA for high mobility group protein (HMGW). | |
| 700281968H2 | g1051262 | 8 | −3 | gb105eukp | RPL39; ribosomal protein L39 | |
| 700380124H1 | g30381 | 12 | 5 | gb105allp | cytochrome oxidase subunit VIb | |
| 700346892H1 | g514945 | 90 | −66 | gb105pln | Zea mays sucrose synthase (Sus1) mRNA, complete cds. | |
| 700346715H1 | g1419369 | 67 | −83 | gb105pln | Z. mays ZmABP3 mRNA for actin depolymerizing factor. | |
| 700343657H1 | g2407800 | 17 | 3 | gb105eukp | H2Av; histone H2A.F/Z | |
| 700342481H1 | g290275 | 18 | −9 | gb105eukp | M(3)95A; multifunctional activity and location; ribosomal protein S3/AP endonuclease | |
| | | | | | DNA repair protein | |
| 700379959H1 | g1061069 | 10 | 6 | gb105eukp | F54F7.1 | |
| 700347282H1 | g1906827 | 16 | −15 | gb105pln | A. thaliana hsp81.4 gene. | |
| 700346238H1 | g561663 | 42 | −47 | gb105pln | Rice mRNA, partial homologous to ribosomal protein coding sequence. | |
| 700345815H1 | g2645069 | 6 | 6 | gb105eukp | W09D10.2 | |
| 700346547H1 | g474009 | 60 | −56 | gb105pln | Rice mRNA, partial homologous to ribosomal protein S19 gene. | |
| 700343932H1 | g168460 | 71 | −80 | gb105pln | Zea mays cyclophilin (CyP) mRNA, complete cds. | |
| 700342967H1 | g21796 | 66 | −54 | gb105pln | Wheat histone H3 gene. | |
| 700343116H1 | g2599092 | 12 | 7 | gb105allp | WD-40 repeat protein MSI4 | |
| 700346535H1 | g998429 | 39 | −20 | gb105pln | GRF1 = general regulatory factor [Zea mays, XL80, Genomic, 5348 nt]. | |
| 700342288H1 | g2286110 | 17 | −6 | gb105pln | Oryza sativa MADS box protein (OsMADS7) mRNA, complete cds. | |
| 700344768H1 | g336633 | 26 | 4 | gb105eukp | elongation factor Tu (tufA) | |
| 700345658H1 | g1652063 | 16 | 2 | gb105allp | hypothetical protein | |
| 700380479H1 | g49652 | 14 | 8 | gb105allp | ribosomal protein S19 (AA 1-133) | |
| 700344836H1 | g170784 | 43 | −22 | gb105pln | Wheat ubiquitin carrier protein (UBC1) mRNA, complete cds. | |
| 700343713H1 | g732949 | 18 | −4 | gb104eukp | SSM1a | |
| 700342606H1 | g1665767 | 24 | 0 | gb105allp | Similar to Human KIAA0188 protein | |
| 700347133H1 | g2801433 | 51 | 0 | gb105eukp | Salt stress inducible small GTP binding protein Ran1 homolog | |
| 700344116H1 | g22328 | 58 | −46 | gb105pln | Maize mRNA for a high mobility group protein. | |
| 700342945H1 | g516043 | 27 | −4 | gb105eukp | DWF1; Dwarf1 | |
| 700342782H1 | g1617268 | 20 | −8 | gb105eukp | Acyl CoA synthetase; EC 6.2.1.3 | |
| 700343146H1 | g1848290 | 36 | −11 | gb105pln | Arabidopsis thaliana LON protease homolog (LON_ARA) mRNA, nuclear gene | |
| | | | | | encoding mitochonodrial protein, complete cds. | |
| 700343652H1 | g509810 | 28 | −9 | gb105eukp | PEA1; envelope Ca2+-ATPase | |
| 700343649H1 | g22314 | 66 | −78 | gb105pln | Maize mRNA for GSH gluthatione S-transferase I (GST; EC 2.5.1.18). | |
| 700346720H1 | g452711 | 27 | −14 | gb105pln | A. officinalis mRNA for beta-galactosidase. | |
| 700346241H1 | g2341031 | 36 | −21 | gb105eukp | F19P19.10; F19P19.10 | |
| 700344906H1 | g289658 | 53 | −29 | gb105eukp | C50C3.6 protein | |
| 700346126H1 | g757534 | 32 | −10 | gb105eukp | ara12; subtilisin-like protease | |
| 700345912H1 | g2330764 | 20 | −2 | gb105pln | Yeast (Saccharomyces pombe) chromosome I cosmid c23C11. | |
| 700342343H1 | g1913999 | 24 | −1 | gb105eukp | C10C6.6 | |
| 700347382H1 | g2282583 | 98 | −84 | gb105pln | Zea mays elongation factor 1-alpha (EF1-A) mRNA, complete cds. | |
| 700345913H1 | g1244773 | 14 | −1 | gb105eukp | RPL37A; Rp137ap: 60S ribosomal protein L37a | |
| 700344450H1 | g1546918 | 54 | 3 | gb105pln | Z. mays mRNA for translation initiation factor 5A. | |
| 700344327H1 | g1008880 | 9 | 16 | gb105pln | Phaseolus vulgaris eukaryotic initiation factor 5 (eIF-5) gene, complete cds. | |
| 700344217H1 | g436782 | 22 | −6 | gb105pln | Rice mRNA for cyc07, complete cds. | |
| 700343627H1 | g166929 | 22 | 11 | gb105pln | A. thaliana ubiquitin extension protein (UBQ1) gene, complete cds. | |
| 700281809H2 | g2341060 | 50 | −53 | gb105pln | Zea mays translational initiation factor eIF-4A (tif-4A3) mRNMA, | |
| | | | | | complete cds. | |
| 700346932H1 | g170746 | 51 | −47 | gb105pln | Wheat histone H4 TH091 gene, complete cds. | |
| 700344919H1 | g564023 | 27 | −39 | gb105pln | Zea mays dihydrolipoamide acetyl transferase (ZM/DHLAAT) mRNA, complete cds. | |
| 700343701H1 | g21834 | 41 | −40 | gb105pln | Wheat mRNA for cytosolic phosphoglycerate kinase (EC 2.7.2.3). | |
| 700379629H1 | g857573 | 13 | 17 | gb105pln | Oryza sativa vauolar H+-ATPase (vatp-P1) mRNA, complete cds. | |
| 700344980H1 | g459199 | 18 | 8 | gb105pln | Gossypium hirsutum vacuolar H+-ATPase subunit B mRNA, partial cds. | |
| 700343493H1 | g22144 | 95 | −8 | gb105pln | Maize anaerobically regulated gene for fructose bisphosphate aldolase (EC 4.1.2.13). | |
| 700346975H1 | g565643 | 7 | 7 | gb105allp | hnRNP B1 protein | |
| 700342537H1 | g170775 | 79 | −66 | gb105pln | Wheat translation elongation factor 1 alpha-subunit (TEF1) mRNA, complete cds. | |
| 700342672H1 | g1325967 | 23 | −10 | gb105pln | T. aestivum histone H2A gene (clone TH274). | |
| 700346549H1 | g487932 | 18 | 3 | gb105allp | Yhr088wp | |
| 700346077H1 | g710626 | 21 | −2 | gb105eukp | ERD15; ERD15 protein | |
| 700380248H1 | g1498052 | 90 | −81 | gb105pln | Zea mays ribosomal protein S8 mRNA, complete cds. | |
| 700346714H1 | g1408473 | 8 | 7 | gb105eukp | ADF2; actin depolymerizing factor 2 | |
| 700345650H1 | g2276349 | 24 | −9 | gb105pln | Yeast (Saccaromyces pombe) chromosome II cosmid c30D10. | |
| 700345652H1 | g203605 | 54 | 1 | gb105allp | contiguous repeat polypeptide | |
| 700345983H1 | g312178 | 35 | −68 | gb105pln | Z. mays GapC2 gene. | |
| 700343829H1 | g459267 | 39 | −25 | gb105pln | Z. mays gene for HMG protein. | |
| 700380093H1 | g1272684 | 26 | −21 | gb105pln | Z. mays mRNA for acetyl CoA carboxylase (partial). | |
| 700379721H1 | g1225912 | 8 | 2 | gb105eukp | crm1-N1; crm1-N1 protein | |
| 700346592H1 | g2252841 | 11 | 3 | gb105eukp | A_IG005I10.22 | |
| 700343550H1 | g173235 | 13 | 5 | gb105eukp | YL3; 5S ribosomal RNA binding protein | |
| 700345878H1 | g22237 | 96 | −79 | gb105pln | Maize mRNA for cytosolic GAPDH (GapC) glyceraldehyde-3-phosphate dehydrogenase. | |
| 700345723H1 | g968901 | 42 | −45 | gb105pln | Rice mRNA for ribosomal protein S8, complete cds. | |
| 700343034H1 | g973313 | 8 | 8 | gb105eukp | myo-inositol 1-phosphate synthase isozyme-2 | |
| 700346548H1 | g402961 | 11 | 5 | gb105allp | ribosomal protein 5 large subunit | |
| 700346303H1 | g218088 | 22 | −9 | gb105pln | Rice mRNA for ribosomal protein 117 (249 gene), partial sequence. | |
| 700346220H1 | g1184773 | 59 | −78 | gb105pln | Zea mays glyceraldehyde-3-phosphate dehydrogenase GAPC3 (gpc3) mRNA, | |
| | | | | | complete cds. | |
| 700345807H1 | g406209 | 23 | 6 | gb105allp | ‘ferritin L-chain’ | |
| 700345169H1 | g499011 | 62 | −52 | gb105pln | S. vulgare SoAc1 mRNA. | |
| 700342536H1 | g886739 | 48 | −43 | gb105pln | Z. mays histone H4 gene. | |
| 700345581H1 | g166548 | 27 | −17 | gb105pln | Avena sativa vacuolar H+-ATPase 16 kDa proteolipid subunit (vatp-P1) mRNA, | |
| | | | | | complete cds. | |
| 700281812H1 | g460988 | 62 | −40 | gb105pln | O. sativa (Arborio) Beta Tubulin mRNA, clone OSTB-34. | |
| 700346888H1 | g777757 | 61 | −31 | gb105pln | Saccharum hybrid (clone SCUBI561) polyubiquitin mRNA, complete cds. | |
| 700346712H1 | g304346 | 22 | −12 | gb105eukp | ZK686.4 protein | |
| 700342841H1 | g458927 | 10 | 15 | gb105pln | Yeast (Saccharomyces cerevisiae) chromosome VIII cosmid 9998. | |
| 700345629H1 | g2183248 | 39 | −24 | gb105pln | Triticum aestivum glutathione-S-transferase mRNA, complete cds. | |
| 700342303H1 | g998429 | 47 | −54 | gb105pln | GRF1 = general regulatory factor [Zea mays, XL 80, Genomic, 5348 nt]. | |
| 700379837H1 | g168639 | 9 | 16 | gb105pln | Zea mays autonomous transposable element En-1 mosaic protein gene, complete cds. | |
| 700343521H1 | g975887 | 32 | −30 | gb105pln | Mesembryanthemum crystallinum myo-inositol-1-phosphate synthase mRNA, | |
| | | | | | complete cds. | |
| 700379620H1 | g1841307 | 18 | 1 | gb105pln | Fission Yeast mRNA for ribosomal protein S16 homolog, partial cds. | |
| 700346812H1 | g1490384 | 44 | −15 | gb105allp | ribosomal protein L6 | |
| 700344053H1 | g287834 | 85 | −60 | gb105pln | Z. mays yptm2 cDNA. | |
| 700343933H1 | g22483 | 50 | −63 | gb105pln | Z. mays RNA for superoxide dismutase Sod4. | |
| 700379982H1 | g1262433 | 19 | 6 | gb105allp | 26S protease subunit | |
| 700379779H1 | g1524386 | 27 | −8 | gb105pln | Z. mays high copy dispersed repeat DNA, ZHCR4. | |
| 700346379H1 | g600115 | 75 | −71 | gb105pln | Z. mays apx gene encoding cytosolic ascorbate peroxidase. | |
| 700345914H1 | g168514 | 29 | −8 | gb105pln | Z. mays c1 locus myb homologue cDNA, exons 1-3. | |
| 700344424H1 | g2827887 | 22 | −10 | gb105pln | Arabidopsis thaliana ATP-dependent Clp protease proteolytic subunit (clpP) mRNA, | |
| | | | | | nuclear gene encoding chloroplast protein, complete cds. | |
| 700347111H1 | g458972 | 21 | 2 | gb105allp | similar to yeast ribosomal protein YL39 | |
| 700343972H1 | g2660677 | 24 | −1 | gb105eukp | T19K24.17 | |
| 700343743H1 | g2662342 | 35 | −38 | gb105pln | Oryza sativa mRNA for EF-1 alpha, complete cds. | |
| 700345677H1 | g1181672 | 70 | −54 | gb105pln | Sorghum bicolor heat shock protein 70 cognate (hsc70) mRNA, partial cds. | |
| 700344512H1 | g2262177 | 23 | −6 | gb105eukp | F5J6.22; hypothetical protein similar to T18A10.3 | |
| 700342466H1 | g1667359 | 14 | 4 | gb105eukp | des1; Des-1 protein | |
| 700347091H1 | g498738 | 48 | −32 | gb105pln | H. vulgare (pMaW20) pseudo mRNA for beta-ketoacyl-ACP synthase (partial). | |
| 700379658H1 | g557681 | 68 | −60 | g105pln | Z. mays mRNA for ribosomal protein S28. | |
| 700342885H1 | g2351063 | 19 | 4 | gb105pln | Arabidopsis thaliana genomic DNA, chromosome 5, P1 clone: MCL19. | |
| 700342353H1 | g1710363 | 10 | −0 | gb105eukp | splicing factor; U2AF65 | |
| 700346220H1 | g312180 | 34 | −79 | gb105pln | Z. mays GapC4 gene. | |
| 700346210H1 | g1749838 | 12 | 8 | gb105allp | porline iminopeptidase | |
| 700345843H1 | g1906603 | 13 | 11 | gb105pln | Zea mays ACCase gene, intron containing colonist1 and colonist2 retrotransposons | |
| | | | | | and reverse transcriptase pseudogene, complete sequence. | |
| 700346105H1 | g289203 | 14 | −1 | gb105eukp | lipoxygenase; EC 1.13.11.12 | |
| 700379736H1 | g21794 | 17 | −10 | gb105pln | Wheat histone H4. gene. | |
| 700343413H1 | g2464848 | 13 | 16 | gb105pln | Arabidopsis thaliana DNA chromosome 4, ESSA I AP2 contig fragment No. 1. | |
| 700342504H1 | g2832679 | 21 | −1 | gb105eukp | T10I14.120; putative protein | |
| 700346634H1 | g2459406 | 37 | −26 | gb105pln | Arabidospis thaliana chromosome II BAC F4P9 genomic sequence, complete | |
| | | | | | sequence. | |
| 700342528H1 | g218180 | 21 | −16 | gb105pln | Rice mRNA for oryzain alpha (EC 3.4.22). | |
| 700379869H1 | g1498052 | 98 | −89 | gb105pln | Zea mays ribosomal protein S8 mRNA, complete cds. | |
| 700347352H1 | g2656024 | 14 | 12 | gb105pln | Arabidopsis thaliana genomic DNA, chromosome 5, TAC clone: K15E6. | |
| 700347390H1 | g1916867 | 16 | −5 | gb105eukp | who; muscle development; WHO | |
| 700346122H1 | g1236950 | 15 | −2 | gb105pln | Glycine max nucleoside diphosphate kinase mRNA, complete cds. | |
| 700345992H1 | g20163 | 70 | −59 | gb105pln | O. sativa Rr15 mRNA for 5S ribosomal RNA. | |
| 700344966H1 | g391876 | 34 | −42 | gb105pln | Rice mRNA for adenylate kinase. | |
| 700344660H1 | g971485 | 46 | −8 | gb105eukp | putative beta-galactosidase/galactanase; EC 3.2.1.23 | |
| 700343356H1 | g1184773 | 98 | −88 | gb105pln | Zea mays glyceraldehyde-3-phosphate dehydrogenase GAPC3 (gpc3) mRNA, | |
| | | | | | complete cds. | |
| 700342334H1 | g22155 | 87 | −73 | gb105pln | Z. mays mRNA for alpha-tubulin 5. | |
| 700346053H1 | g217973 | 35 | −62 | gb105pln | Z. mays gene for triosephosphate isomerase, complete cds. | |
| 700342916H1 | g168462 | 54 | −76 | gb105pln | Z. mays defective suppressor-mutator from the brittle-1-mutable allele. | |
| 700380409H1 | g304108 | 31 | −19 | gb105pln | Arabidopsis thaliana poly(A)-binding protein mRNA, complete cds. | |
| 700342480H1 | g391874 | 28 | −8 | gb105pln | Rice mRNA for 40S subunit ribosomal protein, complete cds. | |
| 700346719H1 | g20237 | 34 | −34 | gb105pln | O. sativa (rice) constitutive GOS2 gene. | |
| 700345992H1 | g1206016 | 25 | −5 | gb105pln | Yeast (Schizosaccharomyces pombe) ribosomal protein L5 gene, complete cds. | |
| 700345596H1 | g303501 | 24 | 11 | gb105pln | A. thaliana KatA mRNA for kinesin-like motor protein heavy chain, complete cds. | |
| 700344880H1 | g915192 | 34 | −33 | gb105pln | Chlamydomonas reinhardtii DNA for actin, complete cds. | |
| 700345724H1 | g397481 | 61 | −64 | gb105pln | A. thaliana hsc70 mRNA for heat shock cognate protein. | |
| 700380796H1 | g602252 | 71 | −60 | gb105pln | Zea mays enolase (eno2) mRNA, complete cds. | |
| 700346511H1 | g1070358 | 9 | 5 | gb105allp | oxalate oxidase-like protein or germin-like protein | |
| 700346146H1 | g2394431 | 14 | 3 | gb105eukp | F23F1.5 | |
| 700343819H1 | g168500 | 62 | −52 | gb105pln | Maize (Zea mays) histone H4 gene (H4C14), complete cds. | |
| 700342378H1 | g168505 | 53 | −37 | gb105pln | Zea mays histone H3 gene, complete cds. | |
| 700380162H1 | g170775 | 44 | −34 | gb105pln | Wheat translation elongation factor 1 alpha-subunit (TEF1) mRNA, complete cds. | |
| 700345546H1 | g458972 | 17 | −4 | gb105eukp | F37C12.4 | |
| 700281819H2 | g8484 | 91 | −2 | gb105eukp | RpL7; ribosomal protein | |
| 700343266H1 | g1419087 | 17 | 13 | gb105pln | N. plumbaginifolia mRNA for calcreticulin. | |
| 700342429H1 | g2065530 | 20 | −7 | gb105pln | Lycopersicon esculentum endo-1,4-beta-glucanase (Cel3) mRNA, complete cds. | |
| 700346057H1 | g577824 | 42 | −44 | gb105pln | Z. mays gene for H2B histone (gH2B3). | |
| 700380261H1 | g2160144 | 22 | −11 | gb105eukp | F19K23.13 | |
| 700343188H1 | g453188 | 25 | −21 | gb105pln | Z. mays acp mRNA for acyl carrier protein. | |
| 700345443H1 | g1806140 | 34 | −7 | gb105eukp | cdc2MsC | |
| 700346763H1 | g168460 | 89 | −80 | gb105pln | Zea mays cyclophilin (CyP) mRNA, complete cds. | |
| 700346908H1 | g600768 | 56 | −42 | gb105pln | Oryza sativa cyclophilin 2 (Cyp2) mRNA, complete cds. | |
| 700346469H1 | g577824 | 26 | −27 | gb105pln | Z. mays gene for H2B histone (gH2B3). | |
| 700342649H1 | g2431768 | 46 | 2 | gb105pln | Zea mays acidic ribosomal protein P1a (rpp1a) mRNA, complete cds. | |
| 700342652H1 | g2599116 | 20 | 6 | gb105pln | Hypocrea jecorina proteasome regulatory subunit 12 (prs12) gene, complete cds. | |
| 700379817H1 | g22314 | 53 | −20 | gb105pln | Maize mRNA for GSH gluthathione S-transferase I (GST; EC 2.5.1.18). | |
| 700343961H1 | g1302478 | 12 | 5 | gb105allp | ORF YN6006w | |
| 700343008H1 | g2828278 | 18 | 7 | gb105pln | Arabidopsis thaliana DNA chromosome 4, BAC clone T18B16 (ESSAII project). | |
| 700346366H1 | g169818 | 29 | −58 | gb105pln | Rice 25S ribosomal RNA gene. | |
| 700345254H1 | g2330648 | 28 | −15 | gb105pln | Pisum sativum mRNA for topoisomerase I. | |
| 700344709H1 | g168379 | 29 | −34 | gb105pln | M. racemosus TEF-1 gene encoding elongation factor 1-alpha (EF-1-alpha), | |
| | | | | | complete cds. | |
| 700343413H1 | g2464883 | 21 | 7 | gb105eukp | hypothetical protein | |
| 700347058H1 | g21800 | 22 | −32 | gb105pln | T. aestivum L mRNA for histone H2B. | |
| 700346839H1 | g1667582 | 17 | 6 | gb105allp | splicing factor At-SRp40 | |
| 700281870H2 | g1877523 | 22 | −27 | gb105pln | Arabidopsis thaliana BAC T7I23, complete sequence. | |
| 700342653H1 | g532788 | 15 | 4 | gb105eukp | caz; RNA binding protein; sarcoma associated RNA binding fly homologue | |
| 700346889H1 | g1397320 | 29 | −1 | gb105eukp | R08C7.3 | |
| 700345539H1 | g22176 | 13 | 15 | gb105pln | Z. mays P gene. | |
| 700345223H1 | g1244773 | 16 | −2 | gb105eukp | RPL37A; Rp137ap: 60S ribosomal protein L37a | |
| 700380665H1 | g599722 | 13 | 9 | gb105pln | C. melo mRNA for aconitase (UNI-ZAPxR). | |
| 700379664H1 | g166868 | 42 | −34 | gb105pln | Arabidopsis thaliana ribosomal protein S11 (RPS11-beta) mRNA, complete cds. | |
| 700380244H1 | g493590 | 64 | −58 | gb105pln | Hordeum vulgare disulfide isomerase (PDI) mRNA, 3′ end. | |
| 700345596H1 | g1438841 | 28 | −3 | gb105pln | Arabidopsis thaliana katB mRNA for heavy chain polypeptide of kinesin-like protein, | |
| | | | | | complete cds. | |
| 700344604H1 | g575291 | 65 | −59 | gb105pln | H. vulgare mRNA for SNF1-related protein kinase. | |
| 700346430H1 | g22430 | 17 | 11 | gb105pln | Maize pseudo-Gpa2 pseudogene for glyceraldehyde-3-phosphate dehydrogenase | |
| | | | | | subunit A. | |
| 700281822H2 | g169023 | 17 | 5 | gb105eukp | hsp70; 70 kDa heat shock protein | |
| 700281833H2 | g2570508 | 22 | −10 | gb105pln | Oryza sativa transmembrane protein mRNA, complete cds. | |
| 700344170H1 | g18259 | 21 | −7 | gb105pln | C. sativus mRNA for cs DnaJ-1. | |
| 700344120H1 | g1488296 | 18 | 5 | gb105pln | Oryza sativa osRAD23 mRNA, complete cds. | |
| 700281967H1 | g459894 | 54 | −78 | gb105pln | Zea mays sus1 gene, complete cds. | |
| 700379937H1 | g899607 | 96 | −84 | gb105pln | Zea mays polyubiquitin (MubC5) mRNA, complete cds. | |
| 700346838H1 | g1946689 | 22 | −1 | gb105pln | Arabidopsis thaliana glutathione peroxidase GPx mRNA, complete cds. | |
| 700380747H1 | g487286 | 38 | 3 | gb105pln | Rice mRNA EN053, partial sequence. | |
| 700346346H1 | g2108344 | 16 | −3 | gb105pln | Brassica campestris small GTP-binding protein Bsar1a (bsar1a) mRNA, complete cds. | |
| 700345454H1 | g1813684 | 8 | 5 | gb105eukp | bm-rbp-1; putative RNA binding protein | |
| 700379826H1 | g1002532 | 28 | −25 | gb105pln | Arabidopsis thaliana actin-11 (ACT11) gene, complete cds. | |
| 700347236H1 | g1749747 | 25 | −9 | gb105pln | Fission Yeast mRNA, partial cds. | |
| 700344352H1 | g300082 | 45 | −42 | gb105pln | hsp82 = 82 kda heat shock protein [Zea mays, seeding, leaves, Genomic, 3468 nt]. | |
| 700342985H1 | g886402 | 44 | −27 | gb105pln | Oryza sativa MADS-box protein (MADS4) mRNA, complete cds. | |
| 700347055H1 | g1905933 | 39 | −21 | gb105pln | Sorghum bicolor putative MADS box protein (SbMADS2) mRNA, partial cds. | |
| 700344843H1 | g218177 | 23 | −5 | gb105pln | Rice mRNA for ribosomal protein L35 (NH77 gene), partial sequence. | |
| 700343796H1 | g1079566 | 14 | 3 | gb105allp | Hep27 protein | |
| 700281887H2 | g968901 | 43 | −49 | gb105pln | Rice mRNA for ribosomal protein S8, complete cds. | |
| 700343026H1 | g1161230 | 12 | 7 | gb105allp | protocadherin-3 | |
| 700343287H1 | g939778 | 51 | −31 | gb105pln | Zea mays MADS-box protein (ZAG3) mRNA, complete cds. | |
| 700346533H1 | g644492 | 36 | −41 | gb105pln | Corn elongation factor 1alpha gene, complete cds. | |
| 700345868H1 | g1495251 | 6 | 7 | gb105eukp | heat-shock protein | |
| 700346705H1 | g22324 | 37 | −25 | gb105pln | Z. mays mRNA for H2B histone (clone cH2B221). | |
| 700281971H1 | g436030 | 44 | 3 | gb105allp | 60s ribosomal protein L34 | |
| 700346822H1 | g2244854 | 8 | 4 | gb105eukp | hypothetical protein | |
| 700346872H1 | g2231173 | 15 | 3 | gb105allp | cdc21p | |
| 700343443H1 | g1165205 | 18 | −14 | gb105pln | Arabidopsis thaliana multiubiquitin chain binding protein (MBP1) mRNA, complete cds. | |
| 700344505H1 | g30295 | 11 | 2 | gb105allp | cytochrome c oxidase subunit VIb (AA1--86) | |
| 700344029H1 | g2522362 | 30 | 1 | gb105allp | MutS homolog 2 | |
| 700343802H1 | g2821959 | 28 | −16 | gb105eukp | spermidine synthase; EC 2.5.1.6 | |
| 700281929H2 | g1930080 | 27 | −15 | gb105pln | Garcinia mangostana acyl-ACP thioesterase (FatB1) mRNA, nuclear gne encoding | |
| | | | | | chloroplast protein, complete cds. | |
| 700342244H1 | g1292866 | 26 | 4 | gb105allp | por1 | |
| 700380788H1 | g777757 | 53 | −40 | gb105pln | Saccharum hybrid (clone SCUBI561) polyubiquitin mRNA, complete cds. | |
| 700344051H1 | g2196465 | 22 | 6 | gb105pln | Arabidopsis thaliana mRNA for TATA binding protein-associated factor. | |
| 700343409H1 | g1103727 | 36 | −26 | gb105pln | Yeast (Saccharomyces pombe) chromosome I cosmid c1F5. | |
| 700345441H1 | g457708 | 38 | −25 | gb105pln | S. oleracea mRNA for protein kinase. | |
| 700343021H1 | g2641235 | 16 | −2 | gb105eukp | ACT1; actin | |
| 700342285H1 | g578845 | 17 | −11 | gb105eukp | COI; cytochrome oxidase subunit 1 | |
| 700342755H1 | g2244788 | 17 | 15 | gb105pln | Arabidopsis thaliana DNA chromosome 4, ESSA I contig fragment No. 1. | |
| 700379989H1 | g727357 | 15 | 0 | gb105eukp | atj; molecular chaperone; DnaJ homolog | |
| 700379623H1 | g2104681 | 27 | −10 | gb105eukp | transcription factor | |
| 700342823H1 | g22149 | 80 | −79 | gb105pln | Z. mays mRNA for alpha-tubulin 3. | |
| 700345985H1 | g2564336 | 18 | 6 | gb105pln | Crassica campestris mRNA for Tat binding protein 1, complete cds. | |
| 700345467H1 | g1374771 | 29 | −15 | gb105pln | Arabidopsis thaliana mRNA for diacylglycerol kinase, complete cds. | |
| 700380593H1 | g393399 | 37 | −39 | gb105pln | Z. mays Irma and En1 element DNA. | |
| 700346851H1 | g218130 | 13 | −2 | gb105pln | Rice mRNA for Ribosomal protein S15. | |
| 700345540H1 | g2662342 | 62 | −47 | gb105pln | Oryza sativa mRNA for EF-1 alpha, complete cds. | |
| 700342308H1 | g1498389 | 57 | −50 | gb105pln | Zea mays actin (Maz81) gene, partial cds. | |
| 700346666H1 | g1136119 | 79 | −65 | gb105pln | O. sativa mRNA for alpha-tubulin (clone OSAT-111). | |
| 700346495H1 | g790507 | 40 | −32 | gb105pln | Z. mays mRNA for 60S acidic robosomal protein. | |
| 700345013H1 | g1143864 | 29 | 3 | gb105allp | beta glucosidase | |
| 700344058H1 | g455995 | 71 | −32 | gb105allp | A-gamma globin | |
| 700342715H1 | g1323402 | 14 | −0 | gb105eukp | ORF YGR223c | |
| 700344914H1 | g166857 | 55 | −48 | gb105pln | Arabidopsis thaliana cytoplasmic ribosomal protein mRNA, complete cds. | |
| 700380283H1 | g886737 | 59 | −47 | gb105pln | Z. mays histone H3 gene. | |
| 700346994H1 | g2245014 | 11 | 3 | gb105eukp | glucosyltransferase homolog | |
| 700344042H1 | g168500 | 72 | −59 | gb105pln | Maize (Zea mays) histone H4 gene (H4C14), complete cds. | |
| 700343961H1 | g496723 | 12 | 5 | gb105eukp | N2038 | |
| 700343014H1 | g2828280 | 26 | −11 | gb105eukp | T18B16.20; putative protein | |
| 700343566H1 | g22747 | 12 | 17 | gb105pln | L. longiflorum mRNA for actin depolymerizing factor. | |
| 700379753H1 | g2414636 | 11 | 7 | gb105eukp | SPAC3A11.08; hypothetical protein | |
| 700345468H1 | g1181458 | 6 | 6 | gb105allp | similar to Mycobacterium ORF, corresponds to GenBank Accession Number Z79701 | |
| 700344445H1 | g1438062 | 15 | −5 | gb105allp | PWP2 | |
| 700345741H1 | g188565 | 71 | −20 | gb105allp | mitochondrial hinge protein precursor | |
| 700347163H1 | g829221 | 15 | 8 | gb105eukp | histone H2 A.F/Z | |
| 700281942H2 | g394755 | 22 | −6 | gb105eukp | CF(o)II ATP synthase subunit 9 | |
| 700346518H1 | g21531 | 34 | −34 | gb105pln | S. tuberosum PoAc100 gene for actin (exons 2, 3, & 4). | |
| 700343654H1 | g42800 | 11 | 5 | gb105allp | ribosomal protein L17 (aa 1-127) | |
| 700344114H1 | g643596 | 83 | −55 | gb105pln | Corn mRNA for cysteine proteinase, clone CCP, complete cds. | |
| 700343945H1 | g1519250 | 54 | −37 | gb105pln | Oryza sativa GF14-c protein mRNA, complete cds. | |
| 700343625H1 | g451489 | 16 | −2 | gb105allp | phenylethylamine oxidase; monoamine oxidase | |
| 700345472H1 | g17391 | 14 | 2 | gb105allp | GLYCINE-RICH RNA-BINDING PROTEIN | |
| 700346921H1 | g886739 | 58 | −40 | gb105pln | Z. mays histone H4 gene. | |
| 700346686H1 | g2599103 | 21 | 1 | gb105pln | Dunaliella salina 60S ribosomal protein (DSRP1) mRNA, complete cds. | |
| 700345277H1 | g169127 | 36 | −34 | gb105pln | Pisum sativum (clone pCLp) nuclear encoded precursor to chloroplast protein mRNA, | |
| | | | | | complete cds. | |
| 700344993H1 | g168722 | 44 | −57 | gb105pln | Z. mays protein phosphatase-1 (ZmPP1) mRNA, complete cds. | |
| 700345771H1 | g402903 | 27 | −23 | gb105pln | Arabidopsis thaliana Columbia laminin receptor-like protein mRNA, complete cds. | |
| 700342307H1 | g1913999 | 35 | −17 | gb105eukp | C10C6.6 | |
| 700346740H1 | g1195531 | 21 | 2 | gb105allp | type I keratin 16, K16 [human, epidermal keratinocytes, Peptide, 473 aa] | |
| 700343112H1 | g2760165 | 33 | −13 | gb105pln | Arabidopsis thaliana genomic DNA, chromosome 5, P1 clone: MAC9, complete | |
| | | | | | sequence. | |
| 700346901H1 | g398844 | 70 | −69 | gb105pln | Z. mays mRNA for beta 3 tubulin. | |
| 700346092H1 | g555945 | 18 | 0 | gb105allp | ribosomal protein S3 | |
| 700345553H1 | g2160184 | 16 | −6 | gb105eukp | F21M12.6 | |
| 700345465H1 | g166745 | 35 | −25 | gb105pln | A. thaliana plasma membrane proton ATPase (PMA) mRNA, complete cds. | |
| 700344536H1 | g2160158 | 23 | 6 | gb105allp | Similar to elongation factor 1-gamma (gb\|EF1G_XENLA). ESTs gb\|T20564, gb\|T45940, | |
| | | | | | gb\|T04527 come from this gene. | |
| 700380480H1 | g416432 | 32 | 2 | gb105allp | ubiquitin-conjugating enzyme E2-17 kD | |
| 700343874H1 | g2654088 | 24 | −12 | gb105eukp | KUP1; potassium transporter | |
| 700379919H1 | g829147 | 81 | −76 | gb105pln | Z. mays gene for cyclophilin. | |
| 700343635H1 | g1419369 | 38 | −15 | gb105pln | Z. mays ZmABP3 mRNA for actin depolymerizing factor. | |
| 700342714H1 | g2384757 | 49 | −44 | gb105pln | Oryza sativa GDP dissociation inhibitor protein OsGDI1 (OsGDI1) mRNA, | |
| | | | | | complete cds. | |
| 700342678H1 | g2739382 | 12 | 4 | gb105eukp | T9J22.24; myosin heavy chain-like protein | |
| 700343084H1 | g520543 | 41 | −79 | gb105pln | Sorphum bicolor clone BADH1 betaine aldehyde dehydrogenase mRNA, partial cds. | |
| 700343108H1 | g474007 | 38 | −24 | gb105pln | Rice mRNA, partial homologus to ribosomal protein S12 gene. | |
| 700343204H1 | g415634 | 29 | −2 | gb105eukp | cloned by ability to arrest the cell cycle when expressed in the fission yeast | |
| | | | | | Schizosaccharomyces pombe; homolog of human 40S ribosomal protein S31 | |
| 700347019H1 | g1814402 | 51 | −43 | gb105pln | Mesembryanthemum crystallinum methionine synthase (MetE) mRNA, complete cds. | |
| 700346510H1 | g600710 | 14 | 2 | gb105eukp | SAR1 | |
| 700345369H1 | g2244991 | 25 | −5 | gb105pln | Arabidopsis thaliana DNA chromosome 4, ESSA I contig fragment No. 6. | |
| 700344420H1 | g1778820 | 13 | 2 | gb105pln | Oryza sativa S-adenosyl-L-methionine synthetase)pOS-SAMS2) mRNA, complete cds. | |
| 700347071H1 | g168460 | 67 | −56 | gb105pln | Zea mays cyclophilin (CyP) mRNA, complete cds. | |
| 700344840H1 | g22484 | 46 | −44 | gb105pln | Z. mays RNA for superoxide dismutase Sod4A. | |
| 700342567H1 | g2281104 | 7 | 8 | gb105eukp | F18O19.23; Glucan endo-1,3,-beta glucosidase isolog | |
| 700347362H1 | g2760334 | 23 | −5 | gb105eukp | F1N21.5 | |
| 700346319H1 | g170053 | 45 | −43 | gb105pln | Soybean ribosomal protein S11 mRNA, 3′ end. | |
| 700345321H1 | g218241 | 23 | −35 | gb105pln | Rice mRNA for ribosomal protein L3 (T82 gene), partial sequence. | |
| 700344815H1 | g1237249 | 24 | −8 | gb105pln | N. tabacum cytochrome P-450 gene. | |
| 700344767H1 | g2326946 | 43 | −60 | gb105pln | Z. mays mRNA for chlorophyll a/b-binding protein CP29. | |
| 700343927H1 | g1814236 | 32 | −14 | gb105eukp | ubaA; ubiquitin-activating enzyme | |
| 700281977H2 | g167107 | 45 | −42 | gb105pln | Hordeum vulgare vacuolar ATPase B subunit isoform mRNA, complete cds. | |
| 700346953H1 | g2264307 | 15 | −2 | gb105pln | Arabidopsis thaliana genomic DNA, chromosome 5, P1 clone: MED 24, complete | |
| | | | | | sequence. | |
| 700346325H1 | g310934 | 38 | −25 | gb105pln | Nicotiana tabacum ribosomal protein L25, complete cds. | |
| 700343842H1 | g2366750 | 14 | 7 | gb105eukp | RGP-3; RNA binding protein | |
| 700342885H1 | g407488 | 12 | 4 | gfb105eukp | unknown | |
| 700380182H1 | g732950 | 16 | −5 | gb105pln | Yeast (Saccharomyces cerevisiae) SSM1b gene. | |
| 700346988H1 | g431212 | 15 | 0 | gb105eukp | GFA1; glutamine-fructose-6-phosphate aminotransferase; YKL457 | |
| 700346488H1 | g2243115 | 34 | −21 | gb105pln | A. thaliana mRNA for aspartate kinase. | |
| 700346193H1 | g459894 | 44 | −6 | gb105pln | Zea mays sus1 gene, complete cds. | |
| 700345259H1 | g1620592 | 6 | 1 | gb105eukp | SmDLC; dynein light chain | |
| 700346231H1 | g1839334 | 12 | 7 | gb105allp | ribosomal protein L37 {C2-C2 zinc-finger-like} [human, HeLa cells, Peptide, 97 aa] | |
| 700344486H1 | g1907211 | 9 | 5 | gb105eukp | YCR072c, len:515 | |
| 700345058H1 | g662367 | 54 | −49 | gb105pln | Zea mays farnesyl pyrophosphate synthetase (fps) mRNA, complete cds. | |
| 700343334H1 | g17917 | 13 | −4 | gb105eukp | S-receptor kinase related protein | |
| 700344852H1 | g473604 | 23 | −18 | gb105pln | Zea mays W-22 histone H2B mRNA, complete cds. | |
| 700344292H1 | g398921 | 33 | −14 | gb105pln | B. napus cold induced protein (BnC24B). | |
| 700281929H2 | g804947 | 22 | −7 | gb105pln | A. thaliana mRNA for acyl-(acyl carrier protein) thioesterase. | |
| 700342505H1 | g17862 | 33 | −18 | gb105pln | B. napus mRNA for ribosomal protein S15a (pPcB8). | |
| 700343395H1 | g498738 | 44 | −26 | pb105pln | H. vulgare (pMaW20) pseudo mRNA for beta-ketoacyl-ACP synthase (partial). | |
| 700343920H1 | g1750404 | 31 | −8 | gb105eukp | B0412.4 | |
| 700379915H1 | g557598 | 24 | −11 | gb105pln | Yeast (Saccharomyces cerevisiae) ATPase gene, complete cds. | |
| 700379827H1 | g18259 | 48 | −43 | gb105pln | C. sativus mRNA for cs DnaJ-1. | |
| 700347236H1 | g2408013 | 25 | −9 | gb105pln | Yeast (Saccharomyces pombe) chromosome I cosmid c17G6. | |
| 700344387H1 | g1419467 | 12 | −9 | gb105eukp | ZC434.5 | |
| 700281915H1 | g1463121 | 24 | −4 | gb105eukp | RPS3; ribosomal protein S3 | |
| 700346463H1 | g2624199 | 37 | −27 | gb105pln | M. acuminata mRNA; clone pBAN UU93. | |
| 700344544H1 | g22328 | 77 | −68 | gb105pln | Maize mRNA for a high mobility group protein. | |
| 700345692H1 | g498774 | 38 | −58 | gb105pln | Z. mays (cv DH5xDH7) hsp70-5 mRNA for heat shock protein 70. | |
| 700344370H1 | g2366749 | 17 | 7 | gb105pln | Nicotiana sylvestris mRNA for RNA binding protein, complete cds. | |
| 700343927H1 | g1055197 | 28 | −14 | gb105eukp | F11H8.1 | |
| 700347105H1 | g2511572 | 34 | −8 | gb105eukp | prcga; multicatalytic endopeptidase; EC 3.4.99.46 | |
| 700343588H1 | g2196671 | 35 | −72 | gb105pln | Z. mays mRNA for HMG protein | |
| 700342769H1 | g1799916 | 6 | 2 | gb105allp | similar to [SwissProt Accession Number P36979] | |
| 700380186H1 | g1419684 | 29 | −14 | gb105pln | M. sativa mRNA for TCTP-like protein. | |
| 700346817H1 | g2668745 | 29 | −11 | gb105pln | Zea mays inorganic pyrophosphatase (IPP) mRNA, complete cds. | |
| 700346681H1 | g1054795 | 23 | 2 | gb105pln | H. vulgare mRNA for transmembrane protein. | |
| 700345505H1 | g644492 | 71 | −54 | gb105pln | Corn elongation factor 1alpha gene, complete cds. | |
| 700344052H1 | g410509 | 22 | −9 | gb105pln | Yeast (Saccharomyces cerevisiae) CIM5 gene for putative ATPase. | |
| 700379649H1 | g416265 | 26 | −12 | gb105pln | Rice mRNA for ribosomal protein A2, partial sequence. | |
| 700343651H1 | g2274990 | 39 | −35 | gb105pln | Hordeum vulgare mRNA for expressed sequence tag. | |
| 700342482H1 | g2347192 | 10 | 6 | gb105allp | spliceosomal protein U2B isolog | |
| 700345844H1 | g218160 | 36 | −15 | gb105pln | Oryza sativa mRNA for elongation factor 1 beta′. | |
| 700345376H1 | g2330693 | 14 | −2 | gb105eukp | SPAC16E8.04c; chorismate mutase | |
| 700342524H1 | g20255 | 20 | −18 | gb105pln | O. sativa gene for heat shock protein 82 HSP82. | |
| 700346835H1 | g1100224 | 35 | −22 | gb105pln | Pinus sylvestris chloroplast NAD+-dependent glyceraldehyde-3-phosphate | |
| | | | | | dehydrogenase mRNA, complete cds. | |
| 700346748H1 | g551482 | 13 | 3 | gb105pln | Zea mays ABA- and ripening-inducible-like protein mRNA, complete cds. | |
| 700379731H1 | g20255 | 29 | −31 | gb105pln | O. sativa gene for heat shock protein 82 HSP82. | |
| 700347114H1 | g169295 | 48 | −10 | gb105pln | Pharbitis nil heat shock protein 83 (Hsp83) gene, complete cds. | |
| 700379763H1 | g1200153 | 36 | −16 | gb105pln | S. tuberosum mRNA for starch synthase. | |
| 700342277H1 | g21800 | 21 | −40 | gb105pln | T. aestivum L mRNA for histone H2B. | |
| 700345441H1 | g457688 | 41 | −28 | gb105pln | M. crystallinum mRNA for protein kinase. | |
| 700345254H1 | g16557 | 35 | −23 | gb105pln | A. thaliana TOP1 mRNA for topoisomerase I. | |
| 700343160H1 | g1143863 | 41 | −25 | gb105pln | Oryza sativa beta-glucosidase mRNA, nuclear gene encoding chloroplast protein, | |
| | | | | | complete cds. | |
| 700342213H1 | g22324 | 22 | −5 | gb105pln | Z. mays mRNA for H2B histone (clone cH2B221). | |
| 700347059H1 | g2464876 | 29 | −6 | gb105eukp | patatin homolog | |
| 700346461H1 | g459894 | 54 | −56 | gb105pln | Zea mays sus1 gene, complete cds. | |
| 700343461H1 | g409070 | 16 | 6 | gb105allp | HBp15/L22 | |
| 700347255H1 | g780326 | 28 | −28 | gb105pln | Eucalyptus globulus bicostata symbiont (F00060) mRNA, ESTun038. | |
| 700345844H1 | g218340 | 38 | −17 | gb105pln | Triticum aestivum mRNA for elongation factor 1 beta′. | |
| 700343201H1 | g166848 | 26 | −12 | gb105eukp | receptor-like protein kinase; EC 2.7.11. | |
| 700344763H1 | g1223910 | 23 | −1 | gb105eukp | chaperonin-60 alpha subunit | |
| 700343922H1 | g289212 | 39 | −30 | gb105pln | Atriplex nummularia homologous sequence (ANJ1) mRNA. | |
| 700342211H1 | g1915974 | 15 | −7 | gb105eukp | FK; fructokinase; EC 2.7.1.4 | |
| 700342976H1 | g1632830 | 18 | 9 | gb105pln | R. communis mRNA (unknown). | |
| 700347311H1 | g1244773 | 13 | 3 | gb105eukp | RPL37A; Rp137ap: 60S ribosomal protein L37a | |
| 700346566H1 | g20805 | 23 | −3 | gb105pln | P. sativum lpd mRNA for dihydrolipoamide dehydrogenase. | |
| 700345336H1 | g2281103 | 14 | −0 | gb105eukp | F18O19.22; Glucan endo-1,3-beta glucosidase isolog | |
| 700343743H1 | g473976 | 33 | −45 | gb105pln | Rice mRNA, partial homologous to elongation factor 1-alpha gene. | |
| 700281923H2 | g21800 | 31 | −35 | gb105pln | T. aestivum L mRNA for histone H2B. | |
| 700281817H2 | g2460018 | 8 | 1 | gb105allp | RecA | |
| 700344854H1 | g624220 | 51 | −40 | gb105pln | Oryza sativa signal recognition particle 19 kDa protein subunit SRP19 mRNA, | |
| | | | | | complete cds. | |
| 700343641H1 | g407028 | 20 | 7 | gb105pln | Zea mays gene for Ferredoxin-NADP reductase binding protein. | |
| 700345158H1 | g871812 | 13 | 7 | gb105eukp | ARA.KIN | |
| 700343081H1 | g2827531 | 10 | 7 | gb105eukp | F8F16.180; hypothetical protein | |
| 700380121H1 | g21800 | 27 | −26 | gb105pln | T. aestivum L mRNA for histone H2B. | |
| 700347153H1 | g1769965 | 36 | −25 | gb105pln | B. napus mRNA for enoyl reductase. | |
| 700344961H1 | g2245073 | 23 | 1 | gb105pln | Arabidopsis thaliana DNA chromosome 4, ESSA I contig fragment No. 8. | |
| 700347186H1 | g431167 | 42 | −26 | gb105pln | Lily mRNA for RAD51-like protein, complete cds. | |
| 700343818H1 | g218160 | 38 | −23 | gb105pln | Oryza sativa mRNA for elongation factor 1 beta′. | |
| 700345648H1 | g1488296 | 23 | −23 | gb105pln | Oryza sativa osRAD23 mRNA, complete cds. | |
| 700343890H1 | g1845196 | 50 | −72 | gb105pln | Z. mays mRNA for HMGc2 protein. | |
| 700342204H1 | g2331300 | 25 | −10 | gb105pln | Zea mays ribosomal protein S4 type I (rps4) mRNA, complete cds. | |
| 700346439H1 | g2408027 | 30 | −15 | gb105eukp | SPAC17G6.14c; atp-dependent rna helicase | |
| 700346074H1 | g1839580 | 52 | −10 | gb105pln | putative glycine-rich protein {clone CHEM 11} [Zea mays = maize, cv. INRA 258, | |
| | | | | | mercuric chloride-treated, leaves, mRNA Partial, 149 nt]. | |
| 700346916H1 | g2801536 | 9 | 5 | gb105eukp | LPL1; lysophospholipase homolog | |
| 700342872H1 | g1082146 | 11 | 5 | gb105allp | T18D3.3 | |
| 700346413H1 | g2501765 | 14 | −6 | gb105pln | Glycine max calmodulin-like domain protein kinase isoenzyme gamma mRNA, | |
| | | | | | complete cds. | |
| 700343761H1 | g2565339 | 42 | −30 | gb105pln | Lupinus luteus ribosomal protein S14 (rps14) mRNA, complete cds. | |
| 700346883H1 | g2262165 | 35 | −9 | gb105eukp | F5J6.10; predicted protein of unknown function | |
| 700345993H1 | g117368 | 68 | −47 | gb105pln | Z. mays mRNA for ribosomal protein L39. | |
| 700344745H1 | g895891 | 12 | −1 | gb105eukp | RPS5; ribosomal protein S5 | |
| 700347302H1 | g20163 | 28 | −24 | gb105pln | O. sativa Rr15 mRNA for 5S ribosomal RNA. | |
| 700343818H1 | g218340 | 38 | −23 | gb105pln | Triticum aestivum mRNA for elongation factor 1 beta′. | |
| 700347045H1 | g2529657 | 22 | 12 | gb105pln | Arabidopsis thaliana chromosome II BAC T30B22 genomic sequence, complete | |
| | | | | | sequence. | |
| 700346896H1 | g217973 | 24 | −23 | gb105pln | Zea mays gene for triosephosphate isomerase, complete cds. | |
| 700344853H1 | g2632928 | 8 | 5 | gb105allp | sorbitol dehydrogenase | |
| 700346013H1 | g443696 | 12 | 16 | gb105pln | Arabidopsis thaliana mRNA for ERD1 protein, complete cds. | |
| 700345221H1 | g434342 | 28 | −16 | gb105pln | A. thaliana (C24) mRNA for S18 ribosomal protein. | |
| 700343770H1 | g2330856 | 14 | 0 | gb105eukp | SPAC6F12.09; hypothetical protein | |
| 700343457H1 | g486229 | 19 | 1 | gb105eukp | APL2 | |
| 700346915H1 | g1688322 | 8 | 4 | gb105allp | PinA | |
| 700345169H1 | g20323 | 60 | −49 | gb105pln | O. sativa RAc1 gene for actin. | |
| 700342516H1 | g1486286 | 52 | −44 | gb105pln | C. sativus mRNA for T-complex polypeptide 1. | |
| 700379679H1 | g1841869 | 32 | −16 | gb105pln | Pimpinella brachycarpa elongation factor 1-beta (EF-1-beta) mRNA, complete cds. | |
| 700344178H1 | g1632830 | 29 | −2 | gb105pln | R. communis mRNA (unknown). | |
| 700344005H1 | g1181672 | 61 | −34 | gb105pln | Sorghum bicolor heat shock protein 70 cognate (hsc70) mRNA, partial cds. | |
| 700281809H2 | g397632 | 38 | −42 | gb105pln | T. aestivum translation initiation factor 4A. | |
| 700343085H1 | g557803 | 44 | −18 | gb105eukp | rir3 | |
| 700345848H1 | g22324 | 48 | −31 | gb105pln | Z. mays mRNA for H2B histone (clone cH2B221). | |
| 700346243H1 | g31419 | 25 | −9 | gb105allp | fibulin-1 C | |
| 700347384H1 | g22328 | 52 | −35 | gb105pln | Maize mRNA for a high mobility group protein. | |
| 700343809H1 | g1498385 | 56 | −70 | gb105pln | Zea mays actin (Maz87) gene, partial cds. | |
| 700380795H1 | g557828 | 21 | −12 | gb105eukp | sec11 | |
| 700344783H1 | g1813975 | 6 | 7 | gb105allp | cystathionine beta-synthase | |
| 700345826H1 | g902526 | 35 | −51 | gb105pln | Zea mays clone MubG7 ubiquitin fusion protein gene, complete cds. | |
| 700343920H1 | g287628 | 48 | −8 | gb105eukp | YS29A; ribosomal protein YS29 | |
| 700344323H1 | g22324 | 24 | −5 | gb105pln | Z. mays mRNA for H2B histone (clone CH2B221). | |
| 700343725H1 | g1262999 | 43 | −12 | gb105eukp | ZK287.5 | |
| 700342935H1 | g1628083 | 15 | −3 | gb105eukp | R07H5.5.8 | |
| 700343017H1 | g1885345 | 42 | −28 | gb105pln | T. aestivum mRNA for serpin WZS3. | |
| 700347227H1 | g643469 | 17 | −7 | gb105eukp | unknown | |
| 700344450H1 | g1546919 | 50 | 8 | gb105allp | translation initiation factor 5A | |
| 700345075H1 | g603403 | 12 | 6 | gb105eukp | YER163C; Yer163cp | |
| 700343381H1 | g474009 | 45 | −26 | gb105pln | Rice mRNA, partial homologous to ribosomal protein S19 gene. | |
| 700344613H1 | g414349 | 44 | −2 | gb105allp | ribosomal protein | |
| 700380650H1 | g168502 | 53 | −41 | gb105pln | Maize (Zea mays) histone H4 gene (H4C7), complete cds. | |
| 700345667H1 | g2345153 | 67 | −68 | gb105pln | Zea mays ribosomal protein S4 (rps4) mRNA, complete cds. | |
| 700345662H1 | g2511690 | 20 | −1 | gb105pln | Phaseolus vulgaris Moldavian encoding cystein proteinase precursor (clone cp41). | |
| 700346560H1 | g516306 | 12 | −3 | gb105eukp | Su(var)3-9; 51KDa protein | |
| 700346342H1 | g1063258 | 13 | 4 | gb105allp | p33/41 (annexin IV) | |
| 700343285H1 | g2564050 | 18 | 7 | gb105pln | Arabidopsis thaliana genomic DNA, chromosome 5, P1 clone: MUA22, complete | |
| | | | | | sequence. | |
| 700347252H1 | g1906825 | 59 | −51 | gb105pln | A. thaliana hsp81.2 gene. | |
| 700345472H1 | g18347 | 12 | 4 | gb105allp | glycine-rich protein | |
| 700343982H1 | g1055345 | 33 | 0 | gb105allp | beta-subunit of BK channels | |
| 700343691H1 | g2108344 | 30 | −14 | gb105pln | Brassica campestris small GTP-binding protein Bsar1a (bsar1a) mRNA, | |
| | | | | | complete cds. | |
| 700347002H1 | g168460 | 80 | −64 | gb105pln | Zea mays cyclophilin (CyP) mRNA, complete cds. | |
| 700346250H1 | g16117 | 20 | −22 | gb105pln | Avena sativa mRNA for protochlorophyllide reductase. | |
| 700344274H1 | g1620986 | 23 | −8 | gb105allp | 40S ribosomal protein S17 | |
| 700380406H1 | g168500 | 60 | −52 | gb105pln | Maize (Zea mays) histone H4 gene (H4C14), complete cds. | |
| 700343436H1 | g1872523 | 20 | −5 | gb105eukp | LSD1; negative regulator of cell death; zinc-finger protein Lsd1 | |
| 700345189H1 | g516042 | 13 | 14 | gb105pln | Arabidopsis thaliana Columbia Dwraf1 (DWF1) mRNA, complete cds. | |
| 700343815H1 | g2160155 | 18 | 6 | gb105pln | Sequence of BAC F21M12 from Arabidopsis thaliana chromosome 1, complete | |
| | | | | | sequence. | |
| 700281819H2 | g7357 | 19 | −3 | gb105eukp | ribosomal protein L7 (AA 1-246) | |
| 700343932H1 | g829147 | 71 | −85 | gb105pln | Z. mays gene for cyclophilin. | |
| 700344215H1 | g20250 | 47 | −19 | gb105pln | Oryza sativa H3 histone gene H3R-11. | |
| 700343691H1 | g1549221 | 27 | −11 | gb105pln | Tobacco mRNA for NtSar1 protein, complete cds. | |
| 700346069H1 | g214758 | 34 | −7 | gb105allp | ribosomal protein S22, 40S subunit | |
| 700343041H1 | g960356 | 35 | −31 | gb105pln | Barley mRNA for S-adenosylmethionine synthetase, complete cds. | |
| 700342543H1 | g2150130 | 13 | 3 | gb105eukp | cytoplasmic ribosomal protein S15a | |
| 700379874H1 | g556217 | 15 | 0 | gb105allp | spliceosomal protein | |
| 700347190H1 | g2326350 | 21 | −5 | gb105eukp | hypothetical protein | |
| 700345527H1 | g168500 | 71 | −58 | gb105pln | Maize (Zea mays) histone H4 gene (H4C14), complete cds. | |
| 700345273H1 | g2414643 | 27 | −8 | gb105pln | Yeast (Saccharomyces pombe) chromosome I cosmid c3H5. | |
| 700343038H1 | g1161251 | 32 | −23 | gb105pln | Glycine max nucleosome assembly protein 1 (SNAP-1) mRNA, complete cds. | |
| 700345943H1 | g2196445 | 12 | 4 | gb105allp | YSK1 | |
| 700344703H1 | g516684 | 54 | 7 | gb105allp | similar to bbc1 (breast basic conserved gene) of human | |
| 700342406H1 | g624220 | 46 | −30 | gb105pln | Oryza sativa signal recognition particle 19 kDa protein subunit SRP19 mRNA, | |
| | | | | | complete cds. | |
| 700379854H1 | g2618602 | 16 | 9 | gb105pln | Arabidopsis thaliana genomic DNA, chromosome 5, P1 clone: MSJ1, complete | |
| | | | | | sequence. | |
| 700346290H1 | g1906827 | 44 | −32 | gb105pln | A. thaliana hsp81.4 gene. | |
| 700346101H1 | g2773153 | 15 | −1 | gb105pln | Oryza sativa abscisic acid- and stress-inducible protein (Asr1) mRNA, | |
| | | | | | complete cds. | |
| 700342557H1 | g218176 | 30 | −44 | gb105pln | Rice mRNA for 21 kd polypeptide. | |
| 700344220H1 | g391604 | 32 | −32 | gb105pln | Arabidopsis thaliana mRNA for casein kinase II catalytic subunit. | |
| 700343590H1 | g303848 | 26 | −8 | gb105pln | Rice mRNA for nucleoside diphosphate kinase, complete cds. | |
| 700345888H1 | g2352494 | 16 | −4 | gb105eukp | TIR1; transport inhibitor response 1 | |
| 700380090H1 | g1054864 | 30 | −3 | gb105eukp | coxIII; cytochrome oxidase | |
| 700342583H1 | g1902991 | 56 | −45 | gb105pln | Rice mRNA for asparagine synthetase, complete cds. | |
| 700346939H1 | g499111 | 25 | −12 | gb105pln | Flaveria bidentis clone pNDK-b nucleoside diphosphate kinase mRNA, complete cds. | |
| 700346109H1 | g2529662 | 22 | −2 | gb105eukp | T30B22.5; putative small nuclear ribonucleoprotein, Sm D2 | |
| 700342234H1 | g1747310 | 18 | −3 | gb105eukp | AtCDC5; Myb-like DNA binding protein | |
| 700380552H1 | g182518 | 26 | 1 | gb105allp | ferritin light subunit | |
| 700347033H1 | g2302294 | 14 | 8 | gb105allp | unnamed protein product | |
| 700345489H1 | g434342 | 34 | −23 | gb105pln | A. thaliana (C24) mRNA for S18 ribosomal protein. | |
| 700379647H1 | g603764 | 69 | −38 | gb105allp | ionizing radiation resistance conferring protein | |
| 700346136H1 | g1403043 | 31 | −23 | gb105pln | H. chilense x T. turgidum conv. durum (Tritordeum) mRNA for S-adenosylmethionine | |
| | | | | | decarboxylase. | |
| 700342822H1 | g1167974 | 40 | −21 | gb105eukp | molecular chaperone Dd-TCP1 | |
| 700346975H1 | g565644 | 7 | 7 | gb105allp | hnRNP A2 protein | |
| 700281875H2 | g736271 | 46 | −42 | gb105pln | O. sativa hsp70 gene for heat shock protein 70. | |
| 700344292H1 | g398917 | 36 | −19 | gb105pln | B. napus cold induced protein (BnC24A) mRNA. | |
| 700343162H1 | g551319 | 27 | −11 | gb105pln | Yeast (Saccaromyces cerevisiae) chromosome VIII cosmid 9986. | |
| 700345344H1 | g473987 | 16 | −3 | gb105pln | Rice mRNA, partial homologous to histone H3 gene. | |
| 700344116H1 | g397395 | 65 | −50 | gb105pln | Z. mays MNB1b mRNA for DNA-binding protein. | |
| 700281846H2 | g1781299 | 33 | −11 | gb105eukp | splicing factor; transformer-SR ribonucleoprotein | |
| 700379908H1 | g2370231 | 48 | −40 | gb105pln | Hordum vulgare mRNA for putative acyl-CoA oxidase. | |
| 700345727H1 | g2618603 | 17 | −2 | gb105pln | Arabidopsis thaliana genomic DNA, chromosome 5, P1 clone: MSL3, complete | |
| | | | | | sequence. | |
| 700342303H1 | g168602 | 54 | −44 | gb105pln | Zea mays regulatory protein GF14-12 mRNA, complete cds. | |
| 700345707H1 | g485376 | 43 | −89 | gb105pln | Zea mays alpha-3-tubulin gene, complete cds. | |
| 700342769H1 | g2314600 | 8 | −0 | gb105allp | conserved hypthetical protein | |
| 700344273H1 | g992966 | 14 | −5 | gb105eukp | thioredoxin | |
| 700281838H2 | g2462076 | 26 | −13 | gb105pln | A. thaliana mRNA for oxa1-like gene. | |
| 700346720H1 | g971484 | 21 | −3 | gb105pln | L. esculentum mRNA for beta-galactosidase/galactanase protein (putative). | |
| 700344340H1 | g1809142 | 31 | 1 | gb105eukp | multicatalytic endopeptidase subunit C8; EC 3.4.99.46 | |
| 700346901H1 | g22180 | 86 | −83 | gb105pln | Maize gene for beta 1 tubulin. | |
| 700281887H2 | g2274990 | 51 | −55 | gb105pln | Hordeum vulgare mRNA for expressed sequence tag. | |
| 700343401H1 | g1785947 | 17 | −12 | gb105pln | Hordeum vulgare cytosolic triosephosphate somerase mRNA, complete cds. | |
| 700343266H1 | g984112 | 16 | 13 | gb105pln | C. annuum PCRTC mRNA. | |
| 700345847H1 | g2388943 | 26 | −10 | gb105eukp | SPAC27E2.03c; hypothetical protein | |
| 700346927H1 | g157564 | 20 | 2 | gb105eukp | Aats-glupro; transfer RNA-Glu-Pro aminoacyl synthetase | |
| 700346429H1 | g2661840 | 28 | −13 | gb105eukp | adk; adenosine kinase; EC 2.7.1.20 | |
| 700343728H1 | g2832762 | 20 | −5 | gb105eukp | EG:39E1.1 | |
| 700342766H1 | g1177368 | 100 | −11 | gb105pln | Z. mays mRNA for ribosomal protein L39. | |
| 700343213H1 | g1872546 | 19 | 7 | gb105allp | NIK | |
| 700342619H1 | g21794 | 31 | −40 | gb105pln | Wheat histone H4 gene. | |
| 700346106H1 | g1183936 | 16 | 2 | gb105pln | P. sativum 5S rRNA gene. | |
| 700379624H1 | g397395 | 75 | −58 | gb105pln | Z. mays MNB1b mRNA for DNA-binding protein. | |
| 700342403H1 | g2635371 | 8 | 1 | gb105allp | similar to hypothetical proteins | |
| 700380083H1 | g960290 | 33 | 1 | gb105pln | Ruta graveolens anthranilate synthase alpha-subunit mRNA, complete cds. | |
| 700346295H1 | g2760015 | 22 | −12 | gb105eukp | 60S ribosomal protein L14 | |
| 700346847H1 | g1914684 | 18 | −3 | gb105pln | D. carota mRNA for RAD23 protein, isoform II. | |
| 700346159H1 | g2668737 | 25 | −27 | gb105pln | Zea mays translation initiation factor 5A (TIF5A) mRNA, complete cds. | |
| 700346066H1 | g21229 | 43 | −32 | gb105pln | S. oleracea mRNA for stearoyl-acyl carrier protein desaturase. | |
| 700344052H1 | g1395190 | 43 | −38 | gb105pln | Spinacia oleracea L. mRNA for 26S proteasome ATPase subunit, complete cds. | |
| 700343820H1 | g1591042 | 10 | 4 | gb105allp | translation elongation factor EF-1, subunit alpha | |
| 700342893H1 | g2465426 | 12 | −2 | gb105eukp | JRG1.1.; 32 kDa protein | |
| 700346241H1 | g2842498 | 36 | −22 | gb105eukp | F21O9.240; protein kinase ADK1-subunit alpha | |
| 700346105H1 | g436920 | 14 | −1 | gb105eukp | lipoxygenase 1; EC 1.13.11.12 | |
| 700345320H1 | g563346 | 22 | −18 | gb105eukp | actin-like protein | |
| 700345841H1 | g443836 | 19 | −1 | gb105eukp | T07C4.9 | |
| 700342938H1 | g2191168 | 15 | −10 | gb105eukp | A_IG002P16.20 | |
| 700379790H1 | g710626 | 21 | 1 | gb105eukp | ERD15; ERD15 protein | |
| 700345439H1 | g172423 | 18 | 3 | gb105pln | Yeast (Saccharomyces cerevisiae) ribosomal protein L1 gene, complete cds. | |
| 700346921H1 | g170746 | 57 | −39 | gb105pln | Wheat histone H4 TH091 gene, complete cds. | |
| 700346691H1 | g303854 | 69 | −54 | gb105pln | Rice mRNA for ribosomal protein L7A, complete cds. | |
| 700346437H1 | g2852444 | 30 | −12 | gb105pln | Salix bakko mRNA for SUI1 homolog, complete cds. | |
| 700346342H1 | g189617 | 13 | 4 | gb105allp | protein PP4-X | |
| 700345887H1 | g218164 | 24 | −5 | gb105pln | Rice prepro-glutelin gene, complete cds. | |
| 700342493H1 | g386764 | 89 | −41 | gb105allp | hba2 alpha globin | |
| 700345983H1 | g1184771 | 68 | −71 | gb105pln | Zea mays glyceraldehyde-3-phosphate dehydrogenase GAPC2 (gpc2) mRNA, | |
| | | | | | complete cds. | |
| 700344302H1 | g22324 | 51 | −41 | gb105ln | Z. mays mRNA for H2B histone (clone cH2B221). | |
| 700379651H1 | g1209700 | 46 | −47 | gb105pln | Zea mays ribosomal protein L12 mRNA, complete cds. | |
| 700347091H1 | g498739 | 48 | −32 | gb105pln | H. vulgare (pMaW22) mRNA for beta-ketoacyl-ACP synthase. | |
| 700380188H1 | g633687: | 48 | −11 | gb105eukp | ubiquinol-cytochrome c reductase; EC 1.10.2.2 | |
| 700342858H1 | g20267 | 7 | 1 | gb105eukp | lipoxygenase L-2; EC 1.13.11.12 | |
| 700342896H1 | g1469218 | 39 | −13 | gb105pln | B. oleracea mRNA (unknown). | |
| 700346275H1 | g1575726 | 8 | 12 | gb105pln | Glycine max 14-3-3 related protein SGF14B mRNA, partial cds. | |
| 700343322H1 | g22171 | 19 | 13 | gb105pln | Maize nuclear ARS3 DNA autonomously replicating in Yeast. | |
| 700380159H1 | g22483 | 39 | −40 | gb105pln | Z. mays RNA for superoxide dismutase Sod4. | |
| 700343937H1 | g532572 | 15 | −3 | gb105eukp | LoxA; lipoxygenase 1; EC 1.13.11.12; linoleate:oxygen oxioreductase, lipoxidase, | |
| | | | | | carotene oxidase | |
| 700343079H1 | g532821 | 8 | 7 | gb105eukp | F57B9.10 | |
| 700345325H1 | g683502 | 19 | −5 | gb105eukp | protein phosphatase 2A 65 kDa regulatory subunit | |
| 700379811H1 | g2465018 | 40 | −35 | gb105pln | Fragaria vesca partial mRNA for putative cystathionine gamma synthase. | |
| 700346790H1 | g1006830 | 21 | −1 | gb105pln | Gossypium hirsutum acyl-CoA-binding protein mRNA, complete cds. | |
| 700342826H1 | g2274990 | 61 | −49 | gb105pln | Hordeum vulgare mRNA for expressed sequence tag. | |
| 700344990H1 | g2653284 | 40 | −38 | gb105pln | Oryza sativa mRNA for enoyl-ACP reductase. | |
| 700343013H1 | g1183936 | 15 | 3 | gb105pln | P. sativum 5S rRNA gene. | |
| 700343586H1 | g1167527 | 14 | −17 | gb105eukp | Cytb; cytochrome b | |
| 700343281H1 | g2370518 | 5 | 6 | gb105allp | ribosomal protein | |
| 700343308H1 | g498642 | 48 | −24 | gb105pln | Zea mays G-box binding factor 1 (GBF1) mRNA, complete cds. | |
| 700379982H1 | g1167963 | 19 | 6 | gb105eukp | 18-56 protein | |
| 700344703H1 | g510552 | 54 | 7 | gb105allp | ribosomal protein L13 | |
| 700344193H1 | g1523921 | 17 | 1 | gb105eukp | F27D4.1 | |
| 700343076H1 | g2330709 | 6 | 8 | gb105eukp | SPAC17H9.02; hyothetical helicase | |
| 700344804H1 | g2570506 | 42 | −30 | gb105pln | Oryza sativa ribosomal protein mRNA, complete cds. | |
| 700342928H1 | g473602 | 45 | −43 | gb105pln | Zea mays W-22 histone H2A mRNA, complete cds. | |
| 700345822H1 | g1218041 | 18 | −14 | gb105pln | Arabidopsis thaliana secreted purple acid phosphatase precursor (PAP1) gene, | |
| | | | | | complete cds. | |
| 700344120H1 | g1488297 | 17 | 8 | gb105allp | osRAD23 | |
| 700343863H1 | g1213072 | 42 | −2 | gb105pln | O. sativa (Tainong 67) mRNA for heat shock protein 17.8. | |
| 700347067H1 | g1655679 | 27 | −13 | gb105eukp | 3-hydroxy-3-methylglutaryl-CoA-synthase | |
| 700346540H1 | g1903019 | 61 | −31 | gb105eukp | curly leaf | |
| 700343332H1 | g347715 | 16 | −0 | gb105eukp | shows 46% identity to human placental protein 15 (PP15) | |
| 700379754H1 | g218176 | 30 | 8 | gb105pln | Rice mRNA for 21kd polypeptide. | |
| 700344801H1 | g2668747 | 29 | 9 | gb105pln | Zea mays ribosomal protein L17 (rp117) mRNA, complete cds. | |
| 700344880H1 | g915193 | 34 | −34 | gb105pln | Chlamydomonas reinhardtii mRNA for actin, complete cds. | |
| 700342711H1 | g1632830 | 28 | −11 | gb105pln | R. communis mRNA (unknown). | |
| 700379647H1 | g8720565 | 12 | 1 | gb105eukp | C14A4.2 | |
| 700347215H1 | g166606 | 28 | −17 | gb105eukp | anthranilate synthase alpha subunit | |
| 700379739H1 | g576998 | 8 | 7 | gb105eukp | C08B11.5 | |
| 700343280H1 | g145301 | 11 | 2 | gb105allp | adk ORF | |
| 700346001H1 | g1321660 | 41 | −36 | gb105pln | Rice mRNA for ascorbate peroxidase, complete cds. | |
| 700343413H1 | g397340 | 8 | 4 | gb105allp | DNA-binding protein | |
| 700343933H1 | g22484 | 50 | −43 | gb105pln | Z. mays RNA for superoxide dismutase Sod4A. | |
| 700343250h1 | g2570223 | 19 | −15 | gb105pln | Sequence of BAC F20D22 from Arabidopsis thaliana chromosome 1, complete | |
| | | | | | sequence. | |
| 700344907H1 | g473604 | 26 | −29 | gb105pln | Zea mays W-22 histone H2B mRNA, complete cds. | |
| 700344149H1 | g2814799 | 18 | −1 | gb105eukp | ZK858.6 | |
| 700379931H1 | g2114206 | 22 | −35 | gb105pln | Rice DNA for glutaredoxin, complete cds. | |
| 700380220H1 | g558651 | 27 | −12 | gb105pln | T. aestivum VDAC3 mRNA for voltage dependent anion channel. | |
| 700346518H1 | g1944202 | 32 | −36 | gb105pln | Perilla frutescens mRNA for actin, partial cds. | |
| 700344120H1 | g2264320 | 18 | 12 | gb105pln | Arabidopsis thaliana genomic DNA, chromosome 5, P1 clone: MX110, complete | |
| | | | | | sequence. | |
| 700346601H1 | g624675 | 35 | −26 | gb105pln | Citrus maxima citrate synthase (cit) mRNA, nuclear gene encoding mitochondrial | |
| | | | | | protein, complete cds. | |
| 700342514H1 | g2464911 | 23 | 3 | gb105eukp | splicing factor homolog | |
| 700342564H1 | g469247 | 21 | 0 | gb105pln | Helianthus annuuus ribosomal protein S3a mRNA, complete cds. | |
| 700343173H1 | g438279 | 24 | −9 | gb105allp | Ribosomal protein L7 | |
| 700347280H1 | g556672 | 50 | −45 | gb105pln | S. cereale (Halo) chloroplast mRNA for heat-shock protein. | |
| 700342365H1 | g1066474 | 14 | −6 | gb105eukp | YPR118W; Ypr118wp | |
| 700342946H1 | g166857 | 40 | −27 | gb105pln | Arabidopsis thaliana cytoplasmic ribosomal protein mRNA, complete cds. | |
| 700380278H1 | g1911165 | 38 | −30 | gb105pln | S. tuberosum mRNA for soluble-starch-synthase. | |
| 700380469H1 | g337187 | 18 | −0 | gb105allp | cytochrome oxidase subunit II | |
| 700344051H1 | g2196466 | 14 | 5 | gb105allp | TATA binding protein-associated factor | |
| 700343834H1 | g293888 | 29 | −11 | gb105pln | Zea mays, glyceraldehyde-3-phosphate dehydrogenase mRNA, 3′ end (clone GAPC2). | |
| 700343366H1 | g1261930 | 8 | 6 | gb105allp | unknown | |
| 700346763H1 | g829147 | 91 | −82 | gb105pln | Z. mays gene for cyclophilin. | |
| 700379655H1 | g2407799 | 20 | −15 | gb105pln | Arabidopsis thaliana mRNA for histone H2A.F/Z. | |
| 700347065H1 | g2656029 | 16 | −17 | gb105pln | Arabidopsis thaliana genomic DNA, chromosome 5, P1 clone: MOB2. | |
| 700346892H1 | g459894 | 54 | −63 | gb105pln | Zea mays sus1 gene, complete cds. | |
| 700344720H1 | g1302342 | 6 | 6 | gb105eukp | ORF YNL275w | |
| 700342296H1 | g1468961 | 23 | −1 | gb105allp | ribophorin | |
| 700345121H1 | g2302292 | 18 | 2 | gb105allp | unnamed protein product | |
| 700345431H1 | g2677823 | 9 | 9 | gb105pln | Prunus armeniaca abscisic stress ripening protein homolog mRNA, complete cds. | |
| 700345443H1 | g541654 | 14 | 7 | gb105eukp | cdc2rk; Dcdrk kinase | |
| 700345652H1 | g204477 | 59 | 1 | gb105allp | Rat submandibular gland secretory protein | |
| 700345413H1 | g602605 | 71 | −70 | gb105pln | Zea mays tandem genes for alpha1-tubulin and alpha2-tubulin. | |
| 700343677H1 | g21692 | 28 | −13 | gb105pln | T. aestivum mRNA 1 for cathepsin B (2529). | |
| 700342328H1 | g551289 | 48 | −68 | gb105pln | Z. mays (W22) phosphoglycerate mutase gene exons 2-8. | |
| 700347028H1 | g2738247 | 31 | −19 | gb105pln | Arabidopsis thaliana cobalamin-independent methionine synthase (ATCIMS) mRNA, | |
| | | | | | complete cds. | |
| 700346607H1 | g1322867 | 8 | 7 | gb105allp | ORF YGL220w | |
| 700347072H1 | g1381150 | 17 | 5 | gb105allp | Hs-CUL-4B | |
| 700345462H1 | g287834 | 32 | −18 | gb105pln | Z. mays yptm2 cDNA. | |
| 700344227H1 | g2827142 | 17 | −12 | gb105pln | Arabidopsis thaliana cellulose synthase catalytic subunit (Ath-B) mRNA, | |
| | | | | | complete cds. | |
| 700346005H1 | g190234 | 28 | 3 | gb105allp | acidic ribosomal phosphoprotein (P1) | |
| 700343996H1 | g2809480 | 65 | −63 | gb105pln | Oryza sativa calmodulin (CaM2) mRNA, complete cds. | |
| 700342328H1 | g168587 | 92 | −76 | gb105pln | Zea mays cofactor-independent phosphoglycerate mutase mRNA, complete cds. | |
| 700343158H1 | g2739020 | 19 | 15 | gb105pln | Rhododendron metternichii var. hondoense CT, AT, GT repeat, genomic sequence. | |
| 700343485H1 | g736271 | 51 | −26 | gb105pln | O. sativa hsp70 gene for heat shock protein 70. | |
| 700346269H1 | g1408515 | 5 | 7 | gb105eukp | ribosomal protein L22 homolog | |
| 700281822H2 | g871515 | 71 | 5 | gb105allp | Psst70 (stress 70 protein) | |
| 700343144H1 | g1575129 | 96 | −59 | gb105pln | Zea mays lumenal binding protein cBiPe3 mRNA, complete cds. | |
| 700347045H1 | g303854 | 64 | −25 | gb105pln | Rice mRNA for ribosomal protein L7A, complete cds. | |
| 700345058H1 | g1532051 | 33 | −24 | gb105pln | P. argentatum mRNA for farnesyl diphosphate synthase (FPS2). | |
| 700344941H1 | g575730 | 33 | −34 | gb105pln | Z. mays mRNA for transmembrane protein. | |
| 700345472H1 | g2226370 | 10 | 4 | gb105eukp | RNA-binding protein | |
| 700343377H1 | g1015315 | 23 | 5 | gb105pln | Pisum sativum (clone PsRCI35-2) ribosomal protein L41 mRNA, complete cds. | |
| 700380747H1 | g556685 | 64 | −51 | gb105pln | Z. mays mRNA for ADP-ribosylation factor. | |
| 700342333H1 | g736271 | 31 | −10 | gb105pln | O. sativa hsp70 gene for heat shock protein 70. | |
| 700342734H1 | g218160 | 47 | −47 | gb105pln | Oryza sativa mRNA for elongation factor 1 beta′. | |
| 700380283H1 | g168492 | 61 | −48 | gb105pln | Corn histone H3 (H3C3) gene, complete cds. | |
| 700345759H1 | g2662342 | 83 | −76 | gb105pln | Oryza sativa mRNA for EF-1 alpha, complete cds. | |
| 700344835H1 | g397395 | 69 | −68 | gb105pln | Z. mays MNB1b mRNA for DNA-binding protein. | |
| 700344141H1 | g2224910 | 36 | −27 | gb105pln | Daucus carota somatic embryogenesis receptor-like kinase mRNA, complete cds. | |
| 700343702H1 | g1088348 | 8 | 5 | gb105allp | adenylate kinase | |
| 700281812H2 | g398848 | 84 | −56 | gb105pln | Z. mays mRNA for beta 5 tubulin. | |
| 700344450H1 | g2668737 | 59 | 2 | gb105pln | Zea mays translation initiation factor 5A (TIF5A) mRNA, complete cds. | |
| 700344215H1 | g168494 | 47 | −18 | gb105pln | Maize (Zea mays) histone H3 gene (H3C2), complete cds. | |
| 700344102H1 | g1256595 | 40 | −17 | gb105allp | LytB | |
| 700346953H1 | g2739218 | 47 | −33 | gb105pln | Hordeum vulgare S28 ribosomal protein. | |
| 700342896H1 | g2584827 | 36 | −8 | gb105pln | Sequence of BAC F12F1 from Arabidopsis thaliana chromosome 1, complete | |
| | | | | | sequence. | |
| 700347061H1 | g2384757 | 54 | −47 | gb105pln | Oryza sativa GDP dissociation inhibitor protein OsGDI1 (OsGDI1) mRNA, | |
| | | | | | complete cds. | |
| 700343717H1 | g2668743 | 37 | −38 | gb105pln | Zea mays ubiquitin conjugating enzyme (UBC) mRNA, complete cds. | |
| 700343011H1 | g2760168 | 12 | 13 | gb105pln | Arabidopsis thaliana genomic DNA, chromosome 5, P1 clone: MEE6, complete | |
| | | | | | sequence. | |
| 700346901H1 | g416144 | 70 | −69 | gb105pln | Zea mays beta-4 tubulin (tub4) mRNA, complete cds. | |
| 700380603H1 | g2656016 | 7 | 6 | gb105allp | cell-cycle regulatory protein | |
| 700343517H1 | g2642324 | 12 | 6 | gb105eukp | PRO4; G-actin binding protein; profilin | |
| 700379831H1 | g499011 | 67 | −61 | gb105pln | S. vulgare SoAc1 mRNA. | |
| 700379677H1 | g22314 | 61 | −82 | gb105pln | Maize mRNA for GSH gluthathione S-transferase I (GST; EC 2.5.1.18). | |
| 700347334H1 | g2463332 | 23 | −22 | gb105pln | Oryza sativa mRNA for M79 protein. | |
| 700343933H1 | g1574937 | 29 | −62 | gb105pln | Zea mays superoxide dismutase 4 (sod4) gene, partial cds. | |
| 700346827H1 | g285638 | 23 | 6 | gb105eukp | inorganic pyrophosphatase ase′; EC 3.6.1.1 | |
| 700343483H1 | g473169 | 48 | −7 | gb105eukp | subunit of the mitochondrial pyruvate dehydrogenase complex; E1 alpha subunit of | |
| | | | | | pyruvate dehydrogenase precursor; EC 1.2.4.1 | |
| 700345248H1 | g157535 | 10 | 5 | gb105eukp | gol; zinc finger protein; goliath protein | |
| 700345912H1 | g643073 | 22 | −2 | gb105pln | Fragaria x ananassa putative 40S ribosomal protein s12 mRNA, complete cds. | |
| 700343433H1 | g564024 | 34 | −10 | gb105eukp | ZM/DHLAAT; dihydrolipoamide acetyl transferase | |
| 700380575H1 | g2558659 | 14 | 1 | gb105allp | No definition line found | |
| 700346313H1 | g57004 | 8 | 6 | gb105allp | pyrimidine binding protein 2 | |
| 700345237H1 | g836764 | 15 | 3 | gb105eukp | YFR009W | |
| 700344542H1 | g2076623 | 10 | 5 | gb105allp | PtrB | |
| 700346145H1 | g4026 | 23 | −2 | gb105eukp | NAM8 | |
| 700345875H1 | g2558943 | 50 | −36 | gb105pln | Gossypium hirsutum histone 3 mRNA, complete cds. | |
| 700344166H1 | g1008296 | 20 | −3 | gb105pln | Yeast (Saccharomyces cerevisiae) chromosome X reading frame ORF YJL111w. | |
| 700342546H1 | g1006731 | 18 | −13 | gb105eukp | CCT3 | |
| 700379675H1 | g309071 | 14 | −7 | gb105eukp | RPS7; ribosomal protein S7 | |
| 700346257H1 | g633109 | 14 | 8 | gb105pln | Rice mRNA for plasma membrane H+-ATPase, complete cds. | |
| 700342977H1 | g416251 | 46 | −36 | gb105pln | Rice mRNA for acetohydroxy acid reductoisomerase, partial sequence. | |
| 700343930H1 | g20163 | 44 | −32 | gb105pln | O. sativa Rr15 mRNA for 5S ribosomal RNA. | |
| 700343318H1 | g536190 | 19 | −3 | gb105eukp | COQ1 | |
| 700346147H1 | g2414643 | 24 | −0 | gb105pln | Yeast (Saccharomyces pombe) chromosome I cosmid C3H5. | |
| 700344913H1 | g2511530 | 82 | −71 | gb105pln | Eleusine indica alpha tubulin 1 (TUA1) mRNA, complete cds. | |
| 700343852H1 | g304674 | 11 | −1 | gb105eukp | Eif2<alpha>; translation initiation; eIF-2 alpha-subunit | |
| 700344014H1 | g17780 | 55 | −2 | gb105eukp | 3-oxoacyl-[acyl-carrier protein] reductase; EC 1.1.1.100 | |
| 700342780H1 | g1041336 | 31 | −12 | gb105eukp | F54D5.8 | |
| 700380683H1 | g525196 | 6 | 8 | gb105allp | epsilon-COP; 1d1Fp | |
| 700346495H1 | g899609 | 40 | −32 | gb105pln | Zea mays acidic ribosomal protein P2 (RPA-2A1) mRNA, complete cds. | |
| 70034588H1 | g17928 | 39 | −32 | gb105pln | B. rapa cv.R500 mRNA for stearoyl-acyl carrier protein desaturase. | |
| 700346118H1 | g487934 | 15 | 3 | gb105eukp | NAM8; Nam8p: Putative RNA binding proteins | |
| 700343968H1 | g2245377 | 24 | −10 | gb105pln | Arabidopsis thaliana auxin response factor 1 (ARF1) mRNA, complete cds. | |
| 700342789H1 | g22322 | 21 | −32 | gb105pln | Z. mays mRNA for H2B histone (clone cH2B214). | |
| 700342657H1 | g2415704 | 22 | 4 | gb105allp | proline iminopeptidase | |
| 700345820H1 | g2257755 | 52 | −39 | gb105pln | Zea mays nucleolar histone deacetylase HD2-p39 mRNA, complete cds. | |
| 700345476H1 | g1246843 | 22 | −6 | gb105eukp | G2834; ribosomal protein | |
| 700345288H1 | g22447 | 26 | 3 | gb105pln | Zea mays ZMPMS2 gene for 19 kDa zein protein. | |
| 700344810H1 | g2369713 | 54 | −45 | gb105pln | Beta vulgaris cDNA for elongation factor 2. | |
| 700344322H1 | g166410 | 33 | −6 | gb105eukp | nucleic acid binding protein; Alfin-1 | |
| 700380062H1 | g168500 | 41 | −10 | gb105pln | Maize (Zea mays) histone H4 gene (H4C14), complete cds. | |
| 700345975H1 | g436032 | 61 | −4 | gb105eukp | 60S ribosomal protein L34 | |
| 700344038H1 | g200781 | 20 | 5 | gb105allp | ribosomal protein L32-3A gene | |
| 700346602H1 | g536891 | 65 | −56 | gb105pln | Wheat mRNA for protein H2A, complete cds, clone wcH2A-4. | |
| 700344146H1 | g1064826 | 7 | 3 | gb105allp | Actin | |
| 700343255H1 | g2827716 | 16 | 5 | gb105eukp | F6H11.180; predicted protein | |
| 700347246H1 | g1235520 | 14 | 0 | gb105allp | orf gene product | |
| 700346584H1 | g1209756 | 44 | −9 | gb105eukp | putative sugar transporter; integral membrane protein | |
| 700343407H1 | g529009 | 22 | −5 | gb105eukp | PFK; PPi-dependent phosphofructo-1-kinase; EC 2.7.1.90 | |
| 700380182H1 | g1370455 | 16 | −5 | gb105pln | Yeast (Saccharomyces cerevisiase) chromosome XVI reading ORF YPL220w. | |
| 700346002H1 | g498737 | 50 | −52 | gb105pln | H. vulgare (pMaW21) pseudo mRNA for beta-ketoacyl-ACP synthase (partial). | |
| 700342333H1 | g22342 | 69 | −57 | gb105pln | Maize gene for heat shock protein 70 exon 2 and 3′-UT (hsp70; clone pMON 9502). | |
| 700343276H1 | g551319 | 28 | −14 | gb105pln | Yeast (Saccharomyces cerevisiae) chromosome VIII cosmid 9986. | |
| 700347024H1 | g264277 | 82 | −69 | gb105pln | auxin-binding protein [corn, mRNA, 795 nt]. | |
| 700345724H1 | g450879 | 60 | −63 | gb105pln | A. thaliana hsc70-1 gene. | |
| 700344548H1 | g2351064 | 14 | 15 | gb105pln | Arabidopsis thaliana genomic DNA, chromosome 5, P1 clone: MDJ22. | |
| 700342760H1 | g303731 | 34 | −16 | gb105pln | Pea mRNA for GTP-binding protein, complete cds. | |
| 700347216H1 | g2511572 | 28 | −5 | gb105eukp | prcga; multicatalytic endopeptidase; EC 3.4.99.46 | |
| 700344868H1 | g22314 | 48 | −80 | gb105pln | Maize mRNA for GSH gluthathione S-transferase I (GST; EC 2.5.1.18). | |
| 700343138H1 | g1568483 | 15 | 2 | gb105pln | B. vulgaris mRNA for cyclin. | |
| 700346532H1 | g1263159 | 13 | 15 | gb105pln | O. sativa DNA for LRK2 gene. | |
| 700343852H1 | g2706460 | 17 | −5 | gb105eukp | SPAC3G9.09c; hypothetical translational initiation factor 2 alpha | |
| 700345142H1 | g1006624 | 15 | −1 | gb105eukp | alt A45; proteindisulfidisomerase | |
| 700342461H1 | g1652223 | 12 | 1 | gb105allp | ABC1-like | |
| 700342754H1 | g1519248 | 43 | −28 | gb105pln | Oryza sativa GF14-b protein mRNA, complete cds. | |
| 700379947H1 | g2244847 | 8 | 7 | gb105eukp | hydroxyproline-rich glycoprotein homolog | |
| 700344805H1 | g550543 | 37 | −21 | gb105pln | A. thaliana mRNA for ribosomal protein L16. | |
| 700346859H1 | g1203905 | 21 | −4 | gb105eukp | M(1)15D; M(1)15D | |
| 700344374H1 | g1575127 | 57 | −55 | gb105pln | Zea mays lumenal binding protein cBiPe2 mRNA, complete cds. | |
| 700342284H1 | g156374 | 19 | −5 | gb105eukp | mlc-2 myosin light chain 2 | |
| 700342573H1 | g2765423 | 54 | −37 | gb105allp | immunoglobulin kappa light chain | |
| 700343119H1 | g841308 | 24 | 6 | gb105allp | TAFII32 precursor | |
| 700379649H1 | g790507 | 65 | −55 | gb105pln | Z. mays mRNA for 60S acidic ribosomal protein. | |
| 700346920H1 | g1430978 | 22 | −13 | gb105pln | Yeast (Saccharomyces cerevisiae) chromosome IV reading frame ORF YDL014w. | |
| 700345761H1 | g2827140 | 50 | −15 | gb105pln | Arabidopsis thaliana cellulose synthase catalytic subunit (Ath-A) mRNA, | |
| | | | | | complete cds. | |
| 700345346H1 | g2789434 | 10 | 8 | gb105allp | CLB1 | |
| 700380172H1 | g1008401 | 29 | −14 | gb105pln | Yeast (Saccharomyces cerevisiae) chromosome X reading frame ORF YJL191w. | |
| 700344340H1 | g2285802 | 34 | −1 | gb105eukp | 26S proteasome alpha subunit | |
| 700342258H1 | g6815 | 28 | −16 | gb105eukp | R08D7.3 | |
| 700342466H1 | g2225941 | 35 | −9 | gb105allp | Mdes protein | |
| 700346422H1 | g1322276 | 21 | −0 | gb105pln | Triticum aestivum histone H2A gene, complete cds. | |
| 700344925H1 | g22155 | 93 | −76 | gb105pln | Z. mays mRNA for alpha-tubulin 5. | |
| 700380233H1 | g444022 | 37 | −30 | gb105pln | N. tabacum mRNA for pyruvate kinase. | |
| 700347071H1 | g829147 | 76 | −68 | gb105pln | Z. mays gene for cyclophilin. | |
| 700344931H1 | g20250 | 58 | −44 | gb105pln | Oryza sativa H3 histone gene H3R-11. | |
| 700343627H1 | g395078 | 25 | 9 | gb105pln | B. rapa ubiquitin and ribosomal protein mRNA, complete CDS's. | |
| 700346185H1 | g762785 | 42 | −1 | gb105eukp | cysteine proteinase inhibitor | |
| 700346213H1 | g868002 | 33 | −19 | gb105pln | Pumpkin mRNA for aconitase, complete cds. | |
| 700347150H1 | g914875 | 27 | −7 | gb105eukp | unknown | |
| 700344111H1 | g2190547 | 51 | −21 | gb105eukp | F5I14.13 | |
| 700345736H1 | g303852 | 65 | −67 | gb105pln | Rice mRNA for ribosomal protein L3, complete cds. | |
| 700345108H1 | g454913 | 36 | −26 | gb105pln | A. porrum LDJ2 mRNA. | |
| 700345661H1 | g455419 | 17 | 1 | gb105allp | PR264/SC35 | |
| 700342473H1 | g2564046 | 26 | −6 | gb105pln | Arabidopsis thaliana genomic DNA, chromosome 5, P1 clone: MGI19, complete | |
| | | | | | sequence. | |
| 700380212H1 | g21794 | 33 | −39 | gb105pln | Wheat histone H4 gene. | |
| 700342780H1 | g1707657 | 36 | −17 | gb105eukp | DnaJ homologue | |
| 700342686H1 | g2341028 | 40 | −4 | gb105eukp | F19P19.5 | |
| 700343395H1 | g498739 | 44 | −26 | gb105pln | H. vulgare (pMaW22) mRNA for beta-ketoacyl-ACP synthase. | |
| 700345336H1 | g2281104 | 8 | 3 | gb105eukp | F18O19.23; Glucan endo-1,3-beta glucosidase isolog | |
| 700281817H2 | g44204 | 8 | 2 | gb105allp | recA protein | |
| 700342324H1 | g1388021 | 13 | 7 | gb105allp | UDP-glucose pyrophosphorylase | |
| 700344050H1 | g22187 | 38 | −31 | gb105pln | Z. mays mRNA for b-32 protein, putative regulatory factor of zein expression | |
| | | | | | (clone b-32.129). | |
| 700343032H1 | g1498052 | 76 | −74 | gb105pln | Zea mays ribosomal protein S8 mRNA, complete cds. | |
| 700380284H1 | g398607 | 27 | −9 | gb105pln | A. thaliana mRNA for elongation factor 1 beta. | |
| 700347151H1 | g2760167 | 22 | −0 | gb105pln | Arabidopsis thaliana genomic DNA, chromosome 5, P1 clone: MCO15, complete | |
| | | | | | sequence. | |
| 700342504H1 | g2832685 | 21 | −1 | gb105eukp | T10I14.180; putative protein | |
| 700347360H1 | g2343181 | 20 | −10 | gb105eukp | MDL3; catalyzes dissociation of (R)-mandelonitrile to hydrogen cyanide and | |
| | | | | | benzaldehyde; (R)-(+)-madelonitrile lyase isoform MDL3 precursor; EC 4.1.2.10 | |
| 700344961H1 | g2245074 | 29 | −4 | gb105eukp | hypothetical protein | |
| 700346736H1 | g2827314 | 24 | 3 | gb105eukp | casein kinase | |
| 700379891H1 | g1053056 | 20 | −31 | gb105pln | Triticum aestivum histone H3 gene, partial cds, clone W1. | |
| 700344091H1 | g2293565 | 33 | −13 | gb105pln | Oryza sativa ADP-ribosylation factor 1 (Os-ARF1) mRNA, complete cds. | |
| 700342280H1 | g20237 | 43 | −42 | gb105pln | O. sativa (rice) constitutive GOS2 gene. | |
| 700345519H1 | g2196671 | 85 | −72 | gb105pln | Z. mays mRNA for HMG protein. | |
| 700342268H1 | g762850 | 10 | 4 | gb105allp | p21 protein | |
| 700344751H1 | g736271 | 17 | −41 | gb105pln | O. sativa hsp70 gene for heat shock protein 70. | |
| 700347259H1 | g2599091 | 44 | −32 | gb105pln | Arabidopsis thaliana WD-40 repeat protein MSI4 (MSI4) mRNA, complete cds. | |
| 700342532H1 | g522131 | 10 | 5 | gb105eukp | D2045.8 | |
| 700344705H1 | g1488265 | 19 | −7 | gb105eukp | high affinity calcium antiporter CAX1 | |
| 700342480H1 | g168539 | 58 | −15 | gb105pln | Zea mays putative ribosomal protein S22 homolog mRNA, partial cds. | |
| 700345577H1 | g825783 | 22 | 7 | gb105pln | Nicotiana tabacum ribosomal protein L41 mRNA, complete cds. | |
| 700345926H1 | g431155 | 19 | −3 | gb105pln | Lily mRNA for ORF, partial cds. | |
| 700342916H1 | g168639 | 58 | −82 | gb105pln | Zea mays autonomous transposable element En-1 mosaic protein gene, complete cds. | |
| 700379877H1 | g2257484 | 8 | 0 | gb105eukp | pi04; HYPOTHETICAL 45.0 KD PROTEIN IN NOT1/CDC39-HMR INTERGENIC | |
| | | | | | REGION | |
| 700347208H1 | g1808578 | 12 | −0 | gb105allp | proteasome subunit p112 | |
| 700346001H1 | g2274983 | 43 | −25 | gb105pln | Hordeum vulgare mRNA for expressed sequence tag. | |
| 700344988H1 | g2827530 | 16 | −5 | gb105eukp | F8F16.170; predicted protein | |
| 700345631H1 | g387509 | 17 | 4 | gb105allp | protein disulfide isomerase | |
| 700345323H1 | g2282583 | 82 | −76 | gb105pln | Zea mays elongation factor 1-alpha (EF1-A) mRNA, complete cds. | |
| 700344184H1 | g2529657 | 16 | 13 | gb105pln | Arabidopsis thaliana chromosome II BAC T30B22 genomic sequence, complete | |
| | | | | | sequence. | |
| 700380133H1 | g473604 | 20 | −35 | gb105pln | Zea mays W-22 histone H2B mRNA, complete cds. | |
| 700344508H1 | g2145356 | 8 | −3 | gb105eukp | ATHB-14; HD-Zip protein | |
| 700343514H1 | g600710 | 17 | −19 | gb105eukp | SAR1 | |
| 700346885H1 | g2564233 | 27 | −2 | gb105eukp | Ci-zeta; proteasome Z subunit | |
| 700344253H1 | g2827142 | 54 | −46 | gb105pln | Arabidopsis thaliana cellulose synthase catalytic subunit (Ath-B) mRNA, | |
| | | | | | complete cds. | |
| 700345768H1 | g2463564 | 45 | −27 | gb105pln | Oryza sativa mRNA for squalene synthase, complete cds. | |
| 700344872H1 | g886470 | 44 | −48 | gb105pln | C. roseus MetE mRNA for methionine synthase. | |
| 700342686H1 | g310933 | 37 | −4 | gb105eukp | r117; a subunit of 60S ribosomal protein; 60S ribosomal protein subunit L17 | |
| 700344815H1 | g1171578 | 25 | −12 | gb105pln | N. tabacum mRNA for HSR515 protein. | |
| 700343020H1 | g2313520 | 13 | −9 | gb105allp | cyclopropane fatty acid synthase (cfa) | |
| 700380209H1 | g486151 | 9 | 6 | gb105eukp | ORF YKL056c | |
| 700379630H1 | g2257755 | 27 | −31 | gb105pln | Zea mays nucleolar histone deacetylase HD2-p39 mRNA, complete cds. | |
| 700347048H1 | g1184773 | 59 | −10 | gb105pln | Zea mays glyceraldehyde-3-phosphate dehydrogenase GAPC3 (gpc3) mRNA, | |
| | | | | | complete cds. | |
| 700345243H1 | g303856 | 25 | −19 | gb105pln | Rice mRNA for ubiquitin protein fused to a ribosomal protein, complete cds. | |
| 700344691H1 | g624956 | 31 | −15 | gb105pln | C. reinhardtii mRNA for ribosomal protein S18. | |
| 700343266H1 | g2429342 | 15 | 16 | gb105pln | Brassica napus calreticulin mRNA, complete cds. | |
| 700380214H1 | g1335861 | 50 | −45 | gb105pln | Glycine max clathrin heavy chain mRNA, complete cds. | |
| 700347368H1 | g550019 | 8 | 6 | gb105allp | ribosomal protein L28 | |
| 700347285H1 | g2388689 | 19 | 2 | gb105allp | GH1 protein | |
| 700346181H1 | g168500 | 45 | 14 | gb105pln | Maize (Zea mays) histone H4 gene (H4C14), complete cds. | |
| 700344447H1 | g786132 | 14 | −13 | gb105eukp | RCc3 | |
| 700343457H1 | g520884 | 19 | 1 | gb105eukp | APL2; clathrin assembly; Ap12 | |
| 700345511H1 | g601790 | 23 | −1 | gb105pln | Arabidopsis thaliana protein kinase (AFC3) mRNA, partial cds. | |
| 700343070H1 | g666053 | 46 | −52 | gb105pln | H. vulgare mRNA for photosysteme I antenna protein. | |
| 700281886H2 | g2618599 | 14 | −10 | gb105pln | Arabidopsis thaliana genomic DNA, chromosome 5, P1 clone: MBD2, | |
| | | | | | complete sequence. | |
| 700343796H1 | g1523950 | 12 | 1 | gb105eukp | F54F3.4 | |
| 700345905H1 | g436031 | 23 | −19 | gb105pln | Nicotiana tabacum (TSC40-4) 60S ribosomal protein L34 mRNA, complete cds. | |
| 700344112H1 | g168496 | 89 | −65 | gb105pln | Maize (Zea mays) histone H3 gene (H3C4), complete cds. | |
| 700346816H1 | g1786697 | 13 | 2 | gb105allp | f305; This 305 aa ORF is 33 pct identical (5 gaps) to 202 residues of an approx. 288 aa | |
| | | | | | protein BAN7_HUMAN SW: P27105 | |
| 700344001H1 | g22324 | 54 | 6 | gb105pln | Z. mays mRNA for H2B histone (clone cH2B221). | |
| 700342746H1 | g968901 | 56 | −46 | gb105pln | Rice mRNA for ribosomal protein S8, complete cds. | |
| 700347319H1 | g22651 | 47 | −39 | gb105pln | H. vulgare mRNA for GRP94 homologue. | |
| 700345706H1 | g167284 | 15 | 7 | gb105eukp | glyoxysomal malate dehydrogenase precursor (EC 1.1.1.37) | |
| 700342459H1 | g2282583 | 74 | −66 | gb105pln | Zea mays elongation factor 1-alpha (EF1-A) mRNA, complete cds. | |
| 700343406H1 | g1905943 | 29 | −38 | gb105pln | Sorghum bicolor MADS box transcription factor SbMADS1 mRNA, complete cds. | |
| 700343183H1 | g19257 | 41 | −37 | gb105pln | Lycopersicon esculentum hsc-2 mRNA for heat shock protein cognate 70. | |
| 700345465H1 | g758354 | 49 | −53 | gb105pln | Z. mays mRNA for plasma membrane H+ ATPase. | |
| 700343070H1 | g2306980 | 39 | −41 | gb105pln | Oryza sativa photosystem I antenna protein (Lhca) mRNA, complete cds. | |
| 700345278H1 | g2258073 | 34 | −21 | gb105pln | Hordeum vulgare var. distichum soluble inorganic pyrophosphatase (Ipp) mRNA, | |
| | | | | | complete cds. | |
| 700347103H1 | g968901 | 35 | −43 | gb105pln | Rice mRNA for ribosomal protein S8, complete cds. | |
| 700380047H1 | g1743007 | 33 | −3 | gb105eukp | ribosomal protein L13a. | |
| 700346445H1 | g2687432 | 43 | −53 | gb105pln | Plumbago auriculata large subunit 26S ribosomal RNA gene, partial sequence. | |
| 700343906H1 | g927427 | 12 | 15 | gb105pln | L. usitatissiumum mRNA for fis1 protein. | |
| 700342866H1 | g1125808 | 60 | −5 | gb105eukp | F07D10.1 | |
| 700345122H1 | g2351069 | 12 | 11 | gb105pln | Arabidopsis thaliana genomic DNA, chromosome 5, P1 clone: MSH12. | |
| 700342655H1 | g2243116 | 29 | −5 | gb105eukp | ak-lys1; aspartate kinase; Ec 2.7.2.4 | |
| 700343339H1 | g1255116 | 17 | 5 | gb105allp | heat-responsive protein | |
| 700344882H1 | g248336 | 77 | −74 | gb105pln | polyubiquitin [maize, Genomic, 3841 nt]. | |
| 700342949H1 | g1177368 | 98 | −78 | gb105pln | Z. mays mRNA for ribosomal protein L39. | |
| 700345191H1 | g1655678 | 19 | −9 | gb105pln | P. sylvestris mRNA for 3-hydroxy-3-methylglutaryl-CoA synthase. | |
| 700379842H1 | g2465428 | 20 | −22 | gb105eukp | JRG1.2; 32 kDa protein | |
| 700346220H1 | g1184775 | 64 | −85 | gb105pln | Zea mays glyceraldehyde-3-phosphate dehydrogenase GAPC4 (gpc4) mRNA, | |
| | | | | | complete cds. | |
| 700344977H1 | g2651316 | 17 | −2 | gb105eukp | T2P4.5 | |
| 700343681H1 | g21800 | 31 | −37 | gb105pln | T. aestivum L mRNA for histone H2B. | |
| 700345652H1 | g204482 | 59 | 2 | gb105allp | glutamine/glutamic acid-rich protein | |
| 700342996H1 | g1741870 | 20 | −5 | gb105allp | SDF2 | |
| 700379995H1 | g1931628 | 55 | −31 | gb105pln | Zea mays glutamate dehydrogenase mutant (GDH1) mRNA, complete cds. | |
| 700342211H1 | g1052973 | 19 | −12 | gb105eukp | fructokinae; EC 2.7.1.4 | |
| 700343419H1 | g22322 | 70 | −54 | gb105pln | Z. mays mRNA for H2B histone (clone cH2B214). | |
| 700343101H1 | g2264367 | 24 | −7 | gb105pln | Arabidopsis thaliana BAC F6P23 from chromosome IV, top arm, complete sequence. | |
| 700344703H1 | g971713 | 52 | 6 | gb105allp | breast basic conserved protein 1 | |
| 700346249H1 | g1931637 | 12 | −2 | gb105eukp | T19D16.1; receptor-associated kinase isolog | |
| 700343183H1 | g1181672 | 59 | −61 | gb105pln | Sorghum bicolor heat shock protein 70 cognate (hsc70) mRNA, partial cds. | |
| 700343233H1 | g1628443 | 18 | −4 | gb105eukp | ORF | |
| 700380608H1 | g1658321 | 33 | −18 | gb105pln | S. tuberosum mRNA for transketolase. | |
| 700380216H1 | g416251 | 49 | −49 | gb105pln | Rice mRNA for acetohydroxy acid reductoisomerase, partial sequence. | |
| 700342828H1 | g2565339 | 39 | −26 | gb105pln | Lupinus luteus ribosomal protein S14 (rps14) mRNA, complete cds. | |
| 700347170H1 | g170164 | 24 | −36 | gb105pln | S. guttatum aox1 mRNA encoding an alternative oxidase protein. | |
| 700344836H1 | g166923 | 28 | −6 | gb105pln | Arabidopsis thaliana ubiquitin carrier protein (UBC1) mRNA, complete cds. | |
| 700344613H1 | g453281 | 44 | −2 | gb105allp | ribosomal protein S23 | |
| 700347127H1 | g1183936 | 18 | 15 | gb105pln | P. sativum 5S rRNA gene. | |
| 700346231H1 | g461232 | 12 | 7 | gb105allp | ribosomal protein L37 | |
| 700342537H1 | g949877 | 77 | −65 | gb105pln | H. vulgare mRNA for elongation factor 1-alpha. | |
| 700379982H1 | g1262435 | 19 | 6 | gb105allp | put. 26S protease subunit | |
| 700342493H1 | g38223 | 89 | −41 | gb105allp | alpha1-globin | |
| 700380791H1 | g13844 | 20 | 4 | gb105allp | ATPase 6 | |
| 700344042H1 | g515376 | 66 | −59 | gb105pln | L. temulentum mRNA for histone H4. | |
| 700342829H1 | g633686 | 20 | −1 | gb105pln | S. tuberosum (Desiree) 8.2 kD subunit of cytochrome C reductase mRNA. | |
| 700342519H1 | g167107 | 70 | −62 | gb105pln | Hordeum vulgare vacuolar ATPase B subunit isoform mRNA, complete cds. | |
| 700347319H1 | g623612 | 11 | 14 | gb105pln | Yeast (Schizosaccharomyces pombe) heat shock protein 90 (Hsp90) gene, complete cds. | |
| 700346164H1 | g415315 | 15 | −2 | gb105eukp | ME6; NADP-dependent malic enzyme | |
| 700345305H1 | g1086831 | 15 | −4 | gb105eukp | F10E7.7 | |
| 700345064H1 | g22469 | 30 | −1 | gb105pln | Maize mRNA for cytoplasmic ribosomal protein S11. | |
| 700344056H1 | g476095 | 59 | −17 | gb105allp | B4-2 protein | |
| 700344217H1 | g387908 | 21 | 8 | gb105pln | Brassica rapa S-phase-specific (BIS289) mRNA, complete cds. | |
| 700380163H1 | g57710 | 18 | 6 | gb105allp | ribosomal phosphoprotein P1 (AA 1-114) | |
| 700343126H1 | g468055 | 24 | −28 | gb105pln | Zea mays B73 QM protein mRNA, complete cds. | |
| 700347002H1 | g829147 | 90 | −76 | gb105pln | Z. mays gene for cyclophilin. | |
| 700346726H1 | g557871 | 27 | −5 | gb105eukp | cytochrome oxidase I | |
| 700344952H1 | g21832 | 37 | −23 | gb105pln | Wheat mRNA for chloroplast phosphoglycerate kinase (EC 2.7.2.3). | |
| 700346540H1 | g404864 | 11 | 6 | gb105eukp | E(z) | |
| 700346221H1 | g2160155 | 33 | −17 | gb105pln | Sequence of BAC F21M12 from Arabidospis thaliana chromosome 1, complete | |
| | | | | | sequence. | |
| 700345973H1 | g2245082 | 26 | −14 | gb105eukp | SCARECROW homolog | |
| 700345275H1 | g1136119 | 46 | −38 | gb105pln | O. sativa mRNA for alpha-tubulin (clone OSTA-111). | |
| 700345389H1 | g16086 | 18 | −21 | gb105pln | A. porrum dnaJ mRNA for DNA J protein (partial). | |
| 700344294H1 | g2494110 | 25 | −10 | gb105pln | Sequence of BAC T1G11 from Arabidopsis thaliana chromosome 1, complete | |
| | | | | | sequence. | |
| 700346201H1 | g968995 | 48 | −57 | gb105pln | Oryza sativa clone glyceraldehyde-3-phosphate dehydrogenase (Gpc) mRNA, | |
| | | | | | complete cds. | |
| 700343937H1 | g20267 | 14 | −2 | gb105eukp | lipoxygenase L-2; EC 1.13.11.12 | |
| 700343356H1 | g1184775 | 89 | −81 | gb105pln | Zea mays glyceraldehyde-3-phosphate dehydrogenase GAPC4 (gpc4) mRNA, | |
| | | | | | complete cds. | |
| 700345752H1 | g415316 | 21 | −7 | gb105pln | Rice mRNA for acidic ribosomal protein P0, complete cds. | |
| 700345254H1 | g1800220 | 27 | −14 | gb105pln | Daucus carota topoisomerase I (Top1) mRNA, complete cds. | |
| 700345690H1 | g455419 | 13 | 3 | gb105allp | PR264/SC35 | |
| 700342566H1 | g170781 | 30 | −11 | gb105pln | Wheat ubiquitin carrier protein (E2) mRNA, complete cds. | |
| 700345973H1 | g2339980 | 14 | 6 | gb105eukp | RGA2; RGA2 protein | |
| 700380596H1 | g2583081 | 7 | 4 | gb105allp | microsomal glutathione S-transferase 3 | |
| 700342434H1 | g2130984 | 38 | −21 | gb105pln | B. napus mRNA for ribosomal protein S15a (pA813). | |
| 700379634H1 | g2511540 | 54 | −47 | gb105pln | Oryza sativa DNA-binding protein GBP16 (Rgbp16) mRNA, complete cds. | |
| 700344746H1 | g514305 | 30 | −32 | gb105pln | Triticum aestivum Tam 107 Hard Red Winter acetyl-CoA carboxylase mRNA, | |
| | | | | | complete cds. | |
| 700344108H1 | g20163 | 59 | −51 | gb105pln | O. sativa Rr15 mRNA for 5S ribosomal RNA. | |
| 700343154H1 | g475212 | 12 | 15 | gb105pln | N. tabacum eIF-4A10 mRNA. | |
| 700380255H1 | g170775 | 53 | −47 | gb105pln | Wheat translation elongation factor 1 alpha-subunit (TEF1) mRNA, complete cds. | |
| 700344040H1 | g2632156 | 30 | −21 | gb105pln | Aspergillus niger mRNA for ribosomal protein L15. | |
| 700345687H1 | g529705 | 15 | 3 | gb105eukp | cct-6; C. elegans cct-6 (similar to T complex proteins, Tcp-1-related, Cctz) | |
| 700347384H1 | g950052 | 23 | −17 | gb105pln | H. vulgare mRNA for HMG1/2-like protein. | |
| 700343238H1 | g1498052 | 67 | −21 | gb105pln | Zea mays ribosomal protein S8 mRNA, complete cds. | |
| 700345396H1 | g2760165 | 15 | 13 | gb105pln | Arabidopsis thaliana genomic DNA, chromosome 5, P1 clone: MAC9, complete | |
| | | | | | sequence. | |
| 700342657H1 | g1754489 | 32 | 3 | gb105allp | prolyl aminopeptidase | |
| 700343439H1 | g21794 | 69 | −55 | gb105pln | Wheat histone H4 gene. | |
| 700347191H1 | g285951 | 16 | 3 | gb105allp | KIAA0107 | |
| 700342329H1 | g515357 | 17 | 3 | gb105pln | S. tuberosum pPOM36I mRNA for 36kDA porinI. | |
| 700346909H1 | g1107484 | 27 | −12 | gb105pln | A. thaliana mRNA for 40S ribosomal protein S15. | |
| 700346185H1 | g1638842 | 42 | −1 | gb105eukp | cysteine proteinase inhibitor | |
| 700345133H1 | g218160 | 42 | −31 | gb105pln | Oryza sativa mRNA for elongation factor 1 beta′. | |
| 700379634H1 | g1657616 | 32 | −18 | gb105pln | Arabidopsis thaliana putative nuclear DNA-binding protein G2p (AtG2) mRNA, | |
| | | | | | complete cds. | |
| 700342460H1 | g2827513 | 15 | 10 | gb105pln | Arabidopsis thaliana DNA chromosome 4, BAC clone F8F16 (ESSAII project). | |
| 700344253H1 | g2827138 | 25 | −16 | gb105pln | Arabidopsis thaliana cellulose synthase catalytic subunit (RSW1) gene, complete cds. | |
| 700380093H1 | g1335965 | 27 | −34 | gb105pln | Zea mays acetyl CoA carboxylase mRNA, partial cds. | |
| 700343926H1 | g972781 | 16 | 5 | gb105eukp | cyclophilin | |
| 700342993H1 | g396230 | 32 | −17 | gb105eukp | putative ATP synthase subunit | |
| 700346965H1 | g2160173 | 7 | 4 | gb105eukp | F21M12.21 | |
| 700345709H1 | g15988 | 57 | −63 | gb105pln | A. fatua mRNA for tetraubiquitin. | |
| 700345629H1 | g167967 | 22 | −0 | gb105pln | Dianthus caryophyllus glutathione s-transferase mRNA, complete cds. | |
| 700343810H1 | g2827001 | 65 | −58 | gb105pln | Triticum aestivum 70 kDa heat shock protein (TaHSP70d) mRNA, complete cds. | |
| 700343424H1 | g2565339 | 51 | −42 | gb105pln | Lupinus luteus ribosomal protein S14 (rps14) mRNA, complete cds. | |
| 700345831H1 | g184858 | 54 | −29 | gb105allp | immunoglobulin heavy chain V-region | |
| 700346991H1 | g1685645 | 46 | −2 | gb105pln | Zea mays putative ribosomal protein L19 homolog mRNA, partial cds. | |
| 700345584H1 | g2773188 | 40 | −21 | gb105eukp | F49D11.1 | |
| 700344633H1 | g2724049 | 35 | −21 | gb105pln | Fritillaria agrestis clone CA1 glutaredoxin type I (glr1) mRNA, complete cds. | |
| 700346337H1 | g473604 | 78 | −62 | gb105pln | Zea mays W-22 histone H2B mRNA, complete cds. | |
| 700344944H1 | g555616 | 35 | −12 | gb105eukp | cim1; cytokinin induced message | |
| 700281955H2 | g433043 | 35 | −96 | gb105pln | Zea mays W-22 clone PREM-1E retroelement PREM-1, partial sequence. | |
| 700379974H1 | g577611 | 92 | −77 | gb105pln | Zea mays CRT1 gene for calcium-binding protein. | |
| 700346263H1 | g1931647 | 18 | 3 | gb105eukp | T19D16.13; endomembrane protein EMP70 precursor isolog | |
| 700345596H1 | g1438843 | 27 | 7 | gb105pln | Arabidopsis thaliana katC mRNA for heavy chain of kinesin-like protein, complete cds. | |
| 700345133H1 | g218340 | 37 | −37 | gb105pln | Triticum aestivum mRNA for elongation factor 1 beta′. | |
| 700344193H1 | g182251 | 15 | 5 | gb105allp | electron transport flavoprotein | |
| 700343952H1 | g22302 | 40 | −79 | gb105pln | Maize Gpc1 gene for glyceraldehyde-3-phosphate dehydrogenase (GADPH) subunit C. | |
| 700346251H1 | g173065 | 20 | 2 | gb105pln | Yeast (Saccharomyces cerevisiae) mitochondrial ef-tu (tufm) gene. | |
| 700345661H1 | g63752 | 17 | 1 | gb105allp | PR 264 | |
| 700344053H1 | g1370167 | 56 | −37 | gb105pln | L. japonicus mRNA for small GTP-binding protein, RAB1D. | |
| 700342287H1 | g578440 | 7 | −4 | gb105eukp | ATP6; H(+)-transporting ATP synthase; EC 3.6.1.34 | |
| 700345677H1 | g2624199 | 58 | −43 | gb105pln | M. acuminata mRNA; clone pBAN UU93. | |
| 700343937H1 | g2182267 | 18 | −1 | gb105eukp | LoxB; lipoxygense; EC 1.13.11.12 | |
| 700343244H1 | g1917018 | 100 | −76 | gb105pln | Zea mays ribosomal protein S6 RPS6-1 (rps6-1) mRNA, complete cds. | |
| 700380162H1 | g949877 | 44 | −34 | gb105pln | H. vulgare mRNA for elongation factor 1-alpha. | |
| 700342366H1 | g22747 | 20 | −0 | gb105pln | L. longiflorum mRNA for actin depolymerizing factor. | |
| 700281918H2 | g510190 | 16 | 3 | gb105eukp | unknown; chloroplast outer envelope protein 34 | |
| 700343566H1 | g1419369 | 30 | −27 | gb105pln | Z. mays ZmABP3 mRNA for actin depolymerizing factor. | |
| 700346096H1 | g170746 | 46 | 6 | gb105pln | Wheat histone H4 TH091 gene, complete cds. | |
| 700342732H1 | g2293565 | 80 | −77 | gb105pln | Oryza sativa ADP-ribosylation factor 1 (Os-ARF1) mRNA, complete cds. | |
| 700342447H1 | g2677829 | 38 | −18 | gb105pln | Prunus armeniaca ribosomal protein L12 mRNA, complete cds. | |
| 700380443H1 | g1200160 | 16 | −10 | gb105pln | T. gesneriana mRNA for tonoplast intrinsic protein. | |
| 700346459H1 | g170746 | 54 | −53 | gb105pln | Wheat histone H4 TH091 gene, complete cds. | |
| 700344524H1 | g168472 | 42 | −15 | gb105pln | Maize ferredoxin III (Fd) isoprotein mRNA, pFD3. | |
| 700346122H1 | g1777929 | 24 | −25 | gb105pln | Saccharum officinarum nucleoside diphosphate kinase (SoNDPK1) mRNA, | |
| | | | | | complete cds. | |
| 700342493H1 | g386765 | 89 | −41 | gb105allp | hba1 alpha globin | |
| 700344101H1 | g189422 | 9 | 7 | gb105allp | proliferating cell nuclear protein P120 | |
| 700347353H1 | g393400 | 82 | −78 | gb105pln | Z. mays mRNA for alpha-tubulin. | |
| 700344029H1 | g2522364 | 30 | 1 | gb105eukp | atMSH2; MutS homolog 2 | |
| 700343282H1 | g2244788 | 17 | −20 | gb105pln | Arabidopsis thaliana DNA chromosome 4, ESSA I contig fragment No. 1. | |
| 700343303H1 | g22322 | 27 | −45 | gb105pln | Z. mays mRNA for H2B histone (clone cH2B214). | |
| 700347255H1 | g21438 | 40 | −38 | gb105pln | S. tuberosum cycl gene encoding cytochrome c1. | |
| 700345418H1 | g1325967 | 28 | −11 | gb105pln | T. aestivum histone H2A gene (clone TH274). | |
| 700379678H1 | g1129084 | 33 | −27 | gb105pln | Wheat mRNA for protein H2A, complete cds, clone wcH2A-3. | |
| 700346867H1 | g168608 | 95 | −74 | gb105pln | Maize 17S ribosomal RNA gene and flanks. | |
| 700344149H1 | g2435604 | 20 | −1 | gb105eukp | F08F1.7 | |
| 700344073H1 | g2088662 | 12 | 2 | gb105eukp | T28M21.22 | |
| 700346985H1 | g168500 | 51 | −50 | gb105pln | Maize (Zea mays) histone H4 gene (H4C14), complete cds. | |
| 700346803H1 | g1458245 | 10 | −0 | gb105eukp | F54D11.1 | |
| 700380511H1 | g533689 | 30 | −21 | gb105pln | Brassica napus Naehan RNA polymerase II subunit RPB10 homolog (BRP10) mRNA, | |
| | | | | | complete cds. | |
| 700345690H1 | g63752 | 13 | 3 | gb105allp | PR 264 | |
| 700345632H1 | g2570506 | 45 | −31 | gb105pln | Oryza sativa ribosomal protein mRNA, complete cds. | |
| 700342267H1 | g293886 | 96 | −84 | gb105pln | Zea mays glyceraldehyde-3-phosphate dehydrogenase mRNA, 3′ end, (clone GAPC3). | |
| 700346347H1 | g1255410 | 19 | −15 | gb105eukp | T19A5.2 | |
| 700344757H1 | g306812 | 34 | −17 | gb105allp | glutathione transferase M1 | |
| 700342528H1 | g218182 | 41 | −24 | gb105pln | Rice mRNA for oryzain beta (EC 3.4.22). | |
| 700379970H1 | g168500 | 63 | −32 | gb105pln | Maize (Zea mays) histone H4 gene (H4C14), complete cds. | |
| 700379813H1 | g2244991 | 20 | −19 | gb105pln | Arabidopsis thaliana DNA chromosome 4, ESSA I contig fragment No. 6. | |
| 700344966H1 | g391878 | 35 | −41 | gb105pln | Rice mRNA for adenylate kinase. | |
| 700344790H1 | g1458245 | 17 | −2 | gb105eukp | F54D11.1 | |
| 700343229H1 | g2274990 | 54 | −33 | gb105pln | Hordeum vulgare mRNA for expressed sequence tag. | |
| 700343305H1 | g288058 | 75 | −64 | gb105pln | Z. mays S13 mRNA for cytoplasmic ribosomal protein S13. | |
| 700344865H1 | g602605 | 27 | −29 | gb105pln | Zea mays tandem genes for alpha1-tubulin and alpha2-tubulin. | |
| 700346914H1 | g433608 | 12 | 1 | gb105pln | R. communis mRNA for enolase. | |
| 700344612H1 | g2511530 | 80 | −70 | gb105pln | Eleusine indica alpha tubulin 1 (TUA1) mRNA, complete cds. | |
| 700344330H1 | g4554 | 15 | −1 | gb105eukp | STE11 (AA 1-717) | |
| 700343205H1 | g2062696 | 28 | −18 | gb105allp | Ro/SSA ribonucleoprotein homolog | |
| 700345227H1 | g887571 | 13 | 1 | gb105allp | glycogen (starch) synthase | |
| 700345357H1 | g303856 | 49 | −33 | gb105pln | Rice mRNA for ubiquitin protein fused to a ribosomal protein, complete cds. | |
| 700346740H1 | g386848 | 18 | 4 | gb105allp | keratin | |
| 700345757H1 | g1653931 | 18 | 7 | gb105allp | argininosuccinate synthetase | |
| 700344982H1 | g1302195 | 8 | 1 | gb105allp | ORF YNL197c | |
| 700343982H1 | g2570860 | 33 | 0 | gb105allp | calcium-activated potassium channel beta subunit | |
| 700344738H1 | g2213534 | 20 | −5 | gb105eukp | DNA-binding PD1-like protein | |
| 700346727H1 | g170746 | 74 | −67 | gb105pln | Wheat histone H4 TH091 gene, complete cds. | |
| 700344146H1 | g520494 | 6 | 4 | gb105eukp | cytoskeletal actin | |
| 700343414H1 | g456671 | 24 | −3 | gb105pln | T. aestivum VDAC 1 mRNA. | |
| 700342313H1 | g3075 | 20 | −0 | gb105pln | N. crassa mRNA for a ribosomal protein. | |
| 700344450H1 | g2668738 | 50 | 8 | gb105eukp | TIF5A; translation initiation factor 5A | |
| 700345531H1 | g1871360 | 10 | 2 | gb105eukp | glutamyl-prolyl-tRNA synthetase | |
| 700345452H1 | g633139 | 36 | −22 | gb105pln | A. thaliana mRNA for phosphoribosyl diphosphate synthetase. | |
| 700344636H1 | g22237 | 96 | −4 | gb105pln | Maize mRNA for cytosolic GAPDH (GapC) glyceraldehyde-3-phosphate | |
| | | | | | dehydrogenase. | |
| 700345973H1 | g2569938 | 14 | 6 | gb105eukp | GAI | |
| 700345689H1 | g2702261 | 24 | −3 | gb105pln | Arabidopsis thaliana chromosome II BAC T21L14 genomic sequence, complete | |
| | | | | | sequence. | |
| 700380159H1 | g22484 | 45 | −45 | gb105pln | Z. mays RNA for superoxide dismutase Sod4A. | |
| 700347254H1 | g168500 | 50 | −51 | gb105pln | Maize (Zea mays) histone H4 gene (H4C14), complete cds. | |
| 700347169H1 | g17795 | 22 | −7 | gb105eukp | Bplo | |
| 700342944H1 | g1360175 | 15 | −2 | gb105eukp | ORF YLL010c | |
| 700342268H1 | g2656016 | 10 | 4 | gb105allp | cell-cycle regulatory protein | |
| 700346165H1 | g14199 | 62 | −2 | gb105pln | Petunia sp. mitochondrial rps19 gene for ribosomal protein S19. | |
| 700345355H1 | g1532045 | 19 | −12 | gb105pln | O. sativa mRNA for expansin. | |
| 700345002H1 | g557681 | 50 | −31 | gb105pln | Z. mays mRNA for ribosomal protein S28. | |
| 700343851H1 | g496267 | 22 | −5 | gb105pln | Nicotiana tabacum GTP-binding protein (Ran-A1) mRNA, complete cds. | |
| 700343453H1 | g510910 | 58 | −35 | gb105pln | L. temulentum mRNA for histone H3. | |
| 700343104H1 | g187608 | 20 | −7 | gb105allp | cell surface glycoprotein | |
| 700347390H1 | g1947005 | 19 | −8 | gb105eukp | T21G5.5 | |
| 700344393H1 | g21399 | 37 | −19 | gb105pln | Solanum tuberosum processed actin pseudogene. | |
| 700379968H1 | g1848280 | 44 | −70 | gb105pln | Sorghum bicolor membrane intrinsic protein (Mip1) mRNA, partial cds. | |
| 700342791H1 | g20283 | 39 | −6 | gb105pln | Rice (O. sativa) gene for proliferating cell nuclear antigen (PCNA). | |
| 700345227H1 | g21471 | 12 | 1 | gb105allp | glycogen (starch) synthase | |
| 700342714H1 | g2384759 | 47 | −42 | gb105pln | Oryza sativa GDP dissociation inhibitor protein OsGDI2 (OsGDI2) mRNA, | |
| | | | | | complete cds. | |
| 700343550H1 | g172424 | 13 | 5 | gb105eukp | 5S rRNA binding protein; ribosomal protein L1 | |
| 700345902H1 | g1136784 | 20 | −17 | gb105pln | Fission Yeast mRNA for elongation factor 1 alpha-B, complete cds. | |
| 700344831H1 | g1657425 | 31 | −3 | gb105eukp | tifA; tifA | |
| 700346649H1 | g2264309 | 19 | 6 | gb105pln | Arabidopsis thaliana genomic DNA, chromosome 5, P1 clone: MJJ3, complete sequence. | |
| 700344859H1 | g1575534 | 13 | 5 | gb105allp | Mad2 | |
| 700380508H1 | g1890351 | 18 | −7 | gb105pln | A. thaliana mRNA for transcription factor L2. | |
| 700346231H1 | g1215986 | 19 | 1 | gb105allp | ribosomal protein L37 | |
| 700346064H1 | g2695701 | 10 | 5 | gb105allp | mammary tumor-associated protein INT6 | |
| 700379944H1 | g218135 | 35 | −53 | gb105pln | Rice mRNA for heat shock protein 90 KD (AK108 gene), partial sequence. | |
| 700379791H1 | g168650 | 42 | −34 | gb105pln | Zea mays ubiquitin fusion protein (UBF9) gene, complete cds. | |
| 700379705H1 | g2626751 | 16 | −19 | gb105pln | Triticum aestivum retrotransposon Tar1, partial sequence. | |
| 700344234H1 | g606969 | 29 | −14 | gb105pln | Arabidopsis thaliana cytoplasmic ribosomal protein L18 mRNA, complete cds. | |
| 700281971H1 | g436032 | 44 | 3 | gb105eukp | 60S ribosomal protein L34 | |
| 700344139H1 | g22144 | 74 | −78 | gb105pln | Maize anaerobically regulated gene for fructose bisphosphate aldolase (EC 4.1.2.13). | |
| 700342458H1 | g1142621 | 13 | 7 | gb105allp | phaeolin G-box binding protein PG2 | |
| 700345257H1 | g2737908 | 13 | 6 | gb105eukp | crps-7; ribosomal protein | |
| 700380047H1 | g557790 | 35 | −5 | gb105eukp | orf, len: 199, CAI: 0.62, predicted to be spliced, similar to A44367 A44367 P23 = | |
| | | | | | TUMOR-SPECIFIC TRANSPLANTATION ANTIGEN and ribosomal proteins | |
| 700281828H2 | g899607 | 59 | −45 | gb105pln | Zea mays polyubiquitin (MubC5) mRNA, complete cds. | |
| 700344907H1 | g22324 | 14 | −16 | gb105pln | Z. mays mRNA for H2B histone (clone cH2B221). | |
| 700379926H1 | g21598 | 33 | −35 | gb105pln | S. tuberosum mRNA for UDP-glucose pyrophosphorylase. | |
| 700347372H1 | g2827699 | 13 | 1 | gb105eukp | F6H11.10; predicted protein | |
| 700347368H1 | g1418578 | 7 | 6 | gb105allp | R11D1.8 | |
| 700345467H1 | g2264306 | 19 | −1 | gb105pln | Arabidopsis thaliana genomic DNA, chromosome 5, P1 clone: MBK5, complete | |
| | | | | | sequence. | |
| 700343131H1 | g2660676 | 24 | −21 | gb105eukp | T19K24.16; Dreg-2 like protein | |
| 700380256H1 | g65317 | 16 | 2 | gb105allp | snRNP C | |
| 700346904H1 | g433608 | 56 | −47 | gb105pln | R. communis mRNA for enolase. | |
| 700342280H1 | g2852444 | 21 | −19 | gb105pln | Salix bakko mRNA for SUI1 homolog, complete cds. | |
| 700379889H1 | g886470 | 62 | −22 | gb105pln | C. roseus MetE mRNA for methionine synthase. | |
| 700342846H1 | g2072023 | 19 | 4 | gb105eukp | symbiosis-related protein | |
| 700344696H1 | g2522261 | 28 | 2 | gb105allp | CPE-receptor | |
| 700342526H1 | g2773225 | 9 | 3 | gb105eukp | W03G9.4 | |
| 700343489H1 | g2266661 | 66 | −39 | gb105pln | Hordeum vulgare mRNA for 14-3-3 protein (Hv1433c). | |
| 700380110H1 | g8040 | 22 | −8 | gb105eukp | histone H2A variant (AA 1-141) | |
| 700344147H1 | g1304268 | 21 | −7 | gb105pln | Yeast cps8 gene for actin, complete cds. | |
| 700343796H1 | g2315645 | 16 | 2 | gb105allp | strong similarity to the insect-type alcohol dehydrogenase family | |
| 700379665H1 | g1890353 | 29 | −13 | gb105pln | B. napus mRNA for ascorbate peroxidase. | |
| 700281910H1 | g313148 | 11 | 7 | gb105eukp | MSK-3; protein kinase | |
| 700380658H1 | g1854445 | 32 | 7 | gb105eukp | CPRD14 protein | |
| 700346887H1 | g1143863 | 22 | 13 | gb105pln | Oryza sativa beta-glucosidase mRNA, nuclear gene encoding chloroplast protein, | |
| | | | | | complete cds. | |
| 700345758H1 | g487317 | 42 | 11 | gb105pln | Rice mRNA EN56, partial sequence. | |
| 700344914H1 | g166859 | 41 | −33 | gb105pln | Arabidopsis thaliana ribosomal protein gene, complete cds. | |
| 700344350H1 | g507770 | 46 | −6 | gb105pln | Zea mays D3L H(+)-transporting ATPase (Mha1) gene, complete cds. | |
| 700343864H1 | g927571 | 97 | −57 | gb105pln | Z. mays mRNA for calreticulin precursor. | |
| 700343248H1 | g2623247 | 35 | −10 | gb105pln | Zea mays SU1 isoamylase (sugaryl) gene, complete cds. | |
| 700346731H1 | g556685 | 70 | −69 | gb105pln | Z. mays mRNA for ADP-ribosylation factor. | |
| 700346421H1 | g21800 | 26 | −20 | gb105pln | T. aestivum L mRNA for histone H2B. | |
| 700343051H1 | g1323417 | 24 | −12 | gb105eukp | ORF YGR231c | |
| 700344619H1 | g166604 | 13 | 7 | gb105eukp | anthranilate synthase alpha subunit | |
| 700343821H1 | g18903 | 33 | −17 | gb105pln | Barley mRNA for aspartic proteinase. | |
| 700345594H1 | g1184773 | 61 | −72 | gb105pln | Zea mays glyceraldehyde-3-phosphate dehydrogenase GAPC3 (gpc3) mRNA, | |
| | | | | | complete cds. | |
| 700344372H1 | g2804455 | 12 | 7 | gb105allp | similar to a human orf (GB:D13642) and human UV-damaged DNA binding factor | |
| | | | | | (GB:U32986) in separate non-overlapping regions | |
| 700342330H1 | g218155 | 13 | 2 | gb105allp | chloroplastic aldolase | |
| 700343221H1 | g1132506 | 30 | −17 | gb105eukp | F28C6.7 | |
| 700380795H1 | g4433 | 21 | −12 | gb105eukp | SEC11 | |
| 700345490H1 | g1054845 | 17 | −11 | gb105eukp | END13 | |
| 700345737H1 | g1001957 | 6 | 8 | gb105allp | ZNF127 | |
| 700342791H1 | g408231 | 29 | 2 | gb105pln | PCNA = proliferating cell nuclear antigen [Brassica napus = oilseed rape, cv. Westar, | |
| | | | | | apical meristem, mRNA, 1004 nt]. | |
| 700344804H1 | g550543 | 40 | −27 | gb105pln | A. thaliana mRNA for ribosomal protein L16. | |
| 700344711H1 | g602605 | 33 | −64 | gb105pln | Zea mays tandem genes for alpha1-tubulin and alpha2-tubulin. | |
| 700281891H2 | g1065890 | 9 | −0 | gb105eukp | SPAC30D11.03; unknown | |
| 700346437H1 | g2668739 | 35 | −19 | gb105pln | Zea mays translation initiation factor GOS2 (TIF) mRNA, complete cds. | |
| 700345941H1 | g473602 | 48 | −17 | gb105pln | Zea mays W-22 histone H2A mRNA, complete cds. | |
| 700346108H1 | g1841398 | 27 | −8 | gb105pln | A. thaliana mRNA for AtTFIIB2 protein. | |
| 700342760H1 | g1053066 | 35 | −17 | gb105pln | Solanum lycopersicum small GTP-binding protein (LeRab1C) mRNA, complete cds. | |
| 700343923H1 | g1139585 | 18 | −6 | gb105eukp | CCA1; addition of 3′ CMP and AMP to transfer RNAs; tRNA nucleotidyltransferase; | |
| | | | | | EC 2.7.7.25 | |
| 700343457H1 | g434902 | 30 | −13 | gb105eukp | Bap; beta-adaptin Drosophila 1 | |
| 700346780H1 | g450879 | 44 | −50 | gb105pln | A. thaliana hsc70-1 gene. | |
| 700281955H2 | g433039 | 27 | −84 | gb105pln | Zea mays W-22 clone PREM-1 retroelement PREM-1, partial sequence. | |
| 700346002H1 | g498738 | 50 | −52 | gb105pln | H. vulgare (pMaW20) pseudo mRNA for beta-ketoacyl-ACP synthase (partial). | |
| 700345552H1 | g1439533 | 20 | −22 | gb105pln | Ipomoea batatas starch phosphorylase gene, complete cds. | |
| 700344238H1 | g22204 | 40 | −18 | gb105pln | Maize Bz-McC gene for UDP glucose flavonoid glycosyl-transferase. | |
| 700343792H1 | g2827618 | 24 | −1 | gb105pln | Arabidopsis thaliana DNA chromosome 4, BAC clone F10N7 (ESSAII project). | |
| 700379938H1 | g1835728 | 36 | −25 | gb105pln | Oryza sativa ribosomal protein mRNA, complete cds. | |
| 700380290H1 | g2282583 | 59 | −48 | gb105pln | Zea mays elongation factor 1-alpha (EF1-A) mRNA, complete cds. | |
| 700380074H1 | g2827001 | 38 | −34 | gb105pln | Triticum aestivum 70 kDa heat shock protein (TaHSP70d) mRNA, complete cds. | |
| 700344894H1 | g1183998 | 18 | −0 | gb105eukp | SPAC13F4.02c; unknown | |
| 700342663H1 | g2384956 | 13 | −2 | gb105eukp | T15B7.2 | |
| 700342465H1 | g1149509 | 26 | −4 | gb105allp | 37 kD Laminin receptor precursor/p40 ribosomal associated protein | |
| 700346731H1 | g1132482 | 71 | −69 | gb105pln | Rice mRNA for ADP-ribosylation factor, complete cds. | |
| 700346294H1 | g561663 | 23 | −47 | gb105pln | Rice mRNA, partial homologous to ribosomal protein coding sequence. | |
| 700342464H1 | g2191175 | 28 | −5 | gb105eukp | A_IG002P16.24 | |
| 700344445H1 | g1545982 | 15 | −5 | gb105allp | PWP2H protein | |
| 700343506H1 | g1498052 | 29 | −60 | gb105pln | Zea mays ribosomal protein S8 mRNA, complete cds. | |
| 700345692H1 | g2827001 | 31 | −41 | gb105pln | Triticum aestivum 70 kDa heat shock protein (TaHSP70d) mRNA, complete cds. | |
| 700343864H1 | g1181332 | 97 | −57 | gb05pln | Z mays CRH mRNA. | |
| 700345441h1 | g506533 | 43 | −31 | gb105pln | N. tabacum PKTL7 mRNA for protein kinase. | |
| 700379902H1 | g2651307 | 24 | 2 | gb105eukp | T2P4.16; putative uroporphyinogen decarboxylase | |
| 700345992H1 | g2414643 | 25 | −5 | gb105pln | Yeast (Saccaromyces pombe) chromosome I cosmid c3H5. | |
| 700344792H1 | g1486425 | 13 | −1 | gb105allp | BioA homologue | |
| 700342479H1 | g1339835 | 17 | −4 | gb105allp | kidney androgen-related protein | |
| 700343945H1 | g1519248 | 42 | −25 | gb105pln | Oryza sativa GF14-b protein mRNA, complete cds. | |
| 700344931H1 | g1667591 | 55 | −43 | gb105pln | Oryza sativa histone 3 mRNA, complete cds. | |
| 700343277H1 | g643596 | 86 | −82 | gb105pln | Corn mRNA for cysteine proteinase, clone CCP, complete cds. | |
| 700346868H1 | g1495767 | 21 | −1 | gb105pln | P. sativum mRNA for 110 kD chloroplast inner envelope protein IEP110. | |
| 700344390H1 | g2695860 | 23 | −1 | gb105pln | Pisum sativum mRNA for 3-deoxy-D-manno-2-octulosonate-8-phosphate synthase, | |
| | | | | | clone pPS40. | |
| 700342772H1 | g20163 | 52 | −44 | gb105pln | O. sativa Rr15 mRNA for 5S ribosomal RNA. | |
| 700342648H1 | g170046 | 7 | 17 | gb105pln | Glycine max protein kinase (PK6) mRNA, complete cds. | |
| 700281977H2 | g167109 | 42 | −36 | gb105pln | Hordeum vulgare vacuolar ATPase B subunit mRNA, complete cds. | |
| 700344851H1 | g531057 | 14 | 3 | gb105pln | Wheat mRNA for protein H2B-8, complete cds. | |
| 700379649H1 | g899609 | 65 | −54 | gb105pln | Zea mays acidic ribosomal protein P2 (RPA-2A1) mRNA, complete cds. | |
| 700345009H1 | g1905933 | 41 | −24 | gb105pln | Sorghum bicolor putative MADS box protein (SbMADS2) mRNA, partial cds. | |
| 700344064H1 | g556685 | 62 | −62 | gb105pln | Z. mays mRNA for ADP-ribosylation factor. | |
| 700343054H1 | g1276967 | 15 | −2 | gb105eukp | putative ribosomal protein | |
| 700345183H1 | g487304 | 16 | −10 | gb105pln | Rice mRNA EN320, partial sequence. | |
| 700344369H1 | g551251 | 9 | 1 | gb105allp | ribosomal protein S7 | |
| 700379675H1 | g1419464 | 12 | −6 | gb105eukp | ZC434.2 | |
| 700343502H1 | g623577 | 20 | −17 | gb105pln | Nicotiana tabacum SR1 Nt-rab11b mRNA, complete cds. | |
| 700342295H1 | g1160445 | 5 | 8 | gb105allp | ribosomal protein S7 | |
| 700343391H1 | g22312 | 54 | −63 | gb105pln | Maize ABA-inducible gene for glycine-rich protein (ABA = abscisic acid). | |
| 700343840H1 | g393400 | 83 | −71 | gb105pln | Z. mays mRNA for alpha-tubulin. | |
| 700343925H1 | g1773257 | 18 | 4 | gb105allp | aspartyl-tRNA synthetase | |
| 700343809H1 | g1498387 | 41 | −52 | gb105pln | Zea mays actin (Maz83) gene, partial cds. | |
| 700345913H1 | g1086831 | 14 | −2 | gb105eukp | F10E7.7 | |
| 700345543H1 | g2832401 | 30 | −17 | gb105pln | Arabidopsis thaliana mRNA for dihydroxypolyprenylbenzoate methyltransferase. | |
| 700344254H1 | g467467 | 9 | −8 | gb105allp | unknown | |
| 700344085H1 | g2668749 | 64 | −65 | gb105pln | Zea mays ribosomal protein L30 (rp130) mRNA, complete cds. | |
| 700379858H1 | g881485 | 9 | 6 | gb105allp | extendin | |
| 700379614H1 | g602605 | 36 | −63 | gb105pln | Zea mays tandem genes for alpha1-tubulin and alpha2-tubulin. | |
| 700344527H1 | g829137 | 15 | 0 | gb105eukp | ORF OR26.17; STI1 heat shock protein; STI1 | |
| 700343526H1 | g2062169 | 16 | 1 | gb105eukp | T02O04.17; ABC transporter (PDR5-like) isolog | |
| 700342534H1 | g473602 | 91 | −71 | gb105pln | Zea mays W-22 histone H2A mRNA, complete cds. | |
| 700347376H1 | g817824 | 16 | 4 | gb105eukp | SEC26; Sec26p | |
| 700347290H1 | g1902902 | 65 | −54 | gb105pln | Oryza sativa DNA for phospholipase D, complete cds. | |
| 700342619H1 | g170746 | 32 | −42 | gb105pln | Wheat histone H4 Th091 gene, complete cds. | |
| 700380716H1 | g1817577 | 40 | −22 | gb105allp | alpha-globin 1 | |
| 700342245H1 | g471319 | 17 | 5 | gb105eukp | HvB12D | |
| 700347305H1 | g887588 | 7 | 6 | gb105eukp | unknown | |
| 700343691H1 | g2108346 | 25 | −7 | gb105pln | Brassica campestris small GTP-binding protein Bsar1b (bsar1b) mRNA, complete cds. | |
| 700342712H1 | g456355 | 42 | −53 | gb105pln | N. tabacum NtK-1 mRNA. | |
| 700343461H1 | g409072 | 16 | 6 | gb105allp | HBp15/L22 | |
| 700344420H1 | g960356 | 10 | 0 | gb105pln | Barley mRNA for S-adenosylmethionine synthetase, complete cds. | |
| 700346547H1 | g2351061 | 16 | −3 | gb105pln | Arabidopsis thaliana genomic DNA, chromosome 5, P1 clone: MAF19. | |
| 700343018H1 | g2814786 | 18 | −8 | gb105eukp | C13B4.2 | |
| 700346560H1 | g2832707 | 14 | −3 | gb105eukp | T9A21.180; translation initiation factor eIF-2 gamma chain-like protein | |
| 700346373H1 | g563926 | 19 | −18 | gb105pln | Zea mays xyloglucan endo-transglycosylase homolog mRNA, complete cds. | |
| 700345652H1 | g459931 | 59 | 2 | gb105allp | contiguous repeat polypeptide | |
| 700344093H1 | g217973 | 34 | −55 | gb105pln | Zea mays gene for triosephosphate isomerase, complete cds. | |
| 700347041H1 | g1945611 | 7 | 8 | gb105allp | 26S proteasome subunit p55 | |
| 700344856H1 | g2245038 | 16 | −6 | gb105eukp | hypothetical protein | |
| 700346225H1 | g1016205 | 28 | −16 | gb105eukp | clpP1; subunit of ClpP protease | |
| 700343947H1 | g1302630 | 9 | 3 | gb105allp | DUB-1 | |
| 700342557H1 | g303834 | 32 | −45 | gb105pln | Rice mRNA for 21 kd polypeptide, complete cds. | |
| 700346533H1 | g473976 | 28 | −29 | gb105pln | Rice mRNA, partial homologous to elongation factor 1-alpha gene. | |
| 700346391H1 | g1743276 | 38 | −15 | gb105pln | H. vulgare mRNA for beta tubulin. | |
| 700379653H1 | g19400 | 20 | 3 | gb105pln | Lemna gibba negatively light-regulated mRNA (Lg106). | |
| 700345109H1 | g1469041 | 5 | 7 | gb105eukp | F23B12.5 | |
| 700343846H1 | g1498052 | 77 | −66 | gb105pln | Zea mays ribosomal protein S8 mRNA, complete cds. | |
| 700281833H2 | g2440041 | 17 | −1 | gb105pln | Craterostigma plantagineum mRNA for major intrinsic protein PIPa2. | |
| 700342809H1 | g1654143 | 45 | −34 | gb105pln | Brassica campestris small GTP-binding protein rab (BRAB-1) mRNA, complete cds. | |
| 700342885H1 | g486279 | 12 | 4 | gb105allp | ORF YKL160w | |
| 700380108H1 | g2673867 | 23 | −4 | gb105pln | Antirrhinum majus mRNA for fimbriata-associated protein 1, partial. | |
| 700346284H1 | g218082 | 24 | −19 | gb105pln | Rice mRNA for initiation factor eIF-4D (225 gene), partial sequence. | |
| 700380133H1 | g531057 | 16 | −7 | gb105pln | Wheat mRNA for protein H2B-8, complete cds. | |
| 700346679H1 | g2653284 | 18 | 12 | gb105pln | Oryza sativa mRNA for enoyl-ACP reductase. | |
| 700344974H1 | g473604 | 39 | −22 | gb105pln | Zea mays W-22 histone H2B mRNA, complete cds. | |
| 700342751H1 | g559921 | 52 | 5 | gb105eukp | axi 1 | |
| 700346622H1 | g170775 | 61 | −48 | gb105pln | Wheat translation elongation factor 1 alpha-subunit (TEF1) mRNA, complete cds. | |
| 700347019H1 | g886470 | 52 | −44 | gb105pln | C. roseus MetE mRNA for methionine synthase. | |
| 700342262H1 | g1065942 | 12 | 2 | gb105eukp | F42C5.8 | |
| 700343126H1 | g575354 | 10 | 15 | gb105pln | O. sativa SC34 mRNA for tumor suppressor. | |
| 700379868H1 | g1002532 | 46 | 9 | gb105pln | Arabidopsis thaliana actin-11 (ACT11) gene, complete cds. | |
| 700346762H1 | g1814400 | 44 | −36 | gb105pln | Mesembryanthemum crystallinum phosphoglucomutase (PGM) mRNA, complete cds. | |
| 700379947H1 | g2191186 | 8 | 6 | gb105allp | contains similarity to tropomyosin and kinesin | |
| 700347111H1 | g312345 | 26 | 1 | gb105allp | rat ribosomal protein L36 | |
| 700346965H1 | g2335106 | 9 | 4 | gb105allp | salt inducible protein isolog | |
| 700346381H1 | g2213606 | 24 | −1 | gb105pln | Genomic sequence for Arabidopsis thaliana BAC F21J9, complete sequence. | |
| 700346780H1 | g313759 | 50 | −57 | gb105pln | Z. mays hsp 70-1 gene for heat shock protein 70. | |
| 700346584H1 | g2342687 | 19 | 0 | gb105eukp | F7G19.20 | |
| 700343054H1 | g1669623 | 10 | 4 | gb105eukp | ribosomal protein L39 | |
| 700343168H1 | g171785 | 10 | −0 | gb105eukp | alpha-ketoglutarate dehydrogenase | |
| 700344925H1 | g452473 | 91 | −75 | gb105pln | Zea mays Black Mexican Sweet alpha-tubulin mRNA, complete cds. | |
| 700342992H1 | g1183936 | 16 | 2 | gb105pln | P. sativum 5S rRNA gene. | |
| 700343151H1 | g312257 | 25 | −10 | gb105pln | Yeast (Saccharomyces cerevisiae) PUP2 gene. | |
| 700346705H1 | g577824 | 36 | −25 | gb105pln | Z. mays gene for H2B histone (gH2B3). | |
| 700345783H1 | g2388931 | 14 | 6 | gb105eukp | SPAC23H4.12; hypothetical protein | |
| 700343718H1 | g1147799 | 22 | −3 | gb105pln | Yeast (Saccaromyces cerevisiae) Sug2p (SUG2) gene, complete cds. | |
| 700343915H1 | g1632830 | 23 | 7 | gb105pln | R. communis mRNA (unknown). | |
| 700342745H1 | g2465923 | 24 | −12 | gb105eukp | RKF1; receptor-like serine/threonine kinase | |
| 700379960H1 | g21800 | 37 | −40 | gb105pln | T. aestivum L mRNA for histone H2B. | |
| 700344646H1 | g1839580 | 35 | −3 | gb105pln | putative glycine-rich protein {clone CHEM 11} [Zea mays = maize, cv. INRA 258, | |
| | | | | | mercuric chloride-treated, leaves, mRNA Partial, 149 nt]. | |
| 700342564H1 | g436782 | 22 | −4 | gb105pln | Rice mRNA for cyc07, complete cds. | |
| 700345221H1 | g434344 | 28 | −16 | gb105pln | A. thaliana (Columbia) mRNA for S18 ribosomal protein (641 bp). | |
| 700343065H1 | g899607 | 38 | −51 | gb105pln | Zea mays polyubiquitin (MubC5) mRNA, complete cds. | |
| 700343906H1 | g927428 | 16 | 4 | gb105allp | fis1 gene product | |
| 700345571H1 | g2583135 | 15 | 5 | gb105eukp | F4L23.30 | |
| 700347255H1 | g498788 | 43 | −39 | gb105pln | S. tuberosum (Desiree) cyc1 II mRNA. for cytochrome c1. | |
| 700343958H1 | g940889 | 39 | −29 | gb105eukp | SET | |
| 700281886H2 | g487311 | 51 | 7 | gb105pln | Rice mRNA EN448, partial sequence. | |
| 700281996H2 | g396209 | 22 | 4 | gb105pln | S. polyrrhiza mRNA for D-myo-inositol-3-phosphate synthase. | |
| 700343001H1 | g173384 | 40 | −17 | gb105eukp | pold; DNA polymerase delta | |
| 700345364H1 | g1129083 | 41 | −25 | gb105pln | Wheat mRNA for protein H2A, complete cds, clone wcH2A-2. | |
| 700344101H1 | g287723 | 9 | 7 | gb105allp | P120 antigen | |
| 700343579H1 | g2564046 | 14 | −0 | gb105pln | Arabidopsis thaliana genomic DNA, chromosome 5, P1 clone: MGI19, complete | |
| | | | | | sequence. | |
| 700342683H1 | g3040 | 9 | 6 | gb105eukp | NUO-12.3 | |
| 700347328H1 | g397395 | 51 | −28 | gb105pln | Z. mays MNB1b mRNA for DNA-binding protein. | |
| 700342893H1 | g2465428 | 12 | −1 | gb105eukp | JRG1.2; 32 kDa protein | |
| 700347261H1 | g248336 | 45 | −70 | gb105pln | polyubiquitin [maize, Genomic 3841 nt]. | |
| 700342434H1 | g17862 | 34 | −17 | gb105pln | B. napus mRNA for ribosomal protein S15a (pPCB8). | |
| 700345079H1 | g2618602 | 11 | 9 | gb105pln | Arabidopsis thaliana genomic DNA, chromosome 5, P1 clone: MSJ1, complete | |
| | | | | | sequence. | |
| 700343707H1 | g168505 | 16 | −18 | gb105pln | Zea mays histone H3 gene, complete cds. | |
| 700344858H1 | g596134 | 32 | −2 | gb105allp | autoantigen | |
| 700343884H1 | g2623296 | 8 | −3 | gb105eukp | T20B5.2 | |
| 700345326H1 | g832876 | 35 | −0 | gb105eukp | AFRR; ascorbate free radical reductase | |
| 700343053H1 | g2735839 | 55 | −74 | gb105pln | Sorghum bicolor ADP-glucose pyrophosphyorylase subunit SH2, transcriptional | |
| | | | | | regulator, NADPH-dependent reductase A1-a and NADPH-dependent reductase A1-b | |
| | | | | | genes, complete cds. | |
| 700343338H1 | g1468969 | 37 | −17 | gb105allp | brain acyl-CoA synthtase II | |
| 700344411H1 | g998429 | 20 | −47 | gb105pln | GRF1 = general regulatory factor [Zea mays, XL80, Genomic, 5348 nt]. | |
| 700346873H1 | g2252843 | 15 | −4 | gb105eukp | A_IG005I10.24 | |
| 700343016H1 | g217842 | 20 | −3 | gb105pln | A. thaliana mRNA for protein kinase. | |
| 700347258H1 | g556685 | 55 | −38 | gb105pln | Z. mays mRNA for ADP-ribosylation factor. | |
| 700342594H1 | g416150 | 100 | −85 | gb105pln | Zea mays beta-8 tubulin (tub8) mRNA, complete cds. | |
| 700342352H1 | g396531 | 27 | −19 | gb105eukp | ribosomal protein S19 | |
| 700343573H1 | g1245447 | 30 | −15 | gb105eukp | putative ribosomal protein S13 | |
| 700345722H1 | g2342724 | 21 | −21 | gb105eukp | T14G11.16 | |
| 700344067H1 | g2792238 | 12 | 8 | gb105eukp | r10; NBS-LRR type resistance protein | |
| 700380110H1 | g2407800 | 27 | −11 | gb105eukp | H2Av; histone H2A.F/Z | |
| 700347358H1 | g1184771 | 67 | −86 | gb105pln | Zea mays glyceraldehyde-3-phosphate dehydrogenase GAPC2 (gpc2) mRNA, | |
| | | | | | complete cds. | |
| 700343667H1 | g1546918 | 27 | −62 | gb105pln | Z. mays mRNA for translation initiation factor 5A. | |
| 700345223H1 | g1086831 | 17 | −5 | gb105eukp | F10E7.7 | |
| 700379754H1 | g303834 | 33 | 7 | gb105pln | Rice mRNA for 21 kd polypeptide, complete cds. | |
| 700345831H1 | g468235 | 56 | −30 | gb105allp | immunoglobulin heavy chain Fd region V-D-J-CH1 | |
| 700344522H1 | g218176 | 30 | −30 | gb105pln | Rice mRNA for 21 kd polypeptide. | |
| 700342756H1 | g21399 | 46 | −6 | gb105pln | Solanum tuberosum processed actin pseudogene. | |
| 700342977H1 | g21233 | 41 | −30 | gb105pln | S. oleracea AHRI mRNA for acetohydroxy acid reductoisomerase. | |
| 700346567H1 | g34031 | 18 | −1 | gb105allp | KDEL receptor | |
| 700342357H1 | g395076 | 34 | −12 | gb105pln | B. rapa ribosomal protein L37a mRNA, complete CDS. | |
| 700346820H1 | g456671 | 35 | −15 | gb105pln | T. aestivum VDAC 1 mRNA. | |
| 700346587H1 | g227594 | 20 | 2 | gb105pln | Arabidopsis thaliana chromosome II BAC T08I13 genomic sequence, complete | |
| | | | | | sequence. | |
| 700343154H1 | g1749747 | 29 | −18 | gb105pln | Fission Yeast mRNA, partial cds. | |
| 700343205H1 | g2088552 | 28 | −18 | gb105allp | No definition line found | |
| 700345357H1 | g349054 | 44 | −29 | gb105pln | Solanum tuberosum ubiquitin/ribosomal fusion protein (ubi3) gene, complete cds. | |
| 700343289H1 | g3075 | 18 | 2 | gb105pln | N. crassa mRNA for a ribosomal protein. | |
| 700346546H1 | g1322276 | 21 | −4 | gb105pln | Triticum aestivum histone H2A gene, complete cds. | |
| 700346778H1 | g2653397 | 19 | −4 | gb105eukp | EG:171D11.1 | |
| 700342701H1 | g2464874 | 10 | 4 | gb105allp | patatin | |
| 700343549H1 | g1842187 | 43 | 15 | gb105pln | B. pendula mRNA encoding mitochondrial phosphate translocator. | |
| 700347130H1 | g1217607 | 41 | 2 | gb105allp | HVB12D homologue | |
| 700343070H1 | g551046 | 46 | −50 | gb105pln | L. temulentum 1haB mRNA. | |
| 700347134H1 | g22155 | 52 | −55 | gb105pln | Z. mays mRNA for alpha-tubulin 5. | |
| 700347011H1 | g1946690 | 21 | 5 | gb105eukp | glutathione peroxidase | |
| 700346090H1 | g1053044 | 18 | −30 | gb105pln | Glycine max histone H3 gene, partial cds, clone S1. | |
| 700345480H1 | g576999 | 7 | 4 | gb105eukp | C08B11.7 | |
| 700379811H1 | g2198850 | 82 | −78 | gb105pln | Zea mays cystathionine gamma-synthase (CGS1) mRNA, complete cds. | |
| 700342533H1 | g38223 | 65 | −8 | gb105allp | alpha1-globin | |
| 700346792H1 | g303848 | 31 | −12 | gb105pln | Rice mRNA for nucleoside diphosphate kinase, complete cds. | |
| 700344114H1 | g2511690 | 20 | 5 | gb105pln | Phaseolus vulgaris Moldavian encoding cysteine proteinase precursor (clone cp41). | |
| 700281904H2 | g949979 | 93 | 11 | gb105pln | Z. mays Glossy2 locus DNA. | |
| 700345641H1 | g577824 | 25 | −2 | gb105pln | Z. mays gene for H2B histone (gH2B3). | |
| 700379675H1 | g1122378 | 16 | −4 | gb105eukp | SPAC18G6.13c; unknown | |
| 700345975H1 | g498908 | 60 | −4 | gb105eukp | RPL34; ribosomal protein L34 homolog | |
| 700342518H1 | g387398 | 74 | −35 | gb105allp | epidermal keratin type I | |
| 700342883H1 | g2642157 | 8 | 8 | gb105eukp | T5I7.5 ankyrin-like protein | |
| 700379678H1 | g1129085 | 33 | −27 | gb105pln | Wheat mRNA for protein H2A, complete cds, clone wcH2A-9. | |
| 700343907H1 | g1478271 | 16 | 4 | gb105pln | Yeast (Schizosaccharomyces pombe) cosmid 800. | |
| 700380216H1 | g21233 | 43 | −39 | gb105pln | S. oleracea AHRI mRNA for acetohydroxy acid reductoisomerase. | |
| 700379902H1 | g1009429 | 23 | 2 | gb105allp | uroporphyrinogen decarboxylase | |
| 700380547H1 | g218082 | 39 | −38 | gb105pln | Rice mRNA for initiation factor eIF-4D (225 gene), partial sequence. | |
| 700345505H1 | g473976 | 52 | −38 | gb105pln | Rice mRNA, partial homologous to elongation factor 1-alpha gene. | |
| 700344352H1 | g170455 | 49 | −49 | gb105pln | Tomato heat shock cognate protein 80 gene, 3′ end. | |
| 700281872H2 | g169804 | 58 | −3 | gb105pln | Oryza sativa DNA fragment with a miscellaneous signal and an open reading frame. | |
| 700345657H1 | g1546918 | 90 | −37 | gb105pln | Z. mays mRNA for translation initiation factor 5A. | |
| 700345121H1 | g2302294 | 18 | 2 | gb105allp | unnamed protein product | |
| 700342389H1 | g886739 | 62 | −47 | gb105pln | Z. mays histone H4 gene. | |
| 700379952H1 | g1429356 | 20 | −18 | gb105eukp | ORF D1075 | |
| 700347006H1 | g488786 | 25 | −5 | gb105pln | B. oleracea putative imbibition protein mRNA. | |
| 700345559H1 | g426441 | 41 | −25 | gb105pln | Rice mRNA for thioredoxin h, complete cds. | |
| 700346091H1 | g168379 | 26 | −20 | gb105pln | M. racemosus TEF-1 gene encoding elongation factor 1-alpha (EF-1-alpha), | |
| | | | | | complete cds. | |
| 700281955H2 | g433044 | 72 | −83 | gb105pln | Zea mays W-22 clone PREM-1D retroelement PREM-1, partial sequence. | |
| 700346387H1 | g166605 | 14 | 15 | gb105pln | Arabidopsis thaliana anthranilate synthase alpha subunit gene, complete cds. | |
| 700281927H2 | g2435510 | 15 | −0 | gb105pln | Arabidopsis thaliana BAC TM017A05. | |
| 700343493H1 | g790969 | 68 | 1 | gb105pln | Rice mRNA for aldolase C-1, complete cds. | |
| 700346464H1 | g1419036 | 15 | 4 | gb105eukp | P5CS-1; delta-1-pyrroline-5-carboxylate synthase | |
| 700346446H1 | g22677 | 13 | −2 | gb105eukp | A6; anther-specific protein | |
| 700379965H1 | g498772 | 91 | −51 | gb105pln | Z. mays (cv DH5xDH7) hsp70-4 mRNA for heat shock protein 70. | |
| 700344644H1 | g1107484 | 26 | 1 | gb105pln | A. thaliana mRNA for 40S ribosomal protein S15. | |
| 700380230H1 | g1335861 | 16 | −22 | gb105pln | Glycine max clathrin heavy chain mRNA, complete cds. | |
| 700346501H1 | g1325967 | 31 | −18 | gb105pln | T. aestivum histone H2A gene (clone TH274). | |
| 700345645H1 | g16189 | 9 | 2 | gb105eukp | ATR2; NADPH-ferrihemoprotein reductase | |
| 700379858H1 | g1890281 | 7 | 4 | gb105eukp | transformation-sensitive protein homolog | |
| 700344505H1 | g268 | 11 | −2 | gb105allp | cytochrome c oxidase subunit VIb (AA 1-86) | |
| 700342639H1 | g1066153 | 18 | −3 | gb105eukp | cysC; cysteine synthase; EC 4.2.99.8 | |
| 700343344H1 | g1498246 | 56 | −41 | gb105pln | S. oleracea mRNA for bas1 protein. | |
| 700281861H2 | g2369713 | 31 | −19 | gb105pln | Beta vulgaris cDNA for elongation factor 2. | |
| 700342245H1 | g2293567 | 21 | 10 | gb105pln | Oryza sativa HvB12D homolog mRNA, complete cds. | |
| 700345389H1 | g18259 | 20 | −26 | gb105pln | C. sativus mRNA for cs DnaJ-1. | |
| 700345065H1 | g999395 | 46 | −57 | gb105pln | HSP81-3 = heat-shock Protein [Arabidopsis thaliana = thale-cress, Genomic, 3094 nt]. | |
| 700346723H1 | g147920 | 19 | −1 | gb105allp | 3-methyladenine-DNA glycosylase I (tag) | |
| 700345565H1 | g2244747 | 56 | −45 | gb105pln | Arabidopsis thaliana DNA chromosome 4, ESSA I contig fragment No. 0. | |
| 700344835H1 | g22328 | 69 | −68 | gb105pln | Maize mRNA for a high mobility group protein. | |
| 700342358H1 | g483411 | 49 | −64 | gb105pln | Zea Mays calmodulin-binding protein mRNA, 3′ end. | |
| 700345759H1 | g2662344 | 83 | −75 | gb105pln | Oryza sativa mRNA for EF-1 alpha, complete cds. | |
| 700343903H1 | g536891 | 27 | −40 | gb105pln | Wheat mRNA for protein H2A, complete cds, clone wcH2A-4. | |
| 700342658H1 | g431176 | 10 | 6 | gb105eukp | LIM9; serine proteinase | |
| 700346313H1 | g53553 | 8 | 6 | gb105allp | 25 kDa nuclear protein | |
| 700346011H1 | g467403 | 17 | 1 | gb105allp | seryl-tRNA synthetase | |
| 700344913H1 | g393400 | 86 | −75 | gb105pln | Z. mays mRNA for alpha-tubulin. | |
| 700343905H1 | g899393 | 12 | 13 | gb105pln | Yeast (Saccharomyces cerevisiae) chromosome IV cosmid 8358. | |
| 700343543H1 | g2182286 | 18 | 9 | gb105pln | Sequence of BAC F20P5 from Arabidopsis thaliana chromosome 1, complete sequence. | |
| 700344004H1 | g2642212 | 58 | −36 | gb105pln | Zea mays nitrate-induced NOI protein gene, complete cds. | |
| 700343373H1 | g2213425 | 16 | 7 | gb105eukp | unknown; hypothetical protein | |
| 700346053H1 | g169820 | 57 | −50 | gb105pln | Oryza sativa triosephosphate isomerase (Rictpi) mRNA, complete cds. | |
| 700379927H1 | g303852 | 56 | −45 | gb105pln | Rice mRNA for ribosomal protein L3, complete cds. | |
| 700344942H1 | g773580 | 14 | 14 | gb105pln | P. sativum mRNA for heat shock protein 22. | |
| 700281918H2 | g1151244 | 18 | 0 | gb105eukp | OEP34; GTP-binding protein | |
| 700342419H1 | g432367 | 38 | −21 | gb105pln | Rice mRNA for elongation factor 1 beta, complete cds. | |
| 700347061H1 | g2384759 | 51 | −37 | gb105pln | Oryza sativa GDP dissociation inhibitor protein OsGDI2 (OsGDI2) mRNA, | |
| | | | | | complete cds. | |
| 700346623H1 | g1132482 | 41 | −19 | gb105pln | Rice mRNA for ADP-ribosylation factor, complete cds. | |
| 700346594H1 | g1272406 | 10 | 7 | gb105eukp | FKBP15-1; immunophilin | |
| 700345651H1 | g1749464 | 19 | 0 | gb105eukp | similar to Saccharomyces cerevisiae putative NDP-hexose pyrophosphopylase, | |
| | | | | | SWISS-PROT Accession Number P41940 | |
| 700342695H1 | g1167953 | 22 | −3 | gb105eukp | putative 32.6 kDa jasmonate-induced protein | |
| 700346511H1 | g2655285 | 9 | 4 | gb105allp | germin-like protein 1 | |
| 700343874H1 | g2384669 | 24 | −12 | gb105eukp | AtKT1; putative potassium transporter AtKT1p | |
| 700344953H1 | g2511571 | 22 | −2 | gb105pln | Arabidopsis thaliana mRNA for proteasome subunit prcga. | |
| 700345766H1 | g406050: | 31 | 0 | gb105pln | Yeast (Schizosaccharomyces pombe) Let1 (let1) gene, complete cds. | |
| 700344050H1 | g168452 | 39 | −24 | gb105pln | Zea mays ribosome-inactivating protein (CRIP9) mRNA, complete cds. | |
| 700342796H1 | g556685 | 45 | −31 | gb105pln | Z. mays mRNA for ADP-ribosylation factor. | |
| 700379711H1 | g170746 | 22 | −23 | gb105pln | Wheat histone H4 TH091 gene, complete cds. | |
| 700342578H1 | g169190 | 33 | −31 | gb105pln | P. hybrida 5-enolpyruvylshikimate 3-phosphate synthase mRNA, complete cds. | |
| 700342229H1 | g2266661 | 36 | −21 | gb105pln | Hordeum vulgare mRNA for 14-3-3 protein (Hv1433c). | |
| 700345545H1 | g736271 | 26 | −34 | gb105pln | O. sativa hsp70 gene for heat shock protein 70. | |
| 700344506H1 | g1255029 | 100 | 2 | gb105allp | FBP 28 | |
| 700342607H1 | g35105 | 35 | −5 | gb105allp | snRNP E protein (AA 1-92) | |
| 700346208H1 | g758352 | 65 | −77 | gb105pln | Z. mays mRNA for cysteine synthase. | |
| 700345584H1 | g575457 | 8 | 7 | gb105eukp | CDC40; Cdc40p | |
| 700345174H1 | g2632252 | 12 | 2 | gb105allp | serine/threonine kinase | |
| 700344768H1 | g1149570 | 21 | 3 | gb105pln | A. thaliana mRNA for mitochondrial elongation factor Tu. | |
| 700346108H1 | g945084 | 24 | −5 | gb105pln | Arabidopsis thaliana transcription factor TFIIB mRNA, complete cds. | |
| 700343107H1 | g1293564 | 38 | −18 | gb105pln | Arabidopsis thaliana isopentenyl diphosphate:dimethylallyl diphsophate isomerase | |
| | | | | | (IPP2) mRNA, complete cds. | |
| 700347067H1 | g1143390 | 27 | −14 | gb105eukp | HMGS; hydroxymethylglutaryl-CoA synthase; EC 4.1.3.5 | |
| 700345224H1 | g20163 | 31 | −13 | gb105pln | O. sativa Rr15 mRNA for 5S ribosomal RNA. | |
| 700345242H1 | g2564051 | 22 | −6 | gb105pln | Arabidopsis thaliana genomic DNA, chromosome 5, P1 clone: MWD9, complete | |
| | | | | | sequence. | |
| 700344691H1 | g434342 | 30 | −14 | gb105pln | A. thaliana (C24) mRNA for S18 ribosomal protein. | |
| 700343926H1 | g939726 | 16 | 5 | gb105eukp | ATCYP4; cyclophilin | |
| 700343578H1 | g2828188 | 32 | −17 | gb105pln | Arabidopsis thaliana genomic DNA, chromosome 5, TAC clone: K3I3, complete | |
| | | | | | sequence. | |
| 700380795H1 | g763367 | 21 | −12 | gb105eukp | SEC11; Sec11p | |
| 700346991H1 | g470126 | 16 | 12 | gb105pln | N. tabacum (cv. Samsun NN) L19 mRNA for ribosomal protein L19. | |
| 700342594H1 | g460988 | 76 | −65 | gb105pln | O. sativa (Arborio) Beta Tubulin mRNA, clone OSTB-34. | |
| 700281891H2 | g439260 | 17 | −14 | gb105eukp | T26G10.1 | |
| 700346211H1 | g454279 | 10 | 2 | gb105allp | DNA-binding protein | |
| 700345878H1 | g1184771 | 92 | −75 | gb105pln | Zea mays glyceraldehyde-3-phosphate dehydrogenase GAPC2 (gpc2) mRNA, | |
| | | | | | complete cds. | |
| 700343770H1 | g1066931 | 17 | −3 | gb105eukp | F10B5.7 | |
| 700380569H1 | g829221 | 24 | −1 | gb105eukp | histone H2 A.F/Z | |
| 700346181H1 | g515376 | 48 | 14 | gb105pln | L. temulentum mRNA for histone H4. | |
| 700347212H1 | g2814799 | 31 | −17 | gb105eukp | ZK858.6 | |
| 700344430H1 | g21800 | 22 | −14 | gb105pln | T. aestivum L mRNA for histone H2B. | |
| 700343919H1 | g21800 | 50 | −63 | gb105pln | T. aestivum L mRNA for histone H2B. | |
| 700342824H1 | g22151 | 93 | −48 | gb105pln | Z. mays (A188) mRNA for alpha-tubulin 4. | |
| 700379868H1 | g1498365 | 46 | 9 | gb105pln | Solanum lycopersicum actin (Tom51) gene, partial cds. | |
| 700342776H1 | g758354 | 33 | 9 | gb105pln | Z. mays mRNA for plasma membrane H+ ATPase. | |
| 700342855H1 | g168498 | 32 | 16 | gb105pln | Corn histone H4 (H4C13) gene, complete cds. | |
| 700343154H1 | g2408013 | 29 | −18 | gb105pln | Yeast (Saccharomyces pombe) chromosome I cosmid c17G6. | |
| 700380479H1 | g517221 | 14 | 8 | gb105allp | ribosomal protein S24 | |
| 700380294H1 | g2244827 | 46 | −21 | gb105eukp | hypothetical protein | |
| 700347241H1 | g416148 | 71 | −69 | gb105pln | Zea mays beta-7 tubulin (tub7) mRNA, complete cds. | |
| 700345736H1 | g166857 | 58 | −60 | gb105pln | Arabidopsis thaliana cytoplasmic ribosomal protein mRNA, complete cds. | |
| 700347378H1 | g312500 | 46 | −28 | gb105eukp | 60S ribosomal protein L17 | |
| 700344146H1 | g1064828 | 7 | 2 | gb105eukp | Actin; Pharbitis nil actin 3-1 | |
| 700343356H1 | g312180 | 42 | −78 | gb105pln | Z. mays GapC4 gene. | |
| 700345514H1 | g2632928 | 15 | −3 | gb105allp | sorbitol dehydrogenase | |
| 700344064H1 | g1132482 | 65 | −64 | gb105pln | Rice mRNA for ADP-ribosylation factor, complete cds. | |
| 700343076H1 | g473933 | 6 | 6 | gb105allp | KIAA0052 | |
| 700347058H1 | g22322 | 15 | −38 | gb105pln | Z. mays mRNA for H2B histone (clone cH2B214). | |
| 700346972H1 | g929917 | 25 | −7 | gb105pln | Z. mays ABP1 mRNA for actin-depolymerizing factor. | |
| 700345515H1 | g2194119 | 7 | 6 | gb105eukp | F20P5.5 | |
| 700345227H1 | g1247302 | 12 | 1 | gb105allp | GBSS gene product | |
| 700281924H2 | g293888 | 31 | −21 | gb105pln | Zea mays, glyceraldehyde-3-phosphate dehydrogenase mRNA, 3′ end (clone GAPC2). | |
| 700343559H1 | g498788 | 37 | −22 | gb105pln | S. tuberosum (Desiree) cycl II mRNA. for cytochrome c1. | |
| 700346887H1 | g1143864 | 27 | 8 | gb105allp | beta glucosidase | |
| 700344745H1 | g1015849 | 12 | −1 | gb105eukp | RPS5 | |
| 700379945H1 | g2662344 | 82 | −70 | gb105pln | Oryza sativa mRNA for EF-1 alpha, complete cds. | |
| 700346795H1 | g166548 | 35 | −17 | gb105pln | Avena sativa vacuolar H+-ATPase 16 kDa proteolipid subunit (vatp-P1) mRNA, | |
| | | | | | complete cds. | |
| 700344374H1 | g1575129 | 60 | −58 | gb105pln | Zea mays lumenal binding protein cBiPe3 mRNA, complete cds. | |
| 700344331H1 | g170687 | 22 | 2 | gb105pln | Triticum aestivum DNA binding protein (EmBP-1c) mRNA, partial cds. | |
| 700344117H1 | g2828180 | 19 | −31 | gb105pln | Arabidopsis thaliana genomic DNA, chromosome 5, P1 clone: MDK4, complete | |
| | | | | | sequence. | |
| 700347323H1 | g2245027 | 10 | 0 | gb105eukp | ribosomal protein | |
| 700343453H1 | g1053056 | 36 | −34 | gb105pln | Triticum aestivum histone H3 gene, partial cds, clone W1. | |
| 700346919H1 | g1497983 | 42 | −22 | gb105eukp | alien; putative thyroid receptro interacting protein | |
| 700345905H1 | g498907 | 22 | −3 | gb105pln | Pisum sativum ribosomal protein L34 homolog (RPL34) mRNA, complete cds. | |
| 700344662H1 | g22245 | 96 | −86 | gb105pln | Zea mays DNA for cin4 element (showing homology to reverse transcriptase). | |
| 700342309H1 | g1420100 | 9 | 5 | gb105eukp | ORF YOR007c | |
| 700342869H1 | g184556 | 9 | 3 | gb105allp | insulin-degrading enzyme | |
| 700346631H1 | g1737491 | 58 | −49 | gb105pln | Triticum aestivum poly(A)-binding protein (wheatpab) mRNA, complete cds. | |
| 700345325H1 | g437901 | 21 | −6 | gb105eukp | phosphoprotein phosphatase 2A 65 kDa regulatory subunit | |
| 700343904H1 | g1107484 | 26 | −6 | gb105pln | A. thaliana mRNA for 40S ribosomal protein S15. | |
| 700346109H1 | g1483246 | 20 | 2 | gb105eukp | C52E4.3 | |
| 700344766H1 | g292055 | 43 | −22 | gb105allp | helix-loop-helix phosphoprotein | |
| 700346748H1 | g2773153 | 14 | −1 | gb105pln | Oryza sativa abscisic acid- and stress-inducible protein (Asr1) mRNA, complete cds. | |
| 700344711H1 | g1638836 | 45 | −49 | gb105pln | H. vulgare mRNA for alpha-tubulin 2. | |
| 700344215H1 | g168496 | 49 | −20 | gb105pln | Maize (Zea mays) histone H3 gene (H3C4), complete cds. | |
| 700347311H1 | g1086831 | 13 | −3 | gb105eukp | F10E7.7 | |
| 700345807H1 | g182514 | 28 | 4 | gb105allp | ferritin light chain | |
| 700345758H1 | g21841 | 18 | 6 | gb105pln | T. aestivum mRNA for a proline-rich protein. | |
| 700379905H1 | g303739 | 26 | −28 | gb105pln | Pea mRNA for GTP-binding protein, complete cds. | |
| 700342841H1 | g1041039 | 10 | 15 | gb105pln | Yeast gene for proteasome subunit complete cds. | |
| 700345986H1 | g1256607 | 11 | 12 | gb105pln | Glycine max G protein beta subunit mRNA, complete cds. | |
| 700281870H2 | g1418316 | 20 | −24 | gb105pln | A. thaliana CER1-like gene (4200 bp) | |
| 700342382H1 | g2088753 | 9 | 7 | gb105eukp | C53H9.2 | |
| 700379779H1 | g1657766 | 81 | −48 | gb105pln | Zea mays retrotransposon Opie-2 5′ LTR, primer binding site, gag gene, pol gene, | |
| | | | | | complete cds, polypurine tract and 3′ LTR. | |
| 700345521H1 | g1173554 | 27 | −13 | gb105pln | Pisum sativum UDP-galactose-4-epimerase (galE) mRNA, complete cds. | |
| 700344095H1 | g1051257 | 62 | −56 | gb105pln | Hordeum vulgare vacuolar ATPase catalytic subunit mRNA, partial cds. | |
| 700342335H1 | g311302 | 22 | −2 | gb105pln | N. sylvestris mRNA. | |
| 700347072H1 | g1381148 | 14 | 6 | gb105allp | Hs-CUL-4A | |
| 700343263H1 | g435648 | 64 | −56 | gb105pln | Rice mRNA for gamma-Tip, complete cds. | |
| 700346290H1 | g20255 | 55 | −45 | gb105pln | O. sativa gene for heat shock protein 82 HSP82. | |
| 700346004H1 | g2661839 | 32 | −16 | gb105pln | Physcomitrella patens mRNA for adenosine kinase. | |
| 700347078H1 | g1546918 | 44 | −41 | gb105pln | Z. mays mRNA for translation initiation factor 5A. | |
| 700346544H1 | g2244857 | 32 | −16 | gb105eukp | hypothetical protein | |
| 700344335H1 | g577824 | 27 | −35 | gb105pln | Z. mays gene for H2B histone (gH2B3). | |
| 700343778H1 | g1524382 | 58 | −76 | gb105pln | Z. mays mRNA for EPSP-synthase. | |
| 700343685H1 | g805003 | 45 | −45 | gb105pln | O. sativa SG12 gene. | |
| 700342543H1 | g895693 | 14 | 3 | gb105allp | ribosomal protein S15a | |
| 700345894H1 | g602252 | 80 | −60 | gb105pln | Zea mays enolase (eno2) mRNA, complete cds. | |
| 700342944H1 | g1495214 | 15 | −2 | gb105eukp | L13441; L1341 protein | |
| 700346554H1 | g2645068 | 18 | −3 | gb105eukp | W09D10.1 | |
| 700346816H1 | g2621777 | 12 | 4 | gb105allp | stomatin-like protein | |
| 700346792H1 | g1777929 | 23 | −5 | gb105pln | Saccharum officinarum nucleoside diphosphate kinase (SoNDPK1) mRNA, | |
| | | | | | complete cds. | |
| 700344705H1 | g1488267 | 15 | −5 | gb105eukp | low affinity calcium antiporter CAX2 | |
| 700281842H2 | g2296279 | 18 | −5 | gb105allp | unnamed protein product | |
| 700343856H1 | g2655115 | 35 | −1 | gb105pln | Zea mays Ca-5 mRNA, 3′UTR. | |
| 700380481H1 | g2641976 | 15 | 2 | gb105allp | mGpilp | |
| 700346762H1 | g1881692 | 79 | −70 | gb105pln | Zea mays phosphoglucomutase mRNA, partial cds. | |
| 700342305H1 | g1218053 | 41 | −26 | gb105pln | Oryza sativa protein phosphatase 2A mRNA, complete cds. | |
| 700345460H1 | g1182048 | 41 | −18 | gb105eukp | nda4; Nda4 | |
| 700342763H1 | g2708482 | 16 | 3 | gb105allp | IAA25 | |
| 700380590H1 | g473602 | 47 | −42 | gb105pln | Zea mays W-22 histone H2A mRNA, complete cds. | |
| 700344988H1 | g2252634 | 25 | −13 | gb105eukp | T19D16.28 | |
| 700347087H1 | g2656031 | 29 | −14 | gb105pln | Arabidopsis thaliana genomic DNA, chromosome 5, P1 clone: MXC20. | |
| 700344667H1 | g386764 | 75 | 3 | gb105allp | hba2 alpha globin | |
| 700343429H1 | g473933 | 9 | 3 | gb105allp | KIAA0052 | |
| 700343562H1 | g1430979 | 18 | −6 | gb105eukp | NOP1 | |
| 700344119H1 | g168460 | 86 | −32 | gb105pln | Zea mays cyclophilin (CyP) mRNA, complete cds. | |
| 700343447H1 | g416265 | 25 | −7 | gb105pln | Rice mRNA for ribosomal protein A2, partial sequence. | |
| 700344736H1 | g396254 | 25 | −9 | gb105eukp | 40S ribosomal protein S5 | |
| 700344508H1 | g2145358 | 8 | −3 | gb105eukp | ATHB-9; transcription factor; HD-Zip protein | |
| 700343051H1 | g861323 | 29 | −16 | gb105eukp | T24H7.1 | |
| 700380168H1 | g1944402 | 31 | −13 | gb105pln | Zinnia elegans mRNA for cinnamyl alcohol dehydrogenase, partial cds. | |
| 700380194H1 | g1332386 | 24 | −5 | gb105allp | Rattus norvegicus ATPase subunit 6 | |
| 700343085H1 | g171399 | 44 | −18 | gb105eukp | DIN1; ribonucleotide reductase DNA damage-inducible regulatory subunit | |
| 700344426H1 | g182514 | 27 | −6 | gb105allp | ferritin light chain | |
| 700344644H1 | g313151 | 26 | 1 | gb105pln | A. thaliana ribosomal protein S15 mRNA, complete CDS. | |
| 700343886H1 | g2104525 | 34 | −16 | gb105eukp | T10M13.2; T10M13.2 | |
| 700343696H1 | g1785643 | 17 | 5 | gb105allp | dinG | |
| 700347328H1 | g459267 | 36 | −12 | gb105pln | Z. mays gene for HMG protein. | |
| 700344330H1 | g871812 | 25 | −7 | gb105eukp | ARA.KIN | |
| 700347028H1 | g886470 | 29 | −15 | gb105pln | C. roseus MetE mRNA for methionine synthase. | |
| 700346002H1 | g498739 | 50 | −52 | gb105pln | H. vulgare (pMaW22) mRNA for beta-keotacyl-ACP synthase. | |
| 700345768H1 | g2463566 | 98 | −84 | gb105pln | Zea mays mRNA for squalene synthase, complete cds. | |
| 700379874H1 | g1002380 | 12 | 1 | gb105allp | RRM-type RNA binding protein | |
| 700380267H1 | g2257755 | 91 | −83 | gb105pln | Zea mays nucleolar histone deacetylase HD2-p39 mRNA, complete cds. | |
| 700344950H1 | g18140 | 10 | −0 | gb105pln | C. rubrum mRNA for light-induced 34 kD protein. | |
| 700343677H1 | g21694 | 22 | 4 | gb105pln | T. aestivum mRNA 2 for cathepsin B (2077). | |
| 700344336H1 | g886739 | 69 | −55 | gb105pln | Z. mays histone H4 gene. | |
| 700380083H1 | g960288 | 43 | −6 | gb105pln | Ruta graveolens anthranilate synthase alphs-subunit mRNA, complete cds. | |
| 700342458H1 | g1465368 | 14 | 6 | gb105allp | bHLH protein | |
| 700343493H1 | g168419 | 95 | −8 | gb105pln | Maize (Z. mays) aldolase mRNA, complete cds. | |
| 700342785H1 | g18449 | 36 | 11 | gb105pln | F. ananassa 26s rRNA gene. | |
| 700342324H1 | g1212996 | 12 | 4 | gb105eukp | UDP-glucose pyrophosphorylase; EC 2.7.7.9 | |
| 700343340H1 | g2213424 | 38 | −22 | gb105pln | Citrus paradisi mRNA for hypothetical protein. | |
| 700343904H1 | g313151 | 25 | −5 | gb105pln | A. thaliana ribosomal protein S15 mRNA, complete CDS. | |
| 700344755H1 | g577818 | 64 | −74 | gb105pln | Z. mays gene for H2B histone (gH2B4). | |
| 700344872H1 | g974781 | 42 | −46 | gb105pln | C. blumei kinetoplast met gene for cobalamine-independent methionine synthase. | |
| 700346836H1 | g1149594 | 34 | −22 | gb105pln | B. napus mRNA for 1-acyl-sn-glycerol-3-phosphate acyltransferase. | |
| 700346313H1 | g35768 | 8 | 6 | gb105allp | polypirimidine tract binding protein | |
| 700380716H1 | g1817578 | 40 | −22 | gb105allp | alpha-globin 2 | |
| 700346327H1 | g476103 | 18 | 2 | gb105allp | mago nashi protein | |
| 700343023H1 | g2737925 | 24 | −1 | gb105pln | Arabidopsis thaliana fimbrin-like protein AtFim2 mRNA, partial cds. | |
| 700343419H1 | g473986 | 35 | −31 | gb105pln | Rice mRNA, partial homologous to histone H2B gene. | |
| 700342692H1 | g2224352 | 36 | −23 | gb105pln | Chlorella vulgaris C-27 chloroplast DNA, complete sequence. | |
| 700345540H1 | g544491 | 61 | −47 | gb105pln | Corn mRNA for elongation factor 1A. | |
| 700281930H2 | g886739 | 22 | −37 | gb105pln | Z. mays histone H4 gene. | |
| 700342204H1 | g2345153 | 27 | −14 | gb105pln | Zea mays ribosomal protein S4 (rps4) mRNA, complete cds. | |
| 700343163H1 | g2673911 | 12 | −2 | gb105eukp | T24P15.11; putative squamosa-promoter binding protein | |
| 700345701H1 | g432367 | 38 | −31 | gb105pln | Rice mRNA for elongation factor 1 beta, complete cds. | |
| 700343570H1 | g669028 | 34 | −6 | gb105eukp | F32A5.7 | |
| 700379913H1 | g2494106 | 26 | 8 | gb105pln | Arabidopsis thaliana chromosome 1 YAC yUP8H12R, complete sequence. | |
| 700343815H1 | g2160158 | 41 | −16 | gb105eukp | F21M12.3 | |
| 700347124H1 | g971283 | 20 | −24 | gb105pln | Rice mRNA for ribosomal protein S31, complete cds. | |
| 700380064H1 | g397400 | 38 | −22 | gb105pln | B. rapa mRNA for S phase specific gene. | |
| 700343480H1 | g699510 | 12 | 4 | gb105allp | minute(1)1B protein | |
| 700379994H1 | g1399567 | 43 | −60 | gb105pln | Podophyllum peltatum nuclear 26S ribosomal RNA gene, partial sequence. | |
| 700346116H1 | g289212 | 18 | −17 | gb105pln | Atriplex nummularia homologous sequence (ANJ1) mRNA. | |
| 700346114H1 | g219910 | 28 | −10 | gb105allp | lipocortin II | |
| 700346952H1 | g218514 | 21 | 2 | gb105pln | Yeast (Saccharomyces cerevisiae) YS11A gene for ribosomal protein YS11. | |
| 700346325H1 | g2641200 | 44 | −31 | gb105pln | Fritillaria agrestis ribosomal protein L23a (rp123a) mRNA, complete cds. | |
| 700344974H1 | g21800 | 35 | −38 | gb105pln | T. aestivum L mRNA for histone H2B. | |
| 700345057H1 | g473602 | 64 | −59 | gb105pln | Zea mays W-22 histone H2A mRNA, complete cds. | |
| 700345019H1 | g496267 | 41 | −26 | gb105pln | Nicotiana tabacum GTP-binding protein (Ran-A1) mRNA, complete cds. | |
| 700379935H1 | g558366 | 73 | −74 | gb105pln | Z. mays CYP71C3 mRNA for cytochrome P-450. | |
| 700343381H1 | g1841307 | 11 | 17 | gb105pln | Fission Yeast mRNA for ribosomal protein S16 homolog, partial cds. | |
| 700346886H1 | g1841307 | 19 | 5 | gb105pln | Fission Yeast mRNA for ribosomal protein S16 homolog, partial cds. | |
| 700346584H1 | g2342688 | 23 | 1 | gb105eukp | F7G19.22 | |
| 700379995H1 | g695410 | 98 | −81 | gb105pln | Corn mRNA for glutamate dehydrogenase, complete cds. | |
| 700346682H1 | g2599103 | 21 | 2 | gb105pln | Dunaliella salina 60S ribosomal protein (DSRP1) mRNA, complete cds. | |
| 700342277H1 | g22322 | 21 | −35 | gb105pln | Z. mays mRNA for H2B histone (clone cH2B214). | |
| 700343927H1 | g984708 | 24 | −9 | gb105eukp | SPAC24H6.12c; unknown | |
| 700345614H1 | g19101 | 33 | −18 | gb105pln | H. vulgare mRNA for ribosomal protein L17-1. | |
| 700343915H1 | g1632831 | 11 | 3 | gb105allp | orf | |
| 700345093H1 | g2275007 | 76 | −69 | gb105pln | Hordeum vulgare mRNA for expressed sequence tag. | |
| 700346494H1 | g2342717 | 15 | 16 | gb105pln | Arabidopsis thaliana chromosome II BAC T14G11 genomic sequence, complete | |
| | | | | | sequence. | |
| 700346251H1 | g1149570 | 28 | −14 | gb105pln | A. thaliana mRNA for mitochondrial elongation factor Tu. | |
| 700343901H1 | g575730 | 81 | −78 | gb105pln | Z. mays mRNA for transmembrane protein. | |
| 700342389H1 | g170746 | 62 | −47 | gb105pln | Wheat histone H4 TH091 gene, complete cds. | |
| 700342789H1 | g22324 | 62 | −47 | gb105pln | Z. mays mRNA for H2B histone (clone cH2B221). | |
| 700344290H1 | g429021 | 49 | −51 | gb105pln | Rice mRNA for ribosomal protein S4 (gene name SS536), partial cds. | |
| 700345519H1 | g473985 | 45 | −34 | gb105pln | Rice mRNA, partial homologous to high mobility group protein gene. | |
| 700342379H1 | g290275 | 35 | −13 | gb105eukp | M(3)95A; multifunctional activity and location; ribosomal protein S3/AP endonuclease | |
| | | | | | DNA repair protein | |
| 700346145H1 | g487934 | 23 | −2 | gb105eukp | NAM8; Nam8p: Putative RNA binding proteins | |
| 700380796H1 | g780371 | 53 | −42 | gb105pln | Oryza sativa enolase mRNA, complete cds. | |
| 700281819H2 | g2088722 | 20 | −3 | gb105eukp | F53G12.10 | |
| 700342808H1 | g2529228 | 32 | −18 | gb105pln | Glycine max mRNA for 6-phosphogluconate dehydrogenase, complete cds. | |
| 700345469H1 | g2828287 | 9 | 6 | gb105eukp | T18B16.90; putative protein | |
| 700343627H1 | g303856 | 26 | 7 | gb105pln | Rice mRNA for ubiquitin protein fused to a ribosomal protein, complete cds. | |
| 700345645H1 | g461001 | 7 | 3 | gb105allp | NADPH-ferrihemoprotein reductase | |
| 700343207H1 | g1230639 | 12 | 6 | gb105eukp | YDR266C; Ydr266cp | |
| 700347264H1 | g2330705 | 7 | 6 | gb105eukp | SPAC16E8.17c; succinyl coA ligase | |
| 700343578H1 | g1518539 | 35 | −20 | gb105pln | Glycine max UDP-glucose dehydrogenase mRNA, complete cds. | |
| 700346916H1 | g1931639 | 17 | −1 | gb105eukp | T19D16.3; lysophospholipase isolog | |
| 700346303H1 | g2459406 | 21 | 3 | gb105pln | Arabidopsis thaliana chromosome II BAC F4P9 genomic sequence, complete sequence. | |
| 700345842H1 | g1931641 | 16 | 4 | gb105eukp | T19D16.5 | |
| 700380481H1 | g2623160 | 15 | 2 | gb105allp | N-acetylglucosamyl transferase component Gpi1 | |
| 700342961H1 | g2370511 | 21 | −8 | gb105eukp | SPAC2C6.14c; putative 40s ribosomal protein | |
| 700343483H1 | g1263302 | 51 | −8 | gb105eukp | pyruvate dehydrogenase E1 alpha subunit; EC 1.2.4.1 | |
| 700346257H1 | g507770 | 14 | 15 | gb105pln | Zea mays D3L H(+)-transporting ATPase (Mha1) gene, complete cds. | |
| 700281923H2 | g22322 | 15 | −42 | gb105pln | Z. mays mRNA for H2B histone (clone cH2B214). | |
| 700342668H1 | g19101 | 39 | −26 | gb105pln | H. vulgare mRNA for ribosomal protein L17-1. | |
| 700343828H1 | g1754992 | 65 | −51 | gb105pln | Triticum aestivum calmodulin TaCaM1-2 mRNA, complete cds. | |
| 700379825H1 | g473602 | 87 | −81 | gb105pln | Zea mays W-22 histone H2A mRNA, complete cds. | |
| 700281805H2 | g1906825 | 48 | −40 | gb105pln | A. thaliana hsp81.2 gene. | |
| 700342280H1 | g2668739 | 71 | −78 | gb105pln | Zea mays translation initiation factor GOS2 (TIF) mRNA, complete cds. | |
| 700345819H1 | g22483 | 35 | −31 | gb105pln | Z. mays RNA for superoxide dismutase Sod4. | |
| 700346896H1 | g169820 | 32 | −17 | gb105pln | Oryza sativa triosephosphate isomerase (Rictpi) mRNA, complete cds. | |
| 700345364H1 | g1129084 | 40 | −23 | gb105pln | Wheat mRNA for protein H2A, complete cds, clone wcH2A-3. | |
| 700347350H1 | g2599103 | 18 | 0 | gb105pln | Dunaliella salina 60S ribosomal protein (DSRP1) mRNA, complete cds. | |
| 700380047H1 | g763213 | 35 | −5 | gb105eukp | unknown | |
| 700379967H1 | g577824 | 35 | −42 | gb105pln | Z. mays gene for H2B histone (gH2B3). | |
| 700380121H1 | g473604 | 26 | −25 | gb105pln | Zea mays W-22 histone H2B mRNA, complete cds. | |
| 700347327H1 | g2702273 | 8 | 7 | gb105allp | carrot B2 protein-like | |
| 700344155H1 | g2244857 | 30 | −30 | gb105eukp | hypothetical protein | |
| 700346116H1 | g1125690 | 21 | −17 | gb105pln | S. tuberosum mRNA for DnaJ protein. | |
| 700346005H1 | g63064 | 28 | 3 | gb105allp | ribosomal protein P1 (AA 1-114) | |
| 700380557H1 | g166689 | 16 | −11 | gb105pln | A. thaliana 3-deoxy-D-arabino-heptulosonate 7-phosphate synthase (DHS2) mRNA, | |
| | | | | | complete cds. | |
| 700343365H1 | g534915 | 23 | −1 | gb105pln | S. tuberosum (Desiree) ppa mRNA for soluble inorganic pyrophosphatase. | |
| 700346391H1 | g460990 | 34 | −15 | gb105pln | O. sativa (Arborio) Beta Tubulin mRNA, clone OSTB-16. | |
| 700342479H1 | g818886 | 86 | −39 | gb105allp | KAP | |
| 700346734H1 | g459440 | 46 | −41 | gb105pln | F. pringlei modA mRNA. | |
| 700346694H1 | g2827143 | 97 | −0 | gb105eukp | Ath-B; cellulose synthase catalytic subunit | |
| 700347270H1 | g577732 | 15 | −22 | gb105pln | A. thaliana PRL1 gene. | |
| 700342419H1 | g1841869 | 21 | 0 | gb105pln | Pimpinella brachycarpa elongation factor 1-beta (EF-1-beta) mRNA, complete cds. | |
| 700347059H1 | g2462265 | 32 | −5 | gb105eukp | mobilization of fat during seed germination; patatin-like protein | |
| 700342989H1 | g1546918 | 78 | −79 | gb105pln | Z. mays mRNA for translation initiation factor 5A. | |
| 700344396H1 | g1196896 | 23 | 2 | gb105pln | Glycine max acidic ribosomal protein P0 mRNA, complete cds. | |
| 700347389H1 | g2160155 | 27 | −6 | gb105pln | Sequence of BAC F21M12 from Arabidopsis thaliana chromosome 1, complete | |
| | | | | | sequence. | |
| 700342490H1 | g21794 | 51 | −49 | gb105pln | Wheat histone H4 gene. | |
| 700380235H1 | g2708531 | 13 | 10 | gb105pln | Nicotiana tabacum putative RNA binding protein (QRRBP-1) mRNA, partial cds. | |
| 700345248H1 | g2746333 | 13 | 4 | gb105allp | RING zinc finger protein | |
| 700347034H1 | g1806139 | 41 | −27 | gb105pln | M. sativa mRNA for cdc2 kinase homologue, cdc2MsC. | |
| 700342610H1 | g1181330 | 50 | −33 | gb105pln | Z. mays CNX mRNA. | |
| 700343015H1 | g2353172 | 37 | −22 | gb105pln | Arabidopsis thaliana sigma factor 2 (SIG2) mRNA, nuclear gene encoding chloroplast | |
| | | | | | protein, complete cds. | |
| 700380070H1 | g2558943 | 46 | −4 | gb105pln | Gossypium hirsutum histone 3 mRNA, complete cds. | |
| 700342481H1 | g1463121 | 16 | −8 | gb105eukp | RPS3; ribosomal protein S3 | |
| 700343859H1 | g2829889 | 32 | −14 | gb105eukp | F3I6.29 | |
| 700342713H1 | g2408056 | 12 | 14 | gb105pln | Yeast (Saccharomyces pombe) chromosome I cosmid c2F3. | |
| 700344871H1 | g1045497 | 9 | 7 | gb105allp | conserved ATPase domain protein 44 | |
| 700345312H1 | g2465927 | 18 | −7 | gb105eukp | RKF3; receptor-like serine/threonine kinase | |
| 700380462H1 | g1129084 | 27 | −27 | gb105pln | Wheat mRNA for protein H2A, complete cds, clone wcH2A-3. | |
| 700281876H2 | g495263 | 21 | −14 | gb105eukp | sec61; sec61 protein | |
| 700343010H1 | g1336053 | 7 | 2 | gb105eukp | chymotrypsin-like protease precursor | |
| 700344512H1 | g2262155 | 15 | 11 | gb105pln | DNA sequence of Arabidopsis thaliana BAC F5J6 from chromosome IV, complete | |
| | | | | | sequence. | |
| 700347031H1 | g533251 | 96 | −42 | gb105pln | Zea mays (clone pSM8) sucrose synthase 2 (Sus1) gene, complete cds. | |
| 700346629H1 | g1208548 | 16 | 9 | gb105pln | Pseudosuga menziesii cysteine protease pseudotzain (PM33cysP) mRNA, complete cds. | |
| 700343240H1 | g292443 | 39 | −9 | gb105allp | ribosomal protein S20 | |
| 700379677H1 | g168490 | 59 | −60 | gb105pln | Maize glutathione S-transferase (GST-I) mRNA, complete cds. | |
| 700343243H1 | g2244950 | 14 | 15 | gb105pln | Arabidopsis thaliana DNA chromosome 4, ESSA I contig fragment No. 5. | |
| 700343512H1 | g852057 | 10 | 7 | gb105allp | casein kinase I-epsilon | |
| 700343880H1 | g218099 | 40 | 16 | gb105pln | Rice mRNA for ribosomal protein S12 (320 gene), partial sequence. | |
| 700345344H1 | g488576 | 17 | 1 | gb105pln | Medicago sativa Regen S clone pH3c131 histone H3.2 mRNA, complete cds. | |
| 700347227H1 | g452714 | 16 | −10 | gb105eukp | unknown | |
| 700347171H1 | g563245 | 16 | 5 | gb105eukp | RTS2; Rts2p | |
| 700346631H1 | g398326 | 33 | −21 | gb105pln | A. phyllitidis PABP mRNA for poly(A)-binding protein. | |
| 700345983H1 | g1185553 | 34 | −65 | gb105pln | Zea mays glyceraldehyde-3-phosphate dehydrogenase (gpc2) gene, complete cds. | |
| 700347118H1 | g886739 | 54 | −28 | gb105pln | Z. mays histone H4 gene. | |
| 700345273H1 | g2565339 | 41 | −28 | gb105pln | Lupinus luteus ribosomal protein S14 (rps14) mRNA, complete cds. | |
| 700344389H1 | g736308 | 8 | 1 | gb105eukp | unknown | |
| 700344742H1 | g22237 | 93 | −84 | gb105pln | Maize mRNA for cytosolic GAPDH (GapC) glyceraldehyde-3-phosphate dehydrogenase. | |
| 700344402H1 | g2244798 | 15 | −1 | gb105eukp | hypothetical protein | |
| 700343027H1 | g2245073 | 17 | 13 | gb105pln | Arabidopsis thaliana DNA chromosome 4, ESSA I contig fragment No. 8. | |
| 700344411H1 | g168602 | 22 | −40 | gb105pln | Zea mays regulatory protein GR14-12 mRNA, complete cds. | |
| 700345841H1 | g488198 | 17 | −0 | gb105eukp | ZC155.1 | |
| 700346386H1 | g1008175 | 18 | −1 | gb105eukp | ORF YJL045w | |
| 700346207H1 | g1742885 | 9 | 6 | gb105allp | Soribtol dehydrogenase (EC 1.1.1.14) (L-iditol 2-dehydrogenase). | |
| 700346033H1 | g2696030 | 30 | −14 | gb105eukp | PAP1; poly A polymerase | |
| 700342701H1 | g2464875 | 11 | 4 | gb105eukp | patatin homolog | |
| 700343263H1 | g1200160 | 29 | −19 | gb105pln | T. gesneriana mRNA for tonoplast intrinsic protein. | |
| 700343549H1 | g1842188 | 77 | 6 | gb105allp | mitochondrial phosphate translocator | |
| 700343992H1 | g473602 | 66 | −35 | gb105pln | Zea mays W-22 histone H2A mRNA, complete cds. | |
| 700344053H1 | g1370169 | 56 | −37 | gb105pln | L. japonicus mRNA for small GTP-binding protein, RAB1E. | |
| 700379938H1 | g474001 | 36 | −22 | gb105pln | Rice mRNA, partial homologous to ribosomal protein L38 gene. | |
| 700346436H1 | g896063 | 36 | 5 | gb105allp | PMS2 | |
| 700281996H2 | g1513228 | 12 | 5 | gb105eukp | myo-inositol 1-phosphate synthase | |
| 700344822H1 | g1841461 | 25 | −23 | gb105pln | N. tabacum mRNA for elongation factor 2. | |
| 700344810H1 | g1749509 | 22 | −3 | gb105pln | Fission Yeast mRNA, partial cds. | |
| 700347017H1 | g2407799 | 21 | −0 | gb105pln | Arabidopsis thaliana mRNA for histone H2A.F/Z. | |
| 700344856H1 | g2244842 | 17 | −6 | gb105eukp | hypothetical protein | |
| 700281971H1 | g498908 | 43 | 4 | gb105eukp | RPL34; ribosomal protein L34 homolog | |
| 700347309H1 | g313027 | 28 | −5 | gb105eukp | rp138; ribosomal protein L38 | |
| 700346242H1 | g960356 | 27 | −4 | gb105pln | Barley mRNA for S-adenosylmethionine synthetase, complete cds. | |
| 700347371H1 | g606969 | 26 | −7 | gb105pln | Arabidopsis thaliana cytoplasmic ribosomal protein L18 mRNA, complete cds. | |
| 700342456H1 | g2258073 | 35 | −39 | gb105pln | Hordeum vulgare var. distichum soluble inorganic pyrophosphatas (Ipp) mRNA, | |
| | | | | | complete cds. | |
| 700380075H1 | g473986 | 22 | −28 | gb105pln | Rice mRNA, partial homologous to histone H2B gene. | |
| 700342519H1 | g167109 | 61 | −53 | gb105pln | Hordeum vulgare vacuolar ATPase B subunit mRNA, complete cds. | |
| 700380044H1 | g2459446 | 13 | 3 | gb105allp | putative cinnamoyl-CoA reductase | |
| 700345308H1 | g2828283 | 13 | 7 | gb105allp | hypothetical protein | |
| 700345438H1 | g1399276 | 43 | −30 | gb105pln | Arabidopsis thaliana calmodulin-domain protein kinase CDPK isoform 7 (CPK7) mRNA, | |
| | | | | | complete cds. | |
| 700342607H1 | g338267 | 35 | −5 | gb105allp | small nuclear RNA protein (snRNP E) | |
| 700347241H1 | g493724 | 63 | −59 | gb105pln | O. sativa mRNA for beta-tubulin. | |
| 700344960H1 | g886739 | 82 | −72 | gb105pln | Z. mays histone H4 gene. | |
| 700379754H1 | g1419684 | 24 | 3 | gb105pln | M. sativa mRNA for TCTP-like protein. | |
| 700344703H1 | g29383 | 54 | 7 | gb105allp | BBC1 gene product | |
| 700346388H1 | g22430 | 20 | 7 | gb105pln | Maize pseudo-Gpa2 pseudogene for glyceraldehyde-3-phosphate dehydrogenase subunit A. | |
| 700342357H1 | g474000 | 64 | −47 | gb105pln | Rice mRNA, partial homologous to ribosomal protein L37a gene. | |
| 700344031H1 | g1498589 | 58 | 5 | gb105allp | 20S proteasome alpha subunit PSMA5 | |
| 700347121H1 | g747879 | 9 | 16 | gb105pln | Yeast (Saccharomyces cerevisiae) chromosome IV cosmid 9727. | |
| 700344932H1 | g547391 | 30 | −14 | gb105eukp | TRAP | |
| 700345023H1 | g2641233 | 17 | −2 | gb105eukp | ACT1; actin | |
| 700346776H1 | g2760839 | 17 | 1 | gb105eukp | F18A8.10; putative receptor kinase | |
| 700342996H1 | g1741868 | 20 | −6 | gb105allp | SDF2 | |
| 700380248H1 | g2274990 | 58 | −57 | gb105pln | Hordeum vulgare mRNA for expressed sequence tag. | |
| 700345540H1 | g2662346 | 61 | −48 | gb105pln | Oryza sativa mRNA for EF-1 alpha, complete cds. | |
| 700342494H1 | g1573716 | 12 | 3 | gb105allp | ATP-dependent clp protease proteolytic component (clpP) | |
| 700343648H1 | g1750404 | 28 | −6 | gb105eukp | B0412.4 | |
| 700345457H1 | g939780 | 20 | −13 | gb105pln | Zea mays MADS-box protein (ZAG5) mRNA, complete cds. | |
| 700347174H1 | g2429086 | 43 | −29 | gb105pln | Hordeum vulgare lipoxygenase 2 (LoxC) mRNA, complete cds. | |
| 700346944H1 | g793879 | 30 | −11 | gb105eukp | UBA2; Uba2 protein | |
| 700344412H1 | g2264302 | 12 | 14 | gb105pln | Arabidopsis thaliana genomic DNA, chromosome 5, P1 clone: MAC12, complete | |
| | | | | | sequence. | |
| 700380480H1 | g170784 | 33 | 0 | gb105pln | Wheat ubiquitin carrier protein (UBC1) mRNA, complete cds. | |
| 700347215H1 | g960291 | 23 | −16 | gb105eukp | anthranilate synthase alpha subunit | |
| 700344482H1 | g2766713 | 57 | −6 | gb105eukp | CMT1; chromomethylase | |
| 700346831H1 | g668984 | 27 | −5 | gb105pln | S. tuberosum TYKY1 mRNA for NADE:ubiquinone oxidoreductase. | |
| 700343608H1 | g2832667 | 26 | −6 | gb105pln | Arabidopsis thaliana DNA chromosome 4, BAC clone T10I14 (ESSAII project). | |
| 700342245H1 | g2293568 | 25 | −11 | gb105eukp | HvB12D homolog | |
| 700344058H1 | g183885 | 78 | −36 | gb105allp | gamma-globin | |
| 700346972H1 | g1419367 | 22 | −4 | gb105pln | Z. mays ZmABP2 mRNA for actin depolymerizing factor. | |
| 700343312H1 | g1572719 | 46 | −18 | gb105eukp | PAST-1 | |
| 700343065H1 | g777757 | 35 | −39 | gb105pln | Saccarum hybrid (clone SCUBI561) polyubiquitin mRNA, complete cds. | |
| 700344738H1 | g2213536 | 20 | −5 | gb105eukp | DNA-binding protein PD1 | |
| 700347133H1 | g2058280 | 51 | 0 | gb105eukp | atran3 | |
| 700344504H1 | g2645166 | 26 | −5 | gb105pln | Oryza sativa mRNA, similar to ubiquitin conjugating enzyme. | |
| 700379620H1 | g2351061 | 17 | −27 | gb105pln | Arabidopsis thaliana genomic DNA, chromosome 5, P1 clone: MAF19. | |
| 700342726H1 | g836954 | 10 | 1 | gb105allp | No definition line found | |
| 700344251H1 | g2213615 | 14 | 4 | gb105eukp | F21J9.9 | |
| 700379736H1 | g168500 | 16 | −13 | gb105pln | Maize (Zea mays) histone H4 gene (H4C14), complete cds. | |
| 700346567H1 | g2832595 | 14 | 1 | gb105allp | dJ434P1.2 | |
| 700342329H1 | g515359 | 18 | 1 | gb105pln | S. tuberosum pPOM36II mRNA for 36 kDa porinII. | |
| 700346079H1 | g927571 | 56 | −43 | gb105pln | Z. mays mRNA for calreticulin precursor. | |
| 700380256H1 | g1705482 | 17 | 1 | gb105eukp | F08B4.7 | |
| 700343631H1 | g456211 | 28 | −9 | gb105pln | S. tuberosum mRNA for 60S ribosomal protein L27. | |
| 700345415H1 | g218088 | 69 | −75 | gb105pln | Rice mRNA for ribosomal protein 117 (249 gene), partial sequence. | |
| 700343178H1 | g1082128 | 24 | −3 | gb105eukp | F45E6.3 | |
| 700343964H1 | g218176 | 13 | 15 | gb105pln | Rice mRNA for 21 kd polypeptide. | |
| 700344036H1 | g533251 | 74 | −30 | gb105pln | Zea mays (clone pSM8) sucrose synthase 2 (Sus1) gene, complete cds. | |
| 700345046H1 | g2688829 | 39 | −26 | gb105pln | Prunus armeniaca putative sugar transporter mRNA, complete cds. | |
| 700345632H1 | g463251 | 40 | −25 | gb105pln | M. sativa (Nagyszenasi) mRNA for ribosomal protein RL5. | |
| 700346429H1 | g2661839 | 21 | 3 | gb105pln | Physcomitrella patens mRNA for adenosine kinase. | |
| 700281884H2 | g717080 | 21 | 11 | gb105pln | Zea mays glyceraldehyde-3-phosphate dehydrogenase (GapC4) gene, promoter region. | |
| 700342910H1 | g1263468 | 13 | 3 | gb105eukp | F57A8.2 | |
| 700342979H1 | g2511596 | 14 | 8 | gb105eukp | prce; multicatalytic endopeptidase complex, proteasome precursor, beta subunit; | |
| | | | | | EC 3.4.99.46 | |
| 700346459H1 | g21794 | 53 | −50 | gb105pln | Wheat histone H4 gene. | |
| 700346437H1 | g20237 | 37 | −21 | gb105pln | O. sativa (rice) constitutive GOS2 gene. | |
| 700346387H1 | g2264309 | 15 | 14 | gb105pln | Arabidopsis thaliana genomic DNA, chromosome 5, P1 clone: MJJ3, complete sequence. | |
| 700347350H1 | g20163 | 40 | −29 | gb105pln | O. sativa Rr15 mRNA for 5S ribosomal RNA. | |
| 700343523H1 | g435679 | 36 | −11 | gb105eukp | ribosomal protein S25 | |
| 700342822H1 | g1262453 | 40 | −21 | gb105eukp | TpCCTeta; CCTeta | |
| 700344768H1 | g1149571 | 31 | −1 | gb105eukp | mitochondrial elongation factor Tu | |
| 700342789H1 | g577824 | 35 | −35 | gb105pln | Z. mays gene for H2B histone (gH2B3). | |
| 700342985H1 | g2529339 | 31 | −20 | gb105pln | Zea maize AGAMOUS homologue mRNA, complete cds. | |
| 700345118H1 | g624956 | 26 | −15 | gb105pln | C. reinhardtii mRNA for ribosomal protein S18. | |
| 700379869H1 | g2274990 | 72 | −68 | gb105pln | Hordeum vulgare mRNA for expressed sequence tag. | |
| 700345902H1 | g1136786 | 20 | −17 | gb105pln | Fission Yeast mRNA for elongation factor 1 alpha-C, complete cds. | |
| 700380756H1 | g485376 | 35 | −2 | gb105pln | Zea mays alpha-3-tubulin gene, complete cds. | |
| 700346694H1 | g2827139 | 82 | 2 | gb105eukp | RSW1; cellulos synthase catalytic subunit | |
| 700343245H1 | g927642 | 30 | −25 | gb105pln | Hordeum vulgare mRNA for betain aldehyde dehydrogenase, complete cds. | |
| 700345325H1 | g1568511 | 20 | −7 | gb105eukp | 65 kD regulatory subunit; protein phosphatase 2A | |
| 700379944H1 | g170455 | 63 | −54 | gb105pln | Tomato heat shock cognate protein 80 gene, 3′ end. | |
| 700344784H1 | g1248382 | 14 | 7 | gb105allp | subtilisin | |
| 700342952H1 | g1448967 | 16 | 0 | gb105allp | CROC-1B gene product | |
| 700344631H1 | g2196454 | 18 | −0 | gb105pln | Tobacco mRNA for A-type cyclin, complete cds. | |
| 700342526H1 | g2464904 | 27 | −4 | gb105eukp | X-Pro aminopeptidase homolog | |
| 700344625H1 | g606430 | 8 | 7 | gb105eukp | unknown | |
| 700344740H1 | g2529665 | 13 | −6 | gb105eukp | T30B22.8; putative ribosomal protein L7A | |
| 700345314H1 | g886739 | 47 | −70 | gb105pln | Z. mays histone H4 gene. | |
| 700380794H1 | g2264313 | 22 | −2 | gb105pln | Arabidopsis thaliana genomic DNA, chromosome 5, P1 clone: MOP10, complete | |
| | | | | | sequence. | |
| 700346689H1 | g603221 | 44 | −8 | gb105eukp | 6-phosphogluconate dehydrogenase | |
| 700347212H1 | g2435604 | 44 | −25 | gb105eukp | F08F1.7 | |
| 700380490H1 | g902524 | 31 | −23 | gb105pln | Zea mays clone MubG10 ubiquitin fusion protein gene, complete cds. | |
| 700343980H1 | g577824 | 40 | −43 | gb105pln | Z. mays gene for H2B histone (gH2B3). | |
| 700345113H1 | g1841421 | 17 | 2 | gb105eukp | S20 ribosomal protein | |
| 700342763H1 | g2618731 | 16 | 3 | gb105eukp | IAA21; IAA21 | |
| 700344952H1 | g21834 | 54 | −49 | gb105pln | Wheat mRNA for cytosolic phosphoglycerate kinase (EC 2.7.2.3). | |
| 700346512H1 | g1200039 | 9 | 7 | gb105eukp | F57C7.2 | |
| 700343258H1 | g1279640 | 7 | 5 | gb105eukp | NAM; apical meristem formation | |
| 700344336H1 | g170746 | 71 | −57 | gb105pln | Wheat histone H4 TH091 gene, complete cds. | |
| 700346985H1 | g168502 | 48 | −45 | gb105pln | Maize (Zea mays) histone H4 gene (H4C7), complete cds. | |
| 700343224H1 | g1931636 | 18 | −9 | gb105pln | Arabidopsis thaliana BAC T19D16 genomic sequence. | |
| 700281947H2 | g602605 | 35 | −48 | gb105pln | Zea mays Tandem genes for alpha1-tubulin and alpha2-tubulin. | |
| 700342639H1 | g17944 | 19 | −3 | gb105eukp | O-acetylserine (thiol)-lyase; EC 4.2.99.8 | |
| 700345250H1 | g21800 | 34 | −18 | gb105pln | T. aestivum L mRNA for histone H2B. | |
| 700344378H1 | g293888 | 70 | −81 | gb105pln | Zea mays, glyceraldehyde-3-phosphate dehydrogenase mRNA, 3′ end (clone GAPC2). | |
| 700343521H1 | g1513227 | 29 | −31 | gb105pln | Brassica napus myo-inositol 1-phosphate synthase mRNA, complete cds. | |
| 700345807H1 | g28519 | 32 | 2 | gb105allp | L apoferritin | |
| 700345511H1 | g601788 | 17 | 6 | gb105pln | Arabidopsis thaliana protein kinase (AFC2) mRNA, complete cds. | |
| 700380166H1 | g1816585 | 23 | −65 | gb105pln | Zea mays LON1 protease (LON1) mRNA, complete cds. | |
| 700343418H1 | g2341023 | 36 | −29 | gb105pln | Sequence of BAC F19P19 from Arabidopsis thaliana chromosome 1, complete sequence. | |
| 700343894H1 | g602605 | 71 | −42 | gb105pln | Zea mays tandem gene for alpha1-tubulin and alpha2-tubulin. | |
| 700347134H1 | g450292 | 51 | −55 | gb105pln | Zea mays alpha-tubulin mRNA, complete cds. | |
| 700345918H1 | g1620661 | 44 | −60 | gb105pln | Triticum aestivum 1,4-alpha-D-glucan 6-alpha-D-(1,4-alpha-D-glucanotransferase | |
| | | | | | mRNA, complete cds. | |
| 700347021H1 | g2827561 | 23 | 2 | gb105eukp | T12H17.230; predicted protein | |
| 700345905H1 | g436029 | 22 | −18 | gb105pln | Nicotiana tabacum (TSC40-3) 60S ribosomal protein L34 mRNA, complete cds. | |
| 700344205H1 | g2459406 | 26 | −16 | gb105pln | Arabidopsis thaliana chromosome II BAC F4P9 genomic sequence, complete sequence. | |
| 700345594H1 | g1184775 | 59 | −61 | gb105pln | Zea mays glyceraldehyde-3-phosphate dehydrogenase GAPC4 (gpc4) mRNA, | |
| | | | | | complete cds. | |
| 700281952H2 | g20250 | 41 | −41 | gb105pln | Oryza sativa H3 histone gene H3R-11. | |
| 700379889H1 | g974781 | 60 | −21 | gb105pln | C. blumei kinetoplast met gene for cobalamine-independent methionine synthase. | |
| 700343761H1 | g463856 | 30 | −15 | gb105pln | Chlamydomonas reinhardtii 21gr ribosomal protein S14 (CRY1) gene, complete cds. | |
| 700344745H1 | g396254 | 10 | −5 | gb105eukp | 40S ribosomal protein S5 | |
| 700346082H1 | g398921 | 43 | −32 | gb105pln | B. napus cold induced protein (BnC24B). | |
| 700344190H1 | g2078441 | 23 | −9 | gb105eukp | F52E4.7 | |
| 700346640H1 | g469248 | 25 | −11 | gb105eukp | ribosomal protein S3a | |
| 700342503H1 | g22340 | 66 | −72 | gb105pln | Maize gene for heat shock protein 70 exon 1 (hsp70; clone pMON 9502). | |
| 700346739H1 | g951334 | 9 | −3 | gb105eukp | LTP2; lipid transfer protein precursor | |
| 700343119H1 | g940151 | 24 | 6 | gb105allp | TAFII31 | |
| 700347158H1 | g166548 | 44 | −23 | gb105pln | Avena sativa vacuolar H+-ATPase 16 kDa proteolipid subunit (vatp-P1) mRNA, | |
| | | | | | complete cds. | |
| 700344247H1 | g1498383 | 48 | −40 | gb105pln | Zea mays actin (Maz89) gene, partial cds. | |
| 700342287H1 | g1334468 | 8 | −4 | gb105eukp | ATPase 6 (AA 1-229); Author-given protein sequence is in conflict with the conceptual | |
| | | | | | translation | |
| 700342392H1 | g862479 | 46 | −36 | gb105pln | Glycine max valosin-containing protein mRNA, complete cds. | |
| 700379677H1 | g168486 | 37 | −42 | gb105pln | Maize glutathione S-transferse gene (GST-I), exon 1. | |
| 700347309H1 | g2289009 | 31 | −6 | gb105eukp | T01O24.20; ribosomal protein L38 isolog | |
| 700347078H1 | g218082 | 39 | −10 | gb105pln | Rice mRNA for initiation factor eIF-4D (225 gene), partial sequence. | |
| 700346477H1 | g2642157 | 14 | 6 | gb105eukp | T5I7.5; ankyrin-like protein | |
| 700343608H1 | g602367 | 15 | 7 | gb105pln | Yeast (Saccharomyces cerevisiae) chromosome V cosmids 9871, 8199, 9867, 9495 and | |
| | | | | | lambda clones 6693 and 5898. | |
| 700345803H1 | g1236950 | 41 | −26 | gb105pln | Glycine max nucleoside diphosphate kinase mRNA, complete cds. | |
| 700347028H1 | g1814402 | 34 | −15 | gb105pln | Mesembryanthemum crystallinum methionine synthase (MetE) mRNA, complete cds. | |
| 700344607H1 | g508700 | 12 | −2 | gb105pln | Filobasidiella neoformans actin gene, complete cds. | |
| 700342460H1 | g1164925 | 16 | −6 | gb105pln | O. sativa matrix association region. | |
| 700342960H1 | g190336 | 58 | −44 | gb105allp | protease E precursor | |
| 700343160H1 | g1236960 | 10 | 16 | gb105pln | Prunus serotina prunasin hydrolase precursor mRNA, complete cds. | |
| 700346225H1 | g1016087 | 28 | −16 | gb105eukp | clpPI; ATP-dependent protease subunit; ClpP1 protease subunit | |
| 700344979H1 | g746415 | 10 | 4 | gb105allp | I kappa BR | |
| 700346876H1 | g1917018 | 38 | −57 | gb105pln | Zea mays ribosomal protein S6 RPS6-1 (rps6-1) mRNA, complete cds. | |
| 700346147H1 | g2565339 | 37 | −19 | gb105pln | Lupinus luteus ribosomal protein S14 (rps14) mRNA, complete cds. | |
| 700345874H1 | g1049306 | 39 | −11 | gb105pln | Arabidopsis thaliana actin-2 mRNA, complete cds. | |
| 700343667H1 | g2668737 | 23 | −44 | gb105pln | Zea mays translation initiation factor 5A (TIF5A) mRNA, complete cds. | |
| 700343458H1 | g6815 | 31 | −11 | gb105eukp | R08D7.3 | |
| 700344145H1 | g1399563 | 44 | −41 | gb105pln | Hydrastis canadensis nuclear 26S ribosomal RNA gene, partial sequence. | |
| 700347081H1 | g303854 | 65 | −52 | gb105pln | Rice mRNA for ribosomal protein L7A, complete cds. | |
| 700345651H1 | g2642152 | 18 | 0 | gb105pln | Arabidopsis thaliana chromosome II BAC T5I7 genomic sequence, complete sequence. | |
| 700343627H1 | g347063 | 25 | 9 | gb105pln | Brassica rapa ubiquitin/ribosomal protein mRNA, complete cds. | |
| 700379753H1 | g2262135 | 16 | 13 | gb105pln | Arabidopsis thaliana BAC T10P11, complete sequence. | |
| 700345689H1 | g1420870 | 20 | −6 | gb105pln | S. tuberosum mRAN for inorganic phosphate transporter, StPT1. | |
| 700343101H1 | g1766045 | 35 | −14 | gb105pln | Arabidopsis thaliana NAD+ dependent isocitrate dehydrogenase subunit 1 (IDH1) | |
| | | | | | mRNA, complete cds. | |
| 700343032H1 | g968901 | 47 | −42 | gb105pln | Rice mRNA for ribosomal protein S8, complete cds. | |
| 700346940H1 | g2317910 | 35 | −16 | gb105eukp | T7I23.10; CER1 protein | |
| 700346487H1 | g601790 | 28 | −10 | gb105pln | Arabidopsis thaliana protein kinase (AFC3) mRNA, partial cds. | |
| 700345783H1 | g2326410 | 4 | 8 | gb105eukp | 87B1.k | |
| 700346426H1 | g493587 | 11 | 6 | gb105eukp | PDI; catalyze the formation of disulfide bonds; disulfide isomerase; EC 5.3.4.1 | |
| 700344014H1 | g18046 | 66 | −2 | gb105eukp | Clkr27; beta-ketoacyl-ACP reductase; EC 1.1.1.100 | |
| 700342989H1 | g218082 | 51 | −38 | gb105pln | Rice mRNA for initiation factor eIF-4D (225 gene), partial sequence. | |
| 700344294H1 | g600709 | 33 | −24 | gb105pln | Arabidopsis thaliana synaptobrevin-related protein (SAR1) mRNA, complete cds. | |
| 700345424H1 | g22174 | 29 | −3 | gb105pln | Maize Aux311 gene for auxin-binding protein. | |
| 700344390H1 | g2695862 | 23 | −1 | gb105pln | Pisum sativum mRNA for 3-deoxy-D-manno-2-octulosonate-8-phosphate synthase, | |
| | | | | | clone pPS1A. | |
| 700346344H1 | g2239260 | 18 | −5 | gb105eukp | CCR; cinnamoyl CoA reductase | |
| 700344667H1 | g28549 | 75 | 3 | gb105allp | alpha globin | |
| 700344971H1 | g1737491 | 39 | −31 | gb105pln | Triticum aestivum poly(A)-binding protein (wheatpab) mRNA, complete cds. | |
| 700343447H1 | g790507 | 61 | −44 | gb105pln | Z. mays mRNA for 60S acidic ribosomal protein. | |
| 700344822H1 | g167244 | 22 | −23 | gb105pln | Chlorella kessleri elongation factor 2 mRNA, complete cds. | |
| 700346529H1 | g1129084 | 29 | −16 | gb105pln | Wheat mRNA for protein H2A, complete cds, clone wcH2A-3. | |
| 700342650H1 | g577611 | 95 | −51 | gb105pln | Zea mays CRT1 gene for calcium-binding protein. | |
| 700343736H1 | g683501 | 30 | −20 | gb105pln | A. thaliana mRNA for 65 kDa regulatory subunit of protein phosphatase 2A. | |
| 700344653H1 | g473602 | 95 | −34 | gb105pln | Zea mays W-22 histone H2A mRNA, complete cds. | |
| 700345321H1 | g303852 | 49 | −37 | gb105pln | Rice mRNA for ribosomal protein L3, complete cds. | |
| 700379735H1 | g167244 | 27 | −14 | gb105pln | Chlorella kessleri elongation factor 2 mRNA, complete cds. | |
| 700346241H1 | g1216484 | 38 | −24 | gb105eukp | ADK1; dual specificity kinase 1 | |
| 700343285H1 | g2257742 | 20 | −0 | gb105pln | Arabidopsis thaliana lysine-sensitive aspartate kinase mRNA, complete cds. | |
| 700343303H1 | g22324 | 68 | −57 | gb105pln | Z. mays mRNA for H2B histone (clone cH2B221). | |
| 700347186H1 | g1518156 | 40 | −23 | gb105pln | Glycine max RecA/Rad51/DMC1-like protein mRNA , complete cds. | |
| 700346248H1 | g2266661 | 36 | −17 | gb105pln | Hordeum vulgare mRNA for 14-3-3 protein (Hv1433c). | |
| 700345685H1 | g2262137 | 13 | 3 | gb105eukp | T10P11.3; sulfate transporter protein | |
| 700343584H1 | g927571 | 47 | −48 | gb105pln | Z. mays mRNA for calreticulin precursor. | |
| 700343558H1 | g499111 | 28 | −28 | gb105pln | Flaveria bidentis clone pNDK-b nucleoside diphosphate kinase mRNA, complete cds. | |
| 700347230H1 | g2645163 | 19 | 14 | gb105pln | Oryza sativa mRNA, similar to ribosomal protein L26. | |
| 700345475H1 | g606970 | 21 | −26 | gb105eukp | cytoplasmic ribosomal protein L18 | |
| 700343352H1 | g2827559 | 18 | −2 | gb105eukp | T12H17.210; predicted protein | |
| 700343380H1 | g2102693 | 23 | −6 | gb105eukp | Frk2; fructokinase; EC 2.7.1.4 | |
| 700345453H1 | g2464909 | 7 | 4 | gb105eukp | SCARECROW homolog | |
| 700344831H1 | g19699 | 35 | −9 | gb105eukp | NeIF-4A3; nicotiana eukaryotic translation initiation factor 4A | |
| 700380484H1 | g304109 | 16 | 7 | gb105eukp | PAB2; poly(A)-binding protein | |
| 700346249H1 | g2392895 | 10 | 2 | gb105eukp | BRI1; brassinosteroid insensitive 1 | |
| 700342555H1 | g386764 | 11 | −19 | gb105allp | hba2 alpha globin | |
| 700342927H1 | g2832642 | 13 | 4 | gb105eukp | F28J12.30; putative protein | |
| 700346123H1 | g2832681 | 34 | −4 | gb105eukp | T10T14.170; putative protein | |
| 700346817H1 | g534915 | 26 | −7 | gb105pln | S. tuberosum (Desiree) ppa mRNA for soluble inorganic pyrophosphatase. | |
| 700345676H1 | g1330253 | 43 | −2 | gb105pln | Zea mays calcium-dependent protein kinase mRNA, complete cds. | |
| 700343657H1 | g940450 | 16 | 4 | gb105allp | HISTONE H2A VARIANT | |
| 700343322H1 | g1244652 | 12 | −3 | gb105pln | Zea mays copia-type retroelement PREM-2 gag gene, complete cds. | |
| 700343809H1 | g1498389 | 41 | −52 | gb105pln | Zea mays actin (Maz81) gene, partial cds. | |
| 700343050H1 | g861323 | 22 | −12 | gb105eukp | T24H7.1 | |
| 700343656H1 | g2462748 | 25 | −16 | gb105eukp | F8A5.29; putative Clathrin Coat Assembly protein | |
| 700343889H1 | g435542 | 81 | −72 | gb105pln | Z. mays mRNA for calmodulin. | |
| 700344633H1 | g485952 | 56 | −45 | gb105pln | O. sativa mRNA for glutaredoxin. | |
| 700347382H1 | g644491 | 96 | −83 | gb105pln | Corn mRNA for elongation factor 1A. | |
| 700342746H1 | g1498052 | 89 | −80 | gb105pln | Zea mays ribosomal protein S8 mRNA, complete cds. | |
| 700343433H1 | g458426 | 13 | 1 | gb105eukp | dihydrolipoamide acetyltransferase | |
| 700343461H1 | g31062 | 16 | 6 | gb105allp | Epstein-Barr virus small RNA associated protein | |
| 700344443H1 | g16086 | 13 | 14 | gb105pln | A. porrum dnaJ mRNA for DNA J protein (partial). | |
| 700345511H1 | g642133 | 23 | −1 | gb105pln | Arabidopsis thaliana AME3 mRNA for protein kinase, complete cds. | |
| 700344544H1 | g397395 | 77 | −68 | gb105pln | Z. mays MNB1b mRNA for DNA-binding protein. | |
| 700345657H1 | g2668737 | 98 | −41 | gb105pln | Zea mays translation initiation factor 5A (TIF5A) mRNA, complete cds. | |
| 700345706H1 | g169977 | 15 | 6 | gb105allp | malate dehydrogenase | |
| 700343379H1 | g1498315 | 8 | 8 | gb105eukp | IAP100 | |
| 700343564H1 | g2465428 | 8 | −1 | gb105eukp | JRG1.2; 32 kDa protein | |
| 700344237H1 | g2564051 | 28 | −4 | gb105pln | Arabidopsis thaliana genomic DNA, chromosome 5, P1 clone: MWD9, complete | |
| | | | | | sequence. | |
| 700346924H1 | g2624327 | 24 | −3 | gb105pln | Oryza sativa mRNA for glycine rich RNA-binding protein 2 (OsGRF2). | |
| 700346226H1 | g1321660 | 18 | −39 | gb105pln | Rice mRNA for ascorbate peroxidase, complete cds. | |
| 700342260H1 | g1458245 | 11 | 1 | gb105eukp | F54D11.1 | |
| 700345483H1 | g2239260 | 15 | −0 | gb105eukp | CCR; cinnamoyl CoA reductase | |
| 700347048H1 | g1185555 | 41 | −14 | gb105pln | Zea mays glyceraldehyde-3-phosphate dehydrogenase (gpc4) gene, partial cds. | |
| 700344231H1 | g170746 | 49 | −40 | gb105pln | Wheat histone H4 TH091 gene, complete cds. | |
| 700344619H1 | g166606 | 16 | 4 | gb105eukp | anthranilate synthase alpha subunit | |
| 700380614H1 | g2662340 | 78 | −77 | gb105pln | Oryza sativa mRNA for EF-1 alpha, complete cds. | |
| 700379858H1 | g2506064 | 9 | 5 | gb105eukp | stil+ | |
| 700345784H1 | g1813915 | 8 | 7 | gb105eukp | F26E4.1 | |
| 700342828H1 | g463856 | 35 | −21 | gb105pln | Chlamydomonas reinhardtii 21 gr ribosomal protein S14 (CRY1) gene, complete cds. | |
| 700346992H1 | g166844 | 40 | −16 | gb105eukp | ribonucleoprotein | |
| 700342458H1 | g1142619 | 15 | 6 | gb105eukp | PG1; transcription factor; phaseolin G-box binding protein PG1 | |
| 700342409H1 | g22324 | 54 | −37 | gb105pln | Z. mays mRNA for H2B histone (clone cH2B221). | |
| 700342724H1 | g2245110 | 10 | 7 | gb105eukp | hypothetical protein | |
| 700347334H1 | g2286110 | 23 | −21 | gb105pln | Oryza sativa MADS box protein (OsMADS7) mRNA, complete cds. | |
| 700346064H1 | g1854579 | 10 | 5 | gb105allp | Int-6 | |
| 700345912H1 | g1850765 | 20 | −2 | gb105pln | Fission Yeast mRNA for ribosomal protein S23 homolog, partial cds. | |
| 700344884H1 | g2440191 | 17 | −10 | gb105eukp | hypothetical protein | |
| 700346340H1 | g2190272 | 22 | −2 | gb105allp | L-allo-threonine aldolase | |
| 700343126H1 | g1305524 | 10 | 15 | gb105pln | Oryza sativa Wilms' tumor-related protein QM mRNA, partial cds. | |
| 700344667H1 | g386765 | 75 | 3 | gb105allp | hba1 alpha globin | |
| 700342481H1 | g1302158 | 16 | −8 | gb105eukp | RPS3 | |
| 700346105H1 | g1323744 | 12 | −0 | gb105eukp | lipoxygenase | |
| 700345802H1 | g602605 | 12 | 4 | gb105pln | Zea mays tandem genes for alpha1-tubulin and alpha2-tubulin. | |
| 700343009H1 | g536891 | 29 | −42 | gb105pln | Wheat mRNA for protein H2A, complete cds, clone wcH2A-4. | |
| 700344868H1 | g168490 | 48 | −53 | gb105pln | Maize glutathione S-transferase (GST-I) mRNA, complete cds. | |
| 700343424H1 | g463856 | 27 | −35 | gb105pln | Chlamydomonas reinhardtii 21gr ribosomal protein S14 (CRY1) gene, complete cds. | |
| 700347118H1 | g170746 | 31 | −6 | gb105pln | Wheat histone H4 TH091 gene, complete cds. | |
| 700344119H1 | g829147 | 95 | −39 | gb105pln | Z. mays gene for cyclophilin. | |
| 700345121H1 | g17593 | 13 | −0 | gb105allp | THIOREDOXINE | |
| 700342447H1 | g2264318 | 29 | −8 | gb105pln | Arabidopsis thaliana genomic DNA, chromosome 5, P1 clone: MUP24, complete | |
| | | | | | sequence. | |
| 700342321H1 | g1870026 | 25 | −10 | gb105allp | histidine triad nucleotide-binding protein (HINT) | |
| 700342594H1 | g398848 | 98 | −84 | gb105pln | Z. mays mRNA for beta 5 tubulin. | |
| 700343418H1 | g218088 | 50 | −61 | gb105pln | Rice mRNA for ribosomal protein 117 (249 gene), partial sequence. | |
| 700347169H1 | g17797 | 22 | −7 | gb105eukp | Bplo | |
| 700346044H1 | g871507 | 34 | −18 | gb105pln | P. sativum mRNA for small GTP-binding protein (clone pGTP13). | |
| 700345963H1 | g2276349 | 25 | −5 | gb105pln | Yeast (Saccharomyces pombe) chromosome II cosmid c30D10. | |
| 700345847H1 | g1877169 | 37 | −16 | gb105eukp | W08E3.3 | |
| 700342403H1 | g396266 | 9 | 3 | gb105allp | orfX gene product | |
| 700379957H1 | g1420686 | 14 | −1 | gb105eukp | RPL18B | |
| 700380574H1 | g1054795 | 34 | −47 | gb105pln | H. vulgare mRNA for transmembrane protein. | |
| 700347055H1 | g939784 | 41 | −25 | gb105pln | Zea mays MADS-box protein (ZAP1) mRNA, complete cds. | |
| 700346591H1 | g2058311 | 15 | −7 | gb105eukp | CCR; cinnamoyl-CoA reductase; EC 1.2.1.44 | |
| 700380108H1 | g2673869 | 24 | −7 | gb105pln | Antirrhinum majus mRNA for fimbriata-associated protein 2, partial. | |
| 700380456H1 | g1814400 | 20 | −20 | gb105pln | Mesembryanthemum crystallinum phosphoglucomutase (PGM) mRNA, complete cds. | |
| 700379978H1 | g1839188 | 28 | −8 | gb105eukp | RHD3; putative GTP-binding protein; root hair defective 3 | |
| 700344335H1 | g21800 | 21 | −35 | gb105pln | T. aestivum L mRNA for histone H2B. | |
| 700380480H1 | g2689243 | 32 | 3 | gb105allp | ubiquitin conjugating enzyme | |
| 700344041H1 | g2245109 | 9 | −2 | gb105eukp | carboxyl-terminal proteinase homolog | |
| 700344721H1 | g19538 | 20 | −8 | gb105pln | M. crystallinum mRNA for ribosomal protein YL16. | |
| 700342455H1 | g2645166 | 30 | −11 | gb105pln | Oryza sativa mRNA, similar to ubiquitin conjugating enzyme. | |
| 700346381H1 | g166887 | 20 | −5 | gb105pln | Arabidopsis thaliana protein kinase (TMK1) gene, complete cds. | |
| 700346208H1 | g602330 | 13 | 17 | gb105pln | A. thaliana mRNA for O-acetylserine lyase (AT. OAS. 7-4). | |
| 700343567H1 | g2809480 | 22 | −11 | gb105pln | Oryza sativa calmodulin (CaM2) mRNA, complete cds. | |
| 700343846H1 | g968901 | 47 | −34 | gb105pln | Rice mRNA for ribosomal protein S8, complete cds. | |
| 700342411H1 | g1841940 | 18 | −10 | gb105eukp | SUM1 | |
| 700380557H1 | g169474 | 14 | −8 | gb105pln | S. tuberosum 3-deoxy-D-arabino-heptulosonate 7-phosphate synthase (aro1) mRNA, | |
| | | | | | complete cds. | |
| 700342308H1 | g1498337 | 56 | −49 | gb105pln | Glycine max actin (Soy119) gene, partial cds. | |
| 700380209H1 | g1816592 | 17 | 2 | gb105eukp | TCTP; translationally controlled tumor protein | |
| 700347190H1 | g2244945 | 21 | −5 | gb105eukp | similar to HYPOTHETICAL MYELOID CELL LINE PROTEIN 6 (FRAGMENT) | |
| 700347103H1 | g1498052 | 62 | −78 | gb105pln | Zea mays ribosomal protein S8 mRNA, complete cds. | |
| 700346917H1 | g172235 | 12 | 3 | gb105eukp | PR12 | |
| 700346734H1 | g1785859 | 46 | −42 | gb105pln | Flaveria linearis NADP-malic enzyme mRNA, partial cds. | |
| 700379941H1 | g218241 | 22 | −35 | gb105pln | Rice mRNA for ribosomal protein L3 (T82 gene), partial sequence. | |
| 700343291H1 | g872116 | 13 | 4 | gb105allp | sti (stress inducible protein) | |
| 700347019H1 | g974781 | 53 | −45 | gb105pln | C. blumei kinetoplast met gene for cobalamine-independent methionine synthase. | |
| 700379826H1 | g1145694 | 30 | −25 | gb105pln | Arabidopsis thaliana actin (ACT3) gene, complete cds. | |
| 700343384H1 | g264277 | 71 | −53 | gb105pln | auxin-binding protein [corn, mRNA, 795 nt]. | |
| 700344325H1 | g1574748 | 12 | 5 | gb105allp | tRNA pseudouridine 55 synthase (truB) | |
| 700281965H1 | g2852446 | 20 | −4 | gb105pln | Arabidopsis thaliana APK2a mRNA for protein kinase, complete cds. | |
| 700380188H1 | g2828186 | 20 | 2 | gb105pln | Arabidopsis thaliana genomic DNA, chromosome 5, TAC clone: K18I23, complete | |
| | | | | | sequence. | |
| 700344882H1 | g902583 | 72 | −69 | gb105pln | Zea mays clone MubG1 ubiquitin gene, complete cds. | |
| 700344065H1 | g209383 | 46 | −4 | gb105allp | MS-2 pol-stefin B fusion protein | |
| 700346988H1 | g1149474 | 11 | −1 | gb105eukp | F22B3.4 | |
| 700343010H1 | g2853182 | 7 | 3 | gb105eukp | Digestive; Trypsin; EC 3.4.21.4 | |
| 700346201H1 | g22302 | 32 | −73 | gb105pln | Maize Gpc1 gene for glyceraldehyde-3-phosphate dehydrogenase (GADPH) subunit C. | |
| 700343059H1 | g439585 | 50 | −37 | gb105pln | Hordeum vulgare calreticulin (CRH1) mRNA, partial cds. | |
| 700345575H1 | g2827887 | 40 | −30 | gb105pln | Arabidopsis thaliana ATP-dependent Clp protease proeolytic subunit (clpP) mRNA, | |
| | | | | | nuclear gene encoding chloroplast protein, complete cds. | |
| 700380779H1 | g166548 | 41 | −31 | gb105pln | Avena sativa vacuolar H+-ATPase 16 kDa proteolipid subunit (vatp-P1) mRNA, | |
| | | | | | complete cds. | |
| 700347084H1 | g473604 | 33 | −28 | gb105pln | Zea mays W-22 histone H2B mRNA, complete cds. | |
| 700346090H1 | g1435156 | 37 | −41 | gb105pln | L. esculentum mRNA for histone H3 variant H3.3. | |
| 700345364H1 | g1129085 | 42 | −26 | gb105pln | Wheat mRNA for protein H2A, complete cds, clone wcH2A-9. | |
| 700343005H1 | g168460 | 83 | −67 | gb105pln | Zea mays cyclophilin (CyP) mRNA, complete cds. | |
| 700344675H1 | g3046 | 15 | 1 | gb105eukp | NUO-40; 40 kD subunit of NADH dehydrogenase | |
| 700380280H1 | g2702371 | 8 | 1 | gb105eukp | B0546.4 | |
| 700379777H1 | g2286154 | 41 | −37 | gb105pln | Zea mays 6-phosphofructo-2-kinase/fructose-2,6-bisphosphatase mRNA, partial cds. | |
| 700343655H1 | g2414643 | 30 | −12 | gb105pln | Yeasts (Saccharomyces pombe) chromosome I cosmid c3H5. | |
| 700379991H1 | g2407799 | 45 | −30 | gb105pln | Arabidopsis thaliana mRNA for histone H2A.F/Z. | |
| 700347360H1 | g1262279 | 20 | −10 | gb105eukp | MDL3; catalyzes dissociation of (R)-mandelonitrile to hydrogen cyanide and | |
| | | | | | benzaldehyde; (R)-(+)-mandelonitrile lyase isoform MDL3 precursor; EC 4.1.2.10 | |
| 700347174H1 | g2182266 | 60 | −46 | gb105pln | Hordeum vulgare lipoxygenase (LoxB) mRNA, complete cds. | |
| 700342429H1 | g1022806 | 23 | −5 | gb105pln | Arabidopsis thaliana cellulase (OR16pep) mRNA, complete cds. | |
| 700343495H1 | g2266661 | 22 | −6 | gb105pln | Hordeum vulgare mRNA for 14-3-3 protein (Hv1433c). | |
| 700346082H1 | g398917 | 44 | −34 | gb105pln | B. napus cold induced protein (BnC24A) mRNA. | |
| 700345362H1 | g2264307 | 16 | 5 | gb105pln | Arabidopsis thaliana genomic DNA, chromosome 5, P1 clone: MED24, complete | |
| | | | | | sequence. | |
| 700346640H1 | g2792508 | 33 | −24 | gb105eukp | ribosomal protein S3a | |
| 700343980H1 | g21800 | 23 | −47 | gb105pln | T. aestivum L mRNA for histone H2B. | |
| 700345233H1 | g2414643 | 17 | −12 | gb105pln | Yeast (Saccharomyces pombe) chromosome I cosmid c3H5. | |
| 700379825H1 | g1322276 | 25 | −15 | gb105pln | Triticum aestivum histone H2A gene, complete cds. | |
| 700347201H1 | g2330866 | 8 | 5 | gb105eukp | SPAC6G10.02c; hypothetical protein | |
| 700343386H1 | g1789489 | 13 | 6 | gb105allp | hypothetical 37.4 kD protein in exuR-tdcC intergenic region | |
| 700345458H1 | g170746 | 59 | −43 | gb105pln | Wheat histone H4 TH091 gene, complete cds. | |
| 700343461H1 | g1213516 | 18 | 3 | gb105allp | ribosomal protein L22 | |
| 700343250H1 | g487315 | 21 | −13 | gb105pln | Rice mRNA EN520, partial sequence. | |
| 700344522H1 | g303834 | 33 | −30 | gb105pln | Rice mRNA for 21 kd polypeptide, complete cds. | |
| 700380235H1 | g2708532 | 15 | 5 | gb105allp | putative RNA binding protein | |
| 700343461H1 | g409074 | 16 | 6 | gb105allp | HBp15/L22 | |
| 700342656H1 | g313151 | 22 | −4 | gb105pln | A. thaliana ribosomal protein S15 mRNA, complete CDS. | |
| 700347125H1 | g1155264 | 65 | −58 | gb105pln | Pennisetum ciliare possible apospory-associated protein mRNA, complete cds. | |
| 700346666H1 | g602605 | 69 | −76 | gb105pln | Zea mays tandem genes for alpha1-tubulin and alpha2-tubulin. | |
| 700344087H1 | g2623294 | 20 | −4 | gb105pln | Arabidopsis thaliana chromosome II BAC T20B5 genomic sequence, complete sequence. | |
| 700380462H1 | g1129085 | 26 | −25 | gb105pln | Wheat mRNA for protein H2A, complete cds, clone wcH2A-9. | |
| 700344352H1 | g20255 | 57 | −57 | gb105pln | O. sativa gene for heat shock protein 82 HSP82. | |
| 700346916H1 | g2529663 | 18 | −2 | gb105eukp | T30B22.6; putative lysophospholipase | |
| 700346709H1 | g1944506 | 45 | −40 | gb105pln | Spinacia oleracea mRNA for thylakoid-bound ascorbate peroxidase, complete cds. | |
| 700345687H1 | g1289304 | 14 | −0 | gb105eukp | TCP20; Tcp20p | |
| 700380146H1 | g786228 | 9 | 8 | gb105eukp | tRNA-Gly | |
| 700346419H1 | g454881 | 15 | 1 | gb105pln | Rice gene for thioredoxin h, complete cds. | |
| 700346110H1 | g2073547 | 24 | −11 | gb105pln | Arabidopsis thaliana polyubiquitin (ubq4) gene, complete cds. | |
| 700346939H1 | g1777929 | 50 | −55 | gb105pln | Saccharum officinarum nucleoside diphosphate kinase (SoNDPK1) mRNA, | |
| | | | | | complete cds. | |
| 700345984H1 | g168500 | 75 | −17 | gb105pln | Maize (Zea mays) histone H4 gene (H4C14), complete cds. | |
| 700379870H1 | g1200153 | 27 | −14 | gb105pln | S. tuberosum mRNA for starch synthase. | |
| 700342564H1 | g387908 | 19 | 3 | gb105pln | Brassica rapa S-phase-specific (BIS289) mRNA, complete cds. | |
| 700342652H1 | g2264309 | 28 | −2 | gb105pln | Arabidopsis thaliana genomic DNA, chromosome 5, P1 clone: MJJ3, complete sequence. | |
| 700343201H1 | g2252839 | 26 | −12 | gb105eukp | A_IG005I10.19 | |
| 700343416H1 | g1841467 | 20 | −22 | gb105pln | N. tabacum mRNA for tyrosyl-tRNA synthetase. | |
| 700344238H1 | g22206 | 40 | −20 | gb105pln | Maize Ins1 insertion element upstream of bronze gene Bz-McC. | |
| 700342236H1 | g1066996 | 45 | −23 | gb105eukp | K03H1.2 | |
| 700343652H1 | g471089 | 28 | −9 | gb105eukp | ACA1; chloroplast envelope Ca2+-ATPase precursor | |
| 700346952H1 | g1235570 | 22 | −1 | gb105pln | P. anserina su12 gene. | |
| 700345704H1 | g1668705 | 34 | −36 | gb105pln | A. thaliana mRNA for AtRan2 protein. | |
| 700342701H1 | g2464876 | 11 | 1 | gb105allp | patatin homolog | |
| 700380613H1 | g577824 | 24 | −25 | gb105pln | Z. mays gene for H2B histone (gH2B3). | |
| 700346227H1 | g2213594 | 18 | −6 | gb105eukp | T7N9.14 | |
| 700342455H1 | g456567 | 30 | −9 | gb105pln | Pisum sativum ubiquitin conjugating enzyme (UBC4), complete cds. | |
| 700343531H1 | g1296954 | 38 | −31 | gb105pln | O. sativa mRNA for novel protein, osr40c1. | |
| 700346066H1 | g22681 | 42 | −31 | gb105pln | L. usitatissimum mRNA for Stearoyl-(acyl-carrier-protein)desaturase. | |
| 700345314H1 | g170746 | 41 | −40 | gb105pln | Wheat histone H4 TH091 gene, complete cds. | |
| 700379940H1 | g2282583 | 72 | −62 | gb105pln | Zea mays elongation factor 1-alpha (EF1-A) mRNA, complete cds. | |
| 700345415H1 | g310932 | 47 | −48 | gb105pln | Nicotiana tabacum ribosomal protein L17 mRNA, complete cds. | |
| 700347201H1 | g644882 | 7 | 8 | gb105allp | HCF | |
| 700342353H1 | g2464911 | 42 | −20 | gb105eukp | splicing factor homolog | |
| 700379811H1 | g2198852 | 35 | −82 | gb105pln | Zea mays cystathionine gamma-synthase (CGS1) gene, complete cds. | |
| 700347078H1 | g2668737 | 48 | −57 | gb105pln | Zea mays translation initiation factor 5A (TIF5A) mRNA, complete cds. | |
| 700345951H1 | g388206 | 51 | −18 | gb105pln | Lycopersicon esculentum ubiquitin carrier protein (Ubc) mRNA, complete cds. | |
| 700346893H1 | g1632830 | 23 | 9 | gb105pln | R. communis mRNA (unknown). | |
| 700344417H1 | g19572 | 24 | −3 | gb105pln | M. sativa C29 mRNA for SnRNP-related protein. | |
| 700380115H1 | g2665672 | 16 | −4 | gb105eukp | IOTA; proteasome IOTA subunit | |
| 700346920H1 | g4038 | 22 | −13 | gb105pln | Yeast (Saccharomyces cerevisiae) DNA for 38 kd nukleolar protein NOP1. | |
| 700380647H1 | g871985 | 67 | −57 | gb105pln | A. sativa Aspk11 mRNA. | |
| 700347107H1 | g391874 | 34 | −19 | gb105pln | Rice mRNA for 40S subunit ribosomal protein, complete cds. | |
| 700345885H1 | g218088 | 52 | −42 | gb105pln | Rice mRNA for ribosomal protein 117 (249 gene), partial sequence. | |
| 700344393H1 | g1145694 | 26 | −18 | gb105pln | Arabidopsis thaliana actin (ACT3) gene, complete cds. | |
| 700345072H1 | g2827080 | 9 | 7 | gb105eukp | mmdh; malate dehydrogenase precursor; EC 1.1.1.37 | |
| 700343122H1 | g248336 | 73 | −57 | gb105pln | polyubiquitin [maize, Genomic, 3841 nt]. | |
| 700380781H1 | g22324 | 33 | −50 | gb105pln | Z. mays mRNA for H2B histone (clone cH2B221). | |
| 700379927H1 | g166857 | 41 | −29 | gb105pln | Arabidopsis thaliana cytoplasmic ribosomal protein mRNA, complete cds. | |
| 700379637H1 | g2673867 | 28 | −9 | gb105pln | Antirrhinum majus mRNA for fimbriate-associated protein 1, partial. | |
| 700281992H2 | g2696803 | 20 | −33 | gb105pln | Oryza sativa mRNA for water channel protein, complete cds. | |
| 700380074H1 | g498772 | 45 | −45 | gb105pln | Z. mays (cv DH5xDH7) hsp70-4 mRNA for heat shock protein 70. | |
| 700379877H1 | g1397319 | 15 | 0 | gb105eukp | R08C7.2 | |
| 700343417H1 | g1053092 | 16 | 9 | gb105pln | Arabidopsis thaliana pre zeta-carotene desaturase precursor (zds) mRNA, | |
| | | | | | completecds. | |
| 700344091H1 | g556685 | 33 | −13 | gb105pln | Z. mays mRNA for ADP-ribosylation factor. | |
| 700345951H1 | g441456 | 51 | −18 | gb105pln | L. esculentum mRNA for ubiquitin conjugating enzyme E2. | |
| 700345605H1 | g8040 | 23 | −3 | gb105eukp | histone H2A variant (AA 1-141) | |
| 700345475H1 | g1550725 | 14 | −14 | gb105eukp | ribosomal protein L18 | |
| 700345620H1 | g467751 | 5 | 6 | gb105allp | 2-phosphoglycerate kinase | |
| 700346859H1 | g1015849 | 14 | −2 | gb105eukp | RPS5 | |
| 700347223H1 | g2660661 | 13 | 15 | gb105pln | Arabidopsis thaliana BAC T19K24 genomic sequence, complete sequence. | |
| 700342379H1 | g1055070 | 37 | −17 | gb105eukp | C23G10.3 | |
| 700281918H2 | g576505 | 16 | 3 | gb105eukp | IAP34; component of chloroplast outer membrane protein import apparatus; GTP-binding | |
| | | | | | protein | |
| 700346456H1 | g169818 | 18 | 14 | gb105pln | Rice 25S ribosomal RNA gene. | |
| 700345819H1 | g22484 | 42 | −31 | gb105pln | Z. mays RNA for superoxide dismutase Sod4A. | |
| 700345524H1 | g520543 | 46 | −45 | gb105pln | Sorghum bicolor clone BADH1 betaine aldehyde dehydrogenase mRNA, partial cds. | |
| 700343843H1 | g1495339 | 31 | −12 | gb105eukp | F26A3.3 | |
| 700380076H1 | g2351580 | 50 | −3 | gb105eukp | thymidine diphospho-glucose 4-6-dehydratase homolog | |
| 700379964H1 | g2558668 | 22 | 8 | gb105allp | eukaryotic translation initiation factor | |
| 700344509H1 | g500850 | 54 | −42 | gb105pln | Zea mays (clone pAKHSDH1) aspartate kinase-homoserine dehydrogenase mRNA, | |
| | | | | | complete cds. | |
| 700344755H1 | g21800 | 35 | −54 | gb105pln | T. aestivum L mRNA for histone H2B. | |
| 700281881H2 | g1617206 | 26 | −1 | CP12 | | |
| 700343909H1 | g1125690 | 30 | −14 | gb105pln | S. tuberosum mRNA for DnaJ protein. | |
| 700346373H1 | g1890574 | 24 | −25 | gb105pln | H. vulgare mRNA for xyloglucan endotransglycosylase-like protein (XEA). | |
| 700346145H1 | g2708532 | 22 | −3 | gb105eukp | QRRBP-1; putative RNA binding protein | |
| 700344482H1 | g2766714 | 31 | 2 | gb105pln | Arabidopsis arenosa isolate Care-1 (9509) chromomethylase (CMT1) mRNA, partial cds. | |
| 700346619H1 | g2505873 | 22 | −0 | gb105pln | Arabidopsis thaliana DNA, 40 kb surrounding ACS1 locus. | |
| 700342573H1 | g1514583 | 53 | −37 | gb105allp | immunoglobulin kappa light chain | |
| 700343656H1 | g451888 | 16 | −10 | gb105eukp | | |
| 700344177H1 | g2827714 | 8 | 4 | gb105allp | receptor protein kinase-like protein | |
| 700344971H1 | g2213870 | 23 | −3 | gb105pln | Mesembryanthemum crystallinum poly(A)-binding protein mRNA, partial cds. | |
| 700346226H1 | g2274983 | 16 | −35 | gb105pln | Hordeum vulgare mRNA for expressed sequence tag. | |
| 700345581H1 | g416256 | 22 | −18 | gb105pln | Rice mRNA for H+-ATPase, partial sequence. | |
| 700379827H1 | g535587 | 52 | −48 | gb105pln | Arabidopsis thaliana chaperone protein (atj) mRNA, complete cds. | |
| 700344409H1 | g1498052 | 34 | −52 | gb105pln | Zea mays ribosomal protein S8 mRNA, complete cds. | |
| 700347105H1 | g2244837 | 34 | −8 | gb105eukp | proteasome chain protein | |
| 700343409H1 | g19698 | 53 | −45 | gb105pln | N. plubaginifolia NeIF-4A3 mRNA for nicotiana eukaryotic translation initiation factor | |
| | | | | | 4A. | |
| 700344766H1 | g1911237 | 34 | −17 | gb105allp | G protein signaling regulator RGS2 | |
| 700345906H1 | g2792216 | 9 | 5 | gb105eukp | b8; NBS-LRR type resistance protein | |
| 700344038H1 | g57117 | 20 | 5 | gb105allp | ribosomal protein L32 | |
| 700345535H1 | g1082107 | 8 | 6 | gb105eukp | F17E5.2 | |
| 700342788H1 | g246 | 9 | 1 | gb105allp | NADH dehydrogenase | |
| 700344004H1 | g2642214 | 34 | 5 | gb105pln | Arabidopsis thaliana NOI protein mRNA, complete cds. | |
| 700344868H1 | g168486 | 35 | −42 | gb105pln | Maize glutathione S-transferase gene (GST-I), exon 1. | |
| 700343950H1 | g552061 | 20 | 4 | gb105eukp | actin | |
| 700344322H1 | g166409 | 16 | 9 | gb105pln | Alfalfa nucleic acid binding protein (alfin-1) mRNA, partial cds. | |
| 700345779H1 | g1015699 | 6 | 7 | gb105allp | ORF YJR044c | |
| 700343491H1 | g602605 | 44 | 13 | gb105pln | Zea mays tandem genes for alpha1-tubulin and alpha2-tubulin. | |
| 700343391H1 | g21624 | 40 | −24 | gb105pln | S. vulgare mRNA for glycine-rich RNA-binding protein (clone S2). | |
| 700342691H1 | g168490 | 93 | −78 | gb105pln | Maize glutathione S-transferase (GST-I) mRNA, complete cds. | |
| 700344278H1 | g22483 | 57 | −57 | gb105pln | Z. mays RNA for superoxide dismutase Sod4. | |
| 700380714H1 | g1322276 | 24 | −5 | gb105pln | Triticum aestivum histone H2A gene, complete cds. | |
| 700347383H1 | g1388076 | 21 | −2 | gb105eukp | TRX3; thioredoxin h | |
| 700344496H1 | g1469041 | 10 | 5 | gb105eukp | F23B12.5 | |
| 700345009H1 | g939784 | 40 | −24 | gb105pln | Zea mays MADS-box protein (ZAP1) mRNA, complete cds. | |
| 700344734H1 | g1209700 | 70 | −72 | gb105pln | Zea mays ribosomal protein L12 mRNA, complete cds. | |
| 700345174H1 | g2632254 | 12 | 2 | gb105eukp | SNFL2; serine/threonine kinase | |
| 700281821H2 | g248338 | 80 | −77 | gb105pln | polyubiquitin [maize, Genomic, 3439 nt]. | |
| 700343687H1 | g17958 | 34 | −18 | gb105pln | C. cardunculus cypro4 mRNA. | |
| 700344173H1 | g1184771 | 80 | −73 | gb105pln | Zea mays glyceraldehyde-3-phosphate dehydrogenase GAPC2 (gpc2) mRNA, | |
| | | | | | complete cds. | |
| 700380480H1 | g170785 | 33 | 3 | gb105eukp | UBC1; ubiquitin carrier protein | |
| 700346487H1 | g642131 | 19 | 3 | gb105pln | Arabidopsis thaliana AME2 mRNA for protein kinase, complete cds. | |
| 700345761H1 | g1706955 | 48 | −14 | gb105pln | Gossypium hirsutum cellulose synthase (celA1) mRNA, complete cds. | |
| 700342580H1 | g22328 | 50 | −33 | gb105pln | Maize mRNA for a high mobility group protein. | |
| 700346571H1 | g410285 | 26 | −11 | gb105pln | Pisum sativum rho (ras-related) GTP-binding protein mRNA, complete cds. | |
| 700346414H1 | g984964 | 7 | 4 | gb105eukp | SIK1; suppressor of toxicity of GAL4-IKB; Sik1p | |
| 700343641H1 | g168462 | 13 | 12 | gb105pln | Zea mays defective suppressor-mutator from the brittle-1-mutable allele. | |
| 700346440H1 | g2459406 | 35 | −37 | gb105pln | Arabidopsis thaliana chromosome II BAC F4P9 genomic sequence, complete sequence. | |
| 700346956H1 | g2737925 | 19 | 4 | gb105pln | Arabidopsis thaliana fimbrin-like protein AtFim2 mRNA, partial cds. | |
| 700343156H1 | g219929 | 8 | 7 | gb105allp | midkine | |
| 700343239H1 | g2191168 | 12 | 1 | gb105eukp | A_IG002P16.20 | |
| 700346045H1 | g1167857 | 21 | −29 | gb105pln | S. cereale cv. Petkus ‘Halo’ encoding cpn60. | |
| 700345275H1 | g602605 | 35 | −45 | gb105pln | Zea mays tandem genes for alpha-tubulin and alpha2-tubulin. | |
| 700342657H1 | g1236731 | 35 | 0 | gb105allp | prolyl aminopeptidase | |
| 700343119H1 | g882393 | 24 | 6 | gb105allp | TBP-associated factor TAFII31 | |
| 700281925H1 | g166410 | 36 | −10 | gb105eukp | nucleic acid binding protein; Alfin-1 | |
| 700343631H1 | g224829 | 27 | −8 | gb105pln | Arabidopsis thaliana DNA chromosome 4, ESSA I contig fragment No. 2. | |
| 700345072H1 | g473206 | 8 | 3 | gb105allp | mitochondrial malate dehydrogenase | |
| 700345889H1 | g2662342 | 70 | −55 | gb105pln | Oryza sativa mRNA for EF-1 alpha, complete cds. | |
| 700346710H1 | g2264311 | 12 | 15 | gb105pln | Arabidopsis thaliana genomic DNA, chromosome 5, P1 clone: MLN1, complete | |
| | | | | | sequence. | |
| 700344044H1 | g416554 | 40 | −5 | gb105allp | ribosomal protein L18a (AA 1-175) | |
| 700380653H1 | g886739 | 46 | −35 | gb105pln | Z. mays histone H4 gene. | |
| 700343156H1 | g188571 | 8 | 7 | gb105allp | retinoic acid inducible factor | |
| 700380647H1 | g508307 | 38 | −26 | gb105pln | Arabidopsis thaliana protein-serine kinase mRNA, complete cds. | |
| 700346836H1 | g575959 | 92 | −76 | gb105pln | Z. mays (Black Mexican Sweet) mRNA for 1-acyl-glycerol-3-phosphate acyltransferase | |
| | | | | | (putative). | |
| 700342453H1 | g166816 | 43 | −35 | gb105pln | Arabidopsis thaliana protein kinase mRNA, complete cds. | |
| 700343120H1 | g2246624 | 28 | −1 | gb105pln | Oryza sativa protein kinase mRNA, complete cds. | |
| 700344325H1 | g2367200 | 9 | 5 | gb105allp | tRNA pseudouridine 55 synthase (psi55 synthase) (p35 protein) | |
| 700344953H1 | g2244829 | 19 | 4 | gb105pln | Arabidopsis thaliana DNA chromosome 4, ESSA I contig fragment No. 2. | |
| 700343079H1 | g2150046 | 9 | 7 | gb105allp | 26S proteasome subunit 9 | |
| 700346465H1 | g1147800 | 44 | −25 | gb105eukp | SUG2; Sug2p | |
| 700344192H1 | g2078349 | 41 | −29 | gb105pln | Solanum tuberosum transaldolase (PotTall) mRNA, complete cds. | |
| 700345752H1 | g2088638 | 20 | −3 | gb105pln | Arabidopsis thaliana chromosome II BAC T28M21 genomic sequence, complete | |
| | | | | | sequence. | |
| 700379965H1 | g498774 | 78 | −43 | gb105pln | Z. mays (cv DH5xDH7) hsp70-5 mRNA for heat shock protein 70. | |
| 700343453H1 | g1053058 | 34 | −32 | gb105pln | Triticum aestivum histone H3 gene, partial cds, clone W2. | |
| 700342378H1 | g168494 | 52 | −34 | gb105pln | Maize (Zea mays) histone H3 gene (H3C2), complete cds. | |
| 700344747H1 | g303855 | 16 | −1 | gb105eukp | ribosomal protein L7A | |
| 700343110H1 | g602367 | 13 | 15 | gb105pln | Yeast (Saccharomyces cerevisiae) chromosome V cosmids 9871, 8199, 9867, 9495 and | |
| | | | | | lambda clones 6693 and 5898. | |
| 700344856H1 | g2244839 | 17 | −8 | gb105eukp | hypothetical protein | |
| 700347371H1 | g2529657 | 13 | 16 | gb105pln | Arabidopsis thaliana chromosome II BAC T30B22 genomic sequence, complete | |
| | | | | | sequence. | |
| 700344026H1 | g167961 | 65 | −58 | gb105pln | D. caryophyllus S-adenosylmethionine synthetase (CARSAM2) mRNA, complete cds. | |
| 700342490H1 | g168498 | 76 | −79 | gb105pln | Corn histone H4 (H4C13) gene, complete cds. | |
| 700379947H1 | g2191193 | 14 | 1 | gb105eukp | A_TM021B04.8 | |
| 700343934H1 | g473604 | 79 | −63 | gb105pln | Zea mays W-22 histone H2B mRNA, complete cds. | |
| 700345085H1 | g310314 | 75 | −68 | gb105pln | Oryza sativa calmodulin gene, complete cds. | |
| 700342734H1 | g432367 | 44 | −38 | gb105pln | Rice mRNA for elongation factor 1 beta, complete cds. | |
| 700343582H1 | g166866 | 18 | 3 | gb105pln | A. thaliana ribosomal protein S11 mRNA, 3′ end. | |
| 700347341H1 | g633599 | 27 | −6 | gb105pln | N. tabacum (SR1) aox mRNA. | |
| 700342305H1 | g1929409 | 34 | −17 | gb105pln | N. tabacum npp4 mRNA for protein phosphatase Type 2A. | |
| 700344260H1 | g416251 | 23 | −8 | gb105pln | Rice mRNA for acetohydroxy acid reductoisomerase, partial sequence. | |
| 700343104H1 | g433492 | 19 | −5 | gb105allp | HLA-3 | |
| 700343514H1 | g600709 | 16 | 2 | gb105pln | Arabidopsis thaliana synaptobrevin-related protein (SAR1) mRNA, complete cds. | |
| 700380655H1 | g1296954 | 27 | −52 | gb105pln | O. sativa mRNA for novel protein, osr40c1. | |
| 700345549H1 | g485376 | 46 | −32 | gb105pln | Zea mays alpha-3-tubulin gene, complete cds. | |
| 700281817H2 | g1049197 | 8 | 2 | gb105allp | RecA | |
| 700343725H1 | g2388937 | 37 | −9 | gb105eukp | SPAC23H4.18c; hypothetical protein | |
| 700344689H1 | g443591 | 34 | 4 | gb105eukp | rp119; bind calmodulin; ribosomal protein; v14 gene | |
| 700345008H1 | g2262141 | 18 | −5 | gb105eukp | T10P11.8; hypothetical protein | |
| 700345561H1 | g1321660 | 37 | −35 | gb105pln | Rice mRNA for ascorbate peroxidase, complete cds. | |
| 700345416H1 | g798817 | 37 | −29 | gb105pln | A. thaliana mRNA for ribosomal protein L2. | |
| 700344814H1 | g1103391 | 31 | −14 | gb105eukp | GCTK; signal transduction; Sponge Receptor tyrosine kinase; EC 2.7.1.112 | |
| 700344968H1 | g21634 | 13 | 5 | gb105pln | T. aestivum 1b-c38 gene for HBP-1b (leucine zipper type transcription factor). | |
| 700346731H1 | g2293565 | 82 | −78 | gb105pln | Oryza sativa ADP-ribosylation factor 1 (Os-ARF1) mRNA, complete cds. | |
| 700342989H1 | g2668737 | 65 | −55 | gb105pln | Zea mays translation initiation factor 5A (TIF5A) mRNA, complete cds. | |
| 700344253H1 | g1706957 | 24 | −7 | gb105pln | Gossypium hirsutum cellulose synthase (celA2) mRNA, partial cds. | |
| 700281870H2 | g1418318 | 35 | −29 | gb105pln | A. thaliana CER1-like gene (1992bp). | |
| 700379679H1 | g398607 | 26 | −21 | gb105pln | A. thaliana mRNA for elongation factor 1 beta. | |
| 700342785H1 | g18057 | 39 | 11 | gb105pln | Citrus limon 26S ribosomal RNA gene 3′ region. | |
| 700344808H1 | g2642212 | 14 | 2 | gb105pln | Zea mays nitrate-induced NOI protein gene, complete cds. | |
| 700345865H1 | g13339 | 30 | −11 | gb105pln | P. hybrida mitochondrial rps19 gene for ribosomal protein S19. | |
| 700346080H1 | g1055087 | 11 | −4 | gb105eukp | W06B11.2 | |
| 700346108H1 | g945086 | 30 | −12 | gb105pln | Glycine max transcription factor TFIIB mRNA, complete cds. | |
| 700343083H1 | g1212995 | 21 | −23 | gb105pln | H. vulgare mRNA for UDP-glucose pyrophosphorylase. | |
| 700380456H1 | g1881692 | 41 | −68 | gb105pln | Zea mays phosphoglucomutase mRNA, partial cds. | |
| 700342573H1 | g1514579 | 54 | −37 | gb105allp | immunoglobulin kappa light chain | |
| 700345093H1 | g1929405 | 57 | −48 | gb105pln | N. tabacum npp2 mRNA for protein phosphatase type 1. | |
| 700346255H1 | g2702261 | 16 | 6 | gb105pln | Arabidopsis thaliana chromosome II BAC T21L14 genomic sequence, complete | |
| | | | | | sequence. | |
| 700346917H1 | g486060 | 12 | 3 | gb105eukp | PRI2 | |
| 700343138H1 | g1072389 | 16 | 0 | gb105pln | N. tabacum mRNA for cyclin A-like protein (clone 13). | |
| 700345595H1 | g1747418 | 89 | −1 | gb105pln | Z. mays mRNA for eukaryotic initiation factor-5. | |
| 700344691H1 | g434344 | 29 | −14 | gb105pln | A. thaliana (Columbia) mRNA for S18 ribosomal protein (641bp). | |
| 700346762H1 | g1881694 | 86 | −77 | gb105pln | Zea mays phosphoglucomutase mRNA, partial cds. | |
| 700342229H1 | g998429 | 47 | −60 | gb105pln | GRF1 = general regulatory factor [Zea mays, XL80, Genomic, 5348 nt]. | |
| 700346927H1 | g459009 | 27 | −2 | gb105eukp | T20H4.3 | |
| 700343258H1 | g1944132 | 8 | 5 | gb105allp | CUC2 | |
| 700343418H1 | g310932 | 38 | −27 | gb105pln | Nicotiana tabacum ribosomal protein L17 mRNA, complete cds. | |
| 700380763H1 | g497119 | 31 | −23 | gb105pln | Pisum sativum monodehydroascorbate reductase mRNA, complete cds. | |
| 700344292H1 | g404165 | 33 | −14 | gb105pln | A. thaliana gene for BBC1 protein. | |
| 700380794H1 | g166409 | 30 | −18 | gb105pln | Alfalfa nucleic acid binding protein (alfin-1) mRNA, partial cds. | |
| 700346529H1 | g1129085 | 28 | −14 | gb105pln | Wheat mRNA for protein H2A, complete cds, clone wcH2A-9. | |
| 700344738H1 | g2459442 | 22 | −3 | gb104eukp | F4P9.39; putative DNA-binding protein PD1 | |
| 700281909H2 | g166410 | 9 | 3 | gb105eukp | nucleic acid binding protein; Alfin-1 | |
| 700343331H1 | g1402878 | 15 | 1 | gb105eukp | orf4; unknown | |
| 700347171H1 | g2104889 | 16 | 5 | gb105eukp | YOR29-28 | |
| 700347125H1 | g2317873 | 45 | −38 | gb105pln | Prunus armeniaca Rab7 GTP binding protein mRNA, complete cds. | |
| 700345736H1 | g166859 | 35 | −38 | gb105pln | Arabidopsis thaliana ribosomal protein gene, complete cds. | |
| 700345480H1 | g2182285 | 14 | 6 | gb105pln | Sequence of bAC F5I14 from Arabidopsis thaliana chromosome 1, complete sequence. | |
| 700345768H1 | g2463568 | 19 | 6 | gb105pln | Glycine max mRNA for squalene synthase, complete cds. | |
| 700343892H1 | g168500 | 54 | −42 | gb105pln | Maize (Zea mays) histone H4 gene (H4C14), complete cds. | |
| 700380786H1 | g310934 | 12 | 17 | gb105pln | Nicotiana tabacum ribosomal protein L25, complete cds. | |
| 700346378H1 | g642243 | 22 | −11 | gb105pln | H. vulgare cdr29 gene. | |
| 700281804H2 | g557681 | 55 | −46 | gb105pln | Z. mays mRNA for ribosomal protein S28. | |
| 700346389H1 | g2656030 | 20 | 7 | gb105pln | Arabidopsis thaliana genomic DNA, chromosome 5, P1 clone: MUL8. | |
| 700346351H1 | g895693 | 11 | 6 | gb105eukp | ribosomal protein S15a | |
| 700347257H1 | g1519250 | 62 | −53 | gb105pln | Oryza sativa GF14-c protein mRNA, complete cds. | |
| 700346427H1 | g2749918 | 12 | 15 | gb105pln | Arabidopsis thaliana chromosome I BAC F3I6 genomic sequence, complete sequence. | |
| 700345145H1 | g2696018 | 22 | −1 | gb105pln | Arabidopsis thaliana genomic DNA, chromosome 5, P1 clone: MXC9. | |
| 700380212H1 | g170746 | 30 | −38 | gb105pln | Wheat histone H4 TH091 gene, complete cds. | |
| 700346872H1 | g940536 | 15 | 3 | gb105allp | P1 Cdc21 protein | |
| 700342557H1 | g587545 | 24 | −31 | gb105pln | S. tuberosum mRNA encoding homolog to Human P23 tumor protein. | |
| 700342262H1 | g1498053 | 13 | −2 | gb105eukp | ribosomal protein S8 | |
| 700380256H1 | g1360017 | 16 | 2 | gb105allp | U1 snRNP-specific protein C | |
| 700345918H1 | g1885343 | 42 | −59 | gb105pln | T. aestivum mRNA for starch branching enzyme II. | |
| 700346688H1 | g2564336 | 44 | −30 | gb105pln | Brassica campestris mRNA for Tat binding protein 1, complete cds. | |
| 700346120H1 | g1946624 | 12 | −4 | gb105eukp | COII; cytochrome c oxidase subunit II | |
| 700344090H1 | g2632251 | 86 | −78 | gb105pln | S. bicolor DNA for gene encoding putative protein serine/threonine kinase, clone | |
| | | | | | cSNFL1. | |
| 700345911H1 | g436031 | 28 | −15 | gb105pln | Nicotiana tabacum (TSC40-4) 60S ribosomal protein L34 mRNA, complete cds. | |
| 700345490H1 | g409131 | 18 | −14 | gb105eukp | mei-1; meiotic spindle formation | |
| 700380786H1 | g2654121 | 12 | 15 | gb105pln | Arabidopsis thaliana ribosomal protein L23a (AtrpL23a) mRNA, complete cds. | |
| 700347055H1 | g1905943 | 37 | −21 | gb105pln | Sorghum bicolor MADS box transcription factor SbMADS1 mRNA, complete cds. | |
| 700344506H1 | g2460124 | 40 | −9 | gb105allp | putative transcription factor CA150 | |
| 700347289H1 | g1401051 | 4 | 8 | gb105allp | similar to Dvl-1 product encoded by GenBank Accession Number U10115; dishevelled | |
| | | | | | segment polarity protein homolog | |
| 700380496H1 | g551450 | 10 | 7 | gb105allp | splicing factor SF3a60 | |
| 700342808H1 | g603220 | 32 | −18 | gb105pln | Medicago sativa 6-phosphogluconate dehydrogenase mRNA, complete cds. | |
| 700343334H1 | g1418331 | 17 | −4 | gb105eukp | LRK1; receptor like protein kinase | |
| 700343511H1 | g1439625 | 9 | 7 | gb105eukp | C52B9.4 | |
| 700345077H1 | g603569 | 27 | −1 | gb105pln | L. esculentum mRNA for ribosomal protein S17. | |
| 700342488H1 | g450292 | 43 | −18 | gb105pln | Z. mays alpha-tubulin mRNA, complete cds. | |
| 700379690H1 | g2317728 | 25 | −0 | gb105pln | Arabidopsis thaliana reversibly glycosylated polypeptide-1 (AtRGP) mRNA, | |
| | | | | | complete cds. | |
| 700344504H1 | g297877 | 23 | −0 | gb105pln | A. thaliana UBC10 mRNA for ubiquitin conjugating enzyme homolog. | |
| 700345638H1 | g1869859 | 5 | 7 | gb105allp | very large tegument protein | |
| 700281841H2 | g602605 | 56 | −79 | gb105pln | Zea mays tandem genes for alpha1-tubulin and alpha2-tubulin. | |
| 700347234H1 | g2459424 | 16 | 0 | gb105eukp | F4P9.19 | |
| 700347166H1 | g313151 | 20 | 2 | gb105pln | A. thaliana ribosomal protein S15 mRNA, complete CDS. | |
| 700346739H1 | g510337 | 9 | −3 | gb105eukp | lipid transfer protein | |
| 700342555H1 | g386765 | 11 | −19 | gb105allp | hba1 alpha globin | |
| 700346922H1 | g2384908 | 36 | −7 | gb105eukp | W03F9.10 | |
| 700343447H1 | g899609 | 61 | −43 | gb105pln | Zea mays acidic ribosomal protein P2 (RPA-2A1) mRNA, complete cds. | |
| 700343144H1 | g168423 | 87 | −54 | gb105pln | Zea mays polypeptide chain-binding protein mRNA, 3′ end. | |
| 700345410H1 | g2191149 | 51 | −26 | gb105eukp | Ap_IG002N01.22 | |
| 700347382H1 | g644492 | 96 | −82 | gb105pln | Corn elongation factor 1alpha gene, complete cds. | |
| 700342551H1 | g1710150 | 18 | 2 | gb105pln | Arabidopsis thaliana proline iminopeptidase mRNA, complete cds. | |
| 700342237H1 | g531548 | 6 | 5 | gb105eukp | PRD1; saccharolysin | |
| 700343901H1 | g1054795 | 68 | −65 | gb105pln | H. vulgare mRNA for transmembrane protein. | |
| 700342401H1 | g2190545 | 18 | −1 | gb105eukp | F5I14.8 | |
| 700343331H1 | g2252840 | 14 | 1 | gb105allp | contains regions of similarity to Haemophilus influenzae permease (SP:P38767) | |
| 700342446H1 | g1049252 | 84 | −70 | gb105pln | Zea mays vacuolar ATPase 69 kDa subunit mRNA, partial cds. | |
| 700343570H1 | g790473 | 48 | −11 | gb105eukp | soluble, glycine rich protein | |
| 700346272H1 | g1550738 | 13 | 3 | gb105allp | endomembrane-associated protein | |
| 700344134H1 | g2196671 | 80 | −26 | gb105pln | Z. mays mRNA for HMG protein. | |
| 700346867H1 | g2114208 | 63 | −70 | gb105pln | Wheat DNA for 18S rRNA and telomere repeat sequence. | |
| 700345577H1 | g2645165 | 58 | 0 | gb105pln | Oryza sativa mRNA, similar to ribosomal protein 41. | |
| 700344130H1 | g457708 | 24 | −20 | gb105pln | S. oleracea mRNA for protein kinase. | |
| 700344859H1 | g950199 | 13 | 5 | gb105allp | mitotic feedback control protein Madp2 homolog | |
| 700379614H1 | g22151 | 94 | −48 | gb105pln | Z. mays (A188) mRNA for alpha-tubulin 4. | |
| 700343057H1 | g2618721 | 33 | −12 | gb105eukp | IAA16; IAA16 | |
| 700344630H1 | g2352492 | 7 | 5 | gb105eukp | TIR1; transport inhibitor response 1 | |
| 700344203H1 | g1695692 | 18 | 5 | gb105eukp | diminuto | |
| 700345362H1 | g2739218 | 44 | −22 | gb105pln | Hordeum vulgare S28 ribosomal protein. | |
| 700379734H1 | g2388574 | 10 | 6 | gb105allp | Strong similarity to Phalaenopsis homeobox protein (gb\|U34743). | |
| 700345250H1 | g473604 | 29 | −13 | gb105pln | Zea mays W-22 histone H2B mRNA, complete cds. | |
| 700346295H1 | g1834423 | 15 | −3 | gb105eukp | ribosomal protein L14 | |
| 700344323H1 | g577824 | 21 | 1 | gb105pln | Z. mays gene for H2B histone (gH2B3). | |
| 700344667H1 | g38223 | 75 | 3 | gb105allp | alpha1-globin | |
| 700346908H1 | g168460 | 89 | −72 | gb105pln | Zea mays cyclophilin (CyP) mRNA, complete cds. | |
| 700343962H1 | g218180 | 63 | −58 | gb105pln | Rice mRNA for oryzain alpha (EC 3.4.22). | |
| 700346981H1 | g218160 | 24 | −15 | gb105pln | Oryza sativa mRNA for elongation factor 1 beta′. | |
| 700346885H1 | g2511578 | 41 | −11 | gb105eukp | prcfa; multicatalytic endopeptidase; EC 3.4.99.46 | |
| 700343411H1 | g1915974 | 17 | −2 | gb105eukp | FK; fructokinase; EC 2.7.1.4 | |
| 700343183H1 | g736271 | 54 | −54 | gb105pln | O. sativa hsp70 gene for heat shock protein 70. | |
| 700347384H1 | g397395 | 59 | −39 | gb105pln | Z. mays MNB1b mRNA for DNA-binding protein. | |
| 700346602H1 | g536895 | 65 | −57 | gb105pln | Wheat mRNA for protein H2A, complete cds, clone wcH2A-10. | |
| 700344163H1 | g456567 | 34 | −16 | gb105pln | Pisum sativum ubiquitin conjugating enzyme (UBC4), complete cds. | |
| 700346380H1 | g532571 | 14 | 10 | gb105pln | Barley lipoxygenase 1 (LoxA) gene, complete cds. | |
| 700343828H1 | g1754994 | 67 | −52 | gb105pln | Tritiucum aestivum calmodulin TaCaM1-3 mRNA, complete cds. | |
| 700347058H1 | g22324 | 43 | −51 | gb105pln | Z. mays mRNA for H2B histone (clone cH2B221). | |
| 700281805H2 | g1906827 | 50 | −42 | gb105pln | A. thaliana hsp81.4 gene. | |
| 700344009H1 | g510697 | 10 | 8 | gb105eukp | pol; protease, reverse transcriptase, RNaseH, integrase; pol polyprotein | |
| 700342715H1 | g2623295 | 29 | −13 | gb105eukp | T20B5.1 | |
| 700345418H1 | g473602 | 73 | −66 | gb105pln | Zea mays W-22 histone H2A mRNA, complete cds. | |
| 700345443H1 | g168510 | 17 | 10 | gb105pln | Z. mays protein cdc2 kinase mRNA, complete cds. | |
| 700342928H1 | g1129084 | 46 | −26 | gb105pln | Wheat mRNA for protein H2A, complete cds, clone wcH2A-3. | |
| 700344747H1 | g806545 | 23 | −2 | gb105eukp | RpL7a; ribosomal protein L7a | |
| 700346845H1 | g1165125 | 22 | 0 | gb105allp | mSUG1 protein | |
| 700380665H1 | g868002 | 27 | −23 | gb105pln | Pumpkin mRNA for aconitase, complete cds. | |
| 700346533H1 | g2282583 | 54 | −77 | gb105pln | Zea mays elongation factor 1-alpha (EF1-A) mRNA, complete cds. | |
| 700343032H1 | g2274990 | 53 | −57 | gb105pln | Hordeum vulgare mRNA for expressed sequence tag. | |
| 700344443H1 | g16087 | 16 | 7 | gb105eukp | dnaJ; DNA J protein | |
| 700345337H1 | g18903 | 21 | 1 | gb105pln | Barley mRNA for aspartic proteinase. | |
| 700346549H1 | g1272628 | 15 | 5 | gb105allp | F44G4.1 | |
| 700345885H1 | g310932 | 47 | −34 | gb105pln | Nicotiana tabacum ribosomal protein L17 mRNA, complete cds. | |
| 700342365H1 | g1667268 | 21 | −8 | gb105eukp | C01G10.9 | |
| 700345118H1 | g434342 | 24 | −6 | gb105pln | A. thaliana (C24) mRNA for S18 ribosomal protein. | |
| 700346256H1 | g54006 | 20 | −3 | gb105allp | ribosomal protein S12 (AA 1-132) | |
| 700346381H1 | g1707641 | 46 | −43 | gb105pln | O. sativa mRNA for leucine rich repeat receptor-like kinase. | |
| 700345248H1 | g2746335 | 13 | 4 | gb105allp | RING zinc finger protein | |
| 700379968H1 | g2696803 | 40 | −17 | gb105pln | Oryza sativa mRNA for water channel protein, complete cds. | |
| 700281810H2 | g2625015 | 25 | −0 | gb105eukp | rpc10+; RNA polymerases I, II and III subunit Rpc10 | |
| 700342963H1 | g2369713 | 59 | −51 | gb105pln | Beta vulgaris cDNA for elongation factor 2. | |
| 700346956H1 | g1575594 | 68 | −62 | gb105pln | Triticum aestivum fimbrin/plastin-like mRNA, partial cds. | |
| 700281928H2 | g4392 | 19 | −5 | gb105eukp | RPL37A; ribosomal protein L37a | |
| 700345425H1 | g168405 | 84 | −25 | gb105pln | maize alcohol dehydrogenase (adh1) mrna 3′ end and flank. | |
| 700347034H1 | g20818 | 37 | −26 | gb105pln | P. sativum mRNA for p34 kinase-related protein (cdc2 homologue). | |
| 700346422H1 | g1325967 | 21 | −0 | gb105pln | T. aestivum histone H2A gene (clone TH274). | |
| 700342648H1 | g1054632 | 39 | −27 | gb105pln | A. thaliana mRNA for ATN1 protein kinase. | |
| 700345561H1 | g2274983 | 33 | −32 | gb105pln | Hordeum vulgare mRNA for expressed sequence tag. | |
| 700343712H1 | g669022 | 19 | 1 | gb105eukp | W06E11.4 | |
| 700343841H1 | g2394230 | 14 | 15 | gb105pln | Arabidopsis thaliana WD-40 repeat protein (MSI2) mRNA, complete cds. | |
| 700344396H1 | g1550813 | 70 | −68 | gb105pln | Z. mays mRNA for acidic ribosomal protein P0. | |
| 700344990H1 | g2653289 | 19 | 1 | gb105pln | Petunia hybrida pte gene. | |
| 700344604H1 | g1743008 | 33 | −24 | gb105pln | C. sativus mRNA for SNF1-related protein kinase. | |
| 700347375H1 | g21634 | 13 | 5 | gb105pln | T. aestivum 1b-c38 gene for HBP-1b (leucine zipper type transcription factor). | |
| 700343163H1 | g1183866 | 9 | −3 | gb105eukp | SBP1; squamosa-promoter binding protein 1 | |
| 700343961H1 | g785067 | 12 | 5 | gb105eukp | VPS27; vacuolar protein sorting; Vps27p | |
| 700347282H1 | g169295 | 27 | −17 | gb105pln | Pharbitis nil heat shock protein 83 (Hsp83) gene, complete cds. | |
| 700345974H1 | g736271 | 65 | −14 | gb105pln | O. sativa hsp70 gene for heat shock protein 70. | |
| 700344094H1 | g4352 | 14 | 6 | gb105pln | Yeast (Saccharomyces cerevisiae) gene for RNA-helicase. | |
| 700380449H1 | g1737490 | 9 | 6 | gb105allp | p76 | |
| 700379726H1 | g395071 | 25 | −4 | gb105pln | V. faba guanine nucleotide regulatory protein mRNA, complete CDS. | |
| 700347358H1 | g1185553 | 38 | −81 | gb105pln | Zea mays glyceraldehyde-3-phosphate dehydrogenase (gpc2) gene, complete cds. | |
| 700343005H1 | g829147 | 94 | −79 | gb105pln | Z. mays gene for cyclophilin. | |
| 700342334H1 | g450292 | 86 | −72 | gb105pln | Zea mays alpha-tubulin mRNA, complete cds. | |
| 700380217H1 | g169128 | 17 | 4 | gb105eukp | regulatory subunit of an atp-dependent protease; nuclear encoded precursor to chloroplast | |
| | | | | | protein | |
| 700347261H1 | g902583 | 45 | −70 | gb105pln | Zea mays clone MubG1 ubiquitin gene, complete cds. | |
| 700281830H2 | g2827138 | 19 | 9 | gb105pln | Arabidopsis thaliana cellulose synthase catalytic subunit (RSW1) gene, complete cds. | |
| 700344093H1 | g169820 | 52 | −44 | gb105pln | Oryza sativa triosephosphate isomerase (Rictpi) mRNA, complete cds. | |
| 700342361H1 | g1488296 | 27 | −18 | gb105pln | Oryza sativa osRAD23 mRNA, complete cds. | |
| 700380667H1 | g416148 | 85 | −31 | gb105pln | Zea mays beta-7 tubulin (tub7) mRNA, complete cds. | |
| 700342824H1 | g2511530 | 57 | −47 | gb105pln | Eleusine indica alpha tubulin 1 (TUA1) mRNA, complete cds. | |
| 700342606H1 | g1136436 | 24 | 0 | gb105allp | KIAA0188 | |
| 700380143H1 | g1050540 | 16 | −8 | gb105eukp | tRNA-glutamine synthetase | |
| 700342512H1 | g454356 | 37 | −27 | gb105pln | Arabidopsis thaliana Columbia glutamate-1-semialdehyde-2,1-aminomutase (gsa1) gene. | |
| 700347351H1 | g2286150 | 49 | −70 | gb105pln | Zea mays translation initiation factor (eIF-4A) mRNA, complete cds. | |
| 700342756H1 | g1145694 | 26 | −3 | gb105pln | Arabidopsis thaliana actin (ACT3) gene, complete cds. | |
| 700343034H1 | g558648 | 10 | 6 | gb105eukp | D-myo-inositol-3-phosphate synthase; EC 5.5.1.4 | |
| 700343947H1 | g2739431 | 10 | 3 | gb105allp | hematopoietic-specific IL-2 deubiquitinating enzyme | |
| 700345767H1 | g2760836 | 13 | 4 | gb105allp | putative Ser/Thr protein kinase | |
| 700344026H1 | g450548 | 70 | −62 | gb105pln | O. sativa (pRSAM-1) gene for S-adenosyl methionine synthetase. | |
| 700344212H1 | g3075 | 20 | 5 | gb105pln | N. crassa mRNA for ribosomal protein. | |
| 700380653H1 | g170746 | 43 | −32 | gb105pln | Wheat histone H4 TH091 gene, complete cds. | |
| 700342357H1 | g347061 | 34 | −12 | gb105pln | Brassica rapa ribosomal protein L37A (RPL37A) mRNA, complete cds. | |
| 700342364H1 | g1546918 | 51 | −70 | gb105pln | Z. mays mRNA for translation initiation factor 5A. | |
| 700342955H1 | g2331300 | 47 | −72 | gb105pln | Zea mays ribosomal protein S4 type I (rps4) mRNA, complete cds. | |
| 700344241H1 | g416150 | 76 | −74 | gb105pln | Zea mays beta-8 tubulin (tub8) mRNA, complete cds. | |
| 700344337H1 | g1730332 | 19 | −5 | gb105eukp | (R)-(+)-mandelonitrile lyase isoform MDL1 precursor | |
| 700380130H1 | g1628440 | 12 | 4 | gb105eukp | ORF | |
| 700345964H1 | g2564046 | 25 | −2 | gb105pln | Arabidopsis thaliana genomic DNA, chromosome 5, P1 clone: MGI19, complete | |
| | | | | | sequence. | |
| 700343056H1 | g18918 | 8 | −6 | gb105eukp | beta-amylase (AA 1-535) | |
| 700380647H1 | g1526412 | 41 | −31 | gb105pln | Arabidopsis thaliana ATPK19 mRNA for ribosomal-protein S6 kinase homolog, | |
| | | | | | complete cds. | |
| 700342476H1 | g21800 | 31 | −32 | gb105pln | T. aestivum L mRNA for histone H2B. | |
| 700343417H1 | g1053093 | 29 | −2 | gb105eukp | zds; zeta-carotene desaturase precursor | |
| 700345023H1 | g2641235 | 18 | −2 | gb105eukp | ACT1; actin | |
| 700344340H1 | g2511592 | 31 | −0 | gb105eukp | prc8; multicatalytic endopeptidase complex, proteasome component, alpha subunit; | |
| | | | | | EC 3.4.99.46 | |
| 700343582H1 | g474006 | 18 | −6 | gb105pln | Rice mRNA, partial homologus to ribosomal protein S11 gene. | |
| 700343146H1 | g2191157 | 22 | −8 | gb105pln | Arabidopsis thaliana BAC IG002P16. | |
| 700380108H1 | g1432082 | 23 | −3 | gb105pln | Arabidopsis thaliana Skp1p homolog mRNA, complete cds. | |
| 700345862H1 | g2275202 | 39 | −20 | gb105eukp | T08I13.8; acyl-CoA synthetase isolog | |
| 700342760H1 | g287834 | 51 | −34 | gb105pln | Z. mays yptm2 cDNA. | |
| 700343011H1 | g2262105 | 25 | −7 | gb105eukp | T19F06.8 | |
| 700281839H2 | g2791947 | 18 | 12 | gb105pln | Lupinus luteus mRNA for ribosomal protein L13a. | |
| 700344130H1 | g457688 | 21 | −1 | gb105pln | M. crystallinum mRNA for protein kinase. | |
| 700344144H1 | g1929411 | 27 | −6 | gb105pln | N. tabacum npp5 mRNA for protein phosphatase type 2A. | |
| 700345625H1 | g1666176 | 52 | −39 | gb105pln | N. tabacum mRNA for subunit of NADH:ubiquinone oxidoreductase complex I. | |
| 700343677H1 | g21696 | 28 | −7 | gb105pln | T. aestivum mRNA 3 for cathepsin B (2557). | |
| 700379630H1 | g2351064 | 12 | 14 | gb105pln | Arabidopsis thaliana genomic DNA, chromosome 5, P1 clone: MDJ22. | |
| 700346880H1 | g143187) | 15 | 2 | gb105allp | ent-kaurene synthase B | |
| 700345914H1 | g2642212 | 32 | −11 | gb105pln | Zea mays nitrate-induced NOI protein gene, complete cds. | |
| 700281947H2 | g22151 | 82 | −48 | gb105pln | Z. mays (A188) mRNA for alpha-tubulin 4. | |
| 700281831H2 | g2760166 | 24 | −3 | gb105pln | Arabidopsis thaliana genomic DNA, chromosome 5, P1 clone: MBK20, complete | |
| | | | | | sequence. | |
| 700347216H1 | g2244837 | 28 | −5 | gb105eukp | proteasome chain protein | |
| 700345537H1 | g995562 | 17 | −2 | gb105eukp | ada1; AMP deaminase | |
| 700343515H1 | g2384757 | 56 | −44 | gb105pln | Oryza sativa GDP dissociation inhibitor protein OsGDI1 (OsGDI1) mRNA, | |
| | | | | | complete cds. | |
| 700344482H1 | g2766715 | 57 | −7 | gb105eukp | CMT1; chromomethylase | |
| 700347003H1 | g2738948 | 21 | −14 | gb105pln | Fragaria x ananassa cytosolic ascorbate peroxidase (APX-c) mRNA, complete cds. | |
| 700345327H1 | g2564049 | 14 | 9 | gb105pln | Arabidopsis thaliana genomic DNA, chromosome 5, P1 clone: MLE2, complete | |
| | | | | | sequence. | |
| 700379931H1 | g2724049 | 27 | −12 | gb105pln | Fritillaria agrestis clone CA1 glutaredoxin type I (glr1) mRNA, complete cds. | |
| 700346972H1 | g1419369 | 76 | −68 | gb105pln | Z. mays ZmABP3 mRNA for actin depolymerizing factor. | |
| 700346623H1 | g2293565 | 35 | −14 | gb105pln | Oryza sativa ADP-ribosylation factor 1 (Os-ARF1) mRNA, complete cds. | |
| 700342663H1 | g1008274 | 10 | 0 | gb105eukp | ORF YJL097w | |
| 700343641H1 | g396148 | 12 | 8 | gb105pln | Z. mays CHI gene. | |
| 700344177H1 | g2827715 | 9 | 3 | gb105allp | receptor protein kinase-like protein | |
| 700346342H1 | g216 | 13 | 4 | gb105allp | endonexin | |
| 700346064H1 | g2114363 | 10 | 5 | gb105allp | similar to mouse Int-6 | |
| 700343964H1 | g303834 | 14 | 14 | gb105pln | Rice mRNA for 21 kd polypeptide, complete cds. | |
| 700347270H1 | g577734 | 42 | −30 | gb105pln | A. thaliana PRL1 mRNA. | |
| 700345885H1 | g2341023 | 44 | −30 | gb105pln | Sequence of BAC F19P19 from Arabidopsis thaliana chromosome 1, complete | |
| | | | | | sequence. | |
| 700345545H1 | g1181672 | 51 | −48 | gb105pln | Sorghum bicolor heat shock protein 70 cognate (hsc70) mRNA, partial cds. | |
| 700342648H1 | g2656028 | 15 | 15 | gb105pln | Arabidopsis thaliana genomic DNA, chromosome 5, P1 clone: MNF13. | |
| 700342570H1 | g791101 | 19 | 0 | gb105pln | Yeast (Saccharomyces cerevisiae) PMS1, TPM1, MKS1, YMK1, MSK1, ODP2, YL9A | |
| | | | | | & FKH2 genes. | |
| 700346686H1 | g20163 | 42 | −23 | gb105pln | O. sativa Rr15 mRNA for 5S ribosomal RNA. | |
| 700342705H1 | g2624327 | 38 | −36 | gb105pln | Oryza sativa mRNA for glycine rich RNA-binding protein 2 (OsGRP2). | |
| 700343716H1 | g533251 | 69 | −70 | gb105pln | Zea mays (clone pSM8) sucrose synthase 2 (Sus1) gene, complete cds. | |
| 700344120H1 | g1914683 | 21 | 8 | gb105allp | RAD23, isoform I | |
| 700345133H1 | g432367 | 42 | −32 | gb105pln | Rice mRNA for elongation factor 1 beta, complete cds. | |
| 700347050H1 | g1553130 | 15 | 16 | gb105pln | Gossypium hirsutum ribosomal protein L44 isoform b (RL44), complete cds. | |
| 700281804H2 | g2264307 | 14 | −4 | gb105pln | Arabidopsis thaliana genomic DNA, chromosome 5, P1 clone: MED24, complete | |
| | | | | | sequence. | |
| 700380481H1 | g2623158 | 14 | 2 | gb105allp | N-acetylglucosamyl transferase component Gpi1 | |
| 700342372H1 | g168505 | 62 | −56 | gb105pln | Zea mays histone H3 gene, complete cds. | |
| 700343204H1 | g435679 | 19 | 2 | gb105eukp | ribosomal protein S25 | |
| 700344346H1 | g2342425 | 10 | 8 | gb105eukp | ANP2; NPK1-related protein kinase 2 | |
| 700344445H1 | g1737072 | 15 | −5 | gb105allp | periodic tryptophan protein 2 | |
| 700347208H1 | g172578 | 10 | 7 | gb105eukp | SEN3; affects tRNA processing | |
| 700344150H1 | g2541973 | 51 | −1 | gb105allp | DNA damage-inducible RNA binding protein | |
| 700347285H1 | g17601 | 13 | 3 | gb105allp | AUXIN REGULATED PROTEIN | |
| 700347282H1 | g20255 | 20 | −27 | gb105pln | O. sativa gene for heat shock protein 82 HSP82. | |
| 700342916H1 | g22502 | 58 | −83 | gb105pln | Zea mays DNA fragment for deletion derivative Spm-I8 of En-I transposable element. | |
| 700344496H1 | g559395 | 19 | −2 | gb105eukp | dihydrolipoamide acetyltransferase (E2) subunit of PDC | |
| 700380696H1 | g433608 | 57 | −49 | gb105pln | R. communis mRNA for enolase. | |
| 700347222H1 | g170107 | 16 | 6 | gb105eukp | CPN10; chaperonin 10 | |
| 700343657H1 | g295749 | 11 | 7 | gb105eukp | His2AvD; histone H2A | |
| 700380165H1 | g1001725 | 10 | 4 | gb105allp | delta(24)-sterol C-methyltransferase | |
| 700346857H1 | g1184595 | 12 | 2 | gb105eukp | T11G6.2 | |
| 700344066H1 | g2225941 | 25 | 8 | gb105allp | Mdes protein | |
| 700281992H2 | g2570508 | 18 | −20 | gb105pln | Oryza sativa transmembrane protein mRNA, complete cds. | |
| 700343344H1 | g1783180 | 65 | −50 | gb105pln | Wheat mRNA for Thiol-specific antioxidant protein, partial cds. | |
| 700379667H1 | g2760173 | 19 | −15 | gb105pln | Arabidopsis thaliana genomic DNA, chromosome 5, P1 clone: MYH19, complete | |
| | | | | | sequence. | |
| 700281913H2 | g397958 | 60 | −71 | gb105pln | Z. mays mRNA for beta-amylase. | |
| 700345305H1 | g4392 | 14 | 1 | gb105eukp | RPL37A; ribosomal protein L37a | |
| 700379646H1 | g395076 | 22 | 2 | gb105pln | B. rapa ribosomal protein L37a mRNA, complete CDS. | |
| 700379664H1 | g22469 | 75 | −73 | gb105pln | Maize mRNA for cytoplasmic ribosomal protein S11. | |
| 700346932H1 | g168500 | 53 | −50 | gb105pln | Maize (Zea mays) histone H4 gene (H4C14), complete cds. | |
| 700345918H1 | g2340107 | 58 | −79 | gb105pln | Zea mays starch branching enzyme IIa (Sbe2a) mRNA, partial cds. | |
| 700345123H1 | g1183936 | 13 | 13 | gb105pln | P. sativum 5S rRNA gene. | |
| 700347326H1 | g533473 | 35 | −20 | gb105pln | Mesembryanthemum crystallinum 2-phospho-D-glycerate hydrolase, enolase, mRNA, | |
| | | | | | complete cds. | |
| 700379973H1 | g2209343 | 14 | 6 | gb105allp | copper transport protein Atox1 | |
| 700344064H1 | g2293565 | 79 | −79 | gb105pln | Oryza sativa ADP-ribosylation factor 1 (Os-ARF1) mRNA, complete cds. | |
| 700346011H1 | g2632280 | 17 | 1 | gb105allp | seryl-tRNA synthetase | |
| 700342277H1 | g22324 | 48 | −32 | gb105pln | Z. mays mRNA for H2B histone (clone cH2B221). | |
| 700379915H1 | g556557 | 66 | −59 | gb105pln | Rice mRNA for homlogue of Tat binding protein, complete cds. | |
| 700346829H1 | g881635 | 47 | −20 | gb105eukp | Arp3 | |
| 700345614H1 | g19103 | 41 | −25 | gb105pln | H. vulgare mRNA for ribosomal protein L17-2. | |
| 700342546H1 | g969094 | 21 | −11 | gb105eukp | chaperonin containing T-complex protein gamma subunit-like protein | |
| 700344110H1 | g166843 | 26 | −8 | gb105pln | Arabidopsis thaliana ribonucleoprotein mRNA, complete cds. | |
| 700346541H1 | g1435156 | 28 | −13 | gb105pln | L. esculentum mRNA for histone H3 variant H3.3. | |
| 700343238H1 | g2274990 | 42 | −4 | gb105pln | Hordeum vulgare mRNA for expressed sequence tag. | |
| 700345055H1 | g166548 | 68 | −46 | gb105pln | Avena sativa vacuolar H+-ATPase 16 kDa proteolipid subunit (vatp-P1) mRNA, | |
| | | | | | complete cds. | |
| 700345212H1 | g2331130 | 29 | −13 | gb105pln | Oryza sativa glycine-rich protein (OSGRP1) mRNA, complete cds. | |
| 700346096H1 | g576632 | 46 | 7 | gb105pln | Chlamydomonas reinhardtii histone H3 (ch3-I) and histone H4 (ch4-I) genes, | |
| | | | | | complete cds. | |
| 700343841H1 | g2394226 | 21 | 2 | gb105pln | Lycopersicon esculentum WD-40 repeat protein (LeMSI1) mRNA, complete cds. | |
| 700345264H1 | g2258073 | 32 | −16 | gb105pln | Hordeum vulgare var. distichum soluble inorganic pyrophosphatase (Ipp) mRNA, | |
| | | | | | complete cds. | |
| 700344038H1 | g415410 | 63 | 0 | gb105allp | 60S ribosomal protein L32 | |
| 700380440H1 | g1098619 | 19 | 4 | gb105allp | voltage dependent anion channel 2 | |
| 700380294H1 | g2739365 | 38 | −17 | gb105eukp | T9J22.7 | |
| 700380043H1 | g1022800 | 18 | −3 | gb105pln | Arabidopsis thaliana OBP33pep mRNA, partial cds. | |
| 700344734H1 | g18210 | 17 | 3 | gb105pln | C. reinhardtii mRNA for ribosomal protein P1. | |
| 700345732H1 | g565064 | 21 | −1 | gb105pln | Arabidopsis thaliana pyruvate dehydrogenase E1 beta subunit mRNA, complete cds. | |
| 700342270H1 | g2827081 | 29 | −13 | gb105pln | Medicago sativa cytosolic malate dehydrogenase (cmdh) mRNA, complete cds. | |
| 700343903H1 | g1154953 | 29 | −37 | gb105pln | T. aestivum histone H2A gene. | |
| 700379674H1 | g2318117 | 21 | 5 | gb105eukp | ChlD; one of three subunit of a complex which catalyzes the Mg insertion step in | |
| | | | | | chlorophyll biosynthesis; Mg-chelatase subunit D | |
| 700342668H1 | g19103 | 46 | −34 | gb105pln | H. vulgare mRNA for ribosomal protein L17-2. | |
| 700281923H2 | g22324 | 32 | −39 | gb105pln | Z. mays mRNA for H2B histone (clone cH2B221). | |
| 700344248H1 | g1405356 | 12 | −2 | gb105eukp | PDI; catalyses native disulphide bond formation; protein disulphide isomerase | |
| | | | | | precursor; EC 5.3.4.1 | |
| 700346571H1 | g2654010 | 15 | −9 | gb105pln | Arabidopsis thaliana Rho-like GTP binding protein (Rop5) gene, partial cds. | |
| 700346256H1 | g872315 | 20 | −3 | gb105allp | 40S ribosomal protein S12 | |
| 700344977H1 | g1350539 | 15 | 10 | gb105pln | Picea glauca EMB4 mRNA. | |
| 700346445H1 | g169818 | 48 | −60 | gb105pln | Rice 25S ribosomal RNA gene. | |
| 700344035H1 | g310934 | 58 | −28 | gb105pln | Nicotiana tabacum ribosomal protein L25, complete cds. | |
| 700344204H1 | g432488 | 18 | −5 | gb105pln | Wheat initiation factor 1A (eIF-1A) mRNA. | |
| 700343313H1 | g1532210 | 18 | 7 | gb105allp | cyclophilin A | |
| 700346985H1 | g21794 | 50 | −47 | gb105pln | Wheat histone H4 gene. | |
| 700343338H1 | g1617274 | 13 | 1 | gb105eukp | AMP-binding protein | |
| 700346831H1 | g668986 | 24 | −2 | gb105pln | S. tuberosum TYKY2 mRNA for NADH:ubiquinone oxidoreductase. | |
| 700342638H1 | g473216 | 38 | −30 | gb105pln | P. sativum (little marvel) HSC71.0 mRNA. | |
| 700343281H1 | g488835 | 9 | 5 | gb105allp | ribosomal protein L28 | |
| 700344486H1 | g607003 | 9 | 7 | gb105allp | beta transducin-like protein | |
| 700344208H1 | g22317 | 10 | 6 | gb105eukp | GST III (AA 1-222) | |
| 700342649H1 | g1209700 | 44 | −5 | gb105pln | Zea mays ribosomal protein L12 mRNA, complete cds. | |
| 700343701H1 | g313266 | 26 | −15 | gb105pln | T. aestivum gene for phosphoglycerate kinase. | |
| 700380552H1 | g28519 | 33 | −0 | gb105allp | L apoferritin | |
| 700343960H1 | g1515357 | 17 | 2 | gb105allp | CTP synthetase | |
| 700344965H1 | g167167 | 18 | −3 | gb105eukp | SKR6; receptor protein kinase | |
| 700345644H1 | g1103629 | 27 | −56 | gb105pln | Z. mays Fer2 gene. | |
| 700346379H1 | g1389653 | 30 | −9 | gb105pln | Tobacco mRNA for cytosolic ascorbate peroxidase, complete cds. | |
| 700379952H1 | g1044860 | 24 | −23 | gb105eukp | W02B12.10 | |
| 700281915H1 | g527680 | 29 | −5 | gb105eukp | ribosomal protein S3 | |
| 700346408H1 | g2801432 | 17 | 1 | gb105pln | Arabidopsis thaliana salt stress inducible small GTP binding protein Ran1 homolog | |
| | | | | | mRNA, complete cds. | |
| 700346945H1 | g19342 | 35 | −23 | gb105pln | L. esculentum mRNA for ribosomal protein L2. | |
| 700345987H1 | g1181330 | 25 | −37 | gb105pln | Z. mays CNX mRNA. | |
| 700345531H1 | g157564 | 10 | 2 | gb105eukp | Aats-glupro; trnasfer RNA-Glu-Pro aminoacyl synthetase | |
| 700345321H1 | g166857 | 35 | −18 | gb105pln | Arabidopsis thaliana cytoplasmic ribosomal protein mRNA, complete cds. | |
| 700380417H1 | g1321660 | 20 | −10 | gb105pln | Rice mRNA for ascorbate peroxidase, complete cds. | |
| 700347132H1 | g168559 | 77 | −18 | gb105pln | Zea mays putative elongation factor 1-alpha homolog mRNA, partial cds. | |
| 700342963H1 | g2641945 | 30 | −16 | gb105pln | Yeast (Schizosaccaromyces pombe) DNA for elongation factor 2, complete cds. | |
| 700343815H1 | g161172 | 17 | −0 | gb105eukp | elongation factor 1-gamma | |
| 700344808H1 | g2642213 | 32 | 3 | gb105eukp | nitrate-induced NOI protein | |
| 700346044H1 | g871513 | 34 | −18 | gb105pln | P. sativum mRNA for small G protein. | |
| 700344278H1 | g22484 | 53 | −52 | gb105pln | Z. mays RNA for superoxide dismutase Sod4A. | |
| 700379641H1 | g397631 | 26 | −6 | gb105eukp | cleavage of sucrose to glucose and fructose; beta-fructofuranosidase; EC 3.2.1.26; | |
| | | | | | invertase | |
| 700346579H1 | g1699370 | 28 | −8 | gb105allp | prolidase = peptidase D/imidopeptidase {EC 3.4.13.9} [mice, liver, Peptide, 493aa] | |
| 700343419H1 | g577824 | 40 | −43 | gb105pln | Z. mays gene for H2B histone (gH2B3). | |
| 700343631H1 | g498901 | 24 | −5 | gb105pln | Pisum sativum ribosomal protein L27 homolog (RPL27-3) mRNA, complete cds. | |
| 700344815H1 | g1684713 | 10 | 14 | gb105pln | N. racemosa mRNA for cytochrome P450, CYP71A5. | |
| 700344944H1 | g2190552 | 29 | −8 | gb105eukp | F5I14.21 | |
| 700347114H1 | g1906827 | 32 | −5 | gb105pln | A. thaliana hsp81.4 gene. | |
| 700345865H1 | g1877024 | 37 | −19 | gb105pln | Rice mitochondrial DNA for ribosomal protein L2, ribosomal protein S19, complete cds. | |
| 700380285H1 | g1335861 | 52 | −45 | gb105pln | Glycine max clathrin heavy chain mRNA, complete cds. | |
| 700343101H1 | g1766047 | 33 | −9 | gb105pln | Arabidopsis thaliana NAD+ dependent isocitrate dehydrogenase subunit 2 (IDH2) | |
| | | | | | mRNA, complete cds. | |
| 700347133H1 | g2058278 | 51 | 0 | gb105eukp | atran1 | |
| 700343208H1 | g2191187 | 9 | −2 | gb105eukp | A_TM021B04.9 | |
| 700345809H1 | g886739 | 12 | 14 | gb105pln | Z. mays histone H4 gene. | |
| 700342934H1 | g2832358 | 25 | −6 | gb105pln | Arabidopsis thaliana mRNA for HMG betal protein. | |
| 700346347H1 | g2414625 | 17 | −15 | gb105eukp | SPAC2C4.14c; hypothetical protein | |
| 700345605H1 | g1397320 | 24 | −3 | gb105eukp | R08C7.3 | |
| 700346566H1 | g984677 | 23 | −3 | gb105pln | P. sativum mRNA for lipoamide dehydrogenase. | |
| 700281856H2 | g1143863 | 33 | −17 | gb105pln | Oryza sativa beta-glucosidase mRNA, nuclear gene encoding chloroplast protein, | |
| | | | | | complete cds. | |
| 700281881H2 | g2275217 | 20 | 2 | gb105eukp | T08I13.24: chloroplast protein CP12 isolog | |
| 700343606H1 | g473604 | 69 | −58 | gb105pln | Zea mays W-22 histone H2B mRNA, complete cds. | |
| 700342957H1 | g1743387 | 57 | −39 | gb105pln | S. bicolor mRNA for pSbaNS5 protein. | |
| 700346949H1 | g2252639 | 17 | −15 | gb105pln | Genomic sequence of Arabidopsis BAC F8A5, complete sequence. | |
| 700346664H1 | g218132 | 64 | −55 | gb105pln | Rice mRNA for Heat shock protein 83. | |
| 700342494H1 | g2384690 | 14 | −1 | gb105allp | proteosome major subunit | |
| 700343409H1 | g485946 | 36 | −27 | gb105pln | N. tabacum NeIF-4A6 mRNA. | |
| 700343558H1 | g1777929 | 48 | −65 | gb105pln | Saccharum officinarum nucleoside diphosphate kinase (SoNDPK1) mRNA, | |
| | | | | | complete cds. | |
| 700346957H1 | g1657767 | 22 | −8 | gb105eukp | gag | |
| 700346579H1 | g1236706 | 27 | −9 | gb105allp | prolidase | |
| 700343490H1 | g20255 | 43 | −14 | gb105pln | O. sativa gene for heat shock protein 82 HSP82. | |
| 700345738H1 | g2149639 | 28 | −22 | gb105pln | Arabidopsis thaliana Argonaute protein (AGO1) mRNA, complete cds. | |
| 700380490H1 | g902526 | 26 | −3 | gb105pln | Zea mays clone MubG7 ubiquitin fusion protein gene, complete cds. | |
| 700345188H1 | g603509 | 9 | 8 | gb105eukp | cyclin delta-3 | |
| 700347368H1 | g2370518 | 5 | 4 | gb105eukp | SPAC2E11.04; ribosomal protein | |
| 700343209H1 | g2635323 | 15 | 1 | gb105allp | similar to DNA mismatch repair protein | |
| 700347014H1 | g644491 | 74 | −26 | gb105pln | Corn mRNA for elongation factor 1A. | |
| 700342313H1 | g971283 | 40 | −29 | gb105pln | Rice mRNA for ribosomal protein S31, complete cds. | |
| 700346661H1 | g1136121 | 50 | −40 | gb105pln | O. sativa mRNA for alpha-tubulin (clone OSTA-136). | |
| 700344281H1 | g871985 | 29 | −16 | gb105pln | A. sativa Aspk11 mRNA. | |
| 700346287H1 | g1322276 | 25 | 3 | gb105pln | Triticum aestivum histone H2A gene, complete cds. | |
| 700380523H1 | g289769 | 52 | −22 | gb105eukp | ZK652.3 protein | |
| 700342236H1 | g2317715 | 39 | −21 | gb105eukp | helD; helD | |
| 700343221H1 | g2160300 | 33 | −17 | gb105eukp | ribosomal protein | |
| 700347365H1 | g16732 | 24 | −10 | gb105allp | NADH ubiquinone oxidoreductase subunit | |
| 700346872H1 | g940406 | 17 | 1 | gb105allp | mcdc21 protein | |
| 700346607H1 | g1628193 | 8 | 5 | gb105allp | T12D8.3 | |
| 700343176H1 | g1495272 | 17 | 6 | gb105pln | A. thaliana mRNA for sugar transporter. | |
| 700281956H2 | g968901 | 32 | −29 | gb105pln | Rice mRNA for ribosomal protein S8, complete cds. | |
| 700344266H1 | g1244773 | 19 | −11 | gb105eukp | RPL37A; Rp137ap: 60S ribosomal protein L37a | |
| 700342796H1 | g1132482 | 50 | −34 | gb105pln | Rice mRNA for ADP-ribosylation factor, complete cds. | |
| 700380614H1 | g2662342 | 80 | −78 | gb105pln | Oryza sativa mRNA for EF-1 alpha, complete cds. | |
| 700345647H1 | g2414629 | 11 | 7 | gb105eukp | SPAC2C4.18; hypothetical protein | |
| 700342423H1 | g1906825 | 56 | −10 | gb105pln | A. thaliana hsp81.2 gene. | |
| 700345803H1 | g1777929 | 79 | −67 | gb105pln | Saccharum officinarum nucleoside diphosphate kinase (SoNDPK1) mRNA, | |
| | | | | | complete cds. | |
| 700345662H1 | g643596 | 85 | −75 | gb105pln | Corn mRNA for cysteine proteinase, clone CCP, complete cds. | |
| 700342844H1 | g1550813 | 38 | −48 | gb105pln | Z. mays mRNA for acidic ribosomal protein P0. | |
| 700342284H1 | g1906838 | 24 | −7 | gb105eukp | C56G7.1 | |
| 700344425H1 | g1381140 | 16 | 6 | gb105eukp | cul-4; CUL-4 | |
| 700346009H1 | g561663 | 44 | −32 | gb105pln | Rice mRNA, partial homologous to ribosomal protein coding sequence. | |
| 700342593H1 | g474006 | 49 | −50 | gb105pln | Rice mRNA, partial homologous to ribosomal protein S11 gene. | |
| 700344430H1 | g22322 | 30 | −36 | gb105pln | Z. mays mRNA for H2B histone (clone cH2B214). | |
| 700379779H1 | g1244652 | 44 | −20 | gb105pln | Zea mays copia-type retroelement PREM-2 gag gene, complete cds. | |
| 700379604H1 | g2736146 | 25 | −12 | gb105pln | Arabidopsis thaliana fatty acid hydroxylase Fah1p (FAH1) mRNA, complete cds. | |
| 700345709H1 | g248336 | 79 | −84 | gb105pln | polyubiquitin [maize, Genomic, 3841 nt]. | |
| 700346136H1 | g1532072 | 56 | −51 | gb105pln | Z. mays mRNA for S-adenosylmethionine decarboxylase. | |
| 700345874H1 | g21399 | 39 | −11 | gb105pln | Solanum tuberosum processed actin pseudogene. | |
| 700380138H1 | g664900 | 17 | −27 | gb105pln | C. plantagineum tkt3 gene for transketolase. | |
| 700343919H1 | g22322 | 100 | −90 | gb105pln | Z. mays mRNA for H2B histone (clone cH2B214). | |
| 700347165H1 | g4199 | 22 | −6 | gb105eukp | IPP1 | |
| 700346645H1 | g458426 | 20 | −11 | gb105eukp | dihydrolipoamide acetyltransferase | |
| 700343589H1 | g168505 | 44 | −42 | gb105pln | Zea mays histone H3 gene, complete cds. | |
| 700380042H1 | g1644402 | 17 | 0 | gb105allp | putative ATP/GTP-binding protein | |
| 700379926H1 | g1212995 | 70 | −61 | gb105pln | H. vulgare mRNA for UDP-glucose pyrophosphorylase. | |
| 700345278H1 | g2668745 | 65 | −57 | gb105pln | Zea mays inorganic pyrophosphatase (IPP) mRNA, complete cds. | |
| 700347107H1 | g168539 | 75 | −28 | gb105pln | Zea mays putative ribosomal protein S22 homolog mRNA, partial cds. | |
| 700347229H1 | g1839188 | 19 | 3 | gb105eukp | RHD3; putative GTP-binding protein; root hair defective 3 | |
| 700343880H1 | g474007 | 40 | 16 | gb105pln | Rice mRNA, partial homologous to ribosomal protein S12 gene. | |
| 700344993H1 | g951335 | 24 | −1 | gb105pln | Oryza sativa protein phosphatase 1 mRNA, complete cds. | |
| 700345801H1 | g1469220 | 23 | −1 | gb105pln | B. oleracea mRNA (unknown). | |
| 700342935H1 | g2661840 | 30 | −17 | gb105eukp | adk; adenosine kinase; EC 2.7.1.20 | |
| 700380178H1 | g1498052 | 57 | −64 | gb105pln | Zea mays ribosomal protein S8 mRNA, complete cds. | |
| 700346591H1 | g2058313 | 15 | −7 | gb105eukp | CCR1; cinnamoyl-CoA reductase; EC 1.2.1.44 | |
| 700345744H1 | g170746 | 73 | −73 | gb105pln | Wheat histone H4 TH091 gene, complete cds. | |
| 700342546H1 | g493574 | 18 | −13 | gb105eukp | BIN2; Bin2p | |
| 700380535H1 | g2341023 | 43 | −39 | gb105pln | Sequence of BAC F19P19 from Arabidopsis thaliana chromosome 1, complete sequence. | |
| 700345631H1 | g166418 | 15 | 4 | gb105allp | putative endomembrane protein; putative | |
| 700342206H1 | g2624416 | 39 | −22 | gb105pln | Zea mays mRNA for ubiquitin carrier protein UBC7. | |
| 700343922H1 | g16086 | 43 | −34 | gb105pln | A. porrum dnaJ mRNA for DNA J protein (partial). | |
| 700345438H1 | g836941 | 41 | −28 | gb105pln | Arabidopsis thaliana calcium-dependent protein kinase (CDPK19) mRNA, complete cds. | |
| 700379601H1 | g1906827 | 39 | −17 | gb105pln | A. thaliana hsp81.4 gene. | |
| 700346110H1 | g20588 | 21 | −11 | gb105pln | Pea PU1 gene mRNA for polyubiquitin. | |
| 700343889H1 | g2623679 | 71 | −67 | gb105pln | Zea mays calmodulin (Zmrcalm) mRNA, complete cds. | |
| 700343017H1 | g19070 | 51 | −38 | gb105pln | H. vulgare pazx gene encoding protein zx. | |
| 700343057H1 | g972931 | 32 | −12 | gb105eukp | IAA14; IAA14 | |
| 700344266H1 | g4392 | 19 | −11 | gb105eukp | RPL37A; ribosomal protein L37a | |
| 700342551H1 | g1710151 | 31 | −13 | gb105eukp | proline iminopeptidase | |
| 700281872H2 | g1255684 | 64 | −6 | gb105pln | Ric emRNA for aspartic protease, complete cds. | |
| 700343921H1 | g166810 | 21 | −6 | gb105pln | Arabidopsis thaliana Columbia protein kinase mRNA, complete cds. | |
| 700380294H1 | g2244788 | 11 | 17 | gb105pln | Arabidopsis thaliana DNA chromosome 4, ESSA I contig fragment No. 1. | |
| 700342488H1 | g22155 | 43 | −18 | gb105pln | Z. mays mRNA for alpha-tubulin 5. | |
| 700345002H1 | g2264307 | 16 | 6 | gb105pln | Arabidopsis thaliana genomic DNA, chromosome 5, P1 clone: MED24, complete | |
| | | | | | sequence. | |
| 700379623H1 | g2245031 | 12 | 5 | gb105pln | Arabidopsis thaliana DNA chromosome 4, ESSA I contig fragment No. 7. | |
| 700345696H1 | g1017825 | 34 | 2 | gb105allp | RNA polymerase II subunit | |
| 700343053H1 | g2149018 | 17 | −28 | gb105pln | Oryza sativa putative ADP-glucose pyrophosphyorylase subunit SH2 and putative | |
| | | | | | NADPH-dependent reductase A1 genes, complete cds. | |
| 700344751H1 | g498772 | 25 | −67 | gb105pln | Z. mays (cv DH5xDH7) hsp70-4 mRNA for heat shock protein 70. | |
| 700346621H1 | g452445 | 27 | −28 | gb105pln | Arabidopsis thaliana Landsberg erecta cycloartenol synthase (CAS1) mRNA, | |
| | | | | | complete cds. | |
| 700342374H1 | g1905943 | 59 | −47 | gb105pln | Sorghum bicolor MADS box transcription factor SbMADS1 mRNA, complete cds. | |
| 700379728H1 | g397400 | 36 | −32 | gb105pln | B. rapa mRNA for S phase specific gene. | |
| 700346426H1 | g493589 | 11 | 6 | gb105eukp | PDI; catalyze the formation of disulfide bonds; disulfide isomerase; EC 5.3.4.1 | |
| 700345587H1 | g1890574 | 63 | −50 | gb105pln | H. vulgare mRNA for xyloglucan endotransglycosylase-like protein (XEA). | |
| 700281913H2 | g169778 | 40 | −41 | gb105pln | Oryza sativa beta-amylase gene, complete cds. | |
| 700346391H1 | g416146 | 45 | −17 | gb105pln | Zea mays beta-6 tubulin (tub6) gene and mRNA, complete cds. | |
| 700345958H1 | g1574937 | 28 | −3 | gb105pln | Zea mays superoxide dismutase 4 (sod4) gene, partial cds. | |
| 700342518H1 | g2443314 | 72 | −36 | gb105allp | keratin 14 | |
| 700346250H1 | g510676 | 18 | −24 | gb105pln | Triticum aestivium pWR5 RNA for protochlorophyilide reductase. | |
| 700343210H1 | g303854 | 47 | −52 | gb105pln | Rice mRNA for ribosomal protein L7A, complete cds. | |
| 700347234H1 | g1903347 | 17 | −0 | gb105eukp | F19P19.6 | |
| 700347169H1 | g1255951 | 23 | −7 | gb105eukp | PS60 | |
| 700346478H1 | g2511540 | 13 | 15 | gb105pln | Oryza sativa DNA-binding protein GBP16 (Rgbp16) mRNA, complete cds. | |
| 700344325H1 | g42223 | 9 | 5 | gb105allp | P35 gene product (AA 1-314) | |
| 700344705H1 | g1139591 | 7 | 6 | gb105eukp | VCX1; vacuolar H+/Ca2+ exchanger | |
| 700343736H1 | g683503 | 30 | −17 | gb105pln | A. thaliana mRNA for 65 kDa regulatory subunit of protein phosphatase 2A. | |
| 700281965H1 | g2852448 | 22 | −8 | gb105pln | Arabidopsis thaliana APK2b mRNA for protein kinase, complete cds. | |
| 700379620H1 | g474009 | 71 | −61 | gb105pln | Rice mRNA, partial homologous to ribosomal protein S19 gene. | |
| 700342691H1 | g168487 | 59 | −53 | gb105pln | Maize glutathione S-transferase gene (GST-I), exons 2 and 3. | |
| 700343878H1 | g2645166 | 32 | −3 | gb105pln | Oryza sativa mRNA, similar to ubiquitin conjugating enzyme. | |
| 700344612H1 | g393400 | 85 | −74 | gb105pln | Z. mays mRNA for alpha-tubulin. | |
| 700342782H1 | g2275202 | 18 | −7 | gb105eukp | T08I13.8; acyl-CoA synthetase isolog | |
| 700343244H1 | g2662468 | 41 | −24 | gb105pln | Arabidopsis thaliana ribosomal protein S6 (rps6) mRNA, complete cds. | |
| 700344784H1 | g1248427 | 14 | 7 | gb105allp | subtilisin | |
| 700281947H2 | g2511530 | 44 | −43 | gb105pln | Eleusine indica alpha tubulin 1 (TUA1) mRNA, complete cds. | |
| 700343907H1 | g1301851 | 26 | −13 | gb105eukp | HDA1 | |
| 700379660H1 | g19342 | 22 | −10 | gb105pln | L. esculentum mRNA for ribosomal protein L2. | |
| 700342715H1 | g2315459 | 10 | −1 | gb105eukp | F41E6.13 | |
| 700344443H1 | g1872162 | 10 | 16 | gb105pln | Arabidopsis thaliana DnaJ homolog (atj) mRNA, complete cds. | |
| 700345874H1 | g1002532 | 26 | −11 | gb105pln | Arabidopsis thaliana actin-11 (ACT11) gene, complete cds. | |
| 700380124H1 | g2098574 | 12 | 5 | gb105allp | COXG | |
| 700344686H1 | g2696081 | 10 | 16 | gb105pln | Arabidopsis thaliana genomic DNA, chromosome 5, P1 clone: MXC9. | |
| 700342928H1 | g1129085 | 41 | −22 | gb105pln | Wheat mRNA for protein H2A, complete cds, clone wcH2A-9. | |
| 700344810H1 | g167244 | 35 | −24 | gb105pln | Chlorella kessleri elongation factor 2 mRNA, complete cds. | |
| 700380075H1 | g577824 | 18 | −23 | gb105pln | Z. mays gene for H2B histone (gH2B3). | |
| 700379913H1 | g2160172 | 30 | 2 | gb105eukp | F21M12.20 | |
| 700346392H1 | g553063 | 12 | 5 | gb105eukp | GST2; glutathione s-transferase | |
| 700347215H1 | g960289 | 28 | −19 | gb105eukp | anthranilate synthase alpha subunit | |
| 700344941H1 | g1632821 | 30 | −30 | gb105pln | O. sativa mRNA for transmembrane protein. | |
| 700344942H1 | g710431 | 17 | 6 | gb105pln | Glycine max low molecular weight heat shock protein Hsp23.9 (Gmhsp23.9) mRNA, | |
| | | | | | complete cds. | |
| 700380003H1 | g180941 | 56 | −37 | gb105allp | cytochrome c oxidase precursor (EC 1.9.3.1) | |
| 700346088H1 | g1181272 | 6 | 7 | gb105eukp | L2128 | |
| 700342902H1 | g886739 | 39 | −48 | gb105pln | Z. mays histone H4 gene. | |
| 700344281H1 | g508307 | 9 | 14 | gb105pln | Arabidopsis thaliana protein-serine kinase mRNA, complete cds. | |
| 700342270H1 | g1524120 | 31 | −15 | gb105pln | M. crystallinum mRNA for malate dehydrogenase. | |
| 700346863H1 | g2764573 | 10 | 15 | gb105pln | Pisum sativum mRNA for pore protein of 24 kD OEF24. | |
| 700345734H1 | g2282583 | 45 | −36 | gb105pln | Zea mays elongation factor 1-alpha (EF1-A) mRNA, complete cds. | |
| 700345348H1 | g1184773 | 97 | −79 | gb105pln | Zea mays glyceraldehyde-3-phosphate dehydrogenase GAPC3 (gpc3) mRNA, | |
| | | | | | complete cds. | |
| 700343506H1 | g2274990 | 20 | −41 | gb105pln | Hordeum vulgare mRNA for expressed sequence tag. | |
| 700343586H1 | g2316063 | 12 | −11 | gb105eukp | cyt-b; cytochrome apoenzyme b | |
| 700342330H1 | g2407278 | 11 | 5 | gb105pln | Oryza sativa aldolase mRNA, complete cds. | |
| 700344422H1 | g2661193 | 21 | −9 | gb105eukp | rp15; ribosomal protein L5 | |
| 700345628H1 | g169295 | 34 | −14 | gb105pln | Pharbitis nil heat shock protein 83 (Hsp83) gene, complete cds. | |
| 700342489H1 | g2257526 | 15 | −0 | gb105eukp | pi040; PROTEIN-TYROSINE PHOSPHATASE YVH1 | |
| 700380791H1 | g13483 | 21 | 4 | gb105allp | ATPase subunit 6 | |
| 700345416H1 | g20000 | 33 | −31 | gb105pln | N. tabacum RL2 mRNA for 60S ribosomal protein L2. | |
| 700342755H1 | g1553130 | 15 | 17 | gb105pln | Gossypium hirsutum ribosomal protein L44 isoform b (RL44), complete cds. | |
| 700380428H1 | g887793 | 67 | −33 | gb105allp | FXR1 | |
| 700379832H1 | g2661839 | 30 | −18 | gb105pln | Physcomitrella patens mRNA for adenosine kinase. | |
| 700346908H1 | g829147 | 100 | −84 | gb105pln | Z. mays gene for cyclophilin. | |
| 700379706H1 | g2814825 | 9 | 7 | gb105eukp | T10C6.12 | |
| 700346709H1 | g1944508 | 45 | −40 | gb105pln | Spinacia oleracea mRNA for stromal ascorbate peroxidase, complete cds. | |
| 700346005H1 | g972205 | 37 | 4 | gb105allp | 60S ribosomal protein P1 | |
| 700343258H1 | g1321924 | 7 | 6 | gb105allp | NAM gene product | |
| 700345650H1 | g2564051 | 27 | −20 | gb105pln | Arabidopsis thaliana genomic DNA, chromosome 5, P1 clone: MWD9, complete | |
| | | | | | sequence. | |
| 700345637H1 | g173231 | 23 | −6 | gb105pln | Yeast (Saccharomyces cerevisiae) ribosomal 5S RNA-binding protein (YL3) gene, 5′ cds. | |
| 700347208H1 | g763271 | 10 | 7 | gb105allp | Sen3p | |
| 700342393H1 | g541611 | 47 | −33 | gb105allp | cytokeratin 13 | |
| 700343811H1 | g634003 | 26 | −14 | gb105eukp | acyl-(acyl carrier protein) thioesterase; EC 3.1.2.14 | |
| 700346940H1 | g1209703 | 35 | −16 | gb105eukp | maize g11 homolog | |
| 700346440H1 | g218088 | 54 | −69 | gb105pln | Rice mRNA for ribosomal protein 117 (249 gene), partial sequence. | |
| 700343894H1 | g2511530 | 78 | −39 | gb105pln | Eleusine indica alpha tubulin 1 (TUA1) mRNA, complete cds. | |
| 700380255H1 | g2662346 | 56 | −47 | gb105pln | Oryza sativa mRNA for EF-1 alpha, complete cds. | |
| 700342311H1 | g1519400 | 44 | −36 | gb105pln | Chlorella vulgaris actin mRNA, partial cds. | |
| 700344409H1 | g168543 | 51 | −34 | gb105pln | Zea mays putative ribosomal protein S8 mRNA, partial cds. | |
| 700380278H1 | g2828011 | 11 | 15 | gb105pln | Zea mays starch synthase I precursor (Ss1) mRNA, nuclear gene encoding plastid protein, | |
| | | | | | complete cds. | |
| 700346948H1 | g395076 | 44 | −33 | gb105pln | B. rapa ribosomal protein L37a mRNA, complete CDS. | |
| 700342962H1 | g1370145 | 17 | 7 | gb105pln | L. japonicus mRNA for small GTP-binding protein, RAB11C. | |
| 700342826H1 | g968901 | 56 | −41 | gb105pln | Rice mRNA for ribosomal protein S8, complete cds. | |
| 700343236H1 | g20163 | 32 | −21 | gb105pln | O. sativa Rr15 mRNA for 5S ribosomal RNA. | |
| 700343711H1 | g1008175 | 21 | −2 | gb105eukp | ORF YJL045w | |
| 700346430H1 | g1935046 | 10 | 17 | gb105pln | Zea mays helix-loop-helix type transcription factor R (R-d:Catspaw allele) gene, exon 1, | |
| | | | | | inverted repeat, partial cds. | |
| 700342505H1 | g2130984 | 38 | −24 | gb105pln | B. napus mRNA for ribosomal protein S15a (pA813). | |
| 700342288H1 | g1905929 | 17 | −6 | gb105pln | Oryza sativa MADS box protein OsMADS45 mRNA, complete cds. | |
| 700344447H1 | g1420885 | 16 | −7 | gb105eukp | proline-rich 14 kDa protein | |
| 700345302H1 | g304668 | 23 | −2 | gb105eukp | ben | |
| 700346106H1 | g2599103 | 19 | 3 | gb105pln | Dunaliella salina 60S ribosomal protein (DSRP1) mRNA, complete cds. | |
| 700347139H1 | g1835730 | 13 | 17 | gb105pln | Oryza sativa photosystem II 10 kDa polypeptide mRNA, complete cds. | |
| 700343736H1 | g437900 | 26 | −16 | gb105pln | P. sativum mRNA for phosphoprotein phosphatase 2A 65 kDa regulatory subunit. | |
| 700346441H1 | g1654002 | 8 | 3 | gb105allp | Sop2p-like protein | |
| 700345667H1 | g2463334 | 52 | −44 | gb105pln | Oryza sativa mRNA for ribosomal protein S4. | |
| 700345584H1 | g849185 | 8 | 7 | gb105eukp | CDC40; Cdc40p | |
| 700344724H1 | g2829133 | 13 | 2 | gb105eukp | akn2; phosphorylates 3′-OH group of adenosine-5′-phosphosulfate; adenosine-5′- | |
| | | | | | phosphosulfate-kinase; EC 2.7.1.25 | |
| 700346406H1 | g19538 | 9 | 9 | gb105pln | M. crystallinum mRNA for ribosomal protein YL16. | |
| 700281967H1 | g533251 | 54 | −78 | gb105pln | Zea mays (clone pSM8) sucrose synthase 2 (Sus1) gene, complete cds. | |
| 700346337H1 | g21800 | 37 | −35 | gb105pln | T. aestivum L mRNA for histone H2B. | |
| 700343962H1 | g2425065 | 90 | −83 | gb105pln | Zea mays cysteine proteinase Mir3 (mir3) mRNA, complete cds. | |
| 700379637H1 | g2673869 | 29 | −12 | gb105pln | Antirrhinum majus mRNA for fimbriata-associated protein 2, partial. | |
| 700342536H1 | g168500 | 50 | −47 | gb105pln | Maize (Zea mays) histone H4 gene (H4C14), complete cds. | |
| 700344630H1 | g2088647 | 27 | −16 | gb105eukp | T28M21.10 | |
| 700281804H2 | g2739218 | 42 | −31 | gb105pln | Hordeum vulgare S28 ribosomal protein. | |
| 700343480H1 | g312345 | 12 | 4 | gb105allp | rat ribosomal protein L36 | |
| 700380164H1 | g22272 | 95 | −89 | gb105pln | Maize mRNA for enolase (2-phospho-D-glycerate hydrolase). | |
| 700281934H2 | g17645 | 56 | −3 | gb105allp | RIBOSOMAL PROTEIN L35a | |
| 700344241H1 | g20760 | 18 | 13 | gb105pln | P. sativum gTUB3 mRNA for beta-tubulin 3. | |
| 700344893H1 | g22293 | 7 | 5 | gb105eukp | glycine-rich protein | |
| 700380711H1 | g2286152 | 74 | −78 | gb105pln | Zea mays cytoplasmic malate dehydrogenase mRNA, complete cds. | |
| 700346910H1 | g1130617 | 28 | −3 | gb105eukp | F11A10.2 | |
| 700343858H1 | g22375 | 10 | 4 | gb105eukp | ORF | |
| 700344193H1 | g309666 | 12 | 6 | gb105allp | electron transfer flavoprotein alpha-subunit | |
| 700345065H1 | g1906827 | 47 | −57 | gb105pln | A. thaliana hsp81.4 gene. | |
| 700343661H1 | g450548 | 29 | −22 | gb105pln | O. sativa (pRSAM-1) gene for S-adenosyl methionine synthetase. | |
| 700347290H1 | g1020408 | 100 | −82 | gb105pln | Zea mays mRNA for phospholipase D, complete cds. | |
| 700343113H1 | g2656032 | 34 | −13 | gb105pln | Arabidopsis thaliana genomic DNA, chromosome 5, P1 clone: MZF18. | |
| 700345262H1 | g600768 | 37 | −22 | gb105pln | Oryza sativa cyclophilin 2 (Cyp2) mRNA, complete cds. | |
| 700342533H1 | g386764 | 65 | −8 | gb105allp | hba2 alpha globin | |
| 700343411H1 | g1052973 | 21 | −9 | gb105eukp | fructokinase; EC 2.7.1.4 | |
| 700346548H1 | g1785691 | 11 | 5 | gb105allp | ribosomal protein L5 | |
| 700379968H1 | g2570508 | 40 | −17 | gb105pln | Oryza sativa transmembrane protein mRNA, complete cds. | |
| 700343013H1 | g2599103 | 20 | −4 | gb105pln | Dunaliella salina 60S ribosomal protein (DSRP1) mRNA, complete cds. | |
| 700343846H1 | g2274990 | 51 | −41 | gb105pln | Hordeum vulgare mRNA for expressed sequence tag. | |
| 700345337H1 | g1665866 | 24 | −3 | gb105pln | C. calcitrapa mRNA for aspartic proteinase. | |
| 700346373H1 | g1890576 | 24 | −33 | gb105pln | H. vulgare mRNA for xyloglucan endotransglycosylase-like protein (XEB). | |
| 700344194H1 | g1526412 | 32 | −19 | gb105pln | Arabidopsis thaliana ATPK19 mRNA for ribosomal-protein S6 kinase homolog, | |
| | | | | | complete cds. | |
| 700344516H1 | g487932 | 23 | −9 | gb105eukp | YHR088w; Yhr088wp | |
| 700343309H1 | g386764 | 60 | −27 | gb105allp | hba2 alpha globin | |
| 700342532H1 | g1061077 | 7 | 6 | gb105allp | R07A4.1 | |
| 700347319H1 | g348695 | 25 | −11 | gb105pln | Catharanthus roseus heat shock protein 90 mRNA, complete cds. | |
| 700345255H1 | g2739371 | 18 | −4 | gb105eukp | T9J22.13 | |
| 700380141H1 | g55775 | 42 | 4 | gb105allp | alpha-tubulin | |
| 700342847H1 | g2656031 | 16 | 12 | gb105pln | Arabidopsis thaliana genomic DNA, chromosome 5, P1 clone: MXC20. | |
| 700343160H1 | g249261 | 14 | 10 | gb105pln | linamarase = beta-glucosidase [Manihot esculenta = cassava, Cranz, mRNA, 1705 nt]. | |
| 700343414H1 | g558651 | 25 | −5 | gb105pln | T. aestivum VDAC3 mRNA for voltage dependent anion channel. | |
| 700344004H1 | g2642216 | 33 | 3 | gb105pln | Oryza sativa NOI protein mRNA, complete cds. | |
| 700344822H1 | g2369713 | 23 | −34 | gb105pln | Beta vulgaris cDNA for elongation factor 2. | |
| 700347170H1 | g2811175 | 38 | −66 | gb105pln | Zea mays alternative oxidase (Aox) gene, partial cds. | |
| 700343763H1 | g1149569 | 13 | −7 | gb105eukp | athb-8; HD-zip | |
| 700379678H1 | g473602 | 50 | −76 | gb105pln | Zea mays W-22 histone H2A mRNA, complete cds. | |
| 700342344H1 | g1402896 | 19 | 2 | gb105eukp | cyclin delta-2 | |
| 700344729H1 | g1911548 | 21 | 2 | gb105allp | cytochrome c-like polypeptide [human, lung adenocarcinoma A549, Peptide, 190 aa] | |
| 700342283H1 | g2583081 | 8 | 4 | gb105allp | microsomal glutathione S-transferase 3 | |
| 700346622H1 | g2662342 | 62 | −48 | gb105pln | Oryza sativa mRNA for EF-1 alpha, complete cds. | |
| 700343251H1 | g169537 | 28 | −15 | gb105pln | Potato pyrophosphate-fructose 6-phosphate 1-phosphotransferase (PFP) alpha-subunit | |
| | | | | | mRNA, complete cds. | |
| 700346816H1 | g1773171 | 13 | 2 | gb105allp | similar to M. tuberculosis MTCY277.09 | |
| 700345984H1 | g168502 | 31 | 8 | gb105pln | Maize (Zea mays) histone H4 gene (H4C7), complete cds. | |
| 700343204H1 | g1118105 | 26 | −1 | gb105eukp | K02B2.5 | |
| 700343886H1 | g2160295 | 31 | −20 | gb105eukp | APK1b; protein tyrosine-serine-threonine kinase | |
| 700344251H1 | g940446 | 20 | 0 | gb105eukp | CYP86; cytochrome p450 | |
| 700347378H1 | g19102 | 31 | −19 | gb105eukp | Cytoplasmic large subunit ribosomal protein; ribosomal protein L17-1 | |
| 700343128H1 | g1129083 | 16 | 7 | gb105pln | Wheat mRNA for protein H2A, complete cds, clone wcH2A-2. | |
| 700379661H1 | g547477 | 24 | −3 | gb105pln | V. faba mRNA for guanine nucleotide regulatory protein. | |
| 700347285H1 | g972919 | 18 | 2 | gb105eukp | IAA8; IAA8 | |
| 700342647H1 | g600115 | 33 | −10 | gb105pln | Z. mays apx gene encoding cytosolic ascorbate peroxidase. | |
| 700344631H1 | g1064924 | 18 | −0 | gb105pln | N. tabacum mRNA for cyclin A-like protein (clone 105). | |
| 700345809H1 | g170746 | 12 | 16 | gb105pln | Wheat histone H4 TH091 gene, complete cds. | |
| 700380716H1 | g28547 | 40 | −22 | gb105allp | alpha globin | |
| 700379735H1 | g2369713 | 37 | −26 | gb105pln | Beta vulgaris cDNA for elongation factor 2. | |
| 700346857H1 | g1184596 | 13 | 3 | gb105eukp | T11G6.3 | |
| 700343531H1 | g1658312 | 16 | −12 | gb105pln | O. sativa osr40g2 gene. | |
| 700345761H1 | g1706957 | 43 | −11 | gb105pln | Gossypium hirsutum cellulose synthase (celA2) mRNA, partial cds. | |
| 700343711H1 | g407500 | 18 | −0 | gb105eukp | unknown | |
| 700343038H1 | g1778377 | 28 | −20 | gb105pln | Pisum sativum NAP1Ps mRNA, complete cds. | |
| 700342257H1 | g2760173 | 23 | −6 | gb105pln | Arabidopsis thaliana genomic DNA, chromosome 5, P1 clone: MYH19, complete | |
| | | | | | sequence. | |
| 700344302H1 | g577824 | 27 | −27 | gb105pln | Z. mays gene for H2B histone (gH2B3). | |
| 700343953H1 | g1498052 | 60 | −54 | gb105pln | Zea mays ribosomal protein S8 mRNA, complete cds. | |
| 700346083H1 | g556672 | 31 | −14 | gb105pln | S. cereale (Halo) chloroplast mRNA for heat-shock protein. | |
| 700342516H1 | g435172 | 70 | −62 | gb105pln | A. sativa (Pewi) ASTCP-K19 mRNA for t complex polypeptide 1. | |
| 700342440H1 | g7117 | 28 | −29 | gb105eukp | ribosomal YL10 protein homologue | |
| 700343055H1 | g2239259 | 96 | −25 | gb105pln | Zea mays mRNA for cinnamoyl CoA reductase. | |
| 700345564H1 | g2827698 | 21 | 1 | gb105pln | Arabidopsis thaliana DNA chromosome 4, BAC clone F6H11 (ESSAI project). | |
| 700345628H1 | g300082 | 26 | −4 | gb105pln | hsp82 = 82 kda heat shock protein [Zea mays, seedling, leaves, Genomic, 3468 nt]. | |
| 700345515H1 | g2191126 | 12 | 15 | gb105pln | Arabidopsis thaliana BAC IG002N01. | |
| 700342866H1 | g1658341 | 60 | −5 | gb105eukp | T22F3.4 | |
| 700343928H1 | g2213424 | 37 | −28 | gb105pln | Citrus paradisi mRNA for hypothetical protein. | |
| 700345155H1 | g2262173 | 21 | 4 | gb105eukp | F5J6.18; NADPH thioredoxin reductase | |
| 700345951H1 | g2668743 | 53 | −21 | gb105pln | Zea mays ubiquitin conjugating enzyme (UBC) mRNA, complete cds. | |
| 700342671H1 | g2351063 | 19 | 4 | gb105pln | Arabidopsis thaliana genomic DNA, chromosome 5, P1 clone: MCL19. | |
| 700344310H1 | g2583129 | 27 | −9 | gb105eukp | F4L23.25; putative methionine aminopeptidase | |
| 700345257H1 | g337518 | 13 | 6 | gb105allp | ribosomal protein | |
| 700343778H1 | g170228 | 24 | −23 | gb105pln | N. tabacum 5-enolpyruvylshikimate-3-phosphate synthase mRNA, complete cds. | |
| 700380074H1 | g498774 | 45 | −44 | gb105pln | Z. mays (cv DH5xDH7) hsp 70-5 mRNA for heat shock protein 70. | |
| 700380479H1 | g2369810 | 14 | 8 | gb105allp | ribosomal protein S24 | |
| 700343470H1 | g20250 | 65 | −43 | gb105pln | Oryza sativa H3 histone gene H3R-11. | |
| 700345318H1 | g1597723 | 7 | 7 | gb105allp | CRINKLY4 precursor | |
| 700342825H1 | g1049252 | 60 | −23 | gb105pln | Zea mays vacuolar ATPase 69 kDa subunit mRNA, partial cds. | |
| 700342722H1 | g1354932 | 14 | 10 | gb105pln | Olea europaeafruit stearoyl-ACP desaturase, complete cds. | |
| 700343924H1 | g167107 | 23 | −14 | gb105pln | Hordeum vulgare vacuolar ATPase B subunit isoform mRNA, complete cds. | |
| 700344505H1 | g2098574 | 11 | 2 | gb105allp | COXG | |
| 700345259H1 | g2208914 | 7 | −1 | gb105eukp | outer arm dynein LC6 | |
| 700346341H1 | g531031 | 14 | −15 | gb105pln | Pennisetum ciliare apomixis-associated mRNA. | |
| 700380473H1 | g22121 | 58 | −59 | gb105pln | Maize alcohol dehydrogenase 1 gene (Adh1-1F). | |
| 700346011H1 | g1128947 | 18 | 2 | gb105allp | ORF X; putative | |
| 700281891H2 | g487961 | 16 | −3 | gb105eukp | YHR065c; Yhr065cp | |
| 700342855H1 | g168502 | 29 | 17 | gb105pln | Maize (Zea mays) histone H4 gene (H4C7), complete cds. | |
| 700343654H1 | g147716 | 11 | 5 | gb105allp | ribosomal protein L17 | |
| 700346661H1 | g22149 | 77 | −65 | gb105pln | Z. mays mRNA for alpha-tubulin 3. | |
| 700379778H1 | g1015460 | 25 | 1 | gb105eukp | F26C11.1 | |
| 700342419H1 | g398605 | 12 | 5 | gb105pln | A. thaliana gene for elongation factor 1 beta. | |
| 700346193H1 | g533251 | 44 | −6 | gb105pln | Zea mays (clone pSM8) sucrose synthase 2 (Sus1) gene, complete cds. | |
| 700344509H1 | g500852 | 78 | −64 | gb105pln | Zea mays (clone pAKHSDH2) aspartate kinase-homserine dehydrogenase mRNA, | |
| | | | | | complete cds. | |
| 700380003H1 | g180937 | 56 | −37 | gb105allp | COX5B | |
| 700379646H1 | g474000 | 58 | −48 | gb105pln | Rice mRNA, partial homologous to ribosomal protein L37a gene. | |
| 700345522H1 | g2695940 | 34 | −20 | gb105pln | Hordeum vulgare mRNA for ribosomal like-protein, clone RG131. | |
| 700344002H1 | g2809232 | 17 | 7 | gb105eukp | F21B7.1 | |
| 700379628H1 | g432606 | 49 | −37 | gb105pln | ric1 = ras-related GTP binding protein possessing GTPase activity [Oryza sativa = rice, | |
| | | | | | Yamahoushi, callus, mRNA, 955 nt]. | |
| 700342862H1 | g600768 | 40 | 6 | gb105pln | Oryza sativa cyclophilin 2 (Cyp2) mRNA, complete cds. | |
| 700342657H1 | g2297175 | 22 | 4 | gb105allp | PROLINE IMINOPEPTIDASE | |
| 700343648H1 | g625108 | 42 | −5 | gb105eukp | YLR388W; Ylr388wp | |
| 700342738H1 | g2318116 | 34 | −41 | gb105pln | Pisum sativum Mg-chelatase subunit D (ChlD) mRNA, complete cds. | |
| 700345111H1 | g2160162 | 22 | −14 | gb105eukp | F21M12.8 | |
| 700347314H1 | g514945 | 25 | −18 | gb105pln | Zea mays sucrose synthase (Sus1) mRNA, complete cds. | |
| 700342604H1 | g2760330 | 13 | 4 | gb105eukp | F1N21.15 | |
| 700380681H1 | g2565339 | 17 | −4 | gb105pln | Lupinus luteus ribosomal protein S14 (rps14) mRNA, complete cds. | |
| 700342374H1 | g939780 | 44 | −26 | gb105pln | Zea mays MADS-box protein (ZAG5) mRNA, complete cds. | |
| 700343502H1 | g218227 | 35 | −50 | gb105pln | Rice mRNA for ras-related GTP binding protein, complete cds. | |
| 700342210H1 | g1321917 | 47 | −18 | gb105eukp | su12; cytoplasmic ribosomal protein S7 | |
| 700281875H2 | g2827001 | 47 | −44 | gb105pln | Triticum aestivum 70 kDa heat shock protein (TaHSP70d) mRNA, complete cds. | |
| 700344826H1 | g913941 | 11 | 3 | gb105allp | aldehyde dehydrogenase homolog = btg-26 [Brassica napus, cv. Bridger, Peptide, | |
| | | | | | 494 aa] | |
| 700345682H1 | g20255 | 50 | −7 | gb105pln | O. sativa gene for heat shock protein 82 HSP82. | |
| 700345894H1 | g780371 | 41 | −18 | gb105pln | Oryza sativa enolase mRNA, complete cds. | |
| 700347277H1 | g2351065 | 12 | 13 | gb105pln | Arabidopsis thaliana genomic DNA, chromosome 5, P1 clone: MHF15. | |
| 700346159H1 | g19701 | 12 | 9 | gb105pln | N. plumbaginifolia mRNA NeIF-5A2 for initiation factor 5A(2). | |
| 700343950H1 | g552063 | 20 | 4 | gb105allp | actin | |
| 700347006H1 | g2351067 | 12 | 14 | gb105pln | Arabidopsis thaliana genomic DNA, chromosome 5, P1 clone: MPO12. | |
| 700346196H1 | g393400 | 95 | −78 | gb105pln | Z. mays mRNA for alpha-tubulin. | |
| 700344814H1 | g1103393 | 30 | −13 | gb105eukp | GCTK 2; signal transduction; Sponge receptor tyrosine kinase; EC 2.7.1.112 | |
| 700344702H1 | g493707 | 59 | −48 | gb105pln | Rice mRNA for beta-tubulin, complete cds. | |
| 700346708H1 | g397395 | 100 | −96 | gb105pln | Z. mays MNB1b mRNA for DNA-binding protein. | |
| 700346229H1 | g170224 | 43 | −35 | gb105pln | Nicotiana tabacum 3-deoxy-D-arabino-heptulosonate 7-phosphate synthase, | |
| | | | | | complete cds. | |
| 700342840H1 | g2431766 | 87 | −73 | gb105pln | Zea mays acidic ribosomal protein P3a (rpp3a) mRNA, complete cds. | |
| 700344923H1 | g1373395 | 21 | 0 | gb105pln | Arabidopsis thaliana FK506 binding protein FKBP62 (ROF1) gene, complete cds. | |
| 700346461H1 | g533251 | 54 | −57 | gb105pln | Zea mays (clone pSM8) sucrose synthase 2 (Sus1) gene, complete cds. | |
| 700344281H1 | g867996 | 9 | 14 | gb105pln | Arabidopsis thaliana ATPK6 mRNA for ribosomal-protein S6 kinase homolog, | |
| | | | | | complete cds. | |
| 700344629H1 | g1061037 | 29 | −16 | gb105pln | A. thaliana mRNA for sterol-C5-desaturase. | |
| 700380456H1 | g1881694 | 44 | −73 | gb105pln | Zea mays phosphoglucomutase mRNA, partial cds. | |
| 700346214H1 | g2358139 | 14 | −5 | gb105pln | Arabidopsis thaliana chromosome 1 YAC yUP8H12 complete sequence. | |
| 700342292H1 | g2662342 | 59 | −45 | gb105pln | Oryza sativa mRNA for EF-1 alpha, complete cds. | |
| 700346487H1 | g642133 | 28 | −10 | gb105pln | Arabidopsis thaliana AME3 mRNA for protein kinase, complete cds. | |
| 700346469H1 | g21800 | 22 | −27 | gb105pln | T. aestivum L mRNA for histone H2B. | |
| 700343280H1 | g425196 | 12 | 2 | gb105allp | adenylate kinase | |
| 700345521H1 | g1143391 | 25 | −12 | gb105pln | A. thaliana mRNA for uridine diphosphate glucose epimerase. | |
| 700344607H1 | g20321 | 13 | 3 | gb105pln | Oryza sativa Rac1 mRNA for actin. | |
| 700380171H1 | g1911582 | 11 | 5 | gb105eukp | Cyn d 1; Cyn d 1 | |
| 700345302H1 | g546724 | 23 | −2 | gb105eukp | ben | |
| 700343711H1 | g172551 | 18 | −0 | gb105eukp | SDH1; succinate dehydrogenase flavoprotein subunit | |
| 700344389H1 | g940843 | 8 | 1 | gb105allp | orf 06116 | |
| 700346921H1 | g168500 | 61 | −43 | gb105pln | Maize (Zea mays) histone H4 gene (H4C14), complete cds. | |
| 700346824H1 | g297889 | 34 | −9 | gb105eukp | B2 protein | |
| 700346546H1 | g1325967 | 21 | −4 | gb105pln | T. aestivum histone H2A gene (clone TH274). | |
| 700342243H1 | g2511572 | 21 | 1 | gb105eukp | prcga; multicatalytic endopeptidase; EC 3.4.99.46 | |
| 700345962H1 | g1429287 | 9 | 5 | gb105allp | F58H1.3 | |
| 700342706H1 | g303852 | 56 | −69 | gb105pln | Rice mRNA for ribosomal protein L3, complete cds. | |
| 700343377H1 | g407800 | 24 | 6 | gb105pln | G. hirsutum mRNA for ribosomal protein 41, large subunit (RL41). | |
| 700347174H1 | g532571 | 39 | −25 | gb105pln | Barley lipoxygenase 1 (LoxA) gene, complete cds. | |
| 700344915H1 | g2191149 | 27 | −13 | gb105eukp | A_IG002N01.22 | |
| 700346915H1 | g2739197 | 6 | 5 | gb105eukp | pinA; peptidyl-prolyl cis/trans isomerase | |
| 700345661H1 | g1405747 | 17 | −0 | gb105allp | PR264/SC35 | |
| 700379665H1 | g1321660 | 48 | −29 | gb105pln | Rice mRNA for ascorbate peroxidase, complete cds. | |
| 700345752H1 | g2737891 | 26 | −14 | gb105pln | Sartorya fumigata nucleolar protein AfCbf5p (AfCBF5p) mRNA, complete cds. | |
| 700344634H1 | g577187 | 28 | −10 | gb105eukp | CDC46; Cdc46p | |
| 700343909H1 | g1872162 | 27 | −7 | gb105pln | Arabidopsis thaliana DnaJ homolog (atj) mRNA, complete cds. | |
| 700345539H1 | g168406 | 13 | 16 | gb105pln | Z. mays alcohol dehydrogenase (ADH-1 C-m allele) gene, complete cds. | |
| 700344601H1 | g908831 | 36 | −13 | gb105eukp | C09H10.3 | |
| 700342311H1 | g1906606 | 47 | −40 | gb105pln | Cyanophora paradoxa actin gene, partial cds. | |
| 700343416H1 | g1707006 | 26 | −11 | gb105pln | Arabidopsis thaliana chromosome II BAC T01B08 genomic sequence, complete | |
| | | | | | sequence. | |
| 700342722H1 | g976256 | 31 | −16 | gb105pln | Rice mRNA stearyl-ACP desaturase, complete cds. | |
| 700342453H1 | g166818 | 38 | −30 | gb105pln | Arabidopsis thaliana protein kinase mRNA, complete cds. | |
| 700342364H1 | g2668737 | 33 | −48 | gb105pln | Zea mays translation initiation factor 5A (TIF5A) mRNA, complete cds. | |
| 700342902H1 | g170746 | 38 | −48 | gb105pln | Wheat histone H4 TH091 gene, complete cds. | |
| 700346126H1 | g1771160 | 26 | −6 | gb105eukp | SBT1; serine protease | |
| 700345663H1 | g1330395 | 17 | −10 | gb105eukp | C01F1.3 | |
| 700343176H1 | g1495273 | 21 | −4 | gb105eukp | sugar transporter | |
| 700346827H1 | g485744 | 25 | 6 | gb105allp | pyrophosphatase | |
| 700346207H1 | g1742893 | 9 | 6 | gb105allp | Sorbitol dehydrogenase (EC 1.1.1.14) (L-iditol 2-dehydrogenase). | |
| 700342378H1 | g168496 | 76 | −78 | gb105pln | Maize (Zea mays) histone H3 gene (H3C4), complete cds. | |
| 700343440H1 | g1184595 | 14 | 0 | gb105eukp | T11G6.2 | |
| 700344090H1 | g2632253 | 76 | −70 | gb105pln | S. bicolor mRNA for putative protein serine/threonine kinase, clone cSNFL2. | |
| 700380248H1 | g968901 | 54 | −44 | gb105pln | Rice mRNA for ribosomal protein S8, complete cds. | |
| 700343050H1 | g1323417 | 21 | −11 | gb105eukp | ORF YGR231c | |
| 700346238H1 | g303852 | 52 | −39 | gb105pln | Rice mRNA for ribosomal protein L3, complete cds. | |
| 700344411H1 | g2266661 | 16 | −35 | gb105pln | Hordeum vulgare mRNA for 14-3-3 protein (Hv1433c). | |
| 700346978H1 | g1129144 | 44 | −34 | gb105pln | M. indica (Manila) THMF5 mRNA for 3-ketoacyl-coA thiolase B. | |
| 700343507H1 | g474015 | 46 | −27 | gb105pln | Rice mRNA, partial homologous to calmodulin gene. | |
| 700344208H1 | g22280 | 10 | 6 | gb105eukp | GSTIII (aa 1-220) | |
| 700346790H1 | g1938235 | 25 | −14 | gb105pln | R. communis mRNA for acyl-CoA-binding protein. | |
| 700345505H1 | g2282583 | 93 | −84 | gb105pln | Zea mays elongation factor 1-alpha (EF1-A) mRNA, complete cds. | |
| 700342360H1 | g1620661 | 57 | −60 | gb105pln | Triticum aestivum 1,4-alpha-D-glucan 6-alpha-D-(1,4-alpha-D-glucanotransferase | |
| | | | | | mRNA, complete cds. | |
| 700343574H1 | g1575127 | 78 | −71 | gb105pln | Zea mays lumenal binding protein cBiPe2 mRNA, complete cds. | |
| 700345002H1 | g2739218 | 43 | −21 | gb105pln | Hordeum vulgare S28 ribosomal protein. | |
| 700346295H1 | g1749777 | 15 | −3 | gb105eukp | Minute(3)66D; ribosomal protein L14 | |
| 700345080H1 | g534915 | 23 | −24 | gb105pln | S. tuberosum (Desiree) ppa mRNA for soluble inorganic pyrophosphatase. | |
| 700380701H1 | g2342860 | 6 | 4 | gb105eukp | E4/E8 binding protein-1 | |
| 700379629H1 | g166548 | 14 | 13 | gb105pln | Avena sativa vacuolar H+-ATPase 16 kDa proteolipid subunit (vatp-P1) mRNA, | |
| | | | | | complete cds. | |
| 700342824H1 | g602605 | 36 | −58 | gb105pln | Zea mays tandem genes for alpha1-tubulin and alpha2-tubulin. | |
| 700380655H1 | g1658312 | 26 | −36 | gb105pln | O. sativa osr40g2 gene. | |
| 700380401H1 | g2695678 | 29 | −15 | gb105pln | Spinacia oleracea heat shock 70 protein (HSC70-11) mRNA, nuclear gene encoding | |
| | | | | | mitochondrial protein, complete cds. | |
| 700379869H1 | g968901 | 74 | −68 | gb105pln | Rice mRNA for ribosomal protein S8, complete cds. | |
| 700346080H1 | g158191 | 11 | −1 | gb105eukp | pum; pumilio protein | |
| 700345574H1 | g2160177 | 14 | 1 | gb105eukp | F21M12.26 | |
| 700342876H1 | g415316 | 57 | −43 | gb105pln | Rice mRNA for acidic ribosomal protein P0, complete cds. | |
| 700343903H1 | g536895 | 28 | −42 | gb105pln | Wheat mRNA for protein H2A, complete cds, clone wcH2A-10. | |
| 700379721H1 | g1707480 | 8 | 5 | gb105allp | CRM1 | |
| 700347063H1 | g1322489 | 38 | −24 | gb105eukp | STT3 | |
| 700380717H1 | g1262581 | 33 | 8 | gb105allp | cytochrome c oxidase subunit 1 | |
| 700380440H1 | g340201 | 18 | 5 | gb105allp | voltage-dependent anion channel | |
| 700347167H1 | g22151 | 56 | −35 | gb105pln | Z. mays (A188) mRNA for alpha-tubulin 4. | |
| 700346529H1 | g473602 | 46 | −36 | gb150pln | Zea mays W-22 histone H2A mRNA, complete cds. | |
| 700342477H1 | g2262141 | 7 | 5 | gb105eukp | T10P11.8; hypothetical protein | |
| 700345457H1 | g1905943 | 20 | −12 | gb105pln | Sorghum bicolor MADS box transcription factor SbMADS1 mRNA, complete cds. | |
| 700380658H1 | g2058313 | 29 | 8 | gb105eukp | CCR1; cinnamoyl-CoA reductase; EC 1.2.1.44 | |
| 700347195H1 | g587074 | 21 | 3 | gb105allp | putative IEF | |
| 700342934H1 | g1694975 | 25 | −6 | gb105pln | A. thaliana mRNA for HMG 1 protein. | |
| 700343250H1 | g2832689 | 19 | −13 | gb105pln | Arabidopsis thaliana DNA chromosome 4, BAC clone T9A21 (ESSAII project). | |
| 700343729H1 | g2244973 | 12 | −3 | gb105eukp | similarity to extensin class 1 protein | |
| 700380278H1 | g1200153 | 37 | −29 | gb105pln | S. tuberosum mRNA for starch synthase. | |
| 700347132H1 | g2282583 | 77 | −16 | gb105pln | Zea mays elongation factor 1-alpha (EF1-A) mRNA, complete cds. | |
| 700342967H1 | g20250 | 66 | −54 | gb105pln | Oryza sativa H3 hstone gene H3R-11. | |
| 700379668H1 | g5331 | 20 | −2 | gb105eukp | YCL033c, len:168 | |
| 700342580H1 | g950052 | 23 | −16 | gb105pln | H. vulgare mRNA for HMG1/2-like protein. | |
| 700342566H1 | g431265 | 14 | 14 | gb105pln | Arabidopsis thaliana ubiquitin conjugating enzyme (UBC4) gene, complete cds and | |
| | | | | | flanking regions. | |
| 700344058H1 | g176779 | 71 | −32 | gb105allp | gamma-2 globin | |
| 700345281H1 | g600768 | 41 | −33 | gb105pln | Oryza sativa cyclophilin 2 (Cyp2) mRNA, complete cds. | |
| 700342772H1 | g1183936 | 13 | −6 | gb105pln | P. sativum 5S rRNA gene. | |
| 700281924H2 | g1100222 | 42 | −34 | gb105pln | Pinus sylvestris chloroplast NAD+-dependent glyceraldehyde-3-phosphate dehydrogenase | |
| | | | | | mRNA, complete cds. | |
| 700342278H1 | g1335578 | 4 | 6 | gb105allp | gag p15 protein | |
| 700343958H1 | g1000464 | 16 | −5 | gb105eukp | C27B7.1 | |
| 700281881H2 | g1617213 | 19 | 3 | gb105eukp | CP12 | |
| 700346275H1 | g1519252 | 15 | −4 | gb105pln | Oryza sativa GF14-d protein mRNA, complete cds. | |
| 700343660H1 | g1049327 | 51 | −53 | gb105pln | Bourreria succulenta 18S ribosomal RNA gene, partial sequence. | |
| 700346889H1 | g2407800 | 32 | −3 | gb105eukp | H2Av; histone H2A.F/Z | |
| 700346694H1 | g1706958 | 86 | 1 | gb105eukp | celA2; cellulose synthase | |
| 700343221H1 | g1236272 | 24 | −14 | gb105eukp | putative ribosomal protein L26, most similar to pir: S51347 (68.6% identity in 121 aa | |
| | | | | | overlap) | |
| 700344621H1 | g4392 | 22 | −7 | gb105eukp | RPL37A; ribosomal protein L37a | |
| 700346518H1 | g1498385 | 54 | −62 | gb105pln | Zea mays actin (Maz87) gene, partial cds. | |
| 700343057H1 | g2618723 | 35 | −12 | gb105eukp | IAA17; IAA17 | |
| 700344630H1 | g2352494 | 7 | 5 | gb105eukp | TIR1; transport inhibitor response 1 | |
| 700380515H1 | g2570839 | 5 | 7 | gb105allp | synaptojanin 2 | |
| 700379656H1 | g2267592 | 38 | −34 | gb105pln | Oryza sativa glycine-rich RNA-binding protein mRNA, complete cds. | |
| 700343803H1 | g2244747 | 17 | −2 | gb105pln | Arabidopsis thaliana DNA chromosome 4, ESSA I contig fragment No. 0. | |
| 700342653H1 | g567106 | 15 | 4 | gb105allp | RNA binding protein | |
| 700281911H1 | g22275 | 18 | 16 | gb105pln | Maize mRNA for ferritin (clone FM1). | |
| 700345410H1 | g2262143 | 49 | −22 | gb105eukp | T10P11.10; putative serine/threonine protein kinase/T10P11.10 | |
| 700346440H1 | g310932 | 36 | −42 | gb105pln | Nicotiana tabacum ribosomal protein L17 mRNA, complete cds. | |
| 700345663H1 | g1072251 | 24 | −8 | gb105eukp | F53B1.4 | |
| 700344923H1 | g854625 | 42 | −46 | gb105pln | T. aestivum mRNA for peptidylprolyl cis-trans isomerase, FK506. | |
| 700346975H1 | g500638 | 7 | 7 | gb105allp | hnRNP protein A2 | |
| 700343359H1 | g2464924 | 18 | 2 | gb105eukp | hypothetical protein | |
| 700346959H1 | g1848280 | 20 | −15 | gb105pln | Sorghum bicolor membrane intrinsic protein (Mip1) mRNA, partial cds. | |
| 700343573H1 | g1107562 | 32 | −16 | gb105eukp | RpS13; ribosomal protein S13 | |
| 700344603H1 | g285965 | 80 | −42 | gb105allp | The sequence from bp313 to bp1374 is almost identical to human farnesyl pyrophosphate | |
| | | | | | synthetase mRNA. | |
| 700345132H1 | g1498052 | 73 | −21 | gb105pln | Zea mays ribosomal protein S8 mRNA, complete cds. | |
| 700343667H1 | g218082 | 19 | −19 | gb105pln | Rice mRNA for initiation factor eIF-4D (225 gene), partial sequence. | |
| 700344031H1 | g1523914 | 58 | 5 | gb105allp | F25H2.9 | |
| 700380164H1 | g602252 | 45 | −41 | gb105pln | Zea mays enolase (eno2) mRNA, complete cds. | |
| 700379608H1 | g886739 | 46 | −43 | gb105pln | Z. mays histone H4 gene. | |
| 700345454H1 | g35597 | 10 | 6 | gb105allp | PR 264 | |
| 700344241H1 | g398848 | 36 | −66 | gb105pln | Z. mays mRNA for beta 5 tubulin. | |
| 700343159H1 | g2781345 | 38 | −10 | gb105eukp | F24O1.2 | |
| 700343892H1 | g168502 | 50 | −38 | gb105pln | Maize (Zea mays) histone H4 gene (H4C7), complete cds. | |
| 700347095H1 | g287911 | 8 | 8 | gb105allp | CDC39 | |
| 700342692H1 | g1149570 | 48 | −36 | gb105pln | A. thaliana mRNA for mitochondrial elongation factor Tu. | |
| 700344325H1 | g42219 | 9 | 5 | gb105allp | P35 gene product (AA 1-314) | |
| 700344182H1 | g1143426 | 45 | −35 | gb105pln | C. sativus mRNA for heat shock protein 70 (hsp70). | |
| 700346213H1 | g2145472 | 31 | −26 | gb105pln | S. tuberosum mRNA for aconitase/aconitate hydratase. | |
| 700343041H1 | g1778820 | 40 | −40 | gb105pln | Oryza sativa S-adenosyl-L-methionine synthetase (pOS-SAMS2) mRNA, complete cds. | |
| 700379989H1 | g535588 | 15 | 1 | gb105eukp | atj; molecular chaperone | |
| 700345707H1 | g1556445 | 33 | −21 | gb105pln | Hordeum vulgare alpha tubulin (tubA) mRNA, complete cds. | |
| 700346114H1 | g312253 | 27 | −10 | gb105allp | calpactin I heavy chain | |
| 700345701H1 | g398605 | 11 | 1 | gb105pln | A. thaliana gene for elongation factor 1 beta. | |
| 700344661H1 | g1546918 | 90 | −41 | gb105pln | Z. mays mRNA for translation initiation factor 5A. | |
| 700343820H1 | g581023 | 8 | 5 | gb105allp | elongation factor 1-alpha | |
| 700380408H1 | g514394 | 11 | −1 | gb105pln | Catharanthus roseus cyc07 gene, exon1-7, complete cds. | |
| 700346953H1 | g557681 | 59 | −60 | gb105pln | Z. mays mRNA for ribosomal protein S28. | |
| 700346863H1 | g2764574 | 24 | −9 | gb105eukp | pore protein of 24 kD (OEP24) | |
| 700346708H1 | g22328 | 100 | −96 | gb105pln | Maize mRNA for a high mobility group protein. | |
| 700343857H1 | g2462742 | 18 | −12 | gb105eukp | F8A5.25 | |
| 700344979H1 | g710550 | 11 | 4 | gb105allp | ankyrin 3 | |
| 700343320H1 | g1230697 | 27 | −5 | gb105eukp | YPR094W; Ypr094wp | |
| 700342992H1 | g20163 | 41 | −23 | gb105pln | O. sativa Rr15 mRNA for 5S ribosomal RNA. | |
| 700343280H1 | g216516 | 11 | −1 | gb105allp | adenylate kinase | |
| 700342330H1 | g2407279 | 13 | 2 | gb105allp | aldolase | |
| 700344461H1 | g1632830 | 23 | 7 | gb105pln | R. communis mRNA (unknown). | |
| 700346249H1 | g1155217 | 11 | 3 | gb105eukp | Pti1; sereine/threonine protein kinase; Pto kinase interactor 1 | |
| 700345807H1 | g182518 | 28 | 4 | gb105allp | ferritin light subunit | |
| 700343490H1 | g1906827 | 26 | 3 | gb105pln | A. thaliana hsp81.4 gene. | |
| 700346917H1 | g2760323 | 36 | −8 | gb105eukp | F1N21.8 | |
| 700343439H1 | g170746 | 72 | −57 | gb105pln | Wheat histone H4 TH091 gene, complete cds. | |
| 700347257H1 | g1519248 | 50 | −42 | gb105pln | Oryza sativa GF14-b protein mRNA, complete cds. | |
| 700345910H1 | g2245126 | 12 | 14 | gb105pln | Arabidopsis thaliana DNA chromosome 4, ESSA I contig fragment No. 9. | |
| 700379656H1 | g2668741 | 87 | −79 | gb105pln | Zea mays glycine-rich RNA binding protein (GRP) mRNA, complete cds. | |
| 700347040H1 | g1322613 | 31 | −14 | gb105eukp | ORF YGL087c | |
| 700343162H1 | g460041 | 27 | −11 | gb105pln | Yeast (Saccharomyces cerevisiae) DBF3 gene, complete cds. | |
| 700380088H1 | g4352 | 29 | −12 | gb105pln | Yeast (Saccharomyces cerevisiae) gene for RNA-helicase. | |
| 700342206H1 | g170783 | 22 | −16 | gb105pln | T. aestivum ubiquitin carrier protein mRNA. | |
| 700343811H1 | g804948 | 26 | −14 | gb105eukp | acyl-(acyl carrier protein) thioesterase; EC 3.1.2.14 | |
| 700379988H1 | g1408470 | 19 | 5 | gb105pln | Arabidopsis thaliana actin depolymerizing factor 1 (AtADF1) mRNA, complete cds. | |
| 700281876H2 | g506860 | 92 | −11 | gb105eukp | HRSec61 | |
| 700344603H1 | g182399 | 80 | −43 | gb105allp | farnesyl pyrophosphate synthetase (EC 2.5.1.1) | |
| 700346721H1 | g2656016 | 9 | 6 | gb105allp | cell-cycle regulatory protein | |
| 700342744H1 | g1743006 | 23 | −6 | gb105pln | C. paradoxa mRNA for ribosomal protein L13a. | |
| 700380443H1 | g520935 | 32 | −47 | gb105pln | H. vulgare mRNA for gamma-TIP-like protein. | |
| 700342512H1 | g556018 | 57 | −49 | gb105pln | Barley glutamate 1-semialdehyde aminotransferase (GSA) mRNA, complete cds. | |
| 700344959H1 | g1504022 | 71 | −24 | gb105allp | KIAA0220 | |
| 700345930H1 | g2583106 | 23 | −2 | gb105pln | Arabidopsis thaliana chromosome II BAC F4L23 genomic sequence, complete sequence. | |
| 700346119H1 | g2529386 | 32 | −61 | gb105pln | Zea mays triosephosphate isomerase 1 gene, exon 2-9 and complete cds. | |
| 700346010H1 | g158308 | 29 | −13 | gb105eukp | Dsub\Rp49 | |
| 700343593H1 | g52783 | 33 | −17 | gb105allp | 47 kd keratin | |
| 700343104H1 | g187622 | 21 | −8 | gb105allp | MHC class I antigen | |
| 700345413H1 | g2511530 | 75 | −66 | gb105pln | Eleusine indica alpha tubulin 1 (TUA1) mRNA, complete cds. | |
| 700344310H1 | g662342 | 22 | −7 | gb105eukp | MAP1; Map1p: methionine aminopeptidase | |
| 700380717H1 | g13006 | 33 | 8 | gb105allp | cytochrome oxidase I | |
| 700379954H1 | g2618602 | 20 | −21 | gb105pln | Arabidopsis thaliana genomic DNA, chromosome 5, P1 clone; MSJ1, complete | |
| | | | | | sequence. | |
| 700345641H1 | g22322 | 18 | 2 | gb105pln | Z. mays mRNA for H2B histone (clone cH2B214). | |
| 700344418H1 | g643074 | 21 | 0 | gb105eukp | putative 40S ribosomal protein s12 | |
| 700343947H1 | g2739433 | 10 | 3 | gb105allp | hematopoietic-specific IL-2 deubiquitinating enzyme | |
| 700345012H1 | g1001312 | 13 | 1 | gb105allp | hypothetical protein | |
| 700344748H1 | g170132 | 44 | −39 | gb105pln | Spinach chloroplast ribosomal protein L13 mRNA, complete cds. | |
| 700379711H1 | g168498 | 23 | −20 | gb105pln | Corn histone H4 (H4C13) gene, complete cds. | |
| 700343490H1 | g300082 | 34 | −5 | gb105pln | hsp82 = 82 kda heat shock protein [Zea mays, seedling, leaves, Genomic, 3468 nt]. | |
| 700343303H1 | g577824 | 41 | −45 | gb105pln | Z. mays gene for H2B histone (gH2B3). | |
| 700345031H1 | g915312 | 39 | −23 | gb105pln | Nicotiana glutinosa ribosomal protein L31 mRNA, complete cds. | |
| 700343061H1 | g2351378 | 19 | −4 | gb105allp | eIF3-p66 | |
| 700346735H1 | g2511530 | 58 | −59 | gb105pln | Eleusine indica alpha tubulin 1 (TUA1) mRNA, complete cds. | |
| 700342945H1 | g1695692 | 22 | 1 | gb105eukp | diminuto | |
| 700343962H1 | g218182 | 30 | −25 | gb105pln | Rice mRNA for oryzain beta (EC 3.4.22). | |
| 700380765H1 | g1743356 | 39 | −9 | gb105eukp | proteasome delta subunit | |
| 700345572H1 | g218241 | 18 | −32 | gb105pln | Rice mRNA for ribosomal protein L3 (T82 gene), partial sequence. | |
| 700342273H1 | g13014 | 7 | 7 | gb105allp | URF 5 (NADH dehydrogenase subunit) | |
| 700343622H1 | g1296954 | 24 | −5 | gb105pln | O. sativa mRNA for novel protein, osr40c1. | |
| 700380255H1 | g473976 | 54 | −47 | gb105pln | Rice mRNA, partial homologous to elongation factor 1-alpha gene. | |
| 700380003H1 | g192924 | 49 | −27 | gb105allp | cytochrome c oxidase subunit Vb | |
| 700343107H1 | g1213441 | 38 | −17 | gb105pln | Arabidopsis thaliana isopentenyl pyrophosphate isomerase (Ipi1) mRNA, partial cds. | |
| 700344219H1 | g2827141 | 15 | 3 | gb105allp | cellulose synthase catalystic subunit | |
| 700345312H1 | g2462749 | 17 | −7 | gb105eukp | F8A5.31; Putative Serine/Threonine protein kinase | |
| 700347329H1 | g1653702 | 23 | 6 | gb105allp | dihydrolipoamide acetyltransferase component (E2) of pyruvate dehydrogenase complex | |
| 700346289H1 | g2414593 | 10 | 7 | gb105eukp | SPAC1A6.10; molybdopterin biosynthesis | |
| 700345568H1 | g2586332 | 20 | 4 | gb105pln | Lycopersicon esculentum importin alpha (LeKAP alpha) mRNA, partial cds. | |
| 700344426H1 | g182518 | 27 | −6 | gb105allp | ferritin light subunit | |
| 700379967H1 | g473604 | 51 | −44 | gb105pln | Zea mays W-22 histone H2B mRNA, complete cds. | |
| 700346948H1 | g474000 | 42 | −47 | gb105pln | Rice mRNA, partial homologous to ribosomal protein L37a gene. | |
| 700343655H1 | g2565339 | 38 | −20 | gb105pln | Lupinus luteus ribosomal protein S14 (rps14) mRNA, complete cds. | |
| 700344001H1 | g473986 | 40 | 11 | gb105pln | Rice mRNA, partial homologous to histone H2B gene. | |
| 700346640H1 | g471279 | 23 | −15 | gb105eukp | KRP-A | |
| 700345344H1 | g2558943 | 17 | −0 | gb105pln | Gossypium hirsutum histone 3 mRNA, complete cds. | |
| 700346812H1 | g433416 | 41 | −6 | gb105allp | TAXREB107 | |
| 700346275H1 | g1519248 | 11 | 9 | gb105pln | Oryza sativa GF14-b protein mRNA, complete cds. | |
| 700343515H1 | g2384759 | 51 | −47 | gb105pln | Oryza sativa GDP dissociation inhibitor protein OsGDI2 (OsGDI2) mRNA, | |
| | | | | | complete cds. | |
| 700346456H1 | g312569 | 15 | 16 | gb105pln | I. latifolius 26S rRNA (partial). | |
| 700345622H1 | g736308 | 17 | −4 | gb105eukp | unknown | |
| 700345233H1 | g2565339 | 28 | −33 | gb105pln | Lupinus luteus ribosomal protein S14 (rps14) mRNA, complete cds. | |
| 700346892H1 | g533251 | 54 | −62 | gb105pln | Zea mays (clone pSM8) sucrose synthase 2 (Sus1) gene, complete cds. | |
| 700344134H1 | g473985 | 36 | 1 | gb105pln | Rice mRNA, partial homologous to high mobility group protein gene. | |
| 700345118H1 | g434344 | 26 | −7 | gb105pln | A. thaliana (Columbia) mRNA for S18 ribosomal protein (641 bp). | |
| 700346886H1 | g2351061 | 18 | −6 | gb105pln | Arabidopsis thaliana genomic DNA, chromosome 5, P1 clone: MAF19. | |
| 700344696H1 | g2570125 | 28 | 2 | gb105allp | CPE-receptor | |
| 700345125H1 | g1707012 | 13 | 7 | gb105allp | tyrosyl-tRNA synthetase isolog | |
| 700346465H1 | g1931623 | 44 | −25 | gb105eukp | PCS1; proteasome cap subunit | |
| 700346778H1 | g790381 | 19 | −1 | gb105eukp | F13D12.4 | |
| 700342866H1 | g1498473 | 57 | −6 | gb105eukp | 60S ribosomal protein | |
| 700345685H1 | g2130944 | 13 | 3 | gb105allp | sulfate transporter | |
| 700343122H1 | g902583 | 73 | −57 | gb105pln | Zea mays clone MubG1 ubiquitin gene, complete cds. | |
| 700342629H1 | g2511573 | 37 | −21 | gb105pln | Arabidopsis thaliana mRNA for proteasome subunit prc3. | |
| 700342282H1 | g1122803 | 15 | 5 | gb105allp | F49C12.8 | |
| 700345009H1 | g1905943 | 33 | −20 | gb105pln | Sorghum bicolor MADS box transcription factor SbMADS1 mRNA, complete cds. | |
| 700342827H1 | g1008433 | 27 | −15 | gb105eukp | SPAC22F3.05c; unknown | |
| 700342423H1 | g300082 | 61 | −13 | gb105pln | hsp82 = 82 kda heat shock protein [Zea mays, seedling, leaves, Genomic, 3468 nt]. | |
| 700343864H1 | g577611 | 97 | −57 | gb105pln | Zea mays CRT1 gene for calcium-binding protein. | |
| 700379994H1 | g169818 | 49 | −60 | gb105pln | Rice 25S ribosomal RNA gene. | |
| 700345506H1 | g1050434 | 11 | 17 | gb105pln | b. napus mRNA for glyoxysomal malat edehydrogenase. | |
| 700342872H1 | g1763380 | 10 | 5 | gb105allp | zinc transporter | |
| 700347258H1 | g2293565 | 29 | −11 | gb105pln | Oryza sativa ADP-ribosylation factor 1 (Os-ARF1) mRNA, complete cds. | |
| 700343367H1 | g2662139 | 10 | 6 | gb105allp | KIAA0429 | |
| 700380130H1 | g2736290 | 11 | 7 | gb105allp | hMed7 | |
| 700346939H1 | g296173 | 27 | −13 | gb105pln | P. sativum ndk-p1 mRNA for nucleoside diphosphate kinase. | |
| 700345728H1 | g2708484 | 9 | 6 | gb105allp | IAA24 | |
| 700343506H1 | g968901 | 23 | −39 | gb105pln | Rice mRNA for ribosomal protein S8, complete cds. | |
| 700344724H1 | g2832300 | 16 | −5 | gb105eukp | CRakn; phosphorylates 3′-OH group of adenosine-5′-phosphosulfate; adenosine-5′- | |
| | | | | | phosphosulfate-kinase; EC 2.7.1.25 | |
| 700343921H1 | g1568481 | 21 | −3 | gb105pln | B. vulgaris mRNA for cdc2-related protein kinase. | |
| 700347153H1 | g237649 | 35 | −24 | gb105pln | enoyl-acyl carrier protein reductase [Brassica napus, mRNA, 1358 nt]. | |
| 700281817H2 | g2253314 | 8 | 1 | gb105allp | RecA | |
| 700344130H1 | g506533 | 24 | −3 | gb105pln | N. tabacum PKTL7 mRNA for protein kinase. | |
| 700343624H1 | g473604 | 37 | −22 | gb105pln | Zea mays W-22 histone H2B mRNA, complete cds. | |
| 700343374H1 | g606969 | 30 | −17 | gb105pln | Arabidopsis thaliana cytoplasmic ribosomal protein L18 mRNA, complete cds. | |
| 700343230H1 | g2828186 | 13 | 14 | gb105pln | Arabidopsis thaliana genomic DNA, chromosome 5, TAC clone: K18I23, complete | |
| | | | | | sequence. | |
| 700281848H2 | g313151 | 32 | 5 | gb105pln | A. thaliana ribosomal protein S15 mRNA, complete CDS. | |
| 700345755H1 | g1498385 | 77 | −72 | gb105pln | Zea mays actin (Maz87) gene, partial cds. | |
| 700342533H1 | g386765 | 65 | −8 | gb105allp | hba1 alpha globin | |
| 700342485H1 | g218088 | 40 | −30 | gb105pln | Rice mRNA for ribosomal protein 117 (249 gene), partial sequence. | |
| 700380642H1 | g16732 | 25 | −0 | gb105allp | NADH ubiquinone oxidoreductase subunit | |
| 700344425H1 | g2340104 | 26 | 1 | gb105allp | Very similar and perhaps idential to Hs-CUL-4B.; 80-100% similarity to partial sequence | |
| | | | | | U58091 (PID:g1381150). | |
| 700347080H1 | g587074 | 28 | 8 | gb105allp | putative IEF | |
| 700342593H1 | g166868 | 33 | −24 | gb105pln | Arabidopsis thaliana ribosomal protein S11 (RPS11-beta) mRNA, complete cds. | |
| 700344965H1 | g2181190 | 19 | −2 | gb105eukp | BRLK; serine/threonine kinase | |
| 700346709H1 | g1419389 | 39 | −34 | gb105pln | A. thaliana mRNA for thylakoid-bound ascorbate peroxidase. | |
| 700343712H1 | g2330820 | 18 | 3 | gb105eukp | SPAC4F8.03; hypothetical protein | |
| 700347153H1 | g2653284 | 54 | −44 | gb105pln | Oryza sativa mRNA for enoyl-ACP reductase. | |
| 700346816H1 | g1651729 | 8 | 5 | gb105allp | erthyrocyte band 7 integral membrane protein, protein 7.2B, stomatin | |
| 700346587H1 | g1617267 | 28 | −11 | gb105pln | B. napus mRNA for acyl CoA synthetase. | |
| 700344516H1 | g1272628 | 27 | −9 | gb105eukp | F44G4.1 | |
| 700344757H1 | g31924 | 34 | −17 | gb105allp | glutathione S-transferase (AA 1-218) | |
| 700344960H1 | g21794 | 79 | −70 | gb105pln | Wheat histone H4 gene. | |
| 700346779H1 | g2388950 | 13 | 1 | gb105eukp | SPAC27E2.10c; activator 1 protein | |
| 700380261H1 | g633940 | 29 | −16 | gb105eukp | PTR2-B; peptide transporter; transport protein | |
| 700343309H1 | g386765 | 60 | −27 | gb105allp | hba1 alpha globin | |
| 700380603H1 | g762850 | 7 | 6 | gb105eukp | wos2; p21 protein | |
| 700346421H1 | g22324 | 15 | −7 | gb105pln | Z. mays mRNA for H2B histone (clone cH2B221). | |
| 700379661H1 | g168557 | 64 | −27 | gb105pln | Zea mays putative GTP-binding protein homolog mRNA, partial cds. | |
| 700343942H1 | g21794 | 73 | −59 | gb105pln | Wheat histone H4 gene. | |
| 700346445H1 | g21134 | 68 | −53 | gb105pln | Sinapis alba gene for 25S rRNA. | |
| 700281932H2 | g2369713 | 17 | −5 | gb105pln | Beta vulgaris cDNA for elongation factor 2. | |
| 700346554H1 | g2828180 | 12 | 15 | gb105pln | Arabidopsis thaliana genomic DNA, chromosome 5, P1 clone: MDK4, complete | |
| | | | | | sequence. | |
| 700346277H1 | g886737 | 70 | −20 | gb105pln | Z. mays histone H3 gene. | |
| 700344173H1 | g1185553 | 36 | −61 | gb105pln | Zea mays glyceraldehyde-3-phosphate dehydrogenase (gpc2) gene, complete cds. | |
| 700347076H1 | g1322489 | 17 | −8 | gb105eukp | STT3 | |
| 700346894H1 | g2749918 | 15 | 17 | gb105pln | Arabidopsis thaliana chromosome I BAC F3I6 genomic sequence, complete sequence. | |
| 700346406H1 | g19539 | 9 | −1 | gb105eukp | ribosomal protein YL16 | |
| 700345991H1 | g168549 | 100 | −49 | gb105pln | Zea mays putative anthranilate synthase component II homolog mRNA, partical cds. | |
| 700345824H1 | g599722 | 45 | −33 | gb105pln | C. melo mRNA for aconitase (UNI-ZAPxR). | |
| 700342370H1 | g168505 | 58 | −49 | gb105pln | Zea mays histone H3 gene, complete cds. | |
| 700343386H1 | g606043 | 13 | 6 | gb105allp | ORF_o328 | |
| 700344627H1 | g736271 | 55 | −48 | gb105pln | O. sativa hsp70 gene for heat shock protein 70. | |
| 700344667H1 | g38225 | 75 | 3 | gb105allp | alpha2-globin | |
| 700345450H1 | g2145472 | 29 | −0 | gb105pln | S. tuberosum mRNA for aconitase/aconitate hydratase. | |
| 700343624H1 | g21800 | 34 | −37 | gb105pln | T. aestivum L mRNA for hsitone H2B. | |
| 700343841H1 | g2394228 | 26 | −1 | gb105pln | Arabidopsis thaliana WD-40 repeat protein (MSI1) mRNA, complete cds. | |
| 700345326H1 | g452165 | 29 | 1 | gb105eukp | monodehydroascorbate reductase; EC 1.6.5.4 | |
| 700379989H1 | g2370312 | 16 | −1 | gb105eukp | msj1; molecular chaperone; DnaJ-like protein | |
| 700346393H1 | g2564051 | 37 | −20 | gb105pln | Arabidopsis thaliana genomic DNA, chromosome 5, P1 clone: MWD9, complete | |
| | | | | | sequence. | |
| 700344137H1 | g2842490 | 11 | 7 | gb105eukp | F21O9.160; heat-shock protein | |
| 700347165H1 | g2903 | 23 | −6 | gb105eukp | inorganic pyrophosphatase (AA 1-287) | |
| 700379974H1 | g439585 | 51 | −32 | gb105pln | Hordeum vulgare calreticulin (CRH1) mRNA, partial cds. | |
| 700346535H1 | g2266661 | 39 | −20 | gb105pln | Hordeum vulgare mRNA for 14-3-3 protein (Hv1433c). | |
| 700343215H1 | g2662342 | 60 | −43 | gb105pln | Oryza sativa mRNA for EF-1 alpha, complete cds. | |
| 700380717H1 | g506829 | 33 | 8 | gb105allp | cytochrome oxidase subunit 1 | |
| 700346083H1 | g1906829 | 18 | 8 | gb105pln | A. thaliana hsp88.1 gene. | |
| 700379966H1 | g2656029 | 12 | 16 | gb105pln | Arabidopsis thaliana genomic DNA, chromosome 5, P1 clone: MQB2. | |
| 700347052H1 | g1841467 | 21 | −3 | gb105pln | N. tabacum mRNA for tyrosyl-tRNA synthetase. | |
| 700345191H1 | g1143389 | 21 | 3 | gb105pln | A. thaliana mRNA for 3-hydroxy-3-methylglutaryl-CoA synthase. | |
| 700345991H1 | g403433 | 35 | −22 | gb105pln | Arabidopsis thaliana anthranilate synthase beta subunit 9 (ASB1) mRNA, complete cds. | |
| 700342514H1 | g349761 | 16 | 6 | gb105allp | RNA binding protein | |
| 700343251H1 | g483546 | 15 | 10 | gb105pln | R. communis gene for pyrophosphate-dependent phosphofructokinase alpha subunit. | |
| 700344416H1 | g1302004 | 7 | 7 | gb105allp | ORF YNL096c | |
| 700380285H1 | g167687 | 20 | −3 | gb105pln | Dictyostelium discoideum clathrin heavy chain (chcA) mRNA, complete cds. | |
| 700347163H1 | g1397320 | 16 | 7 | gb105allp | Similar to histone H2A variant. | |
| 700345545H1 | g2624199 | 41 | −34 | gb105pln | M. acuminata mRNA; clone pBAN UU93. | |
| 700343313H1 | g1532212 | 20 | 6 | gb105eukp | cypA; cyclophilin A | |
| 700344644H1 | g218130 | 32 | −16 | gb105pln | Rice mRNA for Ribosomal protein S15. | |
| 700346540H1 | g2104526 | 48 | −23 | gb105eukp | T10M13.3; T10M13.3 | |
| 700343287H1 | g1905943 | 58 | −39 | gb105pln | Sorghum bicolor MADS box transcription factor SbMADS1 mRNA, complete cds. | |
| 700345911H1 | g436029 | 27 | −14 | gb105pln | Nicotiana tabacum (TSC40-3) 60S ribosomal protein L34 mRNA, complete cds. | |
| 700281842H2 | g2262111 | 10 | 1 | gb105allp | ribitol dehydrogenase isolog | |
| 700344301H1 | g1707656 | 12 | 14 | gb105pln | P. sativum mRNA for DnaJ-like protein. | |
| 700343707H1 | g168494 | 16 | −17 | gb105pln | Maize (Zea mays) histone H3 gene (H3C2), complete cds. | |
| 700346435H1 | g2462756 | 7 | 0 | gb105eukp | F8A5.15; putative receptor kinase | |
| 700345521H1 | g3264 | 17 | 2 | gb105pln | P. tannophilus GAL 10 gene for UDP-galactose-4-epimerase. | |
| 700343350H1 | g577818 | 78 | −84 | gb105pln | Z. mays gene for H2B histone (gH2B4). | |
| 700379960H1 | g473986 | 23 | −30 | gb105pln | Rice mRNA, partial homologous to histone H2B gene. | |
| 700346667H1 | g2275202 | 12 | 5 | gb105eukp | T08I13.8; acyl-CoA synthetase isolog | |
| 700346456H1 | g312598 | 16 | 16 | gb105pln | M. ternifolia 26S rRNA (partial). | |
| 700342876H1 | g1196896 | 45 | −31 | gb105pln | Glycine max acidic ribosomal protein P0 mRNA, complete cds. | |
| 700380613H1 | g22322 | 16 | −25 | gb105pln | Z. mays mRNA for H2B histone (clone cH2B214). | |
| 700347270H1 | g577736 | 36 | −23 | gb105pln | A. thaliana PRL2 mRNA. | |
| 700346812H1 | g695638 | 38 | −13 | gb105allp | M-TAXREB107 | |
| 700343339H1 | g1345430 | 17 | 5 | gb105allp | perchrolic acid soluble protein | |
| 700343641H1 | g393399 | 10 | 17 | gb105pln | Z. mays Irma and En1 element DNA. | |
| 700345209H1 | g493707 | 61 | −56 | gb105pln | Ric emRNA for beta-tubulin, complete cds. | |
| 700380124H1 | g268 | 11 | 5 | gb105allp | cytochrome c oxidase subunit VIb (AA 1-86) | |
| 700347362H1 | g2760316 | 11 | 15 | gb105pln | The sequence of BAC F1N21 from Arabidopsis thaliana chromosome 1, complete | |
| | | | | | sequence. | |
| 700345728H1 | g2245378 | 14 | 2 | gb105allp | auxin response factor 1 | |
| 700343904H1 | g218130 | 32 | −26 | gb105pln | Rice mRNA for Ribosomal protein S15. | |
| 700344247H1 | g1498387 | 82 | −72 | gb105pln | Zea mays actin (Maz83) gene, partial cds. | |
| 700345356H1 | g2760322 | 14 | −3 | gb105eukp | F1N21.7 | |
| 700380469H1 | g14016 | 18 | −1 | gb105allp | cytochrome C oxidase II subunit | |
| 700347323H1 | g515865 | 13 | 2 | gb105allp | ribosomal protein L15 gene product | |
| 700346346H1 | g2104546 | 13 | 16 | gb105pln | Arabidopsis thaliana chromosome IV cosmid AGAA, complete sequence. | |
| 700342958H1 | g2642212 | 61 | −86 | gb105pln | Zea mays nitrate-induced NOI protein gene, complete cds. | |
| 700379637H1 | g1432082 | 26 | −5 | gb105pln | Arabidopsis thaliana Skp1p homolog mRNA, complete cds. | |
| 700345577H1 | g2739216 | 24 | 5 | gb105pln | Hordeum vulgare L41 ribosomal protein. | |
| 700346815H1 | g1834353 | 10 | 5 | gb105eukp | 194; hypothetical protein 194 | |
| 700342640H1 | g1197168 | 49 | −20 | gb105eukp | MHCemb; embryonic muscle myosin heavy chain | |
| 700343685H1 | g20311 | 45 | −54 | gb105pln | O. sativa R22 mRNA. | |
| 700346965H1 | g2244996 | 7 | 6 | gb105eukp | similarity to a membrane-associated salt-inducible protein | |
| 700344980H1 | g167107 | 23 | −15 | gb105pln | Hordeum vulgare vacuolar ATPase B subunit isoform mRNA, complete cds. | |
| 700346427H1 | g2213621 | 20 | −12 | gb105eukp | F21J9.26 | |
| 700345025H1 | g1065484 | 7 | 6 | gb105eukp | K02G10.6 | |
| 700346548H1 | g14029 | 13 | 4 | gb105eukp | rp15; ribosomal protein L5 | |
| 700344653H1 | g1322276 | 32 | 11 | gb105pln | Triticum aestivum histone H2A gene, complete cds. | |
| 700345018H1 | g2832242 | 36 | 16 | gb105pln | Zea mays 22-kDa alpha zein gene cluster, complete sequence. | |
| 700345821H1 | g415316 | 58 | −43 | gb105pln | Rice mRNA for acidic ribosomal protein P0, complete cds. | |
| 700345621H1 | g2827624 | 11 | 4 | gb105eukp | hypothetical protein | |
| 700344369H1 | g1160445 | 9 | 1 | gb105allp | ribosomal protein S7 | |
| 700380233H1 | g2656025 | 36 | −29 | gb105pln | Arabidopsis thaliana genomic DNA, chromosome 5, P1 clone: MCD7. | |
| 700346904H1 | g602252 | 100 | −85 | gb105pln | Zea mays enolase (eno2) mRNA, complete cds. | |
| 700346069H1 | g57720 | 40 | −9 | gb105allp | ribosomal protein S20 (AA 1-119) | |
| 700344387H1 | g157564 | 13 | −3 | gb105eukp | Aats-glupro; transfer RNA-Glu-Pro aminoacyl synthetase | |
| 700345323H1 | g644491 | 82 | −76 | gb105pln | Corn mRNA for elongation factor 1A. | |
| 700346305H1 | g625108 | 48 | −8 | gb105eukp | YLR388W; Ylr388wp | |
| 700281862H2 | g2655098 | 9 | 4 | gb105eukp | PTR; PTR | |
| 700344145H1 | g1399567 | 46 | −41 | gb105pln | Podophyllum peltatum nuclear 26S ribosomal RNA gene, partial sequence. | |
| 700344460H1 | g2696018 | 29 | 6 | gb105pln | Arabidopsis thaliana genomic DNA, chromosome 5, P1 clone: MXC9. | |
| 700380479H1 | g437878 | 14 | 8 | gb105allp | mrp S24 gene product | |
| 700343276H1 | g460041 | 28 | −14 | gb105pln | Yeast (Saccharomyces cerevisiae) DBF3 gene, complete cds. | |
| 700344422H1 | g2191128 | 34 | −18 | gb105eukp | A_IG002N01.3 | |
| 700345179H1 | g438279 | 20 | −2 | gb105allp | Ribosomal protein L7 | |
| 700344228H1 | g1322276 | 13 | 4 | gb105pln | Triticum aestivum histone H2A gene, complete cds. | |
| 700346824H1 | g2369765 | 20 | 2 | gb105pln | Citrus paradisi mRNA for hypothetical protein. | |
| 700345767H1 | g2708737 | 8 | 6 | gb105allp | putative nuclear protein | |
| 700343035H1 | g1301621 | 9 | 5 | gb105eukp | C08B6.7 | |
| 700343795H1 | g1276828 | 14 | −5 | gb105eukp | trpG; anthranilate synthase component II | |
| 700379846H1 | g1929057 | 16 | 7 | gb105eukp | longest ORF (1) | |
| 700342644H1 | g532126 | 9 | −3 | gb105eukp | eas; phosphorylate ethanolamine; ethanolamine kinase | |
| 700343836H1 | g2440191 | 17 | −10 | gb105eukp | hypothetical protein | |
| 700343240H1 | g214758 | 32 | −6 | gb105allp | ribosomal protein S22, 40S subunit | |
| 700342882H1 | g790969 | 47 | 2 | gb105pln | Rice mRNA for aldolase C-1, complete cds. | |
| 700379945H1 | g170775 | 82 | −70 | gb105pln | Wheat translation elongation factor 1 alpha-subunit (TEF1) mRNA, complete cds. | |
| 700347050H1 | g1553128 | 15 | 16 | gb105pln | Gossypium hirsutum ribosomal protein L44 isoform a (RL44), complete cds. | |
| 700346684H1 | g1483150 | 20 | 3 | gb105eukp | monodehydroascorbate reductase | |
| 700380663H1 | g1710150 | 21 | −3 | gb105pln | Arabidopsis thaliana proline iminopeptidase mRNA, complete cds. | |
| 700343316H1 | g296949 | 60 | −29 | gb105allp | glutaminyl-peptide cyclotransferase | |
| 700342872H1 | g1763376 | 10 | 5 | gb105allp | ZnT-3 | |
| 700379608H1 | g170746 | 46 | −44 | gb105pln | Wheat histone H4 TH091 gene, complete cds. | |
| 700346683H1 | g4442 | 22 | −4 | gb105pln | Yeast SEC23 gene for cytoplasmic transport protein. | |
| 700342961H1 | g902622 | 23 | −10 | gb105eukp | 40S ribosomal protein S12 | |
| 700345460H1 | g485273 | 40 | −17 | gb105eukp | CDC46; Cdc46p | |
| 700343672H1 | g2832242 | 34 | −9 | gb105pln | Zea mays 22- kDa alpha zein gene cluster, complete sequence. | |
| 700344177H1 | g2160756 | 6 | 5 | gb105allp | CLV1 receptor kinase | |
| 700344755H1 | g531055 | 45 | −63 | gb105pln | Wheat mRNA for protein H2B-6, complete cds. | |
| 700345273H1 | g463856 | 30 | −13 | gb105pln | Chlamydomonas reinhardtii 21gr ribosomal protein S14 (CRY1) gene, complete cds. | |
| 700344137H1 | g1931643 | 12 | 8 | gb105allp | DnaJ isolog | |
| 700380130H1 | g1420026 | 12 | 4 | gb105allp | ORF YOL135c | |
| 700344316H1 | g736308 | 14 | −1 | gb105eukp | unknown | |
| 700345389H1 | g454913 | 17 | −17 | gb105pln | A. porrum LDJ2 mRNA. | |
| 700347066H1 | g1839244 | 19 | 5 | gb105allp | EGF receptor like protein | |
| 700343233H1 | g1262999 | 21 | −9 | gb105eukp | ZK287.5 | |
| 700344448H1 | g416150 | 41 | −55 | gb105pln | Zea mays beta-8 tubulin (tub8) mRNA, complete cds. | |
| 700345155H1 | g520501 | 20 | 7 | gb105eukp | NADPH; thioredoxin reductase | |
| 700345467H1 | g2264321 | 29 | −15 | gb105pln | Arabidopsis thaliana genomic DNA, chromosome 5, P1 clone: MXM12, complete | |
| | | | | | sequence. | |
| 700344637H1 | g2081627 | 27 | −10 | gb105eukp | alpha-glucosidase precoursor; EC 3.2.1.20 | |
| 700345910H1 | g2245131 | 13 | −2 | gb105eukp | hypothetical protein | |
| 700281822H2 | g1143427 | 72 | 5 | gb105eukp | hsp70; heat shock protein 70 | |
| 700343115H1 | g1117927 | 23 | 1 | gb105eukp | ADE1; bifunctional peptide with both glycinamide ribotide synthetase and amino- | |
| | | | | | imidazole ribotide synthetase activites; Ade1p | |
| 700346443H1 | g2668747 | 31 | −14 | gb105pln | Zea mays ribosomal protein L17 (rp117) mRNA, complete cds. | |
| 700345573H1 | g1256607 | 15 | 7 | gb105pln | Glyzine max G protein beta subunit mRNA, complete cds. | |
| 700344138H1 | g2731767 | 11 | 7 | gb105allp | endonuclease/reverse transcriptase | |
| 700345457H1 | g939784 | 20 | −15 | gb105pln | Zea mays MADS-box protein (ZAP1) mRNA, complete cds. | |
| 700344792H1 | g2182652 | 13 | −1 | gb105allp | Y4uB | |
| 700380469H1 | g2245560 | 18 | −1 | gb105allp | cytochrome c oxidase subunit II | |
| 700344632H1 | g643076 | 19 | −3 | gb105eukp | annexin | |
| 700342403H1 | g1213334 | 9 | 4 | gb105allp | OrfX; hypothetical 22.5 KD protein downstream of tyhpe IV prepilin leader peptidase | |
| | | | | | gene; Method: conceptual translation supplied by author | |
| 700343440H1 | g1184596 | 14 | 1 | gb105eukp | T11G6.3 | |
| 700344341H1 | g2258468 | 46 | −34 | gb105pln | Oryza sativa replication protein A1 (Os-RPA1) mRNA, complete cds. | |
| 700345357H1 | g967984 | 44 | −29 | gb105pln | Oryza sativa (clone rma630) ribosomal protein-linked ubiquitin mRNA, complete cds. | |
| 700345391H1 | g218152 | 34 | −50 | gb105pln | Rice serine cbp3 gene for carboxypeptidase III. | |
| 700342686H1 | g2459420 | 40 | −5 | gb105eukp | F4P9.14; putative ribosomal protein L17 | |
| 700344784H1 | g1732367 | 15 | 5 | gb105allp | proteinase TMP | |
| 700346096H1 | g168500 | 54 | 3 | gb105pln | Maize (Zea mays) histone H4 gene (H4C14), complete cds. | |
| 700380614H1 | g2662344 | 79 | −77 | gb105pln | Oryza sativa mRNA for EF-1 alpha, complete cds. | |
| 700342423H1 | g1906827 | 56 | −10 | gb105pln | A. thaliana hsp81.4 gene. | |
| 700343651H1 | g168543 | 100 | −36 | gb105pln | Zea mays putative ribosomal protein S8 mRNA, partial cds. | |
| 700346165H1 | g13339 | 62 | −2 | gb105pln | P. hybrida mitochondrial rps19 gene for ribosomal protein S19. | |
| 700346459H1 | g168500 | 54 | −52 | gb105pln | Maize (Zea mays) histone H4 gene (H4C14), complete cds. | |
| 700344251H1 | g2252844 | 27 | −9 | gb105eukp | A_IG005I10.21 | |
| 700345053H1 | g2114264 | 10 | 2 | gb105allp | topoisomerase-III | |
| 700345866H1 | g2829918 | 11 | 8 | gb105eukp | F22K20.1 | |
| 700343941H1 | g2351066 | 25 | −11 | gb105pln | Arabidopsis thaliana genomic DNA, chromosome 5, P1 clone: MOP9. | |
| 700380290H1 | g644491 | 59 | −48 | gb105pln | Corn mRNA for elongation factor 1A. | |
| 700342732H1 | g556685 | 74 | −72 | gb105pln | Z. mays mRNA for ADP-ribosylation factor. | |
| 700380266H1 | g1877523 | 17 | 4 | gb105pln | Arabidopsis thaliana BAC T7I23, complete sequence. | |
| 700343623H1 | g2511745 | 19 | −5 | gb105eukp | dre4; probable transcriptional regulator dre4 | |
| 700379960H1 | g22324 | 36 | −39 | gb105pln | Z. mays mRNA for H2B histone (clone cH2B221). | |
| 700379641H1 | g551259 | 28 | −5 | gb105eukp | Ntbfruc1; beta-fructofuranosidase; EC 3.2.1.26 | |
| 700343438H1 | g295925 | 21 | −8 | gb105eukp | RPG19; ribosomal protein | |
| 700343407H1 | g2688822 | 32 | −13 | gb105eukp | pyrophosphate-dependent phosphofructo-1-kinase | |
| 700344108H1 | g1183936 | 14 | −1 | gb105pln | P. sativum 5S rRNA gene. | |
| 700380164H1 | g19280 | 47 | −42 | gb105pln | L. esculentum mRNA for enolase. | |
| 700345772H1 | g1276967 | 23 | −16 | gb105eukp | putative ribosomal protein | |
| 700343561H1 | g479146 | 14 | 5 | gb105eukp | putative ATP synthase subunit | |
| 700343332H1 | g2114027 | 18 | −2 | gb105eukp | ntf-2; putative nuclear transport factor 2 | |
| 700342345H1 | g433040 | 15 | −14 | gb105pln | Zea mays W-22 clone PREM-1A retroelement PREM-1, partial sequence. | |
| 700343820H1 | g47488 | 8 | 6 | gb105allp | elongation factor Tu3 | |
| 700344871H1 | g2213932 | 9 | 7 | gb105allp | 26S proteasome regulatory subunit | |
| 700343602H1 | g312178 | 40 | −10 | gb105pln | Z. mays GapC2 gene. | |
| 700379653H1 | g1929057 | 46 | −10 | gb105eukp | longest ORF (1) | |
| 700345729H1 | g544506 | 14 | −0 | gb105eukp | SIK1; Sik1p | |
| 700346995H1 | g2599091 | 28 | −7 | gb105pln | Arabidopsis thaliana WD-40 repeat protein MSI4 (MSI4) mRNA, complete cds. | |
| 700345415H1 | g2459406 | 44 | −40 | gb105pln | Arabidopsis thaliana chromosome II BAC F4P9 genomic sequence, complete sequence. | |
| 700347290H1 | g1020414 | 65 | −54 | gb105pln | Oryza sativa mRNA for phospholipase D, complete cds. | |
| 700345848H1 | g531055 | 47 | −30 | gb105pln | Wheat mRNA for protein H2B-6, complete cds. | |
| 700345809H1 | g21794 | 13 | 16 | gb105pln | Wheat histone H4 gene. | |
| 700346464H1 | g1480670 | 12 | 5 | gb105allp | delta 1-pyrroline-5-carboxylate synthetase | |
| 700345695H1 | g2662340 | 67 | −62 | gb105pln | Oryza sativa mRNA for EF-1 alpha, complete cds. | |
| 700343673H1 | g169776 | 16 | −2 | gb105pln | Oryza sativa beta-amylase gene, complete cds. | |
| 700347192H1 | g1938575 | 39 | −18 | gb105eukp | B0025.3 | |
| 700343110H1 | g2832667 | 30 | −5 | gb105pln | Arabidopsis thaliana DNA chromosome 4, BAC clone T10I14 (ESSAII project). | |
| 700343020H1 | g467038 | 11 | −5 | gb105allp | B2168_F3_130 | |
| 700342447H1 | g1167827 | 34 | −25 | gb105pln | c. reinhardtii mRNA for ribosomal protein L12. | |
| 700346839H1 | g2582641 | 17 | 6 | gb105allp | splicing factor | |
| 700346727H1 | g168500 | 76 | −68 | gb105pln | Maize (Zea mays) histone H4 gene (H4C14), complete cds. | |
| 700346795H1 | g416256 | 17 | −12 | gb105pln | Rice mRNA for H+-ATPase, partial sequence. | |
| 700345587H1 | g1890576 | 57 | −45 | gb105pln | H. vulgare mRNA for xyloglucan endotransglycosylase-like protein (XEB). | |
| 700379739H1 | g556217 | 9 | 7 | gb105allp | spliceosomal protein | |
| 700344010H1 | g22324 | 22 | −18 | gb105pln | Z. mays mRNA for H2B histone (clone cH2B221). | |
| 700342543H1 | g17863 | 13 | 3 | gb105allp | r-protein BnS15a | |
| 700379831H1 | g20321 | 58 | −48 | gb105pln | Oryza sativa RAc1 mRNA for actin. | |
| 700343326H1 | g2408068 | 11 | 6 | gb105eukp | SPAC2F3.16; hypothetical protein | |
| 700342651H1 | g1495270 | 27 | −0 | gb105pln | A. thaliana mRNA for RNA helicase. | |
| 700379988H1 | g929917 | 24 | −2 | gb105pln | Z. mays ABP1 mRNA for actin-depolymerizing factor. | |
| 700343051H1 | g2842494 | 58 | −37 | gb105eukp | F21O9.200; prohibitin-like protein | |
| 700281979H2 | g2696018 | 12 | 16 | gb105pln | Arabidopsis thaliana genomic DNA, chromosome 5, P1 clone: MXC9. | |
| 700281843H2 | g2821961 | 12 | 6 | gb105eukp | spermidine synthase; EC 2.5.1.16 | |
| 700342264H1 | g170783 | 18 | −12 | gb105pln | T. aestivum ubiquitin carrier protein mRNA. | |
| 700343001H1 | g1729537 | 37 | −16 | gb105eukp | F10C2.4 | |
| 700344976H1 | g2407799 | 25 | −6 | gb105pln | Arabidopsis thaliana mRNA for hsitone H2A.F/Z. | |
| 700346511H1 | g2655295 | 9 | 6 | gb105allp | germin-like protein 6 | |
| 700344031H1 | g296740 | 58 | 5 | gb105allp | macropain subunit zeta | |
| 700379996H1 | g2809537 | 14 | 5 | gb105allp | beta prime coatomer protein | |
| 700343587H1 | g288063 | 21 | −11 | gb105eukp | ketol-acid reductoisomerase; EC 1.1.1.86 | |
| 700342672H1 | g473602 | 94 | −80 | gb105pln | Zea mays W-22 histone H2A mRNA, complete cds. | |
| 700345557H1 | g2645166 | 18 | −1 | gb105pln | Oryza sativa mRNA, similar to ubiquitin conjugating enzyme. | |
| 700343031H1 | g168505 | 66 | −55 | gb105pln | Zea mays histone H3 gene, complete cds. | |
| 700347383H1 | g1388084 | 21 | −2 | gb105eukp | TRX5; thioredoxin h | |
| 700344993H1 | g16432 | 20 | 4 | gb105pln | A. thaliana mRNA encoding protein phosphastase 1A. | |
| 700346715H1 | g1408470 | 13 | 8 | gb105pln | Arabidopsis thaliana actin depolymerizing factor 1 (AtADF1) mRNA, complete cds. | |
| 700343374H1 | g2529657 | 15 | −2 | gb105pln | Arabidopsis thaliana chromosome II BAC T30B22 genomic sequence, complete | |
| | | | | | sequence. | |
| 700342952H1 | g2213449 | 16 | 1 | gb105allp | vitamin D inducible protein | |
| 700344132H1 | g1778569 | 8 | 7 | gb105allp | YaaF homolog | |
| 700343685H1 | g468055 | 56 | −66 | gb105pln | Zea mays B73 QM protein mRNA, complete cds. | |
| 700344747H1 | g2274801 | 18 | −4 | gb105eukp | ribosomal protein L4 | |
| 700345376H1 | g2352931 | 22 | 0 | gb105eukp | cCM2; cytosolic chorismate mutase 2 | |
| 700345620H1 | g1592120 | 6 | 6 | gb105allp | 2-phosphoglycerate kinase (2pgk) | |
| 700345245H1 | g2088722 | 21 | −4 | gb105eukp | F53G12.10 | |
| 700345772H1 | g1669623 | 15 | 1 | gb105eukp | ribosomal protein L39 | |
| 700345556H1 | g2811284 | 6 | 7 | gb105allp | ribosomal protein S7 | |
| 700342360H1 | g1885343 | 57 | −60 | gb105pln | T. aestivum mRNA for starch branching enzyme II. | |
| 700345348H1 | g1184775 | 65 | −45 | gb105pln | Zea mays glyceraldehyde-3-phosphate dehydrogenase GAPC4 (gpc4) mRNA, | |
| | | | | | complete cds. | |
| 700346018H1 | g1155259 | 28 | −14 | gb105eukp | Dvir\gl | |
| 700346622H1 | g473976 | 60 | −49 | gb105pln | Rice mRNA, partial homologous to elongation factor 1-alpha gene. | |
| 700345740H1 | g2529657 | 22 | −6 | gb105pln | Arabidopsis thaliana chromosome II BAC T30B22 genomic sequence, complete | |
| | | | | | sequence. | |
| 700281977H2 | g459199 | 83 | −32 | gb105pln | Gossypium hirsutum vacuolar H+-ATPase subunit B mRNA, partial cds. | |
| 700344208H1 | g22319 | 10 | 6 | gb105allp | GSTIII (aa 1-220) | |
| 700346120H1 | g507281 | 11 | −4 | gb105eukp | COXII; cytochrome oxidase subunit 2 | |
| 700344163H1 | g2645166 | 31 | −13 | gb105pln | Oryza sativa mRNA, similar to ubiquitin conjugating enzyme. | |
| 700343968H1 | g2245389 | 13 | 11 | gb105pln | Arabidopsis thaliana auxin response transcription factor 3 (ARF3) mRNA, complete cds. | |
| 700343982H1 | g1616652 | 33 | 0 | gb105allp | calcium-activated potassium channel beta subunit | |
| 700345248H1 | g1321818 | 13 | 4 | gb105allp | RING zinc finger protein | |
| 700345704H1 | g496267 | 34 | −36 | gb105pln | Nicotiana tabacum GTP-binding protein (Ran-A1) mRNA, complete cds. | |
| 700346210H1 | g396840 | 10 | 7 | gb105allp | proline iminopeptidase Pip | |
| 700379905H1 | g1370155 | 22 | −29 | gb105pln | L. japonicus mRNA for small GTP-binding protein, RAB11H. | |
| 700343014H1 | g1100782 | 16 | −5 | gb105eukp | unknown | |
| 700342992H1 | g2599103 | 20 | 1 | gb105pln | Dunaliella salina 60S ribosomal protein (DSRP1) mRNA, complete cds. | |
| 700346256H1 | g484043 | 20 | −3 | gb105allp | ribosomal protein S12 | |
| 700281848H2 | g1107484 | 23 | 4 | gb105pln | A. thaliana mRNA for 40S ribosomal protein S15. | |
| 700342210H1 | g984704 | 45 | −18 | gb105eukp | SPAC24H6.07; unknown | |
| 700345170H1 | g500850 | 33 | −16 | gb105pln | Zea mays (clone pAKHSDH1) aspartate kinase-homoserine dehydrogenase | |
| | | | | | mRNA, complete cds. | |
| 700346439H1 | g1749748 | 30 | −15 | gb105eukp | similar to Saccharomyces cerevisiae eukaryotic initiation factor 4A (EIF-4), | |
| | | | | | SWISS-PROT Accession Number P10081 | |
| 700344321H1 | g1899026 | 26 | −40 | gb105pln | Zea mays superoxide dismutase 4A (sod4A) gene, complete cds. | |
| 700347314H1 | g459894 | 26 | −19 | gb105pln | Zea mays sus1 gene, complete cds. | |
| 700344906H1 | g460042 | 20 | −6 | gb105eukp | DBF3; involved in the control of S phase and pre-mRNA splicing | |
| 700342751H1 | g2245020 | 44 | 6 | gb105allp | growth regulator homolog | |
| 700342724H1 | g2245037 | 12 | 4 | gb105eukp | nuclear antigen homolog | |
| 700342213H1 | g473604 | 17 | −11 | gb105pln | Zea mays W-22 histone H2B mRNA, complete cds. | |
| 700347323H1 | g2245098 | 11 | 0 | gb105eukp | ribosomal protein | |
| 700345561H1 | g1336081 | 23 | −13 | gb105pln | Glycine max var. Century ascorbate peroxidase 2 (APx2) mRNA, | |
| | | | | | complete cds. | |
| 700380182H1 | g2564051 | 27 | −38 | gb105pln | Arabidopsis thaliana genomic DNA, chromosome 5, P1 clone: MWD9, | |
| | | | | | complete sequence. | |
| 700380409H1 | g398326 | 14 | 12 | gb105pln | A. phyllitidis PABP mRNA for poly(A)-binding protein. | |
| 700346838H1 | g2274860 | 22 | −1 | gb105pln | Arabidopsis thaliana mRNA for cytosolic glutathione peroxidase. | |
| 700347086H1 | g2330794 | 9 | 5 | gb105eukp | SPAC24C9.11; hypothetical protein | |
| 700345986H1 | g540534 | 40 | −23 | gb105pln | Rice mRNA for q group of receptor for activated C-kinase, complete cds. | |
| 700347230H1 | g2160300 | 10 | 7 | gb105eukp | ribosomal protein | |
| 700343485H1 | g2827001 | 49 | −25 | gb105pln | Triticum aestivum 70 kDa heat shock protein (TaHSP70d) mRNA, complete cds. | |
| 700346088H1 | g2706466 | 17 | −8 | gb105eukp | SPAC3G9.15c; hypothetical protein | |
| 700344059H1 | g497788 | 10 | 4 | gb105eukp | erd11; glutathione S-transferase; EC 2.5.1.18 | |
| 700342746H1 | g2274990 | 60 | −53 | gb105pln | Hordeum vulgare mRNA for expressed sequence tag. | |
| 700344751H1 | g498774 | 21 | −62 | gb105pln | Z. mays (cv DH5xDH7) hsp70-5 mRNA for heat shock protein 70. | |
| 700343728H1 | g1301996 | 11 | 5 | gb105eukp | ORF YNL092w | |
| 700343159H1 | g1360637 | 38 | −8 | gb105eukp | ENBP1 | |
| 700344979H1 | g710551 | 11 | 4 | gb105allp | ankyrin 3 | |
| 700347024H1 | g168421 | 86 | −72 | gb105pln | Maize auxin-binding protein (ABP) mRNA, complete cds. | |
| 700342882H1 | g168419 | 55 | −2 | gb105pln | Maize (Z. mays) aldolase mRNA, complete cds. | |
| 700346927H1 | g1871360 | 20 | 2 | gb105eukp | glutamyl-prolyl-tRNA synthetase | |
| 700345630H1 | g2564051 | 31 | −9 | gb105pln | Arabidopsis thaliana genomic DNA, chromosome 5, P1 clone: MWD9, complete | |
| | | | | | sequence. | |
| 700343295H1 | g166850 | 15 | −2 | gb105eukp | receptor-like protein kinase; EC 2.7.11 | |
| 700343681H1 | g531055 | 29 | −30 | gb105pln | Wheat mRNA for protein H2B-6, complete cds. | |
| 700343659H1 | g1747293 | 40 | −28 | gb105pln | Rice mRNA for vacuolar H+-pyrophosphatase, complete cds. | |
| 700342456H1 | g2668745 | 35 | −35 | gb105pln | Zea mays inorganic pyrophosphatase (IPP) mRNA, complete cds. | |
| 700342485H1 | g310932 | 36 | −25 | gb105pln | Nicotiana tabacum ribosomal protein L17 mRNA, complete cds. | |
| 700345072H1 | g2827084 | 14 | 4 | gb105eukp | nemdh; malate dehydrogenase precursor; EC 1.1.1.37 | |
| 700344526H1 | g2224913 | 14 | 1 | gb105eukp | beta-expansin | |
| 700379941H1 | g303852 | 64 | −56 | gb105pln | Rice mRNA for ribosomal protein L3, complete cds. | |
| 700379739H1 | g1002380 | 8 | 7 | gb105eukp | RRM-type RNA binding protein | |
| 700343851H1 | g395071 | 24 | −11 | gb105pln | V. faba guanine nucleotide regulatory protein mRNA, complete CDS. | |
| 700347353H1 | g602605 | 97 | −89 | gb105pln | Zea mays tandem genes for alpha1-tubulin and alpha2-tubulin. | |
| 700347061H1 | g2501849 | 41 | −27 | gb105pln | Nicotiana tabacum GDP dissociation inhibitor (GDI) mRNA, complete cds. | |
| 700345801H1 | g1469218 | 32 | −15 | gb105pln | B. oleracea mRNA (unknown). | |
| 700342606H1 | g218488 | 21 | 1 | gb105eukp | Smp2 protein | |
| 700344094H1 | g1431253 | 14 | 6 | gb105pln | Yeast (Saccharomyces cerevisiae) chromosome IV reading frame ORF YDL160c. | |
| 700344179H1 | g22597 | 18 | −0 | gb105eukp | CEX; proline-rich protein | |
| 700344003H1 | g1322620 | 19 | −3 | gb105pln | Yeast (Saccharomyces cerevisiae) chromosome VII reading frame ORF YGL091c. | |
| 700342634H1 | g2642634 | 47 | −3 | gb105eukp | actin | |
| 700342344H1 | g1770190 | 25 | −4 | gb105eukp | cycD1; cyclin-D like protein | |
| 700380728H1 | g1773295 | 12 | 7 | gb105allp | regulatory protein NPR1 | |
| 700347224H1 | g2302292 | 13 | 6 | gb105allp | unnamed protein product | |
| 700343529H1 | g2160155 | 13 | 17 | gb105pln | Sequence of BAC F21M12 from Arabidopsis thaliana chromosome 1, complete | |
| | | | | | sequence. | |
| 700343209H1 | g1652751 | 11 | −4 | gb105allp | DNA mismatch repair protein MutS | |
| 700344073H1 | g2569962 | 11 | 11 | gb105pln | Daucus carota DNA fragment containing transposon-like CACTA/TAGTG repeats | |
| | | | | | and nested inverted repeats. | |
| 700343813H1 | g1223579 | 5 | 8 | gb105eukp | ORF | |
| 700281853H2 | g168490 | 56 | −57 | gb105pln | Maize glutathione S-transferase (GST-I) mRNA, complete cds. | |
| 700342552H1 | g2702406 | 14 | −2 | gb105eukp | C54E4.5 | |
| 700343610H1 | g303854 | 26 | −37 | gb105pln | Rice mRNA for ribosomal protein L7A, complete cds. | |
| 700343559H1 | g21438 | 35 | −28 | gb105pln | S. tuberosum cycl gene encoding cytochrome c1. | |
| 700343035H1 | g306712 | 12 | 8 | gb105allp | putative | |
| 700343215H1 | g473976 | 59 | −44 | gb105pln | Rice mRNA, partial homologous to elongation factor 1-alpha gene. | |
| 700281877H2 | g313147 | 45 | −25 | gb105pln | A. medicago MSK-3 mRNA for protein kinase. | |
| 700344321H1 | g22484 | 42 | −37 | gb105pln | Z. mays RNA for superoxide dismutase Sod4A. | |
| 700380434H1 | g806279 | 8 | −1 | gb105eukp | ribosomal protein | |
| 700342403H1 | g1573909 | 10 | 3 | gb105allp | hypothetical | |
| 700281995H2 | g1707006 | 18 | −3 | gb105pln | Arabidopsis thaliana chromosome II BAC T01B08 genomic sequence, complete | |
| | | | | | sequence. | |
| 700344773H1 | g2827551 | 8 | 4 | gb105eukp | T12H17.130; predicted protein | |
| 700345581H1 | g857573 | 27 | −17 | gb105pln | Oryza sativa vacuolar H+-ATPase (vatp-P1) mRNA, complete cds. | |
| 700344542H1 | g1550660 | 9 | 5 | gb105allp | unknown | |
| 700344001H1 | g577818 | 40 | 12 | gb105pln | Z. mays gene for H2B histone (gH2B4). | |
| 700342827H1 | g290213 | 44 | −25 | gb105eukp | Arf84F; GTP-binding protein | |
| 700379666H1 | g21794 | 25 | −42 | gb105pln | Wheat histone H4 gene. | |
| 700342816H1 | g1072406 | 9 | 6 | gb105allp | unknown | |
| 700281925H1 | g166409 | 19 | 2 | gb105pln | Alfalfa nucleic acid binding protein (alfin-1) mRNA, partial cds. | |
| 700344029H1 | g2547236 | 30 | 1 | gb105allp | DNA mismatch repair protein MSH2 | |
| 700346453H1 | g2462744 | 6 | 7 | gb105eukp | F8A5.28 | |
| 700345268H1 | g606970 | 10 | −2 | gb105eukp | cytoplasmic ribosomal protein L18 | |
| 700347103H1 | g2274990 | 40 | −52 | gb105pln | Hordeum vulgare mRNA for expressed sequence tag. | |
| 700343009H1 | g536895 | 30 | −44 | gb105pln | Wheat mRNA for protein H2A, complete cds, clone wcH2A-10. | |
| 700343084H1 | g170099 | 43 | −36 | gb105pln | Spinach betaine-aldehyde dehydrogenase (BADH) mRNA, complete cds. | |
| 700342333H1 | g2827001 | 30 | −9 | gb105pln | Triticum aestivum 70 kDa heat shock protein (TaHSP70d) mRNA, complete cds. | |
| 700380428H1 | g887795 | 58 | −29 | gb105allp | FXR1 | |
| 700281853H2 | g22314 | 26 | −82 | gb105pln | Maize mRNA for GSH gluthathione S-transferase I (GST; EC 2.5.1.18). | |
| 700344422H1 | g1276768 | 21 | −11 | gb105eukp | rp15; 50S ribosomal protein L5 | |
| 700380650H1 | g170746 | 55 | −42 | gb105pln | Wheat histone H4 TH091 gene, complete cds. | |
| 700342901H1 | g398608 | 26 | 1 | gb105eukp | eEf-1 beta A1; elongation factor-1 beta A1 | |
| 700346361H1 | g535743 | 29 | −6 | gb105pln | Oryza sativa unknown ORF mRNA, complete cds. | |
| 700346351H1 | g17863 | 10 | 6 | gb105allp | r-protein nS15a | |
| 700346467H1 | g634003 | 21 | −3 | gb105eukp | acyl-(acyl carrier protein) thioesterase; EC 3.1.2.14 | |
| 700345959H1 | g1143387 | 30 | −13 | gb105pln | A. thaliana mRNA for Class III ADH. | |
| 700343523H1 | g7364 | 20 | −4 | gb105eukp | ribosomal protein S31 | |
| 700281930H2 | g168498 | 23 | −31 | gb105pln | Corn histone H4 (H4C13) gene, complete cds. | |
| 700380712H1 | g577818 | 29 | −24 | gb105pln | Z. mays gene for H2B histone (gH2B4). | |
| 700347336H1 | g2735839 | 50 | −48 | gb105pln | Sorghum bicolor ADP-glucose pyrophosphorylase subunit SH2, transcriptional | |
| | | | | | regulator, NADPH-dependent reductase A1-a and NADPH-dependent reductase A1-b | |
| | | | | | genes, complete cds. | |
| 700343386H1 | g2293006 | 13 | 6 | gb105allp | hypothetical protein | |
| 700347047H1 | g2661839 | 32 | −16 | gb105pln | Physcomitrella patens mRNA for adenosine kinase. | |
| 700344031H1 | g286254 | 58 | 5 | gb105allp | proteasome subunit R-ZETA | |
| 700345157H1 | g2791806 | 14 | 8 | gb105allp | bet3 | |
| 700342518H1 | g386848 | 71 | −34 | gb105allp | keratin | |
| 700344266H1 | g1370305 | 19 | −11 | gb105eukp | RPL37A | |
| 700343531H1 | g1658314 | 15 | −4 | gb105pln | O. sativa osr40g3 gene. | |
| 700343365H1 | g2258073 | 27 | −5 | gb105pln | Hordeum vulgare var. distichum soluble inorganic pyrophosphatase (Ipp) mRNA, | |
| | | | | | complete cds. | |
| 700345202H1 | g2618602 | 13 | 7 | gb105pln | Arabidopsis thaliana genomic DNA, chromosome 5, P1 clone, MSJ1, complete | |
| | | | | | sequence. | |
| 700346446H1 | g2244764 | 13 | −2 | gb105eukp | AMP-binding protein | |
| 700342303H1 | g2266661 | 43 | −39 | gb105pln | Hordeum vulgare mRNA for 14-3-3 protein (Hv1433c). | |
| 700342955H1 | g2345153 | 40 | −49 | gb105pln | Zea mays Ribsomal protein S4 (rps4) mRNA, complete cds. | |
| 700281913H2 | g2281702 | 42 | −40 | gb105pln | Hordeum vulgare beta-amylase mRNA, partial cds. | |
| 700345433H1 | g21800 | 44 | −21 | gb105pln | T. aestivum L mRNA for histone H2B. | |
| 700379659H1 | g2832245 | 14 | 3 | gb105eukp | hypothetical protein | |
| 700343156H1 | g182651 | 8 | 7 | gb105allp | midkine | |
| 700342669H1 | g623589 | 48 | −38 | gb105pln | Nicotiana tabacum SR1 Nt-rab7b mRNA, complete cds. | |
| 700342629H1 | g2570504 | 45 | −29 | gb105pln | Oryza sativa proteasome component mRNA, complete cds. | |
| 700342619H1 | g168500 | 33 | −44 | gb105pln | Maize (Zea mays) histone H4 gene (H4C14), complete cds. | |
| 700344660H1 | g2464945 | 45 | −8 | gb105eukp | beta-galactosidase | |
| 700342607H1 | g312002 | 35 | −5 | gb105allp | SmE protein | |
| 700346954H1 | g293901 | 23 | −2 | gb105pln | Zea mays Zea mI gene, complete cds. | |
| 700379829H1 | g218241 | 22 | −36 | gb105pln | Rice mRNA for ribosomal protein L3 (T82 gene), partial sequence. | |
| 700346010H1 | g602802 | 29 | −13 | gb105eukp | Dsub\Rp49; ribosomal protein 49 | |
| 700346834H1 | g2833627 | 24 | −9 | gb105pln | Arabidopsis thaliana chromosome 1 BAC F17O7 complete sequence. | |
| 700342755H1 | g1553128 | 15 | 16 | gb105pln | Gossypium hirsutum ribosomal protein L44 isoform a (RL44), complete cds. | |
| 700345889H1 | g2662346 | 70 | −54 | gb105pln | Oryza sativa mRNA for EF-1 alpha, complete cds. | |
| 700379877H1 | g1907232 | 11 | −0 | gb105eukp | YCR094w, len:391 | |
| 700346876H1 | g2662468 | 19 | −13 | gb105pln | Arabidopsis thaliana ribosomal protein S6 (rps6) mRNA, complete cds. | |
| 700345202H1 | g2244973 | 12 | 3 | gb105eukp | similarity to extensin class 1 protein | |
| 700342952H1 | g1066082 | 16 | 1 | gb105allp | DNA-binding protein | |
| 700343684H1 | g1086625 | 10 | 0 | gb105eukp | C06A6.4 | |
| 700345801H1 | g2584827 | 24 | −3 | gb105pln | Sequence of BAC F12F1 from Arabidopsis thaliana chromosome 1, complete | |
| | | | | | sequence. | |
| 700342536H1 | g168502 | 50 | −44 | gb105pln | Maize (Zea mays) histone H4 gene (H4C7), complete cds. | |
| 700380124H1 | g171267 | 15 | 5 | gb105eukp | COX12; cytochrome c oxidase subunit VIb | |
| 700347076H1 | g603808 | 16 | −8 | gb105eukp | STT3; STT3 protein | |
| 700344842H1 | g18266 | 19 | 16 | gb105pln | C. stellata mRNA for ribosomal protein L27. | |
| 700346045H1 | g806807 | 24 | −18 | gb105pln | Pisum sativum chaperonin precursor mRNA, chloroplast gene encoding chloroplast | |
| | | | | | protein, complete cds. | |
| 700343516H1 | g602252 | 67 | −77 | gb105pln | Zea mays enolase (eno2) mRNA, complete cds. | |
| 700347326H1 | g602252 | 77 | −62 | gb105pln | Zea mays enolase (eno2) mRNA, complete cds. | |
| 700345278H1 | g534915 | 29 | −15 | gb105pln | S. tuberosum (Desiree) ppa mRNA for soluble inorganic pyrophosphatase. | |
| 700346641H1 | g416514 | 25 | −13 | gb105allp | NEDD-6 | |
| 700345474H1 | g218175 | 51 | −40 | gb105pln | Rice mRNA for heat shock protein 82 (NH67 gene), partial sequence. | |
| 700343712H1 | g1638838 | 18 | 2 | gb105allp | unknown | |
| 700346102H1 | g2826899 | 22 | −24 | gb105pln | Oryza sativa mRNA for DNA polymerase alpha catalytic subunit, complete cds. | |
| 700344634H1 | g1182048 | 24 | −9 | gb105eukp | nda4; Nda4 | |
| 700379646H1 | g347061 | 22 | 1 | gb105pln | Brassica rapa ribosomal protein L37A (RPL37A) mRNA, complete cds. | |
| 700344059H1 | g676880 | 9 | 4 | gb105allp | The expression is induced by aluminium treatment and Pi starvation. | |
| 700343656H1 | g1945410 | 21 | −20 | gb105eukp | Ap47; clathrin associated protein AP47 | |
| 700344951H1 | g998429 | 37 | −59 | gb105pln | GRF1 = general regulatory factor [Zea mays, XL80, Genomic, 5348 nt]. | |
| 700380584H1 | g2394431 | 9 | 6 | gb105eukp | F23F1.5 | |
| 700346566H1 | g546359 | 22 | −2 | gb105pln | ferric leghemoglobin reductase [Glycine max = soybeans, Merr. nodules, mRNA, 1740 nt]. | |
| 700343802H1 | g1561577 | 30 | −18 | gb105eukp | spermine synthase 1; EC 2.5.1.22 | |
| 700344894H1 | g606970 | 23 | −9 | gb105eukp | cytoplasmic ribosomal protein L18 | |
| 700380088H1 | g474321 | 35 | −20 | gb105pln | Yeast ste13+ gene for RNA helicase, complete cds. | |
| 700346641H1 | g1217609 | 17 | −3 | gb105allp | Csa-19 homlogue | |
| 700345907H1 | g2649663 | 10 | 4 | gb105allp | branched-chain amino acid aminotransferase (ilvE) | |
| 700343707H1 | g1053056 | 17 | −19 | gb105pln | Triticum aestivum histone H3 gene, partial cds, clone W1. | |
| 700344301H1 | g1707657 | 17 | 8 | gb105allp | DnaJ homologue | |
| 700343525H1 | g22483 | 35 | −34 | gb105pln | Z. mays RNA for superoxide dismutase Sod4. | |
| 700344544H1 | g21802 | 43 | −36 | gb105pln | T. aestivum mRNA for high mobility group protein (HMGW). | |
| 700346162H1 | g472913 | 20 | −15 | gb105eukp | Doa; Doa kinase | |
| 700342356H1 | g1914554 | 15 | 4 | gb105eukp | T27E9.2 | |
| 700343590H1 | g218233 | 28 | −11 | gb105pln | Rice mRNA for NDP kinase (T164 gene), partial sequence. | |
| 700346838H1 | g2632108 | 12 | 13 | gb105pln | Pisum sativum mRNA for phospholipid glutathione peroxidase. | |
| 700343483H1 | g2829869 | 51 | −7 | gb105eukp | F3I6.11; pyruvate dehydrogenase E1 alpha subunit | |
| 700343282H1 | g457708 | 29 | −15 | gb105pln | S. oleracea mRNA for protein kinase. | |
| 700379666H1 | g170746 | 25 | −41 | gb105pln | Wheat histone H4 TH091 gene, complete cds. | |
| 700345233H1 | g463856 | 18 | −12 | gb105pln | Chlamydomonas reinhardtii 21 gr ribosomal protein S14 (CRY1) gene, complete cds. | |
| 700342274H1 | g1627599 | 23 | −4 | gb105eukp | C25A1.6 | |
| 700345957H1 | g2564051 | 26 | −8 | gb105pln | Arabidopsis thaliana genomic DNA, chromosome 5, P1 clone, MWD9, complete | |
| | | | | | sequence. | |
| 700344601H1 | g639834 | 28 | −8 | gb105eukp | NADH dehydrogenase; EC 1.6.99.3 | |
| 700344661H1 | g2668737 | 78 | −34 | gb105pln | Zea mays translation initiation factor 5A (TIF5A), mRNA, complete cds. | |
| 700281996H2 | g558648 | 21 | 5 | gb105eukp | D-myo-inositol-3-phosphate synthase; EC 5.5.1.4 | |
| 700343654H1 | g1044992 | 12 | 3 | gb105allp | ribosomal protein L17 | |
| 700342216H1 | g456671 | 33 | −15 | gb105pln | T. aestivum VDAC 1 mRNA. | |
| 700344219H1 | g2827138 | 17 | 2 | gb105pln | Arabidopsis thaliana cellulose synthase catalytic subunit (RSW1) gene, complete cds. | |
| 700342706H1 | g166857 | 48 | −59 | gb105pln | Arabidopsis thaliana cytoplasmic ribosomal protein mRNA, complete cds. | |
| 700342503H1 | g2827001 | 44 | −28 | gb105pln | Triticum aestivum 70 kDa heat shock protein (TaHSP70d) mRNA, complete cds. | |
| 700343188H1 | g218169 | 14 | −1 | gb105pln | Rice mRNA for acyl carrier protein (KN33 gene), partial sequence. | |
| 700342490H1 | g168502 | 74 | −77 | gb105pln | Maize (Zea mays) histone H4 gene (H4C7), complete cds. | |
| 700344038H1 | g36132 | 20 | 5 | gb105allp | rpL32 (aa 1-135) | |
| 700345142H1 | g712823 | 17 | −4 | gb105eukp | PDI; protein disulfide isomerase | |
| 700380548H1 | g1262170 | 19 | −1 | gb105pln | Arabidopsis thaliana phosphoprotein phosphatase 2A regulatory subunit A (RCN1) | |
| | | | | | mRNA, complete cds. | |
| 700347014H1 | g2282583 | 74 | −26 | gb105pln | Zea mays elongation factor 1-alpha (EF1-A) mRNA, complete cds. | |
| 700345687H1 | g531020 | 14 | −0 | gb105eukp | TCP20; chaperonin-like protein | |
| 700343857H1 | g170899 | 14 | 2 | gb105eukp | peroxisomal membrane protein (PMP20A) | |
| 700379825H1 | g1325967 | 25 | −15 | gb105pln | T. aestivum histone H2A gene (clone TH274). | |
| 700379631H1 | g2102696 | 19 | −7 | gb105allp | karyopherin beta 3 | |
| 700343989H1 | g218088 | 49 | −39 | gb105pln | Rice mRNA for ribosomal protein 117 (249 gene), partial sequence. | |
| 700344044H1 | g401845 | 40 | −5 | gb105allp | ribosomal protein L18a | |
| 700344736H1 | g1163029 | 25 | −10 | gb105eukp | T05E11.1 | |
| 700343289H1 | g971283 | 55 | −41 | gb105pln | Rice mRNA for ribosomal protein S31, complete cds. | |
| 700345251H1 | g1272405 | 24 | −5 | gb105pln | Arabidopsis thaliana immunophilin (FKBP15-1) mRNA, complete cds. | |
| 700346880H1 | g1431869 | 13 | 11 | gb105pln | Cucurbita maxima ent-kaurene synthase B mRNA, complete cds. | |
| 700342555H1 | g38223 | 11 | −19 | gb105allp | alpha1-globin | |
| 700343987H1 | g2252863 | 19 | −14 | gb105ekp | A_TM018A10.14 | |
| 700342292H1 | g2662344 | 58 | −45 | gb105pln | Oryza sativa mRNA for EF-1 alpha, complete cds. | |
| 700346267H1 | g533689 | 24 | −2 | gb105pln | Brassica napus Naehan RNA polymerase II subunit RPB10 homolog (BRP10) mRNA, | |
| | | | | | complete cds. | |
| 700342244H1 | g1279761 | 22 | 6 | gb105allp | arfaptin 1 | |
| 700344035H1 | g2654121 | 58 | −28 | gb105pln | Arabidopsis thaliana ribosomal protein L23a (AtrpL23a) mRNA, complete cds. | |
| 700342766H1 | g474002 | 77 | −6 | gb105pln | Rice mRNA, partial homologous to ribosomal protein L39 gene. | |
| 700342872H1 | g1256378 | 11 | 3 | gb105allp | zinc transporter ZnT-2 | |
| 700343807H1 | g945084 | 33 | −24 | gb105pln | Arabidopsis thaliana transcription factor TFIIB mRNA, complete cds. | |
| 700346824H1 | g2369766 | 41 | −13 | gb105eukp | hypothetical protein | |
| 700345625H1 | g668984 | 50 | −37 | gb105pln | S. tuberosum TYKY1 mRNA for NADH:ubiquinone oxidoreductase. | |
| 700345424H1 | g168436 | 48 | −21 | gb105pln | Zea mays catalase (Cat3) gene, complete cds. | |
| 700346539H1 | g2828188 | 28 | −20 | gb105pln | Arabidopsis thaliana genomic DNA, chromosome 5, TAC clone: K3I3, complete | |
| | | | | | sequence. | |
| 700380159H1 | g1899026 | 22 | −36 | gb105pln | Zea mays superoxide dismutase 4A (sod4A) gene, complete cds. | |
| 700346238H1 | g166857 | 47 | −43 | gb105pln | Arabidopsis thaliana cytoplasmic ribosomal protein mRNA, complete cds. | |
| 700343194H1 | g2828187 | 18 | 4 | gb105pln | Arabidopsis thaliana genomic DNA, chromosome 5, TAC clone: K21C13, complete | |
| | | | | | sequence. | |
| 700342791H1 | g732989 | 61 | −20 | gb105pln | Z. mays PCNA mRNA for proliferating cell nuclear antigen. | |
| 700345767H1 | g2330711 | 10 | 6 | gb105eukp | SPAC17H9.04c; hypothetical protein | |
| 700342516H1 | g435174 | 73 | −63 | gb105pln | A. sativa (Pewi) ASTCP-K36 mRNA for t complex polypeptide 1. | |
| 700342360H1 | g2340107 | 73 | −79 | gb105pln | Zea mays starch branching enzyme IIa (Sbe2a) mRNA, partial cds. | |
| 700345277H1 | g170432 | 35 | −32 | gb105pln | Tomato ATP-dependent protease (CD4A) gene, complete cds. | |
| 700345450H1 | g599722 | 20 | 7 | gb105pln | C. melo mRNA for aconitase (UNI-ZAPxR). | |
| 700345831H1 | g185789 | 55 | −31 | gb105allp | immunoglobulin gamma-3 chain | |
| 700345734H1 | g644491 | 45 | −36 | gb105pln | Corn mRNA for elongation factor 1A. | |
| 700343917H1 | g1550813 | 95 | −65 | gb105pln | Z. mays mRNA for acidic ribosomal protein P0. | |
| 700344438H1 | g496661 | 14 | 17 | gb105pln | Yeast (Saccharomyces cerevisiae) genomic DNA, chromosome II from Y element to | |
| | | | | | ILS1 gene. | |
| 700342344H1 | g603509 | 20 | 2 | gb105eukp | cyclin delta-3 | |
| 700344409H1 | g2274990 | 25 | −29 | gb105pln | Hordeum vulgare mRNA for expressed sequence tag. | |
| 700281996H2 | g602565 | 21 | 5 | gb105eukp | INO1 | |
| 700343590H1 | g1777929 | 51 | −39 | gb105pln | Saccharum officinarum nucleoside diphosphate kinase (SoNDPK1) mRNA, | |
| | | | | | complete cds. | |
| 700347308H1 | g2245126 | 11 | 17 | gb105pln | Arabidopsis thaliana DNA chromosome 4, ESSA I contig fragment No. 9. | |
| 700346305H1 | g1750404 | 31 | −8 | gb105eukp | B0412.4 | |
| 700343377H1 | g2645165 | 58 | 0 | gb105pln | Oryza sativa mRNA, similar to ribosomal protein 41. | |
| 700343340H1 | g1469218 | 34 | −17 | gb105pln | B. oleracea mRNA (unknown). | |
| 700344063H1 | g463251 | 33 | −22 | gb105pln | M. sativa (Nagyszenasi) mRNA for ribosomal protein RL5. | |
| 700346970H1 | g452712 | 27 | −12 | gb105eukp | beta-galactosidase; EC 3.2.1.23 | |
| 700343021H1 | g622989 | 16 | −2 | gb105eukp | actin I | |
| 700380179H1 | g473602 | 29 | −15 | gb105pln | Zea mays W-22 histone H2A mRNA, complete cds. | |
| 700379996H1 | g2454309 | 15 | 4 | gb105allp | beta prime COP | |
| 700345538H1 | g643073 | 24 | 8 | gb105pln | Fragaria x ananassa putative 40S ribosomal protein s12 mRNA, complete cds. | |
| 700343924H1 | g167109 | 23 | 3 | gb105pln | Hordeum vulgare vacuolar ATPase B subunit mRNA, complete cds. | |
| 700342796H1 | g2293565 | 54 | −43 | gb105pln | Oryza sativa ADP-ribosylation factor 1 (OLs-ARF1) mRNA, complete cds. | |
| 700346276H1 | g1389566 | 14 | −10 | gb105eukp | ER; receptor protein kinase | |
| 700345632H1 | g550543 | 42 | −27 | gb105pln | A. thaliana mRNA for ribosomal protein L16. | |
| 700281853H2 | g168486 | 62 | −65 | gb105pln | Maize glutathione S-transferase gene (GST-I), exon 1. | |
| 700345113H1 | g2275312 | 32 | 3 | gb105eukp | 40S ribosomal protein S20 homolog | |
| 700345323H1 | g644492 | 82 | −76 | gb105pln | Corn elongation factor 1alpha gene, complete cds. | |
| 700346126H1 | g1771162 | 44 | −16 | gb105eukp | SBT2; serine protease | |
| 700343840H1 | g602605 | 75 | −80 | gb105pln | Zea mays tandem genes for alpha1-tubulin and alpha2-tubulin. | |
| 700344003H1 | g505270 | 19 | −3 | gb105pln | Yeast (Saccharomyces cerevisiae) gene for Nup145p. | |
| 700379791H1 | g902526 | 42 | −34 | gb105pln | Zea mays clone MubG7 ubiquitin fusion protein gene, complete cds. | |
| 700342504H1 | g2832667 | 18 | 10 | gb105pln | Arabidopsis thaliana DNA chromosome 4, BAC clone T10I14 (ESSAII project). | |
| 700344974H1 | g22324 | 33 | −31 | gb105pln | Z. mays mRNA for H2B histone (clone cH2B221). | |
| 700346721H1 | g762850 | 9 | 5 | gb105eukp | wos2; p21 protein | |
| 700346082H1 | g404165 | 43 | −32 | gb105pln | A. thaliana gene for BBC1 protein. | |
| 700343146H1 | g1816587 | 77 | −53 | gb105pln | Zea mays LON2 protease (LON2) mRNA, complete cds. | |
| 700347309H1 | g1835728 | 23 | 1 | gb105pln | Oryza sativa ribosomal protein mRNA, complete cds. | |
| 700343663H1 | g1217651 | 56 | −25 | gb105allp | carbonyl reductase (NADPH) | |
| 700344915H1 | g2262143 | 27 | −11 | gb105eukp | T10P11.10; putative serine/threonine protein kinase/T10P11.10 | |
| 700343018H1 | g1644320 | 14 | 4 | gb105eukp | SPAC6G9.08; putative ubiquitin carboxyl terminal hydrolase | |
| 700343795H1 | g2465746 | 11 | −1 | gb105eukp | trpG; anthranilate synthase component II | |
| 700343917H1 | g18140 | 48 | −29 | gb105pln | C. rubrum mRNA for light-induced 34kD protein. | |
| 700343016H1 | g1200255 | 20 | −3 | gb105pln | S. tuberosum stpk1 gene, and putative sucrase gene. | |
| 700342606H1 | g825570 | 21 | 1 | gb105eukp | SMP2; Smp2p | |
| 700347105H1 | g2511590 | 35 | −9 | gb105eukp | prcgb; multicatalytic endopeptidase complex, proteasome component, beta subunit; | |
| | | | | | EC 3.4.99.46 | |
| 700347111H1 | g443802 | 26 | 1 | gb105allp | ribosomal protein L36 | |
| 700346760H1 | g451192 | 20 | −3 | gb105pln | Triticum aestivum (wali7) mRNA, 3′ end, partial cds. | |
| 700342356H1 | g32101 | 82 | −22 | gb105allp | hinge protein precursor (AA −13 to 78) | |
| 700345932H1 | g707001 | 21 | −0 | gb105eukp | sucrolytic enzyme/ferredoxin homolog | |
| 700343574H1 | g1575129 | 41 | −40 | gb105pln | Zea mays lumenal binding protein cBiPe3 mRNA, complete cds. | |
| 700281821H2 | g899607 | 80 | −75 | gb105pln | Zea mays polyubiquitin (MubC5) mRNA, complete cds. | |
| 700379842H1 | g1167953 | 19 | −22 | gb105eukp | putative 32.6 kDa jasmonate-induced protein | |
| 700380655H1 | g1658314 | 28 | −31 | gb105pln | O. sativa osr40g3 gene. | |
| 700347094H1 | g2342735 | 19 | −2 | gb105eukp | T14G11.28 | |
| 700345588H1 | g1279218 | 39 | −32 | gb105pln | B. napus mRNA for acyl-[acyl-carrier protein] desaturase. | |
| 700342220H1 | g473602 | 82 | −77 | gb105pln | Zea mays W-22 histone H2A mRNA, complete cds. | |
| 700345188H1 | g1402896 | 14 | 4 | gb105allp | cyclin delta-2 | |
| 700342669H1 | g1155264 | 66 | −56 | gb105pln | Pennisetum ciliare possible apospory-associated protein mRNA, complete cds. | |
| 700380141H1 | g340017 | 38 | 3 | gb105allp | alpha-tubulin isotype H2-alpha | |
| 700347264H1 | g1326262 | 35 | −20 | gb105eukp | D1005.1 | |
| 700345568H1 | g1568634 | 22 | −5 | gb105pln | Arabidopsis thaliana AtKAP alpha mRNA, complete cds. | |
| 700345565H1 | g170772 | 63 | −55 | gb105pln | Triticum aestivum S-adenosyl-L-homocysteine hydrolase (SH6.2) mRNA, | |
| | | | | | complete cds. | |
| 700346467H1 | g2459531 | 20 | −2 | gb105eukp | Mf-FatB1; acyl-ACP thioesterase | |
| 700345690H1 | g1405747 | 13 | 1 | gb105allp | PR264/SC35 | |
| 700342936H1 | g16086 | 20 | −22 | gb105pln | A. porrum dnaJ mRNA for DNA J protein (partial). | |
| 700347186H1 | g871831 | 17 | −5 | gb105pln | Arabidopsis thaliana ArLIM15 gene for recA-like protein, complete cds (exon1-15). | |
| 700342343H1 | g2370521 | 19 | −3 | gb105eukp | SPAC2E11.07c; hypothetical atpase | |
| 700344923H1 | g1354206 | 21 | 0 | gb105pln | Arabidopsis thaliana FK506 binding protein FKBP62 (ROF1) mRNA, complete cds. | |
| 700346689H1 | g2529229 | 42 | −7 | gb105eukp | gnd; 6-phosphogluconate dehydrogenase; EC 1.1.1.44 | |
| 700344882H1 | g777757 | 65 | −63 | gb105pln | Saccharum hybrid (clone SCUBI561) polyubiquitin mRNA, complete cds. | |
| 700343995H1 | g633606 | 29 | −17 | gb105pln | P. sativum mRNA for chloroplastic outer envelope membrane protein (OEP75). | |
| 700345183H1 | g21794 | 21 | −10 | gb105pln | Wheat histone H4 gene. | |
| 700342656H1 | g218130 | 26 | −14 | gb105pln | Rice mRNA for Ribosomal protein S15. | |
| 700380745H1 | g587564 | 17 | −2 | gb105eukp | MP; mitochondrial processing peptidase | |
| 700347223H1 | g2660670 | 14 | −1 | gb105eukp | T19K24.9; putative Cu2+-transporting ATPase | |
| 700343567H1 | g435542 | 28 | −20 | gb105pln | Z. mays mRNA for calmodulin. | |
| 700342354H1 | g1061037 | 21 | −3 | gb105pln | A. thaliana mRNA for sterol-C5-desaturase. | |
| 700343282H1 | g457688 | 39 | −26 | gb105pln | M. crystallinum mRNA for protein kinase. | |
| 700281924H2 | g1100224 | 43 | −35 | gb105pln | Pinus sylvestris chloroplast NAD+-dependent glyceraldehyde-3-phosphate | |
| | | | | | dehydrogenase mRNA, complete cds. | |
| 700344647H1 | g1322038 | 7 | 4 | gb105allp | inositol 1,3,4-trisphosphate 5/6-kinase | |
| 700346392H1 | g167968 | 12 | 5 | gb105eukp | CARSR8; glutathione transferase | |
| 700344763H1 | g1185390 | 21 | −1 | gb105eukp | alphacpn60 | |
| 700343858H1 | g595816 | 10 | 4 | gb105eukp | mudrA | |
| 700343952H1 | g22237 | 100 | −90 | gb105pln | Maize mRNA for cytosolic GAPDH (GapC) glyceraldehyde-3-phosphate | |
| | | | | | dehydrogenase. | |
| 700342822H1 | g2104461 | 39 | −21 | gb105eukp | cct7; Cct7p | |
| 700344906H1 | g2440191 | 25 | −15 | gb105eukp | hypothetical protein | |
| 700380141H1 | g9762 | 44 | 4 | gb105allp | alpha-tubulin | |
| 700380714H1 | g13525967 | 24 | −5 | gb105pln | T. aestivum histone H2A gene (clone TH274). | |
| 700346347H1 | g2370557 | 16 | −16 | gb105eukp | SPAC9G1.09; serine threonine protein kinase | |
| 700345740H1 | g303854 | 68 | −65 | gb105pln | Rice mRNA for ribosomal protein L7A, complete cds. | |
| 700344274H1 | g1185156 | 9 | 5 | gb105eukp | rps17; 30S ribosomal protein S17 | |
| 700344447H1 | g407410 | 11 | −11 | gb105eukp | Unknown; 14 kDa polypeptide | |
| 700345878H1 | g293888 | 92 | −76 | gb105pln | Zea mays, glyceraldehyde-3-phosphate dehydrogenase mRNA, 3′ end (clone GAPC2). | |
| 700345709H1 | g902583 | 79 | −84 | gb105pln | Zea mays clone MubG1 ubiquitin gene, complete cds. | |
| 700343820H1 | g395381 | 7 | 5 | gb105allp | elongation factor-1 alpha | |
| 700380531H1 | g218160 | 36 | −26 | gb105pln | Oryza sativa mRNA for elongation actor 1 beta′. | |
| 700345876H1 | g1256771 | 22 | −6 | gb105eukp | COP9 | |
| 700344402H1 | g1762939 | 21 | −9 | gb105eukp | ORF; able to induce HR-like lesions | |
| 700380290H1 | g644492 | 59 | −48 | gb105pln | Corn elongation factor 1alpha gene, complete cds. | |
| 700379957H1 | g736308 | 15 | −1 | gb105eukp | unknown | |
| 700345914H1 | g717080 | 31 | −10 | gb105pln | Zea mays glyceraldehyde-3-phosphate dehydrogenase (GapC4) gene, promoter region. | |
| 700343023H1 | g2811223 | 16 | 7 | gb105pln | Arabidopsis thaliana fimbrin 1 mRNA, partial cds. | |
| 700342888H1 | g289194 | 34 | −17 | gb105pln | Arabidopsis thaliana dihydrofolate reductase-thymidylate synthase (THY-2) mRNA, | |
| | | | | | exons 1 through 9 and complete cds. | |
| 700344631H1 | g728520 | 15 | 6 | gb105pln | A. thaliana (Columbia) cyc3b mRNA for cylcin 3b protein. | |
| 700379682H1 | g1132482 | 35 | −28 | gb105pln | Rice mRNA for ADP-ribosylation factor, complete cds. | |
| 700344895H1 | g1196442 | 51 | −24 | gb105allp | galactose-specific lectin | |
| 700342456H1 | g534915 | 32 | −34 | gb105pln | S. tuberosum (Desiree) ppa mRNA for soluble inorganic pyrophosphatase. | |
| 700342446H1 | g849135 | 54 | −43 | gb105pln | Vigna radiata vacuolar H+-ATPase subunit A mRNA, complete cds. | |
| 700347302H1 | g1183936 | 13 | 14 | gb105pln | P. sativum 5S rRNA gene. | |
| 700344195H1 | g2331281 | 18 | 5 | gb105allp | hamartin | |
| 700346073H1 | g1711035 | 34 | −17 | gb105pln | Pisum sativum hydroxyproline rich glycoprotein PsHRGP1 mRNA, partial cds. | |
| 700343573H1 | g1107564 | 32 | −16 | gb105eukp | RpS13; ribosomal protein S13 | |
| 700343340H1 | g2584827 | 20 | −8 | gb105pln | Sequence of BAC F12F1 from Arabidopsis thaliana chromosome 1, complete | |
| | | | | | sequence. | |
| 700342610H1 | g669002 | 21 | 2 | gb105pln | Glycine max calnexin mRNA, complete cds. | |
| 700347301H1 | g571469 | 8 | 17 | gb105pln | Chlamydomonas reinhardtii histone H3 (ch3-II), histone H4 (ch4-II), histone H2B | |
| | | | | | (ch2b-II) and histone H2A (ch2a-II) genes, complete cds. | |
| 700342453H1 | g170663 | 37 | −27 | gb105pln | Wheat protein kinase mRNA, partial cds. | |
| 700342345H1 | g433041 | 15 | −20 | gb105pln | Zea mays W-22 clone PREM-1B retroelement PREM-1, partial sequence. | |
| 700346143H1 | g2257543 | 16 | −4 | gb105eukp | pi055; protein arginine N-methyltransferase | |
| 700380531H1 | g218340 | 33 | −21 | gb105pln | Triticum aestivum mRNA for elongation factor 1 beta′. | |
| 700379935H1 | g1870202 | 44 | −70 | gb105pln | Z. mays cyp71c3 gene. | |
| 700379711H1 | g168500 | 22 | −22 | gb105pln | Maize (Zea mays) histone H4 gene (H4C14), complete cds. | |
| 700346736H1 | g22117 | 21 | 5 | gb105allp | casein kinase II alpha subunit | |
| 700344941H1 | g1054795 | 30 | −32 | gb105pln | H. vulgare mRNA for transmembrane protein. | |
| 700345103H1 | g2724047 | 22 | −12 | gb105pln | Fritillaria agrestis glutaredoxin type II (glr2) mRNA, complete cds. | |
| 700346745H1 | g927572 | 14 | 6 | gb105eukp | Calreticulin precursor | |
| 700345908H1 | g2827513 | 15 | 12 | gb105pln | Arabidopsis thaliana DNA chromosome 4, BAC clone F8F16 (ESSAII project). | |
| 700346714H1 | g22748 | 11 | 7 | gb105allp | actin depolymerizing factor | |
| 700342634H1 | g1372968 | 52 | −3 | gb105eukp | MocuMA2; actin | |
| 700380473H1 | g22123 | 58 | −59 | gb105pln | Maize alcohol dehydrogenase 1 gene (Adh1-1S). | |
| 700345771H1 | g16379 | 27 | −23 | gb105pln | A. thaliana mRNA for laminin receptor homologue. | |
| 700380763H1 | g832875 | 35 | −29 | gb105pln | Lycopersicon esculentum ascorbate free radical reductase (AFRR), complete cds. | |
| 700343406H1 | g939780 | 27 | −19 | gb105pln | Zea mays MADS-box protein (ZAG5) mRNA, complete cds. | |
| 700380076H1 | g2529661 | 46 | −1 | gb105eukp | T30B22.4; putative dTDP-glucose 4-6-dehydratase | |
| 700343589H1 | g20250 | 46 | −39 | gb105pln | Oryza sativa H3 histone gene H3R-11. | |
| 700343219H1 | g2773153 | 32 | −45 | gb105pln | Oryza sativa abscisic acid- and stress-inducible protein (Asr1) mRNA, complete cds. | |
| 700344217H1 | g397400 | 21 | 8 | gb105pln | B. rapa mRNA for S phase specific gene. | |
| 700346510H1 | g2244934 | 16 | 0 | gb105eukp | similarity to SYNAPTOBREVIN-RELATED PROTEIN | |
| 700345552H1 | g168275 | 35 | −26 | gb105pln | Sweet potato starch phosphorylase mRNA, complete cds. | |
| 700342393H1 | g52783 | 47 | −35 | gb105allp | 47 kd keratin | |
| 700346456H1 | g312575 | 15 | 16 | gb105pln | L. laureoleum 26S rRNA (partial). | |
| 700346207H1 | g2632928 | 13 | 3 | gb105allp | sorbitol dehydrogenase | |
| 700343253H1 | g218082 | 41 | −31 | gb105pln | Rice mRNA for initiation factor eIF-4D (225 gene), partial sequence. | |
| 700342656H1 | g1107484 | 22 | −4 | gb105pln | A. thaliana mRNA for 40S ribosomal protein S15. | |
| 700343414H1 | g558649 | 26 | −4 | gb105pln | T. aestivum VDAC2 mRNA for voltage dependent anion channel. | |
| 700343245H1 | g520543 | 49 | −55 | gb105pln | Sorghum bicolor clone BADH1 betaine aldehyde dehydrogenase mRNA, partial cds. | |
| 700343173H1 | g2088722 | 9 | 5 | gb105allp | strong similarity to the L30P family of ribosomal proteins | |
| 700343589H1 | g168492 | 45 | −39 | gb105pln | Corn histone H3 (H3C3) gene, complete cds. | |
| 700380222H1 | g485985 | 5 | 6 | gb105eukp | ORF YKL009w | |
| 700344248H1 | g712823 | 9 | −2 | gb105eukp | PDI; protein disulfide isomerase | |
| 700346351H1 | g440824 | 10 | 6 | gb105allp | ribosomal protein S15 | |
| 700343367H1 | g2765350 | 10 | 6 | gb105allp | MBNL protein | |
| 700347077H1 | g1865682 | 25 | 13 | gb105pln | A. thaliana 16 kb chromosome 1 DNA fragment. | |
| 700345425H1 | g22121 | 100 | −31 | gb105pln | Maize alcohol dehydrogenase 1 gene (Adh1-1F). | |
| 700346664H1 | g1906825 | 58 | −46 | gb105pln | A. thaliana hsp81.2 gene. | |
| 700343587H1 | g402552 | 21 | −11 | gb105eukp | ketol-acid reductoisomerase; EC 1.1.1.86 | |
| 700346978H1 | g393706 | 38 | −27 | gb105pln | C. sativus mRNA for 3-ketoacyl-CoA thiolase. | |
| 700342743H1 | g2564047 | 15 | 10 | gb105pln | Arabidopsis thaliana genomic DNA, chromosome 5, P1 clone; MJB21, complete | |
| | | | | | sequence. | |
| 700342440H1 | g1220137 | 24 | −23 | gb105eukp | ribosomal protein RL10 | |
| 700379690H1 | g1895083 | 96 | −81 | gb105pln | Zea mays golgi associated protein se-wap41 mRNA, complete cds. | |
| 700380138H1 | g2529341 | 28 | −26 | gb105pln | Spinacia oleracea chloroplast transketolase mRNA, complete cds. | |
| 700379735H1 | g1749509 | 18 | 3 | gb105pln | Fission Yeast mRNA, partical cds. | |
| 700346210H1 | g1710151 | 14 | 3 | gb105eukp | proline iminopeptidase | |
| 700344757H1 | g306819 | 33 | −16 | gb105allp | glutathione transferase M4 | |
| 700346079H1 | g577611 | 55 | −42 | gb105pln | Zea mays CRT1 gene for calcium-binding protein. | |
| 700342736H1 | g556559 | 40 | −28 | gb105pln | Rice mRNA for homlogue of Tat binding protein, complete cds. | |
| 700345587H1 | g563926 | 45 | −33 | gb105pln | Zea mays xyloglucan endo-transglycosylase homolog mRNA, complete cds. | |
| 700343309H1 | g38223 | 60 | −27 | gb105allp | alpha1-globin | |
| 700345694H1 | g2231312 | 37 | −9 | gb105eukp | AtRAB18; AtRab18 | |
| 700342411H1 | g1036803 | 38 | −24 | gb105eukp | TGF-beta receptor interacting protein 1 homolog | |
| 700345637H1 | g20163 | 45 | −34 | gb105pln | O. sativa Rr15 mRNA for 5S ribosomal RNA. | |
| 700342529H1 | g22322 | 26 | −39 | gb105pln | Z. mays mRNA for H2B histone (clone cH2B214). | |
| 700342434H1 | g2150129 | 36 | −20 | gb105pln | Arabidopsis thaliana cytoplasmic ribosomal protein S15a mRNA, complete cds. | |
| 700379628H1 | g311906 | 39 | −23 | gb105pln | N. tabacum mRNA for ras-related GTP-binding protein. | |
| 700345573H1 | g540534 | 40 | −32 | gb105pln | Rice mRNA for q group of receptor for activated C-kinase, complete cds. | |
| 700342392H1 | g1019903 | 38 | −30 | gb105pln | Arabidopsis thaliana cell division cycle protein (CDC48) mRNA, complete cds. | |
| 700347280H1 | g19879 | 14 | 12 | gb105pln | N. tabacum mRNA for heat shock protein 82. | |
| 700345836H1 | g170775 | 76 | −60 | gb105pln | Wheat translation elongation factor 1 alpha-subunit (TEF1) mRNA, complete cds. | |
| 700346164H1 | g510876 | 16 | −2 | gb105eukp | ME1; NADP dependent malic enzyme; EC 1.1.1.40 | |
| 700343240H1 | g57720 | 39 | −9 | gb105allp | ribosomal protein S20 (AA 1-119) | |
| 700342204H1 | g2463334 | 25 | −10 | gb105pln | Oryza sativa mRNA for ribosomal protein S4. | |
| 700343709H1 | g167107 | 46 | −30 | gb105pln | Hordeum vulgare vacuolar ATPase B subunit isoform mRNA, complete cds. | |
| 700342377H1 | g1747418 | 97 | −91 | gb105pln | Z. mays mRNA for eukaryotic initiation factor-5. | |
| 700345031H1 | g2275295 | 18 | 10 | gb105pln | Yeast (Schizosaccharomyces pombe) 60S ribosomal protein L31 homolog mRNA, | |
| | | | | | partial cds. | |
| 700347252H1 | g170455 | 61 | −53 | gb105pln | Tomato heat shock cognate protein 80 gene, 3′ end. | |
| 700343470H1 | g169792 | 64 | −41 | gb105pln | Rice histone 3 gene, complete cds. | |
| 700344743H1 | g198574 | 8 | 3 | gb105allp | hydrophilic protein | |
| 700379624H1 | g22328 | 68 | −54 | gb105pln | Maize mRNA for a high mobility group protein. | |
| 700346981H1 | g432367 | 30 | −14 | gb105pln | Rice mRNA for elongation factor 1 beta, complete cds. | |
| 700344219H1 | g2827143 | 20 | 1 | gb105allp | cellulose synthase catalytic subunit | |
| 700343442H1 | g19539 | 22 | 4 | gb105eukp | ribosomal protein YL16 | |
| 700345245H1 | g7357 | 18 | −5 | gb105eukp | ribosomal protein L7 (AA 1-246) | |
| 700346539H1 | g1518539 | 40 | −36 | gb105pln | Glycine max UDP-glucose dehydrogenase mRNA, complete cds. | |
| 700346948H1 | g347061 | 44 | −33 | gb105pln | Brassica rapa ribosomal protein L37A (RPL37A) mRNA, complete cds. | |
| 700345734H1 | g2662340 | 43 | −37 | gb105pln | Oryza sativa mRNA for EF-1 alpha, complete cds. | |
| 700343059H1 | g927571 | 70 | −85 | gb105pln | Z. mays mRNA for calreticulin precursor. | |
| 700346422H1 | g473602 | 31 | −17 | gb105pln | Zea mays W-22 histone H2A mRNA, complete cds. | |
| 700343681H1 | g473604 | 30 | −38 | gb105pln | Zea mays W-22 histone H2B mRNA, complete cds. | |
| 700345075H1 | g2226414 | 16 | 1 | gb105eukp | SPBC31F10.03; hypothetical protein | |
| 700345333H1 | g1711035 | 35 | −18 | gb105pln | Pisum sativum hydroxyproline rich glycoprotein PsHRGP1 mRNA, partial cds. | |
| 700346430H1 | g168508 | 14 | 15 | gb105pln | Maize oleosin KD18 (KD18; L2) gene, complete cds. | |
| 700344627H1 | g2827001 | 60 | −48 | gb105pln | Triticum aestivum 70 kDa heat shock protein (TaHSP70d) mRNA, complete cds. | |
| 700345701H1 | g398607 | 17 | 1 | gb105pln | A. thaliana mRNA for elongation factor 1 beta. | |
| 700342993H1 | g479146 | 29 | −3 | gb105eukp | putative ATP synthase subunit | |
| 700380791H1 | g13462 | 21 | 4 | gb105allp | ATPase subunit 6 | |
| 700346386H1 | g407500 | 16 | 0 | gb105eukp | unknown | |
| 700343018H1 | g967276 | 14 | −3 | gb105eukp | tgt; tRNA-guanine transglycosylase | |
| 700342285H1 | g1334510 | 15 | −8 | gb105eukp | COI; cytochrome oxidase subunit 1 | |
| 700380725H1 | g2760317 | 19 | −1 | gb105eukp | F1N21.1 | |
| 700343432H1 | g2765417 | 38 | −28 | gb105pln | Pisum sativum GDA-1 mRNA. | |
| 700281813H2 | g2326372 | 21 | −3 | gb105eukp | ISA1; putative arabinose kinase | |
| 700343909H1 | g18259 | 27 | −7 | gb105pln | C. sativus mRNA for cs DnaJ-1. | |
| 700342374H1 | g939778 | 45 | −26 | gb105pln | Zea mays MADS-box protein (ZAG3) mRNA, complete cds. | |
| 700344979H1 | g710552 | 11 | 4 | gb105allp | ankyrin 3 | |
| 700379837H1 | g806299 | 21 | −9 | gb105eukp | unknown protein | |
| 700343810H1 | g736271 | 75 | −67 | gb105pln | O. sativa hsp70 gene for heat shock protein 70. | |
| 700343889H1 | g20185 | 63 | −60 | gb105pln | O. sativa mRNA for calmodulin. | |
| 700347230H1 | g1236272 | 10 | 7 | gb105eukp | putative ribosomal protein L26, most similar to pir: S51347 (68.6% identity in 121 aa | |
| | | | | | overlap) | |
| 700344249H1 | g1488296 | 30 | −1 | gb105pln | Oryza sativa osRAD23 mRNA, complete cds. | |
| 700380044H1 | g2301163 | 9 | 2 | gb105allp | unnamed protein product | |
| 700346958H1 | g871949 | 18 | −0 | gb105eukp | PRE4; proteosome component PRE4 | |
| 700344645H1 | g1420923 | 15 | 16 | gb105pln | Zea mays repressor-like protein (in1) gene, complete cds. | |
| 700344913H1 | g602605 | 100 | −86 | gb105pln | Zea mays tandem genes for alpha1-tubulin and alpha2-tubulin. | |
| 700380492H1 | g2407788 | 5 | 5 | gb105eukp | tipD; tipD | |
| 700379794H1 | g22322 | 27 | −7 | gb105pln | Z. mays mRNA for H2B histone (clone cH2B214). | |
| 700344170H1 | g454913 | 21 | −2 | gb105pln | A. porrum LDJ2 mRNA. | |
| 700345031H1 | g18208 | 19 | 3 | gb105pln | C. reinhardtii mRNA for ribosomal protein L31. | |
| 700346092H1 | g347527 | 18 | −4 | gb105allp | ribosomal protein S3 | |
| 700379940H1 | g2662342 | 71 | −61 | gb105pln | Oryza sativa mRNA for EF-1 alpha, complete cds. | |
| 700343952H1 | g1184771 | 73 | −61 | gb105pln | Zea mays glyceraldehyde-3-phosphate dehydrogenase GAPC2 (gpc2) mRNA, | |
| | | | | | complete cds. | |
| 700346467H1 | g804948 | 21 | −3 | gb105eukp | acyl-(acyl carrier protein) thioesterase; EC 3.1.2.14 | |
| 700345696H1 | g533690 | 43 | 0 | gb105eukp | BRP10 | |
| 700343517H1 | g313142 | 7 | 6 | gb105allp | profilin 3 | |
| 700342425H1 | g2252848 | 14 | 9 | gb105pln | Arabidopsis thaliana BAC TM018A10. | |
| 700344019H1 | g1737221 | 32 | −23 | gb105pln | Pisum sativum BP-80 vacuolar sorting receptor mRNA, complete cds. | |
| 700344781H1 | g1632830 | 28 | −1 | gb105pln | R. communis mRNA (unknown). | |
| 700346269H1 | g2330673 | 5 | 6 | gb105eukp | rp122; 60S ribosomal protein | |
| 700343717H1 | g349210 | 17 | −1 | gb105pln | Arabidopsis thaliana ubiquitin conjugating enzyme mRNA, complete cds. | |
| 700344107H1 | g1707363 | 24 | −6 | gb105pln | A. thaliana mRNA for AATP2. | |
| 700345250H1 | g22324 | 16 | −5 | gb105pln | Z. mays mRNA for H2B histone (clone cH2B221). | |
| 700346636H1 | g21800 | 27 | −33 | gb105pln | T. aestivum L mRNA for histone H2B. | |
| 700343056H1 | g1345367 | 8 | −6 | gb105eukp | AMYB; beta-amylase; EC 3.2.1.2 | |
| 700379729H1 | g493709 | 45 | −33 | gb105pln | Rice mRNA for beta-tubulin, complete cds. | |
| 700347156H1 | g1750404 | 29 | −7 | gb105eukp | B0412.4 | |
| 700345462H1 | g432606 | 39 | −30 | gb105pln | ric1 = ras-related GTP binding protein possessing GTPase activity [Oryza sativa = | |
| | | | | | rice, Yamahoushi, callus, mRNA, 955 nt]. | |
| 700380779H1 | g416256 | 16 | −29 | gb105pln | Rice mRNA for H+-ATPase, partial sequence. | |
| 7u00343257H1 | g495262 | 32 | −22 | gb105pln | P. salina sec61 mRNA. | |
| 700343061H1 | g6815 | 10 | 4 | gb105eukp | R08D7.3 | |
| 700342816H1 | g1314112 | 9 | 6 | gb105eukp | YPR037W; unknown | |
| 700380408H1 | g436782 | 27 | −29 | gb105pln | Rice mRNA for cyc07, complete cds. | |
| 700344526H1 | g293902 | 10 | 3 | gb105eukp | Zea mI | |
| 700342622H1 | g1698669 | 98 | −38 | gb105pln | Zea mays S-like RNase (kin1) mRNA, complete cds. | |
| 700344610H1 | g1524370 | 11 | −1 | gb105eukp | tom20; protein import receptor; TOM20 | |
| 700342307H1 | g2370521 | 31 | −13 | gb105eukp | SPAC2E11.07c; hypothetical atpase | |
| 700342634H1 | g1064821 | 52 | −4 | gb105eukp | MocuMA1; larval muscle specific; actin | |
| 700380180H1 | g1931640 | 15 | −5 | gb105eukp | T19D16.4; Serine carboxypeptidase isolog | |
| 700343989H1 | g310932 | 44 | −32 | gb105pln | Nicotiana tabacum ribosomal protein L17 mRNA, complete cds. | |
| 700342669H1 | g2317873 | 50 | −40 | gb105pln | Prunus armeniaca Rab7 GTP binding protein mRNA, complete cds. | |
| 700343622H1 | g1658312 | 20 | −6 | gb105pln | O. sativa osr40g2 gene. | |
| 700380163H1 | g972169 | 19 | −2 | gb105allp | 60S acikdic ribosomal protein P1 | |
| 700346909H1 | g313151 | 28 | −13 | gb105pln | A. thaliana ribosomal protein S15 mRNA, complete CDS. | |
| 700346096H1 | g515376 | 48 | 6 | gb105pln | L. temulentum mRNA for histone H4. | |
| 700346940H1 | g1199467 | 35 | −16 | gb105eukp | CER1; possible aldehyde decarbonylase | |
| 700345770H1 | g2809251 | 51 | −29 | gb105eukp | F21B7.20 | |
| 700343570H1 | g2276355 | 23 | 3 | gb105eukp | SPBC30D10.06; hypothetical protein | |
| 700342962H1 | g218227 | 25 | −0 | gb105pln | Rice mRNA for ras-related GTP binding protein, complete cds. | |
| 700345320H1 | g881635 | 27 | −21 | gb105eukp | Arp3 | |
| 700342582H1 | g2392021 | 19 | −1 | gb105eukp | phopholipid hydroperoxide glutathione peroxidase-like protein, EC 1.11.1.9 | |
| 700342695H1 | g2465430 | 22 | −3 | gb105eukp | JRG1.3; 32 kDa protein | |
| 700343373H1 | g1808684 | 20 | 4 | gb105allp | hypothetical protein | |
| 700347165H1 | g2624379 | 23 | −8 | gb105eukp | IPP1; inorganic pyrophosphatase (pyrophosphate phospho-hydrolase); EC 3.6.1.1 | |
| 700346554H1 | g600004 | 11 | 1 | gb1053ukp | unknown | |
| 700344341H1 | g2618603 | 11 | 16 | gb105pln | Arabidopsis thaliana genomic DNA, chromosome 5, P1 clone; MSL3, complete | |
| | | | | | sequence. | |
| 700346958H1 | g4223 | 18 | −0 | gb105eukp | PRE4; proteasome Pre4 subunit | |
| 700343030H1 | g498772 | 43 | −51 | gb105pln | Z. mays (cv DH5xDH7) hsp70-4 mRNA for heat shock protein 70. | |
| 700342895H1 | g218088 | 62 | −13 | gb105pln | Rice mRNA for ribosomal protein 117 (249 gene), partial sequence. | |
| 700342273H1 | g704447 | 7 | 7 | gb105allp | NADH dehydrogenase subunit 5 | |
| 700344448H1 | g398848 | 32 | −46 | gb105pln | Z. mays mRNA for beta 5 tubulin. | |
| 700345784H1 | g1408460 | 31 | −6 | gb105eukp | type 2A protein serine/threonine phosphatase 55 kDa B regulatory subunit | |
| 700345556H1 | g971699 | 6 | 5 | gb105allp | ribosomal protein S7 | |
| 700343313H1 | g1532214 | 17 | 7 | gb105eukp | cypA; cyclophilin A | |
| 700343930H1 | g1183936 | 15 | 3 | gb105pln | P. sativum 5S rRNA gene. | |
| 700345237H1 | g643479 | 15 | 3 | gb105eukp | GCN20; Gcn20p | |
| 700346090H1 | g2558943 | 35 | −37 | gb105pln | Gossypium hirsutum histone 3 mRNA, complete cds. | |
| 700379874H1 | g576998 | 12 | 1 | gb105allp | C08B11.5 | |
| 700343584H1 | g577611 | 47 | −48 | gb105pln | Zea mays CRT1 gene for calcium-binding protein. | |
| 700342882H1 | g20203 | 44 | 4 | gb105pln | Rice mRNA for fructose-diphosphate aldolase (EC 4.1.2.13). | |
| 700346386H1 | g172551 | 16 | 0 | gb105eukp | SDH1; succinate dehydrogenase flavoprotein subunit | |
| 700342236H1 | g415906 | 22 | −10 | gb105eukp | ORF YKR406 | |
| 700342844H1 | g415316 | 28 | −8 | gb105pln | Rice mRNA for acidic ribosomal protein P0, complete cds. | |
| 700343659H1 | g285637 | 60 | −46 | gb105pln | Hordeum vulgare mRNA for vacuolar membrane proton-translocating inorganic | |
| | | | | | pyrophosphat. | |
| 700346558H1 | g780196 | 14 | 2 | gb105eukp | K01C8.10 | |
| 700342643H1 | g2645163 | 52 | −19 | gb105pln | Oryza sativa mRNA, similar to ribosomal protein L26. | |
| 700344951H1 | g168602 | 76 | −69 | gb105pln | Zea mays regulatory protein GF14-12 mRNA, complete cds. | |
| 700380256H1 | g1562574 | 16 | 2 | gb105allp | U1 snRNP-specific protein C | |
| 700379782H1 | g557681 | 46 | −25 | gb105pln | Z. mays mRNA for ribosomal protein S28. | |
| 700347124H1 | g3075 | 10 | 6 | gb105pln | N. crassa mRNA for a ribosomal protein. | |
| 700346020H1 | g5151 | 26 | −4 | gb105pln | Yeast (Schizosaccharomyces pombe) ypt3 gene. | |
| 700342389H1 | g168500 | 62 | −46 | gb105pln | Maize (Zea mays) histone H4 gene (H4C14), complete cds. | |
| 700342519H1 | g459199 | 57 | −49 | gb105pln | Gossypium hirsutum vacuolar H+-ATPase subunit B mRNA, partial cds. | |
| 700380070H1 | g473987 | 54 | −19 | gb105pln | Rice mRNA, partial homologous to histone H3 gene. | |
| 700346546H1 | g473602 | 66 | −54 | gb105pln | Zea mays W-22 histone H2A mRNA, complete cds. | |
| 700343763H1 | g2145356 | 14 | −5 | gb105eukp | ATHB-14; HD-Zip protein | |
| 700344247H1 | g1498389 | 66 | −59 | gb105pln | Zea mays actin (Maz81) gene, partial cds. | |
| 700344851H1 | g21800 | 15 | −2 | gb105pln | T. aestivum L mRNA for histone H2B. | |
| 700380473H1 | g168405 | 57 | −59 | gb105pln | maize alcohol dehydrogenase (adh1) mrna 3′ end and flank. | |
| 700342754H1 | g2266661 | 42 | −28 | gb105pln | Hordeum vulgare mRNA for 14-3-3 protein (Hv1433c). | |
| 700346465H1 | g2394434 | 53 | −30 | gb105eukp | F23F1.8 | |
| 700343718H1 | g1420584 | 22 | −3 | gb105pln | Yeast (Saccaromyces cerevisiae) chromosome XV reading frame ORF YOR259c. | |
| 700344389H1 | g1420686 | 8 | 1 | gb105allp | ORF YOR312c | |
| 700342876H1 | g1550813 | 85 | −74 | gb105pln | Z. mays mRNA for acidic ribosomal protein P0. | |
| 700345237H1 | g2522534 | 12 | 6 | gb105allp | TNF-alpha stimulated ABC protein | |
| 700380728H1 | g1916912 | 12 | 7 | gb105eukp | nim1; transcription factor inhibitor I kappa B homolog | |
| 700343045H1 | g902597 | 55 | −25 | gb105allp | MIF homologue | |
| 700379952H1 | g1431332 | 20 | −18 | gb105eukp | ORF YDL201w | |
| 700343982H1 | g2209017 | 33 | 0 | gb105allp | potassium channel beta subunit | |
| 700380133H1 | g21800 | 15 | −6 | gb105pln | T. aestivum L mRNA for histone H2B. | |
| 700346840H1 | g166409 | 22 | −2 | gb105pln | Alfalfa nucleic acid binding protein (alfin-1) mRNA, partial cds. | |
| 700344808H1 | g2642217 | 22 | 5 | gb105eukp | NOI protein | |
| 700380408H1 | g217902 | 21 | −20 | gb105pln | C. roseus (periwinkle) cyc07 gene. | |
| 700345737H1 | g1304599 | 6 | 7 | gb105allp | ZNF127-Xp | |
| 700343770H1 | g1495339 | 16 | −5 | gb105eukp | F26A3.3 | |
| 700344366H1 | g2264307 | 16 | −6 | gb105pln | Arabidopsis thaliana genomic DNA, chromosome 5, P1 clone: MED24, complete | |
| | | | | | sequence. | |
| 700343673H1 | g397958 | 16 | 10 | gb105pln | Z. mays mRNA for beta-amylase. | |
| 700345019H1 | g2149050 | 42 | −26 | gb105pln | Arabidopsis thaliana small Ras-like GTP-binding protein (Ran3) mRNA, | |
| | | | | | complete cds. | |
| 700345974H1 | g313759 | 98 | −29 | gb105pln | Z. mays hsp 70-1 gene for heat shock protein 70. | |
| 700342809H1 | g2289960 | 47 | −37 | gb105pln | Arabidopsis thaliana GTPase AtRAB8 (atrab8) mRNA, complete cds. | |
| 700380124H1 | g30295 | 12 | 5 | gb105allp | cytochrome c oxidase subunit BIb (AA 1-86) | |
| 700346592H1 | g2735841 | 11 | 5 | gb105eukp | transcriptional regulator | |
| 700343660H1 | g532650 | 53 | −55 | gb105pln | Sparganium eurycarpum Engl. 18S ribosomal RNA (18S rRNA) gene, 5′ end. | |
| 700343886H1 | g1778442 | 53 | −19 | gb105eukp | PK5; putative protein kinase PK5 | |
| 700345016H1 | g1806140 | 62 | −8 | gb105eukp | cdc2MsC | |
| 700342237H1 | g5303 | 6 | 5 | gb105eukp | PRD1 | |
| 700343008H1 | g914872 | 19 | 0 | gb105pln | Yeast (Saccharomyces cerevisiae) chromosome IV cosmid 6652. | |
| 700342785H1 | g19325 | 38 | 10 | gb105pln | L. esculentum pT62 mRNA for ribosomal RNA internal fragment, homologous to 26S | |
| | | | | | ribosomal RNA. | |
| 700344619H1 | g960289 | 15 | 5 | gb105allp | anthranilate synthase alpha subunit | |
| 700347166H1 | g218130 | 30 | −13 | gb105pln | Rice mRNA for Ribosomal protein S15. | |
| 700346885H1 | g2582506 | 25 | −2 | gb105eukp | beta2_dm; 20S proteasome beta2 subunit | |
| 700380595H1 | g340520 | 13 | −1 | gb105pln | Coptis japonica triosphosphate isomerase mRNA, complete cds. | |
| 700380151H1 | g758246 | 31 | −33 | gb105pln | Phaenopsis sp. mRNA for S-adenosylhomocysteine hydrolase. | |
| 700281809H2 | g2286150 | 45 | −48 | gb105pln | Zea mays translation initiation factor (eIF-4A) mRNA, complete cds. | |
| 700380457H1 | g435678 | 11 | 14 | gb105pln | L. esculentum Mill (cv. Rutgers) mRNA for ribosomal protein S25. | |
| 700344763H1 | g415925 | 22 | −0 | gb105eukp | chaperonin-60 alpha subunit | |
| 700345641H1 | g22324 | 38 | −28 | gb105pln | Z. mays mRNA for H2B histone (clone cH2B221). | |
| 700380194H1 | g13462 | 25 | −6 | gb105allp | ATPase subunit 6 | |
| 700345690H1 | g337926 | 12 | 4 | gb105allp | splicing factor | |
| 700342484H1 | g312015 | 12 | 7 | gb105allp | SOF1 | |
| 700342788H1 | g312083 | 6 | 1 | gb105allp | NUO-10.5 gene product | |
| 700344766H1 | g292037 | 43 | −22 | gb105allp | helix-loop-helix phosphoprotein | |
| 700346248H1 | g1519250 | 43 | −32 | gb105pln | Oryza sativa GF14-c protein mRNA, complete cds. | |
| 700344689H1 | g295737 | 34 | 4 | gb105allp | V14 gene product | |
| 700343995H1 | g576506 | 29 | −17 | gb105pln | Pisum sativum outer membrane protein (IAF75) mRNA, complete cds. | |
| 700342565H1 | g603269 | 14 | −7 | gb105eukp | YER036C; Yer036cp | |
| 700344709H1 | g473976 | 26 | −34 | gb105pln | Rice mRNA, partial homologous to elongation factor 1-alpha gene. | |
| 700380781H1 | g577824 | 23 | −43 | gb105pln | Z. mays gene for H2B histone (gH2B3). | |
| 700342637H1 | g404070 | 12 | 4 | gb105eukp | O-methyltransferase | |
| 700344019H1 | g1737217 | 29 | −19 | gb105pln | Arabidopsis thaliana vacuolar sorting receptor homolog mRNA, complete cds. | |
| 700343373H1 | g2760327 | 16 | 7 | gb105eukp | F1N21.12 | |
| 700346294H1 | g303852 | 24 | −42 | gb105pln | Rice mRNA for ribosomal protein L3, complete cds. | |
| 700345019H1 | g395071 | 47 | −32 | gb105pln | V. faba guanine nucleotide regulatory protein mRNA, complete CDS. | |
| 700343596H1 | g168490 | 79 | −60 | gb105pln | Maize glutathione S-transferase (GST-I) mRNA, complete cds. | |
| 700347216H1 | g2511590 | 29 | −5 | gb105eukp | progb; multicatalytic endopeptidase complex, proteasome component, beta subunit; | |
| | | | | | EC 3.4.99.46 | |
| 700345779H1 | g1197072 | 6 | 7 | gb105eukp | GEF1 | |
| 700343740H1 | g2789434 | 10 | −3 | gb105eukp | CLB1 | |
| 700344335H1 | g22324 | 53 | −48 | gb105pln | Z. mays mRNA for H2B histone (clone cH2B221). | |
| 700345803H1 | g303848 | 41 | −27 | gb105pln | Rice mRNA for nucleoside diphosphate kinase, complete cds. | |
| 700380417H1 | g433216 | 12 | 4 | gb105pln | Rice mRNA for ascorbate peroxidase (gene name SS622), partial cds. | |
| 700345805H1 | g172221 | 18 | 1 | gb105eukp | proteolipid protein of proton ATPase | |
| 700346252H1 | g416265 | 19 | 3 | gb105pln | Rice mRNA for ribosomal protein A2, partial sequence. | |
| 700343525H1 | g22484 | 65 | −66 | gb105pln | Z. mays RNA for superoxide dismutase Sod4A. | |
| 700281862H2 | g2651310 | 9 | 4 | gb105eukp | T2P4.19; putative PTR2-B peptide transporter | |
| 700379945H1 | g949877 | 80 | −69 | gb105pln | H. vulgare mRNA for elongation factor 1-alpha. | |
| 700343063H1 | g2828187 | 15 | 6 | gb105pln | Arabidopsis thaliana genomic DNA, chromosome 5, TAC clone: K21C13, complete | |
| | | | | | sequence. | |
| 700379919H1 | g600768 | 48 | −36 | gb105pln | Oryza sativa cyclophilin 2 (Cyp2) mRNA, complete cds. | |
| 700345480H1 | g2190550 | 30 | −11 | gb105eukp | F5I14.18 | |
| 700342736H1 | g732814 | 30 | −13 | gb105pln | L. esculentum LeMA-1 mRNA for putative Mg-dependent ATPase 1. | |
| 700344095H1 | g1049252 | 85 | −77 | gb105pln | Zea mays vacuolar ATPase 69 kDa subunit mRNA, partial cds. | |
| 700345268H1 | g1550725 | 8 | 7 | gb105eukp | ribosomal protein L18 | |
| 700380791H1 | g1332386 | 24 | 0 | gb105allp | Rattus norvegicus ATPase subunit 6 | |
| 700281960H2 | g22379 | 79 | −89 | gb105pln | Z. mays mRNA for CAAT-box DNA binding protein subunit B (NF-YB). | |
| 700343623H1 | g2511747 | 19 | −5 | gb105eukp | dre4; probable transcriptional regulator dre4 | |
| 700346488H1 | g2257742 | 34 | −20 | gb105pln | Arabidopsis thaliana lysine-sensitive aspartate kinase mRNA, complete cds. | |
| 700342962H1 | g218203 | 37 | −17 | gb105pln | Rice mRNA for GTP binding protein. | |
| 700342695H1 | g2465426 | 22 | −3 | gb105eukp | JRG1.1; 32 kDa protein | |
| 700342367H1 | g248336 | 36 | −48 | gb105pln | polyubiquitin [maize, Genomic, 3841 nt]. | |
| 700380434H1 | g303853 | 9 | −1 | gb105eukp | ribosomal protein L3 | |
| 700343819H1 | g170746 | 60 | −51 | gb105pln | Wheat histone H4 TH091 gene, complete cds. | |
| 700345906H1 | g2258315 | 10 | 7 | gb105allp | resistance complex protein I2C-1 | |
| 700345080H1 | g2258073 | 30 | −32 | gb105pln | Hordeum vulgare var. distichum soluble inorganic pyrophosphatase (Ipp) mRNA, | |
| | | | | | complete cds. | |
| 700345826H1 | g168650 | 35 | −52 | gb105pln | Zea mays ubiquitin fusion protein (UBF9) gene, complete cds. | |
| 700343517H1 | g313138 | 8 | 6 | gb105eukp | profilin 1 | |
| 700344702H1 | g460990 | 59 | −48 | gb105pln | O. sativa (Arborio) Beta Tubulin mRNA, clone OSTB-16. | |
| 700344980H1 | g167109 | 22 | 4 | gb105pln | Hordeum vulgare vacuolar ATPase B subunit mRNA, complete cds. | |
| 700342392H1 | g1669659 | 48 | −37 | gb105pln | c. annuum mRNA for CDC48p-like protein. | |
| 700342401H1 | g2739376 | 9 | 4 | gb105eukp | T9J22.18; putative permease | |
| 700342638H1 | g736271 | 41 | −32 | gb105pln | O. sativa hsp70 gene for heat shock protein 70. | |
| 700346341H1 | g549983 | 14 | −15 | gb105pln | Pennisetum ciliare possible apospory-associated mRNA clone pSUB C, complete cds. | |
| 700346703H1 | g514317 | 27 | −12 | gb105pln | Arabidopsis thaliana RNA polymerase II third largest subunit (RPB35.5A) gene, | |
| | | | | | complete cds. | |
| 700343167H1 | g2842482 | 15 | −5 | gb105eukp | F21O9.80; protein phosphatase ZC-like protein | |
| 700346820H1 | g558649 | 23 | −1 | gb105pln | T. aestivum VDAC2 mRNA for voltage dependent anion channel. | |
| 700343168H1 | g2736379 | 19 | −5 | gb105eukp | T22B11.5 | |
| 700345695H1 | g2662342 | 66 | −61 | gb105pln | Oryza sativa mRNA for EF-1 alpha, complete cds. | |
| 700379937H1 | g248336 | 62 | −52 | gb105pln | polyubiquitin [maize, Genomic, 3841 nt]. | |
| 700346336H1 | g2828188 | 36 | −24 | gb105pln | Arabidopsis thaliana genomic DNA, chromosome 5, TAC clone: K3I3, complete | |
| | | | | | sequence. | |
| 700344982H1 | g1431377 | 7 | 1 | gb150eukp | ORF YDL224c | |
| 700343438H1 | g603311 | 19 | −6 | gb105eukp | RPS24EA; Rps24eap: 40S ribosomal protein S24E (RP50) | |
| 700343989H1 | g2341023 | 45 | −32 | gb105pln | Sequence of BAC F19P19 from Arabidopsis thaliana chromosome 1, complete | |
| | | | | | sequence. | |
| 700344509H1 | g1107460 | 57 | −45 | gb105pln | Rice mRNA for aspartate kinase-homoserine dehydrogenase, complete cds. | |
| 700380180H1 | g2443888 | 14 | −6 | gb105eukp | F11P17.14 | |
| 700346567H1 | g31218 | 19 | 2 | gb105allp | KDEL receptor | |
| 700347263H1 | g606970 | 6 | 8 | gb105allp | cytoplasmic ribosomal protein L18 | |
| 700346954H1 | g2224914 | 37 | −27 | gb105pln | Oryza sativa beta-expansin mRNA, complete cds. | |
| 700345805H1 | g500700 | 18 | 1 | gb105eukp | PPA1; Ppa1p: Proteolipid protein of proton ATPase | |
| 700344894H1 | g4366 | 16 | 1 | gb105eukp | rp 28 | |
| 700380406H1 | g886739 | 55 | −53 | gb105pln | Z. mays histone H4 gene. | |
| 700281844H2 | g710626 | 9 | 6 | gb105eukp | ERD15; ERD15 protein | |
| 700346558H1 | g1431223 | 16 | −8 | gb105eukp | CCT4 | |
| 700342647H1 | g1321660 | 43 | −20 | gb105pln | Rice mRNA for ascorbate peroxidase, complete cds. | |
| 700346653H1 | g2656031 | 25 | −6 | gb105pln | Arabidopsis thaliana genomic DNA, chromosome 5, P1 clone: MXC20. | |
| 700345552H1 | g217998 | 32 | −18 | gb105pln | Potato tuber, alpha-glucan phosphorylase (EC 2.4.1.1), type L isozyme gene, | |
| | | | | | complete cds. | |
| 700346366H1 | g1399563 | 25 | −43 | gb105pln | Hydrastis canedensis nuclear 26S ribosomal RNA gene, partial sequence. | |
| 700342427H1 | g395078 | 38 | −21 | gb105pln | B. rapa ubiquitin and ribosomal protein mRNA, complete CDS's. | |
| 700342644H1 | g532128 | 9 | −3 | gb105eukp | eas; ethanolamine kinase | |
| 700343980H1 | g22324 | 81 | −70 | gb105pln | Z. mays mRNA for H2B histone (clone cH2B221). | |
| 700345336H1 | g17734 | 4 | 6 | gb105eukp | beta-1,3-glucanase homlogue | |
| 700344441H1 | g217951 | 22 | −13 | gb105eukp | S6PDH; NADP-dependent D-sorbitol-6-phosphate dehydrogenase | |
| 700380178H1 | g168543 | 94 | −33 | gb105pln | Zea mays putative ribosomal protein S8 mRNA, partial cds. | |
| 700343905H1 | g2760167 | 24 | −5 | gb105pln | Arabidopsis thaliana genomic DNA, chromosome 5, P1 clone: MCO15, complete | |
| | | | | | sequence. | |
| 700343091H1 | g533689 | 30 | −6 | gb105pln | Brassica napus Naehan RNA polymease II subunit RPB10 homolog (BRP10) mRNA, | |
| | | | | | complete cds. | |
| 700344740H1 | g2274801 | 20 | −7 | gb105eukp | ribosomal protein L4 | |
| 700343477H1 | g2352930 | 14 | 12 | gb105pln | Petroselinum crispum cytosolic chorismate mutase 2 (cCM2) mRNA, partial cds. | |
| 700342830H1 | g19701 | 25 | −14 | gb105pln | N. plumbaginifolia mRNA NeIF-5A2 for initiation factgor 5A(2). | |
| 700342893H1 | g1167953 | 12 | −2 | gb105eukp | putative 32.6 kDa jasmonate-induced protein | |
| 700344895H1 | g179531 | 51 | −24 | gb105allp | IgE-binding protein | |
| 700343401H1 | g217973 | 17 | −31 | gb105pln | Zea mays gene for triosephosphate isomerase, complete cds. | |
| 700343165H1 | g145769 | 13 | 2 | gb105allp | heat shock protein dnaJ | |
| 700344133H1 | g168490 | 76 | −62 | gb105pln | Maize glutathione S-transferase (GST-I) mRNA, complete cds. | |
| 700345993H1 | g2827618 | 20 | −7 | gb105pln | Arabidopsis thaliana DNA chromosome 4, BAC clone F10N7 (ESSAII project). | |
| 700345108H1 | g16086 | 40 | −31 | gb105pln | A. porrum dnaJ mRNA for DNA J protein (partial). | |
| 700379994H1 | g2687432 | 45 | −61 | gb105pln | Plumbago auriculata large subunit 26S ribosomal RNA gene, partial sequence. | |
| 700346734H1 | g515758 | 48 | −42 | gb105pln | Vitis vinifera (clone pGME1) malate dehydrogenase mRNA, complete cds. | |
| 700343516H1 | g22272 | 31 | −16 | gb105pln | Maize mRNA for enolase (2-phospho-D-glycerate hydrolase). | |
| 700342960H1 | g182035 | 60 | −45 | gb105allp | elastase III B | |
| 700379601H1 | g170455 | 42 | −20 | gb105pln | Tomato heat shock cognate protein 80 gene, 3′ end. | |
| 700343729H1 | g2244950 | 9 | 15 | gb105pln | Arabidopsis thaliana DNA chromosome 4, ESSA I contig fragment No. 5. | |
| 700380714H1 | g473602 | 60 | −55 | gb105pln | Zea mays W-22 histone H2A mRNA, complete cds. | |
| 700380214H1 | g167687 | 19 | −4 | gb105pln | Dictyostelium discoideum clathrin heavy chain (chcA) mRNA, complete cds. | |
| 700347312H1 | g1050540 | 32 | −13 | gb105eukp | tRNA-glutamine synthetase | |
| 700347134H1 | g452473 | 51 | −55 | gb105pln | Zea mays Black Mexican Sweet alpha-tubulin mRNA, complete cds. | |
| 700346512H1 | g2191184 | 33 | −12 | gb105eukp | A_TM021B04.4 | |
| 700346969H1 | g2781362 | 6 | 1 | gb105eukp | F24O1.18 | |
| 700346057H1 | g22322 | 27 | −42 | gb105pln | Z. mays mRNA for H2B histone (clone cH2B214). | |
| 700344524H1 | g1864000 | 43 | −59 | gb105pln | Maize DNA for Fd III, complete cds. | |
| 700380064H1 | g436782 | 47 | −32 | gb105pln | Rice mRNA for cyc07, complete cds. | |
| 700347261H1 | g777757 | 40 | −45 | gb105pln | Saccharum hybrid (clone SCUBI561) polyubiquitin mRNA, complete cds. | |
| 700346118H1 | g4026 | 15 | 3 | gb105eukp | NAM8 | |
| 700345559H1 | g454881 | 21 | −22 | gb105pln | Rice gene for thioredoxin h, complete cds. | |
| 700343822H1 | g2832242 | 38 | −32 | gb105pln | Zea mays 22-kDa alpha zein gene cluster, complete sequence. | |
| 700343844H1 | g1184771 | 95 | −79 | gb105pln | Zea mays glyceraldehyde-3-phosphate dehydrogenase GAPC2 (gpc2) mRNA, | |
| | | | | | complete cds. | |
| 700345847H1 | g498754 | 21 | −4 | gb105eukp | YBR0309 | |
| 700345516H1 | g2749918 | 13 | 17 | gb105pln | Arabidopsis thaliana chromosome I BAC F3I6 genomic sequence, complete sequence. | |
| 700342650H1 | g439585 | 68 | −32 | gb105pln | Hordeum vulgare calreticulin (CRH1) mRNA, partial cds. | |
| 700342489H1 | g726422 | 14 | 0 | gb105eukp | F08B1.1 | |
| 700344966H1 | g218170 | 22 | −24 | gb105pln | Rice mRNA for adenylate kinase (KN57 gene), partial sequence. | |
| 700380613H1 | g22324 | 40 | −37 | gb105pln | Z. mays mRNA for H2B histone (clone cH2B221). | |
| 700345742H1 | g2760330 | 17 | −13 | gb105eukp | F1N21.15 | |
| 700379905H1 | g1370157 | 27 | −28 | gb105pln | L. japonicus mRNA for small GTP-binding protein, RAB11I. | |
| 700345784H1 | g710330 | 27 | −4 | gb105eukp | 55 kDa B regulatory subunit of phosphatase 2A | |
| 700345817H1 | g517492 | 17 | 13 | gb105pln | Z. mays Zm38 gene, intron 1. | |
| 700344378H1 | g1184771 | 70 | −79 | gb105pln | Zea mays glyceraldehyde-3-phosphate dehydrogenase GAPC2 (gpc2) mRNA, | |
| | | | | | complete cds. | |
| 700346012H1 | g2257543 | 22 | 0 | gb105eukp | pi055; protein arginine N-methyltransferase | |
| 700344246H1 | g1109671 | 36 | 17 | gb105pln | Oryza sativa Ca2+ sensitive 3′(2′), 5-diphosphonucleoside 3′(2′) phosphohydrolase | |
| | | | | | mRNA, complete cds. | |
| 700346231H1 | g483586 | 35 | 0 | gb105eukp | ribosomal protein L37 | |
| 700343281H1 | g550019 | 9 | 5 | gb105allp | ribosomal protein L28 | |
| 700344336H1 | g168500 | 75 | −60 | gb105pln | Maize (Zea mays) histone H4 gene (H4C14), complete cds. | |
| 700379941H1 | g166857 | 45 | −37 | gb105pln | Arabidopsis thaliana cytoplasmic ribosomal protein mRNA, complete cds. | |
| 700346011H1 | g1573062 | 18 | 1 | gb105allp | seryl-tRNA synthetase (serS) | |
| 700344283H1 | g313266 | 48 | −46 | gb105pln | T. aestivum gene for phosphoglycerate kinase. | |
| 700380172H1 | g171321 | 29 | −14 | gb105pln | Yeast (Saccharomyces cerevisiae) CRY1 gene, encoding ribosomal protein 59 (rp59), | |
| | | | | | complete cds. | |
| 700344893H1 | g2668742 | 7 | 6 | gb105allp | glycine-rich RNA binding protein | |
| 700380222H1 | g263500 | 5 | 6 | gb105allp | ribosomal protein L10 homolog [Saccharomyces cerevisiae = yeast, Peptide, 236 aa] | |
| 700345645H1 | g295448 | 8 | 3 | gb105eukp | NADPH cytochrome P450 | |
| 700342210H1 | g1177283 | 48 | −19 | gb105eukp | F40F8.10 | |
| 700343917H1 | g415316 | 68 | −46 | gb105pln | Rice mRNA for acidic ribosomal protein P0, complete cds. | |
| 700347040H1 | g2814193 | 26 | −12 | gb105eukp | F39B2.2 | |
| 700342264H1 | g2624416 | 32 | −17 | gb105pln | Zea mays mRNA for ubiquitin carrier protein UBC7. | |
| 700345848H1 | g531057 | 47 | −29 | gb105pln | Wheat mRNA for protein H2B-8, complete cds. | |
| 700281821H2 | g777757 | 73 | −68 | gb105pln | Saccharum hybrid (clone SCUBI561) polyubiquitin mRNA, complete cds. | |
| 700342663H1 | g640006 | 10 | 0 | gb105eukp | J0902 | |
| 700343795H1 | g1016209 | 22 | −13 | gb105eukp | trpG; glutamine amidotransferase associated with anthranilate synthase for tryptophan | |
| | | | | | biosynthesis | |
| 700346958H1 | g836805 | 18 | −0 | gb105eukp | PRE4; proteosome component PRE4; EC 3.4.99.46 | |
| 700346896H1 | g310322 | 16 | −11 | gb105pln | Oryza sativa triosephosphate isomerase (Rictipi2) gene, exons 1-9., | |
| 700346979H1 | g409070 | 18 | 2 | gb105allp | HBp15/L22 | |
| 700343673H1 | g169778 | 15 | 0 | gb105pln | Oryza sativa beta-amylase gene, complete cds. | |
| 700343925H1 | g179102 | 18 | 4 | gb105allp | aspartyl-tRNA synthetase | |
| 700344475H1 | g2244913 | 17 | 6 | gb105eukp | similar to SEN1 protein - yeast; Author-given protein sequence is in conflict with the | |
| | | | | | conceptual translation | |
| 700342329H1 | g456671 | 19 | −1 | gb105pln | T. aestivum VDAC 1 mRNA. | |
| 700342480H1 | g218237 | 20 | −4 | gb105pln | Rice mRNA for ribosomal protein S22 (T47 gene), partial sequence. | |
| 700345326H1 | g497120 | 31 | 1 | gb105eukp | catalyzes the conversion of monodehydroascorbate to ascorbate, oxidizing NADH in | |
| | | | | | the process, binds to flavin as a single subunit; monodehydroascorbate reductase | |
| 700342936H1 | g18259 | 23 | −22 | gb105pln | C. sativus mRNA for cs DnaJ-1. | |
| 700281930H2 | g168500 | 22 | −40 | gb105pln | Maize (Zea mays) histone H4 gene (H4C14), complete cds. | |
| 700344607H1 | g3186 | 12 | −2 | gb105pln | Physarum polycephalum actin gene. | |
| 700380171H1 | g2224915 | 13 | 1 | gb105eukp | beta-expansin | |
| 700343885H1 | g2244829 | 20 | −13 | gb105pln | Arabidopsis thaliana DNA chromosome 4, ESSA I contig fragment No. 2. | |
| 700343031H1 | g886737 | 68 | −55 | gb105pln | Z. mays histone H3 gene. | |
| 700343659H1 | g1747295 | 53 | −39 | gb105pln | Rice mRNA for vacuolar H+-pyrophosphatase, complete cds. | |
| 700343085H1 | g763280 | 44 | −18 | gb105eukp | RNR3; Rnr3p | |
| 700344902H1 | g577530 | 28 | −15 | gb105pln | A. thaliana mRNA for proteasome subunit. | |
| 700380274H1 | g1065506 | 6 | 5 | gb105eukp | C27F2.5 | |
| 700344604H1 | g1477683 | 39 | −31 | gb105pln | Oryza sativa SNF1-related protein kinase (RSk1) mRNA, complete cds. | |
| 700342558H1 | g1877396 | 56 | −49 | gb105pln | R. communis mRNA for shaggy-like kinase, partial. | |
| 700345125H1 | g2842486 | 11 | 6 | gb105eukp | F21O9.120; putative protein | |
| 700342324H1 | g21599 | 13 | 7 | gb105allp | UTP-glucose-1-phosphate uridylyltransferase | |
| 700343718H1 | g1931622 | 22 | −3 | gb105pln | Yeast (Saccharomyces cerevisiae) proteasome cap subunit (PCS1) gene, | |
| | | | | | complete cds. | |
| 700281996H2 | g975888 | 12 | 5 | gb105eukp | myo-inositol-1-phosphate synthase | |
| 700347195H1 | g2599091 | 17 | 12 | gb105pln | Arabidopsis thaliana WD-40 repeat protein MSI4 (MSI4) mRNA, complete cds. | |
| 700343491H1 | g2511530 | 45 | 13 | gb105pln | Eleusine indica alpha tubulin 1 (TUA1) mRNA, complete cds. | |
| 700343115H1 | g289188 | 43 | −7 | gb105eukp | 5′-phosphoribosyl-5-aminoimidazole synthetase; AIR synthetase | |
| 700343596H1 | g168486 | 67 | −46 | gb105pln | Maize glutathione S-transferase gene (GST-I), exon 1. | |
| 700347224H1 | g2302294 | 13 | 6 | gb105allp | unnamed protein product | |
| 700346865H1 | g1841307 | 18 | 5 | gb105pln | Fission Yeast mRNA for ribosomal protein S16 homolog, partial cds. | |
| 700379721H1 | g2626840 | 8 | 5 | gb105allp | CRM1 protein | |
| 700345546H1 | g1276967 | 36 | −13 | gb105eukp | putative ribosomal protein | |
| 700347284H1 | g1232130 | 29 | −6 | gb105eukp | transcription factor HBP-1b(c38) | |
| 700346847H1 | g1488296 | 29 | −11 | gb105pln | Oryza sativa osRAD23 mRNA, complete cds. | |
| 700345439H1 | g20163 | 40 | −24 | gb105pln | O. sativa Rr15 mRNA for 5S ribosomal RNA. | |
| 700343430H1 | g416265 | 23 | −9 | gb105pln | Rice mRNA for ribosomal protein A2, partial sequence. | |
| 700343625H1 | g289153 | 21 | −5 | gb105allp | methylamine oxidase | |
| 700343932H1 | g600768 | 50 | −47 | gb105pln | Oryza sativa cyclophilin 2 (Cyp2) mRNA, complete cds. | |
| 700380178H1 | g2274990 | 35 | −42 | gb105pln | Hordeum vulgare mRNA for expressed sequence tag. | |
| 700345531H1 | g459009 | 14 | −2 | gb105eukp | T20H4.3 | |
| 700342285H1 | g1334511 | 15 | −8 | gb105eukp | COI; cytochrome oxidase subunit 1 | |
| 700345393H1 | g2688821 | 31 | −32 | gb105pln | Prunus armeniaca pyrophosphate-dependent phosphofructo-1-kinase mRNA, | |
| | | | | | partial cds. | |
| 700342414H1 | g2315152 | 30 | −14 | gb105pln | Arabidopsis thaliana mRNA for MAP3K gamma protein kinase. | |
| 700344880H1 | g404406 | 32 | −38 | gb105pln | type 1 actin {type 1} [Emiliania huxleyi = Prymnesiophyte algae, CCMP379, mRNA | |
| | | | | | Partial, 1095 nt]. | |
| 700380409H1 | g1737491 | 27 | −31 | gb105pln | Triticum aestivum poly(A)-binding protein (wheatpab) mRNA, complete cds. | |
| 700346287H1 | g473602 | 41 | −20 | gb105pln | Zea mays W-22 histone H2A mRNA, complete cds. | |
| 700346287H1 | g1325967 | 25 | 3 | gb105pln | T. aestivum histone H2A gene (clone TH274). | |
| 700343334H1 | g2224911 | 14 | −4 | gb105eukp | somatic embryogenesis receptor-like kinase | |
| 700379763H1 | g1911165 | 37 | −17 | gb105pln | S. tuberosum mRNA for soluble-starch-synthase. | |
| 700347059H1 | g2739381 | 27 | −5 | gb105eukp | T9J22.23; putative patatin | |
| 700346579H1 | g189842 | 28 | −10 | gb105allp | prolidase | |
| 700342766H1 | g2827618 | 41 | 10 | gb105pln | Arabidopsis thaliana DNA chromosome 4, BAC clone F10N7 (ESSAII project). | |
| 700346122H1 | g1389639 | 13 | −1 | gb105pln | Pea mRNA for PNDKN1, complete cds. | |
| 700345431H1 | g2773153 | 17 | −30 | gb105pln | Oryza sativa abscisic acid- and stress-inducible protein (Asr1) mRNA, complete cds. | |
| 700342895H1 | g310932 | 44 | −2 | gb105pln | Nicotiana tabacum ribosomal protein L17 mRNA, complete cds. | |
| 700345243H1 | g1044939 | 22 | −12 | gb105pln | Z. mays mRNA for ubiquitin/ribosomal protein S27a fusion protein. | |
| 700345707H1 | g22149 | 70 | −75 | gb105pln | Z. mays mRNA for alpha-tubulin 3. | |
| 700343618H1 | g300082 | 44 | −5 | gb105pln | hsp82 = 82 kda heat shock protein [Zea mays, seedling, leaves, Genomic, 3468 nt]. | |
| 700346123H1 | g1061297 | 17 | 6 | gb105eukp | SPAC24B11.09; unknown | |
| 700342558H1 | g1161511 | 53 | −47 | gb105pln | A. thaliana mRNA for shaggy-like kinase etha. | |
| 700346727H1 | g21794 | 72 | −64 | gb105pln | Wheat histone H4 gene. | |
| 700345170H1 | g500852 | 40 | −33 | gb105pln | Zea mays (clone pAKHSDH2) aspartate kinase-homoserine dehydrogenase mRNA, | |
| | | | | | complete cds. | |
| 700345244H1 | g2160160 | 29 | −13 | gb105eukp | F21M12.5 | |
| 700281928H2 | g1244773 | 19 | −5 | gb105eukp | RPL37A; Rp137ap: 60S ribosomal protein L37a | |
| 700345104H1 | g536891 | 63 | −57 | gb105pln | Wheat mRNA for protein H2A, complete cds, clone wcH2A-4. | |
| 700343725H1 | g1628443 | 21 | −3 | gb105eukp | ORF | |
| 700344290H1 | g2331300 | 60 | −60 | gb105pln | Zea mays ribosomal protein S4 type I (rps4) mRNA, complete cds. | |
| 700347341H1 | g170164 | 29 | −8 | gb105pln | S. guttatum aox1 mRNA encoding an alternative oxidase protein. | |
| 700345562H1 | g625147 | 88 | −78 | gb105pln | Zea mays protein disulfide isomerase (pdi) mRNA, complete cds. | |
| 700344249H1 | g2264320 | 19 | 14 | gb105pln | Arabidopsis thaliana genomic DNA, chromosome 5, P1 clone: MX110, complete | |
| | | | | | sequence. | |
| 700344675H1 | g228 | 15 | −1 | gb105allp | NADH dehydrogenase (ubiquinone) 42 kDa subunit | |
| 700379668H1 | g388600 | 15 | 0 | gb105eukp | F44E2.6 protein | |
| 700346544H1 | g498902 | 33 | −11 | gb105eukp | RPL27-3; ribosomal protein L27 homolog | |
| 700380440H1 | g2735307 | 23 | 6 | gb105allp | voltage dependent anion channel form 3 | |
| 700346351H1 | g2150130 | 10 | 6 | gb105eukp | cytoplasmic ribosomal protein S15a | |
| 700343684H1 | g1122776 | 9 | −1 | gb105eukp | C10C5.3 | |
| 700345376H1 | g2352929 | 31 | −1 | gb105eukp | pCM1; plastidic chorismate mutase 1 | |
| 700346683H1 | g786312 | 22 | −4 | gb105pln | Yeast (Saccharomyces cerevisiae) chromosome SVI cosmid 9705. | |
| 700379913H1 | g2351061 | 28 | 6 | gb105pln | Arabidopsis thaliana genomic DNA, chromosome 5, P1 clone: MAF19. | |
| 700343857H1 | g170901 | 13 | 2 | gb105eukp | peroxisomal membrane protein (PMP20B) | |
| 700281929H2 | g2687424 | 29 | −18 | gb105pln | Helianthus annuus FatB thioesterase (FatB1) mRNA, complete cds. | |
| 700342514H1 | g1710361 | 12 | 8 | gb105allp | splicing factor U2AF65 | |
| 700344863H1 | g2104951 | 10 | 5 | gb105eukp | SDhn-6f; MAP kinase-like protein | |
| 700342963H1 | g167244 | 40 | −30 | gb105pln | Chlorella kessleri elongation factor 2 mRNA, complete cds. | |
| 700344231H1 | g168500 | 52 | −43 | gb105pln | Maize (Zea mays) histone H4 gene (H4C14), complete cds. | |
| 700347011H1 | g296358 | 19 | 6 | gb105eukp | csa; CIT-SAP | |
| 700345902H1 | g1147770 | 20 | −18 | gb105pln | Yeast (Schizosaccharomyces pombe) elongation factor 1-alpha mRNA, complete cds. | |
| 700345142H1 | g1773371 | 15 | −1 | gb105eukp | putative protein disulfide isomerase | |
| 700347224H1 | g17593 | 9 | 6 | gb105allp | THIOREDOXINE | |
| 700342647H1 | g2274983 | 40 | −17 | gb105pln | Hordeum vulgare mRNA for expressed sequence tag. | |
| 700380496H1 | g508723 | 10 | 7 | gb105allp | SAP 61 | |
| 700380428H1 | g1122422 | 67 | −33 | gb105allp | FXR1 gene product | |
| 700343514H1 | g2494115 | 17 | −23 | gb105eukp | T1G11.1 | |
| 700343188H1 | g166970 | 13 | −12 | gb105pln | Hordeum vulgare acyl carrier protein III (Ac13) gene, complete cds. | |
| 700342653H1 | g908756 | 15 | 4 | gb105allp | unknown protein | |
| 700344132H1 | g216457 | 11 | 8 | gb105allp | ORF | |
| 700346945H1 | g798817 | 33 | −20 | gb105pln | A. thaliana mRNA for ribosomal protein L2. | |
| 700343996H1 | g2623679 | 67 | −69 | gb105pln | Zea mays calmodulin (Zmrcalm) mRNA, complete cds. | |
| 700344155H1 | g498902 | 31 | −29 | gb105eukp | RPL27-3; ribosomal protein L27 homolog | |
| 700379831H1 | g20323 | 40 | −43 | gb105pln | O. sativa RAc1 gene for actin. | |
| 700346336H1 | g1518539 | 47 | −35 | gb105pln | Glycine max UDP-glucose dehydrogenase mRNA, complete cds. | |
| 700346092H1 | g32532 | 18 | 0 | gb105allp | ribosomal protein s3 | |
| 700345422H1 | g1149569 | 15 | 3 | gb105eukp | athb-8; HD-zip | |
| 700347118H1 | g168500 | 52 | −27 | gb105pln | Maize (Zea mays) histone H4 gene (H4C14), complete cds. | |
| 700345546H1 | g1669623 | 18 | −4 | gb105eukp | ribosomal protein L39 | |
| 700343223H1 | g1143387 | 21 | −19 | gb105pln | A. thaliana mRNA for Class III ADH. | |
| 700344110H1 | g2443471 | 13 | 11 | gb105pln | Arabidopsis thaliana ASF/SF2 homolog (SF2) gene, complete cds. | |
| 700345264H1 | g2668745 | 32 | −16 | gb105pln | Zea mays inorganic pyrophosphatase (IPP) mRNA, complete cds. | |
| 700342565H1 | g695169 | 35 | −17 | gb105eukp | unknown | |
| 700344133H1 | g168486 | 66 | −65 | gb105pln | Maize glutathione S-transferase gene (GST-I), exon 1. | |
| 700344416H1 | g758292 | 7 | 7 | gb105eukp | YPT53 | |
| 700342570H1 | g1743006 | 26 | −13 | gb105pln | C. paradoxa mRNA for ribosomal protein L13a. | |
| 700344112H1 | g168505 | 56 | −30 | gb105pln | Zea mays histone H3 gene, complete cds. | |
| 700345164H1 | g289707 | 8 | 6 | gb105eukp | K12H4.3 protein | |
| 700379641H1 | g1177601 | 29 | −3 | gb105eukp | bfruct1; hydrplyze sucrose into fructose and glucose; invertase; EC 3.2.1.26 | |
| 700347167H1 | g2511530 | 38 | −45 | gb105pln | Eleusine indica alpha tubulin 1 (TUA1) mRNA, complete cds. | |
| 700346975H1 | g337453 | 7 | 7 | gb105allp | hnRNP B1 protein | |
| 700346033H1 | g4099 | 29 | −13 | gb105eukp | PAP1; poly(A) polymerase | |
| 700342745H1 | g1809261 | 20 | −9 | gb105eukp | Pto; serine/threonine protein kinase Pto | |
| 700344690H1 | g2281098 | 21 | −8 | gb105eukp | F18O19.17 | |
| 700344086H1 | g1843628 | 31 | −7 | gb105eukp | bsh; SNF5 homolog BSH | |
| 700344366H1 | g2739218 | 45 | −32 | gb105pln | Hordeum vulgare S28 ribosomal protein. | |
| 700342705H1 | g2366749 | 26 | −20 | gb105pln | Nicotiana sylvestris mRNA for RNA binding protein, complete cds. | |
| 700380062H1 | g886739 | 42 | −10 | gb105pln | Z. mays histone H4 gene. | |
| 700379721H1 | g1323393 | 6 | 7 | gb105eukp | CRM1 | |
| 700345940H1 | g1724113 | 25 | −6 | gb105pln | Avena fatua Af10-protein mRNA, complete cds. | |
| 700343030H1 | g2827001 | 32 | −29 | gb105pln | Triticum aestivum 70 dKa heat shock protein (TaHSP70d) mRNA, complete cds. | |
| 700342461H1 | g1001579 | 12 | 2 | gb105allp | ABC1-like | |
| 700346902H1 | g416265 | 27 | −10 | gb105pln | Rice mRNA for ribosomal protein A2, partial sequence. | |
| 700343391H1 | g2331130 | 30 | −19 | gb105pln | Oryza sativa glycine-rich protein (SGRP1) mRNA, complete cds. | |
| 700346888H1 | g248338 | 66 | −34 | gb105pln | polyubiquitin [maize, Genomic, 3439 nt]. | |
| 700343852H1 | g1015632 | 13 | 1 | gb105eukp | SUI2 | |
| 700343977H1 | g1495250 | 34 | −25 | gb105pln | A. thaliana mRNA for heat-shock protein. | |
| 700380670H1 | g644491 | 58 | −59 | gb105pln | Corn mRNA for elongation factor 1A. | |
| 700346956H1 | g2811223 | 16 | −15 | gb105pln | Arabidopsis thaliana fimbrin 1 mRNA, partial cds. | |
| 700344960H1 | g168500 | 85 | −76 | gb105pln | Maize (Zea mays) histone H4 gene (H4C14), complete cds. | |
| 700346978H1 | g1066162 | 42 | −32 | gb105pln | B. napus mRNA for glyoxysomal beta-keotacyl-thiolase precursor. | |
| 700347305H1 | g168426 | 45 | −21 | gb105eukp | bt1; brittle-1 protein | |
| 700343386H1 | g1653962 | 15 | 3 | gb105allp | hypothetical protein | |
| 700342545H1 | g2351687 | 18 | −5 | gb105eukp | ap51-2; cytoadherence to epithelial cell surface; adhesin protein AP51-2 | |
| 700344402H1 | g1762945 | 21 | −9 | gb105eukp | ORF; able to induce HR-like lesions | |
| 700347130H1 | g471319 | 40 | 2 | gb105eukp | HvB12D | |
| 700343593H1 | g30377 | 30 | −13 | gb105allp | cytokeratin 13 | |
| 700345212H1 | g22312 | 53 | −59 | gb105pln | Maize ABA-inducible gene for glycine-rich protein (ABA = abscisic acid). | |
| 700346686H1 | g1183936 | 16 | 2 | gb105pln | P. sativum 5S rRNA gene. | |
| 700345654H1 | g429006 | 19 | 14 | gb105pln | Rice mRNA for MCM3 (gene name SS300), partial cds. | |
| 700346681H1 | g1667593 | 24 | 3 | gb105pln | Oryza sativa transmembrane protein mRNA, complete cds. | |
| 700346342H1 | g163030 | 13 | 4 | gb105allp | endonexin | |
| 700343210H1 | g2529657 | 31 | −23 | gb105pln | Arabidopsis thaliana chromosome II BAC T30B22 genomic sequence, complete | |
| | | | | | sequence. | |
| 700345559H1 | g1930071 | 41 | −25 | gb105pln | Oryza sativa thioredoxin h mRNA, complete cds. | |
| 700342466H1 | g2232174 | 35 | −10 | gb105allp | MLD | |
| 700345930H1 | g2570104 | 26 | −6 | gb105pln | S. latifolia mRNA, clone CCLS 30.3. | |
| 700345268H1 | g4366 | 8 | 7 | gb105eukp | rp 28 | |
| 700343168H1 | g599992 | 10 | −0 | gb105eukp | KGD1; 2-oxoglutarate dehydrogenase E1 component | |
| 700343606H1 | g21800 | 29 | −32 | gb105pln | T. asestivum L mRNA for histone H2B. | |
| 700344026H1 | g960356 | 67 | −59 | gb105pln | Barley mRNA for S-adenosylmethionine synthetase, complete cds. | |
| 700347376H1 | g472343 | 20 | 1 | gb105eukp | <beta>Cop | |
| 700343432H1 | g297888 | 39 | −29 | gb105pln | D. carota mRNA for B2 protein. | |
| 700345251H1 | g1272407 | 27 | −7 | gb105pln | Arabidopsis thaliana immunophilin (FKBP15-2) mRNA, complete cds. | |
| 700380662H1 | g2832611 | 27 | −32 | gb105pln | Arabidopsis thaliana DNA chromosome 4, BAC clone F13C5 (ESSAII project). | |
| 700379791H1 | g167072 | 43 | −37 | gb105pln | Barley ubiquitin (mub1) gene, complete cds. | |
| 700347095H1 | g1907231 | 8 | 8 | gb105allp | YCR093w, len:2108 | |
| 700346185H1 | g2317876 | 41 | −2 | gb105eukp | cysteine protease inhibitor | |
| 700343888H1 | g544501 | 11 | −4 | gb105eukp | SEC13; Sec13p | |
| 700346763H1 | g600768 | 56 | −47 | gb105pln | Oryza sativa cyclophilin 2 (Cyp2) mRNA, complete cds. | |
| 700345519H1 | g2196547 | 23 | −2 | gb105pln | Nicotiana tabacum DNA-binding protein (T231) mRNA, complete cds. | |
| 700345413H1 | g393400 | 90 | −80 | gb105pln | Z. mays mRNA for alpha-tubulin. | |
| 700380406H1 | g170746 | 54 | −46 | gb105pln | Wheat histone H4 TH091 gene, complete cds. | |
| 700345651H1 | g2642159 | 28 | −8 | gb105eukp | T5I7.7; putative mannose-1-phosphate guanyltransferase | |
| 700342292H1 | g2662346 | 59 | −46 | gb105pln | Oryza sativa mRNA for EF-1 alpha, complete cds. | |
| 700342244H1 | g1279763 | 26 | 4 | gb105allp | arfaptin 2 | |
| 700342485H1 | g2459406 | 40 | −28 | gb105pln | Arabidopsis thaliana chromosome II BAC F4P9 genomic sequence, complete | |
| | | | | | sequence. | |
| 700379705H1 | g168689 | 13 | 14 | gb105pln | Maize zein (zE25) pseudogene, 5′ end. | |
| 700344441H1 | g18891 | 8 | −2 | gb105eukp | aldose reductase-related protein | |
| 700342526H1 | g1360212 | 9 | 4 | gb105eukp | ORF YLL029w | |
| 700344063H1 | g2570506 | 45 | −36 | gb105pln | Oryza sativa ribosomal protein mRNA, complete cds. | |
| 700346689H1 | g2264305 | 24 | 1 | gb105pln | Arabidopsis thaliana genomic DNA, chromosome 5, P1 clone: MBK23, complete | |
| | | | | | sequence. | |
| 700345527H1 | g170746 | 69 | −57 | gb105pln | Wheat histone H4 TH091 gene, complete cds. | |
| 700342370H1 | g168492 | 60 | −48 | gb105pln | Corn histone H3 (H3C3) gene, complete cds. | |
| 700345458H1 | g168500 | 61 | −45 | gb105pln | Maize (Zea mays) histone H4 gene (H4C14), complete cds. | |
| 700343034H1 | g416460 | 10 | 8 | gb105allp | unidentified protein | |
| 700345744H1 | g168498 | 79 | −79 | gb105pln | Corn histone H4 (H4C13) gene, complete cds. | |
| 700343108H1 | g643073 | 53 | −32 | gb105pln | Fragaria x ananassa putative 40S ribosomal protein s12 mRNA, complete cds. | |
| 700346735H1 | g602605 | 75 | −75 | gb105pln | Zea mays Tandem genes for alpha1-tubulin and alpha2-tubulin. | |
| 700345476H1 | g732949 | 22 | −6 | gb105eukp | SSM1a | |
| 700379682H1 | g861204 | 22 | −12 | gb105pln | Chlamydomonas reinhardtii ADP-ribosylation factor (ARF) mRNA, complete cds. | |
| 700347191H1 | g1122803 | 11 | 7 | gb105allp | F49C12.8 | |
| 700343201H1 | g450300 | 28 | −17 | gb105eukp | receptor type serine/threonine kinase; protein kinase; OSPK10 | |
| 700343942H1 | g168500 | 75 | −60 | gb105pln | Maize (Zea mays) histone H4 gene (H4C14), complete cds. | |
| 700346225H1 | g456519 | 22 | −13 | gb105eukp | ORF203 | |
| 700342403H1 | g2293275 | 8 | 1 | gb105allp | YtaG | |
| 700342352H1 | g1575469 | 25 | −18 | gb105eukp | S19; ribosomal protein S19 | |
| 700342229H1 | g1519248 | 35 | −20 | gb105pln | Oryza sativa GF14-b protein mRNA, complete cds. | |
| 700345188H1 | g1770190 | 14 | 4 | gb105eukp | cycD1; cyclin-D like protein | |
| 700346724H1 | g1946371 | 11 | 2 | gb105eukp | T06B20.17 | |
| 700345930H1 | g2738759 | 19 | −5 | gb105pln | Arabidopsis thaliana 5′-adenylylsulfate reductase (APR3) gene, complete cds. | |
| 700344254H1 | g143411 | 9 | −8 | gb105allp | ORF1 | |
| 700379964H1 | g1778051 | 22 | 8 | gb105allp | Prt1 homolog | |
| 700345647H1 | g262260 | 19 | 8 | gb105eukp | Rbp3 | |
| 700346346H1 | g2104523 | 13 | 16 | gb105pln | Arabidopsis thaliana chromosome IV BAC clone T10M13, complete sequence. | |
| 700346294H1 | g429015 | 26 | −35 | gb105pln | Rice mRNA for ribosomal protein (gene name SS498), partial cds. | |
| 700343175H1 | g2244996 | 11 | 1 | gb105eukp | similarity to a membrane-associated salt-inducible protein | |
| 700343945H1 | g2266661 | 42 | −24 | gb105pln | Hordeum vulgare mRNA for 14-3-3 protein (Hv1433c). | |
| 700344331H1 | g1304265 | 30 | −6 | gb105pln | Wheat mRNA for HALF-1, complete cds. | |
| 700380115H1 | g2511588 | 18 | −5 | gb105eukp | prc1; multicatalytic endopeptidase complex, proteasome component, alpha subunit; | |
| | | | | | EC 3.4.99.46 | |
| 700346718H1 | g602252 | 93 | −87 | gb105pln | Zea mays enolase (eno2) mRNA, complete cds. | |
| 700342376H1 | g182483 | 62 | −34 | gb105allp | prefibroblast collagenase inhibitor | |
| 700342661H1 | g1666172 | 32 | −14 | gb105pln | N. plumbaginifolia mRNA for BTF3-like transcription factor. | |
| 700345355H1 | g1815680 | 26 | −22 | gb105pln | Oryza sativa expansin (OS-EXP4) mRNA, complete cds. | |
| 700346313H1 | g1122433 | 8 | 6 | gb105allp | polypyrimidine tract-binding protein | |
| 700346252H1 | g790507 | 57 | −72 | gb105pln | Z. mays mRNA for 60S acidic ribosomal protein. | |
| 700345314H1 | g168500 | 49 | −68 | gb105pln | Maize (Zea mays) histone H4 gene (H4C14), complete cds. | |
| 700346857H1 | g2245113 | 31 | −11 | gb105eukp | glycerol-3-phosphate permease homolog | |
| 700347265H1 | g2431766 | 86 | −78 | gb105pln | Zea mays acidic ribosomal protein P3a (rpp3a) mRNA, complete cds. | |
| 700346341H1 | g531481 | 14 | −15 | gb105pln | P. ciliare (Higgins) apospory associated mRNA, 1398bp. | |
| 700343525H1 | g1899026 | 29 | −54 | gb105pln | Zea mays superoxide dismutase 4A (sod4A) gene, complete cds. | |
| 700342580H1 | g397395 | 57 | −38 | gb105pln | Z. mays MNB1b mRNA for DNA-binding protein. | |
| 700380484H1 | g1737491 | 20 | 7 | gb105pln | Triticum asestivum poly(A)-binding protein (wheatpab) mRNA, complete cds. | |
| 700379842H1 | g1167955 | 20 | −22 | gb105eukp | putative 32.7 kDa jasmonate-induced protein | |
| 700343820H1 | g510209 | 7 | 5 | gb105allp | elongation factor 1 | |
| 700380233H1 | g2264306 | 34 | −27 | gb105pln | Arabidopsis thaliana genomic DNA, chromosome 5, P1 clone: MBK5, complete | |
| | | | | | sequence. | |
| 700346792H1 | g218233 | 27 | −3 | gb105pln | Rice mRNA for NDP kinase (T164 gene), partial sequence. | |
| 700346610H1 | g2431766 | 55 | −54 | gb105pln | Zea mays acidic ribosomal protein P3a (rpp3a) mRNA, complete cds. | |
| 700343526H1 | g1514643 | 20 | −2 | gb105eukp | multidrug resistance protein; PDR5-like ABC transporter | |
| 700345209H1 | g460990 | 61 | −56 | gb105pln | O. sativa (Arborio) Beta Tubulin mRNA, clone OSTB-16. | |
| 700346062H1 | g2564046 | 19 | −6 | gb105pln | Arabidopsis thaliana genomic DNA, chromosome 5, P1 clone: MGI19, complete | |
| | | | | | sequence. | |
| 700342372H1 | g168494 | 62 | −54 | gb105pln | Maize (Zea mays) histone H3 gene (H3C2), complete cds. | |
| 700281841H2 | g1556445 | 66 | −67 | gb105pln | Hordeum vulgare, alpha tubulin (tubA) mRNA, complete cds. | |
| 700345622H1 | g940843 | 17 | −4 | gb105eukp | orf 06116 | |
| 700342524H1 | g169295 | 16 | −2 | gb105pln | Pharbitis nil heat shock protein 83 (Hsp83) gene, complete cds. | |
| 700343953H1 | g2274990 | 18 | 12 | gb105pln | Hordeum vulgare mRNA for expressed sequence tag. | |
| 700342706H1 | g166859 | 37 | −43 | gb105pln | Arabidopsis thaliana ribosomal protein gene, complete cds. | |
| 700344059H1 | g1890156 | 11 | 3 | gb105eukp | ATGBST1; gluthatione S-transferase | |
| 700380401H1 | g2654209 | 27 | −13 | gb105pln | Spinacia oleracea heat shock 70 protein (HSC70-10) mRNA, nuclear gene encoding | |
| | | | | | mitochondrial protein, complete cds. | |
| 700346181H1 | g886739 | 47 | 13 | gb105pln | Z. mays histone H4 gene. | |
| 700345843H1 | g2244915 | 10 | 4 | gb105allp | strong homology to reverse transcriptase | |
| 700345644H1 | g22275 | 88 | −72 | gb105pln | Maize mRNA for ferritin (clone FM1). | |
| 700343318H1 | g1703631 | 18 | −3 | gb105eukp | C24A11.9 | |
| 700346558H1 | g488531 | 16 | −8 | gb105eukp | anc2; cytosolic chaperonin; Anc2p | |
| 700342726H1 | g2662048 | 8 | 3 | gb105eukp | BcRK1; receptor kinase 1 | |
| 700343991H1 | g2264302 | 10 | 17 | gb105pln | Arabidopsis thaliana genomic DNA, chromosome 5, P1 clone: MAC12, complete | |
| | | | | | sequence. | |
| 700344504H1 | g2668743 | 37 | −38 | gb105pln | Zea mays ubiquitin conjugating enzyme (UBC) mRNA, complete cds. | |
| 700346970H1 | g2464945 | 28 | −13 | gb105eukp | beta-galactosidase | |
| 700345104H1 | g1154953 | 42 | −49 | gb105pln | T. aestivum histone H2A gene. | |
| 700346414H1 | g2230878 | 8 | 7 | gb105allp | hNop56 | |
| 700380791H1 | g829024 | 21 | 4 | gb105allp | ATPase | |
| 700344441H1 | g1835701 | 26 | −20 | gb105eukp | m6pr; NADPH-dependent mannose 6-phosphate reductase; EC 1.1.1.224 | |
| 700344944H1 | g2224913 | 22 | −4 | gb105eukp | beta-expansin | |
| 700379731H1 | g169295 | 28 | −15 | gb105pln | Pharbitis nil heat shock protein 83 (Hsp83) gene, complete cds. | |
| 700343777H1 | g2244829 | 13 | 13 | gb105pln | Arabidopsis thaliana DNA chromosome 4, ESSA I contig fragment No. 2. | |
| 700344852H1 | g577818 | 55 | −59 | gb105pln | Z. mays gene for H2B histone (gH2B4). | |
| 700347018H1 | g1419090 | 45 | −18 | gb105eukp | 37kDa chloroplast inner envelope membrane polypeptide precursor | |
| 700343511H1 | g1931644 | 17 | −7 | gb105eukp | T19D16.10; membrane protein PTM1 precursor isolog | |
| 700342211H1 | g297015 | 15 | −7 | gb105eukp | fructokinase | |
| 700380788H1 | g248338 | 59 | −44 | gb105pln | polyubiquitin [maize, Genomic, 3439 nt]. | |
| 700345702H1 | g1843627 | 20 | −10 | gb105pln | Arabidopsis thaliana SNF5 homolog BSH (bsh) mRNA, complete cds. | |
| 700345537H1 | g575684 | 15 | −0 | gb105eukp | AMD1 | |
| 700345465H1 | g633135 | 33 | −29 | gb105pln | Zostera marina mRNA for putative plasma membrane H+-ATPase, complete cds. | |
| 700343529H1 | g2160162 | 22 | −1 | gb105eukp | F21M12.8 | |
| 700342532H1 | g1771562 | 6 | 5 | gb105allp | neuronal potassium channel | |
| 700346920H1 | g296703 | 32 | −18 | gb105pln | Yeast (Saccharomyces pombe) FIB gene encoding fibrillarin. | |
| 700281987H2 | g1747418 | 30 | −6 | gb105pln | Z. mays mRNA for eukaryotic initiation factor-5. | |
| 700344425H1 | g868263 | 16 | 6 | gb105allp | similar to C. elegans lin-19 | |
| 700347009H1 | g2253010 | 17 | 3 | gb105allp | MAP3K delta-1 protein kinase | |
| 700345458H1 | g21794 | 63 | −45 | gb105pln | Wheat histone H4 gene. | |
| 700342318H1 | g2599091 | 23 | −1 | gb105pln | arabidopsis thaliana WD-40 repeat protein MSI4 (MSI4) mRNA, complete cds. | |
| 700343056H1 | g464145 | 8 | −6 | gb105eukp | beta-amylase; EC 3.2.1.2 | |
| 700343807H1 | g945086 | 44 | −37 | gb105pln | Glycine max transcription factor TFIIB mRNA, complete cds. | |
| 700344010H1 | g577824 | 16 | 9 | gb105pln | Z. mays gene for H2B histone (gH2B3). | |
| 700344759H1 | g2252831 | 8 | −0 | gb105eukp | A_IG005I10.9 | |
| 700345625H1 | g668986 | 52 | −39 | gb105pln | S. tuberosum TYKY2 mRNA for NADH:ubiquinone oxidoreductase. | |
| 700344859H1 | g2463196 | 13 | 5 | gb105allp | MAD2 | |
| 700344979H1 | g710549 | 11 | 4 | gb105allp | ankyrin 3 | |
| 700344094H1 | g474321 | 22 | −7 | gb105pln | Yeast ste13+ gene for RNA helicase, complete cds. | |
| 700380411H1 | g2583081 | 5 | 7 | gb105allp | microsomal glutathione S-transferase 3 | |
| 700342709H1 | g2342495 | 11 | 12 | gb105pln | Ananas comosus mRNA for bromelain, complete cds. | |
| 700347138H1 | g602605 | 76 | −64 | gb105pln | Zea mays tandem genes for alpha1-tubulin and alpha2-tubulin. | |
| 700343863H1 | g429009 | 41 | −3 | gb105pln | Rice mRNA for LMW heat shock protein (gene name SS386), partial cds. | |
| 700343167H1 | g642800 | 14 | −6 | gb105eukp | PTC1; Ptc1p | |
| 700346919H1 | g1938574 | 32 | −17 | gb105eukp | B0025.2 | |
| 700343023H1 | g2811225 | 24 | −1 | gb105pln | Arabidopsis thaliana fimbrin 2 mRNA, complete cds. | |
| 700344826H1 | g20681 | 12 | 7 | gb105allp | 508 aa peptide | |
| 700345075H1 | g2827524 | 51 | −26 | gb105eukp | F8F16.110; predicted protein | |
| 700345277H1 | g170434 | 40 | −36 | gb105pln | Tomato ATP-dependent protease (CD4B) gene, complete cds. | |
| 700347071H1 | g600768 | 39 | −27 | gb105pln | Oryza sativa cyclophilin 2 (Cyp2) mRNA, complete cds. | |
| 700345647H1 | g1781299 | 23 | −1 | gb105eukp | splicing factgor; transformer-SR ribonucleoprotein | |
| 700342640H1 | g157943 | 43 | −19 | gb105eukp | Mhc | |
| 700342384H1 | g550021 | 20 | 0 | gb105allp | ribosomal protein S5 | |
| 700343648H1 | g287628 | 42 | −5 | gb105eukp | YS29A; ribosomal protein YS29 | |
| 700344636H1 | g22302 | 85 | −1 | gb105pln | Maize Gpc1 gene for glyceraldehyde-3-phosphate dehydrogenase (GADPH) subunit C. | |
| 700346975H1 | g337449 | 7 | 7 | gb105allp | hnRNP A2 protein | |
| 700346745H1 | g1658197 | 13 | 6 | gb105eukp | calreticulin | |
| 700345824H1 | g599623 | 31 | −31 | gb105pln | A. thaliana Aco gene. | |
| 700345103H1 | g2724049 | 22 | −12 | gb105pln | Fritillaria agrestis clone CA1 glutaredoxin type I (glr1) mRNA, complete cds. | |
| 700346010H1 | g1519359 | 29 | −13 | gb105eukp | RP49; ribosomal protein 49 | |
| 700342494H1 | g755165 | 12 | 3 | gb105allp | ClpP | |
| 700345085H1 | g20187 | 75 | −68 | gb105pln | O. sativa gene encoding calmodulin. | |
| 700343014H1 | g2832633 | 26 | −11 | gb105eukp | F13C5.220; putative protein | |
| 700345334H1 | g1498052 | 25 | 3 | gb105pln | Zea mays ribosomal protein S8 mRNA, complete cds. | |
| 700343577H1 | g7286954 | 36 | −18 | gb105eukp | DNA helicase; DNA helicase type protein | |
| 700343502H1 | g1370147 | 21 | −18 | gb105pln | L. japonicus mRNA for small GTP-binding protein, RAB11D. | |
| 700347070H1 | g1865682 | 19 | −1 | gb105pln | A. thaliana 16 kb chromosome 1 DNA fragment. | |
| 700345433H1 | g531055 | 41 | −19 | gb105pln | Wheat mRNA for protein H2B-6, complete cds. | |
| 700379651H1 | g2431768 | 48 | −38 | gb105pln | Zea mays acidic ribosomal protein P1a (rpp1a) mRNA, complete cds. | |
| 700346058H1 | g416265 | 28 | −14 | gb105pln | Rice mRNA for ribosomal protein A2, partial sequence. | |
| 700344144H1 | g466442 | 28 | −6 | gb105pln | Arabidopsis thaliana protein phosphatase mRNA, complete cds. | |
| 700380144H1 | g1814400 | 43 | −33 | gb105pln | Mesembryanthemum crystallinum phosphoglucomutase (PGM) mRNA, complete cds. | |
| 700344872H1 | g1814402 | 44 | −50 | gb105pln | Mesembryanthemum crystallinum methionine synthase (MetE) mRNA, complete cds. | |
| 700346645H1 | g1469041 | 18 | −7 | gb105eukp | F23B12.5 | |
| 700345657H1 | g19700 | 54 | −16 | gb105pln | N. plumbaginifolia mRNA NeIF-5A1 for initiation factor 5A(1). | |
| 700342234H1 | g2160167 | 18 | −3 | gb105eukp | F21M12.15 | |
| 700343835H1 | g2388580 | 11 | 3 | gb105eukp | YUP8H12.22 | |
| 700342691H1 | g22314 | 92 | −76 | gb105pln | Maize mRNA for GSH gluthathione S-transferase I (GST; EC 2.5.1.18). | |
| 700380638H1 | g1143387 | 31 | −15 | gb105pln | A. thaliana mRNA for Class III ADH. | |
| 700343128H1 | g473602 | 32 | −14 | gb105pln | Zea mays W-22 histone H2A mRNA, complete cds. | |
| 700343330H1 | g2425065 | 94 | −76 | gb105pln | Zea mays cysteine proteinase Mir3 (mir3) mRNA, complete cds. | |
| 700342570H1 | g1301950 | 19 | 0 | gb105pln | Yeast (Saccharomyces cerevisiae) chromosome XIV reading frame ORF YNL069c. | |
| 700343107H1 | g2736287 | 39 | −18 | gb105pln | Camptotheca acuminata isopentenyl diphosphate isomerase II (IPI2) mRNA, | |
| | | | | | complete cds. | |
| 700342328H1 | g474167 | 47 | −35 | gb105pln | N. tabacum mRNA for phosphoglyceromutase. | |
| 700379938H1 | g313026 | 41 | −27 | gb105pln | L. esculentum rp138 mRNA for ribosomal protein L38. | |
| 700345774H1 | g2160158 | 32 | −15 | gb105eukp | F21M12.3 | |
| 700346048H1 | g1145627 | 19 | −7 | gb105eukp | lipase | |
| 700345515H1 | g2191135 | 13 | −5 | gb105eukp | A_IG002N01.14 | |
| 700344982H1 | g393077 | 8 | 1 | gb105eukp | WHI3; size control; possible RNA binding protein; Whi3p | |
| 700344150H1 | g1060893 | 51 | −1 | gb105allp | human CIRP | |
| 700345506H1 | g695310 | 13 | 14 | gb105pln | Cucumis sativus glyoxysomal malate dehydrogenase (mdhG) mRNA, complete cds. | |
| 700343918H1 | g625147 | 100 | −88 | gb105pln | Zea mays protein disulfide isomerase (pdi) mRNA, complete cds. | |
| 700342936H1 | g1872162 | 22 | −23 | gb105pln | Arabidopsis thaliana DnaJ homolog (agj) mRNA, complete cds. | |
| 700345202H1 | g2760324 | 21 | −4 | gb105eukp | F1N21.9 | |
| 700345963H1 | g2564051 | 28 | −6 | gb105pln | Arabidopsis thaliana genomic DNA, chromosome 5, P1 clone: MWD9, complete | |
| | | | | | sequence. | |
| 700342476H1 | g22324 | 32 | −25 | gb105pln | Z. mays mRNA for H2B histone (clone cH2B221). | |
| 700347158H1 | g1622720 | 32 | −10 | gb105pln | Kalanchoe daigremontiana V-type H+-ATPase 16 kDa subunit mRNA, complete cds. | |
| 700345556H1 | g297172 | 6 | 6 | gb105allp | ribosomal protein S7 | |
| 700346378H1 | g2370231 | 27 | −17 | gb105pln | Hordeum vulgare mRNA for putative acyl-CoA oxidase. | |
| 700345286H1 | g2267592 | 42 | −33 | gb105pln | Oryza sativa glycine-rich RNA-binding protein mRNA, complete cds. | |
| 700345682H1 | g169295 | 36 | 3 | gb105pln | Pharbitis nil heat shock protein 83 (Hsp83) gene, complete cds. | |
| 700344486H1 | g1001440 | 7 | 7 | gb105allp | beta transducin-like protein | |
| 700380745H1 | g587566 | 16 | 0 | gb105eukp | MPP; mitochondrial processing peptidase | |
| 700346443H1 | g19101 | 39 | −22 | gb105pln | H. vulgare mRNA for ribosomal protein L17-1. | |
| 700343021H1 | g596195 | 16 | −2 | gb105eukp | actin | |
| 700342459H1 | g644491 | 74 | −66 | gb105pln | Corn mRNA for elongation factor 1A. | |
| 700346688H1 | g556559 | 74 | −57 | gb105pln | Rice mRNA for homologue of Tat binding protein, complete cds. | |
| 700346226H1 | g2738948 | 12 | −12 | gb105pln | Fragaria x ananassa cytosolic ascorbate peroxidase (APX-c) mRNA, complete cds. | |
| 700346012H1 | g536250 | 26 | −3 | gb105eukp | HMT1 | |
| 700343291H1 | g1890281 | 13 | 4 | gb105eukp | transformation-sensitive protein homolog | |
| 700342414H1 | g2828185 | 16 | −7 | gb105pln | Arabidopsis thaliana genomic DNA, chromosome 5, P1 clone: MUD21, complete | |
| | | | | | sequence. | |
| 700345694H1 | g1619841 | 22 | −3 | gb105eukp | rab1-like | |
| 700344601H1 | g1408306 | 26 | −6 | gb105eukp | qinA; QinA | |
| 700345889H1 | g473976 | 69 | −56 | gb105pln | Rice mRNA, partial homologous to elongation factor 1-alpha gene. | |
| 700345685H1 | g2565006 | 12 | 4 | gb105eukp | T3F12.7; putative sulfate transporter | |
| 700342967H1 | g169792 | 63 | −55 | gb105pln | Rice histone 3 gene, complete cds. | |
| 700380168H1 | g2239257 | 67 | −55 | gb105pln | Zea mays mRNA for cinnamyl alcohol dehydrogense. | |
| 700379996H1 | g298097 | 15 | 4 | gb105allp | subunit of coatomer complex | |
| 700346106H1 | g20163 | 37 | −20 | gb105pln | O. sativa Rr15 mRNA for 5S ribosomal RNA. | |
| 700343165H1 | g2213557 | 12 | 2 | gb105allp | hypothetical protein | |
| 700346388H1 | g1185553 | 17 | 10 | gb105pln | Zea mays glyceraldehyde-3-phosphate dehydrogenase (gpc2) gene, complete cds. | |
| 700345474H1 | g20255 | 60 | −44 | gb105pln | O. sativa gene for heat shock protein 82 HSP82. | |
| 700343084H1 | g927642 | 33 | −36 | gb105pln | Hordeum vulgare mRNA for betaine aldehyde dehydrogenase, complete cds. | |
| 700345959H1 | g1841501 | 68 | −69 | gb105pln | Z. mays mRNA for glutathione-dependent formaldehyde dehydrogenase. | |
| 700344088H1 | g1314048 | 57 | −48 | gb105pln | O. sativa mRNA for archain/delta-COP. | |
| 700347280H1 | g1906829 | 27 | −28 | gb105pln | A. thaliana hsp88.1 gene. | |
| 700343115H1 | g945060 | 42 | −7 | gb105eukp | pur5; aminoimidazole ribonucleotide (AIRS) synthetase; EC 6.3.3.1 | |
| 700342785H1 | g511151 | 36 | 11 | gb105pln | S. tuberosum gene for 25S ribosomal RNA (3′ end). | |
| 700345346H1 | g2275004 | 20 | 0 | gb105pln | Hordeum vulgare mRNA for expressed sequence tag. | |
| 700347066H1 | g1737218 | 19 | 5 | gb105eukp | vacuolar sorting receptor homolog | |
| 700342366H1 | g1419367 | 19 | 1 | gb105pln | Z. mays ZmABP2 mRNA for actin depolymerizing factor. | |
| 700347114H1 | g20255 | 46 | −16 | gb105pln | O. sativa gene for heat shock protein 82 HSP82. | |
| 700346309H1 | g1184771 | 52 | −56 | gb105pln | Zea mays glyceraldehyde-3-phosphate dehydrogenase GAPC2 (gpc2) mRNA, | |
| | | | | | complete cds. | |
| 700345620H1 | g2623021 | 5 | 7 | gb105allp | 2-phosphoglycerate kinase | |
| 700342528H1 | g2425065 | 23 | −1 | gb105pln | Zea mays cysteine proteinase Mir3 (mir3) mRNA, complete cds. | |
| 700281956H2 | g1498052 | 34 | −34 | gb105pln | Zea mays ribosomal protein S8 mRNA, complete cds. | |
| 700342712H1 | g1431621 | 40 | −52 | gb105pln | T. repens mRNA for protein kinase. | |
| 700343266H1 | g1658196 | 16 | 15 | gb105pln | Ricinus communis calreticulin mRNA, complete cds. | |
| 700343142H1 | g2766712 | 26 | −4 | gb105pln | Arabidopsis thaliana ecotype K1-0 chromomethylase (CMT1) mRNA, complete cds. | |
| 700342345H1 | g433043 | 21 | −21 | gb105pln | Zea mays W-22 clone PREM-1E retroelement PREM-1, partial sequence. | |
| 700343654H1 | g2632411 | 12 | 4 | gb105allp | ribosomal protein L17 (BL15) | |
| 700347195H1 | g2599092 | 24 | 2 | gb105eukp | MSI4; WD-40 repeat protein MSI4 | |
| 700342655H1 | g2257743 | 34 | −6 | gb105eukp | lysine-sensitive aspartate kinase | |
| 700344041H1 | g2435515 | 10 | 4 | gb105eukp | A_TM017A05.3 | |
| 700343031H1 | g168492 | 69 | −56 | gb105pln | Corn histone H3 (H3C3) gene, complete cds. | |
| 700380515H1 | g2766529 | 6 | 7 | gb105allp | inositol polyphosphate 5-phosphatase II | |
| 700380563H1 | g1321660 | 28 | −36 | gb105pln | Rice mRNA for ascorbate peroxidase, complete cds. | |
| 700342977H1 | g288062 | 29 | −16 | gb105pln | A. thaliana mRNA for ketol-acid reductoisomerase subunit. | |
| 700347334H1 | g1905929 | 23 | −22 | gb105pln | Oryza sativa MADS box protein OsMADS45 mRNA, complete cds. | |
| 700344050H1 | g496163 | 92 | −61 | gb105pln | Zea mays ribosome-inactivating protein (RIP2) gene, complete cds. | |
| 700379658H1 | g2264307 | 16 | −5 | gb105pln | Arabidopsis thaliana genomic DNA, chromosome 5, P1 clone: MED24, complete | |
| | | | | | sequence. | |
| 700347156H1 | g625108 | 49 | −8 | gb150eukp | YLR388W; Ylr388wp | |
| 700343430H1 | g790507 | 68 | −78 | gb150pln | Z. mays mRNA for 60S acidic ribosomal protein. | |
| 700380062H1 | g170746 | 40 | −11 | gb105pln | Wheat histone H4 TH091 gene, complete cds. | |
| 700343177H1 | g2335089 | 20 | −2 | gb105pln | Arabidopsis thaliana chromosome II BAC T11A07 genomic sequence, complete | |
| | | | | | sequence. | |
| 700346817H1 | g2570500 | 42 | −29 | gb105pln | Oryza sativa inorganic pyrophosphtase (Ipp) mRNA, complete cds. | |
| 700379734H1 | g1173622 | 11 | 6 | gb105allp | homeobox protein | |
| 700281875H2 | g1136574 | 47 | −43 | gb105pln | Sorghum bicolor heat shock protein 70 (hsp70) pseudogene. | |
| 700344316H1 | g940843 | 14 | −2 | gb105eukp | orf 06116 | |
| 700380535H1 | g218088 | 51 | −51 | gb105pln | Rice mRNA for ribosomal protein 117 (249 gene), partial sequence. | |
| 700380151H1 | g1220121 | 28 | −35 | gb105pln | Tobacco mRNA for S-adenosyl-L-homocysteine hydrolase, complete cds. | |
| 700345836H1 | g949877 | 76 | −59 | gb105pln | H. vulgare mRNA for elongation factor 1-alpha. | |
| 700342273H1 | g2052366 | 7 | 7 | gb105allp | protein 5 | |
| 700345183H1 | g170746 | 20 | −10 | gb105pln | Wheat histone H4 TH091 gene, complete cds. | |
| 700379944H1 | g20255 | 63 | −54 | gb105pln | O. sativa gene for heat shock protein 82 HSP82. | |
| 700344696H1 | g2570129 | 16 | 8 | gb105allp | RVP1 | |
| 700345286H1 | g2668741 | 61 | −55 | gb105pln | Zea mays glycine-rich RNA binding protein (GRP) mRNA, complete cds. | |
| 700346816H1 | g1524234 | 15 | 5 | gb105allp | unknown | |
| 700345841H1 | g159256 | 22 | −4 | gb105eukp | annexin XII; annexin XII | |
| 700347375H1 | g1165205 | 18 | 4 | gb105pln | Arabidopsis thaliana multiubiquitin chain binding protein (MBP1) mRNA, | |
| | | | | | complete cds. | |
| 700347079H1 | g2583106 | 27 | −9 | gb105pln | Arabidopsis thaliana chromosome II BAC F4L23 genomic sequence, complete | |
| | | | | | sequence. | |
| 700346847H1 | g2264320 | 27 | −6 | gb105pln | Arabidopsis thaliana genomic DNA, chromosome 5, P1 clone: MX110, complete | |
| | | | | | sequence. | |
| 700343086H1 | g218334 | 48 | −46 | gb105pln | Triticum aestivum mRNA for O-acetylserine (thiol) lyase. | |
| 700380163H1 | g190234 | 18 | 6 | gb105allp | acidic ribosomal phosphoprotein (P1) | |
| 700379970H1 | g886739 | 65 | −33 | gb105pln | Z. mays histone H4 gene. | |
| 700345108H1 | g18259 | 39 | −37 | gb105pln | c. sativus mRNA for cs DnaJ-1. | |
| 700380044H1 | g2301165 | 10 | 4 | gb105allp | unnamed protein product | |
| 700379868H1 | g168403 | 73 | −1 | gb105pln | Maize actin 1 gene (MAc1), complete cds. | |
| 700344687H1 | g1431628 | 18 | 4 | gb105pln | V. radiata mRNA for pectinacetylesterase. | |
| 700344835H1 | g21802 | 31 | −18 | gb105pln | T. aestivum mRNA for high mobility group protein (HMGW). | |
| 700346136H1 | g1532047 | 36 | −29 | gb105pln | O. sativa mRNA for S-adenosylmethionine decarboxylase. | |
| 700343438H1 | g2408019 | 19 | −6 | gb105eukp | SPAC17G6.06; 40s ribosomal protein | |
| 700347130H1 | g2293567 | 39 | 1 | gb105pln | Oryza sativa HvB12D homolog mRNA, complete cds. | |
| 700342488H1 | g452473 | 43 | −18 | gb105pln | Zea mays Black Mexican Sweet alpha-tubulin mRNA, complete cds. | |
| 700346914H1 | g780371 | 14 | −0 | gb105pln | Oryza sativa enolase mRNA, complete cds. | |
| 700380765H1 | g2827525 | 39 | −9 | gb105eukp | F8F16.120; multicatalytic endopeptidase complex, proteasome precursor, beta subunit | |
| 700342639H1 | g312944 | 17 | −2 | gb105eukp | cysK; cysteine synthase; EC 4.2.99.8 | |
| 700346591H1 | g2239260 | 14 | −7 | gb105eukp | CCR; cinnamoyl CoA reductase | |
| 700379940H1 | g2662344 | 72 | −62 | gb105pln | Oryza sativa mRNA for EF-1 alpha, complete cds. | |
| 700347167H1 | g602605 | 37 | −61 | gb105pln | Zea mays tandem genes for alpha1-tubulin and alpha2-tubulin. | |
| 700347360H1 | g1730332 | 21 | −10 | gb105eukp | (R)-(+)-mandelonitrile lyase isoform MDL1 precursor | |
| 700346785H1 | g218367 | 13 | 10 | gb105pln | Yeast (Candida tropicalis) CTPACTB gene for acetoacetyl-CoA thiolase A. | |
| 700346430H1 | g312178 | 19 | 6 | gb105pln | Z. mays GapC2 gene. | |
| 700380209H1 | g1217976 | 19 | −4 | gb105eukp | SPAC1F12.02c; unknown | |
| 700379731H1 | g166769 | 20 | −4 | gb105pln | A. thaliana heat shock protein 83 mRNA, complete cds. | |
| 700347002H1 | g600768 | 49 | −34 | gb105pln | Oryza sativa cyclophilin 2 (Cyp2) mRNA, complete cds. | |
| 700345755H1 | g1498389 | 54 | −49 | gb105pln | Zea mays actin (Maz81) gene, partial cds. | |
| 700345132H1 | g2274990 | 48 | −5 | gb105pln | Hordeum vulgare mRNA for expressed sequence tag. | |
| 700380212H1 | g168500 | 33 | −42 | gb105pln | Maize (Zea mays) histone H4 gene (H4C14), complete cds. | |
| 700343352H1 | g1279278 | 21 | −3 | gb105eukp | F22D6.2 | |
| 700343377H1 | g2739216 | 24 | 5 | gb105pln | Hordeum vulgare L41 ribosomal protein. | |
| 700343010H1 | g785035 | 9 | −0 | gb105eukp | trypsin; EC 3.4.21.4 | |
| 700342566H1 | g431269 | 16 | 12 | gb105pln | Arabidopsis thaliana ubiquitin conjugating enzyme (UBC5) gene, complete cds. | |
| 700344321H1 | g1574937 | 21 | −31 | gb105pln | Zea mays superoxide dismutase 4 (sod4) gene, partial cds. | |
| 700345694H1 | g1370174 | 35 | −8 | gb105eukp | rab1Y; GTP-binding protein; RAB1Y | |
| 700344916H1 | g218088 | 37 | −29 | gb105pln | Rice mRNA for ribosomal protein 117 (249 gene), partial sequence. | |
| 700342671H1 | g407488 | 12 | 4 | gb105eukp | unknown | |
| 700346033H1 | g620055 | 34 | −17 | gb105eukp | T15H9.6 | |
| 700379674H1 | g2239151 | 24 | 5 | gb105eukp | ch1D; CHLD magnesium chelatase subunit | |
| 700346631H1 | g304108 | 30 | −18 | gb105pln | Arabidopsis thaliana poly(A)-binding protein mRNA, complete cds. | |
| 700379734H1 | g1881536 | 11 | 6 | gb105allp | A20 | |
| 700342206H1 | g2641618 | 53 | −32 | gb105pln | Zea mays ubiquitin-conjugating enzyme protein E2 (ubc7) mRNA, complete cds. | |
| 700342545H1 | g1118094 | 21 | −6 | gb105eukp | C50F7.4 | |
| 700346811H1 | g21600 | 44 | −28 | gb105pln | S. tuberosum mRNA for ubiquitin monomer/ribosomal protein. | |
| 700347264H1 | g1729455 | 34 | −19 | gb105eukp | B0365.1 | |
| 700379891H1 | g510910 | 35 | −25 | gb105pln | L. temulentum mRNA for histone H3. | |
| 700344425H1 | g1381150 | 26 | 0 | gb105allp | Hs-CUL-4B | |
| 700344661H1 | g218082 | 53 | −15 | gb105pln | Rice mRNA for initiation factor eIF-4D (225 gene), partial sequence. | |
| 700353606H1 | g1255861 | 23 | −5 | gb105eukp | F02E8.3 | |
| 700355772H1 | g2190016 | 6 | 8 | gb105eukp | alliinase; EC 4.4.1.4 | |
| 700353969H1 | g2154727 | 26 | −2 | gb105pln | C. dactylon mRNA for profilin 2. | |
| 700353206H1 | g669003 | 23 | −5 | gb105eukp | calnexin | |
| 700282404H2 | g965081 | 4 | 8 | gb105eukp | YPL012W; Yp1012wp | |
| 700356833H1 | g311686 | 19 | −11 | gb105eukp | 3-ketoacyl-acyl carrier protein synthase III (KAS III) | |
| 700353708H1 | g22418 | 21 | −16 | gb105pln | Z. mays gene for polygalacturonase (clone 17). | |
| 700355859H1 | g474390 | 64 | −58 | gb105pln | H. vulgare L. (Alexis) Serine carobxypeptidase II-2 mRNA. | |
| 700352886H1 | g17789 | 16 | −0 | gb105eukp | Bp10 | |
| 700383143H1 | g64876 | 6 | 7 | gb105allp | La protein form B | |
| 700355883H1 | g22456 | 97 | −91 | gb105pln | Z. mays pollen specific mRNA C-terminal (clone 3C12). | |
| 700356115H1 | g288366 | 100 | −28 | gb105pln | Z. mays PGg14 gene for polygalacturonase. | |
| 700352725H1 | g1772496 | 20 | −27 | gb105eukp | peptidyl-prolyl cis-trans isomerase.; EC 5.2.1.8 | |
| 700354794H1 | g1438883 | 16 | 1 | gb105allp | GmCK3p | |
| 700354442H1 | g1293783 | 53 | −32 | gb105pln | Oryza sativa QM gene, complete cds. | |
| 700353688H1 | g20310 | 15 | 0 | gb105eukp | pollen specific gene | |
| 700382825H1 | g1302033 | 24 | −9 | gb105pln | Yeast (Saccharomyces cerevisiae) chromosome XIV reading frame ORF YNL112w. | |
| 700353164H1 | g22118 | 25 | 2 | gb105pln | Z. mays DNA for Adh1-Cm allele. | |
| 700352644H1 | g499011 | 66 | −71 | gb105pln | S. vulgare SoAc1 mRNA. | |
| 700383102H1 | g288378 | 45 | −34 | gb105pln | Z. mays gene PG for polygalacturonase. | |
| 700354367H1 | g1519252 | 23 | −49 | gb105pln | Oryza sativa GF14-d protein mRNA, complete cds. | |
| 700352905H1 | g2316063 | 28 | −9 | gb105eukp | cyt-b; cytochrome apoenzyme b | |
| 700353022H1 | g414702 | 34 | −10 | gb105pln | H. lanatus mRNA for allergen Hol-1I. | |
| 700353405H1 | g998429 | 55 | −40 | gb105pln | GRF1 = general regulatory factor [Zea mays, XL80, Genomic, 5348 nt]. | |
| 700353950H1 | g288373 | 42 | −44 | gb105pln | Z. mays PGg6 gene for polygalacturonase. | |
| 700352994H1 | g296094 | 78 | −3 | gb105eukp | M(3)95A; ribosomal protein S3 | |
| 700282438H2 | g2695929 | 15 | 4 | gb105allp | putative thiol protease | |
| 700356670H1 | g1743414 | 32 | −3 | gb105eukp | pSB5; transmembrane proton pump | |
| 700282471H2 | g2181190 | 10 | 8 | gb105allp | serine/threonine kinase | |
| 700355985H1 | g2266661 | 42 | −24 | gb105pln | Hordeum vulgare mRNA for 14-3-3 protein (Hv1433c). | |
| 700355446H1 | g17795 | 26 | 2 | gb105allp | Bplo gene product | |
| 700355973H1 | g544501 | 11 | −3 | gb105eukp | SEC13; Sec13p | |
| 700382952H1 | g313137 | 11 | −1 | gb105pln | Z. mays ZmPRO1 mRNA for profilin 1. | |
| 700352804H1 | g1030068 | 18 | −4 | gb105eukp | NAD(P)H oxidoreductase, isoflavone reductase homologue | |
| 700382314H1 | g1184773 | 96 | −82 | gb105pln | Zea mays glyceraldehyde-3-phosphate dehydrogenase GAPC3 (gpc3) mRNA, | |
| | | | | | complete cds. | |
| 700382087H1 | g1688322 | 7 | 3 | gb105eukp | pinA; pinA | |
| 700356985H1 | g457688 | 56 | −14 | gb105pln | M. crystallinum mRNA for protein kinase. | |
| 700282545H2 | g255568 | 15 | 16 | gb105pln | pollen specific protein [Zea mays = corn, mRNA, 943 nt]. | |
| 700382807H1 | g22560 | 27 | −18 | gb105pln | Mesembryanthemum crystallinum ppc2 gene for phosphoenolpyruvate carboxylase | |
| | | | | | (EC 4.1.1.31). | |
| 700355911H1 | g1771781 | 24 | −22 | gb105pln | T. aestivum mRNA for beta-amylase. | |
| 700355324H1 | g517065 | 25 | 6 | gb105allp | chaperonin-like protein | |
| 700353987H1 | g22427 | 53 | 6 | gb105pln | Z. mays gene for polygalacturonase (clone 65). | |
| 700354407H1 | g2244792 | 11 | −3 | gb105eukp | ankyrin homolog | |
| 700354922H1 | g1785739 | 6 | 7 | gb105eukp | tRNA-Ser | |
| 700356606H1 | g809535 | 21 | 15 | gb105pln | B. verrucosa mRNA for BETV4 pollen allergen. | |
| 700355754H1 | g473359 | 20 | −28 | gb105pln | P. pratense mRNA for Phl pI allergen. | |
| 700382304H1 | g902583 | 39 | −79 | gb105pln | Zea mays clone MubG1 ubiquitin gene, complete cds. | |
| 700356848H1 | g2160155 | 10 | 9 | gb105pln | Sequence of BAC F21M12 from Arabidopsis thaliana chromosome 1, complete | |
| | | | | | sequence. | |
| 700354582H1 | g22458 | 62 | −59 | gb105pln | Z. mays pollen specific mRNA C-terminal (clone 4H7). | |
| 700382574H1 | g288611 | 28 | −15 | gb105pln | Z. mays PG gene for polygalacturonase. | |
| 700383159H1 | g22428 | 8 | 5 | gb105eukp | polygalacturonase | |
| 700382094H1 | g1777706 | 46 | −75 | gb105pln | Zea mays 18S ribosomal RNA gene, partial sequence. | |
| 700357106H1 | g497900 | 86 | 5 | gb105eukp | S-adenosyl methionine synthetase | |
| 700354644H1 | g1184773 | 100 | −80 | gb105pln | Zea mays glyceraldehyde-3-phosphate dehydrogenase GAPC3 (gpc3) mRNA, | |
| | | | | | complete cds. | |
| 700354657H1 | g218175 | 51 | −47 | gb105pln | Rice mRNA for heat shock protein 82 (NH67 gene), partial sequence. | |
| 700282576H2 | g1658173 | 39 | −23 | gb105eukp | otaA; ornithine transaminase; EC 2.6.1.13 | |
| 700355858H1 | g2511530 | 36 | −39 | gb105pln | Eleusine indica alpha tubulin 1 (TUA1) mRNA, complete cds. | |
| 700383156H1 | g414702 | 22 | −3 | gb105pln | H. lanatus mRNA for allergen Hol-lI. | |
| 700357145H1 | g416265 | 42 | −32 | gb105pln | Rice mRNA for ribosomal protein A2, partial sequence. | |
| 700353291H1 | g1777414 | 19 | 3 | gb105allp | 26S proteasome subunit | |
| 700382150H1 | g2252869 | 25 | −10 | gb105eukp | AT0ZI1 | |
| 700354493H1 | g1438878 | 26 | −7 | gb105pln | Glycine max choline kinase GmCK1p mRNA, complete cds. | |
| 700353442H1 | g487946 | 23 | −23 | gb105eukp | DYS1; Dys1p: Deoxyhypusine synthase | |
| 700353084H1 | g2114105 | 32 | −12 | gb105pln | Arabidopsis thaliana mRNA for sulfate transporter, complete cds. | |
| 700357406H1 | g971853 | 67 | 3 | gb105allp | expressed sequence tag; human homolog | |
| 700352655H1 | g777757 | 49 | −59 | gb105pln | Saccharum hybrid (clone SCUBI561) polyubiquitin mRNA, complete cds. | |
| 700383157H1 | g974781 | 38 | −26 | gb105pln | C. blumei kinetoplast met gene for cobalamine-independent methionine synthase. | |
| 700353959H1 | g2062421 | 12 | 1 | gb105eukp | LeEx1; expansin | |
| 700357419H1 | g531389 | 18 | −6 | gb105eukp | gag/pol; copia-like retrotransposon Hopscotch polyprotein | |
| 700382308H1 | g168460 | 55 | −75 | gb105pln | Zea mays cyclophilin (CyP) mRNA, complete cds. | |
| 700355436H1 | g22237 | 62 | −68 | gb105pln | Maize mRNA for cytosolic GAPDH (GapC) glyceraldehyde-3-phosphate | |
| | | | | | dehydrogenase. | |
| 700355582H1 | g1549222 | 18 | −8 | gb105eukp | NtSAR1; NtSar1 protein | |
| 700356263H1 | g607895 | 9 | 1 | gb105eukp | RTS2; anther specific | |
| 700382877H1 | g414702 | 27 | −2 | gb105pln | H. lanatus mRNA for allergen Hol-lI. | |
| 700383030H1 | g176779 | 32 | −16 | gb105allp | gamma-2 globin | |
| 700382112H1 | g1885343 | 32 | −57 | gb105pln | T. estivum mRNA for starch branching enzyme II. | |
| 700354788H1 | g2344871 | 25 | −16 | gb105eukp | pap; purple acid phosphatase precursor; EC 3.1.3.2 | |
| 700353220H1 | g2464894 | 30 | −18 | gb105pln | Arabidopsis thaliana DNA chromosome 4, ESSA I AP2 contig fragment No. 2. | |
| 700355767H1 | g2190559 | 10 | 1 | gb105eukp | F5I14.16; F5I14.16 | |
| 700382015H1 | g16513 | 25 | −40 | gb105pln | A. thaliana gene for suppressor-like protein. | |
| 700382044H1 | g22425 | 92 | −85 | gb105pln | Z. mays gene for polygalacturonase (clone 47). | |
| 700354322H1 | g22418 | 44 | −38 | gb105pln | Z. mays gene for polygalacturonase (clone 17). | |
| 700382730H1 | g1374698 | 27 | −7 | gb105allp | nuclear protein, NP220 | |
| 700356209H1 | g1184773 | 34 | 1 | gb105pln | Zea mays glyceraldehyde-3-phosphate dehydrogenase GAPC3 (gpc3) mRNA, | |
| | | | | | complete cds. | |
| 700356086H1 | g595816 | 9 | 3 | gb105eukp | mudrA | |
| 700352826H1 | g287830 | 14 | −3 | gb105eukp | polygalacturonase | |
| 700356282H1 | g296385 | 18 | 9 | gb105pln | N. tabacum mRNA for cytochrome b5. | |
| 700383167H1 | g435172 | 27 | −3 | gb105pln | A. sativa (Pewi) ASTCP-K19 mRNA for t complex polypeptide 1. | |
| 700382436H1 | g550019 | 6 | 5 | gb105allp | ribosomal protein L28 | |
| 700356834H1 | g288366 | 82 | −80 | gb105pln | Z. mays PGg14 gene for polygalacturonase. | |
| 700356095H1 | g1790315 | 9 | 8 | gb105allp | hypothetical 31.2 kD protein in glnA-fdhE intergenic region | |
| 700382279H1 | g2239262 | 8 | 7 | gb105allp | pectin methylesterase-like protein | |
| 700354794H1 | g1438879 | 15 | 1 | gb105eukp | GmCK1p; EC 2.7.1.32 | |
| 700382885H1 | g643596 | 67 | −58 | gb105pln | Corn mRNA for cysteine proteinase, clone CCP, complete cds. | |
| 700352677H1 | g429015 | 52 | −39 | gb105pln | Rice mRNA for ribosomal protein (gene name SS498), partial cds. | |
| 700382721H1 | g20321 | 53 | −45 | gb105pln | Oryza sativa RAc1 mRNA for actin. | |
| 700382331H1 | g736338 | 34 | −32 | gb105pln | Glycine max phosphatidylinositol 3-kinase mRNA, complete cds. | |
| 700353120H1 | g2642323 | 43 | −38 | gb105pln | Zea mays profilin (PRO4) mRNA, complete cds. | |
| 700355264H1 | g21800 | 86 | −4 | gb105pln | T. aestivum L mRNA for histone H2B. | |
| 700352848H1 | g22425 | 34 | −22 | gb105pln | Z. mays gene for polygalacturonase (clone 47). | |
| 700282516H2 | g18317 | 14 | −3 | gb105pln | D. carota RNA for actin gene Ac1. | |
| 700382579H1 | g2245024 | 13 | 1 | gb105eukp | cyanohydrin lyase homolog | |
| 700355062H1 | g2828278 | 15 | −5 | gb105pln | Arabidopsis thaliana DNA chromosome 4, BAC clone T18B16 (ESSAII project). | |
| 700352630H1 | g927544 | 14 | 15 | gb105pln | Yeast (Saccharomyces cerevisiae) YPT6 gene. | |
| 700355941H1 | g747914 | 90 | −76 | gb105pln | Z. mays CaM1 mRNA for calmodulin. | |
| 700353129H1 | g1399549 | 12 | −0 | gb105pln | Anemone trifolia nuclear 26S ribosomal RNA gene, partial sequence. | |
| 700354442H1 | g468055 | 69 | −45 | gb105pln | Zea mays B73 QM protein mRNA, complete cds. | |
| 700382947H1 | g288378 | 97 | −44 | gb105pln | Z. mays gene PG for polygalacturonase. | |
| 700355086H1 | g1244652 | 51 | 8 | gb105pln | Zea mays copia-type retroelement PREM-2 gag gene, complete cds. | |
| 700355972H1 | g337455 | 37 | −24 | gb105allp | hnRNP C2 protein | |
| 700355868H1 | g2735007 | 66 | −79 | gb105pln | Zea mays kinase associated protein phosphatase (KAPP) mRNA, complete cds. | |
| 700355083H1 | g887785 | 27 | −13 | gb105eukp | ILR1; ILR1 hydrolyzes certain amino acid conjugates of the plant growth regulator | |
| | | | | | indole-3-acetic acid (IAA), including IAA-Leu and IAA-Phe; ILR1 | |
| 700354787H1 | g2464935 | 23 | −6 | gb105eukp | serine C-palmitoyltransferase homolog | |
| 700354929H1 | g414702 | 22 | −5 | gb105pln | H. lanatus mRNA for allergen Hol-lI. | |
| 700354737H1 | g2291232 | 8 | 4 | gb105allp | similar to the AAA family of ATPases | |
| 700357452H1 | g16509 | 41 | −30 | gb105pln | A. thaliana mRNA for succinate-CoA ligase (GCP-forming). | |
| 700282439H2 | g596079 | 37 | −56 | gb105pln | Zea mays thiamine biosynthetic enzyme (thi1-2) mRNA, complete cds. | |
| 700382407H1 | g2182287 | 24 | −6 | gb105pln | Genomic sequence for Arabidopsis thaliana BAC T7N9, complete sequence. | |
| 700354681H1 | g453975 | 41 | −22 | gb105pln | P. pratense mRNA for profilin-Phl p XI. | |
| 700352617H1 | g313139 | 72 | −79 | gb105pln | Z. mays ZmPRO2 mRNA for profilin 2. | |
| 700382157H1 | g1184773 | 83 | −70 | gb105pln | Zea mays glyceraldehyde-3-phosphate dehydrogenase GAPC3 (gpc3) mRNA, | |
| | | | | | complete cds. | |
| 700355762H1 | g19902 | 25 | −10 | gb105eukp | pollen specific protein | |
| 700354644H1 | g312180 | 39 | −64 | gb105pln | Z. mays GapC4 gene. | |
| 700353429H1 | g20359 | 72 | −5 | gb105pln | Rice gene for 17S ribosomal RNA. | |
| 700382474H1 | g433044 | 16 | 12 | gb105pln | Zea mays W-22 clone PREM-1D retroelement PREM-1, partial sequence. | |
| 700352852H1 | g288378 | 93 | −77 | gb105pln | Z. mays gene PG for polygalacturonase. | |
| 700382142H1 | g1132482 | 60 | −40 | gb105pln | Rice mRNA for ADP-ribosylation factor, complete cds. | |
| 700355313H1 | g1638836 | 54 | −50 | gb105pln | H. vulgare mRNA for alpha-tubulin 2. | |
| 700355208H1 | g2505871 | 87 | −6 | gb105eukp | ribosomal protein S18A | |
| 700354319H1 | g1707641 | 12 | 13 | gb105pln | O. sativa mRNA for leucine rich repeat receptor-like kinase. | |
| 700353549H1 | g600768 | 44 | 10 | gb105pln | Oryza sativa cyclophilin 2 (Cyp2) mRNA, complete cds. | |
| 700354923H1 | g1403043 | 37 | −30 | gb105pln | H. chilense x T. turgidum conv. durum (Tritordeum) mRNA for S-adenosylmethionine | |
| | | | | | decarboxylase. | |
| 700353565H1 | g2435604 | 20 | 7 | gb105eukp | F08F1.7 | |
| 700382615H1 | g2801802 | 24 | −6 | gb105pln | Oryza sativa germin-like protein 16 (glp16) mRNA, complete cds. | |
| 700382147H1 | g1497983 | 15 | 0 | gb105eukp | alien; putative thyroid receptor interacting protein | |
| 700357439H1 | g2565420 | 33 | 5 | gb105pln | Onobrychis viciifolia eukaryotic translation initiation factor eIF-1A mRNA, | |
| | | | | | complete cds. | |
| 700356170H1 | g414702 | 21 | −0 | gb105pln | H. lanatus mRNA for allergen Hol-lI. | |
| 700382773H1 | g2351070 | 13 | 11 | gb105pln | Arabidopsis thaliana genomic DNA, chromosome 5, P1 clone: MTH12. | |
| 700355311H1 | g1015931 | 24 | −4 | gb105eukp | ribosomal protein L1 | |
| 700354577H1 | g1155333 | 46 | −4 | gb105pln | Solanum tuberosum POTATP1 mRNA, complete cds. | |
| 700355771H1 | g167607 | 16 | −1 | gb105eukp | actin 7 | |
| 700352629H1 | g915313 | 23 | 3 | gb105allp | ribosomal protein L31 | |
| 700356574H1 | g287829 | 68 | −75 | gb105pln | Z. mays gene for polygalacturonase. | |
| 700355780H1 | g387431 | 18 | 7 | gb105allp | metallothionien II | |
| 700282445H2 | g1741870 | 26 | −11 | gb105allp | SDF2 | |
| 700353109H1 | g287834 | 73 | −8 | gb105pln | Z. mays yptm2 cDNA. | |
| 700356136H1 | g540532 | 25 | −39 | gb105pln | Rice mRNA for G protein alpha subunit, complete cds. | |
| 700353716H1 | g1899059 | 54 | −61 | gb105pln | Zea mays endosperm C-24 sterol methyltransferase (ESMT1) mRNA, complete cds. | |
| 700282505H2 | g532571 | 23 | −7 | gb105pln | Barley lipoxygenase 1 (LoxA) gene, complete cds. | |
| 700357429H1 | g393400 | 77 | −46 | gb105pln | Z. mays mRNA for alpha-tubulin. | |
| 700355046H1 | g485376 | 84 | −76 | gb105pln | Zea mays alpha-3-tubulin gene, complete cds. | |
| 700354627H1 | g1707856 | 40 | −46 | gb105pln | T. aestivum mRNA for obtusifoliol 14-alpha-demethylase (CYP51), clone w516, | |
| | | | | | partial. | |
| 700382205H1 | g2244950 | 24 | −23 | gb105pln | Arabidopsis thaliana DNA chromosome 4, ESSA I contig fragment No. 5. | |
| 700356294H1 | g1654348 | 7 | 8 | gb105allp | cytoplasmatic phosphoprotein | |
| 700355823H1 | g2429617 | 48 | −59 | gb105pln | Oryza sativa mRNA for ferrochelatase, partial cds. | |
| 700357140H1 | g1223922 | 22 | −7 | gb105eukp | vicilin peptidohydrolase | |
| 700352939H1 | g1902903 | 12 | 5 | gb105allp | phospholipase D | |
| 700382574H1 | g288378 | 27 | −13 | gb105pln | Z. mays gene PG for polygalacturonase. | |
| 700353952H1 | g1049082 | 14 | 5 | gb105allp | SRp40-3 | |
| 700354368H1 | g17862 | 30 | −22 | gb105pln | B. napus mRNA for ribosomal protein S15a (pPCB8). | |
| 700355419H1 | g1289203 | 32 | −17 | gb105pln | A. glutinosa mRNA for thiazole biosynthetic enzyme. | |
| 700353902H1 | g1236961 | 25 | −8 | gb105eukp | hydrolysis of the cyanogenic glucoside (R)-prunasin; prunasin hydrolase precursor; | |
| | | | | | EC 3.2.1.21 | |
| 700353263H1 | g999395 | 53 | −52 | gb105pln | HSP81-3 = heat-shock Protein [Arabidopsis thaliana = thale-cress, Genomic, 3094 nt]. | |
| 700355243H1 | g393449 | 82 | −18 | gb105pln | S. cereale mRNA for beta-amylase. | |
| 700382822H1 | g288611 | 48 | −48 | gb105pln | Z. mays PG gene for polygalacturonase. | |
| 700355264H1 | g473604 | 82 | −2 | gb105pln | Zea mays W-22 histone H2B mRNA, complete cds. | |
| 700355262H1 | g255568 | 75 | −59 | gb105pln | pollen specific protein [Zea mays = corn, mRNA, 943 nt]. | |
| 700383131H1 | g475257 | 18 | 7 | gb105eukp | similar to ribosomal protein L19; ctg start codon. putative | |
| 700356461H1 | g499655 | 14 | 8 | gb105eukp | gamma-thionin homolog | |
| 700282445H2 | g1431130 | 5 | 8 | gb105eukp | PMT1 | |
| 700353276H1 | g2656025 | 37 | −28 | gb105pln | Arabidopsis thaliana genomic DNA, chromosome 5, P1 clone: MCD7. | |
| 700353442H1 | g1019423 | 24 | −22 | gb105eukp | catalyzes the transfer of the aminobutyl group from spermidine to eIF-5A lysine | |
| | | | | | residue; deoxyhypusine synthase | |
| 700352874H1 | g1086780 | 13 | 5 | gb105eukp | T02G5.4 | |
| 700356113H1 | g168316 | 17 | −3 | gb105eukp | Lol pI; pollen allergen | |
| 700382489H1 | g186192 | 50 | −41 | gb105allp | immunoglobulin mu chain | |
| 700353106H1 | g1841869 | 18 | 9 | gb105pln | Pimpinella brachycarpa elongation factor 1-beta (EF-1-beta) mRNA, complete cds. | |
| 700356463H1 | g666087 | 68 | 1 | gb105allp | carbonyl reductase (NADPH) | |
| 700382607H1 | g533692 | 22 | 1 | gb105eukp | protease inhibitor | |
| 700354602H1 | g763158 | 22 | −6 | gb105allp | GTP-binding protein | |
| 700353716H1 | g1706964 | 40 | −27 | gb105pln | Triticum aestivum delta-24-sterol methyltransferase (TA-MT) mRNA, complete cds. | |
| 700382546H1 | g398846 | 48 | −26 | gb105pln | Z. mays mRNA for beta 4 tubulin. | |
| 700355264H1 | g1066160 | 80 | −2 | gb105pln | Wheat gene for protein H2B153, complete cds. | |
| 700282591H2 | g409499 | 23 | 5 | gb105allp | 3-Hydroxy-3-methylglutaryl coenzyme A lyase, HL {EC 4.1.3.4} [mice, liver, Peptide | |
| | | | | | Mitochondrial, 325 aa] | |
| 700355330H1 | g16110 | 47 | −48 | gb105pln | Avena sativa mRNA for phytochrome (AP3). | |
| 700356819H1 | g1679757 | 10 | 3 | gb105eukp | chk-1; two-component histidine kinase CHK-1 | |
| 700355771H1 | g20637 | 19 | −3 | gb105eukp | actin | |
| 700352920H1 | g35555 | 28 | 7 | gb105allp | PM/Scl 100kD nucleolar protein | |
| 700357147H1 | g2570506 | 44 | −48 | gb105pln | Oryza sativa ribosomal protein mRNA, complete cds. | |
| 700354360H1 | g1616660 | 94 | −72 | gb105pln | Zea mays adenylosuccinate synthetase mRNA, complete cds. | |
| 700354705H1 | g2244842 | 10 | 1 | gb105eukp | hypothetical protein | |
| 700355955H1 | g1632809 | 18 | 5 | gb105allp | NADH dehydrogenase subunit 3 | |
| 700352923H1 | g22416 | 100 | −57 | gb105pln | Z. mays mRNA for polygalacturonase (clone PG1). | |
| 700355780H1 | g31435 | 21 | 6 | gb105allp | metallothionein | |
| 700353429H1 | g1777706 | 72 | −5 | gb105pln | Zea mays 18S ribosomal RNA gene, partial sequence. | |
| 700355095H1 | g172423 | 24 | 3 | gb105pln | Yeast (Saccharomyces cerevisiae) robosomal protein L1 gene, complete cds. | |
| 700354738H1 | g575730 | 41 | −63 | gb105pln | Z. mays mRNA for transmembrane protein. | |
| 700356573H1 | g974781 | 43 | −41 | gb105pln | C. blumei kinetoplast met gene for cobalamine-independent methionine sythase. | |
| 700355060H1 | g472849 | 14 | 17 | gb105pln | Glycine max Essex desiccation protectant protein Lea14 homolog mRNA, | |
| | | | | | complete cds. | |
| 700356127H1 | g520935 | 34 | −26 | gb105pln | H. vulgare mRNA for gamma-TIP-like protein. | |
| 700354415H1 | g1480025 | 21 | −2 | gb105pln | Brassica rapa mRNA, polyA_site. | |
| 700352887H1 | g1747295 | 66 | −16 | gb105pln | Rice mRNA for vacuolar H+-pyrophosphatase, complete cds. | |
| 700383175H1 | g414702 | 27 | −11 | gb105pln | H. lanatus mRNA for allergen Hol-lI. | |
| 700382383H1 | g1145694 | 34 | −21 | gb105pln | Arabidopsis thaliana actin (ACT3) | |
| 700353267H1 | g2351062 | 16 | 10 | gb105pln | Arabidopsis thaliana genomic DNA chromosome 5, P1 clone: MAH20. | |
| 700355878H1 | g293901 | 16 | −6 | gb105pln | Zea mays mI gene, complete cds. | |
| 700355829H1 | g168558 | 44 | 4 | gb105eukp | putative. similar to GTP-binding proteins | |
| 700355560H1 | g1911581 | 30 | −15 | gb105pln | Cyn d 1 = major allergen {clone 14c1 and CD1} [Cynodon dactylon = Bermuda | |
| | | | | | grass, pollen, mRNA Partial, 759 nt]. | |
| 700353022H1 | g414907 | 33 | −10 | gb105pln | P. pratense mRNA for pollen allergen PhlpI. | |
| 700356745H1 | g18917 | 20 | 6 | gb105pln | Barley mRNA for beta-amylase. | |
| 700356507H1 | g1185555 | 29 | −18 | gb105pln | Zea mays glyceraldehyde-3-phosphate dehydrogenase (gpc4) gene, partial cds. | |
| 700353981H1 | g485376 | 79 | −72 | gb105pln | Zea mays alpha-3-tubulin gene, complete cds. | |
| 700353171H1 | g393449 | 42 | −0 | gb105pln | S. cereale mRNA for beta-amylase. | |
| 700352952H1 | g22416 | 100 | −87 | gb105pln | Z. mays mRNA for polygalacturonase (clone PG1). | |
| 700382032H1 | g1813887 | 16 | 7 | gb105allp | hypothetical protein (cDNA194) | |
| 700353234H1 | g20163 | 19 | −24 | gb105pln | O. sativa Rrl5 mRNA for 5S ribosomal RNA. | |
| 700282554H2 | g2463582 | 10 | 4 | gb105eukp | precursor of cysteine proteinase; FB31 precursor (FB13 precursor) | |
| 700383022H1 | g414907 | 26 | −17 | gb105pln | P. pratense mRNA for pollen allergen PhlpI. | |
| 700353945H1 | g493588 | 31 | −11 | gb105pln | Hordeum vulgare disulfide isomerase (PDI) mRNA, complete cds. | |
| 700356033H1 | g2282586 | 11 | 3 | gb105eukp | methyltransferase | |
| 700353291H1 | g1155334 | 24 | 2 | gb105eukp | POTATP1 | |
| 700356901H1 | g1402878 | 17 | 6 | gb105eukp | orf4; unknown | |
| 700356273H1 | g12956 | 54 | 4 | gb105allp | reading frame protein 5 (896 is 2nd base in codon) | |
| 700355696H1 | g287830 | 11 | 8 | gb105eukp | polygalacturonase | |
| 700382111H1 | g436051 | 56 | −62 | gb105pln | Rice mRNA for branching enzyme-3, complete cds. | |
| 700353091H1 | g167109 | 34 | −45 | gb105pln | Hordeum vulgare vacuolar ATPase B subunit mRNA, complete cds. | |
| 700353867H1 | g17795 | 16 | −3 | gb105eukp | Bplo | |
| 700354373H1 | g620041 | 34 | −26 | gb105pln | A. adeninivorans TEF gene for translation elongation factor EF-1alpha. | |
| 700353951H1 | g1621306 | 10 | 6 | gb105allp | F21G4.2 | |
| 700353027H1 | g2266661 | 50 | −17 | gb105pln | Hordeum vulgare mRNA for 14-3-3 protein (Hv1433c). | |
| 700357106H1 | g609559 | 86 | 5 | gb105eukp | S-adenosylmethionine synthase; EC 2.5.1.6 | |
| 700282464H1 | g22426 | 13 | 1 | gb105eukp | polygalacturonase | |
| 700357106H1 | g1724104 | 86 | 5 | gb105eukp | S-adenosylmethionine sythetase; methionine adenosyltransferase; EC 2.5.1.6 | |
| 700383156H1 | g414907 | 24 | −5 | gb105pln | P. pratense mRNA for pollen allergen PhlpI. | |
| 700382338H1 | g1246115 | 32 | −19 | gb105pln | major allergen Pha a 1 [Phalaris aquatica = canary grass, pollen, mRNA Partial, | |
| | | | | | 1088 nt]. | |
| 700356205H1 | g1785947 | 22 | −7 | gb105pln | Hordeum vulgare cytosolic triosephosphate isomerase mRNA, complete cds. | |
| 700354457H1 | g288373 | 37 | −55 | gb105pln | Z. mays PGp6 gene for polygalacturonase. | |
| 700382741H1 | g204667 | 26 | −1 | gb105allp | 70 kDa heat-shock-like protein | |
| 700382091H1 | g22428 | 17 | −10 | gb105eukp | polygalacturonase | |
| 700354425H1 | g1657854 | 12 | 12 | gb105pln | Triticum aestivum cold acclimation protein WCOR413 (Wcor413) mRNA, | |
| | | | | | complete cds. | |
| 700382036H1 | g2842490 | 8 | 6 | gb105eukp | F21O9.160; heat-shock protein | |
| 700354696H1 | g2154729 | 51 | −36 | gb105pln | C. dactylon mRNA for profilin 1. | |
| 700382820H1 | g206730 | 14 | 3 | gb105allp | ribosomal protein L35 | |
| 700356917H1 | g2264318 | 49 | −11 | gb105pln | Arabidopsis thaliana genomic DNA, chromosome 5, P1 clone: MUP24, complete | |
| | | | | | sequence. | |
| 700382849H1 | g1498391 | 44 | −68 | gb105pln | Zea mays actin (Maz65) gene, partial cds. | |
| 700354918H1 | g22428 | 12 | 7 | gb105eukp | polygalacturonase | |
| 700353688H1 | g255569 | 13 | 2 | gb105eukp | pollen specific protein | |
| 700355774H1 | g473205 | 13 | 17 | gb105pln | E. gunnii mRNA for mitochondrial malate dehydrogenase. | |
| 700355711H1 | g1617036 | 36 | −11 | gb105eukp | Ted2 | |
| 700356916H1 | g15988 | 76 | −25 | gb105pln | A. fatua mRNA for tetraubiquitin. | |
| 700353405H1 | g168602 | 65 | −30 | gb105pln | Zea mays regulatory protein GF14-12 mRNA, complete cds. | |
| 700382877H1 | g414907 | 26 | −2 | gb105pln | P. pratense mRNA for pollen allergen PhlpI. | |
| 700382749H1 | g1167836 | 27 | 3 | gb105allp | protein with incomplete signal sequence | |
| 700354714H1 | g1657619 | 13 | −3 | gb105eukp | AtG5; putative transmembrane protein; G5p | |
| 700354360H1 | g1616656 | 30 | −14 | gb105pln | Arabidopsis thaliana adenylosuccinate synthetase mRNA, complete cds. | |
| 700353524H1 | g20835 | 42 | 7 | gb105eukp | PHSP1; HSP70 | |
| 700356901H1 | g2252840 | 17 | 6 | gb105allp | contains regions of similarity to Haemophilus influenzae permease (SP:P38767) | |
| 700355035H1 | g975887 | 29 | −10 | gb105pln | Mesembryanthemum crystallinum myo-inositol-1-phosphate synthase mRNA, | |
| | | | | | complete cds. | |
| 700355593H1 | g414702 | 19 | −8 | gb105pln | H. lanatus mRNA for allergen Hol-lI. | |
| 700354362H1 | g288373 | 38 | −58 | gb105pln | Z. mays PGg6 gene for polygalacturonase. | |
| 700352642H1 | g1103627 | 36 | −76 | gb105pln | Z. mays Fer1 gene. | |
| 700354801H1 | g2454183 | 22 | −18 | gb105pln | Arabidopsis thaliana pyruvate dehydrogenase E1 beta subunit mRNA, nuclear gene | |
| | | | | | encoding plastid protein, complete cds. | |
| 700356069H1 | g2058277 | 59 | 15 | gb105pln | A. thaliana mRNA for AtRan1 protein. | |
| 700355918H1 | g1695882 | 11 | 1 | gb105allp | mitotic centromere-associated kinesin | |
| 700355741H1 | g166769 | 13 | 11 | gb105pln | A. thaliana heat shock protein 83 mRNA, complete cds. | |
| 700382004H1 | g561663 | 25 | −56 | gb105pln | Rice mRNA, partial homologous to ribosomal protein coding sequence. | |
| 700356533H1 | g2290202 | 7 | 6 | gb105allp | nucellin | |
| 700382822H1 | g288378 | 37 | −32 | gb105pln | Z. mays gene PG for polygalacturonase. | |
| 700354938H1 | g2154729 | 34 | −20 | gb105pln | C. dactylon mRNA for profilin 1. | |
| 700352647H1 | g1065515 | 11 | 5 | gb105eukp | F40F4.7 | |
| 700355555H1 | g2662342 | 46 | −63 | gb105pln | Oryza sativa mRNA for EF-1 alpha, complete cds. | |
| 700354894H1 | g287829 | 60 | −67 | gb105pln | Z. mays gene for polygalacturonase. | |
| 700353994H1 | g441216 | 54 | −16 | gb105pln | Tobacco mRNA for cytokinin binding protein CBP57 (S-adenosyl-L-homocystein | |
| | | | | | hydrolase), complete cds. | |
| 700353685H1 | g886403 | 25 | 4 | gb105allp | MADS box protein | |
| 700382787H1 | g348695 | 18 | −12 | gb105pln | Catharanthus roseus heat shock protein 90 mRNA, complete cds. | |
| 700357412H1 | g308902 | 26 | −8 | gb105eukp | pectate lyase | |
| 700354374H1 | g1480465 | 16 | −6 | gb105eukp | cyclophilin Ovcyp-2 | |
| 700356810H1 | g1931636 | 26 | −8 | gb105pln | Arabidopsis thaliana BAC T19D16 genomic sequence. | |
| 700354259H1 | g974781 | 34 | −41 | gb105pln | C. blumei kinetoplast met gene for cobalamine-independent methionine synthase. | |
| 700382133H1 | g2245394 | 50 | −6 | gb105eukp | putative transcription factor; ARF1-binding protein | |
| 700356814H1 | g2224914 | 27 | −25 | gb105pln | Oryza sativa beta-expansin mRNA, complete cds. | |
| 700356256H1 | g248338 | 73 | −85 | gb105pln | polyubiquitin [maize, Genomic, 3439 nt]. | |
| 700354604H1 | g1330350 | 10 | 2 | gb105eukp | C34D4.2 | |
| 700382510H1 | g22421 | 63 | −61 | gb105pln | Z. mays mRNA for polygalacturonase (clone PG3). | |
| 700382152H1 | g755711 | 14 | 6 | gb105eukp | R05H5.3 | |
| 700356413H1 | g22483 | 52 | −44 | gb105pln | Z. mays RNA for superoxide dismutase Sod4. | |
| 700354544H1 | g1946300 | 32 | 1 | gb105eukp | hypothetical protein | |
| 700353816H1 | g2642213 | 26 | 1 | gb105eukp | nitrate-induced NOI protein | |
| 700353606H1 | g2231702 | 15 | 1 | gb105eukp | AAP19-2; clathrin assembly protein AP19 homolog | |
| 700353569H1 | g2149050 | 31 | −12 | gb105pln | Arabidopsis thaliana small Ras-like GTP-binding protein (Ran3) mRNA, | |
| | | | | | complete cds. | |
| 700352620H1 | g20359 | 95 | −82 | gb105pln | Rice gene for 17S ribosomal RNA. | |
| 700382742H1 | g414702 | 17 | −7 | gb105pln | H. lanatus mRNA for allergen Hol-lI. | |
| 700356427H1 | g11243 | 38 | −15 | gb105pln | Arabidopsis thaliana mRNA for mitochondrial citrate synthetase. | |
| 700355002H1 | g2662340 | 58 | −35 | gb105pln | Oryza sativa mRNA for EF-1 alpha, complete cds. | |
| 700282505H2 | g2429086 | 18 | −1 | gb105pln | Hordeum vulgare lipoxygenase 2 (LoxC) mRNA, complete cds. | |
| 700356809H1 | g20203 | 21 | −2 | gb105pln | Rice mRNA for fructose-diphosphate aldolase (EC 4.1.2.13). | |
| 700355973H1 | g172559 | 11 | −3 | gb105eukp | Sec13; Sec13p | |
| 700382885H1 | g2511690 | 16 | 6 | gb105pln | Phaseolus vulgaris Moldavian encoding cysteine proteinase precursor (clone cp41). | |
| 700382295H1 | g187338 | 26 | −20 | gb105pln | D. carota gene for elongation factor 1A. | |
| 700382768H1 | g473359 | 31 | −2 | gb105pln | P. pratense mRNA for Phl pI allergen. | |
| 700355941H1 | g20187 | 51 | −33 | gb105pln | O. sativa gene encoding calmodulin. | |
| 700353024H1 | g2565339 | 35 | −17 | gb105pln | Lupinus luteus ribosomal protein S14 (rps14) mRNA, complete cds. | |
| 700356225H1 | g217963 | 57 | −72 | gb105pln | Zea mays mRNA for rubulose 1,5-bisphosphate carboxylase small subunit, | |
| | | | | | complete cds. | |
| 7003555590H1 | g2384759 | 37 | −20 | gb105pln | Oryza sativa GDP dissociation inhibitor protein OsGDI2 (OsGDI2) mRNA, | |
| | | | | | complete cds. | |
| 700382440H1 | g157943 | 46 | −25 | gb105eukp | Mhc | |
| 700356476H1 | g22427 | 98 | −61 | gb105pln | Z. mays gene for polygalacturonase (clone 65). | |
| 700355893H1 | g2760330 | 16 | −4 | gb105eukp | F1N21.15 | |
| 700353542H1 | g2168137 | 11 | 3 | gb105eukp | PKF1 | |
| 700382424H1 | g2226414 | 18 | 7 | gb105allp | hypothetical protein | |
| 700355825H1 | g415314 | 58 | −53 | gb105pln | Rice mRNA for NADP dependent malic enzyme, complete cds. | |
| 700354945H1 | g1184775 | 70 | −35 | gb105pln | Zea mays glyceraldehyde-3-phosphate dehydrogenase GAPC4 (gpc4) mRNA, | |
| | | | | | complete cds. | |
| 700382882H1 | g454880 | 18 | 5 | gb105pln | Rice mRNA for WSI724 protein induced by water stress, complete cds. | |
| 700355711H1 | g531095 | 17 | 5 | gb105pln | Zinnia elegans mRNA for TED2, complete cds. | |
| 700355073H1 | g414737 | 48 | 7 | gb105eukp | phosphorylates 3′-OH group of adenylylsulfate; APS kinase; EC 2.7.1.25; ATP: | |
| | | | | | adenylylsulfate-3′-phosphotransferase | |
| 700355988H1 | g311658 | 17 | −8 | gb105eukp | flavonol synthase | |
| 700355960H1 | g288611 | 67 | −79 | gb105pln | Z. mays PG gene for polygalacturonase. | |
| 700382933H1 | g147142 | 5 | 7 | gb105allp | peptidase N | |
| 700282513H2 | g2313254 | 9 | −4 | gb105allp | peptide chain release factor RF-2 (prfB) | |
| 700355816H1 | g407028 | 12 | 17 | gb105pln | Zea mays gene for Ferredoxin-NADP reductase binding protein. | |
| 700355005H1 | g498772 | 59 | −49 | gb105pln | Z. mays (cv DH5xDH7) hsp70-4 mRNA for heat shock protein 70. | |
| 700356415H1 | g2267083 | 18 | 15 | gb105pln | Symbiodinium microadriaticum calmodulin (SMCaM1) mRNA, partial cds. | |
| 700352953H1 | g606810 | 35 | −6 | gb105pln | Zea mays carbonic anhydrase mRNA, complete cds. | |
| 700355160H1 | g2160158 | 22 | 4 | gb105allp | Similar to elongation factor 1-gamma (gb\|EF1G_XENLA). ESTs gb\|T20564, | |
| | | | | | gb\|T45940, gb\|T04527 come from this gene. | |
| 700354422H1 | g414907 | 26 | −32 | gb105pln | P. pratense mRNA for pollen allergen PhlpI. | |
| 700382196H1 | g973312 | 27 | −17 | gb105pln | Arabidopsis thaliana myo-inositol 1-phosphate synthase isozyme-2 mRNA, | |
| | | | | | complete cds. | |
| 700282564H2 | g939778 | 29 | −23 | gb105pln | Zea mays MADS-box protein (ZAG3) mRNA, complete cds. | |
| 700354611H1 | g1001440 | 6 | 7 | gb105allp | beta transducin-like protein | |
| 700354248H1 | g414702 | 17 | 16 | gb105pln | H. lanatus mRNA for allergen Hol-lI. | |
| 700353546H1 | g1051108 | 39 | −27 | gb105pln | A. thaliana mRNA for adenine nucleotide translocase. | |
| 700282416H2 | g287829 | 46 | −61 | gb105pln | Z. mays gene for polygalacturonase. | |
| 700354442H1 | g575354 | 54 | −34 | gb105pln | O. sativa SC34 mRNA for tumor suppressor. | |
| 700282532H2 | g2760334 | 16 | 0 | gb105eukp | F1N21.5 | |
| 700354662H1 | g1302496 | 10 | 5 | gb105allp | ORF YNR015w | |
| 700353962H1 | g312180 | 21 | −5 | gb105pln | Z. mays GapC4 gene. | |
| 700355971H1 | g974301 | 10 | −1 | gb105pln | Chlamydomonas reinhardtii ribosomal protein L41 (RPL41) mRNA, complete cds. | |
| 700353887H1 | g1173556 | 30 | −11 | gb105pln | Oryza sativa Ory s 1 mRNA, complete cds. | |
| 700353639H1 | g22425 | 82 | −71 | gb105pln | Z. mays gene for polygalacturonase (clone 47). | |
| 700282533H2 | g432606 | 53 | −42 | gb105pln | ric1 = ras-related GTP binding protein possessing GTPase activity [Oryza sativa = | |
| | | | | | rice, Yamahoushi, callus, mRNA, 955 nt]. | |
| 700282526H2 | g21399 | 39 | −9 | gb105pln | Solanum tuberosum processed actin pseudogene. | |
| 700382462H1 | g2462732 | 20 | −17 | gb105eukp | F8A5.10 | |
| 700353576H1 | g22375 | 22 | −3 | gb105eukp | ORF | |
| 700353225H1 | g439585 | 48 | −30 | gb105pln | Hordeum vulgare calreticulin (CRH1) mRNA, partial cds. | |
| 700382308H1 | g829147 | 55 | −74 | gb105pln | Z. mays gene for cyclophilin. | |
| 700355854H1 | g2388565 | 11 | −2 | gb105eukp | YUP8H12.7 | |
| 700382439H1 | g35597 | 12 | 6 | gb105allp | PR 264 | |
| 700282591H2 | g211947 | 23 | 5 | gb105allp | hydroxymethylglutaryl-CoA lyase | |
| 700355072H1 | g1666176 | 49 | −23 | gb105pln | N. tabacum mRNA for subunit of NADH:ubiquinone oxidoreductase complex I. | |
| 700354952H1 | g1215982 | 20 | 4 | gb105allp | ribosomal protein L21 | |
| 700382042H1 | g2462746 | 21 | −9 | gb105eukp | F8A5.32 | |
| 700353543H1 | g1667593 | 57 | −34 | gb105pln | Oryza sativa transmembrane protein mRNA, complete cds. | |
| 700354340H1 | g6961 | 11 | 3 | gb105eukp | ZK637.8b | |
| 700352886H1 | g17795 | 15 | 0 | gb105eukp | Bplo | |
| 700382843H1 | g509769 | 11 | 0 | gb105eukp | seed-specific low molecular weight sulfur-rich protein | |
| 700355191H1 | g1370199 | 32 | −12 | gb105pln | L. japonicus mRNA for small GTP-binding protein, RAC1. | |
| 700352666H1 | g17681 | 25 | −10 | gb105pln | A. thaliana mRNA for Wilm's tumor suppresor homlogue. | |
| 700353843H1 | g746487 | 15 | 3 | gb105eukp | F48E8.2 | |
| 700355738H1 | g17561 | 11 | 5 | gb105allp | PROTEINASE INHIBITOR | |
| 700354231H1 | g312180 | 42 | −26 | gb105pln | Z. mays GapC4 gene. | |
| 700356038H1 | g666074 | 9 | 6 | gb105allp | protein-tyrosine-phosphatase | |
| 700282510H2 | g1519252 | 22 | 4 | gb105pln | Oryza sativa GF14-d protein mRNA, complete cds. | |
| 700382707H1 | g603269 | 32 | −14 | gb105eukp | YER036C; Yer036cp | |
| 700383095H1 | g899607 | 52 | −74 | gb105pln | Zea mays polyubiquitin (MubC5) mRNA, complete cds. | |
| 700355593H1 | g1167835 | 21 | −9 | gb105pln | H. lanatus mRNA for Hol lI protein. | |
| 700352890H1 | g2218151 | 39 | −43 | gb105pln | Vigna unguiculata type IIIa membrane protein cp-wap13 mRNA, complete cds. | |
| 700355710H1 | g173231 | 28 | −15 | gb105pln | Yeast (Saccharomyces cerevisiae) ribosomal 5S RNA-binding protein (YL3) gene, 5′ cds. | |
| 700354973H1 | g598193 | 7 | −1 | gb105allp | phosphatidylinositol 4-kinase | |
| 700382428H1 | g1305524 | 20 | −21 | gb105pln | Oryza sativa Wilms' tumor-related protein QM mRNA, partial cds. | |
| 700382055H1 | g2252869 | 37 | −8 | gb105eukp | AT0ZI1 | |
| 700353231H1 | g1136574 | 39 | −40 | gb105pln | Sorghum bicolor heat shock protein 70 (hsp70) pseudogene. | |
| 700354677H1 | g2623248 | 18 | −5 | gb105eukp | sugary1; SU1 isomylase | |
| 700354878H1 | g2104535 | 22 | −11 | gb105eukp | T10M13.13; T10M13.13 | |
| 700353723H1 | g169703 | 45 | 6 | gb105allp | ATP:pyruvate phosphotransferase | |
| 700354677H1 | g758726 | 18 | −6 | gb105eukp | Sugar1; Su1p | |
| 700382391H1 | g19280 | 43 | −29 | gb105pln | L. esculentum mRNA for enolase. | |
| 700353251H1 | g1246115 | 22 | −5 | gb105pln | major allergen Pha a 1 [Phalaris aquatica = canary grass, pollen, mRNA Partial, | |
| | | | | | 1088 nt]. | |
| 700382048H1 | g288373 | 43 | −71 | gb105pln | Z. mays PGg6 gene for polygalacturonase. | |
| 700382789H1 | g22277 | 91 | −83 | gb105pln | Maize mRNA for ferritin (clone FM2). | |
| 700355956H1 | g1805306 | 25 | −10 | gb105pln | Arabidopsis thaliana flavonol synthase mRNA, complete cds. | |
| 700356409H1 | g22144 | 98 | −62 | gb105pln | Maize anaerobically regulated gene for fructose fisphosphate aldolase (EC 4.1.2.13). | |
| 700355860H1 | g170783 | 26 | −22 | gb105pln | T. aestivum ubiquitin carrier protein mRNA. | |
| 700354267H1 | g397958 | 45 | −21 | gb105pln | Z. mays mRNA for beta-amylase. | |
| 700282414H2 | g1911581 | 20 | 11 | gb105pln | Cyn d 1 = major allergen {clone 14c1 and CD1} [Cynodon dactylon = Bermuda grass, | |
| | | | | | pollen, mRNA Partial, 759 nt]. | |
| 700356288H1 | g902585 | 27 | −23 | gb105pln | Zea mays clone MubG9 ubiquitin gene, complete cds. | |
| 700353245H1 | g255568 | 30 | −15 | gb105pln | pollen specific protein [Zea mays = corn, mRNA, 943 nt]. | |
| 700355075H1 | g2224927 | 26 | −6 | gb105eukp | EIL1; ethylene-insensitive3-like1 | |
| 700356246H1 | g1236961 | 24 | −4 | gb105eukp | hydrolysis of the cyanogenic glucoside (R)-prunasin; prunasin hydrolase precursor; | |
| | | | | | EC 3.2.1.21 | |
| 700353983H1 | g2689242 | 30 | −8 | gb105pln | A. thaliana mRNA for ubiquitin conjugating enzyme UBC2. | |
| 700353573H1 | g1173556 | 45 | −11 | gb105pln | Oryza sativa Ory s 1 mRNA, complete cds. | |
| 700354984H1 | g1171161 | 36 | 5 | gb105eukp | pectate lyase homolog | |
| 700353024H1 | g463856 | 27 | −7 | gb105pln | Chlamydomonas reinhardtii 21gr ribosomal protein S14 (CRY1) gene, complete cds. | |
| 700352825H1 | g2252856 | 16 | −0 | gb105eukp | A_TM018A10.8 | |
| 700356856H1 | g22458 | 30 | −35 | gb105pln | Z. mays pollen specific mRNA C-terminal (clone 4H7). | |
| 700352982H1 | g485376 | 89 | −58 | gb105pln | Zea mays alpha-3-tubulin gene, complete cds. | |
| 700352650H1 | g1877396 | 54 | −45 | gb105pln | R. communis mRNA for shaggy-like kinase, partial. | |
| 700354681H1 | g313139 | 73 | −67 | gb105pln | Z. mays ZmPRO2 mRNA for profilin 2. | |
| 700354224H1 | g22425 | 63 | 5 | gb105pln | Z. mays gene for polygalacturonase (clone 47). | |
| 700383175H1 | g414907 | 28 | −13 | gb105pln | P. pratense mRNA for pollen allergen PhlpI. | |
| 700354513H1 | g2058454 | 45 | −2 | gb105eukp | cyclic nucleotide gated channel protein; CaMB-channel protein | |
| 700355054H1 | g406280 | 45 | −21 | gb105pln | F. trinervia ftcpt mRNA for triose phosphate/phosphate translocator. | |
| 700356468H1 | g498747 | 12 | 7 | gb105eukp | Pir7b | |
| 700355594H1 | g1872473 | 7 | 4 | gb105eukp | TA-MT; delta-24-sterol methyltransferase | |
| 700353685H1 | g2529339 | 15 | 4 | gb105pln | Zea maize AGAMOUS homologue mRNA, complete cds. | |
| 700352672H1 | g348695 | 41 | −29 | gb105pln | Catharanthus roseus heat shock protein 90 mRNA, complete cds. | |
| 700352775H1 | g22416 | 62 | −63 | gb105pln | Z. mays mRNA for polygalacturonase (clone PG1). | |
| 700355069H1 | g21399 | 37 | −3 | gb105pln | Solanum tuberosum processed actin pseudogene. | |
| 700357410H1 | g1871186 | 16 | −8 | gb105eukp | T06D20.14 | |
| 700355918H1 | g1572665 | 12 | 0 | gb105eukp | kinesin-like protein K6 | |
| 700353243H1 | g167961 | 25 | −2 | gb105pln | D. caryophyllus S-adenosylmethionine synthetase (CARSAM2) mRNA, complete cds. | |
| 700382445H1 | g396209 | 21 | −4 | gb105pln | S. polyrrhiza mRNA for D-myo-inositol-3-phosphate synthase. | |
| 700382025H1 | g166379 | 21 | −25 | gb105pln | Alfalfa glucose-regulated endoplasmic reticular protein mRNA, complete cds. | |
| 700356111H1 | g600768 | 26 | −46 | gb105pln | Oryza sativa cyclophilin 2 (Cyp2) mRNA, complete cds. | |
| 700353523H1 | g22425 | 47 | −42 | gb105pln | Z. mays gene for polygalacturonase (clone 47). | |
| 700282543H2 | g496683 | 8 | 7 | gb105eukp | YBL0838; B-130 protein | |
| 700382905H1 | g2384677 | 10 | −2 | gb105eukp | AtKT5; putative potassium transporter AtKT5p | |
| 700382166H1 | g927571 | 75 | −74 | gb105pln | Z. mays mRNA for calreticulin precursor. | |
| 700355311H1 | g929961 | 19 | −4 | gb105eukp | ribosomal protein | |
| 700382633H1 | g2992 | 19 | 4 | gb105pln | Neurospora crassa crp-1 mRNA for ribosomal protein homologous to Yeast cyH2 gene | |
| | | | | | encoding L29. | |
| 700382657H1 | g22747 | 43 | −19 | gb105pln | L. longiflorum mRNA for actin depolymerizing factor. | |
| 700357423H1 | g22427 | 54 | −64 | gb105pln | Z. mays gene for polygalacturonase (clone 65). | |
| 700355780H1 | g545715 | 40 | 7 | gb105allp | metallothionein MT-0 isoform, metallothionein-0 [human, monocytes, Peptide Partial, | |
| | | | | | 31 aa] | |
| 700383152H1 | g473604 | 53 | −43 | gb105pln | Zea mays W-22 histone H2B mRNA, complete cds. | |
| 700355338H1 | g454881 | 21 | −18 | gb105pln | Rice gene for thioredoxin h, complete cds. | |
| 700356916H1 | g248338 | 100 | −36 | gb105pln | polyubiquitin [maize, Genomic, 3439 nt]. | |
| 700382016H1 | g22416 | 40 | −84 | gb105pln | Z. mays mRNA for polygalacturonase (clone PG1). | |
| 700352650H1 | g1161511 | 54 | −45 | gb105pln | A. thaliana mRNA for shaggy-like kinase etha. | |
| 700383122H1 | g2276460 | 13 | 0 | gb105allp | multispanning membrane protein | |
| 700382389H1 | g2827140 | 30 | −23 | gb105pln | Arabidopsis thaliana cellulose synthase catalytic subunit (Ath-A) mRNA, complete cds. | |
| 700355735H1 | g1209700 | 26 | −27 | gb105pln | Zea mays ribosomal protein L12 mRNA, complete cds. | |
| 700382295H1 | g18438 | 29 | −23 | gb105pln | Euglena gracilis tef mRNA for elongation factor EF-1alpha. | |
| 700355401H1 | g409074 | 7 | 5 | gb105allp | HBp15/L22 | |
| 700382658H1 | g722327 | 64 | −82 | gb105pln | Zea mays clone Zm-Rab2-B GTP binding protein (rab2) mRNA, complete cds. | |
| 700382956H1 | g463251 | 23 | −1 | gb105pln | M. sativa (Nagyszenasi) mRNA for ribosomal protein RL5. | |
| 700355867H1 | g1707856 | 59 | −53 | gb105pln | T. aestivum mRNA for obtusifoliol 14-alpha-demethylase (CYP51), clone w516, partial. | |
| 700355760H1 | g22125 | 65 | −44 | gb105pln | Zea mays Adh2-N gene for alcohol dehydrogenase 2. | |
| 700282456H2 | g1490417 | 23 | −11 | gb105eukp | mor; global transcriptional regulation; 89B helicase | |
| 700355960H1 | g288378 | 49 | −58 | gb105pln | Z. mays gene PG for polygalacturonase. | |
| 700382057H1 | g2230757 | 18 | −11 | gb105eukp | J10; dnaJ-like protein | |
| 700357413H1 | g1236950 | 41 | −30 | gb105pln | Glycine max nucleoside diphosphate kinase mRNA, complete cds. | |
| 700354788H1 | g2464946 | 24 | −11 | gb105eukp | purple acid phosphatase | |
| 700282527H2 | g168313 | 20 | 9 | gb105pln | L. perenne pollen allergen (Lol pI) gene, 3′ end. | |
| 700355460H1 | g2673867 | 20 | 2 | gb105pln | Antirrhinum majus mRNA for fimbriata-associated protein 1, partial. | |
| 700353620H1 | g1575129 | 89 | −86 | gb105pln | Zea mays lumenal binding protein cBiPe3 mRNA, complete cds. | |
| 700382320H1 | g2656025 | 47 | −39 | gb105pln | Arabidopsis thaliana genomic DNA, chromosome 5, P1 clone: MCD7. | |
| 700382310H1 | g1911581 | 25 | −20 | gb105pln | Cyn d 1 = major allergen {clone 14c1 and CD1} [pu Cynodon dactylon = Bermuda | |
| | | | | | grass, pollen, mRNA Partial, 759 nt]. | |
| 700382269H1 | g170205 | 24 | −23 | gb105pln | N. plumbaginifolia H+-translocating ATPase mRNA. | |
| 700382993H1 | g2330862 | 16 | −4 | gb105eukp | SPAC6F12.16; hypothetical helicase | |
| 700355541H1 | g433038 | 14 | 16 | gb105pln | Zea mays W-22 clone cDNA7 retroelement PREM-1-containing mRNA. | |
| 700353138H1 | g22416 | 46 | −61 | gb105pln | Z. mays mRNA for polygalacturonase (clone PG1). | |
| 700383090H1 | g625108 | 48 | −8 | gb105eukp | YLR388W; Ylr388wp | |
| 700353247H1 | g2062169 | 13 | 2 | gb105eukp | T02O04.17; ABC transporter (PDR5-like) isolog | |
| 700352845H1 | g1841357 | 12 | 2 | gb105eukp | rps11; mitochondrial ribosomal protein S11 (nuclear encoded) | |
| 700382339H1 | g669002 | 55 | −47 | gb105pln | Glycine max calnexin mRNA, complete cds. | |
| 700353822H1 | g2618599 | 21 | −15 | gb105pln | Arabidopsis thaliana genomic DNA, chromosome 5, P1 clone: MBD2, complete | |
| | | | | | sequence. | |
| 700353796H1 | g2244780 | 34 | −10 | gb105eukp | hypothetical protein | |
| 700382264H1 | g2842482 | 10 | 6 | gb105eukp | F21O9.80; protein phosphatase 2C-like protein | |
| 700355941H1 | g310314 | 51 | −33 | gb105pln | Oryza sativa calmodulin gene, complete cds. | |
| 700383085H1 | g22458 | 59 | −61 | gb105pln | Z. mays pollen specific mRNA C-terminal (clone 4H7). | |
| 700357427H1 | g551482 | 85 | −2 | gb105pln | Zea mays ABA- and ripening-inducible-like protein mRNA, complete cds. | |
| 700357183H1 | g2584827 | 10 | 16 | gb105pln | Sequence of BAC F12F1 from Arabidopsis thaliana chromosome 1, complete sequence. | |
| 700355484H1 | g20163 | 30 | −16 | gb105pln | O. sativa Rrl5 mRNA for 5S ribosomal RNA. | |
| 700354265H1 | g1354865 | 24 | −4 | gb105eukp | COI; cytochrome oxidase | |
| 700353030H1 | g414702 | 41 | −4 | gb105pln | H. lanatus mRNA for allergen Hol-lI. | |
| 700356880H1 | g287829 | 96 | −21 | gb105pln | Z. mays gene for polygalacturonase. | |
| 700353138H1 | g288366 | 47 | −63 | gb105pln | Z. mays PGg14 gene for polygalacturonase. | |
| 700382763H1 | g1041240 | 88 | −43 | gb105allp | gamma-adducin | |
| 700354776H1 | g30295 | 10 | −1 | gb105allp | cytochrome c oxidase subunit VIb (AA 1-86) | |
| 700282415H2 | g1899188 | 24 | −8 | gb105eukp | DNA binding protein ACBF | |
| 700382777H1 | g313137 | 33 | −81 | gb105pln | Z. mays ZmPRO1 mRNA for profilin 1. | |
| 700383073H1 | g968901 | 12 | −2 | gb105pn | Rice mRNA for ribosomal protein S8, complete cds. | |
| 700382282H1 | g533692 | 18 | −3 | gb105eukp | protease inhibitor | |
| 700353854H1 | g414702 | 45 | −30 | gb105pln | H. lanatus mRNA for allergen Hol-lI. | |
| 700352862H1 | g1890352 | 27 | 5 | gb105eukp | at12; transcription factor L2 | |
| 700355935H1 | g248336 | 75 | −75 | gb105pln | polyubiquitin [maize, Genomic, 3841 nt]. | |
| 700382016H1 | g22421 | 40 | −84 | gb105pln | Z. mays mRNA for polygalacturonase (clone PG3). | |
| 700356796H1 | g454880 | 25 | 14 | gb105pln | Rice mRNA for WSI724 protein induced by water stress, complete cds. | |
| 700355192H1 | g22651 | 49 | −57 | gb105pln | H. vulgare mRNA for GRP94 homologue. | |
| 700355409H1 | g1890352 | 11 | 4 | gb105eukp | at12; transcription factor L2 | |
| 700355052H1 | g1399512 | 20 | −1 | gb105eukp | repE; repE | |
| 700382310H1 | g19495 | 30 | −20 | gb105pln | L. perenne RNA for Lol pI gene. | |
| 700353643H1 | g484043 | 8 | 6 | gb105allp | ribosomal protein S12 | |
| 700352771H1 | g1553130 | 38 | −30 | gb105pln | Gossypium hirsutum ribosomal protein L44 isoform b (RL44), complete cds. | |
| 700382663H1 | g2435514 | 17 | −17 | gb105eukp | A_TM017A05.2 | |
| 700352754H1 | g1707854 | 62 | −46 | gb105pln | T. aestivum mRNA for obtusifoliol 14-alpha-demethylase (CYP51), clone w51, partial. | |
| 700382924H1 | g2317909 | 12 | 1 | gb105allp | CER1-like protein | |
| 700382825H1 | g5271 | 24 | −9 | gb105pln | Yeast (Saccharomyces cerevisiae) p68 gene. | |
| 700353820H1 | g20238 | 22 | 3 | gb105eukp | GOS2 | |
| 700282505H2 | g2182266 | 27 | −18 | gb105pln | Hordeum vulgare lipoxygenase (LoxB) mRNA, complete cds. | |
| 700354704H1 | g5056 | 19 | −6 | gb105pln | Yeast (Saccharomyces pombe) rpgL29 gene for ribosomal protein L29. | |
| 700353435H1 | g169785 | 43 | −5 | gb105pln | Rice cytochrome c (OsCc-1) gene, complete cds. | |
| 700353164H1 | g168396 | 12 | 16 | gb105pln | Zea mays auxin-binding protein (abp1) gene, exons 1-5 and complete cds. | |
| 700382023H1 | g218160 | 37 | −22 | gb105pln | Oryza sativa mRNA for elongation factor 1 beta′. | |
| 700355437H1 | g886430 | 19 | −8 | gb105eukp | P2; putative NADPH oxidoreductase; zeta-crystallin homologue | |
| 700354841H1 | g531057 | 26 | −21 | gb105pln | Wheat mRNA for protein H2B-8, complete cds. | |
| 700382302H1 | g1532167 | 26 | −4 | gb105eukp | AT.I.24-5 | |
| 700354973H1 | g1477958 | 7 | −1 | gb105allp | type 3 phosphatidylinositol 4-kinase, type 3 PtdIns kinase [cattle, brain, Peptide Partial, | |
| | | | | | 1466 aa] | |
| 700382742H1 | g414907 | 16 | −7 | gb105pln | P. pratense mRNA for pollen allergen PhlpI. | |
| 700382673H1 | g156372 | 27 | −14 | gb105eukp | mlc-1; myosin light chain 1 | |
| 700382325H1 | g2429289 | 13 | −1 | gb105pln | Oryza sativa peroxidase (POX5.1) mRNA, complete cds. | |
| 700355226H1 | g414702 | 17 | 3 | gb105pln | H. lanatus mRNA for allergen Hol-lI. | |
| 700382634H1 | g168665 | 48 | −57 | gb105pln | Maize 16-kDa zein-2 mRNA, complete cds. | |
| 700356427H1 | g483509 | 38 | −15 | gb105pln | S. tuberosum mRNA for mitochondrial citrate-synthase. | |
| 700356969H1 | g313141 | 59 | −33 | gb105pln | Z. mays ZmPRO3 mRNA for profilin 3. | |
| 700354490H1 | g1399266 | 18 | −12 | gb105pln | Arabidopsis thaliana calmodulin-domain protein kinase CDPK isoform 4 (CPK4) | |
| | | | | | mRNA, partial cds. | |
| 700353025H1 | g1519252 | 50 | −52 | gb105pln | Oryza sativa GF14-d protein mRNA, complete cds. | |
| 700352603H1 | g899607 | 93 | −83 | gb105pln | Zea mays polyubiquitin (MubC5) mRNA, complete cds. | |
| 700382843H1 | g16427 | 14 | 3 | gb105eukp | protease inhibitor II | |
| 700282411H2 | g1167835 | 27 | −10 | gb105pln | H. lanatus mRNA for Hol lI protein. | |
| 700382119H1 | g16210 | 18 | 4 | gb105pln | Arabidopsis thaliana calnexin homolog. | |
| 700382023H1 | g218340 | 37 | −23 | gb105pln | Triticum aestivum mRNA for elongation factor 1 beta′. | |
| 700382314H1 | g1184775 | 64 | −48 | gb105pln | Zea mays glyceraldehyde-3-phosphate dehydrogenase GAPC4 (gpc4) mRNA, | |
| | | | | | complete cds. | |
| 700355818H1 | g293901 | 69 | −76 | gb105pln | Zea mays Zea mI gene, complete cds. | |
| 700354594H1 | g17917 | 18 | 6 | gb105eukp | S-receptor kinase related protein | |
| 700352620H1 | g1777706 | 97 | −81 | gb105pln | Zea mays 18S ribosomal RNA gene, partial sequence. | |
| 700382272H1 | g20373 | 49 | −58 | gb105pln | O. sativa mRNA for sucrose synthase. | |
| 700353275H1 | g255569 | 12 | −0 | gb105eukp | pollen specific protein | |
| 700355896H1 | g473359 | 27 | −8 | gb105pln | P. pratense mRNA for Phl pI allergen. | |
| 700352780H1 | g1890351 | 22 | −1 | gb105pln | A. thaliana mRNA for transcription factor L2. | |
| 700353917H1 | g22418 | 64 | 1 | gb105pln | Z. mays gene for polygalacturonase (clone 17). | |
| 700353887H1 | g1911581 | 27 | −10 | gb105pln | Cyn d 1 = major allergen {clone 14c1 and CD1} [Cynodon dactylon = Bermuda grass, | |
| | | | | | pollen, mRNA Partial, 759 nt]. | |
| 700356564H1 | g20323 | 45 | −48 | gb105pln | O. sativa RAc1 gene for actin. | |
| 700282422H2 | g168313 | 18 | 10 | gb105pln | L. perenne pollen allergen (Lol pI) gene, 3′ end. | |
| 700354947H1 | g549983 | 79 | −17 | gb105pln | Pennisetum ciliare possible apospory-associated mRNA clone pSUB C, complete cds. | |
| 700353291H1 | g1395186 | 19 | 4 | gb105allp | proteasomal ATPase (Tat-binding protein7) | |
| 700352841H1 | g2739435 | 12 | 6 | gb105allp | (p)ppGpp synthetase | |
| 700382268H1 | g2160144 | 5 | 6 | gb105allp | Strong similarity to Arabidopsis oligopeptide transporter (gb\|X77503). | |
| 700353168H1 | g1184773 | 46 | −48 | gb105pln | Zea mays glyceraldehyde-3-phosphate dehydrogenase GAPC3 (gpc3) mRNA, | |
| | | | | | complete cds. | |
| 700352809H1 | g18138 | 16 | −3 | gb105pln | C. roseus cpr mRNA for NADPH-ferrihemoprotein reductase. | |
| 700354644H1 | g1184775 | 89 | −72 | gb105pln | Zea mays glyceraldehyde-3-phosphate dehydrogenase GAPC4 (gpc4) mRNA, | |
| | | | | | complete cds. | |
| 700353568H1 | g1814407 | 36 | 4 | gb105eukp | PMA; plasma membrane proton pump; H+-transporting ATPase; EC 3.6.1.35 | |
| 700356143H1 | g20310 | 13 | 6 | gb105eukp | pollen specific gene | |
| 700355296H1 | g1314155 | 43 | 4 | gb105allp | unknown | |
| 700357106H1 | g1778820 | 77 | 4 | gb105pln | Oryza sativa S-adenosyl-L-methionine synthetase (pOS-SAMS2) mRNA, complete cds. | |
| 700382359H1 | g2398828 | 31 | −9 | gb105pln | Solanum tuberosum mRNA for mitochondrial uncoupling protein. | |
| 700382209H1 | g2384757 | 37 | −15 | gb105pln | Oryza sativa GDP dissociation inhibitor protein OsGDI1 (OsGDI1) mRNA, | |
| | | | | | complete cds. | |
| 700356985H1 | g506533 | 51 | −11 | gb105pln | N. tabacum PKTL7 mRNA for protein kinase. | |
| 700355958H1 | g1498391 | 46 | −71 | gb105pln | Zea mays actin (Maz65) gene, partial cds. | |
| 700353256H1 | g2654009 | 39 | −16 | gb105eukp | Rop4; Rho-like GTP binding protein | |
| 700353074H1 | g434329 | 63 | −63 | gb105pln | Z. mays mRNA gs1-4 for glutamine synthetase. | |
| 700282471H2 | g166813 | 12 | 6 | gb105eukp | pro25; serine threonine kinase | |
| 700382266H1 | g511665 | 33 | −32 | gb105pln | Rice gene for aspartic protease, complete cds. | |
| 700355582H1 | g1616612 | 18 | −8 | gb105eukp | small GTP-binding protein | |
| 700382196H1 | g396209 | 42 | −35 | gb105pln | S. polyrrhiza mRNA for D-myo-inositol-3-phosphate synthase. | |
| 700354874H1 | g902583 | 33 | −49 | gb105pln | Zea mays clone MubG1 ubiquitin gene, complete cds. | |
| 700382753H1 | g2360945 | 13 | 4 | gb105allp | 34 kDa Mov34 isologue | |
| 700354317H1 | g2342495 | 18 | 1 | gb105pln | Ananas comosus mRNA for bromelain, complete cds. | |
| 700353132H1 | g1399270 | 19 | 1 | gb105pln | Arabidopsis thaliana calmodulin-domain protein kinase CDPK isoform 2 (CPK2) | |
| | | | | | mRNA, complete cds. | |
| 700382393H1 | g487286 | 44 | 1 | gb105pln | Rice mRNA EN053, partial sequence. | |
| 700356038H1 | g167862 | 11 | 5 | gb105allp | protein tyrosine phosphatase | |
| 700355064H1 | g1519252 | 32 | −33 | gb105pln | Oryza sativa GF14-d protein mRNA, complete cds. | |
| 700355719H1 | g1049441 | 14 | 6 | gb105allp | similar to B. subtilis glycerol-3-phosphate cytidylyltransferase (SP:TAGD_BACSU, | |
| | | | | | P27623) | |
| 700354543H1 | g1556430 | 50 | −11 | gb105pln | Populus hybrid mRNA for citrate synthase. | |
| 700353835H1 | g1532047 | 37 | −26 | gb105pln | O. sativa mRNA for S-adenosylmethionine decarboxylase. | |
| 700352838H1 | g2252856 | 27 | 0 | gb105eukp | A_TM018A10.8 | |
| 700382315H1 | g499011 | 79 | −71 | gb105pln | S. vulgare SoAc1 mRNA | |
| 700354660H1 | g2529657 | 15 | 2 | gb105pln | Arabidopsis thaliana chromosome II BAC T30B22 genomic sequence, complete | |
| | | | | | sequence. | |
| 700382741H1 | g1661134 | 26 | −1 | gb105allp | heat shock 70 protein | |
| 700354379H1 | g1185553 | 36 | −54 | gb105pln | Zea mays glyceraldehyde-3-phosphate dehydrogenase (gpc2) gene, complete cds. | |
| 700355245H1 | g397958 | 97 | −85 | gb105pln | Z. mays mRNA for beta-amylase. | |
| 700355696H1 | g22426 | 11 | 8 | gb105allp | polygalacturonase | |
| 700356086H1 | g22375 | 9 | 2 | gb105eukp | ORF | |
| 700382104H1 | g1293846 | 9 | 5 | gb105eukp | C42D8.3 | |
| 700356196H1 | g2446980 | 32 | −9 | gb105pln | Arabidopsis thaliana mRNA for AtGDI2, complete cds. | |
| 700382061H1 | g1815759 | 14 | 7 | gb105allp | pollen-specific protein | |
| 700355541H1 | g2832242 | 14 | 16 | gb105pln | Zea mays 22-kDa alpha zein gene cluster, complete sequence. | |
| 700353022H1 | g1246115 | 26 | −8 | gb105pln | major allergen Pha a 1 [Phalaris aquatica = canary grass, pollen, mRNA Partial, | |
| | | | | | 1088 nt]. | |
| 700382952H1 | g313139 | 30 | −48 | gb105pln | Z. mays ZmPRO2 mRNA for profilin 2. | |
| 700353963H1 | g288378 | 81 | −12 | gb105pln | Z. mays gene PG for polygalacturonase. | |
| 700352605H1 | g1825459 | 7 | 4 | gb105allp | Dac gIII allergen | |
| 700354271H1 | g22428 | 16 | −0 | gb105eukp | polygalacturonase | |
| 700353569H1 | g395071 | 34 | −15 | gb105pln | V. faba guanine nucleotide regulatory protein mRNA, complete CDS. | |
| 700352887H1 | g790478 | 58 | −12 | gb105pln | N. tabacum mRNA for inorganic pyrophosphatase (TVP9 clone). | |
| 700353243H1 | g450548 | 34 | −13 | gb105pln | O. sativa (pRSAM-1) gene for S-adenosyl methionine synthetase. | |
| 700382661H1 | g171091 | 16 | 7 | gb105eukp | ASF1; derepression of silent loci when overexpressed | |
| 700354663H1 | g21955 | 22 | 2 | gb105eukp | beta-glucosidase; EC 3.2.1.21 | |
| 700383086H1 | g1814400 | 37 | −31 | gb105pln | Mesembryanthemum crystallinum phosphoglucomutase (PGM) mRNA, complete cds. | |
| 700382053H1 | g1370470 | 9 | 5 | gb105eukp | ALG5 | |
| 700355229H1 | g288366 | 74 | −71 | gb105pln | Z. mays PGg14 gene for polygalacturonase. | |
| 700353609H1 | g1668772 | 23 | 15 | gb105pln | O. sativa mRNA for SMT3 protein. | |
| 700352769H1 | g606810 | 38 | −19 | gb105pln | Zea mays carbonic anhydrase mRNA, complete cds. | |
| 700355519H1 | g499011 | 35 | −47 | gb105pln | S. vulgare SoAc1 mRNA. | |
| 700353573H1 | g1911581 | 37 | −5 | gb105pln | Cyn d 1 = major allergen {clone 14c1 and CD1} [Cynodon dactylon = Bermuda grass, | |
| | | | | | pollen, mRNA Partial, 759 nt]. | |
| 700357183H1 | g2781363 | 23 | −9 | gb105eukp | F24O1.19 | |
| 700356927H1 | g498040 | 36 | −4 | gb105eukp | ORF | |
| 700282414H2 | g414907 | 19 | 13 | gb105pln | P. pratense mRNA for pollen allergen PhlpI. | |
| 700382661H1 | g1008304 | 16 | 7 | gb105allp | ORF YJL115w | |
| 700355765H1 | g295850 | 83 | 4 | gb105eukp | fructose bisphosphate aldolase | |
| 700353834H1 | g414702 | 16 | 5 | gb105pln | H. lanatus mRNA for allergen Hol-lI. | |
| 700352776H1 | g899607 | 52 | −48 | gb105pln | Zea mays polyubiquitin (MubC5) mRNA, complete cds. | |
| 700356595H1 | g22427 | 85 | −56 | gb105pln | Z. mays gene for polygalacturonase (clone 65). | |
| 700382448H1 | g20255 | 34 | −49 | gb105pln | O. sativa gene for heat shock protein 82 HSP82. | |
| 700382440H1 | g157944 | 46 | −25 | gb105eukp | Mhc | |
| 700382017H1 | g2264313 | 16 | −11 | gb105pln | Arabidopsis thaliana genomic DNA,chromosome 5, P1 clone: MOP10, complete | |
| | | | | | sequence. | |
| 700354325H1 | g1498385 | 45 | −55 | gb105pln | Zea mays actin (Maz87) gene, partial cds. | |
| 700357441H1 | g473359 | 22 | −4 | gb105pln | P. pratense mRNA for Phl pI allergen. | |
| 700355064H1 | g22606 | 24 | −10 | gb105pln | H. vulgare mRNA for 14-3-3 protein homologue (14-3-3a). | |
| 700353025H1 | g1519248 | 32 | −30 | gb105pln | Oryza sativa GF14-b protein mRNA, complete cds. | |
| 700382283H1 | g871510 | 15 | 7 | gb105eukp | small GTP-binding protein | |
| 700355711H1 | g531096 | 26 | −4 | gb105eukp | TED2 | |
| 700356537H1 | g538427 | 40 | 10 | gb105pln | Oryza sativa ribosomal protein S16 mRNA, complete cds. | |
| 700353891H1 | g28547 | 30 | −22 | gb105allp | alpha globin | |
| 700356584H1 | g22458 | 98 | −23 | gb105pln | Z. mays pollen specific mRNA C-terminal (clone 4H7). | |
| 700355433H1 | g2275016 | 17 | −7 | gb105allp | elastase | |
| 700382127H1 | g16210 | 28 | −7 | gb105pln | Arabidopsis thaliana calnexin homolog. | |
| 700382157H1 | g1184775 | 79 | −60 | gb105pln | Zea mays glyceraldehyde-3-phosphate dehydrogenase GAPC4 (gpc4) mRNA, | |
| | | | | | complete cds. | |
| 700356567H1 | g473359 | 42 | −12 | gb105pln | P. pratense mRNA for Phl pI allergen. | |
| 700356413H1 | g22484 | 61 | −46 | gb105pln | Z. mays RNA for superoxide dismutase Sod4A. | |
| 700355842H1 | g2209343 | 9 | 2 | gb105allp | copper transport protein Atox1 | |
| 700357168H1 | g288378 | 86 | −92 | gb105pln | Z. mays gene PG for polygalacturonase. | |
| 700354380H1 | g487291 | 27 | −5 | gb105pln | Rice mRNA EN171, partial sequence. | |
| 700355583H1 | g1477683 | 25 | −10 | gb105pln | Oryza sativa SNF1-related protein kinase (RSk1) mRNA, complete cds. | |
| 700353120H1 | g1008444 | 36 | −26 | gb105pln | T. aestivum mRNA for profilin (clone TaPRO3). | |
| 700354805H1 | g1906825 | 9 | 15 | gb105pln | A. thaliana hsp81.2 gene. | |
| 700355825H1 | g168527 | 63 | −57 | gb105pln | Maize NADP-dependent malic enzyme (Me1) mRNA, complete cds. | |
| 700382327H1 | g1655482 | 15 | −1 | gb105eukp | delta subunit of mitochondrial F1-ATPase | |
| 700382068H1 | g2160172 | 12 | −1 | gb105eukp | F21M12.20 | |
| 700354550H1 | g166548 | 40 | −0 | gb105pln | Avena sativa vacuolar H+-ATPase 16 kDa proteolipid subunit (vatp-P1) mRNA, | |
| | | | | | complete cds. | |
| 700382850H1 | g2583106 | 25 | −5 | gb105pln | Arabidopsis thaliana chromosome II BAC F4L23 genomic sequence, complete sequence. | |
| 700354577H1 | g290054 | 40 | −1 | gb105pln | Dictyostelium discoideum HIV1 TAT-binding protein homologous protein mRNA, | |
| | | | | | complete cds. | |
| 700356969H1 | g313137 | 40 | 1 | gb105pln | Z. mays ZmPRO1 mRNA for profilin 1. | |
| 700382076H1 | g1769897 | 8 | 6 | gb105eukp | lectin receptor kinase | |
| 700382640H1 | g984697 | 27 | −14 | gb105pln | Yeast (Saccharomyces pombe) chromosome I cosmid c24H6. | |
| 700382181H1 | g599624 | 15 | −24 | gb105pln | A. thaliana mRNA for aconitase (ZAPII). | |
| 700354958H1 | g1154858 | 51 | −45 | gb105pln | H. vulgare mRNA for L24 ribosomal protein. | |
| 700353054H1 | g508502 | 11 | 2 | gb105allp | sulfite oxidase | |
| 700382655H1 | g1718236 | 11 | 0 | gb105allp | (1,4)-beta-xylan endohydrolase, isoenzyme X-I | |
| 700353278H1 | g414702 | 23 | −5 | gb105pln | H. lanatus mRNA for allergen Hol-lI. | |
| 700382920H1 | g288373 | 28 | −58 | gb105pln | Z. mays PGg6 gene for polygalacturonase. | |
| 700354972H1 | g2258468 | 35 | −2 | gb105pln | Oryza sativa replication protein A1 (Os-RPA1) mRNA, complete cds. | |
| 700355542H1 | g433044 | 19 | −30 | gb105pln | Zea mays W-22 clone PREM-1D retroelement PREM-1, partial sequence. | |
| 700355064H1 | g1519248 | 26 | −12 | gb105pln | Oryza sativa GF14-b protein mRNA, complete cds. | |
| 700383022H1 | g1246115 | 22 | −15 | gb105pln | major allergen Pha a 1 [Phalaris aquatica = canary grass, pollen, mRNA Partial, | |
| | | | | | 1088 nt]. | |
| 700382985H1 | g599992 | 9 | 6 | gb105eukp | KGD1; 2-oxoglutarate dehydrogenase E1 component | |
| 700383135H1 | g2224911 | 28 | −13 | gb105eukp | somatic embryogenesis receptor-like kinase | |
| 700382605H1 | g1825459 | 4 | 7 | gb105eukp | Dac gIII allergen | |
| 700383167H1 | g435174 | 28 | −5 | gb105pln | A. sativa (Pewi) ASTCP-K36 mRNA for t complex polypeptide 1. | |
| 700353435H1 | g218240 | 47 | −5 | gb105pln | Rice mRNA for cytochrome C (T76 gene), partial sequence. | |
| 700382880H1 | g22420 | 62 | −37 | gb105pln | Z. mays mRNA for polygalacturonase (clone PG2). | |
| 700382628H1 | g1145694 | 41 | −41 | gb105pln | Arabidopsis thaliana actin (ACT3) gene, complete cds. | |
| 700357138H1 | g288611 | 91 | −87 | gb105pln | Z. mays PG gene for polygalacturonase. | |
| 700382311H1 | g216632 | 11 | 4 | gb105allp | ORF2 | |
| 700356964H1 | g1293668 | 44 | 4 | gb105eukp | ARAC5; GTP-binding protein | |
| 700382269H1 | g218178 | 45 | −51 | gb105pln | Rice OSA1 gene for H+-ATPase, complete cds. | |
| 700382790H1 | g22416 | 68 | −59 | gb105pln | Z. mays mRNA for polygalacturonase (clone PG1). | |
| 700355010H1 | g22149 | 98 | −60 | gb105pln | Z. mays mRNA for alpha-tubulin 3. | |
| 700356258H1 | g1575127 | 81 | −79 | gb105pln | Zea mays lumenal binding protein cBiPe2 mRNA, complete cds. | |
| 700353789H1 | g288611 | 34 | −46 | gb105pln | Z. mays PG gene for polygalacturonase. | |
| 700353608H1 | g2414636 | 23 | −10 | gb105eukp | SPAC3A11.08; hypothetical protein | |
| 700352717H1 | g1161339 | 5 | 7 | gb105eukp | ERG25; C-4 sterol methyl oxidase | |
| 700352613H1 | g177216 | 17 | 8 | gb105allp | 4F2 heavy chain antigen | |
| 700356032H1 | g2645166 | 28 | −10 | gb105pln | Oryza sativa mRNA, similar to ubiquitin conjugating enzyme. | |
| 700352639H1 | g2352924 | 22 | 4 | gb105pln | Petroselinum crispum plastidic 3-deoxy-D-arabino-heptulosonate 7-phosphate synthase 2 | |
| | | | | | (pDAHPS2) mRNA, nuclear gene encoding plastid protein, complete cds. | |
| 700383050H1 | g21233 | 20 | −23 | gb105pln | S. oleracea AHRI mRNA for acetohydroxy acid reductoisomerase. | |
| 700353943H1 | g587563 | 30 | −15 | gb105pln | S. tuberosum mRNA for beta-II MPP. | |
| 700383165H1 | g339771 | 15 | −0 | gb105allp | ORF2 contains a reverse transcriptase domain.; ORF2 | |
| 700382486H1 | g303843 | 57 | −58 | gb105pln | Rice mRNA for eukaryotic initiation factor 4A, complete cds. | |
| 700382148H1 | g790969 | 52 | 5 | gb105pln | Rice mRNA for aldolase C-1, complete cds. | |
| 700354555H1 | g416256 | 34 | 6 | gb105pln | Rice mRNA for H+-ATPase, partial sequence. | |
| 700282585H2 | g168313 | 21 | −3 | gb105pln | L. perenne pollen allergen (Lol pI) gene, 3′ end. | |
| 700356574H1 | g22427 | 67 | −79 | gb105pln | Z. mays gene for polygalacturonase (clone 65). | |
| 700356235H1 | g1895091 | 18 | −2 | gb105eukp | ARG7; acetylornithine acetyltransferase | |
| 700355627H1 | g248336 | 18 | −5 | gb105pln | polyubiquitin [maize, Genomic, 3841 nt]. | |
| 700354905H1 | g644491 | 55 | −64 | gb105pln | Corn mRNA for elongation factor 1A. | |
| 700382770H1 | g559921 | 22 | 1 | gb105eukp | axi 1 | |
| 700382937H1 | g531031 | 39 | −35 | gb105pln | Pennsisetum ciliare apomixis-associated mRNA. | |
| 700355778H1 | g1839188 | 38 | −9 | gb105eukp | RHD3; putative GTP-binding protein; root hair defective 3 | |
| 700352994H1 | g290275 | 77 | −3 | gb105eukp | M(3)95A; multifunctional activity and location; ribosomal protein S3/AP endonuclease | |
| | | | | | DNA repair protein | |
| 700383176H1 | g21492 | 28 | −13 | gb105pln | S. tuberosum mRNA for mitochondrial processing peptidase. | |
| 700354351H1 | g32709 | 16 | 2 | gb105allp | IFP53 | |
| 700354351H1 | g295582 | 30 | −2 | gb105eukp | YME1; causes an increased escape of DNA from mitochondria; putative ATPase; Yme1p | |
| 700382446H1 | g2459435 | 19 | −11 | gb105eukp | F4P9.30; putative serine carboxypeptidase | |
| 700356289H1 | g2244806 | 9 | 3 | gb105eukp | hypothetical protein | |
| 700382985H1 | g763221 | 9 | 6 | gb105eukp | KGD1; 2-oxoglutarate dehydrogenase | |
| 700356188H1 | g170225 | 13 | 2 | gb105eukp | DAHPS-1; 3-deoxy-D-arabino-heptulosonate 7-phosphate synthaase; EC 4.1.2.15 | |
| 700357426H1 | g1486425 | 6 | 3 | gb105allp | BioA homologue | |
| 700354467H1 | g218142 | 13 | −24 | gb105pln | Rice mRNA for aspartic proteinase, complete cds. | |
| 700353233H1 | g288611 | 71 | −73 | gb105pln | Z. mays PG gene for polygalacturonase. | |
| 700355242H1 | g556672 | 33 | −19 | gb105pln | S. cereale (Halo) chloroplast mRNA for heat-shock protein. | |
| 700354917H1 | g22416 | 98 | −63 | gb105pln | Z. mays mRNA for polygalacturonase (clone PG1). | |
| 700353030H1 | g414907 | 42 | −5 | gb105pln | P. pratense mRNA for pollen allergen PhlpI. | |
| 700354615H1 | g2766712 | 20 | 0 | gb105pln | Arabidopsis thaliana ecotype Kl-0 chromomethylase (CMT1) mRNA, complete cds. | |
| 700352989H1 | g22416 | 72 | −56 | gb105pln | Z. mays mRNA for polygalacturonase (clone PG1). | |
| 700356055H1 | g288378 | 50 | −62 | gb105pln | Z. mays gene PG for polygalacturonase. | |
| 700352712H1 | g600768 | 28 | −27 | gb105pln | Oryza sativa cyclophilin 2 (Cyp2) mRNA, complete cds. | |
| 700353275H1 | g1815759 | 15 | −2 | gb105eukp | pollen-specific protein | |
| 700382435H1 | g287829 | 78 | −4 | gb105pln | Z. mays gene for polygalacturonase. | |
| 700353854H1 | g414907 | 45 | −29 | gb105pln | P. pratense mRNA for pollen allergen PhlpI. | |
| 700382737H1 | g313137 | 55 | −80 | gb105pln | Z. mays ZmPRO1 mRNA for profilin 1. | |
| 700356169H1 | g288611 | 71 | −78 | gb105pln | Z. mays PG gene for polygalacturonase. | |
| 700354891H1 | g2226414 | 16 | 6 | gb105eukp | SPBC31F10.03; hypothetical protein | |
| 700353794H1 | g313137 | 26 | −18 | gb105pln | Z. mays ZmPRO1 mRNA for profilin 1. | |
| 700382168H1 | g1399567 | 41 | −56 | gb105pln | Podophyllum peltatum nuclear 26S ribosomal RNA gene, partial sequence. | |
| 700357491H1 | g1707363 | 47 | −12 | gb105pln | A. thaliana mRNA for AATP2. | |
| 700383176H1 | g2062153 | 14 | 5 | gb105pln | Arabidopsis thaliana chromosome III BAC T02O04 genomic sequence, complete | |
| | | | | | sequence. | |
| 700382826H1 | g1777706 | 57 | −63 | gb105pln | Zea mays 18S ribosomal RNA gene, partial sequence. | |
| 700356779H1 | g2190543 | 24 | 3 | gb105eukp | F5I14.6 | |
| 700356442H1 | g288373 | 98 | −59 | gb105pln | Z. mays PGg6 gene for polygalacturonase. | |
| 700355589H1 | g2065531 | 29 | −27 | gb105eukp | Cel3; endo-1,4-beta-glucanase; EC 3.2.1.4 | |
| 700356190H1 | g169989 | 18 | 5 | gb105allp | NADPH-specific isocitrate dehydrogenase | |
| 700352627H1 | g2673901 | 19 | 7 | gb105pln | Arabidopsis thaliana chromosome II BAC T24P15 genomic sequence, complete | |
| | | | | | sequence. | |
| 700382044H1 | g22427 | 90 | −85 | gb105pln | Z. mays gene for polygalacturonase (clone 65). | |
| 700356122H1 | g402903 | 17 | −8 | gb105pln | Arabidopsis thaliana Columbia laminin receptor-like protein mRNA, complete cds. | |
| 700383095H1 | g777757 | 43 | −57 | gb105pln | Saccharum hybrid (clone SCUBI561) polyubiquitin mRNA, complete cds. | |
| 700353633H1 | g2654869 | 23 | −2 | gb105pln | Oryza sativa RbohAOsp mRNA, partial cds. | |
| 700355921H1 | g2281115 | 27 | −16 | gb105eukp | T10P11.14.1; putative cullin-like 1 protein | |
| 700352605H1 | g415896 | 8 | 3 | gb105eukp | PHL PII, pollen allergen | |
| 700355191H1 | g2645642 | 32 | −12 | gb105pln | Arabidopsis thaliana Rho-like GTP binding protein (Rop6) mRNA, complete cds. | |
| 700354776H1 | g2098574 | 10 | −1 | gb105allp | COXG | |
| 700353016H1 | g168460 | 76 | −7 | gb105pln | Zea mays cyclophilin (CyP) mRNA, complete cds. | |
| 700355563H1 | g414703 | 16 | −3 | gb105eukp | allergen Hol-lI | |
| 700353045H1 | g22747 | 27 | −30 | gb105pln | L. longiflorum mRNA for actin depolymerizing factor. | |
| 700382868H1 | g561923 | 16 | −11 | gb105eukp | M01F1.2 | |
| 700357407H1 | g1667262 | 22 | −8 | gb105eukp | B0035.1 | |
| 700353690H1 | g551289 | 34 | −53 | gb105pln | Z. mays (W22) phosphoglycerate mutase gene exons 2-8. | |
| 700355824H1 | g5230 | 13 | 7 | gb105pln | U. maydis encoding iron-sulphur subunit of succinate dehydrogenase. | |
| 700355732H1 | g2224901 | 28 | −5 | gb105eukp | PcMYB1; DNA binding protein; PcMYB1 protein | |
| 700282456H2 | g171965 | 26 | −18 | gb105eukp | MOT1; Mot1 | |
| 700356115H1 | g288373 | 98 | −27 | gb105pln | Z. mays PGg6 gene for polygalacturonase. | |
| 700355163H1 | g288366 | 96 | −45 | gb105pln | Z. mays PGg14 gene for polygalacturonase. | |
| 700382721H1 | g20323 | 53 | −46 | gb105pln | O. sativa RAc1 gene for actin. | |
| 700356236H1 | g2160155 | 14 | 14 | gb105pln | Sequence of BAC F21M12 from Arabidopsis thaliana chromosome 1, complete | |
| | | | | | sequence. | |
| 700353690H1 | g168587 | 67 | −55 | gb105pln | Zea mays cofactor-independent phosphoglycerate mutase mRNA, complete cds. | |
| 700383172H1 | g34234 | 59 | −7 | gb105allp | laminin-binding protein | |
| 700382820H1 | g57702 | 14 | 3 | gb105allp | ribosomal protein L35 (AA 1-123) | |
| 700382711H1 | g414702 | 22 | −3 | gb105pln | H. lanatus mRNA for allergen Hol-lI. | |
| 700356164H1 | g288373 | 54 | −59 | gb105pln | Z. mays PGg6 gene for polygalacturonase. | |
| 700382148H1 | g218157 | 58 | 6 | gb105eukp | cytoplasmic aldolase | |
| 700355956H1 | g311657 | 26 | −12 | gb105pln | P. hybrida flavonol synthase mRNA. | |
| 700382966H1 | g2828278 | 17 | 10 | gb105pln | Arabidopsis thaliana DNA chromosome 4, BAC clone T18B16 (ESSAII project). | |
| 700282445H2 | g1741868 | 25 | −10 | gb105allp | SDF2 | |
| 700382448H1 | g218135 | 23 | −51 | gb105pln | Rice mRNA for heat shock protein 90KD (AK108 gene), partial sequence. | |
| 700357429H1 | g2511530 | 73 | −43 | gb105pn | Eleusine indica alpha tubulin 1 (TUA1) mRNA, complete cds. | |
| 700353986H1 | g2330689 | 15 | 10 | gb105pln | Yeast (Saccaromyces pombe) chromosome I cosmid c16E8. | |
| 700353191H1 | g312083 | 10 | 2 | gb105eukp | NUO-10.5 | |
| 700382015H1 | g1495248 | 25 | −41 | gb105pln | A. thaliana mRNA for unknown protein, eRF1-3 gene. | |
| 700282416H2 | g288366 | 46 | −62 | gb105pln | Z. mays PGg14 gene for polygalacturonase. | |
| 700354405H1 | g431267 | 22 | 11 | gb105pln | Arabidopsis thaliana ubiquitin conjugating enzyme (UBC6) gene, complete cds. | |
| 700355966H1 | g2832707 | 25 | 3 | gb105eukp | T9A21.180; translation initiation factor eIF-2 gamma chain-like protein | |
| 700353576H1 | g540581 | 22 | −3 | gb105eukp | mudrA | |
| 700383072H1 | g2222798 | 6 | 8 | gb105eukp | gibberellin 20-oxidase | |
| 700382424H1 | g2827524 | 24 | 2 | gb105allp | predicted protein | |
| 700352630H1 | g435428 | 33 | −6 | gb105pln | Arabidopsis thaliana GTP-binding protein mRNA. | |
| 700353071H1 | g166379 | 38 | −20 | gb105pln | Alfalfa glucose-regulated endoplasmic reticular protein mRNA, complete cds. | |
| 700357444H1 | g623343 | 23 | 2 | gb105pln | S. oleracea (subito) fad6 mRNA. | |
| 700355560H1 | g1167835 | 25 | −8 | gb105pln | H. lanatus mRNA for Hol lI protein. | |
| 700382374H1 | g2599103 | 20 | 1 | gb105pln | Dunaliella salina 60S ribosomal protein (DSRP1) mRNA, complete cds. | |
| 700357145H1 | g551266 | 25 | −10 | gb105pln | P. argentatum (line 11591) 60S acidic ribosomal protein P2 mRNA. | |
| 700356463H1 | g1906812 | 68 | 1 | gb105allp | inducible carbonyl reductgase | |
| 700354280H1 | g22418 | 73 | −57 | gb105pln | Z. mays gene for polygalacturonase (clone 17). | |
| 700352650H1 | g2182028 | 73 | −62 | gb105pln | Oryza sp. mRNA for shaggy-like kinase etha. | |
| 700352683H1 | g599722 | 22 | −17 | gb105pln | C. melo mRNA for aconitase (UNI-ZAPxR). | |
| 700355972H1 | g306875 | 37 | −24 | gb105allp | C protein | |
| 700352955H1 | g560476 | 78 | −20 | gb105allp | ribosomal protein L4 | |
| 700353162H1 | g22416 | 50 | −58 | gb105pln | Z. mays mRNA for polygalacturonase (clone PG1). | |
| 700382281H1 | g533692 | 11 | 2 | gb105allp | protease inhibitor | |
| 700382777H1 | g453975 | 23 | −30 | gb105pln | P. pratense mRNA for profilin-Phl p XI. | |
| 700354627H1 | g1658192 | 50 | −61 | gb105pln | Sorghum bicolor obtusifoliol 14-alpha demethylase CYP51 (CYP51) mRNA, complete cds. | |
| 700382302H1 | g1532168 | 25 | −4 | gb105eukp | AT.I.24-6 | |
| 700382560H1 | g312180 | 25 | −24 | gb105pln | Z. mays GapC4 gene. | |
| 700357469H1 | g22416 | 48 | −3 | gb105pln | Z. mays mRNA for polygalacturonase (clone PG1). | |
| 700382249H1 | g2814799 | 29 | −9 | gb105eukp | ZK858.6 | |
| 700355207H1 | g22458 | 60 | −85 | gb105pln | Z. mays pollen specific mRNA C-terminal (clone 4H7). | |
| 700382311H1 | g1773190 | 11 | 3 | gb105allp | similar to E. coli yhaE | |
| 700354322H1 | g22425 | 44 | −38 | gb105pln | Z. mays gene for polygalacturonase (clone 47). | |
| 700356039H1 | g22416 | 88 | −79 | gb105pln | Z. mays mRNA for polygalacturonase (clone PG1). | |
| 700352920H1 | g872058 | 26 | 7 | gb105allp | C14A4.4 | |
| 700353129H1 | g1399556 | 14 | −10 | gb105pln | Caltha palustris nuclear 26S ribosomal RNA gene, partial sequence. | |
| 700354947H1 | g531481 | 79 | −17 | gb105pln | P. ciliare (Higgins) apospory associated mRNA, 1398bp. | |
| 700383125H1 | g1302656 | 24 | −5 | gb105allp | translocon-associated protein delta | |
| 700355489H1 | g438253 | 40 | −28 | gb105pln | S. tuberosum mRNA for T subunit of glycine decarboxylase multi-enxyme complex. | |
| 700282577H2 | g1109831 | 40 | −24 | gb105eukp | C16A3.9 | |
| 700356976H1 | g1490417 | 54 | −3 | gb105eukp | mor; global transcriptional regulation; 89B helicase | |
| 700355966H1 | g902603 | 25 | 1 | gb105allp | translation initiation factor | |
| 700382240H1 | g1051108 | 37 | −17 | gb105pln | A. thaliana mRNA for adenine nucleotide translocase. | |
| 700354619H1 | g2583148 | 20 | −6 | gb105eukp | pfk; 6-phospho-1-fructokinase; EC 2.7.1.11 | |
| 700353596H1 | g22458 | 97 | −11 | gb105pln | Z. mays pollen specific mRNA C-terminal (clone 4H7). | |
| 700352736H1 | g2239261 | 38 | −65 | gb105pln | Zea Mays mRNA for pectin methylesterase-like protein. | |
| 700382868H1 | g963095 | 16 | −11 | gb105eukp | 60S ribosomal protein L13A | |
| 700355911H1 | g393449 | 24 | −22 | gb105pln | S. cereale mRNA for beta-amylase. | |
| 700355192H1 | g1906827 | 12 | 14 | gb105pln | A. thaliana hsp81.4 gene. | |
| 700353037H1 | g1143387 | 53 | −22 | gb105pln | A. thaliana mRNA for class III ADH. | |
| 700354360H1 | g1616658 | 64 | −47 | gb105pln | Triticum aestivum adenylosuccinate synthetase mRNA, partial cds. | |
| 700382367H1 | g2351065 | 12 | 12 | gb105pln | Arabidopsis thaliana genomic DNA, chromosome 5, P1 clone: MHF15. | |
| 700356848H1 | g2160158 | 30 | −16 | gb105eukp | F21M12.3 | |
| 700282409H2 | g313137 | 24 | −8 | gb105pln | Z. mays AmPRO1 mRNA for profilin 1. | |
| 700383086H1 | g1881692 | 64 | −70 | gb105pln | Zea mays phosphoglucomutase mRNA, partial cds. | |
| 700357138H1 | g288378 | 76 | −73 | gb105pln | Z. mays gene PG for polygalacturonase. | |
| 700356976H1 | g171965 | 54 | −3 | gb105eukp | MOT1; Mot1 | |
| 700383156H1 | g1246115 | 21 | −2 | gb105pln | major allergen Pha a 1 [Phalaris aquatica = canary grass, pollen, mRNA Partial, | |
| | | | | | 1088 nt]. | |
| 700354705H1 | g2191182 | 8 | 2 | gb105eukp | A_TM021B04.2 | |
| 700383018H1 | g506470 | 19 | 7 | gb105pln | N. tabacum mRNA pNLA-35. | |
| 700353789H1 | g288378 | 31 | −30 | gb105pln | Z. mays gene PG for polygalacturonase. | |
| 700356533H1 | g2290204 | 7 | 6 | gb105eukp | putatively associated with nucellar cell programmed cell death; nucellin; EC 3.4.23 | |
| 700354575H1 | g287829 | 86 | −30 | gb105pln | Z. mays gene for polygalacturonase. | |
| 700382148H1 | g168419 | 62 | 1 | gb105pln | Maize (Z. mays) aldolase mRNA, complete cds. | |
| 700382064H1 | g431164 | 36 | −25 | gb105eukp | LIM17; ORF | |
| 700382628H1 | g166581 | 38 | −39 | gb105pln | A. thaliana AAc1 gene encoding actin-1, complete cds. | |
| 700356084H1 | g288378 | 52 | −59 | gb105pln | Z. mays gene PG for polygalacturonase. | |
| 700355073H1 | g450235 | 48 | 7 | gb105allp | APS kinase | |
| 700383193H1 | g1815758 | 20 | 5 | gb105pln | Phalaris coerulescens pollen-specific protein mRNA, complete cds. | |
| 700382257H1 | g482937 | 42 | −40 | gb105pln | N. tabacum mRNA for pyruvate kinase (plastid isozyme). | |
| 700355594H1 | g1458245 | 14 | −4 | gb105eukp | F54D11.1 | |
| 700353834H1 | g414907 | 16 | 7 | gb105pln | P. pratense mRNA for pollen allergen PhlpI. | |
| 700356050H1 | g2668745 | 100 | −85 | gb105pln | Zea mays inorganic pyrophosphatase (IPP) mRNA, complete cds. | |
| 700353816H1 | g2642215 | 25 | 2 | gb105eukp | NOI protein | |
| 700353152H1 | g1330253 | 43 | 13 | gb105pln | Zea mays calcium-dependent protein kinase mRNA, complete cds. | |
| 700356985H1 | g2244788 | 30 | 9 | gb105pln | Arabidopsis thaliana DNA chromosome 4, ESSA I contig fragment No. 1. | |
| 700353614H1 | g1710150 | 34 | −27 | gb105pln | Arabidopsis thaliana proline iminopeptidase mRNA, complete cds. | |
| 700352784H1 | g576817 | 45 | −20 | gb105eukp | Ape; DNA repair protein | |
| 700354553H1 | g2347209 | 59 | −9 | gb105eukp | T09D09.10; EGF receptor like protein isolog | |
| 700353763H1 | g1877523 | 25 | −5 | gb105pln | Arabidopsis thaliana BAC T7I23, complete sequence. | |
| 700355573H1 | g19850 | 19 | −9 | gb105pln | N. tabacum mRNA for pre-pro-cysteine proteinase. | |
| 700353429H1 | g168608 | 72 | −5 | gb105pln | Maize 17S ribosomal RNA gene and flanks. | |
| 700382237H1 | g556672 | 21 | 2 | gb105pln | S. cereale (Halo) chloroplast mRNA for heat-shock protein. | |
| 700355330H1 | g16112 | 45 | −46 | gb105pln | Avena sativa mRNA for phytochrome (AP4). | |
| 700383057H1 | g984677 | 30 | −11 | gb105pln | P. sativum mRNA for lipoamide dehydrogenase. | |
| 700355075H1 | g2224933 | 20 | −7 | gb105eukp | EIN3; ethylene-insensitive3 | |
| 700382104H1 | g927798 | 14 | −3 | gb105eukp | YDR531W; Ydr531wp | |
| 700355818H1 | g1911581 | 30 | −21 | gb105pln | Cyn d 1 = major allergen {clone 14c1 and CD1} [Cynodon dactylon = Bermuda grass, | |
| | | | | | pollen, mRNA Partial, 759 nt]. | |
| 700382972H1 | g2415701 | 19 | −14 | gb105pln | P. pratense mRNA for profilin 4. | |
| 700382351H1 | g1209258 | 19 | −1 | gb105eukp | protease inhibitior II | |
| 700354724H1 | g971283 | 40 | −36 | gb105pln | Rice mRNA for ribosomal protein S31, complete cds. | |
| 700352816H1 | g22458 | 73 | −30 | gb105pln | Z. mays pollen specific mRNA C-terminal (clone 4H7). | |
| 700282478H2 | g293901 | 35 | −17 | gb105pln | Zea mays Zea mI gene, complete cds. | |
| 700282415H2 | g520596 | 24 | −5 | gb105eukp | MRE2; Mre2 protein | |
| 700282533H2 | g1381677 | 40 | −31 | gb105pln | Glycine max small GTP-binding protein (sra2) mRNA, complete cds. | |
| 700383073H1 | g1498052 | 12 | −1 | gb105pln | Zea mays ribosomal protein S8 mRNA, complete cds. | |
| 700356169H1 | g288378 | 58 | −60 | gb105pln | Z. mays gene PG for polygalacturonase. | |
| 700282438H2 | g1323748 | 12 | 6 | gb105allp | thiol protease | |
| 700357492H1 | g534915 | 33 | −21 | gb105pln | S. tuberosum (Desiree) ppa mRNA for soluble inorganic pyrophosphatase. | |
| 700354271H1 | g288612 | 17 | −0 | gb105eukp | PG; polygalacturonase | |
| 700382715H1 | g13004 | 27 | −0 | gb105allp | URF 1 (NADH dehydrogenase subunit) | |
| 700382607H1 | g16836 | 20 | 2 | gb105allp | probable protease inhibitor P322 precursor (Bowman-Birk) | |
| 700382305H1 | g1103585 | 4 | 8 | gb105allp | laminin beta 2 chain | |
| 700356833H1 | g598075 | 17 | −11 | gb105eukp | KAS III; 3-ketoacyl-acyl carrier protein synthase III (KAS III) | |
| 700354713H1 | g170687 | 27 | −7 | gb105pln | Triticum aestivum DNA binding protein (EmBP-1c) mRNA, partial cds. | |
| 700354248H1 | g414908 | 22 | 8 | gb105eukp | pollen allergen Phl pI | |
| 700382688H1 | g1931579 | 9 | 2 | gb105allp | O-GlcNAc transferase, p110 subunit | |
| 700382002H1 | g600768 | 36 | −36 | gb105pln | Oryza sativa cyclophilin 2 (Cyp2) mRNA, complete cds. | |
| 700352954H1 | g2431770 | 100 | −50 | gb105pln | Zea mays acidic ribosomal protein P2b (rpp2b) mRNA, complete cds. | |
| 700354340H1 | g1067097 | 11 | 3 | gb105eukp | ZK637.8a | |
| 700354250H1 | g854177 | 15 | 2 | gb105allp | RNA polymerase II subunit hRPB17 | |
| 700356950H1 | g1122316 | 52 | −2 | gb105pln | P. glaucum mRNA for heat shock protein, HSP 17.9. | |
| 700356144H1 | g288373 | 34 | −55 | gb105pln | Z. mays PGg6 gene for polygalacturonase. | |
| 700383115H1 | g54006 | 30 | −6 | gb105allp | ribosomal protein S12 (AA 1-132) | |
| 700356990H1 | g22421 | 98 | −38 | gb105pln | Z. mays mRNA for polygalacturonase (clone PG3). | |
| 700355945H1 | g600768 | 50 | −46 | gb105pln | Oryza sativa cyclophilin 2 (Cyp2) mRNA, complete cds. | |
| 700353609H1 | g1668773 | 30 | −1 | gb105eukp | smt3; ubiquitin-like protein | |
| 700357187H1 | g19495 | 29 | −22 | gb105pln | L. perenne RNA for Lol pI gene. | |
| 700354747H1 | g170434 | 20 | −9 | gb105pln | Tomato ATP-dependent protease (CD4B) gene, complete cds. | |
| 700353435H1 | g429010 | 50 | −5 | gb105pln | Rice mRNA for cytochrome c (gene name SS393), partial cds. | |
| 700382392H1 | g2827559 | 9 | 8 | gb105eukp | T12H17.210; predicted protein | |
| 700353633H1 | g1235568 | 23 | −2 | gb105pln | O. sativa mRNA for NAD(P)H oxidase. | |
| 700357449H1 | g1839597 | 65 | −5 | gb105eukp | calcium/calmodulin-dependent protein kinase homolog\|CaM kinase homlog\|MCK1 | |
| 700357492H1 | g2258073 | 46 | −37 | gb105pln | Hordeum vulgare var. distichum soluble inorganic pyrophosphatase (Ipp) mRNA, | |
| | | | | | complete cds. | |
| 700382142H1 | g2293565 | 54 | −36 | gb105pln | Oryza sativa ADP-ribosylation factor 1 (Os-ARF1) mRNA, complete cds. | |
| 700354991H1 | g1217994 | 48 | −1 | gb105eukp | cell plate formation; SDL12A | |
| 700356911H1 | g22421 | 96 | −36 | gb105pln | Z. mays mRNA for polygalacturonase (clone PG3). | |
| 700356445H1 | g1246115 | 20 | 6 | gb105pln | major allergen Pha a 1 [Phalaris aquatica = canary grass, pollen, mRNA Partial, | |
| | | | | | 1088 nt]. | |
| 700353867H1 | g17797 | 15 | −2 | gb105eukp | Bplo | |
| 700352835H1 | g1872162 | 52 | −42 | gb105pln | Arabidopsis thaliana DnaJ homolog (atj) mRNA, complete cds. | |
| 700282447H2 | g577611 | 47 | −36 | gb105pln | Zea mays CRT1 gene for calcium-binding protein. | |
| 700382269H1 | g497239 | 29 | −27 | gb105pln | Zea mays W22 plasma-membrane H+ ATPase (Zmpma1) mRNA, partial cds. | |
| 700282464H1 | g22428 | 12 | 0 | gb105eukp | polygalacturonase | |
| 700356880H1 | g288366 | 98 | −21 | gb105pln | Z. mays PGg14 gene for polygalacturonase. | |
| 700354485H1 | g886400 | 47 | −30 | gb105pln | Oryza sativa MADS-box protein (MADS2) mRNA, complete cds. | |
| 700383194H1 | g168316 | 14 | −6 | gb105eukp | Lol pI; pollen allergen | |
| 700383036H1 | g216535 | 14 | −1 | gb105allp | sensor-regulator protein | |
| 700282486H2 | g1263301 | 29 | −20 | gb105pln | Pisum sativum mitochondrial pyruvate dehydrogenase E1 alpha subunit mRNA, | |
| | | | | | complete cds. | |
| 700354338H1 | g18759 | 11 | 7 | gb105eukp | 28 kD preprotein | |
| 700357164H1 | g533692 | 21 | −3 | gb105eukp | protease inhibitor | |
| 700356479H1 | g939784 | 32 | −4 | gb105pln | Zea mays MADS-box protein (ZAP1) mRNA, complete cds. | |
| 700355014H1 | g1814402 | 44 | −32 | gb105pln | Mesembryanthemum crystallinum methionine synthase (MetE) mRNA, complete cds. | |
| 700383132H1 | g1167836 | 20 | 3 | gb105eukp | hol lI; major group I allergen; protein with incomplete signal sequence | |
| 700383037H1 | g1532047 | 11 | 12 | gb105pln | O. sativa mRNA for S-adenosylmethionine decarboxylase. | |
| 700382344H1 | g1246115 | 23 | −6 | gb105pln | major allergen Pha a 1 [Phalaris aquatica = canary grass, pollen, mRNA Partial, | |
| | | | | | 1088 nt]. | |
| 700356163H1 | g166926 | 9 | −3 | gb105eukp | DNA-damage sensitive. | |
| 700354741H1 | g945023 | 39 | −1 | gb105allp | methylenetetrahydrofolate reductase | |
| 700383038H1 | g395077 | 39 | −19 | gb105eukp | ribosomal protein L37a | |
| 700356511H1 | g22427 | 44 | −65 | gb105pln | Z. mays gene for polygalacturonase (clone 65). | |
| 700382933H1 | g147144 | 5 | 7 | gb105allp | aminopeptidase N | |
| 700382501H1 | g1136119 | 43 | −39 | gb105pln | O. sativa mRNA for alpha-tubulin (clone OSTA-111). | |
| 700355956H1 | g1805308 | 25 | −10 | gb105pln | Arabidopsis thaliana flavonol synthase mRNA, complete cds. | |
| 700355426H1 | g575292 | 9 | 2 | gb105eukp | BKIN2; SNF1-related protein kinase | |
| 700355005H1 | g498774 | 55 | −47 | gb105pln | Z. mays (cv DH5xDH7) hsp70-5 mRNA for heat shock protein 70. | |
| 700382380H1 | g2213594 | 49 | −24 | gb105eukp | T7N9.14 | |
| 700354955H1 | g1217609 | 26 | −5 | gb105allp | Csa-19 homologue | |
| 700353606H1 | g2262169 | 14 | 1 | gb105eukp | F5J6.14; clathrin adaptor protein small chain subunit (AP19 protein) | |
| 700355273H1 | g22458 | 49 | −67 | gb105pln | Z. mays pollen specific mRNA C-termina; (clone 4H7). | |
| 700354408H1 | g2522194 | 40 | −26 | gb105pln | Triticum aestivum ornithine/acetylornithine aminotransferase mRNA, partial cds. | |
| 700352765H1 | g311330 | 9 | 12 | gb105pln | S. vulgare ltp1 gene. | |
| 700382246H1 | g22416 | 65 | −69 | gb105pln | Z. mays mRNA for polygalacturonase (clone PG1). | |
| 700356969H1 | g453975 | 39 | 2 | gb105pln | P. pratense mRNA for profilin-Phl p XI. | |
| 700354459H1 | g2665671 | 37 | −35 | gb105pln | Glycine max proteasome IOTA subunit mRNA, complete cds. | |
| 700352868H1 | g1495251 | 33 | −4 | gb105eukp | heat-shock protein | |
| 700356441H1 | g1825645 | 18 | −2 | gb105eukp | F46F11.4 | |
| 700354663H1 | g804656 | 32 | −2 | gb105eukp | BGO60; beta-glucosidase | |
| 700282491H2 | g470958 | 45 | −17 | gb105pln | Echinodorus cordifolius 18S ribosomal RNA (18S rRNA), ca. bp 294 to 543 in mature | |
| | | | | | rRNA. | |
| 700354330H1 | g1771781 | 22 | −15 | gb105pln | T. aestivum mRNA for beta-amylase. | |
| 700355083H1 | g2181184 | 29 | −13 | gb105eukp | JR3 protein | |
| 700355856H1 | g2330673 | 10 | 5 | gb105eukp | rp122; 60S ribosomal protein | |
| 700355663H1 | g2529386 | 20 | −5 | gb105pln | Zea mays triosephosphate isomerase 1 gene, exon 2-9 and complete cds. | |
| 700355258H1 | g21692 | 49 | 11 | gb105pln | T. aestivum mRNA 1 for cathepsin B (2529). | |
| 700355010H1 | g1556445 | 60 | −33 | gb105pln | Hordeum vulgare alpha tubulin (tubA) mRNA, complete cds. | |
| 700382815H1 | g2160155 | 16 | 10 | gb105pln | Sequence of BAC F21M12 from Arabidopsis thaliana chromosome 1, complete | |
| | | | | | sequence. | |
| 700382493H1 | g414908 | 10 | 1 | gb105allp | pollen allergen Phl pI | |
| 700354638H1 | g2213424 | 24 | −21 | gb105pln | Citrus paradisi mRNA for hypothetical protein. | |
| 700353641H1 | g168490 | 71 | −54 | gb105pln | Maize glutathione S-transferase (GST-I) mRNA, complete cds. | |
| 700355323H1 | g19495 | 23 | 9 | gb105pln | L. perenne RNA for Lol pI gene. | |
| 700353119H1 | g1321660 | 23 | 9 | gb105pln | Rice mRNA for ascorbate peroxidase, complete cds. | |
| 700353064H1 | g313137 | 34 | −75 | gb105pln | Z. mays ZmPRO1 mRNA for profilin 1. | |
| 700354309H1 | g644491 | 96 | −93 | gb105pln | Corn mRNA for elongation factor 1A. | |
| 700353855H1 | g2213586 | 7 | 8 | gb105eukp | T7N9.6 | |
| 700382711H1 | g414907 | 22 | −3 | gb105pln | P. pratense mRNA for pollen allergen PhlpI. | |
| 700352919H1 | g20163 | 40 | −7 | gb105pln | O. sativa Rr15 mRNA for 5S ribosomal RNA. | |
| 700382510H1 | g22423 | 63 | −63 | gb105pln | Z. mays mRNA for polygalacturonase (clone PG4). | |
| 700356575H1 | g313141 | 27 | −67 | gb105pln | Z. mays ZmPRO3 mRNA for profilin 3. | |
| 700353135H1 | g1654002 | 17 | −1 | gb105allp | Sop2p-like protein | |
| 700356248H1 | g899607 | 61 | −27 | gb105pln | Zea mays polyubiquitin (MubC5) mRNA, complete cds. | |
| 700352793H1 | g1707639 | 72 | −55 | gb105pln | O. sativa mRNA for transcription activator, GAMyb. | |
| 700382892H1 | g1184773 | 39 | −56 | gb105pln | Zea mays glyceraldehyde-3-phosphate dehydrogenase GAPC3 (gpc3) mRNA, | |
| | | | | | complete cds. | |
| 700356130H1 | g1911765 | 9 | 1 | gb105eukp | iEP4; iEP4 | |
| 700382389H1 | g2827142 | 36 | −29 | gb105pln | Arabidopsis thaliana cellulose synthase catalytic subunit (Ath-B) mRNA, complete cds. | |
| 700357440H1 | g2351070 | 12 | 17 | gb105pln | Arabidopsis thaliana genomic DNA, chromosome 5, P1 clone: MTH12. | |
| 700382866H1 | g1143392 | 32 | −13 | gb105eukp | uridine diphosphate glucose epimerase; EC 5.1.3.2 | |
| 700354274H1 | g2547025 | 36 | −16 | gb105allp | XY40 protein | |
| 700382181H1 | g868002 | 32 | −28 | gb105pln | Pumpkin mRNA for aconitase, complete cds. | |
| 700356137H1 | g1707867 | 59 | −74 | gb105pln | Z. mays mRNA for 40S ribosomal subunit protein S21. | |
| 700357428H1 | g20310 | 15 | 2 | gb105eukp | pollen specific gene | |
| 700353258H1 | g414907 | 25 | −9 | gb105pln | P. pratense mRNA for pollen allergen PhlpI. | |
| 700354657H1 | g20255 | 55 | −44 | gb105pln | O. sativa gene for heat shock protein 82 HSP82. | |
| 700353723H1 | g169705 | 45 | 6 | gb105eukp | ATP:pyruvate phosphotransferase; EC 2.7.1.40; PK-p-beta | |
| 700352693H1 | g2244993 | 17 | 4 | gb105eukp | similarity to AMP-activated protein kinase beta | |
| 700355969H1 | g1419684 | 33 | −17 | gb105pln | M. sativa mRNA for TCTP-like protein. | |
| 700355754H1 | g1246115 | 18 | −26 | gb105pln | major allergen Pha a 1 [Phalaris aquatica = canary grass, pollen, mRNA Partial, | |
| | | | | | 1088 nt]. | |
| 700352809H1 | g2580498 | 21 | −10 | gb105pln | Eschscholtzia californica NADPH:ferrihemoprotein oxidoreductase mRNA, | |
| | | | | | complete cds. | |
| 700382608H1 | g22416 | 96 | −89 | gb105pln | Z. mays mRNA for polygalacturonase (clone PG1). | |
| 700357187H1 | g1167835 | 32 | −23 | gb105pln | H. lanatus mRNA for Hol lI protein. | |
| 700352659H1 | g1655678 | 21 | −0 | gb105pln | P. sylvestris mRNA for 3-hydroxy-3-methylglutaryl-CoA synthase. | |
| 700357430H1 | g1673354 | 24 | 6 | gb105allp | salt-stress induced hydrophobic peptide | |
| 700355492H1 | g313137 | 49 | −29 | gb105pln | Z. mays ZmPRO1 mRNA for profilin 1. | |
| 700355460H1 | g2673869 | 22 | −0 | gb105pln | Antirrhinum majus mRNA for fimbriata-associated protein 2, partial. | |
| 700354410H1 | g1143501 | 31 | −29 | gb105pln | H. vulgare mRNA for ADP-glucose pyrophosphorylase small subunit (1902 bp). | |
| 700354542H1 | g2331300 | 33 | −48 | gb105pln | Zea mays ribosomal protein S4 type I (rps4) mRNA, complete cds. | |
| 700354852H1 | g313026 | 19 | 4 | gb105pln | L. esculentum rp138 mRNA for ribosomal protein L38. | |
| 700382824H1 | g248336 | 66 | −73 | gb105pln | polyubiquitin [maize, Genomic, 3841 nt]. | |
| 700355992H1 | g1825645 | 42 | −8 | gb105eukp | F46F11.4 | |
| 700382737H1 | g453975 | 40 | −27 | gb105pln | P. pratense mRNA for profilin-Phl p XI. | |
| 700356273H1 | g2052366 | 62 | 5 | gb105allp | protein 5 | |
| 700353794H1 | g453975 | 24 | −1 | gb105pln | P. pratense mRNA for profilin-Phl p XI. | |
| 700352890H1 | g2645970 | 37 | −42 | gb105pln | Arabidopsis thaliana reversivly glycosylated polypeptide-3 (RGP) mRNA, complete cds. | |
| 700355188H1 | g2274990 | 69 | −65 | gb105pln | Hordeum vulgare mRNA for expressed sequence tag. | |
| 700353639H1 | g22427 | 82 | −74 | gb105pln | Z. mays gene for polygalacturonase (clone 65). | |
| 700353635H1 | g393706 | 56 | −20 | gb105pln | C. sativus mRNA for 3-ketoacyl-CoA thiolase. | |
| 700354902H1 | g442525 | 33 | 5 | gb105pln | ZmERabp4 = auxin-binding protein [Zea mays = corn, seedling, mRNA, 917 nt]. | |
| 700382966H1 | g2828279 | 35 | −9 | gb105eukp | T18B16.10; hypothetical protein | |
| 700355701H1 | g288373 | 41 | −11 | gb105pln | Z. mays PGg6 gene for polygalacturonase. | |
| 700354841H1 | g21800 | 26 | −31 | gb105pln | T. aestivum L mRNA for histone H2B. | |
| 700355783H1 | g2351063 | 19 | 7 | gb105pln | Arabidopsis thaliana genomic DNA, chromosome 5, P1 clone: MCL19. | |
| 700353802H1 | g2529661 | 15 | −2 | gb105eukp | T30B22.4; putative dTDP-glucose 4-6-dehydratase | |
| 700353418H1 | g22418 | 94 | −42 | gb105pln | Z. mays gene for polygalacturonase (clone 17). | |
| 700354227H1 | g414703 | 30 | −1 | gb105eukp | allergen Hol-lI | |
| 700382882H1 | g1657852 | 16 | 10 | gb105pln | Triticum aestivum cold acclimation protein WCOR825 (Wcor825) mRNA, partial cds. | |
| 700356494H1 | g2852444 | 19 | 14 | gb105pln | Salix bakko mRNA for SUI1 homolog, complete cds. | |
| 700353591H1 | g2760171 | 26 | −1 | gb105pln | Arabidopsis thaliana genomic DNA, chromosome 5, P1 clone: MPA24, complete | |
| | | | | | sequence. | |
| 700383094H1 | g971283 | 47 | −33 | gb105pln | Rice mRNA for ribosomal protein S31, complete cds. | |
| 700352886H1 | g17797 | 14 | 1 | gb105eukp | Bplo | |
| 700353237H1 | g929917 | 20 | 5 | gb105pln | Z. mays ABP1 mRNA for actin-depolymerizing factor. | |
| 700355905H1 | g2342735 | 25 | 5 | gb105eukp | T14G11.28 | |
| 700355226H1 | g414908 | 11 | 4 | gb105eukp | pollen alergen Phl pI | |
| 700354920H1 | g288611 | 98 | −61 | gb105pln | Z. mays PG gene for polygalacturonase. | |
| 700354833H1 | g22272 | 31 | −57 | gb105pln | Maize mRNA for enolase (2-phospho-D-glycerate hydrolase). | |
| 700353218H1 | g2189964 | 19 | −20 | gb105eukp | Phosphoglycerate dehydrogenase | |
| 700353074H1 | g286121 | 63 | −64 | gb105pln | Maize mRNA for glutamine synthetase, complete cds. | |
| 700352794H1 | g2656031 | 15 | 3 | gb105pln | Arabidopsis thaliana genomic DNA, chromosome 5, P1 clone: MXC20. | |
| 700356745H1 | g393449 | 28 | 1 | gb105pln | S. cereale mRNA for beta-amylase. | |
| 700352754H1 | g1707856 | 63 | −48 | gb105pln | T. aestivum mRNA for obtusifoliol 14-alpha-demethylase (CYP51), clone w516, partial. | |
| 700353107H1 | g456567 | 33 | −12 | gb105pln | Pisum sativum ubiquitin conjugating enzyme (UBC4), complete cds. | |
| 700352708H1 | g2293006 | 10 | −2 | gb105allp | hypothetical protein | |
| 700282585H2 | g414702 | 21 | −3 | gb105pln | H. lanatus mRNA for allergen Hol-lI. | |
| 700352990H1 | g170772 | 79 | −14 | gb105pln | Triticum aestivum S-adenosyl-L-homocysteine hydrolase (SH6.2) mRNA, complete cds. | |
| 700357413H1 | g1777929 | 74 | −68 | gb105pln | Saccharum officinarum nucleoside diphosphate kinase (SoNDPK1) mRNA, | |
| | | | | | complete cds. | |
| 700353016H1 | g829147 | 94 | −18 | gb105pln | Z. mays gene for cyclophilin. | |
| 700382129H1 | g1617270 | 14 | −3 | gb105eukp | acyl-CoA synthetase; EC 6.2.1.3 | |
| 700382013H1 | g1644320 | 15 | 2 | gb105eukp | SPAC6G9.08; putative ubiquitin carboxyl terminal hydrolase | |
| 700357171H1 | g2832242 | 20 | 1 | gb105pln | Zea mays 22-kDa alpha zein gene cluster, complete sequence. | |
| 700382608H1 | g22421 | 96 | −89 | gb105pln | Z. mays mRNA for polygalacturonase (clone PG3). | |
| 700357468H1 | g297797 | 59 | 0 | gb105pln | S. tuberosum mRNA for formate dehydrogenase. | |
| 700352687H1 | g1208445 | 52 | −39 | gb105pln | Rice (YK426) mRNA, complete cds. | |
| 700352977H1 | g633135 | 29 | 4 | gb105pln | Zostera marina mRNA for putative plasma membrane H+-ATPase, complete cds. | |
| 700382249H1 | g2435604 | 32 | −9 | gb105eukp | F08F1.7 | |
| 700354333H1 | g2352262 | 36 | −24 | gb105eukp | peroxidoxin-1 | |
| 700356834H1 | g22418 | 81 | −80 | gb105pln | Z. mays gene for polygalacturonase (clone 17). | |
| 700355659H1 | g288366 | 21 | −11 | gb105pln | Z. mays PGg14 gene for polygalacturonase. | |
| 700352804H1 | g2687724 | 19 | −5 | gb105eukp | NADPH:isoflavone reductase | |
| 700382609H1 | g311906 | 34 | −20 | gb105pln | N. tabacum mRNA for ras-related GTP-binding protein. | |
| 700355293H1 | g20321 | 42 | −25 | gb105pln | Oryza sativa RAc1 mRNA for actin. | |
| 700282527H2 | g168315 | 20 | 9 | gb105pln | L. perenne pollen allergen (Lol pI) gene, complete cds. | |
| 700355576H1 | g577611 | 64 | −68 | gb105pln | Zea mays CRT1 gene for calcium-binding protein. | |
| 700355934H1 | g21794 | 75 | −58 | gb105pln | Wheat histone H4 gene. | |
| 700356492H1 | g2266661 | 51 | −26 | gb105pln | Hordeum vulgare mRNA for 14-3-3 protein (Hv1433c). | |
| 700356555H1 | g2564252 | 33 | 10 | gb105pln | Hordeum vulgare mRNA for diadenosine 5′, 5′′′-P1,P4-tetraphosphate hydrolase. | |
| 700382385H1 | g2286150 | 92 | −78 | gb105pln | Zea mays translation initiaition factor (eIF-4A) mRNA, complete cds. | |
| 700382105H1 | g414702 | 24 | −7 | gb105pln | H. lanatus mRNA for allergen Hol-lI. | |
| 700382636H1 | g2584827 | 10 | 16 | gb105pln | Sequence of BAC F12F1 from Arabidopsis thaliana chromosome 1, complete sequence. | |
| 700357439H1 | g432488 | 35 | −3 | gb105pln | Wheat initiation factor 1A (eIF-1A) mRNA. | |
| 700355634H1 | g169776 | 17 | −4 | gb105pln | Oryza sativa beta-amylase gene, complete cds. | |
| 700354583H1 | g703066 | 72 | −11 | gb105eukp | ste13+; RNA helicase | |
| 700382474H1 | g1185555 | 11 | 16 | gb105pln | Zea mays glyceraldehyde-3-phosphate dehydrogenase (gpc4) gene, partial cds. | |
| 700354224H1 | g22427 | 63 | 5 | gb105pln | Z. mays gene for polygalacturonase (clone 65). | |
| 700353810H1 | g168569 | 49 | −12 | gb105pln | Zea mays putative phenylalanine ammonia lyase mRNA, partial cds. | |
| 700353168H1 | g1184775 | 38 | −38 | gb105pln | Zea mays glyceraldehyde-3-phosphate dehydrogenase GAPC4 (gpc4) mRNA, | |
| | | | | | complete cds. | |
| 700356010H1 | g536053 | 10 | 8 | gb105eukp | URA7 | |
| 700355756H1 | g1532047 | 30 | −40 | gb105pln | O. sativa mRNA for S-adenosylmethionine decarboxylase. | |
| 700355326H1 | g22458 | 60 | −78 | gb105pln | Z. mays pollen specific mRNA C-terminal (clone 4H7). | |
| 700353641H1 | g168486 | 67 | −64 | gb105pln | Maize glutathione S-transferase gene (GST-I), exon 1. | |
| 700282408H2 | g313137 | 23 | −1 | gb105pln | Z. mays ZmPRO1 mRNA for profilin 1. | |
| 700382209H1 | g2384759 | 39 | −17 | gb105pln | Oryza sativa GDP dissociation inhibitor protein OsGDI2 (OsGDI2) mRNA, | |
| | | | | | complete cds. | |
| 700353256H1 | g1732519 | 40 | −16 | gb105eukp | Rho1Ps homolog | |
| 700382102H1 | g556672 | 15 | 8 | gb105pln | S. cereale (Halo) chloroplast mRNA for heat-shock protein. | |
| 700356137H1 | g1419371 | 55 | −38 | gb105pln | Z. mays mRNA for 40S subunit ribosomal protein S21. | |
| 700354308H1 | g22458 | 67 | −83 | gb105pln | Z. mays pollen specific mRNA C-terminal (clone 4H7). | |
| 700353087H1 | g2760164 | 17 | 11 | gb105pln | Arabidopsis thaliana genomic DNA, chromosome 5, TAC clone: K18P6, complete sequence. | |
| 700354866H1 | g288373 | 31 | −36 | gb105pln | Z. mays PGg6 gene for polygalacturonase. | |
| 700352772H1 | g22302 | 36 | −64 | gb105pln | Maize Gpc1 gene for glyceraldehyde-3-phosphate dehydrogenase (GADPH) subunit C. | |
| 700355556H1 | g2702284 | 6 | 3 | gb105eukp | T21L14.12; Argonaute (AGO1)-like protein | |
| 700382777H1 | g313139 | 25 | −31 | gb105pln | Z. mays ZmPRO2 mRNA for profilin 2. | |
| 700382380H1 | g2182287 | 20 | 1 | gb105pln | Genomic sequence for Arabidopsis thaliana BAC T7N9, complete sequence. | |
| 700355226H1 | g1173557 | 13 | 4 | gb105eukp | Ory s 1 | |
| 700353523H1 | g22427 | 46 | −42 | gb105pln | Z. mays gene for polygalacturonase (clone 65). | |
| 700353261H1 | g288611 | 81 | −70 | gb105pln | Z. mays PG gene for polygalacturonase. | |
| 700382391H1 | g602252 | 98 | −79 | gb105pln | Zea mays enolase (eno2) mRNA, complete cds. | |
| 700382005H1 | g22155 | 62 | −74 | gb105pln | Z. mays mRNA for alpha-tubulin 5. | |
| 700354441H1 | g807063 | 31 | −19 | gb105allp | immunoglobulin JC kappa chain [human, B cell precursor acute lymphocytic leukemia | |
| | | | | | cell line pre-ALP, Peptide, 135 aa] | |
| 700355169H1 | g2341032 | 9 | 3 | gb105eukp | F19P19.11 | |
| 700356416H1 | g2288887 | 30 | −17 | gb105eukp | MVD1; mevalonate diphosphate decarboxylase; EC 4.1.1.33 | |
| 700356094H1 | g388928 | 12 | −3 | gb105pln | Zea mays calcium dependent protein kinase (CDPK) mRNA, partial cds. | |
| 700356288H1 | g777757 | 24 | −26 | gb105pln | Saccharum hybrid (clone SCUBI561) polyubiquitin mRNA, complete cds. | |
| 700355935H1 | g248338 | 63 | −64 | gb105pln | polyubiquitin [maize, Genomic 3439 nt]. | |
| 700355867H1 | g1658192 | 76 | −71 | gb105pln | Sorghum bicolor obtusifoliol 14-alpha demethylase CYP51 (CYP51) mRNA, | |
| | | | | | complete cds. | |
| 700354248H1 | g473360 | 22 | 8 | gb105eukp | phl pI; Phl pI allergen | |
| 700353631H1 | g1335861 | 21 | −4 | gb105pln | Glycine max clathrin heavy chain mRNA, complete cds. | |
| 700382637H1 | g166548 | 25 | −23 | gb105pln | Avena sativa vacuolar H+-ATPase 16 kDa proteolipid subunit (vatp-P1) mRNA, complete cds. | |
| 700382267H1 | g2058693 | 10 | 7 | gb105allp | poly A binding protein | |
| 700355693H1 | g1438881 | 19 | 2 | gb105eukp | GmCK2p; EC 2.7.1.32 | |
| 700353952H1 | g1049090 | 14 | 5 | gb105allp | SRp40-2 | |
| 700352614H1 | g1048989 | 37 | −5 | gb105allp | CD9 antigen | |
| 700282422H2 | g414907 | 18 | 10 | gb105pln | P. pratense mRNA for pollen allergen PhlpI. | |
| 700383195H1 | g557598 | 14 | 11 | gb105pln | Yeast (Saccharomyces cerevisiae) ATPase gene, complete cds. | |
| 700382133H1 | g2689469 | 20 | 5 | gb105eukp | IAA22 | |
| 700355949H1 | g1498052 | 40 | −31 | gb105pln | Zea mays ribosomal protein S8 mRNA, complete cds. | |
| 700354609H1 | g414907 | 41 | −40 | gb105pln | P. pratense mRNA for pollen allergen PhlpI. | |
| 700356789H1 | g1041424 | 65 | −19 | gb105pln | H. vulgare mRNA for glutamyl-tRNA reductase, 1st isoform. | |
| 700356565H1 | g17795 | 14 | 1 | gb105eukp | bplo | |
| 700353038H1 | g1864023 | 74 | −24 | gb105pln | Cynodon dactylon calcium-binding pollen allergen gene, partial cds. | |
| 700282415H2 | g2708532 | 24 | −8 | gb105eukp | QRRBP-1; putative RNA binding protein | |
| 700353834H1 | g414908 | 8 | 8 | gb105eukp | pollen allergen Phl pI | |
| 700352748H1 | g289189 | 34 | −19 | gb105pln | Arabidopsis thaliana calcium dependent protein kinase (AK1 isoform) mRNA, | |
| | | | | | complete cds. | |
| 700354878H1 | g1262910 | 14 | 1 | gb105eukp | cytidine triphosphate synthetase; EC 6.3.4.2 | |
| 700383194H1 | g473360 | 15 | −6 | gb105eukp | phl pI; Phl pI allergen | |
| 700356817H1 | g2160177 | 22 | −1 | gb105eukp | F21M12.26 | |
| 700353255H1 | g1345546 | 6 | 2 | gb105eukp | Npg1; polygalacturonase; EC 3.2.1.15 | |
| 700355543H1 | g1246102 | 26 | −6 | gb105allp | CAG-isl 7 [human, pancreas, Peptide Partial, 213 aa] | |
| 700354726H1 | g493709 | 40 | −21 | gb105pln | Rice mRNA for beta-tubulin, complete cds. | |
| 700382427H1 | g780261 | 30 | 7 | gb105allp | lactate dehydrogenase-A | |
| 700355209H1 | g2674203 | 58 | −10 | gb105eukp | CLPX; CLP protease regulatory subunit CLPX | |
| 700382237H1 | g556673 | 24 | −1 | gb105eukp | heat-shock protein | |
| 700355243H1 | g397958 | 98 | −25 | gb105pln | Z. mays mRNA for beta-amylase. | |
| 700383193H1 | g20309 | 14 | 14 | gb105pln | O. sativa DNA for pollen-specific gene. | |
| 700355948H1 | g1246841 | 14 | −3 | gb105eukp | g2827 | |
| 700382868H1 | g1743007 | 16 | −9 | gb105eukp | ribosomal protein L13a | |
| 700282422H2 | g168315 | 19 | 9 | gb105pln | L. perenne pollen allergen (Lol pI) gene, complete cds. | |
| 700356013H1 | g22416 | 37 | −79 | gb105pln | Z. mays mRNA for polygalacturonase (clone PG1). | |
| 700355844H1 | g2108252 | 8 | 1 | gb105eukp | pgp2; P-glycoprotein-2 | |
| 700352676H1 | g166548 | 47 | −29 | gb105pln | Avena sativa vacuolar H+-ATPase 16 kDa proteolipid subunit (vatp-P1) mRNA, | |
| | | | | | complete cds. | |
| 700354342H1 | g19538 | 34 | −31 | gb105pln | M. crystallinum mRNA for ribosomal protein YL16. | |
| 700356747H1 | g1388021 | 39 | 1 | gb105allp | UDP-glucose pyrophosphorylase | |
| 700355824H1 | g2801669 | 15 | −1 | gb105pln | Mycosphaerella graminicola succinate dehydrogenase iron-sulphur protein gene, | |
| | | | | | complete cds. | |
| 700353234H1 | g1881379 | 22 | −4 | gb105pln | Solanum melongena mRNA for ribosomal protein L5, partial cds. | |
| 700353135H1 | g1749452 | 11 | 7 | gb105eukp | similar to Saccharomyces cerevisiae hypothetical 42.5KD protein in PDB1-ABD1 | |
| | | | | | intergenic region, SWISS-PROT Accession Number P38328 | |
| 700353107H1 | g2668743 | 68 | −46 | gb105pln | Zea mays ubiquitin conjugating enzyme (UBC) mRNA, complete cds. | |
| 700355026H1 | g2707295 | 6 | 7 | gb105eukp | root allergen protein | |
| 700353268H1 | g20309 | 19 | −8 | gb105pln | O. sativa DNA for pollen-specific gene. | |
| 700356073H1 | g288378 | 41 | −61 | gb105pln | Z. mays gene PG for polygalacturonase. | |
| 700353611H1 | g16440 | 30 | −14 | gb105pln | A. thaliana PRKase gene for Ribulose-5-phosphate kinase. | |
| 700356814H1 | g293901 | 65 | −45 | gb105pln | Zea mays Zea mI gene, complete cds. | |
| 700352631H1 | g1532210 | 42 | −0 | gb105eukp | cypA; cyclophilin A | |
| 700355522H1 | g22456 | 57 | −77 | gb105pln | Z. mays pollen specific mRNA C-terminal (clone 3C12). | |
| 700353237H1 | g1419367 | 22 | 2 | gb105pln | Z. mays ZmABP2 mRNA for actin depolymerizing factor. | |
| 700353268H1 | g1815758 | 15 | 5 | gb105pln | Phalaris coerulescens pollen-specific protein mRNA, complete cds. | |
| 700355982H1 | g218130 | 30 | −25 | gb105pln | Rice mRNA for Ribosomal protein S15. | |
| 700353528H1 | g288366 | 88 | −82 | gb105pln | Z. mays PGg14 gene for polygalacturonase. | |
| 700357140H1 | g22066 | 21 | −7 | gb105eukp | sulfhydryl-endopeptidase | |
| 700354891H1 | g2827524 | 39 | −8 | gb105eukp | F8F16.110; predicted protein | |
| 700356225H1 | g22464 | 32 | −68 | gb105pln | Maize rbcS gene for ribulose-1,5-bisphosphate carboxylase/oxygenase small subunit | |
| | | | | | (EC 4.1.1.39). | |
| 700354920H1 | g288378 | 76 | −46 | gb105pln | Z. mays gene PG for polygalacturonase. | |
| 700355193H1 | g1749733 | 32 | −21 | gb105pln | Fission Yeast mRNA, partial cds. | |
| 700382507H1 | g2351063 | 23 | 16 | gb105pln | Arabidopsis thaliana genomic DNA, chromosome 5, P1 clone: MCL19. | |
| 700356279H1 | g1762930 | 28 | −8 | gb105pln | Nicotiana tabacum ribosomal protein S14 mRNA, partial cds. | |
| 700353148H1 | g1556375 | 17 | 15 | gb105pln | A. niger gene ANNUO51 for 51 kDa subunit of NADH:ubiquinone reductase (complex 1). | |
| 700382787H1 | g22651 | 50 | −36 | gb105pln | H. vulgare mRNA for GRP94 homologue. | |
| 700355740H1 | g473359 | 24 | −7 | gb105pln | P. pratense mRNA for Phl pI allergen. | |
| 700382027H1 | g1402874 | 41 | −34 | gb105pln | A. thaliana 81kb genomic sequence. | |
| 700357431H1 | g2668747 | 92 | −80 | gb105pln | Zea mays ribosomal protein L17 (rp117) mRNA, complete cds. | |
| 700354944H1 | g1184773 | 81 | −47 | gb105pln | Zea mays glyceraldehyde-3-phosphate dehydrogenase GAPC3 (gpc3) mRNA, | |
| | | | | | complete cds. | |
| 700355401H1 | g31062 | 7 | 5 | gb105allp | Epstein-Barr virus small RNA associated protein | |
| 700382655H1 | g1718238 | 10 | 1 | gb105allp | (1,4)-beta-xylan endohydrolase, isoenzyme X-II | |
| 700382393H1 | g1132482 | 33 | −4 | gb105pln | Rice mRNA for ADP-ribosylation factor, complete cds. | |
| 700352940H1 | g533692 | 10 | 5 | gb105allp | protease inhibitor | |
| 700354471H1 | g641999 | 13 | −12 | gb105eukp | cytochrome oxidase I | |
| 700382789H1 | g1103629 | 30 | −76 | gb105pln | Z. mays Fer2 gene. | |
| 700382617H1 | g22458 | 48 | −87 | gb105pln | Z. mays pollen specific mRNA C-terminal (clone 4H7). | |
| 700355815H1 | g1145627 | 17 | −10 | gb105eukp | lipase | |
| 700353171H1 | g397958 | 67 | −23 | gb105pln | Z. mays mRNA for beta-amylase. | |
| 700382636H1 | g2781363 | 22 | −2 | gb105eukp | F24O1.19 | |
| 700352779H1 | g2341032 | 31 | −10 | gb105eukp | F19P19.11 | |
| 700354905H1 | g2282583 | 55 | −64 | gb105pln | Zea mays elongation factor 1-alpha (EF10-A) mRNA, complete cds. | |
| 700354690H1 | g22421 | 63 | −49 | gb105pln | Z. mays mRNA for polygalacturonase (clone PG3). | |
| 700353272H1 | g2160169 | 17 | −4 | gb105eukp | F21M12.17 | |
| 700354543H1 | g1556428 | 44 | −7 | gb105pln | N. tabacum mRNA for citrate synthase. | |
| 700353294H1 | g1015849 | 12 | −2 | gb105eukp | RPS5 | |
| 700382206H1 | g1655423 | 42 | −24 | gb105pln | Arabidopsis thaliana mRNA for GDP dissociation inhibitor, complete cds. | |
| 700352672H1 | g22651 | 69 | −57 | gb105pln | H. vulgare mRNA for GRP94 homologue. | |
| 700382493H1 | g473360 | 10 | 1 | gb105allp | Phl pI allergen | |
| 700382376H1 | g1064931 | 29 | −5 | gb105eukp | cyclin A-like protein | |
| 700353256H1 | g1293668 | 40 | −19 | gb105eukp | ARAC5; GTP-binding protein | |
| 700355563H1 | g473360 | 20 | −3 | gb105eukp | phl pI; Phl pI allergen | |
| 700355169H1 | g2244792 | 11 | 1 | gb105eukp | ankyrin homolog | |
| 700356048H1 | g1167835 | 23 | −1 | gb105pln | H. lanatus mRNA for Hol lI protein. | |
| 700354917H1 | g287829 | 98 | −62 | gb105pln | Z. mays gene for polygalacturonase. | |
| 700352755H1 | g168460 | 61 | −58 | gb105pln | Zea mays cyclophilin (CyP) mRNA, complete cds. | |
| 700352972H1 | g20310 | 22 | 4 | gb105eukp | pollen specific gene | |
| 700354816H1 | g2642157 | 8 | 6 | gb105eukp | T5I7.5; ankyrin-like protein | |
| 700356660H1 | g531031 | 69 | −24 | gb105pln | Pennisetum ciliare apomixis-associated mRNA. | |
| 700356258H1 | g1575129 | 92 | −89 | gb105pln | Zea mays lumenal binding protein cBiPe3 mRNA, complete cds. | |
| 700353136H1 | g1518259 | 21 | 1 | gb105allp | gpi8 | |
| 700352660H1 | g473359 | 25 | −7 | gb105pln | P. pratense mRNA for Phl pI allergen. | |
| 700354820H1 | g1914844 | 61 | −73 | gb105pln | Zea mays liguleless1 protein (liguleless1) mRNA, complete cds. | |
| 700382956H1 | g2570506 | 31 | −12 | gb105pln | Oryza sativa ribosomal protein mRNA, complete cds. | |
| 700382849H1 | g499011 | 56 | −61 | gb105pln | S. vulgare SoAc1 mRNA. | |
| 700382119H1 | g473877 | 11 | 15 | gb105pln | Arabidopsis thaliana Columbia calnexin homolog gene, complete cds. | |
| 700382048H1 | g22416 | 43 | −68 | gb105pln | Z. mays mRNA for polygalacturonase (clone PG1). | |
| 700356777H1 | g960356 | 61 | −20 | gb105pln | Barley mRNA for S-adenosylmethionine synthetase, complete cds. | |
| 700352968H1 | g22223 | 17 | −12 | gb105pln | Maize cab-1 gene for chlorophyll a/b-binding protein. | |
| 700353222H1 | g290275 | 33 | −12 | gb105eukp | M(3)95A; multifunctional activity and location; ribosomal protein S3/AP endonclease | |
| | | | | | DNA repair protein | |
| 700353261H1 | g288378 | 61 | −49 | gb105pln | Z. mays gene PG for polygalacturonase. | |
| 700356933H1 | g1402878 | 23 | 6 | gb105allp | unknown | |
| 700355812H1 | g288366 | 73 | −85 | gb105pln | Z. mays PGg14 gene for polygalacturonase. | |
| 700353962H1 | g1184773 | 65 | −22 | gb105pln | Zea mays glyceraldehyde-3-phosphate dehydrogenase (gpc3) mRNA, complete cds. | |
| 700382946H1 | g20321 | 37 | −29 | gb105pln | Oryza sativa RAc1 mRNA for actin. | |
| 700382779H1 | g19701 | 42 | −10 | gb105pln | N. plumbaginifolia mRNA NeIF-5A2 for initiation factor 5A(2). | |
| 700382611H1 | g473359 | 24 | −7 | gb105pln | P. pratense mRNA for Phl pI allergen. | |
| 700282411H2 | g414702 | 26 | −10 | gb105pln | H. lanatus mRNA for allergen Hol-lI. | |
| 700282575H2 | g2829898 | 11 | 4 | gb105eukp | T26J12.9 | |
| 700353981H1 | g22151 | 37 | −3 | gb105pln | Z. mays (A188) mRNA for alpha-tubulin 4. | |
| 700353267H1 | g836945 | 15 | −9 | gb105pln | Arabidopsis thaliana calcium-dependent protein kinase (CDPK9) gene, complete cds. | |
| 700353286H1 | g2642323 | 25 | −35 | gb105pln | Zea mays profilin (PRO4) mRNA, complete cds. | |
| 700354615H1 | g2766714 | 22 | −0 | gb105pln | Arabidopsis arenosa isolate Care-1 (9509) chromomethylase (CMT1) mRNA, partial cds. | |
| 700357444H1 | g457630 | 42 | −18 | gb105pln | Brassica napus proplastid omega-6 desaturase mRNA, complete cds. | |
| 700355649H1 | g2058278 | 10 | 4 | gb105eukp | atran1 | |
| 700352989H1 | g287829 | 72 | −55 | gb105pln | Z. mays gene for polygalacturonase. | |
| 700354145H1 | g1732362 | 11 | 17 | gb105pln | Malus domestica pAFD103 mRNA, partial cds. | |
| 700354575H1 | g288366 | 85 | −30 | gb105pln | Z. mays PGg14 gene for polygalacturonase. | |
| 700356564H1 | g499011 | 46 | −53 | gb105pln | S. vulgare SoAc1 mRNA. | |
| 700353081H1 | g2852447 | 17 | 6 | gb105eukp | APK2a; protein kinase | |
| 700282544H2 | g633135 | 37 | −13 | gb105pln | Zostera marina mRNA for putative plasma membrane H+-ATPase, complete cds. | |
| 700354227H1 | g414908 | 31 | 0 | gb105eukp | pollen allergen Phl pI | |
| 700355437H1 | g886428 | 22 | −9 | gb105eukp | P1; putative NADPH oxidoreductase; zeta-crystallin homlogue | |
| 700353064H1 | g453975 | 26 | −29 | gb105pln | P. pratense mRNA for profilin-Phl pXI. | |
| 700355839H1 | g1125690 | 18 | −71 | gb105pln | S. tuberosum mRNA for DnaJ protein. | |
| 700352933H1 | g288378 | 100 | −22 | gb105pln | Z. mays gene PG for polygalacturonase. | |
| 700355696H1 | g22428 | 11 | 8 | gb105eukp | polygalacturonase | |
| 700355770H1 | g2213424 | 36 | −23 | gb105pln | Citrus paradisi mRNA for hypothetical protein. | |
| 700356170H1 | g1246115 | 19 | 0 | gb105pln | major allergen Pha a1 [Phalaris aquatica = canary grass, pollen, mRNA Partial, | |
| | | | | | 1088 nt]. | |
| 700353841H1 | g19500 | 44 | −31 | gb105pln | Lupinus polyphyllus lupin-specific pPLZ12 mRNA. | |
| 700382662H1 | g1815758 | 19 | 4 | gb105pln | Phalaris coerulescens pollen-specific protein mRNA, complete cds. | |
| 700356858H1 | g804656 | 11 | −7 | gb105eukp | BGQ60; beta-glucosidase | |
| 700382412H1 | g22425 | 92 | −16 | gb105pln | Z. mays gene for polygalacturonase (clone 47). | |
| 700382902H1 | g1649012 | 9 | 0 | gb105eukp | egg receptor for sperm | |
| 700353536H1 | g414908 | 32 | 7 | gb105eukp | pollen allergen Phl pI | |
| 700354309H1 | g644492 | 96 | −92 | gb105pln | Corn elongation factor 1alpha gene, complete cds. | |
| 700353543H1 | g1632821 | 57 | −34 | gb105pln | O. sativa mRNA for transmembrane protein. | |
| 700354611H1 | g607003 | 7 | 7 | gb105allp | beta transducin-like protein | |
| 700353917H1 | g22425 | 64 | 1 | gb105pln | Z. mays gene for polygalacturonase (clone 47). | |
| 700354566H1 | g435428 | 15 | −7 | gb105pln | Arabidopsis thaliana GTP-binding protein mRNA. | |
| 700383036H1 | g1789149 | 14 | −1 | gb105allp | sensor protein BarA | |
| 700354287H1 | g2811229 | 32 | −15 | gb105pln | Arabidopsis thaliana fimbrin 1 gene, partial cds. | |
| 700382932H1 | g2113935 | 24 | 1 | gb105allp | unknown | |
| 700382319H1 | g22427 | 76 | −76 | gb105pln | Z. mays gene for polygalacturonase (clone 65). | |
| 700352636H1 | g1255959 | 6 | 8 | gb105allp | ORF N0840 | |
| 700282554H2 | g2463586 | 10 | 4 | gb105eukp | precursor of cysteine proteinase; FB22 precursor | |
| 700353245H1 | g1815758 | 23 | 1 | gb105pln | Phalaris coerulescens pollen-specific protein mRNA, complete cds. | |
| 700353696H1 | g2809231 | 21 | 11 | gb105pln | Genomic sequence for Arabidopsis thaliana BAC F22O13, complete sequence. | |
| 700354817H1 | g2832242 | 30 | −14 | gb105pln | Zea mays 22-kDa alpha zein gene cluster, complete sequence. | |
| 700382883H1 | g1504051 | 19 | −14 | gb105pln | Maize; corn mRNA for Calcium-dependent protein kinase, complete cds. | |
| 700382920H1 | g22416 | 28 | −58 | gb105pln | Z. mays mRNA for polygalacturonase (clone Pg1). | |
| 700383140H1 | g2245073 | 26 | −20 | gb105pln | Arabidopsis thaliana DNA chromosome 4, ESSA I contig fragment No. 8. | |
| 700356933H1 | g2252840 | 18 | 7 | gb105allp | contains regions of similarity to Haemophilua influenzae permease (SP:P38767) | |
| 700352602H1 | g202529 | 9 | 0 | gb105allp | 3-alpha-hydroxysteroid dehydrogenase | |
| 700382448H1 | g170455 | 34 | −48 | gb105pln | Tomato heat shock cognate protein 80 gene, 3′ end. | |
| 700355492H1 | g453975 | 43 | −24 | gb105pln | P. pratense mRNA for profilin-Phl pXI. | |
| 700354974H1 | g2342682 | 28 | −0 | gb105eukp | F7G19.11 | |
| 700353954H1 | g297015 | 27 | −8 | gb105eukp | fructokinase | |
| 700356082H1 | g609261 | 16 | 1 | gb105pln | S. cereale (cv. Halo) mRNA for triosephosphate isomerase. | |
| 700355958H1 | g499011 | 82 | −70 | gb105pln | S. vulgare SoAc1 mRNA. | |
| 700353943H1 | g587565 | 19 | 9 | gb105pln | S. tuberosum mRNA for beta-I MPP. | |
| 700353253H1 | g2264311 | 12 | 7 | gb105pln | Arabidopsis thaliana genomic DNA chromosome 5, P1 clone: MLN1, complete | |
| | | | | | sequence. | |
| 700354642H1 | g2342737 | 15 | 2 | gb105eukp | T14G11.30; Ser/Thr protein kinase isolog, 5′ partial | |
| 700357428H1 | g1815759 | 16 | 1 | gb105eukp | pollen-specific protein | |
| 700383014H1 | g473359 | 21 | −5 | gb105pln | P. pratense mRNA for Phl pI allergen. | |
| 700383076H1 | g1167835 | 18 | 3 | gb105pln | H. lanatus mRNA for Hol lI protein. | |
| 700356435H1 | g2852444 | 20 | 12 | gb105pln | Salix bakko mRNA for SUI1 homolog, complete cds. | |
| 700355974H1 | g747848 | 21 | −3 | gb105pln | H. vulgare (Gerbel) mRNA for adenosine triphosphatase. | |
| 700355001H1 | g1532162 | 16 | 17 | gb105pln | arabidopsis thaliana AT.I.24-1, AT.I.24-2, AT.I.24-3, AT.I.24-4, AT.I.24-5, AT.I.24-6, | |
| | | | | | AT.I.24-9 and AT.I.24-14 genes, partial cds, AT.I.24-7, ascorbate peroxidase | |
| | | | | | (ATHAPX1), EF-1alpha-A1, -A2 and -A3 (EF-1alpha) and AT.I.24-13 genes, | |
| | | | | | complete cds. | |
| 700282404H2 | g683778 | 4 | 8 | gb105eukp | unknown | |
| 700352705H1 | g1030068 | 17 | −4 | gb105eukp | NAD(P)H oxidoreductase, isoflavone reductase homologue | |
| 700382903H1 | g1458245 | 11 | 4 | gb105eukp | F54D11.1 | |
| 700356463H1 | g1906814 | 58 | 3 | gb105allp | non-inducible carbony reductase | |
| 700382850H1 | g1658321 | 26 | −9 | gb105pln | S. tuberosum mRNA for transketolase. | |
| 700282470H2 | g2511596 | 12 | 6 | gb105eukp | prce; multicatalytic endopeptidase complex, proteasome precursor, beta subunit; | |
| | | | | | EC 3.4.99.46 | |
| 700382304H1 | g777757 | 33 | −48 | gb105pln | Saccharum hybrid (clone SCUBI561) polyubiquitin mRNA, complete cds. | |
| 700382268H1 | g2213586 | 5 | 5 | gb105eukp | T7N9.6 | |
| 700356229H1 | g1905943 | 23 | 2 | gb105pln | Sorghum bicolor MADS box transcription factor SbMADS1 mRNA, complete cds. | |
| 700352779H1 | g2244792 | 30 | −8 | gb105eukp | ankyrin homolog | |
| 700383114H1 | g287829 | 84 | −69 | gb105pln | Z. mays gene for polygalacturonase. | |
| 700356847H1 | g288611 | 39 | 13 | gb105pln | Z. mays PG gene for polygalacturonase. | |
| 700356574H1 | g288373 | 68 | −76 | gb105pln | Z. mays PGg6 gene for polygalacturonase. | |
| 700356494H1 | g20237 | 17 | 9 | gb105pln | O. sativa (rice) constitutive GOS2 gene. | |
| 700356057H1 | g1806384 | 26 | 1 | gb105allp | by similarity to bovine sequence | |
| 700357410H1 | g2104525 | 16 | −9 | gb105eukp | T10M13.2; T10M13.2 | |
| 700382737H1 | g313139 | 44 | −30 | gb105pln | Z. mays ZmPRO2 mRNA for profilin 2. | |
| 700382282H1 | g1209258 | 17 | −1 | gb105eukp | protease inhibitor II | |
| 700353794H1 | g313139 | 48 | −57 | gb105pln | Z. mays ZmPRO2 mRNA for profilin 2. | |
| 700282523H2 | g1246116 | 16 | 7 | gb105eukp | major allergen Pha a 1; major allergen Pha a 1 | |
| 700382171H1 | g643596 | 70 | −72 | gb105pln | Corn mRNA for cysteine proteinase, clone CCP, complete cds. | |
| 700355015H1 | g20255 | 40 | −20 | gb105pln | O. sativa gene for heat shock protein 82 HSP82. | |
| 700352939H1 | g1020409 | 12 | 5 | gb105eukp | phospholipase D; EC 3.1.4.4 | |
| 700356248H1 | g777757 | 58 | −19 | gb105pln | Saccharum hybrid (clone SCUBI561) polyubiquitin mRNA, complete cds. | |
| 700353547H1 | g1439635 | 14 | 1 | gb105eukp | F56B6.4 | |
| 700357419H1 | g1785739 | 16 | −5 | gb105eukp | tRNA-Ser | |
| 700354250H1 | g1213454 | 10 | 5 | gb105allp | similar to S. cerevisiae DNA-directed RNA polymerases I, II and II (SP:RPB8_YEAST, | |
| | | | | | P20436) | |
| 700355977H1 | g285637 | 53 | −41 | gb105pln | Hordeum vulgare mRNA for vacuolar membrane proton-translocating inorganic | |
| | | | | | pyrophosphat. | |
| 700355337H1 | g248336 | 69 | −70 | gb105pln | polyubiquitin [maize, Genomic, 3841 nt]. | |
| 700282493H2 | g19902 | 48 | 7 | gb105eukp | pollen specific protein | |
| 700353067H1 | g2218151 | 33 | −10 | gb105pln | Vigna unguiculata type IIIa membrane protein cp-wap13 mRNA, complete cds. | |
| 700355935H1 | g902583 | 69 | −69 | gb105pln | Zea mays clone MubG1 ubiquitin gene, complete cds. | |
| 700382057H1 | g2829925 | 27 | −12 | gb105eukp | F22K20.12 | |
| 700356254H1 | g1246213 | 7 | 6 | gb105allp | AICAR transformylase-IMP cyclohydrolase | |
| 700356095H1 | g304986 | 9 | 8 | gb105allp | similar to 3-hydroxyisobutyrate dehydrogenases; similar to E. coli hypoth. 31 kDa protein | |
| | | | | | in rnpB 3′ region | |
| 700383071H1 | g2529721 | 11 | −1 | gb105allp | unknown | |
| 700353991H1 | g393449 | 27 | −24 | gb105pln | S. cereale mRNA for beta-amylase. | |
| 700356555H1 | g2564253 | 43 | 5 | gb105allp | diadenosine 5′, 5′′′-P1, P4-tetraphosphate hydrolase | |
| 700282482H2 | g1788562 | 8 | 6 | gb105allp | DNA gyrase subunit A | |
| 700356917H1 | g1167827 | 58 | −17 | gb105pln | C. reinhardtii mRNA for ribosomal protein L12. | |
| 700356208H1 | g313137 | 96 | −38 | gb105pln | Z. mays ZmPRO1 mRNA for profilin 1. | |
| 700383086H1 | g1881694 | 57 | −64 | gb105pln | Zea mays phosphoglucomutase mRNA, partial cds. | |
| 700382373H1 | g1403043 | 13 | 8 | gb105pln | H. chilense x T. turgidum conv. durum (Tritordeum) mRNA for S-adenosylmethionine | |
| | | | | | decarboxylase. | |
| 700353891H1 | g1817577 | 30 | −22 | gb105allp | alpha-globin 1 | |
| 700382440H1 | g1197168 | 53 | −27 | gb105eukp | MHCemb; embryonic muscle myosin heavy chain | |
| 700352942H1 | g237649 | 35 | −16 | gb105pln | enoyl-acyl carrier protein reductase [Brassica napus, mRNA, 1358 nt]. | |
| 700355817H1 | g1218042 | 37 | −17 | gb105eukp | PAP1; secreted purple acid phosphatase precursor | |
| 700357468H1 | g297798 | 95 | −6 | gb105eukp | mitochondrial formate dehydrogenase precursor; EC 1.2.1.2 | |
| 700356123H1 | g473359 | 26 | −11 | gb105pln | P. pratense mRNA for Phl pI allergen. | |
| 700356789H1 | g1039331 | 65 | −19 | gb105pln | H. vulgare mRNA for glutamyl-tRNA reductase (1st isoform). | |
| 700354712H1 | g217998 | 12 | 15 | gb105pln | Potato tuber, alpha-glucan phosphorylase (EC 2.4.1.1), type L isozyme gene, | |
| | | | | | complete cds. | |
| 700353902H1 | g804656 | 30 | −9 | gb105eukp | BGQ60; beta-glucosidase | |
| 700356002H1 | g2104438 | 13 | −0 | gb105eukp | SPAC57A7.03c; unknown | |
| 700353641H1 | g22314 | 78 | −78 | gb105pln | Maize mRNA for GSH gluthathione S-transferase I (GST; EC 2.5.1.18). | |
| 700354622H1 | g2244913 | 27 | 8 | gb105eukp | similar to SEN1 protein - yeast; Author-given protein sequence is in conflict with the | |
| | | | | | conceptual translation | |
| 700355460H1 | g1432082 | 20 | 2 | gb105pln | Arabidopsis thaliana Skplp homolog mRNA, complete cds. | |
| 700353816H1 | g2642217 | 21 | 3 | gb105eukp | NOI protein | |
| 700353888H1 | g172320 | 19 | −2 | gb105eukp | RAD16; excision repair protein | |
| 700354434H1 | g2282583 | 36 | −35 | gb105pln | Zea mays elongation factor a-alpha (EF1-A) mRNA, complete cds. | |
| 700355002H1 | g2662344 | 59 | −36 | gb105pln | Oryza sativa mRNA for EF-1 alpha, complete cds. | |
| 700356048H1 | g414702 | 21 | −0 | gb105pln | H. lanatus mRNA for allergen Hol-lI. | |
| 700355562H1 | g736271 | 70 | −64 | gb105pln | O. sativa hsp70 gene for heat shock protein 70. | |
| 700355075H1 | g2224935 | 20 | −7 | gb105eukp | EIN3; ethylene-insensitive3 | |
| 700353796H1 | g2244779 | 24 | 1 | gb105eukp | hypothetical protein | |
| 700355229H1 | g288373 | 73 | −70 | gb105pln | Z. mays PGg6 gene for polygalacturonase. | |
| 700354943H1 | g887594 | 15 | 6 | gb105eukp | unknown | |
| 700352766H1 | g16323 | 19 | −7 | gb105pln | A. thaliana H3 gene 1 and H3 gene 2 for H3.3-like histone variant. | |
| 700357479H1 | g2623679 | 59 | −21 | gb105pln | Zea mays calmodulin (Zmrcalm) mRNA, complete cds. | |
| 700355243H1 | g1771781 | 79 | −17 | gb105pln | T. aestivum mRNA for beta-amylase. | |
| 700354955H1 | g416514 | 28 | −7 | gb105allp | NEDD-6 | |
| 700282568H2 | g1498628 | 27 | −13 | gb105pln | Arabidopsis thaliana p40 protein homolog mRNA, complete cds. | |
| 700382818H1 | g166745 | 38 | −32 | gb105pln | A. thaliana plasma membrane proton ATPase (PMA) mRNA, complete cds. | |
| 700355934H1 | g168500 | 77 | −58 | gb105pln | Maize (Zea mays) histone H4 gene (H4C14), complete cds. | |
| 700355830H1 | g2723470 | 21 | −1 | gb105pln | Oryza sativa mRNA for sucrose transporter, complete cds. | |
| 700356666H1 | g20359 | 62 | −27 | gb105pln | Rice gene for 17S ribosomal RNA. | |
| 700355953H1 | g39209 | 46 | −37 | gb105pln | S. polyrrhiza mRNA for D-myo-inositol-3-phosphate synthase. | |
| 700353642H1 | g2244747 | 16 | −5 | gb105pln | Arabidopsis thaliana DNA chromosome 4, ESSA I contig fragment No. 0. | |
| 700353627H1 | g2290382 | 28 | −18 | gb105eukp | ppt-1; serine/threonine protein phosphatase PPT1 | |
| 700356240H1 | g2342563 | 37 | −24 | gb105pln | Chlamydomonas reinhardtii Csbp gene. | |
| 700354231H1 | g1184773 | 96 | −48 | gb105pln | Zea mays glyceraldehyde-3-phosphate dehydrogenase GAPC3 (gpc3) mRNA, | |
| | | | | | complete cds. | |
| 700382541H1 | g556642 | 38 | −14 | gb105allp | Nascent polypeptide associated complex alpha subunit | |
| 700382669H1 | g511080 | 42 | −33 | gb105pln | A. thaliana HEM15 mRNA for ferrochelatase. | |
| 700382584H1 | g2583133 | 48 | −1 | gb105eukp | F4L23.29 | |
| 700355952H1 | g414702 | 31 | −11 | gb105pln | H. lanatus mRNA for allergen Hol-lI. | |
| 700353255H1 | g1345547 | 6 | 2 | gb105eukp | NPG; polygalacturonase; EC 3.2.1.15 | |
| 700354771H1 | g2224915 | 7 | 2 | gb105eukp | beta-expansin | |
| 700382105H1 | g1246115 | 24 | −7 | gb105pln | major allergen Pha a 1 [Phalaris aquatica = canary grass, pollen, mRNA Partial, | |
| | | | | | 1088 nt]. | |
| 700357444H1 | g459961 | 46 | −21 | gb105pln | Glycine max proplastid omega-6 desaturase mRNA, complete cds. | |
| 700353708H1 | g288611 | 23 | −19 | gb105pln | Z. mays PG gene for polygalacturonase. | |
| 700352605H1 | g939932 | 10 | 6 | gb105allp | allergen Lol pII | |
| 700353539H1 | g2829274 | 23 | 15 | gb105pln | Arabidopsis thaliana nucleoside diphosphate kinase 3 (ndpk3) mRNA, complete cds. | |
| 700356282H1 | g414704 | 19 | −18 | gb105pln | O. sativa mRNA for cytochrome b5. | |
| 700354748H1 | g804944 | 30 | −6 | gb105eukp | wpk4; wpk4 protein kinase | |
| 700382165H1 | g168423 | 94 | −82 | gb105pln | Zea mays polypeptide chain-binding protein mRNA, 3′ end. | |
| 700355583H1 | g169835 | 24 | −7 | gb105pln | Secale cereale RKIN1 mRNA, complete CDS. | |
| 700352829H1 | g2462925 | 20 | 4 | gb105allp | GTP cyclohydrolase II/3,4-dihydroxy-2-butanone-4-phosphate synthase | |
| 700352887H1 | g285637 | 66 | −16 | gb105pln | Hordeum vulgare mRNA for vacuolar membrane proton-translocating inorganic | |
| | | | | | pyrophosphat. | |
| 700355327H1 | g2464911 | 6 | 4 | gb105eukp | splicing factor homolog | |
| 700353695H1 | g1246115 | 18 | 1 | gb105pln | major allergen Pha a 1 [Phalaris aquatica = canary grass, pollen, mRNA | |
| | | | | | Partial, 1088 nt]. | |
| 700356494H1 | g2668739 | 55 | −47 | gb105pln | Zea mays translation initiation factor GOS2 (TIF) mRNA, complete cds. | |
| 700357423H1 | g288611 | 66 | −76 | gb105pln | Z. mays PG gene for polygalacturonase. | |
| 700356576H1 | g974837 | 34 | 4 | gb105allp | phosphotyrosyl phosphatase activator (PTPA) | |
| 700352764H1 | g168460 | 81 | −68 | gb105pln | Zea mays cyclophilin (CyP) mRNA, complete cds. | |
| 700282469H2 | g22427 | 63 | −89 | gb105pln | Z. mays gene for polygalacturonase (clone 65). | |
| 700354390H1 | g22458 | 95 | −88 | gb105pln | Z. mays pollen specific mRNA C-terminal (clone 4H7). | |
| 700282411H2 | g414907 | 26 | −10 | gb105pln | P. pratense mRNA for pollen allergen PhlpI. | |
| 700354906H1 | g21394 | 27 | −2 | gb105eukp | put. preprotein (AA -27 to 47) | |
| 700353153H1 | g533473 | 33 | −23 | gb105pln | Mesembryanthemum crystallinum 2-phospho-D-glycerate hydrolase, enolase, mRNA, | |
| | | | | | complete cds. | |
| 700355842H1 | g1945365 | 9 | 3 | gb105allp | copper transport protein HAH1 | |
| 700355153H1 | g20280 | 24 | −36 | gb105pln | Rice gene for phenylalanine ammonia-lyase (EC 4.3.1.5). | |
| 700382111H1 | g1885343 | 56 | −60 | gb105pln | T. aestivum mRNA for starch branching enzyme II. | |
| 700354322H1 | g22427 | 44 | −38 | gb105pln | Z. mays gene for polygalacturonase (clone 65). | |
| 700282504H2 | g603415 | 17 | 8 | gb105eukp | YER174C; Yer174cp | |
| 700352929H1 | g2370092 | 52 | 1 | gb105allp | lysosomal hyaluronidase | |
| 700382374H1 | g20163 | 43 | −29 | gb105pln | O. sativa Rr15 mRNA for 5S ribosomal RNA. | |
| 700352641H1 | g1206012 | 77 | −41 | gb105pln | Zea mays beta-D-glucosidase precursor (glu2) mRNA, complete cds. | |
| 700354562H1 | g218082 | 23 | 9 | gb105pln | Rice mRNA for initiation factor eIF-4D (225 gene), partial sequence. | |
| 700382117H1 | g2618677 | 11 | 6 | gb105pln | Arabidopsis thaliana BAC F21B7 chromosome 1, complete sequence. | |
| 700382493H1 | g1167836 | 10 | 1 | gb105eukp | hol lI; major group I allergen; protein with incomplete signal sequence | |
| 700352703H1 | g2262117 | 16 | 6 | gb105eukp | T19F06.20; auxin inducible protein isolog | |
| 700356606H1 | g1871506 | 48 | −13 | gb105pln | c. dactylon mRNA for calcium-binding pollen allergen. | |
| 700354501H1 | g22464 | 61 | −21 | gb105pln | Maize rbcS gene for ribulose-1,5-bisphosphate carboxylase/oxygenase small subunit | |
| | | | | | (EC 4.1.1.39). | |
| 700356256H1 | g899607 | 71 | −82 | gb105pln | Zea mays polyubiquitin (MubC5) mRNA, complete cds. | |
| 700382265H1 | g1049252 | 87 | −57 | gb105pln | Zea mays vacuolar ATPase 69 kDa subunit mRNA, partial cds. | |
| 700354725H1 | g2058455 | 52 | −44 | gb105pln | Arabidopsis thaliana GTP-binding protein (ATDRG1) mRNA, complete cds. | |
| 700356990H1 | g22418 | 98 | −38 | gb105pln | Z. mays gene for polygalacturonase (clone 17). | |
| 700355563H1 | g1167836 | 19 | −2 | gb105eukp | hol lI; major group I allergen; protein with incomplete signal sequence | |
| 700382389H1 | g1706955 | 31 | −24 | gb105pln | Gossypium hirsutum cellulose synthase (celA1) mRNA, complete cds. | |
| 700354640H1 | g2340104 | 13 | 5 | gb105allp | Very similar and perhaps identical to Hs-CUL-4B.; 80-100% similarity to partial | |
| | | | | | sequence U58091 (PID:g1381150). | |
| 700382226H1 | g2702272 | 29 | −7 | gb105eukp | T21L14.13 | |
| 700353610H1 | g2852444 | 15 | −3 | gb105pln | Salix bakko mRNA for SUI1 homolog, complete cds. | |
| 700353233H1 | g22425 | 54 | −52 | gb105pln | Z. mays for polygalacturonase (clone 47). | |
| 700354741H1 | g2301335 | 39 | −1 | gb105allp | unnamed protein product | |
| 700382707H1 | g6433479 | 20 | −5 | gb105eukp | GCN20; Gcn20p | |
| 700352841H1 | g1478229 | 14 | 5 | gb105allp | unknown | |
| 700282558H2 | g2213632 | 8 | 2 | gb105eukp | F21J9.24 | |
| 700353680H1 | g312180 | 30 | −49 | gb105pln | Z. mays GapC4 gene. | |
| 700354894H1 | g288373 | 60 | −67 | gb105pln | Z. mays PGp6 gene for polygalacturonase. | |
| 700352839H1 | g1314098 | 30 | −2 | gb105eukp | YME1; Yme1p | |
| 700353658H1 | g1929411 | 53 | −48 | gb105pln | N. tabacum npp5 mRNA for protein phosphatase type 2A. | |
| 700356013H1 | g288378 | 37 | −79 | gb105pln | Z. mays gene PG for polygalacturonase. | |
| 700354227H1 | g473360 | 31 | −0 | gb105eukp | phl pI; Phl pI allergen | |
| 700355803H1 | g299925 | 22 | −9 | gb105eukp | Dpse\Rp49; ribosomal protein 49 | |
| 700382758H1 | g1200238 | 59 | −54 | gb105pln | H. vulgare mRNA for GAMyb protein. | |
| 700353180H1 | g927571 | 69 | −73 | gb105pln | Z. mays mRNA for calreticulin precursor. | |
| 700355803H1 | g1519359 | 22 | −9 | gb105eukp | RP49; ribosomal protein 49 | |
| 700352809H1 | g1359895 | 19 | −7 | gb105pln | H. tuberosus mRNA for NADPH-ferrihemoprotein reductase. | |
| 700356050H1 | g534915 | 25 | −1 | gb105pln | S. tuberosum (Desiree) ppa mRNA for soluble inorganic pyrophosphatase. | |
| 700353854H1 | g1167835 | 42 | −27 | gb105pln | H. lanatus mRNA for Hol lI protein. | |
| 700357493H1 | g17797 | 22 | 7 | gb105eukp | Bplo | |
| 700353127H1 | g2827625 | 19 | −1 | gb105eukp | putative protein | |
| 700356279H1 | g2994 | 16 | −16 | gb105pln | Neurospora crassa crp-2 gene for ribosomal protein crp-2. | |
| 700382892H1 | g1184775 | 36 | −47 | gb105pln | Zea mays glyceraldehyde-3-phosphate dehydrogenase GAPC4 (gpc4) mRNA, | |
| | | | | | complete cds. | |
| 700356911H1 | g22418 | 96 | −36 | gb105pln | Z. mays gene for polygalacturonase (clone 17). | |
| 700353536H1 | g473360 | 32 | 7 | gb105eukp | phl pI; Phl pI allergen | |
| 700354485H1 | g886402 | 49 | −29 | gb105pln | Oryza sativa MADS-box protein (MADS4) mRNA, complete cds. | |
| 700352808H1 | g1045304 | 48 | −64 | gb105pln | Zea mays acetyl-coenzyme A carboxylase mRNA, complete cds. | |
| 700355809H1 | g2511540 | 51 | −39 | gb105pln | Oryza sativa DNA-binding protein GBP16 (Rgbp16) mRNA, complete cds. | |
| 700355163H1 | g288373 | 94 | −44 | gb105pln | Z. mays PGg6 gene for polygalacturonase. | |
| 700352755H1 | g829147 | 61 | −72 | gb105pln | Z. mays gene for cyclophilin. | |
| 700382823H1 | g1184773 | 59 | −63 | gb105pln | Zea mays glyceraldehyde-3-phosphate dehydrogenase GAPC3 (gpc3) mRNA, | |
| | | | | | complete cds. | |
| 700352988H1 | g287829 | 98 | −55 | gb105pln | Z. mays gene for polygalacturonase. | |
| 700383111H1 | g1627596 | 6 | 8 | gb105allp | C25A1.3 | |
| 700355627H1 | g902583 | 18 | −5 | gb105pln | Zea mays clone MubG1 ubiquitin gene, complete cds. | |
| 700354316H1 | g1040729 | 6 | 6 | gb105allp | cytochrome b5 containing fusion protein | |
| 700354583H1 | g157594 | 66 | −10 | gb105eukp | RNA helicase | |
| 700356685H1 | g288366 | 93 | −37 | gb105pln | Z. mays PGg14 gene for polygalacturonase. | |
| 700355995H1 | g1616660 | 77 | −65 | gb105pln | Zea mays adenylosuccinate synthetase mRNA, complete cds. | |
| 700353002H1 | g2245066 | 21 | 0 | gb105eukp | Beta-Amylase | |
| 700353511H1 | g28549 | 45 | −37 | gb105allp | alpha globin | |
| 700352763H1 | g313141 | 54 | −48 | gb105pln | Z. mays ZmPRO3 mRNA for profilin 3. | |
| 700354379H1 | g22237 | 65 | −56 | gb105pln | Maize mRNA for cytosolic GAPDH (GapC) glyceraldehyde-3-phosphate dehydrogenase. | |
| 700354705H1 | g2344896 | 10 | −1 | gb105eukp | T13E15.11 | |
| 700282416H2 | g288373 | 46 | −61 | gb105pln | Z. mays PGg6 gene for polygalacturonase. | |
| 700355809H1 | g1657616 | 31 | −14 | gb105pln | Arabidopsis thaliana putative nuclear DNA-binding protein G2p (AtG2) mRNA, | |
| | | | | | complete cds. | |
| 700352953H1 | g606814 | 35 | −6 | gb105pln | Zea mays Golden Bantam carbonic anhydrase mRNA, complete cds. | |
| 700353246H1 | g2431768 | 29 | −34 | gb105pln | Zea mays acidic ribosomal protein P1a (rpp1a) mRNA, complete cds. | |
| 700383135H1 | g2392895 | 35 | −16 | gb105eukp | BRI1; brassinosteroid insensitive 1 | |
| 700357129H1 | g1246115 | 29 | −20 | gb105pln | major allergen Pha a 1 [Phalaris aquatica = canary grass, pollen, mRNA Partial, | |
| | | | | | 1088 nt]. | |
| 700355594H1 | g1706965 | 7 | 4 | gb105eukp | TA-MT; delta-24-sterol methyltransferase | |
| 700382907H1 | g16427 | 19 | 2 | gb105eukp | protease inhibitor II | |
| 700382655H1 | g1813595 | 11 | 0 | gb105allp | xylan endohydrolase isoenzyme X-I | |
| 700355634H1 | g397958 | 21 | −14 | gb105pln | Z. mays mRNA for beta-amylase. | |
| 700353601H1 | g17645 | 28 | 6 | gb105allp | RIBOSOMAL PROTEIN L35a | |
| 700355973H1 | g1277236 | 12 | 2 | gb105eukp | SEC13; Sec13p | |
| 700352852H1 | g22418 | 89 | −75 | gb105pln | Z. mays gene for polygalacturonase (clone 17). | |
| 700353708H1 | g288378 | 22 | −18 | gb105pln | Z. mays gene PG for polygalacturonase. | |
| 700357178H1 | g1246115 | 29 | −19 | gb105pln | major allergen Pha a 1 [Phalaris aquatica = canary grass, pollen, mRNA Partial, | |
| | | | | | 1088 nt]. | |
| 700356025H1 | g1657854 | 18 | 8 | gb105pln | Triticum aestivum cold acclimation protein WCOR413 (Wcor413) mRNA, complete cds. | |
| 700356236H1 | g2160158 | 27 | −4 | gb105eukp | F21M12.3 | |
| 700355192H1 | g348695 | 32 | −34 | gb105pln | catharanthus roseus heat shock protein 90 mRNA, complete cds. | |
| 700356130H1 | g1009720 | 8 | 2 | gb105eukp | ENOD8; nodulin | |
| 700382242H1 | g871507 | 14 | 12 | gb105pln | P. sativum mRNA for small GTP-binding protein (clone pGTP13). | |
| 700353037H1 | g1841501 | 95 | −49 | gb105pln | Z. mays mRNA for glutathione-dependent formaldehyde dehydrogenase. | |
| 700353120H1 | g1229168 | 35 | −22 | gb105pln | Hordeum vulgare profilin (Hypro1) mRNA, complete cds. | |
| 700356288H1 | g1839582 | 62 | −42 | gb105pln | polyubiquitin homolog {clone CHEM 6} [Zea mays = maize, cv. INRA 258, mercuric | |
| | | | | | chloride-treated, leaves, mRNA Partial, 199 nt, segment 1 of 2]. | |
| 700352874H1 | g1542941 | 27 | −5 | gb105eukp | AACT; Acetoacetyl-coenzyme A thiolase; EC 2.3.1.9 | |
| 700355543H1 | g1430944 | 28 | −2 | gb105allp | ribosomal protein L14 | |
| 700355765H1 | g20204 | 83 | 4 | gb105eukp | frustose-diphosphate aldolase (AA 1-358) | |
| 700353064H1 | g313139 | 28 | −31 | gb105pln | Z. mays ZmPRO2 mRNA for profilin 2. | |
| 700354479H1 | g836941 | 19 | −4 | gb105pln | Arabidopsis thaliana calcium-dependent protein kinase (CDPK19) mRNA, complete cds. | |
| 700357153H1 | g312180 | 27 | −81 | gb105pln | Z. mays GapC4 gene. | |
| 700382770H1 | g2245020 | 28 | −3 | gb105eukp | growth regulator homolog | |
| 700355921H1 | g2414636 | 7 | 8 | gb105eukp | SPAC3A11.08; hypothetical protein | |
| 700383048H1 | g467617 | 18 | −5 | gb105eukp | minor allergen, ribosomal protein | |
| 700383004H1 | g1574093 | 8 | 4 | gb105allp | histidinol-phosphate aminotransferase (hisH) | |
| 700354383H1 | g1550721 | 15 | −2 | gb105eukp | HPR1; RNA binding protein | |
| 700355750H1 | g2258073 | 14 | 16 | gb105pln | Hordeum vulgare var. distichum soluble inorganic pyrophosphatase (Ipp) mRNA, | |
| | | | | | complete cds. | |
| 700382317H1 | g2689242 | 21 | 3 | gb105pln | A. thaliana mRNA for ubiquitin conjugating enzyme UBC2. | |
| 700382649H1 | g469232 | 7 | 7 | gb105allp | vacuolar H+-ATPase subunit | |
| 700354759H1 | g16427 | 17 | 5 | gb105eukp | protease inhibitor II | |
| 700353113H1 | g287829 | 97 | −80 | gb105pln | Z. mays gene for polygalacturonase. | |
| 700355030H1 | g429013 | 32 | −21 | gb105pln | Rice mRNA for pyrophosphate-fructose 6-phosphate 1-phosphotransferase (gene name | |
| | | | | | SS420), partial cds. | |
| 700382439H1 | g455419 | 12 | 6 | gb105allp | PR264/SC35 | |
| 700356127H1 | g310575 | 36 | −22 | gb105pln | Glycine max nodulin-26 mRNA, complete cds. | |
| 700353262H1 | g2370231 | 20 | −35 | gb105pln | Hordeum vulgare mRNA for putative acyl-CoA oxidase. | |
| 700353525H1 | g287829 | 51 | −59 | gb105pln | Z. mays gene for polygalacturonase. | |
| 700354870H1 | g1086860 | 14 | 1 | gb105eukp | T03G11.4 | |
| 700355985H1 | g1519250 | 49 | −37 | gb105pln | Oryza sativa F14-c protein mRNA, complete cds. | |
| 700282455H2 | g288373 | 53 | −79 | gb105pln | Z. mays PGg6 gene for polygalacturonase. | |
| 700382657H1 | g1419367 | 37 | −14 | gb105pln | Z. mays ZmABP2 mRNA for actin depolymerizing factor. | |
| 700356089H1 | g1216483 | 32 | −18 | gb105pln | Arabidopsis thaliana dual specificity kinase 1 (ADK1) mRNA, complete cds. | |
| 700355948H1 | g1167801 | 31 | −16 | gb105eukp | F38E11.5 | |
| 700353129H1 | g1399559 | 14 | −10 | gb105pln | Delphinium exaltatum nuclear 26S ribosomal RNA gene, partial sequence. | |
| 700382816H1 | g288366 | 31 | −9 | gb105pln | Z. mays PGg14 gene for polygalacturonase. | |
| 700356282H1 | g19852 | 18 | 8 | gb105pln | N. tabacum mRNA for cytochrome b5 (partial). | |
| 700382937H1 | g549983 | 39 | −35 | gb105pln | Pennisetum ciliare possible apospory-associated mRNA clone pSUB C, complete cds. | |
| 700354672H1 | g971862 | 31 | −10 | gb105allp | potential laminin-binding protein | |
| 700382544H1 | g790582 | 16 | 9 | gb105pln | Arabidopsis thaliana putative pathogenesis-related protein (ATOZI1) mRNA, | |
| | | | | | complete cds. | |
| 700354368H1 | g2150129 | 26 | −6 | gb105pln | Arabidopsis thaliana cytoplasmic ribosomal protein S15a mRNA, complete cds. | |
| 700354623H1 | g2529228 | 33 | −31 | gb105pln | Glycine max mRNA for 6-phosphogluconate dehydrogenase, complete cds. | |
| 700382315H1 | g20321 | 70 | −62 | gb105pln | Oryza sativa RAc1 mRNA for actin. | |
| 700355492H1 | g313139 | 60 | −57 | gb105pln | Z. mays ZmPRO2 mRNA for profilin 2. | |
| 700355226H1 | g1167835 | 19 | 3 | gb105pln | H. lanatus mRNA for Hol lI protein. | |
| 700353959H1 | g2795809 | 14 | 0 | gb105allp | putative expansin | |
| 700356281H1 | g287829 | 84 | −54 | gb105pln | Z. mays gene for polygalacturonase. | |
| 700355048H1 | g2264318 | 32 | −6 | gb105pln | Arabidopsis thaliana genomic DNA chromosome 5, P1 clone: MUP24, complete | |
| | | | | | sequence. | |
| 700352990H1 | g535583 | 56 | −4 | gb105pln | Medicago sativa adenosylhomocysteinase mRNA, complete cds. | |
| 700382870H1 | g2267213 | 21 | −7 | gb105eukp | dynamin-like GTP binding protein | |
| 700382206H1 | g1550739 | 42 | −24 | gb105pln | A. thaliana mRNA for GDP dissociation inhibitor. | |
| 700383058H1 | g1524115 | 21 | −12 | gb105eukp | PR-P69; subtilisin-like endoprotease | |
| 700382231H1 | g1732518 | 25 | −10 | gb105pln | Arabidopsis thaliana Rho1Ps homolog mRNA, complete cds. | |
| 700382422H1 | g2827496 | 29 | −12 | gb105eukp | EG: 30B8.1 | |
| 700382486H1 | g2286150 | 63 | −69 | gb105pln | Zea mays translation initiation factor (eIF-4A) mRNA, complete cds. | |
| 700383157H1 | g2738247 | 32 | −18 | gb105pln | Arabidopsis thaliana cobalamin-independent methionine synthase (ATCIMS) mRNA, | |
| | | | | | complete cds. | |
| 700382875H1 | g22416 | 43 | −33 | gb105pln | Z. mays mRNA for polygalacturonase (clone PG1). | |
| 700382633H1 | g1107486 | 22 | −15 | gb105pln | A. thaliana mRNA for 60S ribosomal protein L27a. | |
| 700353891H1 | g1817578 | 30 | −22 | gb105allp | alpha-globin 2 | |
| 700354838H1 | g1002369 | 9 | 7 | gb105allp | coatomer protein | |
| 700355952H1 | g414907 | 30 | −11 | gb105pln | P. pratense mRNA for pollen allergen PhlpI. | |
| 700355995H1 | g1616656 | 32 | −21 | gb105pln | Arabidopsis thaliana adenylosuccinate synthetase mRNA, complete cds. | |
| 700382880H1 | g22418 | 62 | −37 | gb105pln | Z. mays gene for polygalacturonase (clone 17). | |
| 700352759H1 | g1209700 | 34 | −38 | gb105pln | Zea mays ribosomal protein L12 mRNA, complete cds. | |
| 700352750H1 | g2781363 | 24 | −4 | gb105eukp | F24O1.19 | |
| 700354805H1 | g348695 | 21 | −17 | gb105pln | Catharanthus roseus heat shock protein 90 mRNA, complete cds. | |
| 700356916H1 | g899607 | 87 | −31 | gb105pln | Zea mays polyubiquitin (MubC5) mRNA, complete cds. | |
| 700352708H1 | g1653962 | 10 | −2 | gb105allp | hypothetical protein | |
| 700356057H1 | g2218135 | 17 | 1 | gb105eukp | UDPGDH; UDP-glucose dehydrogenase | |
| 700354407H1 | g2642157 | 24 | −9 | gb105eukp | T5I7.5; ankyrin-like protein | |
| 700354747H1 | g406310 | 17 | −2 | gb105pln | B. napus (Topas) clpA mRNA. | |
| 700353930H1 | g21273 | 32 | 6 | gb105pln | Spinach mRNA for chloroplast phosphate translocator protein. | |
| 700354771H1 | g293902 | 6 | 0 | gb105eukp | Zea mI | |
| 700355229H1 | g22427 | 69 | −71 | gb105pln | Z. mays gene for polygalacturonase (clone 65). | |
| 700353141H1 | g286033 | 24 | −21 | gb105pln | Ipomoea batatas (sweet potato) mRNA for F1-ATPase gamma-subunit. | |
| 700352639H1 | g166687 | 27 | −2 | gb105pln | A. thaliana 3-deoxy-D-arabino-heptulosonate y-phosphate synthase (DHS1) mRNA, | |
| | | | | | complete cds. | |
| 700354639H1 | g1323704 | 14 | 5 | gb105allp | similar to C. elegans F38E1.9 gene product encoded by GenBank Accession Number | |
| | | | | | U41996 | |
| 700354906H1 | g169580 | 26 | −2 | gb105eukp | trypsin inhibitor precursor (put.); putative | |
| 700382428H1 | g473103 | 18 | −19 | gb105pln | N. tabacum mRNA for protein homologue to Human Wilm's tumor-related protein | |
| | | | | | HUMQM (partial). | |
| 700382390H1 | g22458 | 84 | −73 | gb105pln | Z. mays pollen specific mRNA C-terminal (clone 4H7). | |
| 700382845H1 | g395071 | 25 | −22 | gb105pln | V. faba guanine nucleotide regulatory protein mRNA, complete CDS. | |
| 700354795H1 | g2827700 | 12 | −4 | gb105eukp | F6H11.20; DEAD box ATP dependent helicase protein | |
| 700383048H1 | g2113805 | 19 | −7 | gb105eukp | AmphiP2; ribosomal protein P2 | |
| 700355693H1 | g1438883 | 15 | 5 | gb105allp | GmCK3p | |
| 700354886H1 | g533692 | 16 | 3 | gb105allp | protease inhibitor | |
| 700354725H1 | g2345147 | 28 | −40 | gb105pln | Pisum sativum developmentally regulated GTP binding protein (PsDRG1) mRNA, | |
| | | | | | complete cds. | |
| 700352641H1 | g799376 | 16 | −4 | gb105pln | Zea mays beta-D-glucosidase mRNA, nuclear gene encoding chloroplast protein, | |
| | | | | | complete cds. | |
| 700383182H1 | g1296806 | 17 | −25 | H. vulgare xylose isomerase gene. | | |
| 700352695H1 | g1895083 | 9 | −8 | gb105pln | Zea mays golgi associated protein se-wap41 mRNA, complete cds. | |
| 700382315H1 | g1498391 | 40 | −75 | gb105pln | Zea mays actin (Maz65) gene, partial cds. | |
| 700282406H2 | g313137 | 23 | −5 | gb105pln | Z. mays ZmPRO1 mRNA for profilin 1. | |
| 700353922H1 | g1212995 | 63 | −51 | gb105pln | H. vulgare mRNA for UDP-glucose pyrophosphorylase. | |
| 700352687H1 | g20726 | 39 | −26 | gb105pln | P. sativum GA mRNA (clone F). | |
| 700353171H1 | g1771781 | 41 | −0 | gb105pln | T. aestivum mRNA for beta-amylase. | |
| 700383114H1 | g22416 | 84 | −70 | gb105pln | Z. mays mRNA for polygalacturonase (clone PG1). | |
| 700352766H1 | g488574 | 25 | −6 | gb105pln | Medicago sativa Regen S clone pH3c130 histone H3.2 mRNA, complete cds. | |
| 700354319H1 | g1345131 | 12 | 14 | gb105pln | Arabidopsis thaliana ERECTA mRNA, complete cds. | |
| 700355862H1 | g313141 | 72 | −81 | gb105pln | Z. mays ZmPRO3 mRNA for profilin 3. | |
| 700353695H1 | g168313 | 18 | 2 | gb105pln | L. perenne pollen allergen (Lol pI) gene, 3′ end. | |
| 700383090H1 | g287628 | 48 | −8 | gb105eukp | YS29A; ribosomal protein YS29 | |
| 700354562H1 | g1546918 | 27 | −1 | gb105pln | Z. mays mRNA for translation initiation factor 5A. | |
| 700352918H1 | g1167836 | 34 | −0 | gb105eukp | hol lI; major group I allergen; protein with incomplete signal sequence | |
| 700354175H1 | g886400 | 37 | −16 | gb105pln | Oryza sativa MADS-box protein (MADS2) mRNA, complete cds. | |
| 700354619H1 | g529009 | 26 | −7 | gb105eukp | PFK; PPi-dependent phosphofructo-1-kinase; EC 2.7.1.90 | |
| 700354992H1 | g414702 | 20 | −15 | gb105pln | H. lanatus mRNA for allergen Hol-lI. | |
| 700354410H1 | g18887 | 31 | −31 | gb105pln | H. vulgare agpp mRNA for ADP-glucose pyrophosphorylase small subunit. | |
| 700353255H1 | g1345548 | 6 | 2 | gb105eukp | NPG; polygalacturonase; EC 3.2.1.15 | |
| 700356127H1 | g435648 | 38 | −28 | gb105pln | Rice mRNA for gamma-Tip, complete cds. | |
| 700353549H1 | g168460 | 79 | −6 | gb105pln | Zea mays cyclophilin (CyP) mRNA, complete cds. | |
| 700353627H1 | g2245512 | 13 | −10 | gb105eukp | protein phosphatase-1 | |
| 700353918H1 | g22416 | 35 | −27 | gb105pln | Z. mays mRNA for polygalacturonase (clone PG1). | |
| 700356188H1 | g2398679 | 14 | 3 | gb105eukp | DS1; 3-deoxy-D-arabino-heptulosonate 7-phosphate syntahse; EC 4.1.2.15 | |
| 700355951H1 | g414702 | 19 | −2 | gb105pln | H. lanatus mRNA for allergen Hol-lI. | |
| 700354923H1 | g1532072 | 54 | −49 | gb105pln | Z. mays mRNA for S-adenosylmethionine decarboxylase. | |
| 700353539H1 | g2829275 | 45 | −6 | gb105eukp | ndpk3; nucleoside diphosphate kinase 3 | |
| 700354785H1 | g2262155 | 21 | −1 | gb105pln | DNA sequence of Arabidopsis thaliana BAC F5J6 from chromosome IV, complete | |
| | | | | | sequence. | |
| 700382129H1 | g1617268 | 17 | −3 | gb105eukp | acyl CoA synthetase; EC 6.2.1.3 | |
| 700354253H1 | g414702 | 27 | −12 | gb105pln | H. lanatus mRNA for allergen Hol-lI. | |
| 700355844H1 | g2108254 | 8 | 1 | gb105eukp | pgp2; P-glycoprotein-2 | |
| 700383036H1 | g1805580 | 14 | −1 | gb105allp | sensor-regulator protein barA | |
| 700354325H1 | g1498389 | 35 | −42 | gb105pln | Zea mays actin (Maz81) gene, partial cds. | |
| 700382072H1 | g2673867 | 24 | −4 | gb105pln | Antirrhinum majus mRNA for fimbriata-associated protein 1, partial. | |
| 700356880H1 | g288373 | 96 | −21 | gb105pln | Z. mays PGp6 gene for polygalacturonase. | |
| 700352754H1 | g1658192 | 78 | −65 | gb105pln | Sorghum bicolor obtusifoliol 14-alpha demethylase CYP51 (CYP51) mRNA, | |
| | | | | | complete cds. | |
| 700383070H1 | g2809251 | 7 | 7 | gb105eukp | F21B7.20 | |
| 700383039H1 | g20277 | 21 | 1 | gb105eukp | OC-II; oryzacystatin II | |
| 700356960H1 | g2389003 | 16 | 7 | gb105eukp | SPAC6F6.13c; hypothetical protein | |
| 700353954H1 | g2102693 | 26 | −8 | gb105eukp | Frk2; fructokinase; EC 2.7.1.4 | |
| 700357411H1 | g22178 | 34 | 5 | gb105pln | Z. mays 22 kD alpha-zein gene. | |
| 700355296H1 | g1749567 | 23 | 15 | gb105pln | Fission Yeast mRNA, partial cds. | |
| 700282418H2 | g22509 | 49 | −86 | gb105pln | Zea mays waxy (wx+) locus for UDP-glucose starch glycosyl transferase. | |
| 700352602H1 | g1142698 | 9 | 0 | gb105eukp | NADPH-dependent aldehyde reductase; EC 1.1.1.2 | |
| 700353151H1 | g166766 | 19 | −3 | gb105eukp | heat shock protein HSP70-2 | |
| 700356493H1 | g1129144 | 43 | −22 | gb105pln | M. indica (Manila THMF5 mRNA for 3-ketoacyl-coA thilase B. | |
| 700355331H1 | g1143864 | 16 | −5 | gb105eukp | catalyzes the release of either giberellin or cyanogenic substances from their | |
| | | | | | glucoconjugates; beta glucosidase; EC 3.2.1.21 | |
| 700352631H1 | g1532212 | 39 | 0 | gb105eukp | cypA; cyclophilin A | |
| 700354910H1 | g1871360 | 29 | −7 | gb105eukp | glutamyl-prolyl-tRNA synthetase | |
| 700356435H1 | g2668739 | 81 | −54 | gb105pln | Zea mays translation initiation factor GOS2 (TIF) mRNA, complete cds. | |
| 700355901H1 | g16511 | 22 | −3 | gb105pln | A. thaliana mRNA for suppressor-like protein. | |
| 700356461H1 | g17561 | 17 | 7 | gb105allp | PROTEINASE INHIBITOR | |
| 700355692H1 | g248336 | 32 | −38 | gb105pln | polyubiquitin [maize, Genomic, 3841 nt]. | |
| 700353141H1 | g2702261 | 16 | 12 | gb105pln | Arabidopsis thaliana chromosome II BAC T21L14 genomic sequence, complete | |
| | | | | | sequence. | |
| 700352918H1 | g414703 | 34 | −0 | gb105eukp | allergen Hol-lI | |
| 700357450H1 | g312180 | 25 | −34 | gb105pln | Z. mays GapC4 gene. | |
| 700354838H1 | g1237029 | 9 | 7 | gb105allp | alpha-cop protein | |
| 700356242H1 | g2511574 | 37 | 3 | gb105eukp | prc3; multicatalytic endopeptidase; EC 3.4.99.46 | |
| 700356511H1 | g288366 | 48 | −64 | gb105pln | Z. mays PGg14 gene for polygalacturonase. | |
| 700353026H1 | g1002531 | 44 | −0 | gb105eukp | ACT4; actin-4 | |
| 700352978H1 | g736271 | 63 | −5 | gb105pln | O. sativa hsp70 gene for heat shock protein 70. | |
| 700354472H1 | g177065 | 52 | −39 | gb105allp | beta-2-microglobulin | |
| 700354952H1 | g2160162 | 20 | 5 | gb105eukp | F21M12.8 | |
| 700356611H1 | g1049252 | 86 | −29 | gb105pln | Zea mays vacuolar ATPase 69 kDa subunit mRNA, partial cds. | |
| 700352602H1 | g450473 | 9 | 0 | gb105allp | steroid 3-alpha-dehydrogenase | |
| 700382630H1 | g2529657 | 11 | 17 | gb105pln | Arabidopsis thaliana chromosome II BAC T30B22 genomic sequence, complete | |
| | | | | | sequence. | |
| 700352825H1 | g2827552 | 14 | −6 | gb105eukp | T12H17.140; predicted protein | |
| 700354277H1 | g567226 | 34 | −15 | gb105allp | mATF4 | |
| 700382094H1 | g168608 | 46 | −75 | gb105pln | Maize 17S ribosomal RNA gene and flanks. | |
| 700355293H1 | g20323 | 24 | −20 | gb105pln | O. sativa RAc1 gene for actin. | |
| 700353106H1 | g432367 | 29 | −6 | gb105pln | Rice mRNA for elongation factor 1 beta, complete cds. | |
| 700382131H1 | g2832716 | 19 | −2 | gb105pln | Lolium temulentum mRNA for alkaline/neutral invertase. | |
| 700356242H1 | g2570504 | 23 | 8 | gb105pln | Oryza sativa proteasome component mRNA, complete cds. | |
| 700355693H1 | g1438879 | 14 | 7 | gb105eukp | GmCK1p; EC 2.7.1.32 | |
| 700383032H1 | g1002916 | 15 | 6 | gb105pln | Oryza sativa cap-binding protein p28 mRNA, complete cds. | |
| 700355223H1 | g435172 | 46 | −54 | gb105pln | A. sativa (Pewi) ASTCP-K19 mRNA for t complex polypeptide 1. | |
| 700352784H1 | g171809 | 19 | −1 | gb105eukp | RPL10E | |
| 700354427H1 | g2190418 | 20 | 4 | gb105pln | Lycopersicon esculentum mRNA for Dem protein. | |
| 700352764H1 | g829147 | 86 | −72 | gb105pln | Z. mays gene for cyclophilin. | |
| 700355311H1 | g312177 | 23 | −5 | gb105eukp | RPL2; ribosomal protein L2 | |
| 700356089H1 | g1103317 | 32 | −18 | gb105pln | A. thaliana CKI1 mRNA for casein kinase I. | |
| 700353225H1 | g927571 | 87 | −80 | gb105pln | Z. mays mRNA for calreticulin precursor. | |
| 700354709H1 | g2330689 | 14 | −1 | gb105pln | Yeast (Saccharomyces pombe) chromosome I cosmid c16E8. | |
| 700352717H1 | g1323077 | 5 | 7 | gb105eukp | ERG25 | |
| 700383038H1 | g347062 | 39 | −19 | gb105eukp | RPL37A; ribosomal protein | |
| 700353418H1 | g22425 | 94 | −42 | gb105pln | Z. mays gene for polygalacturonase (clone 47). | |
| 700356907H1 | g777757 | 57 | −20 | gb105pln | Saccharum hybrid (clone SCUBI561) polyubiquitin mRNA, complete cds. | |
| 700354920H1 | g22418 | 76 | −47 | gb105pln | Z. mays gene for polygalacturonase (clone 17). | |
| 700352629H1 | g473999 | 24 | 2 | gb105pln | Rice mRNA, partial homologous to ribosomal protein L31 gene. | |
| 700357440H1 | g1752735 | 13 | 15 | gb105pln | Yeast DNA for MNN4 gene, complete cds. | |
| 700382815H1 | g2160158 | 19 | 4 | gb105allp | Similar to elongation factor 1-gamma (gb\|EF1G_XENLA). ESTs gb\|T20564, gb\|T45940, | |
| | | | | | gb\|T04527 come from this gene. | |
| 700352974H1 | g2352553 | 77 | −6 | gb105eukp | Hsp82; 82 kDa heat shock protein | |
| 700354555H1 | g857573 | 28 | 14 | gb105pln | Oryza sativa vacuolar H+-ATPase (vatp-P1) mRNA, complete cds. | |
| 700353240H1 | g473602 | 50 | −33 | gb105pln | Zea mays W-22 histone H2A mRNA, complete cds. | |
| 700352939H1 | g1020415 | 12 | 5 | gb105allp | phospholipase D | |
| 700355330H1 | g1800214 | 64 | −70 | gb105pln | Sorghum bicolor phytochrome A (PHYA) mRNA, complete cds. | |
| 700355955H1 | g13011 | 24 | 1 | gb105allp | URF 3 (NADH dehydrogenase subunit) | |
| 700382005H1 | g22157 | 71 | −83 | gb105pln | Z. mays mRNA for alpha-tubulin 6. | |
| 700382818H1 | g758354 | 61 | −61 | gb105pln | Z. mays mRNA for plasma membrane H+ ATPase. | |
| 700352990H1 | g2244747 | 57 | −4 | gb105pln | Arabidopsis thaliana DNA chromosome 4, ESSA I contig fragment No. 0. | |
| 700353952H1 | g349079 | 14 | 6 | gb105allp | growth response protein | |
| 700353952H1 | g349079 | 14 | 6 | gb105allp | growth response protein | |
| 700356516H1 | g2302292 | 20 | −3 | gb105allp | unnamed protein product | |
| 700353514H1 | g2829894 | 28 | −8 | gb105eukp | T26J12.6 | |
| 700383041H1 | g2351066 | 23 | −5 | gb105pln | Arabidopsis thaliana genomic DNA, chromosome 5, P1 clone: MOP9. | |
| 700353236H1 | g1931639 | 10 | −1 | gb105eukp | T19D16.3; lysophospholipase isolog | |
| 700383132H1 | g414908 | 21 | 2 | gb105eukp | pollen allergen Phl pI | |
| 700353081H1 | g2852449 | 15 | 6 | gb105allp | protein kinase | |
| 700353090H1 | g1666172 | 30 | −8 | gb105pln | N. plumbaginifolia mRNA for BTF3-like transcription factor. | |
| 700382306H1 | g531388 | 20 | −2 | gb105pln | Zea mays copia-like retrotransposon Hopscotch polyprotein (gag/pol) genes, | |
| | | | | | complete cds. | |
| 700354490H1 | g1504051 | 12 | −10 | gb105pln | Maize; corn mRNA for Calcium-dependent protein kinase, complete cds. | |
| 700354642H1 | g804944 | 8 | 7 | gb105allp | wpk4 protein kinase | |
| 700355818H1 | g2224914 | 28 | −12 | gb105pln | Oryza sativa beta-expansin mRNA, complete cds. | |
| 700355072H1 | g666976 | 49 | −24 | gb105pln | A. thaliana TYKY mRNA for NADH:ubiquinone oxidoreductase. | |
| 700355573H1 | g19848 | 21 | −11 | gb105pln | N. tabacum mRNA for pre-pro-cysteine proteinase. | |
| 700382957H1 | g22416 | 28 | −29 | gb105pln | Z. mays mRNA for polygalacturonase (clone PG1). | |
| 700382935H1 | g1016290 | 10 | 7 | gb105eukp | NAB4; nuclear polyadenylated RNA-binding protein | |
| 700354991H1 | g1218004 | 48 | −1 | gb105eukp | cell plate formation; SDL5A | |
| 700355860H1 | g2624416 | 25 | −26 | gb105pln | Zea mays mRNA for ubiquitin carrier protein UBC7. | |
| 700352972H1 | g255569 | 21 | 4 | gb105eukp | pollen specific protein | |
| 700352707H1 | g425193 | 28 | −41 | gb105pln | Spinacia oleracea heat shock C70 protein mRNA, complete cds. | |
| 700356205H1 | g407524 | 21 | −6 | gb105pln | S. cereale tpi gene for triosephosphate isomerase. | |
| 700355936H1 | g688011 | 6 | 4 | gb105allp | AgX-1 antigen [human, infertile patient, testis, Peptide, 505 aa] | |
| 700356101H1 | g499011 | 38 | −27 | gb105pln | S. vulgare SoAc1 mRNA. | |
| 700355284H1 | g22458 | 17 | −27 | gb105pln | Z. mays pollen specific mRNA C-terminal (clone 4H7). | |
| 700355911H1 | g397958 | 36 | −53 | gb105pln | Z. mays mRNA for beta-amylase. | |
| 700353726H1 | g303854 | 24 | 11 | gb105pln | Rice mRNA for ribosomal protein L7A, complete cds. | |
| 700355533H1 | g2529341 | 26 | −25 | gb105pln | Spinacia oleracea chloroplast transketolase mRNA, complete cds. | |
| 700383022H1 | g473359 | 25 | −15 | gb105pln | P. pratense mRNA for Phl pI allergen. | |
| 700353994H1 | g1724101 | 53 | −15 | gb105pln | Mesembryanthemum crystallinum S-adenosyl-L-homocystein hydrolase mRNA, | |
| | | | | | complete cds. | |
| 700356028H1 | g2331300 | 63 | −29 | gb105pln | Zea mays ribosomal protein S4 type I (rps4) mRNA, complete cds. | |
| 700354893H1 | g460044 | 18 | −7 | gb105eukp | FUN12; Fun12p | |
| 700353286H1 | g1008444 | 24 | −25 | gb150pln | T. aestivum mRNA for profilin (clone TaPRO3). | |
| 700355237H1 | g1203831 | 15 | 8 | gb105pln | Hordeum vulgare beta-D-glucan exohydrolase, isoenzyme ExoII, mRNA, complete cds. | |
| 700356746H1 | g168314 | 23 | 8 | gb105eukp | Lol pI; pollen allergen | |
| 700382074H1 | g1184773 | 47 | −71 | gb105pln | Zea mays glyceraldehyde-3-phosphate dehydrogenase GAPC3 (gpc3) mRNA, | |
| | | | | | complete cds. | |
| 700352769H1 | g606814 | 38 | −20 | gb105pln | Zea mays Golden Bantam carbonic anhydrase mRNA, complete cds. | |
| 700352812H1 | g1289203 | 14 | −24 | gb105pn | A. glutinos mRNA for thiazole biosynthetic enzyme. | |
| 700282554H2 | g2463588 | 10 | 4 | gb105eukp | FB1035 precursor | |
| 700382110H1 | g1167835 | 10 | 5 | gb105pln | H. lanatus mRNA for Hol lI protein. | |
| 700282461H2 | g1769814 | 18 | 2 | gb105allp | beta-D-glucosidase | |
| 700354922H1 | g1769898 | 7 | 6 | gb105eukp | lectin receptor kinase | |
| 700354833H1 | g602252 | 17 | −0 | gb105pln | Zea mays enolase (eno2) mRNA, complete cds. | |
| 700353995H1 | g287829 | 80 | −7 | gb105pln | Z. mays gene for polygalacturonase. | |
| 700355741H1 | g1906829 | 20 | 5 | gb105pln | A. thaliana hsp88.1 gene. | |
| 700353037H1 | g1675393 | 52 | −24 | gb105pln | Oryza sativa class III ADH enzyme (AdhIII) gene, complete cds. | |
| 700382221H1 | g288611 | 88 | −61 | gb105pln | Z. mays PG gene for polygalacturonoase. | |
| 700282518H2 | g2656030 | 35 | −11 | gb105pln | Arabidopsis thaliana genomic DNA, chromosome 5, P1 clone: MUL8. | |
| 700354501H1 | g217963 | 67 | −27 | gb105pln | Zea mays mRNA for ribulose 1,5-bisphosphate carboxylase small subunit, complete cds. | |
| 700382349H1 | g2264305 | 14 | 15 | gb105pln | Arabidopsis thaliana genomic DNA, chromosome 5, P1 clone: MBK23, complete | |
| | | | | | sequence. | |
| 700354604H1 | g973408 | 6 | 4 | gb105eukp | ppx1; PPX homolog | |
| 700355659H1 | g288373 | 21 | −11 | gb105pln | Z. mays PGg6 gene for polygalacturonase. | |
| 700356507H1 | g312180 | 30 | −18 | gb105pln | Z. mays GapC4 gene. | |
| 700353177H1 | g2688821 | 14 | −14 | gb105pln | Prunus armeniaca pyrophosphate-dependent phosphofructo-1-kinase mRNA, partial cds. | |
| 700352759H1 | g474003 | 22 | 7 | gb105pln | Rice mRNA, partial homologous to ribosomal protein rp21c gene. | |
| 700382824H1 | g902583 | 66 | −73 | gb105pln | Zea mays clone MubG1 ubiquitin gene, complete cds. | |
| 700382439H1 | g63752 | 12 | 6 | gb105allp | PR 264 | |
| 700383178H1 | g2351198 | 46 | −24 | gb105allp | PA28 beta subunit | |
| 700382110H1 | g19495 | 9 | 12 | gb105pln | L. perenne RNA for Lol pI gene. | |
| 700382001H1 | g2435511 | 22 | −1 | gb105eukp | A_TM017A05.10 | |
| 700352620H1 | g168608 | 100 | −85 | gb105pln | Maize 17S ribosomal RNA gene and flanks. | |
| 700354472H1 | g179314 | 52 | −39 | gb105allp | beta-2-microglobulin | |
| 700353779H1 | g1835730 | 11 | 17 | gb105pln | Oryza sativa photosystem II 10 kDa polypeptide mRNA, complete cds. | |
| 700356069H1 | g395071 | 60 | 14 | gb105pln | V. faba guanine nucleotide regulatory protein mRNA, complete CDS. | |
| 700355816H1 | g396148 | 23 | 4 | gb105pln | Z. mays CHI gene. | |
| 700382937H1 | g531481 | 39 | −35 | gb105pln | P. ciliare (Higgins) apospory associated mRNA, 1398 bp. | |
| 700355281H1 | g600768 | 30 | 7 | gb105pln | Oryza sativa cyclophilin 2 (Cyp2) mRNA, complete cds. | |
| 700353568H1 | g1304270 | 37 | 3 | gb105eukp | zha1; plasma membrane H+-ATPase; EC 3.6.1.35 | |
| 700382961H1 | g170775 | 18 | −33 | gb105pln | Wheat translation elongation factor 1 alpha-subunit (TEF1) mRNA, complete cds. | |
| 700353857H1 | g576509 | 19 | −1 | gb105eukp | IAP86; component of chloroplast outer membrane protein import apparatus; GTP-binding | |
| | | | | | protein | |
| 700352813H1 | g2632156 | 13 | −8 | gb105pln | Aspergillus niger mRNA for ribosomal protein L15. | |
| 700354542H1 | g2345153 | 45 | −63 | gb105pln | Zea mays ribsomal protein S4 (rps4) mRNA, complete cds. | |
| 700355589H1 | g2190558 | 14 | −8 | gb105eukp | F5I14.14; F5I14.14 | |
| 700382877H1 | g473359 | 25 | 0 | gb105pln | P. pratense mRNA for Phl pI allergen. | |
| 700353163H1 | g968901 | 64 | 11 | gb105pln | Rice mRNA for ribosomal protein S8, complete cds. | |
| 700352718H1 | g469247 | 21 | 2 | gb105pln | Helianthus annuus ribosomal protein S3a mRNA, complete cds. | |
| 700382280H1 | g2505864 | 19 | 2 | gb105pln | Arabidopsis thaliana DNA, 24 kb surrounding PFL locus. | |
| 700354514H1 | g288366 | 55 | −29 | gb105pln | Z. mays PGg14 gene for polygalacturonase. | |
| 700356849H1 | g2275201 | 6 | 8 | gb105eukp | T08I13.7 | |
| 700355629H1 | g20321 | 32 | −31 | gb105pln | Oryza sativa RAc1 mRNA for actin. | |
| 700382596H1 | g431270 | 25 | −7 | gb105eukp | UBC5; ubiquitin conjugating enzyme | |
| 700356112H1 | g886400 | 67 | −61 | gb105pln | Oryza sativa MADS-box protein (MADS2) mRNA, complete cds. | |
| 700382068H1 | g849195 | 6 | 6 | gb105eukp | YDR374C; Ydr374cp | |
| 700354874H1 | g777757 | 28 | −24 | gb105pln | Saccharum hybrid (clone SCUBI561) polyubiquitin mRNA, complete cds. | |
| 700353875H1 | g313137 | 59 | −67 | gb105pln | Z. mays ZmPRO1 mRNA for profilin 1. | |
| 700354611H1 | g1907211 | 9 | 6 | gb105eukp | YCR072c, len:515 | |
| 700354657H1 | g1906825 | 47 | −31 | gb105pln | A. thaliana hsp81.2 gene. | |
| 700355629H1 | g499011 | 33 | −33 | gb105pln | S. vulgare SoAc1 mRNA. | |
| 700354412H1 | g288373 | 56 | −17 | gb105pln | Z. mays PGg6 gene for polygalacturonase. | |
| 700354690H1 | g22423 | 63 | −49 | gb105pln | Z. mays mRNA for polygalacturonase (clone PG4). | |
| 700354734H1 | g288611 | 91 | −82 | gb105pln | Z. mays PG gene for polygalacturonase. | |
| 700352629H1 | g406833 | 34 | 3 | gb105allp | 60S ribosoma protein L31 | |
| 700354786H1 | g19495 | 12 | 2 | gb105pln | L. perenne RNA for Lol pI gene. | |
| 700352929H1 | g2337876 | 50 | −9 | gb105allp | human PH-20 homolog (LUCA-2) | |
| 700355331H1 | g804656 | 23 | −9 | gb105eukp | BGQ60; beta-glucosidase | |
| 700282533H2 | g303733 | 39 | −31 | gb105pln | Pea mRNA for GTP-binding protein, complete cds. | |
| 700382615H1 | g2655294 | 24 | −6 | gb105pln | Oryza sativa germin-like protein 6 (GER6) mRNA, complete cds. | |
| 700282523H2 | g168314 | 16 | 7 | gb105eukp | Lol pI; pollen allergen | |
| 700356827H1 | g606969 | 19 | −4 | gb105pln | Arabidopsis thaliana cytoplasmic ribosomal protein L18 mRNA, complete cds. | |
| 700353263H1 | g1906825 | 54 | −53 | gb105pln | A. thaliana hsp81.2 gene. | |
| 700352940H1 | g16427 | 15 | 8 | gb105allp | protease inhibitor II | |
| 700354831H1 | g897716 | 21 | −3 | gb105eukp | ZC504.4 | |
| 700353610H1 | g2668739 | 44 | −83 | gb105pln | Zea mays translation initiation factor GOS2 (TIF) mRNA, complete cds. | |
| 700356567H1 | g1911581 | 42 | −12 | gb105pln | Cyn d a = major allergen {clone 14c1 and CD1} [Cynodon dactylon = Bermuda grass, | |
| | | | | | pollen, mRNA Partial, 759 nt]. | |
| 700355459H1 | g886470 | 52 | −40 | gb105pln | C. roseus MetE mRNA for methionine synthase. | |
| 700382336H1 | g433040 | 22 | 14 | gb105pln | Zea mays W-22 clone PREM-1A retroelement PREM-1, partial sequence. | |
| 700356517H1 | g2314803 | 27 | −10 | gb105pln | Oryza sativa signal recognition particle RNA sequence. | |
| 700356057H1 | g1518540 | 18 | 1 | gb105allp | UDP-glucose dehydrogenase | |
| 700354929H1 | g473359 | 23 | −6 | gb105pln | P. pratense mRNA for Phl pI allergen | |
| 700352905H1 | g2655388 | 34 | −9 | gb105eukp | Cytb; cytochrome b | |
| 700352838H1 | g2827552 | 20 | 2 | gb105eukp | T12H17.140; predicted protein | |
| 700382956H1 | g550543 | 23 | −2 | gb105pln | A. thaliana mRNA for ribosomal protein L16. | |
| 700354253H1 | g414907 | 27 | −12 | gb105pn | P. pratense mRNA for pollen allergen Phl pI. | |
| 700382544H1 | g790583 | 29 | −4 | gb105eukp | ATOZI1 | |
| 700353963H1 | g22416 | 78 | −12 | gb105pln | Z. mays mRNA for polygalacturonase (clone PG1). | |
| 700382946H1 | g20323 | 37 | −29 | gb105pln | O. sativa RAc1 gene for actin. | |
| 700353002H1 | g296447 | 12 | 4 | gb105eukp | unnamed protein product | |
| 700354909H1 | g288373 | 69 | −62 | gb105pln | Z. mays PGg6 gene for polygalacturonase. | |
| 700356750H1 | g288611 | 87 | −34 | gb105pln | Z. mays PG gene for polygalacturonase. | |
| 700355446H1 | g17782 | 27 | 1 | gb105eukp | Bplo | |
| 700352674H1 | g169435 | 41 | −27 | gb105pln | P. agilis beta-2 tubulin (beta-2-tub) gene, complete cds. | |
| 700354380H1 | g310934 | 28 | 0 | gb105pln | Nicotiana tabacum ribosomal protein L25, complete cds. | |
| 700355839H1 | g1872162 | 19 | −17 | gb105pln | Arabidopsis thaliana DnaJ homolog (atj) mRNA, complete cds. | |
| 700356010H1 | g463269 | 10 | 8 | gb105eukp | YBL0410 | |
| 700356675H1 | g2501763 | 36 | −2 | gb105pln | Glycine max calmodulin-like domain protein kinase isoenzyme beta mRNA, | |
| | | | | | complete cds. | |
| 700356230H1 | g218082 | 40 | −9 | gb105pln | Rice mRNA for initiation factor eIF-4D (225 gene), partial sequence. | |
| 700383160H1 | g600768 | 36 | −34 | gb105pln | Oryza sativa cyclophilin 2 (Cyp2) mRNA, complete cds. | |
| 700382435H1 | g288373 | 78 | −4 | gb105pln | Z. mays PGg6 gene for polygalacturonase. | |
| 700382256H1 | g170240 | 40 | −20 | gb105pln | Tobacco (N. tabacum) GapC mRNA encoding cytosolic glyceraldehyde-3-phosphophate | |
| | | | | | dehydrogenase, partial cds. | |
| 700382171H1 | g2511690 | 17 | 7 | gb105pln | Phaseolus vulgaris Moldavian encoding cysteine proteinase precursor (clone cp41). | |
| 700352717H1 | g2827552 | 18 | −1 | gb105eukp | T12H17.140; predicted protein | |
| 700382067H1 | g1806139 | 25 | −16 | gb105pln | M. sativa mRNA for cdc2 kinase homologue, cdc2MsC. | |
| 700355778H1 | g2138315 | 13 | 0 | gb105pln | Arabidopsis thaliana root hair defective 3 (RHD3) gene, complete cds. | |
| 700353102H1 | g287829 | 96 | −59 | gb105pln | Z. mays gene for polygalacturonase. | |
| 700282469H2 | g288378 | 64 | −87 | gb105pln | Z. mays gene PG for polygalacturonase. | |
| 700382445H1 | g602564 | 19 | −14 | gb105pln | C. paradisi (Macf) INO1 gene. | |
| 700382715H1 | g1262579 | 27 | −0 | gb105allp | NADH dehydrogenase subunit 1 | |
| 700353161H1 | g22458 | 17 | −1 | gb105pln | Z. mays pollen specific mRNA C-terminal (clone 4H7). | |
| 700353531H1 | g493621 | 16 | −3 | gb105pln | A. thaliana mRNA for chloroplast envelope Ca2+-ATPase, complete cds. | |
| 700383122H1 | g1665777 | 7 | 5 | gb105allp | Similar to S. cerevisiae EMP70 protein precursor (S25110) | |
| 700355742H1 | g836779 | 10 | 5 | gb105allp | YFR024C | |
| 700353742H1 | g348717 | 26 | −8 | gb105pln | Medicago truncatula protochlorophyllide reductase homolgue protein mRNA, | |
| | | | | | complete cds. | |
| 700356668H1 | g218088 | 57 | −17 | gb105pln | Rice mRNA for ribosomal protein 117 (249 gene), partial sequence. | |
| 700382348H1 | g170286 | 21 | −15 | gb105pln | Tobacco phytochrome B (phyB) mRNA, 3′ end. | |
| 700353054H1 | g294639 | 12 | 2 | gb105allp | sulfite oxidase | |
| 700353255H1 | g1345549 | 6 | 2 | gb105eukp | NPG; polygalacturonase; EC 3.2.1.15 | |
| 700354535H1 | g2431768 | 41 | −45 | gb105pln | Zea mays acidic ribosomal protein P1a (rpp1a) mRNA, complete cds. | |
| 700355728H1 | g2623295 | 11 | 2 | gb105eukp | T20B5.1 | |
| 700356208H1 | g313139 | 65 | −21 | gb105pln | Z. mays ZmPRO2 mRNA for profilin 2. | |
| 700355168H1 | g2809386 | 26 | −25 | gb105pln | Petroselinum crispum NADPH cytochrome P450 reductase (CPR1) mRNA, | |
| | | | | | complete cds. | |
| 700382542H1 | g1899187 | 21 | −14 | gb105pln | Nicotiana tabacum DNA binding protein ACBF mRNA, complete cds. | |
| 700354973H1 | g2198791 | 7 | −1 | gb105allp | phosphatidylinositol 4-kinase | |
| 700353054H1 | g540487 | 7 | 8 | gb105allp | nitrate reductase | |
| 700382687H1 | g699510 | 22 | −7 | gb105eukp | M(1)1B; minute(1)1B protein; minute(1)1B | |
| 700354931H1 | g22416 | 96 | −60 | gb105pln | Z. mays mRNA for polygalacturonase (clone PG1). | |
| 700354938H1 | g313141 | 49 | −33 | gb105pln | Z. mays ZmPRO3 mRNA for profilin 3. | |
| 700353202H1 | g1289203 | 43 | −36 | gb105pln | A. glutinosa mRNA for thiazole biosynthetic enzyme. | |
| 700353562H1 | g22314 | 94 | −47 | gb105pln | Maize mRNA for GSH gluthathione S-transferase I (GST; EC 2.5.1.18). | |
| 700382817H1 | g1749610 | 8 | 6 | gb105eukp | similar to Saccharomyces cerevisiae unknown, EMBL Accession Number Z68195 | |
| 700356086H1 | g540581 | 9 | 3 | gb105eukp | mudrA | |
| 700354373H1 | g476154 | 36 | −23 | gb105pln | Porphyra purpurea elongation factor EF1-alpha (tef-c) mRNA, complete cds. | |
| 700382314H1 | g312180 | 31 | −54 | gb105pln | Z. mays GapC4 gene. | |
| 700282456H2 | g1147612 | 26 | −18 | gb105eukp | MOT1; Mot1p: a putative helicase | |
| 700382221H1 | g288378 | 75 | −51 | gb105pln | Z. mays gene PG for polygalacturonase. | |
| 700382025H1 | g2529657 | 15 | 7 | gb105pln | Arabidopsis thaliana chromosome II BAC T30B22 genomic sequence, complete | |
| | | | | | sequence. | |
| 700355296H1 | g1749568 | 43 | 4 | gb105allp | similar to Saccharomyces cerevisiae eukaryotic initiation factor 4F subunit P130, | |
| | | | | | SWISS-PROT Accession Number P39936 | |
| 700356240H1 | g14264 | 59 | −61 | gb105pln | T. aestivum gene for sedoheptulose-1,7-bisphoshatase. | |
| 700356188H1 | g166690 | 10 | 2 | gb105allp | 3-deoxy-D-arabino-heptulosonate 7-phosphate synthase | |
| 700352844H1 | g1296806 | 28 | −23 | gb105pln | H. vulgare xylose isomerase gene. | |
| 700354926H1 | g2696803 | 18 | −2 | gb105pln | Oryza sativa mRNA for water channel protein, complete cds. | |
| 700354351H1 | g340368 | 15 | 2 | gb105allp | transfer RNA-Trp synthetase | |
| 700383004H1 | g1591622 | 10 | 3 | gb105allp | histidinol-phosphate aminotransferase (hisC) | |
| 700382339H1 | g16210 | 55 | −47 | gb105pln | Arabidopsis thaliana calnexin homolog. | |
| 700382252H1 | g1946361 | 8 | 6 | gb105eukp | T06B20.7 | |
| 700356667H1 | g1399567 | 59 | −18 | gb105pln | Podophyllum peltatum nuclear 26S ribosomal RNA gene, partial sequence. | |
| 700282591H2 | g1743378 | 23 | 5 | gb105allp | 3-hydroxy-3-methylglutaryl CoA lyase | |
| 700356209H1 | g312180 | 26 | −1 | gb105pln | Z. mays GapC4 gene. | |
| 700354660H1 | g606969 | 27 | −9 | gb105pln | Arabidopsis thaliana cytoplasmic ribosomal protein L18 mRNA, complete cds. | |
| 700356122H1 | g16379 | 17 | −8 | gb105pln | A. thaliana mRNA for laminin receptor homologue. | |
| 700353213H1 | g22416 | 79 | −68 | gb105pln | Z. mays mRNA for polygalacturonase (clone PG1). | |
| 700352636H1 | g1302311 | 6 | 8 | gb105eukp | ATX1 | |
| 700353611H1 | g21840 | 41 | −34 | gb105pln | T. aestivum RNA for phosphoribulokinase. | |
| 700352701H1 | g1794223 | 37 | −19 | gb105allp | DNA ligase III-alpha | |
| 700354754H1 | g289658 | 42 | −14 | gb105eukp | C50C3.6 protein | |
| 700354341H1 | g303854 | 45 | −59 | gb105pln | Rice mRNA for ribosomal protein L7A, complete cds. | |
| 700353549H1 | g829147 | 98 | −15 | gb105pln | Z. mays gene for cyclophilin. | |
| 700382005H1 | g450292 | 62 | −74 | gb105pln | Zea mays alpha-tubulin mRNA, complete cds. | |
| 700355010H1 | g485376 | 79 | −57 | gb105pln | Zea mays alpha-3-tubulin gene, complete cds. | |
| 700382393H1 | g2293565 | 25 | −0 | gb105pln | Oryza sativa ADP-ribosylation factor 1 (Os-ARF1) mRNA, complete cds. | |
| 700382166H1 | g577611 | 75 | −73 | gb105pln | zea mays CRT1 gene for clacium-binding protein. | |
| 700355780H1 | g517349 | 21 | 6 | gb105allp | metallothionein Ih | |
| 700382957H1 | g287829 | 28 | −28 | gb105pln | Z. mays gene for polygalacturonase. | |
| 700352942H1 | g2653284 | 57 | −36 | gb105pln | Oryza sativa mRNA for enoyl-ACP reductase. | |
| 700352929H1 | g1209016 | 50 | −9 | gb105allp | PH-20 homolog, similar to GenBank Accession Number S67798 | |
| 700282504H2 | g965472 | 16 | 6 | gb105allp | glutaredoxin-like protein | |
| 700354492H1 | g4790 | 27 | −8 | gb105eukp | YKL253 | |
| 700382232H1 | g1864023 | 24 | −3 | gb105pln | Cynodon dactylon calcium-binding pollen allergen gene, partial cds. | |
| 700282576H2 | g1749516 | 38 | −24 | gb105eukp | similar to Saccharomyces cerevisiae ornithine-oxo-acid aminotransferase, SWISS-PROT | |
| | | | | | Accession Number P07991 | |
| 700357426H1 | g2415406 | 8 | 4 | gb105allp | YodT | |
| 700383115H1 | g2055419 | 22 | −7 | gb105allp | ribosomal protein S12 | |
| 700382596H1 | g4321266 | 25 | −4 | gb105eukp | UBC4; ubiquitin conjugating enzyme | |
| 700382101H1 | g2245378 | 25 | −7 | gb105eukp | ARF1; auxin response factor 1 | |
| 700356777H1 | g1778820 | 65 | −23 | gb105pln | Oryza sativa S-adenosyl-L-methionine synthetase (pOS-SAMS2) mRNA, complete cds. | |
| 700356111H1 | g168460 | 39 | −79 | gb105pln | Zea mays cyclophilin (CyP) mRNA, complete cds. | |
| 700355217H1 | g288373 | 21 | 1 | gb105pln | Z. mays PGg6 gene for polygalacturonase. | |
| 700354675H1 | g1016136 | 21 | −3 | gb105eukp | rp15; ribosomal protein L5 | |
| 700382035H1 | g1755008 | 34 | −62 | gb105pln | Triticum aestivum calmodulin TRaCaM4-1 mRNA, complete cds. | |
| 700383175H1 | g473359 | 25 | −9 | gb105pln | P. pratense mRNA for Phl pI allergen. | |
| 700354342H1 | g218510 | 11 | 15 | gb105pln | Yeast genomic DNA for ribosomal protein YL16, complete cds. | |
| 700354944H1 | g1185555 | 44 | −38 | gb105pln | Zea mays glyceraldehyde-3-phosphate dehydrogenase (gpc4) gene, partial cds. | |
| 700352870H1 | g414702 | 46 | −33 | gb105pln | H. lanatus mRNA for allergen Hol-lI. | |
| 700354724H1 | g3075 | 18 | 1 | gb105pln | N. crassa mRNA for a ribosomal protein. | |
| 700353113H1 | g288366 | 95 | −79 | gb105pln | Z. mays PGg14 gene for polygalacturonase. | |
| 700356242H1 | g2570505 | 35 | 3 | gb105allp | proteasome component | |
| 700357429H1 | g602605 | 92 | −56 | gb105pln | Zea mays tandem genes for alpha1-tubulin and alpha2-tubulin. | |
| 700353162H1 | g288366 | 51 | −58 | gb105pln | Z. mays PGg14 gene for polygalacturonase. | |
| 700382101H1 | g2262117 | 24 | −2 | gb105eukp | T19F06.20; auxin inducible protein isolog | |
| 700354734H1 | g288378 | 76 | −69 | gb105pln | Z. mays gene PG for polygalacturonase. | |
| 700382033H1 | g1568635 | 22 | 4 | gb105eukp | host cell receptor involved in nuclear import of Agrobacterium VirD2 protein; | |
| | | | | | AtKAP alpha | |
| 700356821H1 | g1498325 | 33 | −40 | gb105pln | Glycine max actin (Soy86) gene, partial cds. | |
| 700356229H1 | g939780 | 36 | −29 | gb105pln | Zea mays MADS-box protein (ZAG5) mRNA, complete cds. | |
| 700354427H1 | g2190419 | 39 | −16 | gb105eukp | dem | |
| 700353525H1 | g288366 | 51 | −58 | gb105pln | Z. mays PGg14 gene for polygalacturonase. | |
| 700354575H1 | g288373 | 86 | −31 | gb105pln | Z. mays PGg6 gene for polygalacturonase. | |
| 700357174H1 | g2814799 | 8 | 0 | gb105eukp | ZK858.6 | |
| 700353676H1 | g22458 | 97 | −86 | gb105pln | Z. mays pollen specific mRNA C-terminal (clone 4H7). | |
| 700354351H1 | g30821 | 15 | 2 | gb105allp | 471 aa polypeptide (gamma 2) | |
| 700352874H1 | g1749576 | 19 | 1 | gb105eukp | similar to Saccharomyces cerevisiae acetyl-CoA acetyltransferase, SWISS-PROT | |
| | | | | | Accession Number P41338 | |
| 700354741H1 | g2301337 | 39 | −1 | gb105allp | unnamed protein product | |
| 700355414H1 | g967967 | 15 | 10 | gb105pln | Brassica campestris ssp. pekinensis (clone bif11) photosystem II 10 kDa polypeptide | |
| | | | | | mRNA, complete cds. | |
| 700282521H2 | g2760334 | 16 | −0 | gb105eukp | F1N21.5 | |
| 700352683H1 | g599624 | 17 | −11 | gb105pln | A. thaliana mRNA for aconitase (ZAPII). | |
| 700382787H1 | g2262097 | 18 | 8 | gb105pln | Arabidopsis thaliana BAC T19F06 genomic sequence, complete sequence. | |
| 700357143H1 | g288611 | 92 | −86 | gb105pln | Z. mays PG gene for polygalacturonase. | |
| 700356281H1 | g288366 | 84 | −53 | gb105pln | Z. mays PGg14 gene for polygalacturonase. | |
| 700356939H1 | g395078 | 33 | −12 | gb105pln | B. rapa ubiquitin and ribosomal protein mRNA, complete CDS's. | |
| 700382258H1 | g2244965 | 18 | −3 | gb105eukp | unnamed protein product | |
| 700357430H1 | g439273 | 32 | 2 | gb105eukp | blt101; not known; 54 amino acids | |
| 700354926H1 | g1667593 | 19 | −1 | gb105pln | Oryza sativa transmembrane protein mRNA, complete cds. | |
| 700383132H1 | g473360 | 21 | 2 | gb105allp | Phl pI allergen | |
| 700357129H1 | g414702 | 31 | −21 | gb105pln | H. lanatus mRNA for allergen Hol-lI. | |
| 700357178H1 | g414702 | 31 | −20 | gb105pln | H. lanatus mRNA for allergen Hol-lI. | |
| 700356745H1 | g397958 | 45 | −23 | gb105pln | Z. mays mRNA for beta-amylase. | |
| 700357491H1 | g2326873 | 45 | −9 | gb105pln | S. tuberosum mRNA for plastidic ATP/ADP-transporter. | |
| 700353293H1 | g22458 | 78 | −84 | gb105pln | Z. mays pollen specific mRNA C-terminal (clone 4H7). | |
| 700356750H1 | g288378 | 70 | −25 | gb105pln | Z. mays gene PG for polygalacturonase. | |
| 700357469H1 | g288366 | 50 | −4 | gb105pln | Z. mays PGg14 gene for polygalacturonase. | |
| 700353962H1 | g1185555 | 21 | −5 | gb105pln | Zea mays glyceraldehyde-3-phosphate dehydrogenase (gpc4) gene, partial cds. | |
| 700353983H1 | g170784 | 50 | −26 | gb105pln | Wheat ubiquitin carrier protein (UBC1) mRNA, complete cds. | |
| 700356487H1 | g168625 | 98 | −63 | gb105pln | Maize sucrose phosphate synthase mRNA, complete cds. | |
| 700354394H1 | g2624416 | 33 | −19 | gb105pln | Zea mays mRNA for ubiquitin carrier protein UBC7. | |
| 700282420H2 | g2827637 | 11 | 4 | gb105eukp | F10N7.190; putative protein | |
| 700383050H1 | g288062 | 13 | 13 | gb105pln | A. thaliana mRNA for ketol-acid reductoisomerase subunit. | |
| 700356974H1 | g1458245 | 10 | 8 | gb105eukp | F54D11.1 | |
| 700382241H1 | g2191157 | 10 | 16 | gb105pln | Arabidopsis thaliana BAC IG002P16. | |
| 700352694H1 | g22416 | 74 | −66 | gb105pln | Z. mays mRNA for polygalacturonase (clone PG1). | |
| 700353643H1 | g36146 | 8 | 7 | gb105allp | ribosomal protein S12 | |
| 700354276H1 | g1469118 | 11 | 6 | gb105eukp | K08E7.2 | |
| 700382657H1 | g929917 | 35 | −12 | gb105pln | Z. mays ABP1 mRNA for actin-depolymerizing factor. | |
| 700355593H1 | g1246115 | 20 | −8 | gb105pln | major allergen Pha a 1 [Phalaris aquatica = canary grass, pollen, mRNA Partial, | |
| | | | | | 1088 nt]. | |
| 700382687H1 | g458972 | 16 | −3 | gb105eukp | F37C12.4 | |
| 700355589H1 | g1022807 | 30 | −26 | gb105eukp | cellulase | |
| 700354824H1 | g992962 | 23 | −3 | gb105eukp | thioredoxin | |
| 700382640H1 | g1235570 | 29 | −17 | gb105pln | P. anserina su12 gene. | |
| 700382823H1 | g1184775 | 47 | −33 | gb105pln | Zea mays glyceraldehyde-3-phosphate dehydrogenase GAPC4 (gpc4) mRNA, | |
| | | | | | complete cds. | |
| 700382779H1 | g2225880 | 43 | −10 | gb105pln | Solanum tuberosum mRNA for eukaryotic initiation factor 5A3, complete cds. | |
| 700353405H1 | g2266661 | 50 | −27 | gb105pln | Hordeum vulgare mRNA for 14-3-3 protein (Hv1433c). | |
| 700353148H1 | g2351062 | 41 | −14 | gb105pln | Arabidopsis thaliana genomic DNA, chromosome 5, P1 clone: MAH20. | |
| 700353834H1 | g1167835 | 18 | 3 | gb105pln | H. lanatus mRNA for Hol lI protein. | |
| 700354652H1 | g1911581 | 30 | −15 | gb105pln | Cyn d 1 = major allergen {clone 14c1 and CD1} [Cynodon dactylon = Bermuda grass, | |
| | | | | | pollen, mRNA Partial, 759 nt]. | |
| 700382033H1 | g2154717 | 22 | 4 | gb105eukp | Kap alpha protein | |
| 700382663H1 | g170047 | 25 | −14 | gb105eukp | PK6; protein kinase | |
| 700382541H1 | g1142653 | 38 | −14 | gb105allp | alpha NAC/1.9.2. protein | |
| 700353168H1 | g312180 | 27 | −48 | gb105pln | Z. mays GapC4 gene. | |
| 700352802H1 | g2226414 | 9 | 5 | gb105eukp | SPBC31F10.03; hypothetical protein | |
| 700356901H1 | g1495259 | 17 | 6 | gb105allp | orf04 | |
| 700382110H1 | g168313 | 9 | 12 | gb105pln | L. perenne pollen allergen (Lol pI) gene, 3′ end. | |
| 700282511H2 | g643596 | 39 | 8 | gb105pln | Corn mRNA for cysteine proteinase, clone CCP, complete cds. | |
| 700357412H1 | g1171161 | 27 | −9 | gb105eukp | pectate lyase homolog | |
| 700282489H2 | g166548 | 33 | 0 | gb105pln | Avena sativa vacuolar H+-ATPase 16 kDa proteolipid subunit (vatp-P1) mRNA, | |
| | | | | | complete cds. | |
| 700382053H1 | g1181261 | 9 | 5 | gb105allp | dolichyl-phosphate beta-glucosyltransferase | |
| 700282473H2 | g833835 | 27 | −4 | gb105eukp | amygdalin hydrolase isoform AH I precursor | |
| 700355237H1 | g1203832 | 25 | −10 | gb105eukp | beta-D-glucan exohydrolase, isoenzyme ExoII; EC 3.2.1.58 | |
| 700354562H1 | g2668737 | 29 | −2 | gb105pln | Zea mays translation initiation factor 5A (TIF5A) mRNA, complete cds. | |
| 700353236H1 | g2529663 | 10 | −2 | gb105eukp | T30B22.6; putative lysophospholipase | |
| 700382790H1 | g22425 | 68 | −59 | gb105pln | Z. mays gene for polygalacturonase (clone 47). | |
| 700352841H1 | g2736190 | 14 | 5 | gb105allp | (p)ppGpp synthetase | |
| 700356637H1 | g313137 | 32 | −1 | gb105pln | Z. mays ZmPRO1 mRNA for profilin 1. | |
| 700352705H1 | g507823 | 21 | −5 | gb105eukp | A622 | |
| 700355858H1 | g1136119 | 34 | −32 | gb105pln | O. sativa mRNA for alpha-tubulin (clone OSTA-111). | |
| 700353742H1 | g957250 | 22 | −2 | gb105pln | FEY = forever young gene [Arabidopsis thaliana, Genomic/mRNA, 1450 nt]. | |
| 700353888H1 | g2388586 | 28 | −13 | gb105eukp | YUP8H12.27 | |
| 700382512H1 | g535587 | 15 | 3 | gb105pln | Arabidopsis thaliana chaperone protein (atj) mRNA, complete cds. | |
| 700356747H1 | g218001 | 39 | 1 | gb105allp | UDP-glucose pyrophosphorylase precursor | |
| 700355846H1 | g288611 | 74 | −79 | gb105pln | Z. mays PG gene for polygalacturonase. | |
| 700356725H1 | g2351063 | 27 | 9 | gb105pln | Arabidopsis thaliana genomic DNA, chromosome 5, P1 clone: MCL19. | |
| 700354550H1 | g416256 | 27 | 3 | gb105pln | Rice mRNA for H+-ATPase, partial sequence. | |
| 700355069H1 | g20321 | 33 | −1 | gb105pln | Oryza sativa RAc1 mRNA for actin. | |
| 700352602H1 | g203918 | 9 | 0 | gb105allp | dihydrodiol dehydrogenase | |
| 700357409H1 | g736271 | 28 | −17 | gb105pln | O. sativa hsp70 gene for heat shock protein 70. | |
| 700353888H1 | g476069 | 19 | −2 | gb105eukp | YBR0909 RAD16; UV damage repair protein | |
| 700353726H1 | g303855 | 26 | 5 | gb105allp | ribosomal protein L7A | |
| 700382311H1 | g2735236 | 11 | 3 | gb105allp | GlxB1 | |
| 700382742H1 | g473359 | 15 | −5 | gb105pln | P. pratense mRNA for Phl pI allergen. | |
| 700382439H1 | g2814650 | 12 | 6 | gb105eukp | R09B3.3 | |
| 700355707H1 | g22458 | 43 | −50 | gb105pln | Z. mays pollen specific mRNA C-terminal (clone 4H7). | |
| 700355438H1 | g22204 | 12 | 15 | gb105pln | Maize Bz-McC gene for UDPglucose flavonoid glycosyl-transferase. | |
| 700355428H1 | g1911581 | 13 | 14 | gb105pln | Cyn d 1 = major allergen {clone 14c1 and CD1} [Cynodon dactylon = Bermuda grass, | |
| | | | | | pollen, mRNA Partial, 759 nt]. | |
| 700353779H1 | g1835731 | 8 | 7 | gb105allp | photosystem II 10 kDa polypeptide | |
| 700353841H1 | g2656029 | 13 | 16 | gb105pln | Arabidopsis thaliana genomic DNA, chromosome 5, P1 clone: MQB2. | |
| 700356130H1 | g304037 | 8 | 2 | gb105eukp | ENOD8; early nodulin | |
| 700282587H2 | g313141 | 24 | −9 | gb105pln | Z. mays ZmPRO3 mRNA for profilin 3. | |
| 700355887H1 | g1750379 | 32 | −42 | gb105pln | Eucalyptus globulus NADP-isocitrate dehydrogenase (EgICDH) mRNA, complete cds. | |
| 700382175H1 | g1903420 | 8 | 4 | gb105allp | p71 | |
| 700356270H1 | g2463564 | 32 | −24 | gb105pln | Oryza sativa mRNA for squalene synthase, complete cds. | |
| 700383122H1 | g1931647 | 10 | 2 | gb105eukp | T19D16.13; endomembrane protein EMP70 recursor isolog | |
| 700356660H1 | g549983 | 69 | −24 | gb105pln | Pennisetum ciliare possible apospory-associated mRNA clone PSUB C, complete cds. | |
| 700355412H1 | g2505864 | 34 | −19 | gb105pln | Arabidopsis thaliana DNA, 24 kb surrounding PFL locus | |
| 700355159H1 | g22421 | 50 | −57 | gb105pln | Z. mays mRNA for polygalacturonase (clone PG3). | |
| 700354692H1 | g167107 | 59 | −40 | gb105pln | Hordeum vulgare vacuolar ATPase B subunit isoform mRNA, complete cds. | |
| 700353969H1 | g313137 | 27 | −5 | gb105pln | Z. mays ZmPRO1 mRNA for profilin 1. | |
| 700354704H1 | g2992 | 19 | −8 | gb105pln | Neurospora crassa crp-1 mRNA for ribosomal protein homologous to Yeast cyH2 gene | |
| | | | | | encoding L29. | |
| 700382807H1 | g22614 | 48 | −52 | gb105pln | S. vulgare pepC gene for PEP carboxylase. | |
| 700354535H1 | g18210 | 17 | 5 | gb105pln | C. reinhardtii mRNA for ribosomal protein P1. | |
| 700383088H1 | g206453 | 57 | −19 | gb105allp | prostatic steroid-binding protein C3 precursor | |
| 700382870H1 | g1218004 | 22 | −8 | gb105eukp | cell plate formation; SDL5A | |
| 700357412H1 | g19451 | 26 | −8 | gb105eukp | pectate lyase | |
| 700355525H1 | g1009231 | 24 | −5 | gb105pln | Nicotiana tabacum EF-1-alpha-related GTP-binding protein (SUP1) mRNA, | |
| | | | | | complete cds. | |
| 700382902H1 | g1568627 | 9 | 0 | gb105eukp | heat shock protein 110 | |
| 700353038H1 | g809535 | 26 | 8 | gb105pln | B. verrucosa mRNA for BETV4 pollen allergen | |
| 700352765H1 | g311334 | 9 | 6 | gb105pln | S. vulgare ltp1 mRNA. | |
| 700356422H1 | g747914 | 30 | −48 | gb105pln | Z. mays CaM1 mRNA for calmodulin. | |
| 700382412H1 | g22456 | 92 | −16 | gb105pln | Z. mays pollen specific mRNA C-terminal (clone 3C12). | |
| 700382094H1 | g20359 | 43 | −73 | gb105pln | Rice gene for 17S ribosomal RNA. | |
| 700352841H1 | g2635224 | 12 | 6 | gb105allp | GTP pyrophosphokinase | |
| 700383115H1 | g872315 | 27 | −10 | gb105allp | 40S ribosomal protein S12 | |
| 700382391H1 | g780371 | 63 | −48 | gb105pln | Oryza sativa enolase mRNA, complete cds. | |
| 700353059H1 | g2245131 | 15 | −7 | gb105eukp | hypothetical protein | |
| 700357196H1 | g2739383 | 20 | −6 | gb105eukp | T9J22.26 | |
| 700356668H1 | g310932 | 41 | −2 | gb105pln | Nicotiana tabacum ribosomal protein L17 mRNA, complete cds. | |
| 700355662H1 | g998429 | 24 | 4 | gb105pln | GRF1 = general regulatory factor [Zea mays, XL80, Genomic, 5348 nt]. | |
| 700282511H2 | g559531 | 92 | −28 | gb105pln | Z. mays mRNA for cysteine proteinase. | |
| 700353874H1 | g313137 | 52 | −66 | gb105pln | Z. mays ZmPRO1 mRNA for profilin 1. | |
| 700352824H1 | g2654088 | 13 | 6 | gb105allp | potassium transporter | |
| 700352770H1 | g2459421 | 31 | −13 | gb105eukp | F4P9.15; similar to calcium-binding EF-hand protein | |
| 700353516H1 | g2384676 | 33 | −13 | gb105pln | Arabidopsis thaliana putative potassium transporter AtKT5p (AtKT5) mRNA, | |
| | | | | | partial cds. | |
| 700354367H1 | g20061 | 17 | −29 | gb105pln | O. hookeri mRNA for protein kinase C inhibitor homologue. | |
| 700353233H1 | g22427 | 54 | −53 | gb105pln | Z. mays gene for polygalacturonase (clone 65). | |
| 700357143H1 | g288378 | 76 | −72 | gb105pln | Z. mays gene PG for polygalacturonase. | |
| 700355995H1 | g1616658 | 53 | −43 | gb105pln | Triticum aestivum adenylosuccinate synthetase mRNA, partial cds. | |
| 700353875H1 | g453975 | 42 | −20 | gb105pln | P. pratense mRNA for profilin-Phl pXI. | |
| 700382242H1 | g871509 | 14 | 12 | gb105pln | P. sativum mRNA for small GTP-binding protein (clone pGTP6). | |
| 700382138H1 | g1542941 | 21 | 8 | gb105eukp | AACT; Acetoacetyl-coenzyme A thiolase; EC 2.3.1.9 | |
| 700356010H1 | g2104535 | 11 | 5 | gb105eukp | T10M13.13; T10M13.13 | |
| 700355742H1 | g1944389 | 9 | 3 | gb105allp | Ray | |
| 700355324H1 | g529705 | 20 | 7 | gb105eukp | cct-6; C. elegans cct-6 (similar to T complex proteins, Tcp-1-related, Cctz) | |
| 700382489H1 | g2344908 | 51 | −41 | gb105allp | IgM heavy chain VH1 region precursor | |
| 700353294H1 | g2408091 | 10 | 2 | gb105eukp | SPAC8C9.08; 40s ribosomal protein | |
| 700353658H1 | g287810 | 60 | −54 | gb105pln | M. sativa mRNA for phosphoprotein phosphatase type 2A. | |
| 700355337H1 | g902583 | 69 | −70 | gb105pln | Zea mays clone MubG1 ubiquitin gene, complete cds. | |
| 700355306H1 | g414907 | 16 | −34 | gb105pln | P. pratense mRNA for pollen allergen PhlpI. | |
| 700354768H1 | g414702 | 31 | −12 | gb105pln | H. lanatus mRNA for allergen Hol-lI. | |
| 700383137H1 | g2851858 | 19 | 4 | gb105allp | unnamed protein product | |
| 700357468H1 | g2276465 | 55 | 4 | gb105eukp | FDH1; NAD-dependent formate dehyddrogenase; EC 1.2.1.2 | |
| 700353136H1 | g2558891 | 21 | 1 | gb105allp | GPI transamidase | |
| 700354280H1 | g22427 | 72 | −58 | gb105pln | Z. mays gene for polygalacturonase (clone 65). | |
| 700356739H1 | g22425 | 26 | −10 | gb105pln | Z. mays gene for polygalacturonase (clone 47). | |
| 700355061H1 | g432606 | 30 | −0 | gb105pln | ric1 = ras-related GTP binding protein possessing GTPase activity [Oryza sativa = rice, | |
| | | | | | Yamahoushi, callus, mRNA, 955 nt]. | |
| 700353266H1 | g402903 | 50 | −45 | gb105pln | Arabidopsis thaliana Columbia laminin receptor-like protein mRNA, complete cds. | |
| 700352918H1 | g473360 | 37 | −1 | gb105eukp | phl pI; Phl pI allergen | |
| 700353657H1 | g287829 | 38 | −49 | gb105pln | Z. mays gene for polygalacturonase. | |
| 700382992H1 | g643596 | 23 | −11 | gb105pln | Corn mRNA for cysteine proteinase, clone CCP, complete cds. | |
| 700352795H1 | g303854 | 52 | −43 | gb105pln | Rice mRNA for ribosomal protein L7A, complete cds. | |
| 700354725H1 | g2345149 | 52 | −44 | gb105pln | Arabidopsis thaliana developmentally regulated GTP binding protein (AtDRG1) mRNA, | |
| | | | | | complete cds. | |
| 700356533H1 | g2570402 | 7 | 6 | gb105allp | EEA1 | |
| 700383182H1 | g1296808 | 48 | −34 | gb105pln | H. vulgare mRNA for xylose isomerase. | |
| 700353418H1 | g288378 | 96 | −43 | gb105pln | Z. mays gene PG for polygalacturonase. | |
| 700353835H1 | g1403043 | 29 | −11 | gb105pln | H. chilense x T. turgidum conv. durum (Tritordeum) mRNA for S-adenosylmethionine | |
| | | | | | decarboxylase. | |
| 700353981H1 | g22149 | 80 | −61 | gb105pln | Z. mays mRNA for alpha-tubulin 3. | |
| 700354903H1 | g414703 | 32 | −5 | gb105eukp | allergen Hol-lI | |
| 700353534H1 | g1498315 | 37 | 6 | gb105eukp | IAP100 | |
| 700382961H1 | g2662342 | 18 | −30 | gb105pln | Oryza sativa mRNA for EF-1 alpha, complete cds. | |
| 700382336H1 | g433041 | 22 | 14 | gb105pln | Zea mays W-22 clone PREM-1B retroelement PREM-1, partial sequence. | |
| 700354406H1 | g2673846 | 43 | 8 | gb105allp | opal codon coding for selenocysteine | |
| 700354427H1 | g17959 | 15 | −8 | gb105eukp | cypro4 | |
| 700282414H2 | g473359 | 18 | 14 | gb105pln | P. pratense mRNA for Phl pI allergen. | |
| 700382511H1 | g169776 | 39 | −39 | gb105pln | Oryza sativa beta-amylase gene, complete cds. | |
| 700352748H1 | g169930 | 34 | −19 | gb105pln | Glycine max calcium dependent protein kinase mRNA. | |
| 700354231H1 | g1185555 | 41 | −25 | gb105pln | Zea mays glyceraldehyde-3-phosphate dehydrogenase (gpc4) gene, partial cds. | |
| 700383088H1 | g56994 | 57 | −19 | gb105allp | steroid binding protein | |
| 700382932H1 | g1765924 | 24 | 1 | gb105allp | B subunit of propionyl-CoA carboxylase | |
| 700354768H1 | g1246115 | 25 | −10 | gb105pln | major allergen Pha a1 [Phalaris aquatica = canary grass, pollen, mRNA Partial, | |
| 1088 nt]. | | | | | | |
| 700356101H1 | g168403 | 16 | −0 | gb105pln | Maize actin 1 gene (MAc1), complete cds. | |
| 700356990H1 | g22425 | 98 | −38 | gb105pln | Z. mays gene for polygalacturonase (clone 47). | |
| 700354713H1 | g1304265 | 34 | −23 | gb105pln | Wheat mRNA for HALF-1, complete cds. | |
| 700355153H1 | g1944572 | 20 | −24 | gb105pln | H. vulgare partial PAL mRNA for phenylalanine ammonia-lyase (1831 bp). | |
| 700354625H1 | g414703 | 9 | 7 | gb105eukp | allergen Hol-lI | |
| 700354406H1 | g306765 | 43 | 7 | gb105allp | glutathione peroxidase | |
| 700282482H2 | g1001649 | 12 | 1 | gb105allp | DNA gyrase A subunit | |
| 700352614H1 | g300115 | 37 | −5 | gb105allp | CD9 antigen [human, leukocytes, Peptide, 228 aa] | |
| 700354776H1 | g30381 | 10 | −1 | gb105allp | cytochrome oxidase subunit VIb | |
| 700352870H1 | g414907 | 48 | −35 | gb105pln | P. pratense mRNA for pollen allergen PhlpI. | |
| 700282457H2 | g1718236 | 8 | −1 | gb105eukp | (1,4)-beta-xylan endohydrolase, isoenzyme X-I; EC 3.2.1.8 | |
| 700382206H1 | g2501849 | 42 | −24 | gb105pln | Nicotiana tabacum GDP dissociation inhibitor (GDI) mRNA, complete cds. | |
| 700354748H1 | g487923 | 23 | 4 | gb105pln | Wheat mRNA for wpk4 protein kinase, complete cds. | |
| 700382072H1 | g2673869 | 24 | −6 | gb105pln | Antirrhinum majus mRNA for fimbriata-associated protein 2, partial. | |
| 700355985H1 | g1519248 | 42 | −24 | gb105pln | Oryza sativa GF14-b protein mRNA, complete cds. | |
| 700355846H1 | g288378 | 59 | −60 | gb105pln | Z. mays gene PG for polygalacturonase. | |
| 700356002H1 | g2340821 | 14 | −4 | gb105eukp | oxi-1; E6-AP ubiquitin-protein ligase | |
| 700352672H1 | g1930152 | 16 | 7 | gb105pln | Aspergillus fumigatus heat shock protein (Hsp1) mRNA, partial cds. | |
| 700354316H1 | g237969 | 4 | 5 | gb105eukp | nitrate reductase heme domain, NR; nitrate reductase heme domain | |
| 700357492H1 | g2668745 | 58 | −49 | gb105pln | Zea mays inorganic pyrophosphatase (IPP) mRNA, complete cds. | |
| 700356144H1 | g288611 | 49 | −76 | gb105pln | Z. mays PG gene for polygalacturonase. | |
| 700382267H1 | g606751 | 9 | 8 | gb105eukp | Rox2; Single-strand nucleic acid binding protein; RNA binding protein | |
| 700352957H1 | g2827142 | 32 | −19 | gb105pln | Arabidopsis thaliana cellulose synthase catalytic subunit (Ath-B) mRNA, complete cds. | |
| 700352771H1 | g218112 | 48 | −57 | gb105pln | Rice mRNA for ribosomal protein L41 (340 gene), partial sequence. | |
| 700356911H1 | g22425 | 96 | −36 | gb105pln | Z. mays gene for polygalacturonase (clone 47). | |
| 700354675H1 | g11288 | 21 | −3 | gb105eukp | ribosomal protein L5 (AA 1-181) | |
| 700282587H2 | g313137 | 40 | −60 | gb105pln | Z. mays ZmPRO1 mRNA for profilin 1. | |
| 700353995H1 | g288366 | 78 | −6 | gb105pln | Z. mays PGg14 gene for polygalacturonase. | |
| 700356487H1 | g1311478 | 60 | −36 | gb105pln | Rice sucrose phosphate synthase (SPS) gene, complete cds. | |
| 700352641H1 | g435312 | 16 | −4 | gb105pln | Z. mays mRNA for beta-D-glucosidase. | |
| 700382175H1 | g2062605 | 8 | 3 | gb105allp | brain secretory protein hSec10p | |
| 700356775H1 | g289124 | 46 | −9 | gb105pln | Medicago sativa MAP kinase MsERK1 mRNA, complete cds. | |
| 700355463H1 | g22416 | 33 | −61 | gb105pln | Z. mays mRNA for polygalacturonase (clone PG1). | |
| 700357129H1 | g414907 | 31 | −22 | gb105pln | P. pratense mRNA for pollen allergen PhlpI. | |
| 700357178H1 | g414907 | 31 | −21 | gb105pln | P. pratense mRNA for pollen allergen PhlpI. | |
| 700356950H1 | g1213072 | 52 | −2 | gb105pln | O. sativa (Tainong 67) mRNA for heat shock protein 17.8. | |
| 700355186H1 | g255568 | 9 | 16 | gb105pln | pollen specific protein [Zea mays = corn, mRNA, 943 nt]. | |
| 700356164H1 | g288378 | 54 | −60 | gb105pln | Z. mays gene PG for polygalacturonase. | |
| 700353026H1 | g1002533 | 44 | −0 | gb105eukp | ACT11; actin-11 | |
| 700383090H1 | g1750404 | 36 | −10 | gb105eukp | B0412.4 | |
| 700352614H1 | g34769 | 37 | −5 | gb105allp | MRP-1 (motility related protein) | |
| 700382108H1 | g510274 | 11 | 11 | gb105pln | Arabidopsis thaliana DET1 gene, complete cds. | |
| 700352766H1 | g488576 | 25 | −6 | gb105pln | Medicago sativa Regen S clone pH3c131 histone H3.2 mRNA, complete cds. | |
| 700382662H1 | g255568 | 28 | −23 | gb105pln | pollen specific protein [Zea mays = corn, mRNA, 943 nt]. | |
| 700353266H1 | g16379 | 50 | −45 | gb105pln | A. thaliana mRNA for laminin receptor homologue. | |
| 700356675H1 | g1399270 | 35 | −1 | gb105pln | Arabidopsis thaliana calmodulin-domain protein kinase CDPK isoform 2 (CPK2) | |
| | | | | | mRNA, complete cds. | |
| 700353695H1 | g168315 | 17 | 2 | gb105pln | L. perenne pollen allergen (Lol pI) gene, complete cds. | |
| 700353609H1 | g1707372 | 28 | 0 | gb105eukp | smt3; ubiquitin-like protein | |
| 700354786H1 | g168313 | 13 | 2 | gb105pln | L. perenne pollen allergen (Lol pI) gene, 3′ end. | |
| 700382351H1 | g533692 | 16 | −0 | gb105eukp | protease inhibitor | |
| 700382721H1 | g499011 | 69 | −59 | gb105pln | S. vulgare SoAc1 mRNA. | |
| 700382295H1 | g537274 | 27 | −27 | gb105pln | Histoplasma capsulatum elongation factor 1-alpha (Hctef1) mRNA, complete cds. | |
| 700356821H1 | g1498387 | 41 | −55 | gb105pln | Zea mays actin (Maz83) gene, partial cds. | |
| 700354175H1 | g886402 | 35 | −25 | gb105pln | Oryza sativa MADS-box protrein (mADS4) mRNA, complete cds. | |
| 700382257H1 | g2656031 | 18 | −25 | gb105pln | Arabidopsis thaliana genomic DNA, chromosome 5, P1 clone: MXC20. | |
| 700352852H1 | g22425 | 89 | −75 | gb105pln | Z. mays gene for polygalacturonase (clone 47). | |
| 700356575H1 | g2415701 | 18 | −21 | gb105pln | P. pratense mRNA for profilin 4. | |
| 700353153H1 | g602252 | 60 | −53 | gb105pln | Zea mays enolase (eno2) mRNA, complete cds. | |
| 700354260H1 | g1145627 | 19 | −9 | gb105eukp | lipase | |
| 700357125H1 | g22458 | 70 | −85 | gb105pln | Z. mays pollen speicif mRNA C-terminal (clone 4H7). | |
| 700352712H1 | g168460 | 49 | −46 | gb105pln | Zea mays cyclophilin (CyP) mRNA, complete cds. | |
| 700354455H1 | g2088650 | 11 | 7 | gb105eukp | T28M21.13; peroxisomal ATP/ADP carrier protein isolog | |
| 700357180H1 | g2388580 | 5 | 6 | gb105eukp | YUP8H12.22 | |
| 700353245H1 | g20309 | 22 | 2 | gb105pln | O. sativa DNA for pollen-specific gene. | |
| 700353542H1 | g2832623 | 33 | −16 | gb105eukp | F13C5.120; protein kinase-like protein | |
| 700355414H1 | g16446 | 10 | 9 | gb105pln | A. thaliana gene for photosystem II 10 kDa polypeptide. | |
| 700353258H1 | g1911581 | 26 | −9 | gb105pln | Cyn d 1 = major allergen {clone 14c1 and CD1} [Cynodon dactylon = Bermuda grass, | |
| | | | | | pollen, mRNA Partial, 759 nt]. | |
| 700353796H1 | g1419875 | 10 | 7 | gb105eukp | ORF YOL060c | |
| 700355783H1 | g407488 | 11 | 6 | gb105eukp | unknown | |
| 700356594H1 | g21629 | 19 | 17 | gb105pln | Sorghum vulgare mRNA for phosphoenolpyruvate carboxylase (PEPC). | |
| 700352639H1 | g2398678 | 33 | −8 | gb105pln | Morinda citrifolia mRNA for 3-deoxy-D-arabino-heptulosonate 7-phosphate synthase, | |
| | | | | | DS1. | |
| 700355701H1 | g22416 | 41 | −11 | gb105pln | Z. mays mRNA for polygalacturonase (clone PG1). | |
| 700383138H1 | g450367 | 30 | −15 | gb105pln | T. aestivum mRNA for eukaryotic initiation factor 4f subunit p26. | |
| 700357174H1 | g2435604 | 10 | −1 | gb105eukp | F08F1.7 | |
| 700382763H1 | g1621033 | 94 | −45 | gb105allp | adducin gamma subunit | |
| 700353030H1 | g473359 | 39 | −2 | gb105pln | P. pratense mRNA for Phl pI allergen. | |
| 700354828H1 | g22421 | 50 | −52 | gb105pln | Z. mays mRNA for polygalacturonase (clone PG3). | |
| 700352763H1 | g2154727 | 44 | −41 | gb105pln | C. dactylon mRNA for profilin 2. | |
| 700352909H1 | g22592 | 45 | −20 | gb105pln | S. vulgare PEPC gene for phosphoenolpyruvate carboxylase. | |
| 700352974H1 | g2352555 | 77 | −6 | gb105eukp | Hsp82; 82 kDa heat shock protein | |
| 700382280H1 | g2505870 | 27 | −24 | gb105eukp | hypothetical protein | |
| 700354212H1 | g2668737 | 45 | 6 | gb105pln | Zea mays translation initiation factor 5A (TIF5A) mRNA, complete cds. | |
| 700355461H1 | g2282583 | 82 | −69 | gb105pln | Zea mays elongation factor 1-alpha (EF1-A) mRNA, complete cds. | |
| 700355949H1 | g2274990 | 22 | −10 | gb105pln | Hordeum vulgare mRNA for expressed sequence tag. | |
| 700356976H1 | g1147612 | 54 | −3 | gb105eukp | MOT1; Mot1p: a putative helicase | |
| 700352677H1 | g561663 | 48 | −34 | gb105pln | Rice mRNA, partial homologous to ribosomal protein coding sequence. | |
| 700356111H1 | g829147 | 40 | −80 | gb105pln | Z. mays gene for cyclophilin. | |
| 700383130H1 | g22223 | 52 | −47 | gb105pln | Maize cab-1 gene for chlorophyll a/b-binding protein. | |
| 700353278H1 | g1167835 | 25 | −6 | gb105pln | H. lanatus mRNA for Hol lI protein. | |
| 700355543H1 | g1620022 | 26 | −6 | gb105allp | ribosomal protein L14 | |
| 700352653H1 | g22458 | 100 | −60 | gb105pln | Z. mays pollen specific mRNA C-terminal (clone 4H7). | |
| 700356516H1 | g2302294 | 20 | −3 | gb105allp | unnamed protein product | |
| 700353987H1 | g22420 | 53 | 6 | gb105pln | Z. mays mRNA for polygalacturonase (clone PG2). | |
| 700353680H1 | g1184773 | 79 | −76 | gb105pln | Zea mays glyceraldehyde-3-phosphate dehydrogenase GAPC3 (gpc3) mRNA, | |
| | | | | | complete cds. | |
| 700354394H1 | g170783 | 18 | 1 | gb105pln | T. aestivum ubiquitin carrier protein mRNA. | |
| 700354267H1 | g1771781 | 27 | −4 | gb105pln | T. aestivum mRNA for beta-amylase. | |
| 700355324H1 | g2300244 | 25 | 6 | gb105allp | unnamed protein product | |
| 700382310H1 | g293901 | 39 | −22 | gb105pln | Zea mays Zea mI gene, complete cds. | |
| 700382074H1 | g312180 | 34 | −75 | gb105pln | Z. mays GapC4 gene. | |
| 700357443H1 | g2827551 | 21 | −10 | gb105eukp | T12H17.130; predicted protein | |
| 700352718H1 | g436782 | 22 | −4 | gb105pln | Rice mRNA for cyc07, complete cds. | |
| 700355323H1 | g168313 | 23 | 9 | gb105pln | L. perenne pollen allergen (Lol pI) gene, 3′ end. | |
| 700382027H1 | g1495248 | 41 | −35 | gb105pln | A. thaliana mRNA for unknown protein, eRF1-3 gene. | |
| 700355006H1 | g20321 | 23 | −7 | gb105pln | Oryza sativa RAc1 mRNA for actin. | |
| 700282489H2 | g1622720 | 25 | 9 | gb105pln | Kalanchoe daigremontiana V-type H+-ATPase 16 kDa subunit mRNA, complete cds. | |
| 700353991H1 | g397958 | 40 | −48 | gb105pln | Z. mays mRNA for beta-amylase. | |
| 700357426H1 | g2182652 | 6 | 3 | gb105allp | Y4uB | |
| 700352957H1 | g2827138 | 37 | −26 | gb105pln | Arabidopsis thaliana cellulose synthase catalytic subunit (RSW1) gene, complete cds. | |
| 700355216H1 | g313137 | 98 | −92 | gb105pln | Z. mays ZmPRO1 mRNA for profilin 1. | |
| 700352941H1 | g2081611 | 47 | −14 | gb105pln | Rice mRNA for deltal-pyrroline-5-carboxylate synthetase, complete cds. | |
| 700353102H1 | g288366 | 95 | −59 | gb105pln | Z. mays PGg14 gene for polygalacturonase. | |
| 700356645H1 | g1173556 | 43 | −5 | gb105pln | Oryza sativa Ory s 1 mRNA, complete cds. | |
| 700354803H1 | g1632830 | 22 | −3 | gb105pln | R. communis mRNA (unknown). | |
| 700355223H1 | g435174 | 43 | −51 | gb105pln | A. sativa (Pewi) ASTCP-K36 mRNA for t complex polypeptide 1. | |
| 700382074H1 | g1184775 | 40 | −61 | gb105pln | Zea mays glyceraldehyde-3-phosphate dehydrogenase GAPC4 (gpc4) mRNA, | |
| | | | | | complete cds. | |
| 700382150H1 | g790583 | 25 | −10 | gb105eukp | ATOZI1 | |
| 700352972H1 | g1815759 | 26 | 3 | gb105eukp | pollen-specific protein | |
| 700353883H1 | g16836 | 20 | 2 | gb105allp | probable protease inhibitor P322 precursor (Bowman-Birk) | |
| 700353802H1 | g928932 | 14 | −6 | gb105eukp | D18; sugar metabolism; homolog of dTDP-glucose 4-6-dehydratases | |
| 700356069H1 | g1370204 | 62 | 14 | gb105pln | L. japonicus mRNA for small GTP-binding protein, RAN1B. | |
| 700352683H1 | g868002 | 22 | −17 | gb105pln | Pumpkin mRNA for aconitase, complete cds. | |
| 700354623H1 | g2264305 | 18 | 6 | gb105pln | Arabidopsis thaliana genomic DNA, chromosome 5, P1 clone: MBK23, complete | |
| | | | | | sequence. | |
| 700282418H2 | g1255713 | 82 | −80 | gb105pln | Sorghum bicolor granule-bound starch synthase precursor (Wx) mRNA, nuclear gene | |
| | | | | | encoding chloroplast protein, complete cds. | |
| 700352841H1 | g466814 | 14 | 6 | gb105allp | spoT; guanosine-3′,5′bis(diphosphate)3′-pyrophosphohydrolase; B1177_C1_168 | |
| 700352834H1 | g2342735 | 21 | −11 | gb105eukp | T14G11.28 | |
| 700352911H1 | g544501 | 10 | 2 | gb105eukp | SEC13; Sec13p | |
| 700354342H1 | g717059 | 11 | 14 | gb105pln | Yeast (Saccharomyces cerevisiae) chromosome XII cosmid 9324. | |
| 700282491H2 | g1280409 | 36 | −15 | gb105pln | Tacca plantaginea (Hance) Drenth 18S ribosomal RNA (18S rRNA) gene, | |
| | | | | | segment 1 of 2. | |
| 700382986H1 | g473360 | 8 | 8 | gb105eukp | phl pI; Phl pI allergen | |
| 700355540H1 | g1296435 | 16 | −2 | gb105eukp | leg10; legumin-like protein | |
| 700356573H1 | g2738247 | 42 | −31 | gb105pln | Arabidopsis thaliana cobalamin-independent methionine synthase (ATCIMS) mRNA, | |
| | | | | | complete cds. | |
| 700356660H1 | g531481 | 69 | −24 | gb105pln | P. ciliare (Higgins) apospory associated mRNA, 1398 bp. | |
| 700355901H1 | g1155262 | 22 | −3 | gb105pln | Arabidopsis thaliana eukaryotic release factor 1 homolog (eRF1) mRNA, partial cds. | |
| 700356144H1 | g288378 | 35 | −56 | gb105pln | Z. mays gene PG for polygalacturonase. | |
| 700356637H1 | g453975 | 31 | 11 | gb105pln | P. pratense mRNA for profilin-Phl pXI. | |
| 700355533H1 | g2583106 | 29 | −20 | gb105pln | Arabidopsis thaliana chromosome II BAC F4L23 genomic sequence, complete sequence. | |
| 700352705H1 | g2687724 | 20 | −4 | gb105eukp | NADPH:isoflavone reductase | |
| 700352676H1 | g1622720 | 34 | −14 | gb105pln | Kalanchoe daigremontiana V-type H+-ATPase 16 kDa subunit mRNA, complete cds. | |
| 700356746H1 | g414908 | 27 | 7 | gb105eukp | pollen allergen Phl pI | |
| 700282508H2 | g833835 | 8 | −6 | gb105eukp | amygdalin hydrolase isoform AH I precursor | |
| 700356415H1 | g168030 | 18 | 15 | gb105pln | Aspergillus nidulans calmodulin gene, complete cds. | |
| 700382357H1 | g623585 | 24 | −0 | gb105pln | Nicotiana tabacum SR1 Nt-rab6 mRNA, complete cds. | |
| 700354894H1 | g22416 | 60 | −68 | gb105pln | Z. mays mRNA for polygalacturonase (clone PG1). | |
| 700353191H1 | g246 | 10 | 2 | gb105allp | NADH dehydrogenase | |
| 700354768H1 | g414907 | 30 | −11 | gb105pln | P. pratense mRNA for pollen allergen PhlpI. | |
| 700356809H1 | g22144 | 52 | −18 | gb105pln | Maize anaerobically regulated gene for fructose bisphosphate aldolase (EC 4.1.2.13). | |
| 700356493H1 | g1694620 | 35 | −14 | gb105pln | Cucurbita sp. mRNA for 3-ketoacyl-CoA thiolase, complete cds. | |
| 700352658H1 | g287829 | 98 | −58 | gb105pln | Z. mays gene for polygalacturonase. | |
| 700352812H1 | g596077 | 24 | −55 | gb105pln | Zea mays thiamine biosynthetic enzyme (thi1-1) mRNA, complete cds. | |
| 700354886H1 | g1209258 | 12 | 5 | gb105allp | protease inhibitor II | |
| 700355061H1 | g1616613 | 28 | 2 | gb105pln | N. plumbaginifolia mRNA for small GTP-binding protein, clone Np43GTP. | |
| 700356055H1 | g22425 | 49 | −62 | gb105pln | Z. mays gene for polygalacturonase (clone 47). | |
| 700357422H1 | g2511715 | 27 | −8 | gb105eukp | putative phosphatidylinositol-4-phosphate 5-kinase | |
| 700383122H1 | g2435604 | 7 | 5 | gb105eukp | F08F1.7 | |
| 700357441H1 | g1167835 | 23 | −4 | gb105pln | H. lanatus mRNA for Hol lI protein. | |
| 700354757H1 | g1067106 | 23 | 3 | gb105allp | ZK757.3 | |
| 700355876H1 | g2384757 | 34 | −24 | gb105pln | Oryza sativa GDP dissociation inhibitor protein OsGDI1 (OsGDI1) mRNA, | |
| | | | | | complete cds. | |
| 700382268H1 | g510238 | 4 | 8 | gb105eukp | OPT1-1; oligopeptide transporter 1-1 | |
| 700352955H1 | g432359 | 78 | −20 | gb105allp | ribosomal protein | |
| 700354757H1 | g2149640 | 35 | 5 | gb105eukp | AGO1; leaf development; Argonaute protein | |
| 700353060H1 | g1045304 | 81 | −73 | gb105pln | Zea mays acetyl-coenzyme A carboxylase mRNA, complete cds. | |
| 700355485H1 | g2213594 | 31 | −15 | gb105eukp | T7N9.14 | |
| 700282455H2 | g22416 | 53 | −79 | gb105pln | Z. mays mRNA for polygalacturonase (clone PG1). | |
| 700357153H1 | g293886 | 42 | −80 | gb105pln | Zea mays glyceraldehyde-3-phosphate dehydrogenase mRNA, 3′ end, (clone GAPC3). | |
| 700356279H1 | g2565339 | 31 | −17 | gb105pln | Lupinus luteus ribosomal protein S14 (rps14) mRNA, complete cds. | |
| 700282508H2 | g21953 | 8 | −6 | gb105eukp | Li; beta-glucosidase; EC 3.2.1.21; linamarase | |
| 700352858H1 | g1931636 | 20 | −26 | gb105pln | Arabidopsis thaliana BAC T19D16 genomic sequence. | |
| 700353511H1 | g1817577 | 63 | −36 | gb105allp | alpha-globin 1 | |
| 700355824H1 | g218168 | 35 | −67 | gb105pln | Rice mRNA for succinate dehydrogenase (K7 gene), partial sequence. | |
| 700355983H1 | g2443751 | 15 | 5 | gb105eukp | FUM1; fumarase; EC 4.2.1.2 | |
| 700354903H1 | g414908 | 32 | −5 | gb105eukp | pollen allergen Phl pI | |
| 700355856H1 | g1633049 | 10 | 4 | gb105eukp | RpL22; ribosomal protein Rp122 | |
| 700282518H2 | g1518539 | 42 | −20 | gb105pln | Glycine max UDP-glucose dehydrogenase mRNA, complete cds. | |
| 700353564H1 | g2760167 | 25 | −10 | gb105pln | Arabidopsis thaliana genomic DNA, chromosome 5, P1 clone: MCO15, complete | |
| | | | | | sequence. | |
| 700354503H1 | g603866 | 26 | −3 | gb105pln | N. tabacum mRNA for L-Glutamate:tRNA-Glu ligase. | |
| 700355883H1 | g22421 | 97 | −91 | gb105pln | Z. mays mRNA for polygalacturonase (clone PG3). | |
| 700282464H1 | g288612 | 13 | 1 | gb105allp | polygalacturonase | |
| 700382290H1 | g758701 | 30 | −0 | gb105eukp | Ch FatB1; 16:0-ACP thioesterase preprotein | |
| 700354917H1 | g288373 | 98 | −63 | gb105pln | Z. mays PGg6 gene for polygalacturonase. | |
| 700353019H1 | g17561 | 16 | 8 | gb105allp | PROTEINASE INHIBITOR | |
| 700354351H1 | g165011 | 17 | 2 | gb105allp | eucaryotic release factor (eRF) | |
| 700382117H1 | g2809246 | 39 | −21 | gb105eukp | F24O1.15 | |
| 700352644H1 | g20321 | 59 | −63 | gb105pln | Oryza sativa RAc1 mRNA for actin. | |
| 700353834H1 | g473359 | 15 | 7 | gb105pln | P. pratense mRNA for Phl pI allergen. | |
| 700355537H1 | g1449178 | 28 | −15 | gb105pln | Nicotiana tabacum mRNA for N-ethylmaleimide sensitive fusion protein, complete cds. | |
| 700357171H1 | g288611 | 21 | −17 | gb105pln | Z. mays PG gene for polygalacturonase. | |
| 700382134H1 | g1255954 | 21 | −11 | gb105eukp | thioredoxin | |
| 700354991H1 | g807577 | 36 | 2 | gb105eukp | GTP-binding protein | |
| 700382110H1 | g414702 | 9 | 5 | gb105pln | H. lanatus mRNA for allergen Hol-lI. | |
| 700282591H2 | g1292952 | 23 | 5 | gb105allp | 3-hydroxy-3-methylglutaryl-CoA lyase | |
| 700382002H1 | g168460 | 49 | −68 | gb105pln | Zea mays cyclophilin (CyP) mRNA, complete cds. | |
| 700352725H1 | g1532210 | 22 | −29 | gb105eukp | cypA; cyclophilin A | |
| 700354747H1 | g169127 | 17 | −13 | gb105pln | Pisum sativum (clone pCLp) nuclear encoded precursor to chloroplast protein mRNA, | |
| | | | | | complete cds. | |
| 700282513H2 | g1653665 | 19 | −17 | gb105allp | peptide chain release factor | |
| 700383006H1 | g393400 | 47 | −45 | gb105pln | Z. mays mRNA for alpha-tubulin. | |
| 700352783H1 | g1184165 | 24 | −6 | gb105eukp | knolle | |
| 700353547H1 | g2342684 | 35 | −10 | gb105eukp | F7G19.14; F7G19.14 | |
| 700352989H1 | g288373 | 72 | −56 | gb105pln | Z. mays PGg6 gene for polygalacturonase. | |
| 700353874H1 | g453975 | 40 | −20 | gb105pln | P. pratense mRNA for profilin-Phl pXI. | |
| 700355945H1 | g168460 | 71 | −76 | gb105pln | Zea mays cyclophilin (CyP) mRNA, complete cds. | |
| 700355459H1 | g974781 | 55 | −43 | gb105pln | C. blumei kinetoplast met gene for cobalamine-independent methionine synthase. | |
| 700383039H1 | g169802 | 24 | 1 | gb105pln | Rice oryzacystatin-II mRNA, complete cds. | |
| 700355947H1 | g415896 | 8 | 6 | gb105eukp | PHL PII, pollen allergen | |
| 700353922H1 | g21598 | 48 | −36 | gb105pln | S. tuberosum mRNA for UDP-glucose pyrophosphorylase. | |
| 700356485H1 | g248336 | 73 | −42 | gb105pln | polyubiquitin [maize, Genomic, 3841 nt]. | |
| 700382004H1 | g303852 | 25 | −46 | gb105pln | Rice mRNA for ribosomal protein L3, complete cds. | |
| 700282527H2 | g19495 | 20 | 9 | gb105pln | L. perenne RNA for Lol pI gene. | |
| 700282541H2 | g1627870 | 13 | 7 | gb105eukp | F30A10.6 | |
| 700353610H1 | g20237 | 18 | −21 | gb105pln | O. sativa (rice) constitutive GOS2 gene. | |
| 700282482H2 | g1019146 | 8 | 6 | gb105allp | DNA gyrase | |
| 700356422H1 | g1292852 | 25 | −3 | gb105pln | F. sylvatica mRNA for CaMF protein. | |
| 700354374H1 | g2443755 | 23 | −10 | gb105eukp | CYP5; cyclophilin | |
| 700355762H1 | g17789 | 29 | −9 | gb105eukp | Bp10 | |
| 700355583H1 | g575291 | 32 | −25 | gb105pln | H. vulgare mRNA for SNF1-related protein kinase. | |
| 700356834H1 | g22427 | 80 | −84 | gb105pln | Z. mays gene for polygalacturonase (clone 65). | |
| 700383168H1 | g22458 | 43 | −75 | gb105pln | Z. mays pollen specific mRNA C-terminal (clone 4H7). | |
| 700356670H1 | g2695945 | 29 | −5 | gb105eukp | H(+)-transporting ATPase-like protein | |
| 700382544H1 | g2252869 | 29 | −4 | gb105eukp | AT0ZI1 | |
| 700355562H1 | g2827001 | 65 | −60 | gb105pln | Triticum aestivum 70 kDa heat shock protein (TaHSP70d) mRNA, complete cds. | |
| 700356112H1 | g886402 | 75 | −68 | gb105pln | Oryza sativa MADS-box protein (MADS4) mRNA, complete cds. | |
| 700353027H1 | g1519248 | 49 | −17 | gb105pln | Oryza sativa GF14-b protein mRNA, complete cds. | |
| 700353141H1 | g1655479 | 21 | 0 | gb105pln | Arabidopsis thaliana mRNA for gamma subunit of mitochondrial F1-ATPase, | |
| | | | | | complete cds. | |
| 700382871H1 | g1895083 | 46 | −56 | gb105pln | Zea mays golgi associated protein se-wap41 mRNA, complete cds. | |
| 700353875H1 | g313139 | 47 | −23 | gb105pln | Z. mays ZmPRO2 mRNA for profilin 2. | |
| 700355627H1 | g899607 | 15 | −2 | gb105pln | Zea mays polyubiquitin (MubC5) mRNA, complete cds. | |
| 700357187H1 | g414907 | 31 | −22 | gb105pln | P. pratense mRNA for pollen allergen PhlpI. | |
| 700353986H1 | g16509 | 30 | −11 | gb105pln | A. thaliana mRNA for succinate-CoA ligase (GCP-forming). | |
| 700383178H1 | g1008915 | 60 | −30 | gb105allp | proteasome activator hPA28 suunit beta | |
| 700352941H1 | g1480669 | 37 | −6 | gb105pln | Solanum lycopersicum delta 1-pyrroline-5-carboxylate synthetase (tomPRO2) mRNA, | |
| | | | | | complete cds. | |
| 700355915H1 | g288373 | 98 | −86 | gb105pln | Z. mays PGg6 gene for polygalacturonase. | |
| 700382643H1 | g1899187 | 25 | −12 | gb105pln | Nicotiana tabacum DNA binding protein ACBF mRNA, complete cds. | |
| 700352775H1 | g288378 | 63 | −63 | gb105pln | Z. mays gene PG for polygalacturonase. | |
| 700355812H1 | g22416 | 71 | −84 | gb105pln | Z. mays mRNA for polygalacturonase (clone PG1). | |
| 700356445H1 | g168313 | 22 | 6 | gb105pln | L. perenne pollen allergen (Lol pI) gene, 3′ end. | |
| 700352775H1 | g22427 | 59 | −63 | gb105pln | Z. mays gene for polygalacturonase (clone 65). | |
| 700382611H1 | g1246115 | 22 | −7 | gb105pln | major allergen Pha a 1 [Phalaris aquatica = canary grass, pollen, mRNA Partial, | |
| | | | | | 1088 nt]. | |
| 700382870H1 | g807577 | 22 | −8 | gb105eukp | GTP-binding protein | |
| 700352787H1 | g2351062 | 18 | −2 | gb105pln | Arabidopsis thaliana genomic DNA, chromosome 5, P1 clone: MAH20. | |
| 700355738H1 | g16427 | 11 | 5 | gb105eukp | protease inhibitor II | |
| 700356881H1 | g2828188 | 15 | −8 | gb105pln | Arabidopsis thaliana genomic DNA, chromosome 5, TAC clone: K3I3, complete | |
| | | | | | sequence. | |
| 700356511H1 | g288373 | 48 | −65 | gb105pln | Z. mays PGg6 gene for polygalacturonase. | |
| 700352844H1 | g1296808 | 33 | −32 | gb105pln | H. vulgare mRNA for xylose isomerase. | |
| 700353567H1 | g1532167 | 24 | 3 | gb105eukp | AT.I.24-5 | |
| 700354175H1 | g2529339 | 27 | −5 | gb105pln | Zea maize AGAMOUS homologue mRNA, complete cds. | |
| 700382820H1 | g972368 | 14 | 2 | gb105allp | 60 S ribosomal protein L35 | |
| 700355834H1 | g22458 | 50 | −73 | gb105pln | Z. mays pollen specific mRNA C-terminal (clone 4H7). | |
| 700382013H1 | g940182 | 14 | −2 | gb105allp | tRNA-Guanine Transglycosylase | |
| 700355002H1 | g170775 | 56 | −35 | gb105pln | Wheat translation elongation factor 1 alpha-subunit (TEF1) mRNA, complete cds. | |
| 700353534H1 | g1495768 | 37 | 6 | gb105allp | chloroplast inner envelope protein, 110 kD (IEP110) | |
| 700383157H1 | g1814402 | 34 | −26 | gb105pln | Mesembryanthemum crystallinum methionine synthase (MetE) mRNA, complete cds. | |
| 700383114H1 | g288373 | 84 | −70 | gb105pln | Z. mays PGg6 gene for polygalacturonase. | |
| 700355710H1 | g20163 | 54 | −45 | gb105pln | O. sativa Rr15 mRNA for 5S ribosomal RNA. | |
| 700282473H2 | g1236961 | 31 | −6 | gb105eukp | hydrolysis of the cyangenic glucoside (R)-pruansin; pruansin hydrolase precursor; | |
| | | | | | EC 3.2.1.21 | |
| 700352802H1 | g2827524 | 12 | −2 | gb105eukp | F8F16.110; predicted protein | |
| 700352953H1 | g882247 | 38 | −7 | gb105pln | Urochloa panicoides carbonic anhydrase 1 mRNA, complete cds. | |
| 700355073H1 | g1575322 | 48 | 7 | gb105allp | APS kinase | |
| 700382510H1 | g22456 | 63 | −62 | gb105pln | Z. mays pollen specific mRNA C-terminal (clone 3C12). | |
| 700354757H1 | g1167810 | 23 | 3 | gb105eukp | T22B3.2 | |
| 700355168H1 | g2580496 | 23 | −23 | gb105pln | Papaver somniferum NADPH:ferrihemoprotein oxidoreductase mRNA, complete cds. | |
| 700355760H1 | g22136 | 65 | −44 | gb105pln | Maize Adh2-N mRNA for alcohol dehydrogenase 2. | |
| 700382107H1 | g529357 | 11 | 6 | gb105allp | No definition line found | |
| 700382308H1 | g600766 | 14 | 13 | gb105pln | Oryza sativa cyclophilin 2 (Cyp2) gene, complete cds. | |
| 700352835H1 | g2641637 | 27 | −39 | gb105pln | Arabidopsis thaliana DnaJ homolog AtJ3 (ATJ3) gene, complete cds. | |
| 700353742H1 | g348719 | 26 | −8 | gb105pln | MtNMedicago truncatula protochlorophyllide reductase homologue mRNA, | |
| | | | | | complete cds. | |
| 700382541H1 | g1666690 | 38 | −14 | gb105allp | alpha-NAC, non-muscle form | |
| 700353032H1 | g2073374 | 70 | −34 | gb105pln | Rice mRNA for farnesyl pyrophosphate synthase, complete cds. | |
| 700355629H1 | g20323 | 30 | −22 | gb105pln | O. sativa RAc1 gene for actin. | |
| 700355203H1 | g2827143 | 39 | −3 | gb105eukp | Ath-B; cellulose synthase catalytic subunit | |
| 700355629H1 | g20323 | 30 | −22 | gb105pln | O. sativa RAc1 gene for actin. | |
| 700355203H1 | g2827143 | 39 | −3 | gb105eukp | Ath-B; cellulose synthase catalytic subunit | |
| 700356759H1 | g499011 | 55 | −13 | gb105pln | S. vulgare SoAc1 mRNA. | |
| 700356773H1 | g619928 | 37 | −1 | gb105eukp | hexokinase; EC 2.7.1.1 | |
| 700354406H1 | g577777 | 43 | 7 | gb105allp | glutathione peroxidase | |
| 700354672H1 | g250127 | 31 | −8 | gb105allp | 67 kda laminin receptor [human, lung cancer cell line SBC3, Peptide, 295 aa] | |
| 700356416H1 | g2330786 | 15 | 2 | gb105eukp | SPAC24C9.03; diphosphomevalonate decarboxylase | |
| 700356658H1 | g1418124 | 48 | −11 | gb105pln | Rapeseed Root mRNA for CTP:phosphocholine cytidylyltransferase, complete cds. | |
| 700355692H1 | g902583 | 31 | −38 | Zea mays clone MubG1 ubiquitin gene, complete cds. | | |
| 700356645H1 | g1911581 | 34 | 2 | gb105pln | Cyn d 1 = major allergen {clone 14c1 and CD1} [Cynodon dactylon = Bermuda grass, | |
| | | | | | pollen, mRNA Partial, 759 nt]. | |
| 700353138H1 | g22427 | 47 | −62 | gb105pln | Z. mays gene for polygalacturonase (clone 65). | |
| 700354638H1 | g1469218 | 21 | 1 | gb105pln | B. oleracea mRNA (unknown). | |
| 700354249H1 | g170772 | 80 | −10 | gb105pln | Triticum aestivum S-adenosy-L-homocysteine hydrolase (SH6.2) mRNA, complete cds. | |
| 700355293H1 | g499011 | 52 | −39 | gb105pln | S. vulgare SoAc1 mRNA. | |
| 700355789H1 | g402753 | 35 | 6 | gb105eukp | fusA; translation elongation factor EF-G | |
| 700356658H1 | g1657381 | 48 | −11 | gb105pln | P. sativum mRNA for cholinephosphate cytidylyltransferase. | |
| 700353221H1 | g168313 | 15 | −1 | gb105pln | L. perenne pollen allergen (Lol pI) gene, 3′ end. | |
| 700382711H1 | g473359 | 22 | −3 | gb105pln | P. pratense mRNA for Phl pI allergen. | |
| 700382637H1 | g416256 | 21 | −27 | gb105pln | Rice mRNA for H+-ATPase, partial sequence. | |
| 700356517H1 | g21870 | 16 | 6 | gb105pln | Wheat signal recognition particle (SRP) 7S RNA variant 1. | |
| 700353557H1 | g168490 | 38 | 9 | gb105pln | Maize glutathione S-transferase (GST-I) mRNA, complete cds. | |
| 700354309H1 | g2282583 | 98 | −94 | gb105pln | Zea mays elongatin factor 1-alpha (EF1-A) mRNA, complete cds. | |
| 700352655H1 | g248336 | 63 | −69 | gb105pln | polyubiquitin [maize, Genomic, 3841 nt]. | |
| 700355436H1 | g293888 | 65 | −74 | gb105pln | Zea mays, glyceraldehyde-3-phosphate dehydrogenase mRNA, 3′ end (clone GAPC2). | |
| 700382108H1 | g510275 | 50 | −20 | gb105eukp | DET1 | |
| 700355485H1 | g2182287 | 12 | 3 | gb105pln | Genomic sequence for Arabidopsis thaliana BAC T7N9, complete sequence. | |
| 700354640H1 | g1381150 | 13 | 4 | gb105allp | Hs-CUL-4B | |
| 700356225H1 | g22473 | 57 | −72 | gb105pln | Maize mRNA for ribulose-1,5-bisphosphate carboxylase small subunit (RuBPC; | |
| | | | | | EC 4.1.1.39). | |
| 700382609H1 | g287834 | 60 | −77 | gb105pln | Z. mays yptm2 cDNA. | |
| 700383004H1 | g2634680 | 9 | 4 | gb105allp | histidinol-phosphate aminotransferase | |
| 700353209H1 | g473359 | 23 | −1 | gb105pln | P. pratense mRNA for Phl allergen. | |
| 700355071H1 | g1173556 | 17 | 16 | gb105pln | Oryza sativa Ory s 1 mRNA, complete cds. | |
| 700353258H1 | g473359 | 22 | −5 | gb105pln | P. pratense mRNA for Phl pI allergen. | |
| 700354941H1 | g2623679 | 63 | −48 | gb105pln | Zea mays calmodulin (Zmrcalm) mRNA, complete cds. | |
| 700355562H1 | g313759 | 78 | −67 | gb105pln | Z. mays hsp 70-1 gene for heat shock protein 70. | |
| 700382307H1 | g2702272 | 18 | −5 | gb105eukp | T21L14.13 | |
| 700355915H1 | g22416 | 98 | −86 | gb105pln | Z. mays mRNA for polygalacturonase (clone PG1). | |
| 700382542H1 | g2708531 | 21 | −14 | gb105pln | Nicotiana tabacum putative RNA binding protein (QRRBP-1) mRNA, partial cds. | |
| 700382805H1 | g2262159 | 18 | −9 | gb105eukp | F5J6.4; predicted protein similar to S. pombe protein C5H10.03 | |
| 700354943H1 | g2642164 | 10 | 1 | gb105allp | hypothetical protein | |
| 700383125H1 | g1071681 | 24 | −5 | gb105allp | H. sapiens mRNA for rat translocon-associated protein delta homolog | |
| 700357160H1 | g967967 | 15 | 10 | gb105pln | Brassica campestris ssp. pekinensis (clone bif11) photosystem II 10 kDa polypeptide | |
| | | | | | mRNA, complete cds. | |
| 700352712H1 | g829147 | 60 | −56 | gb105pln | Z. mays gene for cyclophilin. | |
| 700355918H1 | g1628484 | 12 | 2 | gb105allp | mitotic centromere-associated kinesin | |
| 700382072H1 | g1432082 | 23 | −3 | gb105pln | Arabidopsis thaliana Skp1p homolog mRNA, complete cds. | |
| 700354905H1 | g2662342 | 55 | −63 | gb105pln | Oryza sativa mRNA for EF-1 alpha, complete cds. | |
| 700382383H1 | g166581 | 30 | −20 | gb105pln | A. thaliana AAc1 gene encoding actin-1, complete cds. | |
| 700355582H1 | g1184991 | 16 | −10 | gb105eukp | NTGB3 | |
| 700382035H1 | g747914 | 37 | −69 | gb105pln | Z. mays CaM1 mRNA for calmodulin. | |
| 700382609H1 | g1616613 | 34 | −20 | gb105pln | N. plumbaginifolia mRNA for small GTP-binding protein, clone Np43GTP. | |
| 700356544H1 | g2264304 | 26 | 13 | gb105pln | Arabidopsis thaliana genomic DNA, chromosome 5, P1 clone: MBG8, complete sequence. | |
| 700382596H1 | g431268 | 20 | −4 | gb105eukp | UBC6; ubiquitin conjugating enzyme | |
| 700352839H1 | g531752 | 30 | −2 | gb105eukp | YTA11 | |
| 700354295H1 | g899403 | 17 | −8 | gb105eukp | CPR1; Cpr1p | |
| 700355764H1 | g432488 | 43 | −45 | gb105pln | Wheat initiation factor 1A (eIF-1A) mRNA. | |
| 700353657H1 | g288366 | 37 | −49 | gb105pln | Z. mays PGg14 gene for polygalacturonase. | |
| 700357419H1 | g553073 | 30 | −16 | gb105eukp | reverse transcriptase | |
| 700382889H1 | g176780 | 84 | −37 | gb105allp | gamma-1 globin | |
| 700382873H1 | g1296806 | 17 | −19 | gb105pln | H. vulgare xylose isomerase gene. | |
| 700353132H1 | g587499 | 43 | −28 | gb105pln | O. sativa mRNA for calcium dependent protein kinase 11. | |
| 700355976H1 | g1877218 | 30 | −17 | gb105pln | H. vulgare mRNA for serine carboxypeptidase III, CP-MIII. | |
| 700356820H1 | g1498383 | 45 | −44 | gb105pln | Zea mays actin (Maz89) gene, partial cds. | |
| 700355430H1 | g22458 | 67 | −83 | gb105pln | Z. mays pollen specific mRNA C-terminal (clone 4H7). | |
| 700382119H1 | g669002 | 20 | −2 | gb105pln | Glycine max calnexin mRNA, complete cds. | |
| 700282447H2 | g439585 | 39 | −11 | gb105pln | Hordeum vulgare calreticulin (CRH1) mRNA, partial cds. | |
| 700353849H1 | g2584827 | 12 | 10 | gb105pln | Sequence of BAC F12F1 from Arabidopsis thaliana chromosome 1, complete sequence. | |
| 700353028H1 | g2055230 | 10 | 7 | gb105eukp | src2; SRC2; soybean cold-regulated gene | |
| 700354514H1 | g22416 | 54 | −29 | gb105pln | Z. mays mRNA for polygalacturonase (clone PG1). | |
| 700354638H1 | g2584827 | 17 | −3 | gb105pln | Sequence of BAC F12F1 from Arabidopsis thaliana chromosome 1, complete sequence. | |
| 700353049H1 | g1313946 | 25 | 6 | gb105eukp | T21C9.2 | |
| 700357160H1 | g1835730 | 26 | −10 | gb105pln | Oryza sativa photosystem II 10 kDa polypeptide mRNA, complete cds. | |
| 700353557H1 | g22314 | 38 | 6 | gb105pln | Maize mRNA for GSH gluthathione S-transferase I (GST; EC 2.5.1.18). | |
| 700354655H1 | g2529228 | 34 | −25 | gb105pln | Glycine max mRNA for 6-phosphogluconate dehydrogenase, complete cds. | |
| 700356463H1 | g1049108 | 59 | 3 | gb105allp | carbonyl reducatase | |
| 700354960H1 | g902524 | 55 | 2 | gb105pln | Zea mays clone MubG10 ubiquitin fusion protein gene, complete cds. | |
| 700356409H1 | g790969 | 65 | −40 | gb105pln | Rice mRNA for aldolase C-1, complete cds. | |
| 700382424H1 | g603403 | 14 | 8 | gb105allp | Yer163cp | |
| 700282527H2 | g473359 | 19 | 8 | gb105pln | P. pratense mRNA for Phl pI allergen. | |
| 700353154H1 | g22455 | 30 | −48 | gb105pln | Z. mays pollen specific mRNA C-terminal (clone 3A6). | |
| 700355288H1 | g1616660 | 49 | −30 | gb105pln | Zea mays adenylosuccinate synthetase mRNA, complete cds. | |
| 700357147H1 | g550543 | 55 | −46 | gb105pln | A. thaliana mRNA for ribosomal protein L16. | |
| 700382263H1 | g414702 | 34 | −9 | gb105pln | H. lanatus mRNA for allergen Hol-lI. | |
| 700352904H1 | g536533 | 27 | −3 | gb105pln | Yeast (Saccharomyces cerevisiae) chromosome II reading frame ORF YBR181c. | |
| 700354984H1 | g19451 | 40 | 4 | gb105eukp | pectate lyase | |
| 700356476H1 | g22420 | 100 | −59 | gb105pln | Z. mays mRNA for polygalacturonase (clone PG2). | |
| 700353983H1 | g166923 | 32 | −10 | gb105pln | Arabidopsis thaliana ubiquitin carrier protein (UBC1) mRNA, complete cds. | |
| 700354795H1 | g1067204 | 11 | −4 | gb105eukp | SPAC1F7.02c; unknown | |
| 700382147H1 | g1938575 | 14 | −2 | gb105eukp | B0025.3 | |
| 700383107H1 | g180939 | 97 | −27 | gb105allp | cytochrome c oxidase subunit VIII precursor | |
| 700356666H1 | g168608 | 62 | −27 | gb105pln | Maize 17S ribosomal RNA gene and flanks. | |
| 700356746H1 | g473360 | 27 | 7 | gb105eukp | phl pI ; phl pI allergen | |
| 700353793H1 | g170775 | 22 | −16 | gb105pln | Wheat translation elongation factor 1 alpha-subunit (TEF1) mRNA, complete cds. | |
| 700354514H1 | g288373 | 54 | −29 | gb105pln | Z. mays PGg6 gene for polygalacturonase. | |
| 700355203H1 | g2827139 | 34 | 1 | gb105eukp | RSW1; cellulose synthase catalytic subunit | |
| 700353276H1 | g22575 | 35 | −21 | gb105pln | Potato mRNA for pyruvate kinase (cytosolic isozyme). | |
| 700354961H1 | g414908 | 28 | 5 | gb105allp | pollen allergen Phl pI | |
| 700355236H1 | g473205 | 60 | −2 | gb105pln | E. gunnii mRNA for mitochondrial malate dehydrogenase. | |
| 700353243H1 | g166873 | 26 | −2 | gb105pln | A. thaliana S-adenosylmethionine synthetase 2 (sam-2) gene, complete cds. | |
| 700353032H1 | g662367 | 59 | −27 | gb105pln | Zea mays farnesyl pyrophosphate synthetase (fps) mRNA, complete cds. | |
| 700355266H1 | g22458 | 59 | −36 | gb105pln | Z. mays pollen specific mRNA C-terminal (clone 4H7). | |
| 700356881H1 | g1518539 | 15 | −12 | gb105pln | Glycne max UDP-glucose dehydrogenase mRNA, complete cds. | |
| 700383172H1 | g1302648 | 59 | −7 | gb105allp | 37 kD laminin receptor precursor/p40 ribosome associated protein | |
| 700353987H1 | g22421 | 53 | 6 | gb105pln | Z. mays mRNA for polygalacturonase (clone PG3). | |
| 700382050H1 | g1173556 | 24 | −20 | gb105pln | Oryza sativa Ory s 1 mRNA, complete cds. | |
| 700382812H1 | g168088 | 18 | −8 | gb105eukp | rps16; ribosomal protein S16 | |
| 700353042H1 | g499015 | 39 | −22 | gb105pln | V. cardunculus mRNA for cynarase. | |
| 700353860H1 | g2160300 | 8 | 3 | gb105eukp | ribosomal protein | |
| 700383165H1 | g2072951 | 15 | −0 | gb105allp | putative p150 | |
| 700352808H1 | g1272684 | 48 | −64 | gb105pln | Z. mays mRNA for acetyl CoA carboxylase (partial). | |
| 700355433H1 | g182033 | 19 | −9 | gb105allp | elastase III A | |
| 700355424H1 | g2645162 | 28 | −3 | gb105pln | Oryza sativa mRNA, similar to initiation factor eIF-4c. | |
| 700356270H1 | g2463566 | 52 | −44 | gb105pln | Zea mays mRNA for squalene synthase, complete cds. | |
| 700382662H1 | g20309 | 18 | 5 | gb105pln | O. sativa DNA for pollen-specific gene. | |
| 700353203H1 | g2181184 | 10 | −5 | gb105eukp | JR3 protein | |
| 700356028H1 | g2345153 | 72 | −35 | gb105pln | Zea mays ribsomal protein S4 (rps4) mRNA, complete cds. | |
| 700383135H1 | g2505874 | 22 | −12 | gb105eukp | putative kinase | |
| 700354903H1 | g473360 | 33 | −5 | gb105eukp | phl pI ; Phl pI allergen | |
| 700355974H1 | g2267582 | 22 | −6 | gb105pln | Gossypium hirsutum vacuolar H+-ATPase subunit E mRNA, complete cds. | |
| 700382511H1 | g397958 | 56 | −63 | gb105pln | Z. mays mRNA for beta-amylase. | |
| 700382849H1 | g20321 | 50 | −54 | gb105pln | Oryza sativa RAc1 mRNA for actin> | |
| 700355955H1 | g2290414 | 18 | 5 | gb105allp | NADH dehydrogenase subunit 3 | |
| 700383123H1 | g313141 | 62 | −82 | gb105pln | Z. mays ZmPRO3 mRNA for profilin 3. | |
| 700355525H1 | g1009233 | 23 | −4 | gb105pln | Nicotiana tabacum SUP2 mRNA, 3′ end of cds. | |
| 700353991H1 | g1771781 | 26 | −24 | gb105pln | T. aestivum mRNA for beta-amylase. | |
| 700353511H1 | g1817578 | 63 | −36 | gb105allp | alpha-globin 2 | |
| 700352911H1 | g172559 | 10 | 2 | gb105eukp | Sec13; Sec13p | |
| 700354704H1 | g1107486 | 27 | −7 | gb105pln | A. thaliana mRNA for 60S ribosomal protein L27a. | |
| 700356492H1 | g1519250 | 60 | −32 | gb105pln | Oryza sativa GF14-c protein mRNA, complete cds. | |
| 700356939H1 | g303856 | 36 | −15 | gb105pln | Rice mRNA for ubiquitin protein fused to a ribosomal protein, complete cds. | |
| 700382173H1 | g22416 | 95 | −77 | gb105pln | Z. mays mRNA for polygalacturonase (clone PG1). | |
| 700355208H1 | g434906 | 87 | −6 | gb105eukp | S18 ribosomal protein | |
| 700382110H1 | g168315 | 9 | 12 | gb105pln | L. perenne pollen allergen (Lol pI gene, complete cds. | |
| 700352793H1 | g1200238 | 66 | −50 | gb105pln | H. vulgare mRNA for GAMby protein. | |
| 700354473H1 | g456092 | 6 | 7 | gb105eukp | degradation of polyuronides in fruit cell wall; poly [1,4-a-D-galacturonide] glycan | |
| | | | | | hydrolase; EC 3.2.1.15; polygalacturonase | |
| 700382889H1 | g183885 | 90 | −41 | gb105allp | gamma-globin | |
| 700382614H1 | g168292 | 12 | 7 | gb105allp | ORF1 | |
| 700354625H1 | g473360 | 9 | 7 | gb105allp | Phl pI allergen | |
| 700356637H1 | g313139 | 46 | −17 | gb105pln | Z. mays ZmPRO2 mRNA for profilin 2. | |
| 700282553H2 | g2463586 | 10 | 8 | gb105eukp | precursor of cysteine proteinase; FB22 precursor | |
| 700354619H1 | g558574 | 26 | −7 | gb105eukp | Eh/PPi-PFK; pyrophosphate-fructose-6-phosphate 1-phosphotransferase; EC 2.7.1.90 | |
| 700382272H1 | g22485 | 61 | −75 | gb105pln | Maize mRNA for sucrose synthase (EC 2.4.1.13). | |
| 700357426H1 | g2529462 | 7 | 5 | gb105allp | YokM | |
| 700352613H1 | g182865 | 17 | 8 | gb105allp | 4F2 cell-surface antigen | |
| 700282461H2 | g833835 | 16 | 3 | gb105allp | amygdalin hydrolase isoform AH I precursor | |
| 700356213H1 | g313137 | 49 | −46 | gb105pln | Z. mays ZmPRO1 mRNA for profilin 1. | |
| 700354992H1 | g1167835 | 20 | −15 | gb105pln | H. lanatus mRNA for Hol lI protein. | |
| 700356838H1 | g2804435 | 10 | −2 | gb105eukp | C42C1.9 | |
| 700355433H1 | g220014 | 19 | −9 | gb105allp | pancreatic protease E precursor | |
| 700355756H1 | g1403043 | 19 | −24 | gb105pln | H. chilense x T. turigidum conv. durum (Tritordeum) mRNA for S-adenosylmethionine | |
| | | | | | decarboxylase. | |
| 700382630H1 | g2239261 | 21 | −24 | gb105pln | Zea mays mRNA for pectin methylesterase-like protein. | |
| 700354459H1 | g2511587 | 36 | −36 | gb105pln | Arabidopsis thaliana mRNA for proteasome subunit prc1. | |
| 700357483H1 | g22418 | 95 | −29 | gb105pln | Z. mays gene for polygalacturonase (clone 17). | |
| 700282422H2 | g473359 | 18 | 10 | gb105pln | P. pratense mRNA for Phl pI allergen. | |
| 700382866H1 | g3265 | 25 | −9 | gb105eukp | GAL 10; UDP-galactose-4-epimerase; EC 5.1.3.2 | |
| 700353951H1 | g1764162 | 9 | 8 | gb105allp | canalicular multispecific organic anion transporter | |
| 700356032H1 | g2668743 | 51 | −51 | gb105pln | Zea mays ubiquitin conjugating enzyme (UBC) mRNA, complete cds. | |
| 700356493H1 | g1066162 | 36 | −15 | gb105pln | B. napus mRNA for glyoscysomal beta-ketoacyl-thiolase precursor. | |
| 700383128H1 | g288611 | 32 | −24 | gb105pln | Z. mays PG gene for polygalacturonase. | |
| 700382338H1 | g414702 | 38 | −21 | gb105pln | H. lanatus mRNA for allergen Hol-lI. | |
| 700382379H1 | g287829 | 94 | −76 | gb105pln | Z. mays gene for polygalacturonase. | |
| 700282523H2 | g473360 | 16 | 7 | gb105eukp | phl pI ; Phl pI allergen | |
| 700353608H1 | g1381140 | 27 | −12 | gb105eukp | cul-4; CUL-4 | |
| 700355764H1 | g2645162 | 28 | −3 | gb105pln | Oryza sativa mRNA, similar to initiation factor eIF-4c. | |
| 700383195H1 | g556557 | 37 | −62 | gb105pln | Rice mRNA for homologue of Tat binding protein, complete cds. | |
| 700352624H1 | g1817548 | 13 | −2 | gb105allp | phosphoethanolamine cytidylyltransferase | |
| 700382004H1 | g429015 | 26 | −51 | gb105pln | Rice mRNA for ribosomal protein (gene name SS498), partial cds. | |
| 700382538H1 | g2408094 | 11 | 6 | gb105eukp | SPAC8C9.11; hypothetical protein | |
| 700355291H1 | g2815123 | 17 | 2 | gb105eukp | Y45F10A.f | |
| 700382528H1 | g886400 | 26 | −12 | gb105pln | Oryza sativa MADS-box protein (MADS2) mRNA, complete cds. | |
| 700352988H1 | g288373 | 98 | −55 | gb105pln | Z. mays PGg6 gene for polygalacturonase. | |
| 700382907H1 | g499655 | 17 | 3 | gb105eukp | gamma-thionin homolog | |
| 700354692H1 | g167109 | 53 | −35 | gb105pln | Hordeum vulgare vacuolar ATPase B subunit mRNA, complete cds. | |
| 700353542H1 | g2281085 | 7 | 4 | gb105eukp | F18O19.4; CTR1 protein kinase isolog | |
| 700354471H1 | g2353344 | 12 | −11 | gb105eukp | cytochrome oxidase I | |
| 700382439H1 | g1405747 | 12 | 5 | gb105allp | PR264/SC35 | |
| 700382281H1 | g1209258 | 11 | 3 | gb105allp | protease inhibitor II | |
| 700352666H1 | g575354 | 26 | −11 | gb105pln | O. sativa SC34 mRNA for tumor suppressor. | |
| 700382016H1 | g22456 | 40 | −85 | gb105pln | Z. mays pollen specific mRNA C-terminal (clone 3C12). | |
| 700353144H1 | g2190559 | 10 | 5 | gb105eukp | F5I14.16; F5I14.16 | |
| 700353969H1 | g313139 | 45 | −36 | gb105pln | Z. mays ZmPRO2 mRNA for profilin 2. | |
| 700382002H1 | g829147 | 49 | −70 | gb105pln | Z. mays gene for cyclophilin. | |
| 700382027H1 | g16513 | 41 | −34 | gb105pln | A. thaliana gene for suppressor-like protein. | |
| 700382947H1 | g22416 | 96 | −43 | gb105pln | Z. mays mRNA for polygalacturonase (clone PG1). | |
| 700356645H1 | g293901 | 86 | −31 | gb105pln | Zea mays Zea mI gene, complete cds. | |
| 700382311H1 | g1786719 | 11 | 3 | gb105allp | o292; This 292 aa ORF is 44 pct identical (1 gap) to 287 residues of an approx. 304 aa | |
| | | | | | protein YHAE_ECOLI SW: P23523 | |
| 700353251H1 | g414702 | 21 | −5 | gb105pln | H. lanatus mRNA for allergen Hol-lI. | |
| 700356670H1 | g1304270 | 44 | −4 | gb105eukp | zha1; plasma membrane H+-ATPase; EC 3.6.1.35 | |
| 700353820H1 | g499888 | 12 | 7 | gb105eukp | ORF | |
| 700353222H1 | g1302158 | 28 | −12 | gb105eukp | RPS3 | |
| 700354517H1 | g1403188 | 22 | 7 | gb105eukp | F32D8.6 | |
| 700356229H1 | g939778 | 24 | −1 | gb105pln | Zea mays MADS-box protein (ZAG3) mRNA, complete cds. | |
| 700382812H1 | g396531 | 29 | −12 | gb105eukp | ribosomal protein S19 | |
| 700354385H1 | g1929055 | 31 | −6 | gb105pln | L. esculentum mRNA for 3,4-dihydroxy-2-butanone kinase. | |
| 700356960H1 | g836720 | 16 | 6 | gb105allp | YFL034W | |
| 700282504H2 | g1652154 | 20 | 4 | gb105allp | hypothetical protein | |
| 700355901H1 | g1495248 | 22 | −3 | gb105pln | A. thaliana mRNA for unknown protein, eRF1-3 gene. | |
| 700355945H1 | g829147 | 71 | −73 | gb105pln | Z. mays gene for cyclophilin. | |
| 700357493H1 | g19902 | 23 | 3 | gb105allp | pollen specific protein | |
| 700383039H1 | g169803 | 21 | 1 | gb105eukp | lambda-nOCI; oryzacystatin-II | |
| 700382790H1 | g22427 | 67 | −60 | gb105pln | Z. mays gene for polygalacturonase (clone 65). | |
| 700356409H1 | g168419 | 98 | −63 | gb105pln | Maize (Z. mays) aldolase mRNA, complete cds. | |
| 700354363H1 | g1498391 | 45 | −58 | gb105pln | Zea mays actin (Maz65) gene, partial cds. | |
| 700382763H1 | g2696054 | 96 | −46 | gb105allp | adducin-like protein | |
| 700355169H1 | g2828287 | 12 | −3 | gb105eukp | T18B16.90; putative protein | |
| 700282457H2 | g1718238 | 8 | 4 | gb105eukp | (1,4)-beta-xylan endohydrolase, isoenzyme X-II; EC 3.2.1.8 | |
| 700353922H1 | g218000 | 48 | −36 | gb105pln | Potato mRNA for UDP-glucose pyrophosphorylase (EC 2.7.7.9). | |
| 700354984H1 | g308902 | 40 | 4 | gb105eukp | pectate lyase | |
| 700353874H1 | g313139 | 44 | −22 | gb105pln | Z. mays ZmPRO2 mRNA for profilin 2. | |
| 700355723H1 | g160811 | 25 | −17 | gb105eukp | ribosomal protein L21; L21 | |
| 700357493H1 | g17782 | 18 | 5 | gb105allp | Bplo gene product | |
| 700382290H1 | g595955 | 27 | −0 | gb105eukp | FatB; Uc FatB2 | |
| 700353081H1 | g2795805 | 18 | 7 | gb105eukp | F17A14.3; putative protein kinase | |
| 700353810H1 | g1944572 | 29 | −14 | gb105pln | H. vulgare protein PAL mRNA for phenylalanine ammonia-lyase (1831 bp). | |
| 700382148H1 | g295850 | 58 | 6 | gb105eukp | fructose bisphosphate aldolase | |
| 700353823H1 | g2275006 | 23 | −17 | gb105pln | Hordeum vulgare mRNA for expressed sequence tag. | |
| 700353184H1 | g2618600 | 16 | −4 | gb105pln | Arabidopsis thaliana genomic DNA, chromosome 5, P1 clone: MCD12, complete | |
| | | | | | sequence. | |
| 700355951H1 | g1167835 | 20 | −2 | gb105pln | H. lanatus mRNA for Hol lI protein. | |
| 700354594H1 | g2662048 | 17 | 8 | gb105allp | receptor kinase 1 | |
| 700357164H1 | g16427 | 19 | −2 | gb105eukp | protease inhibitor II | |
| 700382491H1 | g313137 | 17 | −21 | gb105pln | Z. mays ZmPRO1 mRNA for profilin 1. | |
| 700357165H1 | g248336 | 72 | −82 | gb105pln | polyubiquitin [maize, Genomic 3841 nt]. | |
| 700352751H1 | g1321917 | 32 | −16 | gb105eukp | su12; cytoplasmic ribosomal protein S7 | |
| 700353567H1 | g1532168 | 22 | 3 | gb105eukp | AT.I.24-6 | |
| 700355576H1 | g439585 | 43 | −26 | gb105pln | Hordeum vulgare calreticulin (CRH1) mRNA, partial cds. | |
| 700353183H1 | g22427 | 24 | −42 | gb105pln | Z. mays gene for polygalacturonase (clone 65). | |
| 700354902H1 | g168398 | 49 | −39 | gb105pln | Zea mays auxin-binding protein (abp4) gene, exons 1-5 and complete cds. | |
| 700282544H2 | g507770 | 37 | −13 | gb105pln | Zea mays D3L H(+)-transporting ATPase (Mha1) gene, complete cds. | |
| 700382579H1 | g498745 | 9 | 2 | gb105allp | Pir7b | |
| 700354253H1 | g1167835 | 29 | −13 | gb105pln | H. lanatus mRNA for Hol lI protein. | |
| 700282510H2 | g168547 | 37 | −24 | gb105pln | Zea mays putative brain specific 14-3-3 protein, tau protein homolog mRNA, partial cds. | |
| 700382235H1 | g2415701 | 41 | −32 | gb105pln | P. pratense mRNA for profilin 4. | |
| 700356134H1 | g6902 | 13 | 6 | gb105eukp | unc-33; hypothetical polypeptide III | |
| 700353008H1 | g2224926 | 27 | −4 | gb105pln | Arabidopsis thaliana ethylene-insensitive3-like1 (EIL1) mRNA, complete cds. | |
| 700354402H1 | g2668745 | 59 | −23 | gb105pln | Zea mays inorganic pyrophosphatase (IPP) mRNA, complete cds. | |
| 700355437H1 | g2190553 | 31 | −14 | gb105eukp | F5I14.9 | |
| 700383194H1 | g1246116 | 14 | −5 | gb105eukp | major allergen Pha a1; major allergen Pha a1 | |
| 700354392H1 | g22418 | 81 | −73 | gb105pln | Z. mays gene for polygalacturonase (clone 17). | |
| 700352765H1 | g1498596 | 55 | −63 | gb105pln | Zea mays phospholipid transfer protein mRNA, complete cds. | |
| 700355438H1 | g22206 | 12 | 13 | gb105pln | Maize Ins1 insertion element upstream of bronze gene Bz-McC. | |
| 700356101H1 | g20321 | 35 | −8 | gb105pln | Oryza sativa RAc1 mRNA for actin. | |
| 700353113H1 | g288373 | 97 | −80 | gb105pln | Z. mays PGg6 gene for polygalacturonase. | |
| 700356074H1 | g2065436 | 6 | 8 | gb105eukp tea1p | | |
| 700356273H1 | g13014 | 62 | 5 | gb105allp | URF 5 (NADH dehydrogenase subunit) | |
| 700353810H1 | g20280 | 34 | −12 | gb105pln | Rice gene for phenylalanine ammonia-lyase (EC 4.3.1.5). | |
| 700353525H1 | g288373 | 51 | −59 | gb105pln | Z. mays PGg6 gene for polygalacturonase. | |
| 700355331H1 | g1236961 | 18 | −2 | gb105eukp | hydrolysis of the cyanogenic glucoside (R)-prunasin hydrolase precursor; EC 3.2.1.21 | |
| 700354726H1 | g416148 | 41 | −20 | gb105pln | Zea mays beta-7 tubulin (tub7) mRNA, complete cds. | |
| 700354795H1 | g530347 | 11 | −5 | gb105eukp | RNA helicase | |
| 700353643H1 | g206741 | 8 | 6 | gb105allp | ribosomal protein S12 | |
| 700353887H1 | g1246115 | 28 | −9 | gb105pln | major allergen Pha a1 [Phalaris aquatica = canary grass, pollen, mRNA Partial, | |
| | | | | | 1088 nt]. | |
| 700352769H1 | g882247 | 37 | −13 | gb105pln | Urochloa panicoides carbonic anhydrase 1 mRNA, complete cds. | |
| 700382050H1 | g293901 | 60 | −71 | gb105pln | Zea mays Zea mI gene, complete cds. | |
| 7003454511H1 | g1814400 | 35 | −0 | gb105pln | Mesembranthemum crystallinum phosphoglucomutase (PGM) mRNA, complete cds. | |
| 700353086H1 | g1458245 | 8 | 6 | gb105eukp | F54D11.1 | |
| 700354787H1 | g1177668 | 12 | 5 | gb105eukp | SPAC3H8.10; unknown | |
| 700355734H1 | g248336 | 94 | −43 | gb105pln | polyubiquitin [maize, Genomic, 3841 nt]. | |
| 700357406H1 | g531171 | 67 | 3 | gb105allp | Csa-19 | |
| 700382511H1 | g169778 | 37 | −36 | gb105pln | Oryza sativa beta-amylase gene, complete cds. | |
| 700356261H1 | g2623310 | 14 | 8 | gb105eukp | T20B5.16 | |
| 700356281H1 | g288373 | 84 | −54 | gb105pln | Z. mays PGg6 gene for polygalacturonase. | |
| 700355456H1 | g1498325 | 24 | −45 | gb105pln | Glycine max actin (Soy86) gene, partial cds. | |
| 700356821H1 | g1498389 | 47 | −63 | gb105pln | Zea mays actin (Maz81) gene, partial cds. | |
| 700353885H1 | g1438877 | 19 | −3 | gb105allp | zinc finger protein | |
| 700354652H1 | g414907 | 33 | −27 | gb105pln | P. pratense mRNA for pollen allergen PhlpI. | |
| 700355738H1 | g499655 | 9 | 5 | gb105eukp | gamma-thionin homolog | |
| 700355960H1 | g22416 | 48 | −57 | gb105pln | Z. mays mRNA for polygalacturonase (clone PG1). | |
| 700356209H1 | g293886 | 34 | 1 | gb105pln | Zea mays glyceraldehyde-3-phosphate dehydrogenase mRNA, 3′ end, (clone GAPC3). | |
| 700382436H1 | g1418578 | 6 | 5 | gb105allp | R11D1.8 | |
| 700355976H1 | g409581 | 59 | −48 | gb105pln | Rice mRNA for serine carboxypeptidase-like protein. | |
| 700382826H1 | g168608 | 55 | −62 | gb105pln | Maize 17S ribosomal RNA gene and flanks. | |
| 700382764H1 | g22183 | 86 | −81 | gb105pln | Maize mRNA for beta 2 tubulin. | |
| 700352658H1 | g288366 | 100 | −59 | gb105pln | Z. mays PGg14 gene for polygalacturonase. | |
| 700354492H1 | g1256495 | 23 | −4 | gb105eukp | r10H10.1 | |
| 700357469H1 | g288373 | 48 | −3 | gb105pln | Z. mays PGg6 gene for polygalacturonase. | |
| 700382935H1 | g1550721 | 10 | 7 | gb105eukp | HPR1; RNA binding protein | |
| 700383075H1 | g1814402 | 36 | −21 | gb105pln | Mesembryanthemum crystallinum methionine synthase (MetE) mRNA, complete cds. | |
| 700382663H1 | g2168137 | 24 | −14 | gb105eukp | PKF1 | |
| 700353582H1 | g22455 | 72 | −30 | gb105pln | Z. mays pollen specific mRNA C-terminal (clone 3A6.). | |
| 700355649H1 | g2149051 | 10 | 4 | gb105eukp | Ran3; small Ras-like GTP-binding protein | |
| 700383103H1 | g217973 | 28 | −42 | gb105pln | Zea mays gene for triosephosphate isomerase, complete cds. | |
| 700382385H1 | g2341060 | 79 | −64 | gb105pln | Zea mays translational initiation factor eIF-4A (tif-4A3) mRNA, complete cds. | |
| 700353275H1 | g20310 | 14 | −2 | gb105eukp | pollen specific gene | |
| 700352763H1 | g2154729 | 42 | −41 | gb105pln | C. dactylon mRNA for profilin 1. | |
| 700354277H1 | g220088 | 63 | −32 | gb105allp | TAXREB67 protein | |
| 700356867H1 | g1556445 | 63 | −52 | gb105pln | Hordeum vulgare alpha tubulin (tubA) mRNA, complete cds. | |
| 700353038H1 | g1871506 | 74 | −24 | gb105pln | C. dactylon mRNA for clacium-binding pollen allergen. | |
| 700354870H1 | g171996 | 9 | 4 | gb105eukp | MNS1; alpha-mannosidase | |
| 700355346H1 | g2827001 | 20 | −6 | gb105pln | Triticum aestivum 70 kDa heat shock protein (TaHSP70d) mRNA, complete cds. | |
| 700356053H1 | g2529228 | 37 | −26 | gb105pln | Glycine max mRNA for 6-phosphogluconate dehydrogenase, complete cds. | |
| 700282543H2 | g536152 | 8 | 7 | gb105allp | ORF YBL092w | |
| 700356467H1 | g602605 | 61 | −8 | gb105pln | Zea mays tandem genes for alpha1-tubulin and alpha2-tubulin. | |
| 700356445H1 | g414702 | 19 | 7 | gb105pln | H. lanatus mRNA for allergen Hol-lI. | |
| 700382342H1 | g1771781 | 26 | −33 | gb105pln | T. aestivum mRNA for beta-amylase. | |
| 700383128H1 | g288378 | 29 | −22 | gb105pln | Z. mays gene PG for polygalacturonase. | |
| 700382263H1 | g414907 | 34 | −9 | gb105pln | P. pratense mRNA for pollen allergen PhlpI. | |
| 700355770H1 | g1469218 | 31 | −17 | gb105pln | B. oleracea mRNA (unknown). | |
| 700382127H1 | g2760165 | 19 | −1 | gb105pln | Arabidopsis thaliana genomic DNA, chromosome 5, P1 clone: MAC9, complete | |
| | | | | | sequence. | |
| 700382905H1 | g2827650 | 10 | 0 | gb105eukp | F18F4.60; potassium transporter-like protein | |
| 700382050H1 | g1911581 | 22 | −16 | gb105pln | Cyn d 1 = major allergen {clone 14c1 and CD1} [Cynodon dactylon = Bermuda grass, | |
| | | | | | pollen, mRNA Partial, 759 nt]. | |
| 700353680H1 | g1184775 | 50 | −41 | gb105pln | Zea mays glyceraldehyde-3-phosphate dehydrogenase GAPC4 (gpc4) mRNA, | |
| | | | | | complete cds. | |
| 700354713H1 | g1418971 | 27 | −7 | gb105pln | H. vulgare mRNA for transcription factor EmBP-1. | |
| 700356739H1 | g22427 | 26 | −10 | gb105pln | Z. mays gene for polygalacturonase (clone 65). | |
| 700282587H2 | g313139 | 32 | −15 | gb105pln | Z. mays ZmPRO2 mRNA for profilin 2. | |
| 700353162H1 | g22427 | 48 | −58 | gb105pln | Z. mays gene for polygalacturonase (clone 65). | |
| 700353209H1 | g1167835 | 21 | 1 | gb105pln | H. lanatus mRNA for Hol lI protein. | |
| 700355762H1 | g17795 | 29 | −9 | gb105eukp | Bplo | |
| 700357452H1 | g2564048 | 26 | −27 | gb105pln | Arabidopsis thaliana genomic DNA, chromosome 5, P1 clone: MDK15, complete | |
| | | | | | sequence. | |
| 700356039H1 | g288373 | 88 | −79 | gb105pln | Z. mays PGg6 gene for polygalacturonase. | |
| 700382131H1 | g431163 | 32 | −20 | gb105pln | Lily mRNA for ORF, partial cds. | |
| 700382634H1 | g18053 | 15 | 8 | gb105pln | C. lacryma-jobi L. mRNA for gamma-coixin (22 KDa). | |
| 700383087H1 | g699510 | 24 | −11 | gb105eukp | M(1)1B; minute(1)1B protein; minute(1)1B | |
| 700382977H1 | g22458 | 53 | −36 | gb105pln | Z. mays pollen specific mRNA C-terminal (clone 4H7). | |
| 700352779H1 | g2828287 | 33 | −12 | gb105eukp | T18B16.90; putative protein | |
| 700356939H1 | g347063 | 33 | −12 | gb105pln | Brassic rapa ubiquitin/ribosomal protein mRNA, complete cds. | |
| 700354330H1 | g393449 | 23 | −15 | gb105pln | S. cereale mRNA for beta-amylase. | |
| 700355525H1 | g1079719 | 25 | −6 | gb105pln | Ricinus communis eukaryotic release factor 3 mRNA, partial cds, 3′ end. | |
| 700356039H1 | g22427 | 84 | −80 | gb105pln | Z. mays gene for polygalacturonase (clone 65). | |
| 700353164H1 | g577818 | 17 | 7 | gb105pln | Z. mays gene for H2B histone (gH2B4). | |
| 700353857H1 | g599958 | 19 | −1 | gb105eukp | chloroplast outer envelope protein 86 | |
| 700356789H1 | g1666078 | 58 | −15 | gb105pln | H. vulgare mRNA for glutamyl-tRNA reductase (2nd isoform). | |
| 700383057H1 | g20805 | 30 | −11 | gb105pln | P. sativum lpd mRNA for dihydrolipoamide dehydrogenase. | |
| 700382379H1 | g22416 | 94 | −76 | gb105pln | Z. mays mRNA for polygalacturonase (clone PG1). | |
| 700354287H1 | g1575594 | 65 | −50 | gb105pln | Triticum aestivum fimbrin/plastin-like mRNA, partial cds. | |
| 700355732H1 | g2224897 | 28 | −5 | gb105eukp | PcMYB1; binds specifically to MRE-CHS (MYB recognition element in the parsley CHS | |
| | | | | | promoter); DNA-binding protein PcMYB1 | |
| 700382348H1 | g1800216 | 20 | −16 | gb105pln | Sorghum bicolor phytochrome B (PHYB) gene, partial cds. | |
| 700354833H1 | g780371 | 23 | −28 | gb105pln | Oryza sativa enolase mRNA, complete cds. | |
| 700355295H1 | g1181330 | 87 | −14 | gb105pln | Z. mays CNX mRNA. | |
| 700382826H1 | g2114208 | 56 | −61 | gb105pln | Wheat DNA for 18S rRNA and telomere repeat sequence. | |
| 700282473H2 | g1155255 | 28 | −5 | gb105eukp | beta-glucosidase; EC 3.2.1.21 | |
| 700382025H1 | g1848211 | 23 | −31 | gb105pln | N. tabacum mRNA for protein disulfide-isomerase precursor. | |
| 700355540H1 | g793858 | 10 | 4 | gb105eukp | legumin precursor | |
| 700353715H1 | g1276652 | 14 | 12 | gb105pln | Prophyra purpurea chloroplast genome, complete sequence. | |
| 700354501H1 | g22473 | 67 | −27 | gb105pln | Maize mRNA for ribulose-1,5-bisphosphate carboxylase small subunit (RuBPC; | |
| | | | | | EC 4.1.1.39). | |
| 700352868H1 | g1151221 | 16 | 5 | gb105eukp | SSE1; Sse1p: Member of the 70-kDa heat-shock protein family | |
| 700354696H1 | g313141 | 64 | −47 | gb105pln | Z. mays ZmPRO3 mRNA for profilin 3. | |
| 700355295H1 | g2760165 | 52 | 1 | gb105pln | arabidopsis thaliana genomic DNA, chromosome 5, P1 clone: MAC9, complete | |
| | | | | | sequence. | |
| 700353047H1 | g167107 | 64 | −21 | gb105pln | Hordeum vulgare vacuolar ATPase B subunit isoform mRNA, complete cds. | |
| 700355949H1 | g168543 | 57 | −31 | gb105pln | Zea mays putative ribosomal protein S8 mRNA, partial cds. | |
| 700356819H1 | g1652132 | 9 | 7 | gb105allp | sensory transduction histidine kinase | |
| 700354259H1 | g2738247 | 31 | −37 | gb105pln | Arabidopsis thaliana cobalamin-independent methionine synthase (ATCIMS) mRNA, | |
| | | | | | complete cds. | |
| 700354961H1 | g473360 | 29 | 2 | gb105allp | Phl pI allergen | |
| 700382880H1 | g288366 | 62 | −37 | gb105pln | Z. mays PGg14 gene for polygalacturonase. | |
| 700356048H1 | g1246115 | 21 | 1 | gb105pln | major allergen Pha a 1 [Phalaris aquatica = canary grass, pollen, mRNA Partial, | |
| | | | | | 1088 nt]. | |
| 700356235H1 | g817895 | 18 | −2 | gb105eukp | unknown | |
| 700353247H1 | g1514643 | 19 | −7 | gb105eukp | multidrug resistance protein; PDR5-like ABC transporter | |
| 700354611H1 | g886024 | 9 | 6 | gb105allp | protein kinase PkwA | |
| 700354414H1 | g433040 | 38 | −56 | gb105pln | Zea mays W-22 clone PREM-1A retroelement PREM-1, partial sequence. | |
| 700382080H1 | g60072 | 11 | 7 | gb105allp | p24/p25/p7 | |
| 700354655H1 | g603220 | 36 | −26 | gb105pln | Medicago sativa 6-phosphogluconate dehydrogenase mRNA, complete cds. | |
| 700355014H1 | g886470 | 40 | −27 | gb105pln | C. roseus MetE mRNA for methionine synthase. | |
| 700354677H1 | g2088646 | 17 | −4 | gb105eukp | t28M21.9; Su1p isolog | |
| 700355323H1 | g414907 | 23 | 9 | gb105pln | P. pratense mRNA for pollen allergen PhlpI. | |
| 700383076H1 | g168313 | 18 | 4 | gb105pln | L. perenne pollen allergen (Lol pI ) gene, 3′ end. | |
| 700355540H1 | g1296437 | 12 | 2 | gb105eukp | leg18; legumin-like protein | |
| 700357422H1 | g1931652 | 33 | 4 | gb105eukp | T19D16.18; phosphatidylinositol-4-phosphate 5-kinase isolog | |
| 700353213H1 | g287829 | 79 | −67 | gb105pln | Z. mays gene for polygalacturonase. | |
| 700354260H1 | g1009720 | 10 | 1 | gb105eukp | ENOD8; nodulin | |
| 700353203H1 | g902791 | 11 | −6 | gb105eukp | ILL2; ILL2 | |
| 700355817H1 | g2344871 | 36 | −16 | gb105eukp | pap; purple acid phosphatase precursor; EC 3.1.3.2 | |
| 700352718H1 | g387908 | 20 | 4 | gb105pln | Brassica rapa S-phase-specific (BIS289) mRNA, complete cds. | |
| 700354759H1 | g499655 | 15 | 6 | gb105allp | gamma-thionin homolog | |
| 700355803H1 | g1928968 | 22 | −9 | gb105eukp | ribosomal protein 49 | |
| 700382157H1 | g312180 | 35 | −72 | gb105pln | Z. mays GapC4 gene. | |
| 700355770H1 | g2584827 | 19 | −9 | gb105pln | Sequence of BAC F12F1 from Arabidopsis thaliana chromosome 1, complete sequence. | |
| 700356069H1 | g495730 | 53 | 16 | gb105pln | Arabidopsis thaliana small Ras-like GTP-binding protein (Ran-2) mRNA, 3′ end. | |
| 700353539H1 | g1777930 | 26 | 1 | gb105eukp | SoNDPK1; nucleoside diphosphate kinase; EC 2.7.4.6 | |
| 700355501H1 | g499011 | 32 | −23 | gb105pln | S. vulgare SoAc1 mRNA. | |
| 700355750H1 | g2668745 | 25 | −41 | gb105pln | Zea mays inorganic pyrophosphatase (IPP) mRNA, complete cds. | |
| 700355748H1 | g168482 | 61 | −65 | gb105pln | Corn starch branching enzyme II mRNA, complete cds. | |
| 700383143H1 | g746500 | 14 | 0 | gb105allp | weak similarity to lupus LA proteins | |
| 700357428H1 | g295812 | 11 | 2 | gb105eukp | LAT52 | |
| 700382373H1 | g1532072 | 12 | 11 | gb105pln | Z. mays mRNA for S-adenosylmethionine decarboxylase. | |
| 700354467H1 | g1354271 | 11 | 10 | gb105pln | Arabidopsis thaliana aspartic proteinase mRNA, partial cds. | |
| 700383031H1 | g483411 | 27 | −62 | gb105pln | Zea mays calmodulin-binding protein mRNA, 3′ end. | |
| 700382250H1 | g2267583 | 14 | 1 | gb105eukp | tonoplast proton pumping; vacuolar H+-ATPase subunit E | |
| 700353611H1 | g21838 | 41 | −33 | gb105pln | T. aestivum PRK gene for ribulose-5-phosphate kinase. | |
| 700356595H1 | g22420 | 85 | −56 | gb105pln | Z. mays mRNA for polygalacturonase (clone PG2). | |
| 700382338H1 | g414907 | 37 | −19 | gb105pln | P. pratense mRNA for pollen allergen PhlpI. | |
| 700353848H1 | g1710150 | 29 | −14 | gb105pln | Arabidopsis thaliana proline iminopeptidase mRNA, complete cds. | |
| 700382148H1 | g20204 | 58 | 6 | gb105eukp | fructose-diphosphate aldolase (AA 1-358) | |
| 700355741H1 | g556672 | 46 | −45 | gb105pln | S. cereale (Halo) chloroplast mRNA for heat-shock protein. | |
| 700382812H1 | g157469 | 22 | −8 | gb105eukp | S19; ribosomal protein S19 | |
| 700354380H1 | g2654121 | 25 | 2 | gb105pln | Arabidopsis thaliana ribosomal protein L23a (AtrpL23a) mRNA, complete cds. | |
| 700355401H1 | g710295 | 7 | 4 | gb105allp | ribosomal protein L22 | |
| 700354473H1 | g288612 | 8 | 7 | gb105allp | polygalacturonase | |
| 700355323H1 | g168315 | 23 | 9 | gb105pln | L. perenne pollen allergen (Lol pI ) gene, complete cds. | |
| 700383152H1 | g21800 | 59 | −48 | gb105pln | T. aestivum L mRNA for histone H2B. | |
| 700354709H1 | g2564048 | 16 | −19 | gb105pln | Arabidopsis thaliana genomic DNA, chromosome 5, P1 clone: MKD15, complete | |
| | | | | | sequence. | |
| 700383178H1 | g1698572 | 46 | −24 | gb105allp | proteasome activator PA28 beta subunit | |
| 700354666H1 | g1419369 | 27 | −17 | gb105pln | Z. mays ZmABP3 mRNA for actin depolymerizing factor. | |
| 700355783H1 | g486279 | 11 | 6 | gb105eukp | ORF YKL160w | |
| 700382767H1 | g2388791 | 30 | −5 | gb105eukp | cytochrome oxidase I | |
| 700382320H1 | g444022 | 52 | −44 | gb105pln | N. tabacum mRNA for pyruvate kinase. | |
| 700354609H1 | g1911581 | 36 | −36 | gb105pln | Cyn d 1 = major allergen (clone 14c1 and CD1} [Cynodon dactylon = Bermuda grass, | |
| | | | | | pollen, mRNA Partial, 759 nt]. | |
| 700355216H1 | g313139 | 70 | −65 | gb105pln | Z. mays ZmPRO2 mRNA for profilin 2. | |
| 700356907H1 | g416037 | 56 | −20 | gb105pln | O. sativa rub1 mRNA for polybutiquitin. | |
| 700355668H1 | g1747418 | 11 | −3 | gb105pln | Z. mays mRNA for eukaryotic initiation factor-5. | |
| 700352824H1 | g2384669 | 13 | 6 | gb105eukp | AtKT1; putative potassium transporter AtKT1p | |
| 700353961H1 | g22416 | 51 | −59 | gb105pln | Z. mays mRNA for polygalacturonase (clone PG1). | |
| 700355862H1 | g2154727 | 49 | −38 | gb105pln | C. dactylon mRNA for profilin 2. | |
| 700382173H1 | g288373 | 95 | −77 | gb105pln | Z. mays PGg6 gene for polygalacturonase. | |
| 700353239H1 | g1932925 | 12 | −6 | gb105eukp | putative pectin methylesterase | |
| 700356141H1 | g2262105 | 8 | 1 | gb105eukp | T19F06.8 | |
| 700355780H1 | g205532 | 18 | 7 | gb105allp | metallothionein 2 | |
| 700354406H1 | g488476 | 43 | 7 | gb105allp | glutathione peroxidase | |
| 700356273H1 | g13370 | 56 | 3 | gb105allp | reading frame protein 5 | |
| 700383087H1 | g458972 | 26 | −6 | gb105eukp | F37C12.4 | |
| 700353261H1 | g22416 | 60 | −48 | gb105pln | Z. mays mRNA for polygalacturonase (clone PG1). | |
| 700352771H1 | g170919 | 38 | −30 | gb105pln | Yeast (Candida maltosa) ribosomal protein L41 (LEL41) gene, complete cds. | |
| 700355806H1 | g405885 | 17 | 4 | gb105allp | yeiN | |
| 700352827H1 | g170899 | 18 | −1 | gb105eukp | peroxisomal membrane protein (PMP20A) | |
| 700354485H1 | g939784 | 33 | −12 | gb105pln | Zea mays MADS-box protein (ZAP1) mRNA, complete cds. | |
| 700355258H1 | g21698 | 41 | 15 | gb105pln | T. aestivum gene for cathepsin B (A116). | |
| 700382122H1 | g313135 | 61 | −40 | gb105pln | Z. mays mRNA for porin. | |
| 700383006H1 | g2511530 | 13 | 13 | gb105pln | Eleusine indica alpha tubulin 1 (TUA1) mRNA, complete cds. | |
| 700352783H1 | g1184167 | 24 | −6 | gb105eukp | knolle | |
| 700383076H1 | g1246115 | 17 | 3 | gb105pln | major allergen Pha a 1 [Phalaris aquatica = canary grass, pollen, mRNA Partial, | |
| | | | | | 1088 nt]. | |
| 700354473H1 | g479088 | 7 | 6 | gb105allp | polygalacturonase | |
| 700353883H1 | g533692 | 22 | 1 | gb105eukp | protease inhibitor | |
| 700382013H1 | g623547 | 12 | −1 | gb105allp | queuine tRNA-ribosyltransferase | |
| 700355237H1 | g2618605 | 13 | 10 | gb105pln | Arabidopsis thaliana genomic DNA, chromosome 5, P1 clone: MUK11, complete | |
| | | | | | sequence. | |
| 700356180H1 | g2275006 | 39 | −21 | gb105pln | Hordeum vulgare mRNA for expressed sequence ta. | |
| 700356213H1 | g453975 | 39 | −5 | gb105pln | P. pratense mRNA for profilin-Phl p XI. | |
| 700356893H1 | g2738247 | 25 | 0 | gb105pln | Arabidopsis thaliana cobalamin-independent methionine synthase (ATCIMS) mRNA, | |
| | | | | | complete cds. | |
| 700352951H1 | g248336 | 53 | −10 | gb105pln | polyubiquitin [maize, Genomic 3841 nt]. | |
| 700355742H1 | g600708 | 10 | 5 | gb105eukp | unknown; YSC84 | |
| 700382329H1 | g287829 | 99 | −84 | gb105pn | Z. mays gene for polygalacturonase. | |
| 700355018H1 | g22458 | 75 | −78 | gb105pln | Z. mays pollen specific mRNA C-terminal (clone 4H7). | |
| 700355341H1 | g2370460 | 31 | −63 | gb105pln | Sorghum bicolor mRNA for putative glycoprotein. | |
| 700355419H1 | g596077 | 64 | −51 | gb105pln | Zea mays thiamaine biosynthetic enzyme (thi1-1) mRNA, complete cds. | |
| 700382966H1 | g2832632 | 35 | −9 | gb105eukp | F13C5.210; hypothetical protein | |
| 700353557H1 | g168487 | 38 | 13 | gb105pln | Maize glutathione S-transferase gene (GST-I), exons 2 and 3. | |
| 700354726H1 | g493724 | 40 | −21 | gb105pln | O. sativa mRNA for beta-tubulin. | |
| 700382883H1 | g639721 | 25 | −30 | gb105pln | Zea mays calcium-dependent protein kinase (CDPK) gene, exons 1-7 and partial cds. | |
| 700382112H1 | g168482 | 43 | −78 | gb105pln | Corn starch branching enzyme II mRNA, complete cds. | |
| 700352812H1 | g596079 | 30 | −71 | gb105pln | Zea mays thiamine biosynthetic enzyme (thi1-2) mRNA, complete cds. | |
| 700352848H1 | g288611 | 50 | −36 | gb105pln | Z. mays PG gene for polygalacturonase. | |
| 700352973H1 | g414908 | 23 | 1 | gb105eukp | pollen allergen Phl pI | |
| 700354771H1 | g555616 | 11 | −5 | gb105eukp | cim1; cytokinin induced message | |
| 700356002H1 | g1498243 | 13 | 1 | gb105eukp | putative, YGL141w | |
| 700353163H1 | g1498052 | 66 | 11 | gb105pln | Zea mays ribosomal protein S8 mRNA, complete cds. | |
| 700354594H1 | g2735017 | 19 | 7 | gb105allp | KI domain interacting kinase 1 | |
| 700354672H1 | g289984 | 31 | −8 | gb105allp | 33 kDa protein | |
| 700355424H1 | g2565420 | 34 | −18 | gb105pln | Onobrychis viciifolia eukaryotic translation initiation factor eIF-1A mRNA, | |
| | | | | | complete cds. | |
| 700354511H1 | g1881692 | 65 | −21 | gb105pln | Zea mays phosphoglucomutase mRNA, partial cds. | |
| 700382993H1 | g1008185 | 16 | 2 | gb105eukp | MTR4 | |
| 700352906H1 | g1438880 | 24 | −10 | gb105pln | Glycine max choline kinase GmCK2p mRNA, complete cds. | |
| 700355006H1 | g20323 | 18 | 3 | gb105pln | O. sativa RAc1 gene for actin. | |
| 700353026H1 | g1145693 | 44 | −0 | gb105eukp | ACT1; actin | |
| 700353536H1 | g1167836 | 30 | 7 | gb15eukp | hol lI; major group I allergen; protin with incomplete signal sequence | |
| 700354824H1 | g1388076 | 23 | −3 | gb105eukp | TRX3; thioredoxin h | |
| 700354910H1 | g157564 | 29 | −7 | gb105eukp | Aats-glupro; transfer RNA-Glu-Pro aminoacyl synthetase | |
| 700382133H1 | g2245378 | 39 | −2 | gb105eukp | ARF1; auxin response factor 1 | |
| 700382246H1 | g22427 | 61 | −69 | gb105pln | Z. mays gene for polygalacturonase (clone 65). | |
| 700353148H1 | g639833 | 38 | −11 | gb105pln | S. tuberosum mRNA for NADH dehydrogenase, NADH-binding subunit (complex I). | |
| 700355338H1 | g426441 | 35 | −21 | gb105pln | Rice mRNA for thioredoxin h, complete cds. | |
| 700382053H1 | g535141 | 9 | 5 | gb105allp | dolichyl-phosphate beta-glucosyltransferase | |
| 700353995H1 | g288373 | 80 | −7 | gb105pln | Z. mays PGg6 gene for polygalacturonase. | |
| 700355974H1 | g1263910 | 24 | −10 | gb105pln | S. oleracea mRNA for vacuolar H(+)-ATPase. | |
| 700383173H1 | g1136782 | 23 | −19 | gb105pln | Fission Yeast mRNA for elongation factor 1 alpha-A, complete cds. | |
| 700355791H1 | g1653622 | 14 | 6 | gb105allp | hypothetical protein | |
| 700357168H1 | g288366 | 83 | −90 | gb105pln | Z. mays PGg14 gene for polygalacturonase. | |
| 700352977H1 | g758354 | 34 | −0 | gb105pln | Z. mays mRNA for plasma membrane H+ ATPase. | |
| 700382226H1 | g1255428 | 6 | 8 | gb105eukp | ZC513.6 | |
| 700354583H1 | g1431254 | 48 | −5 | gb105eukp | DHH1 | |
| 700355533H1 | g1658321 | 30 | −26 | gb105pln | S. tuberosum mRNA for transketolase. | |
| 700352951H1 | g1839582 | 45 | 11 | gb105pln | polyubiquitin homolog {clone CHEM 6} [Zea mays = maize, cv, INRA 258, mercuric | |
| | | | | | chloride-treated, leaves, mRNA Partial, 199 nt, segment 1 of 2]. | |
| 700354479H1 | g1235716 | 17 | −1 | gb105pln | Arabidopsis thaliana mRNA for calcium-dependent protein kinase (CDPK), | |
| | | | | | complete cds. | |
| 700356565H1 | g19902 | 10 | −2 | gb105eukp | pollen specific protein | |
| 700356585H1 | g1864002 | 37 | −26 | gb105pln | Nicotiana tabacum mRNA for 21D7, complete cds. | |
| 700355035H1 | g396209 | 30 | −11 | gb105pln | S. polyrrhiza mRNA for D-myo-inositol-3-phosphate synthase. | |
| 700355952H1 | g1246115 | 25 | −8 | gb105pln | major allergen Pha a1 [Phalaris aquatica = canary grass, pollen, mRNA Partial, | |
| | | | | | 1088 nt]. | |
| 700382767H1 | g2388787 | 30 | −5 | gb105eukp | cytochrome oxidase I | |
| 700355268H1 | g1359893 | 25 | −24 | gb105pln | H. tuberosus mRNA for NADPH-ferrihemoprotein reductase. | |
| 700352627H1 | g2673914 | 38 | −22 | gb105eukp | T24P15.14 | |
| 700354852H1 | g1835728 | 20 | −4 | gb105pln | Oryza sativa ribosomal protein mRNA, complete cds. | |
| 700356565H1 | g17782 | 12 | −3 | gb105eukp | bplo | |
| 700354366H1 | g498040 | 28 | −23 | gb105eukp | ORF | |
| 700354754H1 | g2440191 | 38 | −12 | gb105eukp | hypothetical protein | |
| 700356240H1 | g2529375 | 42 | −32 | gb105pln | Spinacia oleracea chloroplast sedoheptulose-1,7-bisphosphatase mRNA, complete cds. | |
| 700355069H1 | g499011 | 32 | −0 | gb105pln | S. vulgare SoAc1 mRNA. | |
| 700352905H1 | g1167527 | 30 | −11 | gb105eukp | Cytb; cytochrome b | |
| 700354383H1 | g2459445 | 16 | −5 | gb105eukp | F4P9.18; putative ribonucleoprotein | |
| 700356576H1 | g1403557 | 38 | 3 | gb105eukp | P2591 protein | |
| 700354710H1 | g303854 | 42 | −58 | gb105pln | Rice mRNA for ribosomal protein L7A, complete cds. | |
| 700354786H1 | g1167836 | 18 | 2 | gb105allp | protein with incomplete signal sequence | |
| 700356485H1 | g248338 | 89 | −53 | gb105pln | polyubiquitin [maize, Genomic, 3439 nt]. | |
| 700382491H1 | g453975 | 15 | −16 | gb105pln | P. pratense mRNA for profilin-Ph1 p XI. | |
| 700353180H1 | g577611 | 69 | −74 | gb105pln | Zea mays CRT1 gene for calcium-binding protein. | |
| 700356739H1 | g22456 | 26 | −9 | gb105pln | Z. mays pollen specific mRNA C-terminal (clone 3C12). | |
| 700356775H1 | g298018 | 46 | −9 | gb105pln | M. sativa mRNA msk7 for map kinase. | |
| 700355415H1 | g1835730 | 21 | 2 | gb105pln | Oryza sativa photosystem II 10 kDa polypeptide mRNA, complete cds. | |
| 700355764H1 | g2565420 | 35 | −20 | gb105pln | Onobrychis viciifolia eukaryotic translation initiation factor eIF-1A mRNA, | |
| | | | | | complete cds. | |
| 700353067H1 | g2317728 | 26 | −1 | gb105pln | Arabidospis thaliana reversibly glycosylated polypeptide-1 (AtRGP) mRNA, | |
| | | | | | complete cds. | |
| 700355456H1 | g1498387 | 31 | −62 | gb105pln | Zea mays actin (Maz83) gene, partial cds. | |
| 700356864H1 | g169776 | 14 | 14 | gb105pln | Oryza sativa beta-amylase gene, complete cds. | |
| 700356055H1 | g22427 | 49 | −63 | gb105pln | Z. mays gene for polygalacturonase (clone 65). | |
| 700383006H1 | g22153 | 48 | −48 | gb105pln | Z. mays (B37) mRNA for alpha-tubulin 4. | |
| 700382134H1 | g992962 | 25 | −8 | gb105eukp | thioredoxin | |
| 700354307H1 | g218162 | 55 | −19 | gb105pln | Rice mRNA for ferredoxin-NADP+ reductase, complete cds. | |
| 700355489H1 | g407474 | 34 | −22 | gb105pln | P. sativium, mRNA for T-protein of glycine decarboxylase complex. | |
| 700355754H1 | g414907 | 23 | −30 | gb105pln | P. pratense mRNA for pollen allergen PhlpI. | |
| 700282508H2 | g21955 | 9 | −6 | gb105eukp | beta-glucosidase; EC 3.2.1.21 | |
| 700355854H1 | g2275206 | 7 | 5 | gb105eukp | T08I13.12; pectinesterase isolog | |
| 700382779H1 | g218082 | 48 | −12 | gb105pln | Rice mRNA for initiation factor eIF-4D (225 gene), partial sequence. | |
| 700355883H1 | g22423 | 97 | −94 | gb105pln | Z. mays mRNA for polygalacturonase (clone PG4). | |
| 700282527H2 | g1167835 | 20 | 9 | gb105pln | H. lanatus mRNA for Hol lI protein. | |
| 700383038H1 | g2131104 | 34 | −17 | gb105eukp | ORF YJR094w-a | |
| 700354581H1 | g2586333 | 40 | −1 | gb105eukp | LeKAP alpha; importin alpha | |
| 700356933H1 | g1495259 | 23 | 6 | gb105eukp orf04 | | |
| 700356653H1 | g288373 | 38 | −12 | gb105pln | Z. mays PGg6 gene for polygalacturonase. | |
| 700382502H1 | g22458 | 61 | −11 | gb105pln | Z. mays pollen specific mRNA C-terminal (clone 4H7). | |
| 700356445H1 | g168315 | 21 | 7 | gb105pln | L. perenne pollen allergen (Lol pI) gene, complete cds. | |
| 700354871H1 | g2529339 | 63 | −70 | gb105pln | Zea maize AGAMOUS homologue mRNA, complete cds. | |
| 700382883H1 | g1632767 | 19 | −14 | gb105pln | Maize mRNA for calcium dependent protein kinase, complete cds. | |
| 700352637H1 | g313760 | 75 | −79 | gb105pln | Z. mays hsp 70-2 gene for heat shock protein 70. | |
| 700382309H1 | g22458 | 92 | −69 | gb105pln | Z. mays pollen specific mRNA C-terminal (clone 4H7). | |
| 700354325H1 | g1044865 | 54 | −40 | gb105pln | C. rubrum actin gene | |
| 700355323H1 | g1167835 | 23 | 10 | gb105pln | H. lanatus mRNA for Hol lI protein. | |
| 700355313H1 | g2511530 | 53 | −53 | gb105pln | Eleusine indica alpha tubulin 1 (TUA1) mRNA, complete cds. | |
| 700353960H1 | g510910 | 60 | −42 | gb105pln | L. temulentum mRNA for histone H3. | |
| 700282457H2 | g1813595 | 8 | −1 | gb105eukp | xylan endohydrolase isoenzyme X-I; EC 3.2.1.8 | |
| 700353142H1 | g2055230 | 12 | 5 | gb105eukp | src2; SRC2; soybean cold-regulated gene | |
| 700282470H2 | g2285800 | 12 | 5 | gb105eukp | 26S proteasome beta subunit | |
| 700356510H1 | g22425 | 26 | −47 | gb105pln | Z. mays gene for polygalacturonase (clone 47). | |
| 700353210H1 | g2160155 | 27 | −23 | gb105pln | Sequence of BAC F21M12 from Arabidopsis thaliana chromosome 1, complete | |
| | | | | | sequence. | |
| 700356136H1 | g862309 | 25 | −39 | gb105pln | Rice G protein alpha-subunit (RGA1) mRNA, complete cds. | |
| 700353961H1 | g287829 | 51 | −58 | gb105pln | Z. mays gene for polygalacturonase. | |
| 700382127H1 | g669002 | 30 | −10 | gb105pln | Glycine max calnexin mRNA, complete cds. | |
| 700382935H1 | g1657691 | 10 | 7 | gb105eukp | HRP1; Hrp1p | |
| 700352770H1 | g1177320 | 34 | −15 | gb105eukp | efa27; EFA27 for EF hand, abscisic acid, 27 kD | |
| 700355509H1 | g644491 | 51 | −79 | gb105pln | Corn mRNA for elongation factor 1A. | |
| 700356073H1 | g287829 | 40 | −60 | gb105pln | Z. mays gene for polygalacturonase. | |
| 700382758H1 | g2369877 | 51 | −42 | gb105pln | Hordeum vulgare mRNA for m12 protein. | |
| 700353102H1 | g288373 | 96 | −59 | gb105pln | Z. mays PGg6 gene for polygalacturonase. | |
| 700352962H1 | g414703 | 32 | −5 | gb105eukp | allergen Hol-lI | |
| 700356104H1 | g2804593 | 19 | −17 | gb105pln | Sequence of BAC T12M4 from Arabidopsis thaliana chromosome 1, complete sequence. | |
| 700356125H1 | g2624416 | 52 | −43 | gb105pln | Zea mays mRNA for ubiquitin carrier protein UBC7. | |
| 700356134H1 | g1279329 | 17 | −1 | gb105eukp | R06C7.3 | |
| 700382643H1 | g2708531 | 25 | −12 | gb105pln | Nicotiana tabacum putative RNA binding protein (ZRRBP-1) mRNA, partial cds. | |
| 700352707H1 | g2660771 | 28 | −40 | gb105pln | Spinacia oleracea cytosolic heat shock 70 protein (HSC70-1) gene, complete cds. | |
| 700354559H1 | g786115 | 11 | −1 | gb105eukp | H(+)-transporting ATPase | |
| 700355223H1 | g1486286 | 34 | −36 | gb105pln | C. sativus mRNA for T-complex polypeptide 1. | |
| 700353294H1 | g895891 | 12 | −2 | gb105eukp | RPS5; ribosomal protein S5 | |
| 700353528H1 | g22420 | 90 | −83 | gb105pln | Z. mays mRNA for polygalacturonase (clone PG2). | |
| 700354319H1 | g1155216 | 27 | −11 | gb105pln | Lycopersicon esculentum Pto kinase interactor 1 (Pti1) mRNA, complete cds. | |
| 700354939H1 | g2262105 | 24 | −6 | gb105eukp | T19F06.8 | |
| 700383044H1 | g1165205 | 14 | −11 | gb105pln | Arabidopsis thaliana multiubiquitin chain binding protein (MBP1) mRNA, complete cds. | |
| 700383102H1 | g288373 | 44 | −33 | gb105pln | Z. mays PGg6 gene for polygalacturonase. | |
| 700352848H1 | g288378 | 35 | −22 | gb105pln | Z. mays gene PG for polygalacturonase. | |
| 700356143H1 | g255569 | 14 | 6 | gb105allp | pollen specific protein [Zea mays = corn, Peptide, 170 aa] | |
| 700383032H1 | g170750 | 16 | −7 | gb105pln | Wheat (clone p28-1) initiation factor isozyme 4F p82 subunit mRNA, complete cds. | |
| 700382518H1 | g168486 | 38 | 10 | gb105pln | Maize glutathione S-transferase gene (GST-I), exon 1. | |
| 700353042H1 | g1255684 | 54 | −41 | gb105pln | Rice mRNA for aspartic protease, complete cds. | |
| 700382445H1 | g1513227 | 21 | −6 | gb105pln | Brassica napus myo-inositol 1-phosphate synthase mRNA, complete cds. | |
| 700355030H1 | g169537 | 44 | −35 | gb105pln | Potato pyrophosphate-frustose 6-phosphate 1-phosphotransferase (PFP) alpha-subunit | |
| | | | | | mRNA, complete cds. | |
| 700382873H1 | g1296808 | 29 | −27 | gb105pln | H. vulgare mRNA for xylose isomerase. | |
| 700357426H1 | g2634366 | 8 | 4 | gb105allp | similar to adenosylmethionine-8-amino-7-oxononanoate aminotransferase | |
| 700354402H1 | g2706449 | 21 | 15 | gb105pln | Solanum tuberosum mRNA for magnesium dependent soluble inorganic pyrophosphatase. | |
| 700357479H1 | g435542 | 62 | −22 | gb105pln | Z. mays mRNA for calmodulin. | |
| 700382824H1 | g777757 | 62 | −49 | gb105pln | Saccharum hybrid (clone SCUBI561) polyubiquitin mRNA, complete cds. | |
| 700282485H2 | g2351062 | 12 | 16 | gb105pln | Arabidopsis thaliana genomic DNA, chromosome 5, P1 clone: MAH20. | |
| 700356223H1 | g22614 | 27 | −46 | gb105pln | S. vulgare pepC gene for PEP carboxylase. | |
| 700382993H1 | g1236106 | 14 | −4 | gb105eukp | W08D2.7 | |
| 700354893H1 | g1204225 | 18 | −8 | gb105eukp | SPAC56F8.03; unknown | |
| 700355815H1 | g2191137 | 6 | 6 | gb105eukp | A_IG002N01.17 | |
| 700382032H1 | g1834353 | 16 | 6 | gb105eukp | 194; hypothetical protein 194 | |
| 700382804H1 | g22425 | 35 | −14 | gb105pln | Z. mays gene for polygalacturonase (clone 47). | |
| 700354910H1 | g1419467 | 30 | −8 | gb105eukp | ZC434.5 | |
| 700355842H1 | g1255959 | 7 | 6 | gb105allp | ORF N0840 | |
| 700382886H1 | g22418 | 50 | −57 | gb105pln | Z. mays gene for polygalacturonase (clone 17). | |
| 700353221H1 | g168315 | 14 | −1 | gb105pln | L. perenne pollen allergen (Lol pI ) gene, complete cds. | |
| 700354923H1 | g1532047 | 46 | −31 | gb105pln | O. sativa mRNA for S-adenosylmethionine decarboxylase. | |
| 700352982H1 | g22149 | 100 | −62 | gb105pln | Z. mays mRNA for alpha-tubulin 3. | |
| 700354788H1 | g1218042 | 27 | −15 | gb105eukp | PAP1; secreted purple acid phosphatase precursor | |
| 700356442H1 | g22416 | 98 | −60 | gb105pln | Z. mays mRNA for polygalacturonase (clone PG1). | |
| 700382768H1 | g414702 | 33 | −4 | gb105pln | H. lanatus mRNA for allergen Hol-lI. | |
| 700353068H1 | g248338 | 70 | −53 | gb105pln | polyubiquitin [maize, Genomic, 3439 nt]. | |
| 700354550H1 | g857573 | 41 | 1 | gb105pln | Oryza sativa vacuolar H+-ATPase (vatp-P1) mRNA, complete cds. | |
| 700356977H1 | g2760172 | 37 | −3 | gb105pln | Arabidopsis thaliana genomic DNA, chromosome 5, P1 clone: MUB3, complete | |
| | | | | | sequence. | |
| 700383048H1 | g1850540 | 18 | −5 | gb105eukp | ribosomal P2 phosphoprotein | |
| 700382673H1 | g1389847 | 30 | −16 | gb105eukp | myosin regulatory light chain | |
| 700356794H1 | g2842474 | 26 | 0 | gb105pln | Arabidopsis thaliana DNA chromosome 4, BAC clone F21O9 (ESSAII project). | |
| 700353077H1 | g22458 | 62 | −69 | gb105pln | Z. mays pollen specific mRNA C-terminal (clone 4H7). | |
| 700382226H1 | g1000472 | 6 | 7 | gb105eukp | C09G9.6 | |
| 700353635H1 | g1694620 | 48 | −15 | gb105pln | Cucurbita sp. mRNA for 3-keotacyl-CoA thiolase, complete cds. | |
| 700352772H1 | g22237 | 84 | −72 | gb105pln | Maize mRNA for cytosolic GAPDH (GapC) glyceraldehyde-3-phosphate dehydrogenase. | |
| 700355969H1 | g218176 | 29 | −26 | gb105pln | Rice mRNA for 21 kd polypeptide. | |
| 700356472H1 | g1753197 | 13 | 7 | gb105allp | dipeptidyl peptidase IV | |
| 700353508H1 | g624958 | 32 | −22 | gb105pln | C. reinhardtii mRNA for ribosomal protein S27. | |
| 700382327H1 | g168270 | 26 | −7 | gb105eukp | F-1-ATPase delta subunit precursor (EC 3.6.1.3) | |
| 700354919H1 | g22237 | 32 | 12 | gb105pln | Maize mRNA for cytosolic GAPDH (GapC) glyceraldehyde-3-phosphate dehydrogenase. | |
| 700355988H1 | g1628622 | 13 | −2 | gb105eukp | FLS1; catalyzes the conversion of dihydroflavonols to flavonols; flavonol synthase | |
| 700356216H1 | g2388565 | 17 | 4 | gb105allp | Similar to Prunus pectinesterase (gb\|X95991). | |
| 700382957H1 | g288373 | 28 | −28 | gb105pln | Z. mays PGg6 gene for polygalacturonase. | |
| 700383165H1 | g2072953 | 15 | 0 | gb105allp | putative p150 | |
| 700354621H1 | g22458 | 88 | −79 | gb105pln | Z. mays pollen specific mRNA C-terminal (clone 4H7). | |
| 700357138H1 | g288366 | 76 | −73 | gb105pln | Z. mays PGg14 gene for polygalacturonase. | |
| 700353042H1 | g18903 | 53 | −41 | gb105pln | Barley mRNA for aspartic proteinase. | |
| 700354523H1 | g619788 | 28 | 4 | gb105allp | L21 ribosomal protein | |
| 700353793H1 | g949877 | 22 | −17 | gb105pln | H. vulgare mRNA for elongation factor 1-alpha. | |
| 700354414H1 | g433041 | 40 | −58 | gb105pln | Zea mays W-22 clone PREM-1B retroelement PREM-1, partial sequence. | |
| 700353643H1 | g54006 | 8 | 6 | gb105allp | ribosomal protein S12 (AA 1-132) | |
| 700356223H1 | g22415 | 19 | −27 | gb105pln | Maize mRNA for phosphoenolpyruvate carboxylase (PEPCase EC 4.1.1.31). | |
| 700355560H1 | g293901 | 51 | −66 | gb105pln | Zea mays Zea mI gene, complete cds. | |
| 700357127H1 | g17645 | 59 | −6 | gb105allp | RIBOSOMAL PROTEIN L35a | |
| 700382087H1 | g1147599 | 7 | 7 | gb105allp | dodo | |
| 700382168H1 | g169818 | 36 | −71 | gb105pln | Rice 25S ribosomal RNA gene. | |
| 700356685H1 | g22420 | 93 | −38 | gb105pln | Z. mays mRNA for polygalacturonase (clone PG2). | |
| 700383151H1 | g21493 | 32 | −14 | gb105eukp | mpp; mitochondrial processing peptidase | |
| 700355046H1 | g1638836 | 54 | −49 | gb105pln | H. vulgare mRNA for alpha-tubulin 2. | |
| 700383143H1 | g2773235 | 11 | 2 | gb105allp | contains similarity to lupus LA protein homologs | |
| 700354640H1 | g1381148 | 11 | 6 | gb105allp | Hs-CUL-4A | |
| 700356993H1 | g1203832 | 24 | −6 | gb105eukp | beta-D-glucan exohydrolase, isoenzyme ExoII; EC 3.2.1.58 | |
| 700355848H1 | g2760168 | 15 | 4 | gb105pln | Arabidopsis thaliana genomic DNA, chromosome 5, P1 clone: MEE6, complete | |
| | | | | | sequence. | |
| 700356084H1 | g288366 | 49 | −58 | gb105pln | Z. mays PGg14 gene for polygalacturonase. | |
| 700354367H1 | g22606 | 16 | −26 | gb105pln | H. vulgare mRNA for 14-3-3 protein homologue (14-3-3a). | |
| 700355895H1 | g433043 | 16 | 15 | gb105pln | Zea mays W-22 clone PREM-1E retroelement PREM-1, partial sequence. | |
| 700354893H1 | g1326056 | 19 | −7 | gb105eukp | FUN12; Fun12p: 97 kDa protein, function unknown | |
| 700354295H1 | g2443755 | 28 | −13 | gb105eukp | CYP5; cyclophilin | |
| 700355767H1 | g2190549 | 13 | −4 | gb105eukp | F5I14.17 | |
| 700382574H1 | g22425 | 27 | −14 | gb105pln | Z. mays gene for polygalacturonase (clone 47). | |
| 700354650H1 | g22458 | 87 | −72 | gb105pln | Z. mays pollen specific mRNA C-terminal (clone 4H7). | |
| 700282544H2 | g758354 | 43 | −18 | gb105pln | Z. mays mRNA for plasma membrane H+ ATPase. | |
| 700354931H1 | g288366 | 98 | −61 | gb105pln | Z. mays PGg14 gene for polygalacturonase. | |
| 700353008H1 | g2224932 | 28 | −5 | gb105pln | Arabidopsis thaliana ethylene-insensitive3 (EIN3) mRNA, complete cds. | |
| 700354341H1 | g2529657 | 18 | 8 | gb105pln | Arabidopsis thaliana chromosome II BAC T30B22 genomic sequence, complete | |
| | | | | | sequence. | |
| 700282553H2 | g2463588 | 10 | 7 | gb105allp | FB1035 precursor | |
| 700382250H1 | g1143394 | 14 | −2 | gb105eukp | V-type proton-ATPase | |
| 700356013H1 | g22427 | 37 | −83 | gb105pln | Z. mays gene for polygalacturonase (clone 65). | |
| 700383140H1 | g2632156 | 20 | −2 | gb105pln | Aspergillus niger mRNA for ribosomal protein L15. | |
| 700356582H1 | g2706460 | 18 | 7 | gb105eukp | SPAC3G9.09c; hypothetical translational initiation factor 2 alpha | |
| 700282526H2 | g1049306 | 36 | −8 | gb105pln | Arabidopsis thaliana actin-2 mRNA, complete cds. | |
| 700355245H1 | g1771781 | 52 | −44 | gb105pln | T. aestivum mRNA for beta-amylase. | |
| 700357161H1 | g556672 | 13 | −25 | gb105pln | S. cereale (Halo) chloroplast mRNA for heat-shock protein. | |
| 700383107H1 | g162901 | 55 | −16 | gb105allp | cytochrome c oxidase subunit CIX precursor (E.C. 1.9.3.1) | |
| 700382425H1 | g1495251 | 53 | 7 | gb105eukp | heat-shock protein | |
| 700382165H1 | g1575127 | 94 | −82 | gb105pln | Zea mays lumenal binding protein cBiPe2 mRNA, complete cds. | |
| 700354469H1 | g736271 | 42 | −27 | gb105pln | O. sativa hsp70 gene for heat shock protein 70. | |
| 700382342H1 | g393449 | 27 | −32 | gb105pln | S. cereale mRNA for beta-amylase. | |
| 700356858H1 | g1143864 | 7 | 0 | gb105eukp | catalyzes the release of either giberellin or cyanogenic substances from their | |
| | | | | | glucoconjugates; beta glucosidase; EC 3.2.1.21 | |
| 700356517H1 | g475886 | 28 | −4 | gb105pln | Rice mRNA for signal recognition particle 7S RNA, partial sequence. | |
| 700282564H2 | g1905943 | 30 | −24 | gb105pln | Sorghum bicolor MADS box transcription factor SbMADS1 mRNA, complete cds. | |
| 700356453H1 | g397958 | 36 | 4 | gb105pln | Z. mays mRNA for beta-amylase. | |
| 700357153H1 | g1184775 | 49 | −87 | gb105pln | Zea mays glyceraldehyde-3-phosphate dehydrogenase GAPC4 (gpc4) mRNA, | |
| | | | | | complete cds. | |
| 700382985H1 | g2827711 | 15 | −2 | gb105eukp | F6H11.130; oxoglutarate dehydrogenase-like protein | |
| 700356675H1 | g1235717 | 32 | 1 | gb105pln | Arabidopsis thaliana mRNA for calcium-dependent protein kinase (CDPK), | |
| | | | | | complete cds. | |
| 700352890H1 | g1895083 | 66 | −80 | gb105pln | Zea mays golgi associated protein se-wap41 mRNA, complete cds. | |
| 700353206H1 | g473878 | 22 | −3 | gb105eukp | calnexin homolog | |
| 700352808H1 | g1335965 | 45 | −58 | gb105pln | Zea mays acetyl CoA carboxylase mRNA, partial cds. | |
| 700352973H1 | g473360 | 26 | 0 | gb105allp | Phl pI allergen | |
| 700354902H1 | g168400 | 29 | −27 | gb105pln | Zea mays auxin-binding protein | |
| 700354405H1 | g170781 | 38 | −3 | gb105pln | Wheat ubiquitin carrier protein (E2) mRNA, complete cds. | |
| 700356174H1 | g2623961 | 30 | −8 | gb105pln | A. graveolens mRNA for isocitrate dehydrogenase (NADP+). | |
| 700354363H1 | g1498358 | 56 | −46 | gb105pln | Nicotiana tabacum actin (Tob103) gene, partial cds. | |
| 700355288H1 | g1616658 | 36 | −17 | gb105pln | Triticum aestivum adenylosuccinate synthetase mRNA, partial cds. | |
| 700383076H1 | g414702 | 16 | 4 | gb105pln | H. lanatus mRNA for allergen Hol-lI. | |
| 700354841H1 | g577818 | 27 | −20 | gb105pln | Z. mays gene for H2B histone (gH2B4). | |
| 700352875H1 | g2245136 | 19 | −12 | gb105eukp | trehalose-6-phosphate synthase homolog | |
| 700353723H1 | g482936 | 42 | 7 | gb105eukp | Glycolytic enzyme; pyruvate kinase; plastid isozyme | |
| 700353987H1 | g22418 | 53 | 6 | gb105pln | Z. mays gene for polygalacturonase (clone 17). | |
| 700355001H1 | g2760168 | 19 | 13 | gb105pln | Arabidopsis thaliana genomic DNA, chromosome 5, P1 clone: MEE6, complete | |
| | | | | | sequence. | |
| 700355823H1 | g2347186 | 18 | −15 | gb105pln | Arabidopsis thaliana chromosome II BAC T09D09 genomic sequence, complete | |
| | | | | | sequence. | |
| 700355765H1 | g218157 | 83 | 4 | gb105eukp | cytoplasmic aldolase | |
| 700355865H1 | g2266661 | 26 | −35 | gb105pln | Hordeum vulgare mRNA for 14-3-3 protein (Hv1433c). | |
| 700352923H1 | g287829 | 100 | −57 | gb105pln | Z. mays gene for polygalacturonase. | |
| 700355095H1 | g173231 | 24 | 3 | gb105pln | Yeast (Saccharomyces cerevisiae) ribosomal 5S RNA-binding protein (YL3) gene, 5′ cds. | |
| 700356573H1 | g1814402 | 45 | −33 | gb105pln | Mesembryanthemum crystallinum methionine synthase (MetE) mRNA, complete cds. | |
| 700353246H1 | g1209700 | 28 | −52 | gb105pln | Zea mays ribosomal protein L12 mRNA, complete cds. | |
| 700352674H1 | g1431716 | 42 | −28 | gb105pln | P. agilia beta-1 tubulin (beta-1-tub) gene, complete cds. | |
| 700353286H1 | g1052816 | 22 | −25 | gb105pln | T. aestivum mRNA for profilin (clone TaPRO1). | |
| 700356465H1 | g168549 | 77 | −30 | gb105pln | Zea mays putative anthranilate synthase component II homolog mRNA, partial cds. | |
| 700355789H1 | g553080 | 37 | 7 | gb105allp | chloroplast EF-G | |
| 700383087H1 | g1276967 | 31 | −7 | gb105eukp | putative ribosomal protein | |
| 700355285H1 | g394755 | 11 | 2 | gb105eukp | CF(o)II ATP synthase subunit 9 | |
| 700382111H1 | g168482 | 74 | −82 | gb105pln | Corn starch branching enzyme II mRNA, complete cds. | |
| 700353109H1 | g311906 | 42 | −23 | gb105pln | N. tabacum mRNA for ras-related GTP-binding protein. | |
| 700356246H1 | g804656 | 38 | −01 | gb105eukp | BGQ60; beta-glucosidase | |
| 700356427H1 | g1556428 | 37 | −14 | gb105pln | N. tabacum mRNA for citrate synthase. | |
| 700282577H2 | g1658173 | 42 | −26 | gb105eukp | otaA; ornithine transaminase; EC 2.6.1.13 | |
| 700355860H1 | g2641618 | 33 | −41 | gb105pln | Zea mays ubiquitin-conjugating enzyme protein E2 (ubc7) mRNA, complete cds. | |
| 700382608H1 | g22456 | 96 | −89 | gb105pln | Z. mays pollen specific mRNA C-terminal (clone 3C12). | |
| 700383075H1 | g886470 | 37 | −23 | gb105pln | C. roseus MetE mRNA for methionine synthase. | |
| 700355226H1 | g1246115 | 16 | 4 | gb105pln | major allergen Pha a 1 [Phalaris aquatica = canary grass, pollen, mRNA Partial, | |
| | | | | | 1088 nt]. | |
| 700353573H1 | g293901 | 92 | −39 | gb105pln | Zea mays Zea mI gene, complete cds. | |
| 700354909H1 | g288611 | 94 | −84 | gb105pln | Z. mays PG gene for polygalacturonase. | |
| 700356244H1 | g2160155 | 27 | −2 | gb105pln | Sequence of BAC F21M12 from Arabidopsis thaliana chromosome 1, complete | |
| | | | | | sequence. | |
| 700353135H1 | g2282034 | 20 | −2 | gb105allp | p41-Arc | |
| 700282410H2 | g313137 | 24 | −6 | gb105pln | Z. mays ZmPRO1 mRNA for profilin 1. | |
| 700382250H1 | g1263911 | 15 | −0 | gb105eukp | vacuolar H(+)-ATPase | |
| 700383140H1 | g2244991 | 28 | −21 | gb105pln | Arabidopsis thaliana DNA chromosome 4, ESSA I contig fragment No. 6. | |
| 700356487H1 | g1854375 | 87 | −55 | gb105pln | Saccharum officinarum mRNA for Sucrose-Phosphate Synthase, partial cds. | |
| 700352694H1 | g287829 | 74 | −66 | gb105pln | Z. mays gene for polygalacturonase. | |
| 700282577H2 | g790956 | 44 | −27 | gb105eukp | Dana\Oat; ornithine aminotransferase; EC 2.6.1.13 | |
| 700355953H1 | g975887 | 41 | −31 | gb105pln | Mesembryanthemum crystallinum myo-inositol-1-phosphate synthase mRNA, | |
| | | | | | complete cds. | |
| 700356156H1 | g854625 | 16 | −41 | gb105pln | T. aestivum mRNA for peptidylprolyl cis-trans isomerase, FK506. | |
| 700354304H1 | g763328 | 22 | −13 | gb105eukp | unknown | |
| 700382749H1 | g414703 | 27 | 3 | gb105eukp | allergen Hol-lI | |
| 700354808H1 | g1679658 | 9 | 6 | gb105eukp | gamma glutamyl hydrolase | |
| 700356213H1 | g313139 | 43 | −8 | gb105pln | Z. mays ZmPRO2 mRNA for profilin 2. | |
| 700356752H1 | g2341042 | 34 | 2 | gb105eukp | F19P19.26; F19P19.26 | |
| 700355953H1 | g1513227 | 40 | −30 | gb105pln | Brassica napus myo-inositol 1-phosphate synthase mRNA, complete cds. | |
| 700382620H1 | g166966 | 20 | −0 | gb105pln | Hordeum vulgare acyl carrier protein I (Acl1) gene, complete cds. | |
| 700353225H1 | g577611 | 85 | −77 | gb105pln | Zea mays CRT1 gene for calcium-binding protein. | |
| 700356492H1 | g1519248 | 50 | −24 | gb105pln | Oryza sativa GF14-b protein mRNa, complete cds. | |
| 700383004H1 | g2622710 | 9 | 3 | gb105allp | histidinol-phosphate aminotransferase | |
| 700352631H1 | g436959 | 42 | −1 | gb105eukp | 20 kDa cyclophilin precursor | |
| 700354823H1 | g1620985 | 9 | 15 | gb105pln | N. plumbaginifolia mRNA for 40S ribosomal protein S17. | |
| 700355179H1 | g747848 | 42 | −24 | gb105pln | H. vulgare (Gerbel) mRNA for adenosine triphosphatase. | |
| 700355765H1 | g22144 | 76 | 3 | gb105pln | Maize anaerobically regulated gene for fructose bisphosphate aldolase (EC 4.1.2.13). | |
| 700355817H1 | g2464946 | 43 | −20 | gb105eukp | purple acid phosphatase | |
| 700356794H1 | g1216483 | 36 | −3 | gb105pln | Arabidopsis thaliana dual specificity kinase 1 (ADK1) mRNA, complete cds. | |
| 700383159H1 | g287830 | 8 | 6 | gb105eukp | polygalacturonase | |
| 700354551H1 | g313137 | 54 | −32 | gb105pln | Z. mays ZmPRO1 mRNA for profilin 1. | |
| 700356448H1 | g1572719 | 42 | −4 | gb105eukp | PAST-1 | |
| 700356775H1 | g20807 | 44 | −7 | gb105pln | P. sativum mRNA for MAP kinase homlogue. | |
| 700382669H1 | g2460250 | 30 | −49 | gb105pln | Hordeum vulgare ferrochelatase (hemH) gene, complete cds. | |
| 700355489H1 | g438004 | 45 | −34 | gb105pln | F. pringlei mRNA for T subunit of glycine decarboxylase multi-enzyme complex. | |
| 700357431H1 | g19101 | 38 | −26 | gb105pln | H. vulgare mRNA for ribosomal protein L17-1. | |
| 700357479H1 | g2809480 | 46 | −11 | gb105pln | Oryza sativa calmodulin (CaM2) mRNA, complete cds. | |
| 700282482H2 | g1574722 | 8 | 6 | gb105allp | DNA gyrase, subunit A (gyrA) | |
| 700352644H1 | g1498391 | 66 | −60 | gb105pln | Zea mays actin (Maz 65) gene, partial cds. | |
| 700353153H1 | g780371 | 43 | −35 | gb105pln | Oryza sativa enolase mRNA, complete cds. | |
| 700382528H1 | g886402 | 22 | −5 | gb105pln | Oryza sativa MADS-box protrein (MADS4) mRNA, complete cds. | |
| 700353002H1 | g2559006 | 14 | 3 | gb105eukp | BA1; beta-amylase; EC 3.2.1.2 | |
| 700282513H2 | g1402638 | 8 | −3 | gb105allp | PrfB | |
| 700355961H1 | g409569 | 35 | −16 | gb105pln | Eleusine coracana 5S ribosomal RNA gene, complete sequence. | |
| 700382373H1 | g1531764 | 11 | 12 | gb105pln | D. stramonium mRNA for S-adenosylmethionine decarboxylase. | |
| 700354921H1 | g1122443 | 11 | 8 | gb105allp | receptor kinase-like protein | |
| 700357160H1 | g16446 | 9 | 7 | gb105pln | A. thaliana gene for photosystem II 10 kDa polypeptide. | |
| 700354276H1 | g1685051 | 4 | 7 | gb105allp | CD97 | |
| 700355306H1 | g1173556 | 31 | −35 | gb105pln | Oryza sativa Ory s 1 mRNA, complete cds. | |
| 700355765H1 | g168419 | 76 | 3 | gb105pln | Maize (Z. mays) aldolase mRNA, complete cds. | |
| 700354333H1 | g2829135 | 38 | −24 | gb105eukp | PXN-2; peroxidoxin-2 | |
| 700383057H1 | g171389 | 15 | 9 | gb105pln | Yeast (Saccaromyces cerevisiae) dihydrolipoamide dehydrogenase mRNA, complete cds. | |
| 700352962H1 | g414908 | 33 | −5 | gb105eukp | pollen allergen Phl pI | |
| 700357161H1 | g1906829 | 13 | −5 | gb105pln | A. thaliana hsp88.1 gene. | |
| 700352941H1 | g1928959 | 38 | −7 | gb105pln | Actinidia deliciosa pyrroline-5-carboxylate synthetase mRNA, complete cds. | |
| 700356029H1 | g2088826 | 13 | 5 | gb105eukp | R08F11.1 | |
| 700353608H1 | g1381138 | 24 | −10 | gb105eukp | cul-3; CUL-3 | |
| 700353616H1 | g313135 | 98 | −96 | gb105pln | Z. mays mRNA for porin. | |
| 700356609H1 | g2529657 | 24 | 12 | gb105pln | Arabidopsis thaliana chromosome II BAC T30B22 genomic sequence, complete | |
| | | | | | sequence. | |
| 700382427H1 | g34313 | 30 | 7 | gb105allp | lactate dehydrogenase-A | |
| 700356667H1 | g2687430 | 38 | −17 | gb105pln | Acorus gramineus large subunit 26S ribosomal RNA gene, partial sequence. | |
| 700383123H1 | g2154727 | 43 | −54 | gb105pln | C. dactylon mRNA for profilin 2. | |
| 700382474H1 | g288611 | 12 | 16 | gb105pln | Z. mays PG gene for polygalacturonase. | |
| 700354387H1 | g170556 | 14 | −4 | gb105eukp | thioesterase | |
| 700353027H1 | g998429 | 67 | −30 | gb105pln | GRF1 = general regulatory factor [Zea mays, XL80, Genomic, 5348 nt]. | |
| 700356964H1 | g1263170 | 42 | 4 | gb105eukp | GTP-binding protein | |
| 700353202H1 | g596077 | 79 | −78 | gb105pln | Zea mays thiamine biosynthetic enzyme (thil-1) mRNA, complete cds. | |
| 700352909H1 | g169843 | 90 | −52 | gb105pln | Saccarum hybrid phosphoenolpyruvate carboxylase (SCPEPCD1) gene, complete cds. | |
| 700383007H1 | g1495272 | 15 | 7 | gb105pln | A. thaliana mRNA for sugar transporter. | |
| 700382920H1 | g22427 | 26 | −58 | gb105pln | Z. mays gene for polygalacturonase (clone 65). | |
| 700382460H1 | g1872521 | 20 | −5 | gb105eukp | LSD1; negative regulator of cell death; zinc-finger protein Lsd1 | |
| 700382034H1 | g642130 | 23 | −11 | gb105eukp | AME1; protein kinase | |
| 700356867H1 | g2511530 | 65 | −54 | gb105pln | Eleusine indica alpha tubulin 1 (TUA1) mRNA, complete cds. | |
| 700382272H1 | g22487 | 38 | −70 | gb105pln | Maize gene for sucrose synthase. | |
| 700355939H1 | g2623304 | 9 | 8 | gb105eukp | T20B5.10; similar to Medicago nodulin N21 | |
| 700382009H1 | g2160155 | 24 | −10 | gb105pln | Sequence of BAC F21M12 from Arabidopsis thaliana chromosome 1, complete | |
| | | | | | sequence. | |
| 700382486H1 | g2341060 | 73 | −78 | gb105pln | Zea mays translational initiation factor eIF-4A (tif-4A3) mRNA, complete cds. | |
| 700354655H1 | g2264305 | 18 | 6 | gb105pln | Arabidopsis thaliana genomic DNA, chromosome 5, P1 clone: MBK23, complete | |
| | | | | | sequence. | |
| 700382491H1 | g313139 | 28 | −57 | gb105pln | Z. mays ZmPRO2 mRNA for profilin 2. | |
| 700355217H1 | g288611 | 40 | −13 | gb105pln | Z. mays PG gene for polygalacturonase. | |
| 700382266H1 | g1255684 | 37 | −41 | gb105pln | Rice mRNA for aspartic protease, complete cds. | |
| 700353715H1 | g1052566 | 17 | −2 | gb105pln | C. annuum mRNA for PFTF (pastid fusion and/or translation factor. | |
| 700356794H1 | g1103321 | 29 | 2 | gb105pln | A. thaliana CKI3 mRNA for casein kinase I. | |
| 700382917H1 | g758354 | 37 | 14 | gb105pln | Z. mays mRNA for plasma membrane H+ ATPase. | |
| 700282529H2 | g432606 | 43 | −38 | gb105pln | ric1 = ras-related GTP binding protein possessing GTPase activity [Oryza sativa = rice, | |
| | | | | | Yamohoushi, callus, mRNA, 955 nt]. | |
| 700355634H1 | g1771781 | 17 | 0 | gb105pln | T. aestivum mRNA for beta-amylase. | |
| 700356809H1 | g168419 | 52 | −19 | gb105pln | Maize (Z. mays) aldolase mRNA, complete cds. | |
| 700353251H1 | g1167835 | 24 | −6 | gb105pln | H. lanatus mRNA for Hol lI protein. | |
| 700353621H1 | g2632128 | 91 | −86 | gb105pln | Zea mays mRNA for poly(ADP-ribose) polymerase (3211bp). | |
| 700355950H1 | g2583128 | 18 | 4 | gb105allp | hypothetical protein | |
| 700382843H1 | g1209258 | 14 | −0 | gb105eukp | protease inhibitor II | |
| 700382579H1 | g498747 | 9 | 2 | gb105eukp | Pir7b | |
| 700355735H1 | g2431768 | 27 | −28 | gb105pln | Zea mays acidic ribosomal protein P1a (rpp1a) mRNA, complete cds. | |
| 700352952H1 | g287829 | 100 | −87 | gb105pln | Z. mays gene for polygalacturonase. | |
| 700353586H1 | g2827544 | 29 | 5 | gb105eukp | T12H17.60; HSP associated protein like | |
| 700353657H1 | g288373 | 38 | −50 | gb105pln | Z. mays PGg6 gene for polygalacturonase. | |
| 700382044H1 | g22421 | 92 | −84 | gb105pln | Z. mays mRNA for polygalacturonase (clone PG3). | |
| 700383072H1 | g2245032 | 12 | −5 | gb105eukp | gibberellin oxidase homolog | |
| 700355179H1 | g2267582 | 26 | −11 | gb105pln | Gossypium hirsutum vacuolar H+-ATPase subunit E mRNA, complete cds. | |
| 700382768H1 | g414907 | 33 | −4 | gb105pln | P. pratense mRNA for pollen allergen PhlpI. | |
| 700354412H1 | g288378 | 56 | −17 | gb105pln | Z. mays gene PG for polygalacturonase. | |
| 700356163H1 | g1015926 | 7 | 2 | gb105eukp | SPAC22F3.01; unknown | |
| 700353849H1 | g169539 | 28 | −12 | gb105pln | Potato pyrophosphate-fructose 6-phosphate 1-phosphotransferase (PFP) beta-subunit | |
| | | | | | mRNA, complete cds. | |
| 700356076H1 | g168557 | 22 | 14 | gb105pln | Zea mays putative GTP-binding protein homolog mRNA, partial cds. | |
| 700355659H1 | g22416 | 21 | −12 | gb105pln | Z. mays mRNA for polygalacturonase (clone PG1). | |
| 700382256H1 | g1100222 | 50 | −29 | gb105pln | Pinus sylvestris chloroplast NAD+-dependent glyceraldehyde-3-phosphate dehydrogenase | |
| | | | | | mRNA, complete cds. | |
| 700354786H1 | g473360 | 19 | 2 | gb105allp | Phl pI allergen | |
| 700282418H2 | g168652 | 49 | −86 | gb105pln | Maize amyloplast-specific transit protein (waxy; wc+ locus), complete cds. | |
| 700352655H1 | g902583 | 63 | −69 | gb105pln | Zea mays clone MubG1 ubiquitin gene, complete cds. | |
| 700382946H1 | g499011 | 43 | −34 | gb105pln | S. vulgare SoAc1 mRNA. | |
| 700354224H1 | g22420 | 63 | 5 | gb105pln | Z. mays mRNA for polygalacturonase (clone PG2). | |
| 700355896H1 | g414702 | 29 | −11 | gb105pln | H. lanatus mRNA for allergen Hol-lI. | |
| 700356287H1 | g22458 | 63 | −82 | gb105pln | Z. mays pollen specific mRNA C-terminal (clone 4H7). | |
| 700352637H1 | g313761 | 71 | −73 | gb105pln | Z. mays hsp 70-3 gene for heat shock protein 70. | |
| 700353068H1 | g902583 | 64 | −48 | gb105pln | Zea mays clone MubG1 ubiquitin gene, complete cds. | |
| 700382320H1 | g170050 | 44 | −37 | gb105pln | Soybean pyruvate kinase mRNA, complete cds. | |
| 700352603H1 | g248336 | 77 | −69 | gb105pln | polyubiquitin [maize, Genomic, 3841 nt]. | |
| 700282422H2 | g19495 | 18 | 10 | gb105pln | L. perenne RNA for Lol pI gene. | |
| 700355193H1 | g2113828 | 32 | −22 | gb105pln | Yeast (Candida albicans) TOP2 gene. | |
| 700282461H2 | g21953 | 16 | 3 | gb105allp | beta-glucosidase | |
| 700355732H1 | g2224899 | 28 | −5 | gb105eukp | PcMYB1; DNA-binding protein PcMYB1 | |
| 700382477H1 | g433664 | 13 | 14 | gb105pln | A. thaliana for Sec61 beta-subunit homolog. | |
| 700354316H1 | g2462759 | 4 | 6 | gb105allp | Putative Cytochrome B5 | |
| 700355734H1 | g248338 | 77 | −34 | gb105pln | polyuibiquitin [maize, Genomic, 3439 nt]. | |
| 700356907H1 | g303856 | 71 | −23 | gb105pln | Rice mRNA for ubiquitin protein fused to a ribosomal protein, complete cds. | |
| 700382348H1 | g1800218 | 89 | −75 | gb105pln | Sorghum bicolor phytochome C (PHYC) mRNA, complete cds. | |
| 700382317H1 | g431259 | 20 | 3 | gb105pln | Arabidopsis thaliana 16 kDa ubiquitin conjugating enzyme (UBC1) gene, complete cds. | |
| 700353091H1 | g166626 | 31 | −38 | gb105pln | A. thaliana 57 Kd nucleotide-binding subunit of the vacuolar ATPase mRNA, | |
| | | | | | complete cds. | |
| 700382122H1 | g558651 | 44 | −31 | gb105pln | T. asestivum VDAC3 mRNA for voltage dependent anion channel. | |
| 700353164H1 | g168406 | 25 | 2 | gb105pln | Z. mays alcohol dehydrogenase (ADH-1 C-m allele) gene, complete cds. | |
| 700382807H1 | g21629 | 48 | −52 | gb105pln | Sorghum vulgare mRNA for phosphoenolpyruvate carboxylase (PEPC). | |
| 700383125H1 | g1673433 | 24 | −5 | gb105allp | translocon-associated protein delta subunit precursor | |
| 700354249H1 | g1724101 | 76 | −9 | gb105pln | Mesembryanthemum crystallinum S-adenosyl-L-homocystein hydrolase mRNA, | |
| | | | | | complete cds. | |
| 700382687H1 | g1276967 | 17 | −3 | gb105eukp | putative ribosomal protein | |
| 700382649H1 | g1654385 | 7 | 7 | gb105allp | vacuolar-type H(+) ATPase 115 kDa subunit | |
| 700355313H1 | g602605 | 37 | −75 | gb105pln | Zea mays tandem genes for alpha1-tubulin and alpha2-tubulin. | |
| 700382329H1 | g288366 | 96 | −83 | gb105pln | Z. mays PGg14 gene for polygalacturonase. | |
| 700382033H1 | g2104538 | 22 | 4 | gb105eukp | T10M13.16; T10M13.16 | |
| 700355971H1 | g218112 | 17 | −33 | gb105pln | Rice mRNA for ribosomal protein L41 (340 gene), partial sequence. | |
| 700354909H1 | g288378 | 71 | −63 | gb105pln | Z. mays gene PG for polygalacturonase. | |
| 700355509H1 | g644492 | 51 | −78 | gb105pln | Corn elongation factor 1alpha gene, complete cds. | |
| 700382134H1 | g1388076 | 25 | −8 | gb105eukp | TRX3; thioredoxin h | |
| 700355281H1 | g168460 | 62 | −0 | gb105pln | Zea mays cyclophilin (Cyp) mRNA, complete cds. | |
| 700352636H1 | g2209343 | 8 | 4 | gb105allp | copper transport protein Atox1 | |
| 700382435H1 | g288378 | 81 | −5 | gb105pln | Z. mays gene PG for polygalacturonase. | |
| 700355947H1 | g1173557 | 4 | 8 | gb105allp | Ory s 1 | |
| 700354690H1 | g22456 | 63 | −49 | gb105pln | Z. mays pollen specific mRNA C-terminal (clone 3C12). | |
| 700357430H1 | g551068 | 32 | 2 | gb105eukp | ESI3; unknown; salt-stress induced hydrophobic peptide | |
| 700357164H1 | g1209258 | 19 | −2 | gb105eukp | protease inhibitor II | |
| 700357483H1 | g22425 | 95 | −29 | gb105pln | Z. mays gene for polygalacturonase (clone 47). | |
| 700382935H1 | g1420003 | 10 | 7 | gb105eukp | HRP1 | |
| 700383136H1 | g2306767 | 27 | −5 | gb105pln | Triticum aestivum eIF-2 beta subunit mRNA, complete cds. | |
| 700357450H1 | g1184773 | 35 | −63 | gb105pln | Zea mays glyceraldehyde-3-phosphate dehydrogenase GAPC3 (gpc3) mRNA, | |
| | | | | | complete cds. | |
| 700382822H1 | g288373 | 37 | −32 | gb105pln | Z. mays PGg6 gene for polygalacturonase. | |
| 700353442H1 | g1375088 | 23 | −23 | gb105eukp | DYS 1; NAD-dependent aminobutyl-transferring from spermidine to eIF5A; | |
| | | | | | deoxyhypusine synthase | |
| 700382825H1 | g466572 | 39 | −28 | gb105pln | Tobacco mRNA for RNA helicase like protein DB10. | |
| 700353221H1 | g1173556 | 16 | −4 | gb105pln | Oryza sativa Ory s 1 mRNA, complete cds. | |
| 700382845H1 | g495728 | 21 | −13 | gb105pln | Arabidopsis thaliana small Ras-like GTP-binding protein (Ran-1) mRNA, complete cds. | |
| 700354383H1 | g2582639 | 16 | −6 | gb105eukp | hnRNP-like protein | |
| 700355663H1 | g217973 | 20 | −5 | gb105pln | Zea mays gene for triosephosphate isomerase, complete cds. | |
| 700355030H1 | g483546 | 14 | 5 | gb105pln | R. communis gene for pyrophosphate-dependent phosphofructokinase alpha subunit. | |
| 700353945H1 | g508974 | 33 | −13 | gb105pln | Triticum aestivum Chinese spring protein disulfide isomerase (PDI) mRNA, | |
| | | | | | complete cds. | |
| 700354926H1 | g575730 | 21 | −10 | gb105pln | Z. mays mRNA for transmembrane protein. | |
| 700356667H1 | g169818 | 51 | −31 | gb105pln | Rice 25S ribosomal RNA gene. | |
| 700353950H1 | g287829 | 42 | −44 | gb105pln | Z. mays gene for polygalacturonase. | |
| 700355014H1 | g974781 | 42 | −29 | gb105pln | C. blumei kinetoplast met gene for cobalamine-independent methionine synthase. | |
| 700382560H1 | g1184773 | 41 | −27 | gb105pln | Zea mays glyceraldehyde-3-phosphate dehydrogenase GAPC3 (gpc3) mRNA, | |
| | | | | | complete cds. | |
| 700356133H1 | g2827618 | 16 | 6 | gb105pln | Arabidopsis thaliana DNA chromosome 4, BAC clone F10N7 (ESSAII project). | |
| 700382142H1 | g556685 | 52 | −34 | gb105pln | Z. mays mRNA for ADP-ribosylation factor. | |
| 700382283H1 | g403230 | 11 | 7 | gb105allp | ara-5; GTP-binding protein | |
| 700354955H1 | g971853 | 19 | 6 | gb105allp | expressed sequence tag; human homolog | |
| 700352908H1 | g971283 | 21 | 5 | gb105pln | Rice mRNA for ribosomal protein S31, complete cds. | |
| 700356609H1 | g606969 | 37 | −1 | gb105pln | Arabidopsis thaliana cytoplasmic ribosomal protein L18 mRNA, complete cds. | |
| 700357406H1 | g2276367 | 59 | 5 | gb105allp | 60s ribosomal protein | |
| 700382345H1 | g488712 | 37 | −4 | gb105eukp | cr7; ubiquinol-cytochrome c reductase; EC 1.10.2.2 | |
| 700353106H1 | g398607 | 16 | 12 | gb105pln | A. thaliana mRNA for elongation factor 1 beta. | |
| 700354675H1 | g219128 | 26 | −12 | gb105eukp | A_IG002N01.3 | |
| 700356125H1 | g170783 | 31 | −36 | gb105pln | T. aestivum ubiquitin carrier protein mRNA. | |
| 700282414H2 | g939932 | 13 | 7 | gb105allp | allergen Lol pI I | |
| 700356867H1 | g602605 | 43 | −73 | gb105pln | Zea mays tandem genes for alpha1-tubulin and alpha2-tubulin. | |
| 700382242H1 | g1370193 | 15 | 11 | gb105pln | L. japonicus mRNA for small GTP-binding protein, RAB8C. | |
| 700354441H1 | g185949 | 31 | −19 | gb105allp | Ig nonfunctional kappa-chain (C-region) | |
| 700355159H1 | g22425 | 50 | −58 | gb105pln | Z. mays gene for polygalacturonase (clone 47). | |
| 700353253H1 | g1216483 | 21 | −2 | gb105pln | Arabidopsis thaliana dual specificity kinase 1 (ADK1) mRNA, complete cds. | |
| 700383190H1 | g886400 | 51 | −38 | gb105pln | Oryza sativa MADS-box protein (MADS2) mRNA, complete cds. | |
| 700382614H1 | g1929057 | 21 | 1 | gb105eukp | longest ORF (1) | |
| 700282520H2 | g2656030 | 34 | −11 | gb105pln | Arabidopsis thaliana genomic DNA, chromosome 5, P1 clone: MUL8. | |
| 700354553H1 | g1839244 | 56 | −8 | gb105eukp | EGF receptor like protein | |
| 700355519H1 | g20321 | 27 | −29 | gb105pln | Oryza sativa RAc1 mRNA for actin. | |
| 700357441H1 | g414702 | 22 | −3 | gb105pln | H. lanatus mRNA for allergen Hol-lI. | |
| 700354992H1 | g473359 | 20 | −15 | gb105pln | P. pratense mRNA for Phl pI allergen. | |
| 700355337H1 | g777757 | 52 | −44 | gb105pln | Saccharum hybrid (clone SCUBI561) polyubiquitin mRNA, complete cds. | |
| 700382764H1 | g460988 | 59 | −56 | gb105pln | O. sativa (Arborio) Beta Tubulin mRNA, clone OSTB-34. | |
| 700383083H1 | g218177 | 26 | −6 | gb105pln | Rice mRNA for ribosomnal protein L356 (NH77 gene), partial sequence. | |
| 700353047H1 | g167109 | 60 | −18 | gb105pln | Hordeum vulgare vacuolar ATPase B subunit mRNA, complete cds. | |
| 700355862H1 | g2154729 | 46 | −35 | gb105pln | C. dactylon mRNA for profilin 1. | |
| 700383160H1 | g168460 | 60 | −63 | gb105pln | Zea mays cyclophilin (CyP) mRNA, complete cds. | |
| 700382633H1 | g5056 | 19 | 5 | gb105pln | Yeast (Saccharomyces pombe) rpgL29 gene for ribosomal protein L29. | |
| 700356112H1 | g2529339 | 30 | −11 | gb105pln | Zea maize AGAMOUS homologue mRNA, complete cds. | |
| 700353960H1 | g1053056 | 37 | −38 | gb105pln | Triticum aestivum histone H3 gene, partial cds, clone W1. | |
| 700353239H1 | g1932927 | 12 | −5 | gb105eukp | putative pectin methylesterase | |
| 700352776H1 | g248336 | 64 | −58 | gb105pln | polyubiquitin [maize, Genomic, 3841 nt]. | |
| 700355951H1 | g473359 | 19 | −1 | gb105pln | P. pratense mRNA for Phl pI allergen. | |
| 700353140H1 | g2804257 | 16 | 10 | gb105pln | Arabidopsis thaliana DNA for phosphoglycerate dehydrogenase, complete cds. | |
| 700356233H1 | g312180 | 61 | −56 | gb105pln | Z. mays GapC4 gene. | |
| 700356893H1 | g886470 | 25 | −1 | gb105pln | C. roseus MetE mRNA for methionine synthase. | |
| 700353635H1 | g1066162 | 48 | −14 | gb105pln | B. napus mRNA for glyoxysomal beta-ketoacyl-thiolase precursor. | |
| 700383116H1 | g2494106 | 15 | 7 | gb105pln | Arabidopsis thaliana chromosome 1 YAC yUP8H12R, complete sequence. | |
| 700355876H1 | g1655423 | 35 | −25 | gb105pln | Arabidopsis thaliana mRNA for GDP dissociation inhibitor, complete cds. | |
| 700382501H1 | g602605 | 56 | −55 | gb105pln | Zea mays tandem genes for alpha1-tubulin and alpha2-tubulin. | |
| 700356208H1 | g2415701 | 51 | −12 | gb105pln | P. pratense mRNA for profilin 4. | |
| 700353546H1 | g2326873 | 40 | −29 | gb105pln | S. tuberosum mRNA for plastidic ATP/ADP-transporter. | |
| 700382961H1 | g473976 | 17 | −38 | gb105pln | Rice mRNA, partial homologous to elongation factor 1-alpha gene. | |
| 700382972H1 | g2415699 | 20 | −14 | gb105pln | P. pratense mRNA for profilin 3. | |
| 700354528H1 | g2149639 | 42 | −6 | gb105pln | Arabidopsis thaliana Argonaute protein (AGO1) mRNA, complete cds. | |
| 700382231H1 | g1304412 | 25 | −9 | gb105pln | Arabidopsis thaliana Rac-like protein (ARAC3) gene, complete cds. | |
| 700383076H1 | g168315 | 17 | 5 | gb105pln | L. perenne pollen allergen (Lol pI ) gene, complete cds. | |
| 700355217H1 | g288378 | 22 | 0 | gb105pln | Z. mays gene PG for polygalacturonase. | |
| 700382924H1 | g1418317 | 12 | 2 | gb105eukp | CER1-like | |
| 700354392H1 | g22425 | 80 | −72 | gb105pln | Z. mays gene for polygalacturonase (clone 47). | |
| 700353033H1 | g2459428 | 25 | 3 | gb105eukp | F4P9.23 | |
| 700355689H1 | g22458 | 17 | −43 | gb105pln | Z. mays pollen specific mRNA C-terminal (clone 4H7). | |
| 700355912H1 | g2766449 | 56 | −53 | gb105pln | Sorghum bicolor cytochrome P450 CYP99A1 (CYP99A1) mRNA, partial cds. | |
| 700357409H1 | g498772 | 44 | −34 | gb105pln | Z. mays (cv DH5xDH7) hsp70-4 mRNA for heat shock protein 70. | |
| 700354727H1 | g1762938 | 22 | −6 | gb105pln | Nicotiana tabacum ORF mRNA, complete cds. | |
| 700352772H1 | g968995 | 62 | −44 | gb105pln | Oryza sativa clone glyceraldehyde-3-phosphate dehydrogenase (Gpc) mRNA, | |
| | | | | | complete cds. | |
| 700282516H2 | g1049306 | 13 | −2 | gb105pln | Arabidopsis thaliana actin-2 mRNA, complete cds. | |
| 700355809H1 | g298069 | 12 | 8 | gb105pln | A. thaliana Em protein gene (ATEM1). | |
| 700382436H1 | g488835 | 6 | 5 | gb105allp | ribosomal protein L28 | |
| 700357184H1 | g1041197 | 6 | 8 | gb105eukp | sconB; sulfur metabolite repression control | |
| 700354581H1 | g1568635 | 41 | −2 | gb105eukp | host cell receptor involved in nuclear import of Agrobacterium VirD2 protein; AtKAP | |
| | | | | | alpha | |
| 700354609H1 | g1167835 | 37 | −35 | gb105pln | H. lanatus mRNA for Hol lI protein. | |
| 700353524H1 | g1695716 | 21 | 17 | gb105pln | Arabidopsis thaliana DNA for luminal binding protein, complete cds. | |
| 700356254H1 | g2465560 | 8 | 6 | gb105allp | phosphoribosylaminoimidazole-carboxamide formyltransferase; formyltransferase/IMP | |
| | | | | | cyclohydrolase | |
| 700355961H1 | g20070 | 29 | −18 | gb105pln | O. minuta 5S DNA. | |
| 700352724H1 | g632679 | 10 | 2 | gb105eukp | CDC73; Cdc73p | |
| 700355411H1 | g393449 | 26 | −31 | gb105pln | S. cereale mRNA for beta-amylase. | |
| 700282489H2 | g416256 | 24 | 2 | gb105pln | Rice mRNA for H+-ATPase, partial sequence. | |
| 700355424H1 | g432488 | 39 | −42 | gb105pln | Wheat initiation factor 1A (eIF-1A) mRNA. | |
| 700354434H1 | g644491 | 35 | −34 | gb105pln | Corn mRNA for elongation factor 1A. | |
| 700356479H1 | g886400 | 42 | −14 | gb105pln | Oryza sativa MADS-box protein (MADS2) mRNA, complete cds. | |
| 700356864H1 | g397958 | 81 | −77 | gb105pln | Z. mays mRNA for beta-amylase. | |
| 700357147H1 | g550546 | 36 | −41 | gb105pln | A. thaliana RPL16B gene. | |
| 700382501H1 | g2511530 | 43 | −39 | gb105pln | Eleusine indica alpha tubulin 1 (TUA1) mRNA, complete cds. | |
| 700354394H1 | g2641618 | 57 | −40 | gb105pln | Zea mays ubiquitin-conjugating enzyme protein E2 (ubc7) mRNA, complete cds. | |
| 700353060H1 | g1272684 | 81 | −73 | gb105pln | Z. mays mRNA for acetyl CoA carboxylase (partial). | |
| 700356233H1 | g1184775 | 98 | −62 | gb105pln | Zea mays glyceraldehyde-3-phosphate dehydrogenase GAPC4 (gpc4) mRNA, | |
| | | | | | complete cds. | |
| 700357171H1 | g433043 | 10 | 8 | gb105pln | Zea mays W-22 clone PREM-1E retroelement PREM-1, partial sequence. | |
| 700382901H1 | g299814 | 24 | 1 | gb105pln | tuber-induction gene {3′ region} [Solanum tuberosum = potatoes, cv. Desiree, leaves, | |
| | | | | | mRNA Partial, 950 nt]. | |
| 700357406H1 | g531169 | 67 | 3 | gb105allp | Csa-19 | |
| 700353576H1 | g595816 | 22 | −3 | gb105eukp | mudrA | |
| 700357491H1 | g1051108 | 39 | −6 | gb105pln | A. thaliana mRNA for adenine nucleotide translocase. | |
| 700354511H1 | g1881694 | 73 | −27 | gb105pln | Zea mays phosphoglucomutase mRNA, partial cds. | |
| 700352906H1 | g1438882 | 28 | −13 | gb105pln | Glycine max choline kinase GmCK3p mRNA, partial cds. | |
| 700382102H1 | g348695 | 30 | −34 | gb105pln | Catharanthus roseus heat shock protein 90 mRNa, complete cds. | |
| 700355426H1 | g18936 | 9 | −4 | gb105eukp | BKIN9; protein kinase | |
| 700354852H1 | g474001 | 17 | 10 | gb105pln | Rice mRNA, partial homologous to ribosomal protein L38 gene. | |
| 700383116H1 | g849195 | 8 | 2 | gb105eukp | YDR374C; Ydr374cp | |
| 700353658H1 | g473258 | 51 | −45 | gb105pln | Arabidopsis thaliana Ser/Thr protein phosphatase mRNA, complete cds. | |
| 700356658H1 | g1236977 | 48 | −11 | gb105pln | Arabidopsis thaliana CTP:phosphocholine cytidylyltransferase gene, complete cds. | |
| 700356285H1 | g1322722 | 21 | −7 | gb105eukp | MRF1 | |
| 700353952H1 | g2460180 | 14 | 5 | gb105allp | RNA binding protein | |
| 700383111H1 | g2662077 | 8 | 7 | gb105allp | KIAA0398 | |
| 700356422H1 | g2809482 | 24 | −2 | gb105pln | Oryza sativa calmodulin (CaM1) mRNA, partial cds. | |
| 700382474H1 | g433040 | 16 | 13 | gb105pln | Zea mays W-22 clone PREM-1A retroelement PREM-1, partial sequence. | |
| 700383173H1 | g1136784 | 24 | −21 | gb105pln | Fission Yeast mRNA for elongation factor 1 alpha-B, complete cds. | |
| 700354919H1 | g312178 | 47 | 6 | gb105pln | Z. mays GapC2 gene. | |
| 700354542H1 | g2463334 | 30 | −40 | gb105pln | Oryza sativa mRNA for ribosomal protein S4. | |
| 700352701H1 | g860963 | 52 | −26 | gb105allp | DNA ligase III | |
| 700356463H1 | g1217651 | 68 | 1 | gb105allp | carbonyl reductase (NADPH) | |
| 700355555H1 | g2282583 | 48 | −64 | gb105pln | Zea mays elongation factor 1-alpha (EF1-A) mRNA, complete cds. | |
| 700353045H1 | g929917 | 23 | −20 | gb105pln | Z. mays ABP1 mRNA for actin-depolymerizing factor. | |
| 700354724H1 | g2651294 | 13 | 1 | gb105pln | Arabidopsis thaliana chromosome II BAC T2P4 genomic sequence, complete sequence. | |
| 700352988H1 | g22416 | 98 | −55 | gb105pln | Z. mays mRNA for polygalacturonase (clone PG1). | |
| 700354373H1 | g456717 | 31 | −24 | gb105pln | A. gossypii TEF gene for translation elongation factor 1 alpha (EF-1 alpha). | |
| 700352978H1 | g22342 | 72 | −9 | gb105pln | Maize gene for heat shock protein 70 exon 2 and 3′-UT (hsp70; clone pMON 9502). | |
| 700356210H1 | g2407616 | 26 | −9 | gb105pln | Lycopersicon esculentum glutathione synthetase (GSH2) mRNA, complete cds. | |
| 700354517H1 | g459748 | 26 | 6 | gb105allp | Sec61-complex gamma-subunit | |
| 700382489H1 | g37836 | 51 | −41 | gb105allp | Immunoglobulin heavy chain | |
| 700354581H1 | g2154717 | 34 | 1 | gb105eukp | Kap alpha protein | |
| 700355179H1 | g1143508 | 29 | −25 | gb105pln | M. crystallinum mRNA for vauolar proton ATPase subunit E. | |
| 700382061H1 | g20310 | 12 | 7 | gb105eukp | pollen specific gene | |
| 700382265H1 | g167559 | 48 | −27 | gb105pln | Carrot 70 kd subunit vacular H+-ATPase, complete cds. | |
| 700382767H1 | g2388789 | 30 | −5 | gb105eukp | cytochrome oxidase I | |
| 700354307H1 | g397841 | 55 | −19 | gb105pln | Rice mRNA for ferredoxin-NADP+ reductase, complete cds. | |
| 700353857H1 | g2262153 | 19 | −1 | gb105eukp | T10P11.19; putative chloroplast outer envelope 86-like protein | |
| 700282576H2 | g790956 | 44 | −26 | gb105eukp | Dana\Oat; ornithine aminotransferase; EC 2.6.1.13 | |
| 700355203H1 | g1706958 | 37 | 1 | gb105eukp | celA2; cellulose synthase | |
| 700355305H1 | g599874 | 7 | 8 | gb105allp | NADH-ubiquinone oxidoreductase complex B22 subunit | |
| 700382266H1 | g18903 | 34 | −34 | gb105pln | Barley mRNA for aspartic proteinase. | |
| 700356476H1 | g22418 | 100 | −59 | gb105pln | Z. mays gene for polygalacturonase (clone 17). | |
| 700355054H1 | g479119 | 48 | −24 | gb105pln | F. pringlei fpcpt mRNA for triose phosphate/phosphate translocator. | |
| 700352770H1 | g2270994 | 32 | −13 | gb105eukp | GmPM13; Ca+2-binding EF hand protein | |
| 700282420H2 | g2245108 | 17 | −8 | gb105eukp | EREBP-4 homolog | |
| 700382351H1 | g509769 | 17 | −0 | gb105eukp | seed-specific low molecular weight sulfur-rich protein | |
| 700352962H1 | g473360 | 34 | −5 | gb105eukp | phl pI ; Phl pI allergen | |
| 700352658H1 | g288373 | 98 | −58 | gb105pln | Z. mays PGg6 gene for polygalacturonase. | |
| 700356196H1 | g2275006 | 33 | −18 | gb105pln | Hordeum vulgare mRNA for expressed sequence tag. | |
| 700353642H1 | g304106 | 15 | −4 | gb105pln | Arabidopsis thaliana cytosine-5 methyltransferase mRNA, complete cds. | |
| 700355419H1 | g596079 | 83 | −70 | gb105pln | Zea mays thiamine biosynthetic enzyme (thi1-2) mRNA, complete cds. | |
| 700355887H1 | g169988 | 31 | −41 | gb105pln | Glycine max NADP-specific isocitrate dehydrogenase (idh1) mRNA, 3′ end. | |
| 700382246H1 | g288373 | 65 | −69 | gb105pln | Z. mays PGg6 gene for polygalacturonase. | |
| 700354543H1 | g624675 | 44 | −7 | gb105pln | Citrus maxima citrate synthase (cit) mRNA, nuclear gene encoding mitochondrial | |
| | | | | | protein, complete cds. | |
| 700354490H1 | g1632767 | 12 | −8 | gb105pln | Maize mRNA for calcium dependent protein kinase, complete cds. | |
| 700355456H1 | g1498389 | 35 | −74 | gb105pln | Zea mays actin (Maz81) gene, partial cds. | |
| 700357165H1 | g902583 | 72 | −82 | gb105pln | Zea mays clone MubG1 ubiquitin gene, complete cds. | |
| 700382311H1 | g606065 | 11 | 4 | gb105allp | ORF_f299 | |
| 700354551H1 | g453975 | 37 | 7 | gb105pln | P. pratense mRNA for profilin-Phl p XI. | |
| 700355522H1 | g22421 | 57 | −76 | gb105pln | Z. mays mRNA for polygalacturonase (clone PG3). | |
| 700355242H1 | g1906825 | 10 | 15 | gb105pln | A. thaliana hsp81.2 gene. | |
| 700355322H1 | g2642161 | 8 | 5 | gb105eukp | T5I7.9 | |
| 700355590H1 | g2275006 | 38 | −24 | gb105pln | Hordeum vulgare mRNA for expressed sequence tag. | |
| 700355978H1 | g1718236 | 13 | −1 | gb105eukp | (1,4)-beta-xylan endohydrolase, isoenzyme X-I; EC 3.2.1.8 | |
| 700353234H1 | g2828184 | 16 | 7 | gb105pln | Arabidopsis thaliana genomic DNA, chromosome 5, P1 clone: MSN9, complete | |
| | | | | | sequence. | |
| 700355896H1 | g414907 | 29 | −10 | gb105pln | P. pratense mRNA for pollen allergen PhlpI. | |
| 700382282H1 | g16427 | 16 | −1 | gb105eukp | protease inhibitor II | |
| 700352751H1 | g984704 | 28 | −16 | gb105eukp | SPAC24H6.07; unknown | |
| 700352794H1 | g2160132 | 20 | −1 | gb105pln | Sequence of BAC F19K23 from Arabidopsis thaliana chromosome 1, complete | |
| | | | | | sequence. | |
| 700382129H1 | g2275202 | 9 | 1 | gb105eukp | T08I13.8; acyl-CoA synthetase isolog | |
| 700382715H1 | g786120 | 27 | −1 | gb105allp | ORF1; putative | |
| 700355324H1 | g468554 | 25 | 6 | gb105allp | CCT (chaperonin containing TCP-1) zeta subunit | |
| 700356960H1 | g868225 | 23 | 3 | gb105allp | No definition line found | |
| 700382254H1 | g1132482 | 65 | −57 | gb105pln | Rice mRNA for ADP-ribosylation factor, complete cds. | |
| 700383007H1 | g1495273 | 29 | −10 | gb105eukp | sugar transporter | |
| 700354559H1 | g2245679 | 13 | 2 | gb105eukp | vha44; V-ATPase C subunit | |
| 700352642H1 | g22275 | 83 | −79 | gb105pln | Maize mRNA for ferritin (clone FM1). | |
| 700354821H1 | g565064 | 15 | 15 | gb105pln | Arabidopsis thaliana pyruvate dehydrogenase E1 beta subunit mRNA, complete cds. | |
| 700383137H1 | g1245182 | 19 | 4 | gb105eukp | ST7R; sterol delta-7 reductase | |
| 700356516H1 | g1388080 | 16 | 0 | gb105allp | thioredoxin h | |
| 700382637H1 | g857573 | 25 | −23 | gb105pln | Oryza sativa vacuolar H+-ATPase (vatp-P1) mRNA, complete cds. | |
| 700354623H1 | g603220 | 34 | −33 | gb105pln | Medicago sativa 6-phosphogluconate dehydrogenase mRNA, complete cds. | |
| 700355402H1 | g2252824 | 12 | −3 | gb105eukp | A_IG005I10.1 | |
| 700352906H1 | g1438878 | 23 | −10 | gb105pln | Glycine max choline kinase GmCL1p mRNA, complete cds. | |
| 700355734H1 | g902583 | 91 | −42 | gb105pln | Zea mays clone MubG1 ubiquitin gene, complete cds. | |
| 700382339H1 | g1181330 | 89 | −77 | gb105pln | Z. mays CNX mRNA. | |
| 700354828H1 | g22425 | 50 | −53 | gb105pln | Z. mays gene for polygalacturonase (clone 47). | |
| 700355208H1 | g434345 | 87 | −6 | gb105eukp | S18 ribosomal protein | |
| 700354709H1 | g16509 | 38 | −28 | gb105pln | A. thaliana mRNA for succinate-CoA ligase (GCP-forming). | |
| 700353203H1 | g902789 | 9 | 2 | gb105eukp | ILL1; ILL1 | |
| 700355955H1 | g506832 | 24 | 1 | gb105allp | protein 3 | |
| 700382889H1 | g176779 | 84 | −37 | gb105allp | gamma-2 globin | |
| 700282486H2 | g2749918 | 24 | −12 | gb105pln | Arabidopsis thaliana chromosome I BAC F3I6 genomic sequence, complete sequence. | |
| 700356185H1 | g2702273 | 11 | 2 | gb105eukp | T21L14.15; carrot B2 protein-like | |
| 700356069H1 | g495728 | 59 | 15 | gb105pln | Arabidopsis thaliana small Ras-like GTP-binding protein (Ran-1) mRNA, complete cds. | |
| 700356113H1 | g1246116 | 17 | −3 | gb105eukp | major allergen Pha a 1; major allergen Pha a 1 | |
| 700352827H1 | g2462742 | 24 | −17 | gb105eukp | F8A5.25 | |
| 700356224H1 | g804655 | 20 | −0 | gb105pln | Hordeum vulgare L. beta-glucosidase (BGQ60) gene, complete cds. | |
| 700355463H1 | g22425 | 31 | −61 | gb105pln | Z. mays gene for polygalacturonase (clone 47). | |
| 700356122H1 | g1498628 | 14 | −23 | gb105pln | Arabidopsis thaliana p40 protein homolog mRNA, complete cds. | |
| 700382454H1 | g2827551 | 9 | 5 | gb105eukp | T12H17.130; predicted protein | |
| 700354263H1 | g2460250 | 30 | −48 | gb105pln | Hordeum vulgare ferrochelatase (hemH) gene, complete cds. | |
| 700353945H1 | g625147 | 35 | −32 | gb105pln | Zea mays protein disulfide isomerase (pdi) mRNA, complete cds. | |
| 700356823H1 | g643596 | 38 | −32 | gb105pln | Corn mRNA for cysteine proteinase, clone CCP, complete cds. | |
| 700354410H1 | g1143499 | 31 | −29 | gb105pln | H. vulgare mRNA for ADP-glucose pyrophosphorylase small subunit. | |
| 700352726H1 | g514317 | 32 | −14 | gb105pln | Arabidopsis thaliana RNA polymerase II third largest subunit (RPB35.5A) gene, | |
| | | | | | complete cds. | |
| 700354960H1 | g899115 | 54 | 5 | gb105eukp | polyubiquitin | |
| 700383073H1 | g536114 | 15 | 6 | gb105pln | Yeast (Saccharomyces cerevisiae) chromosome II reading frame ORF YBL072c. | |
| 700354544H1 | g2760084 | 32 | 0 | gb105eukp | G8B7T7; leucine-rich repeat protein | |
| 700353071H1 | g2529657 | 18 | 10 | gb105pln | Arabidopsis thaliana chromosome II BAC T30B22 genomic sequence, complete | |
| | | | | | sequence. | |
| 700357406H1 | g1370289 | 67 | 3 | gb105allp | ribosomal protein L10a | |
| 700382927H1 | g2316015 | 18 | 17 | gb105pln | Arabidopsis thaliana MRP-like ABC transporter mRNA, complete cds. | |
| 700354960H1 | g209603 | 54 | 5 | gb105allp | ubiquitin/relaxin fusion protein | |
| 700356864H1 | g169778 | 15 | 13 | gb105pln | Oryza sativa beta-amylase gene, complete cds. | |
| 700352994H1 | g527680 | 77 | −4 | gb105eukp | ribosomal protein S3 | |
| 700354535H1 | g1209700 | 37 | −48 | gb105pln | Zea mays ribosomal protein L12 mRNA, complete cds. | |
| 700354422H1 | g1911581 | 26 | −30 | gb105pln | Cyn d 1 = major allergen {clone 14c1 and CD1} [Cynodon dactylon = Bermuda grass, | |
| | | | | | pollen, mRNA Partial, 759 nt]. | |
| 700352676H1 | g857573 | 42 | −21 | gb105pln | Oryza sativa vacuolar H+-ATPase (vatp-P1) mRNA, complete cds. | |
| 700355789H1 | g147895 | 32 | 8 | gb105allp | fusA | |
| 700383030H1 | g176780 | 32 | −16 | gb105allp | gamma-1 globin | |
| 700356820H1 | g1498387 | 62 | −68 | gb105pln | Zea mays actin (Maz83) gene, partial cds. | |
| 700352904H1 | g172496 | 27 | −3 | gb105pln | Yeast (Saccharomyces carlsbergensis) ribosomal protein s10 gene. | |
| 700282541H2 | g1657619 | 28 | −4 | gb105eukp | AtG5; putative transmembrane protein; G5p | |
| 700356950H1 | g429009 | 50 | −2 | gb105pln | Rice mRNA for LMW heat shock protein (gene name SS386), partial cds. | |
| 700352804H1 | g507823 | 20 | −6 | gb105eukp | A622 | |
| 700382032H1 | g1834355 | 16 | 7 | gb105allp | hypothetical protein 194 | |
| 700382770H1 | g170201 | 18 | 15 | gb105pln | Nicotiana tabacum mRNA sequence. | |
| 700354921H1 | g2586081 | 12 | 6 | gb105eukp | receptor kinase-like protein | |
| 700352678H1 | g293901 | 30 | −18 | gb105pln | Zea mays Zea mI gene, complete cds. | |
| 700382166H1 | g439585 | 51 | −30 | gb105pln | Hordeum vulgare calreticulin (CRH1) mRNA, partial cds. | |
| 700353523H1 | g22416 | 47 | −41 | gb105pln | Z. mays mRNA for polygalacturonase (clone PG1). | |
| 700356848H1 | g161172 | 8 | 6 | gb105eukp | elongation factor 1-gamma | |
| 700382875H1 | g288611 | 59 | −49 | gb105pln | Z. mays PG gene for polygalacturonase. | |
| 700352829H1 | g2578364 | 13 | 16 | gb105pln | Lycopersicon esculentum mRNA for GTP cyclohydrolase II/3,4-dihydroxy-2-butanone | |
| | | | | | 4-phosphate synthase. | |
| 700382102H1 | g22651 | 71 | −65 | gb105pln | H. vulgare mRNA for GRP94 homologue. | |
| 700354778H1 | g1438881 | 10 | −0 | gb105eukp | GmCK2p; EC 2.7.1.32 | |
| 700355062H1 | g2832611 | 15 | −5 | gb105pln | Arabidopsis thaliana DNA chromosome 4, BAC clone F13C5 (ESSAII project). | |
| 700355969H1 | g303834 | 32 | −27 | gb105pln | Rice mRNA for 21 kd polypeptide, complete cds. | |
| 700354662H1 | g1616627 | 10 | 5 | gb105eukp | smm1; SMM1 protein | |
| 700382232H1 | g1871506 | 24 | −3 | gb105pln | C. dactylon mRNA for calcium-binding pollen allergen. | |
| 700353716H1 | g1872472 | 32 | −22 | gb105pln | Triticum aestivum delta-24-sterol methyltransferase (TA-MT) gene, complete cds. | |
| 700356114H1 | g1155264 | 21 | −13 | gb105pln | Pennisetum ciliare possible apospory-associated protein mRNA, complete cds. | |
| 700356567H1 | g414907 | 46 | −15 | gb105pln | P. pratense mRNA for pollen allergen PhlpI. | |
| 700356773H1 | g1899025 | 37 | −1 | gb105eukp | AtHXK2; hexokinase 2; EC 2.7.1.1 | |
| 700382477H1 | g433665 | 21 | 6 | gb105allp | Sec61 beta-subunit homolog | |
| 700353930H1 | g479119 | 30 | 7 | gb105pln | F. pringlei fpcpt mRNA for triose phosphate/phosphate translocator. | |
| 700355413H1 | g22425 | 100 | −86 | gb105pln | Z. mays gene for polygalacturonase (clone 47). | |
| 700382673H1 | g1389849 | 30 | −16 | gb105eukp | myosin regulatory light chain | |
| 700356273H1 | g896268 | 54 | 4 | gb105allp | protein 5 | |
| 700354457H1 | g287829 | 37 | −54 | gb105pln | Z. mays gene for polygalacturonase. | |
| 700355461H1 | g644491 | 80 | −67 | gb105pln | Corn mRNA for elongation factor 1A. | |
| 700382658H1 | g642120 | 37 | −48 | gb105pln | Oryza sativa small GTP-binding protein (ORRab-2) mRNA, complete cds. | |
| 700352666H1 | g1141785 | 33 | −20 | gb105pln | Yeast (Schizosaccharomyces pombe) QM homolog (SPQM) mRNA, complete cds. | |
| 700352748H1 | g967124 | 31 | −18 | gb105pln | Vigna radiata Rwilcz calcium dependent protein kinase (CDPK) mRNA, complete cds. | |
| 700355723H1 | g289644 | 31 | −15 | gb105eukp | C14B9.7 protein | |
| 700383103H1 | g169820 | 34 | −16 | gb105pln | Oryza sativa triosephosphate isomerase (Rictpi) mRNA, complete cds. | |
| 700354570H1 | g2656029 | 28 | 8 | gb105pln | Arabidopsis thaliana genomic DNA, chromosome 5, P1 clone: MQB2. | |
| 700352920H1 | g179283 | 28 | 7 | gb105allp | PM-Scl autoantigen | |
| 700353902H1 | g1143864 | 27 | −9 | gb105eukp | catalyzes the release of either giberellin or cyanogenic substances from their gluco- | |
| | | | | | conjugates; beta glucosidase; EC 3.2.1.21 | |
| 700355281H1 | g829147 | 58 | −11 | gb105pln | Z. mays gene for cyclophilin. | |
| 700352751H1 | g1177283 | 31 | −18 | gb105eukp | F40F8.10 | |
| 700354472H1 | g176827 | 52 | −39 | gb105allp | beta-2-microglobulin | |
| 700355858H1 | g602605 | 27 | −56 | gb105pln | Zea mays tandem genes for alpha1-tubulin and alpha2-tubulin. | |
| 700354602H1 | g55457 | 22 | −6 | gb105allp | Ypt1 protein (AA 1-205) | |
| 700354224H1 | g22421 | 63 | 5 | gb105pln | Z. mays mRNA for polygalacturonase (clone PG3). | |
| 700355213H1 | g2370460 | 28 | −43 | gb105pln | Sorghum bicolor mRNA for putative glycoprotein. | |
| 700382933H1 | g1574460 | 5 | 6 | gb105allp | aminopeptidase N (pepN) | |
| 700383032H1 | g170752 | 17 | −10 | gb105pln | Wheat (clone p28-62) initiation factor isozyme 4F p28 subunit mRNA, complete cds. | |
| 700354362H1 | g287829 | 38 | −58 | gb105pln | Z. mays gene for polygalacturonase. | |
| 700354250H1 | g1017823 | 14 | 3 | gb105allp | RNA polymerase II subunit | |
| 700382816H1 | g288611 | 39 | −15 | gb105pln | Z. mays PG gene for polygalacturonase. | |
| 700355649H1 | g1668706 | 10 | 4 | gb105eukp | atran2 | |
| 700355847H1 | g1173621 | 43 | −37 | gb105pln | Phalaenopsis sp. ‘hybrid SM9108’ homeobox protein mRNA, complete cds. | |
| 700355921H1 | g984700 | 7 | 6 | gb105eukp | SPAC24H6.03; unknown | |
| 700382902H1 | g1495251 | 23 | −21 | gb105eukp | heat-shock protein | |
| 700353963H1 | g288373 | 78 | −12 | gb105pln | Z. mays PGg6 gene for polygalacturonase. | |
| 700352630H1 | g623585 | 28 | −1 | gb105pln | Nicotiana tabacum SR1 Nt-rab6 mRNA, complete cds. | |
| 700353008H1 | g2224934 | 28 | −5 | gb105pln | Arabidopsis thaliana ethylene-insensitive3 (EIN3) gene, complete cds. | |
| 700383030H1 | g183885 | 33 | −21 | gb105allp | gamma-globin | |
| 700357467H1 | g540534 | 43 | −4 | gb105pln | Rice mRNA for q group of receptor for activated C-kinase, complete cds. | |
| 700354350H1 | g633684 | 21 | −2 | gb105pln | S. tuberosum (Desiree) 8.0 kD subunit of cytochrome C reductase mRNA. | |
| 700355710H1 | g2599103 | 29 | −17 | gb105pln | Dunaliella salina 60S ribosomal protein (DSRP1) mRNA, complete cds. | |
| 700352835H1 | g18259 | 48 | −39 | gb105pln | C. sativus mRNA for cs DnaJ-1. | |
| 700355306H1 | g473359 | 28 | −34 | gb105pln | P. pratense mRNA for Phl pI allergen. | |
| 700353835H1 | g1532072 | 61 | −40 | gb105pln | Z. mays mRNA for S-adenosylmethionine decarboxylase. | |
| 700353183H1 | g288611 | 40 | −61 | gb105pln | Z. mays PG gene for polygalacturonase. | |
| 700355518H1 | g2384676 | 27 | −14 | gb105pln | Arabidopsis thaliana putative potassium transporter AtKT5p (AtKT5) mRNA, | |
| | | | | | partial cds. | |
| 700382749H1 | g473360 | 29 | 2 | gb105allp | Phl pI allergen | |
| 700355856H1 | g161631 | 14 | −0 | gb105eukp | 217 g protein | |
| 700353001H1 | g255568 | 100 | −22 | gb105pln | pollen specific protein [Zea mays = corn, mRNA, 943 nt]. | |
| 700356136H1 | g439616 | 22 | −33 | gb105pln | Soybean G protein alpha subunit mRNA, complete cds. | |
| 700353860H1 | g17603 | 11 | −2 | gb105allp | 60S RIBOSOMAL PROTEIN L26 | |
| 700383107H1 | g1145295 | 48 | −14 | gb105allp | cytochrome c oxidase subunit VIII precursor | |
| 700382165H1 | g1575129 | 87 | −76 | gb105pln | Zea mays lumenal binding protein cBiPe3 mRNA, complete cds. | |
| 700355153H1 | g168569 | 48 | −34 | gb105pln | Zea mays putative phenylalanine ammonia lyase mRNA, partial cds. | |
| 700355193H1 | g486253 | 29 | −13 | gb105pln | Yeast (Saccharomyces cerevisiae) chromosome XI reading frame ORF YKL148c. | |
| 700383058H1 | g757534 | 16 | −11 | gb105eukp | ara12; subtilisin-like protease | |
| 700382281H1 | g16836 | 10 | 3 | gb105allp | probable protease inhibitor P322 precursor (Bowman-Birk) | |
| 700354387H1 | g2459533 | 15 | −4 | gb105eukp | Ua-FatB1; acyl-ACP thioesterase | |
| 700353072H1 | g1420585 | 15 | −0 | gb105eukp | CRL13 | |
| 700382620H1 | g166972 | 20 | −4 | gb105pln | Barley acyl carrier protein I (ACP I) mRNA, complete cds. | |
| 700382344H1 | g414702 | 25 | −6 | gb105pln | H. lanatus mRNA for allergen Hol-lI. | |
| 700353616H1 | g558651 | 15 | 8 | gb105pln | T. aestivum VDAC3 mRNA for voltage dependent anion channel. | |
| 700357440H1 | g486357 | 13 | 16 | gb105pln | Yeast (Saccaromyces cerevisiae) chromosome XI reading frame ORF YKL202w. | |
| 700355611H1 | g2208961 | 24 | −0 | gb105pln | O. sativa mRNA for signal recognition particle subunit 14. | |
| 700353132H1 | g289189 | 13 | 10 | gb105pln | Arabidopsis thaliana calcium dependent protein kinase (AK1 isoform) mRNA, | |
| | | | | | complete cds. | |
| 700353231H1 | g2827001 | 49 | −33 | gb105pln | Triticum aestivum 70 kDa heat shock protein (TaHSP70d) mRNA, complete cds. | |
| 700354945H1 | g312180 | 43 | −47 | gb105pln | Z. mays GapC4 gene. | |
| 700356510H1 | g22427 | 26 | −50 | gb105pln | Z. mays gene for polygalacturonase (clone 65). | |
| 700382374H1 | g1183936 | 16 | 2 | gb105pln | P. sativum 5S rRNA gene. | |
| 700354919H1 | g1184771 | 47 | 5 | gb105pln | Zea mays glyceraldehyde-3-phosphate dehydrogenase GAPC2 (gpc2) mRNA, | |
| | | | | | complete cds. | |
| 700352687H1 | g2160318 | 59 | −50 | gb105pln | Rice mRNA for ribosomal protein L9, partial sequence. | |
| 700352738H1 | g2288886 | 33 | −19 | gb105pln | Arabidopsis thaliana mRNA for mevalonate diphosphate decarboxylase. | |
| 700383160H1 | g829147 | 66 | −69 | gb105pln | Z. mays gene for cyclophilin. | |
| 700382317H1 | g166923 | 21 | −0 | gb105pln | Arabidopsis thaliana ubiquitin carrier protein (UBC1) mRNA, complete cds. | |
| 700382305H1 | g1335202 | 4 | 8 | gb105allp | beta2/S laminin chain | |
| 700353107H1 | g2645166 | 32 | −13 | gb105pln | Oryza sativa mRNa, similar to ubiquitin conjugating enzyme. | |
| 700357168H1 | g288373 | 83 | −91 | gb105pln | Z. mays PGg6 gene for polygalacturonase. | |
| 700356759H1 | g1666233 | 26 | 10 | gb105pln | Pisum sativum actin (PEAc14) mRNA, complete cds. | |
| 700356038H1 | g1906832 | 9 | 4 | gb105eukp | C48D5.2 | |
| 700352974H1 | g2352565 | 77 | −6 | gb105eukp | Hsp82; 82 kDa heat shock protein | |
| 700353260H1 | g468524 | 24 | 1 | gb105eukp | NADPH thioredoxin reductase | |
| 700357452H1 | g218128 | 26 | −27 | gb105pln | Rice mRNA for succinyl-CoA synthetase (475 gene), partial sequence. | |
| 700353959H1 | g1041708 | 12 | 1 | gb105eukp | At-EXP2; induces extension (creep) in plant cell walls; expansin At-EXP2 | |
| 700352991H1 | g1065907 | 28 | −1 | gb105pln | Pisum sativum chloroplast processing enzyme mRNA, nuclear gene encoding chloroplast | |
| | | | | | protein, complete cds. | |
| 700356180H1 | g2384757 | 34 | −13 | gb105pln | Oryza sativa GDP dissociation inhibitor protein OsGDI1 (OsGDI1) mRNA, | |
| | | | | | complete cds. | |
| 700383050H1 | g416251 | 31 | −36 | gb105pln | Rice mRNA for acetohydroxy acid reductoisomerase, partial sequence. | |
| 700352870H1 | g473359 | 43 | −30 | gb105pln | P. pratense mRNA for Phl pI allergen. | |
| 700355948H1 | g1752864 | 14 | −11 | gb105eukp | E03H4.8 | |
| 700353276H1 | g444022 | 46 | −39 | gb105pln | N. tabacum mRNA for pyruvate kinase. | |
| 700282517H2 | g1518539 | 22 | −11 | gb105pln | Glycine max UDP-glucose dehydrogenase mRNA, complete cds. | |
| 700382952H1 | g2154729 | 11 | 5 | gb105pln | C. dactylon mRNA for profilin 1. | |
| 700352951H1 | g902583 | 53 | −9 | gb105pln | Zea mays clone MubG1 ubiquitin gene, complete cds. | |
| 700355216H1 | g2415701 | 59 | −58 | gb105pln | P. pratense mRNA for profilin 4. | |
| 700382741H1 | g32467 | 26 | −1 | gb105allp | 71 Kd heat shock cognate protein | |
| 700353054H1 | g19065 | 6 | 8 | gb105allp | nitrate reductase (NAD(P)H) | |
| 700353591H1 | g2827698 | 26 | −1 | gb105pln | Arabidopsis thaliana DNA chromosome 4, BAC clone F6H11 (ESSAII project). | |
| 700382875H1 | g288378 | 44 | −33 | gb105pln | Z. mays gene PG for polygalacturonase. | |
| 700382196H1 | g1513227 | 28 | −19 | gb105pln | Brassica napus myo-inositol 1-phosphate synthase mRNA, complete cds. | |
| 700354434H1 | g644492 | 35 | −33 | gb105pln | Corn elongation factor 1alpha gene, complete cds. | |
| 700356461H1 | g16427 | 16 | 7 | gb105eukp | protease inhibitor II | |
| 700354692H1 | g459197 | 52 | −36 | gb105pln | Gossypium hirsutum vacuolar H+-ATPase subunit B mRNA, complete cds. | |
| 700282553H2 | g2342496 | 10 | 7 | gb105eukp | bromelain; EC 3.4.4.24 | |
| 700353150H1 | g2264312 | 17 | −1 | gb105pln | Arabidopsis thaliana genomic DNA, chromosome 5, P1 clone: MOK16, complete | |
| | | | | | sequence. | |
| 700383075H1 | g974781 | 41 | −28 | gb105pln | C. blumei kinetoplast met gene for cobalamine-independent methionine synthase. | |
| 700382304H1 | g248336 | 39 | −79 | gb105pln | polyubiquitin [maize, Genomic, 3841 nt]. | |
| 700355467H1 | g557472 | 10 | 2 | gb105allp | arabinosidase | |
| 700353016H1 | g600768 | 41 | 9 | gb105pln | Oryza sativa cyclophilin 2 (Cyp2) mRNA, complete cds. | |
| 700382067H1 | g20818 | 24 | −13 | gb105pln | P. sativum mRNA for p34 kinase-related protein (cdc2 homologue). | |
| 700382649H1 | g1638835 | 7 | 7 | gb105allp | vacuolar-type H(+)-ATPase 115 kDa subunit | |
| 700356438H1 | g1173556 | 24 | 13 | gb105pln | Oryza sativa Ory s 1 mRNA, complete cds. | |
| 700382302H1 | g1532162 | 12 | 14 | gb105pln | Arabidopsis thaliana AT.I.24-1, AT.I.24-2, AT.I.24-3, AT.I.24-4, AT.I.24-5, AT.I.24-6, | |
| | | | | | AT.I.24-9 and AT.I.24-14 genes, partial cds, AT.I.24-7, ascorbate peroxidase | |
| | | | | | (ATHAPX1), EF-1-alpha-A1, -A2 and -A3 (EF-1alpha) and AT.I.24-13 genes, | |
| | | | | | complete cds. | |
| 700354821H1 | g1336097 | 13 | 7 | gb105allp | pyruvate dehydrogenase E1beta | |
| 700352725H1 | g2655157 | 21 | −27 | gb105eukp | Cyp1; cyclophilin 1 | |
| 700382707H1 | g500734 | 21 | −6 | gb105eukp | F42A10.1 | |
| 700352908H1 | g168797 | 30 | −3 | gb105pln | Neurospora crassa ribosomal protein (crp-5) gene, 5′ end. | |
| 700356459H1 | g22458 | 93 | −45 | gb105pln | Z. mays pollen specific mRNA C-terminal (clone 4H7). | |
| 700353633H1 | g2342673 | 15 | 13 | gb105pln | Sequence of BAC F7G19 from Arabidopsis thaliana chromosome 1, complete sequence. | |
| 700354642H1 | g2246625 | 11 | 0 | gb105eukp | protein kinase | |
| 700355977H1 | g1747293 | 50 | −35 | gb105pln | Rice mRNA for vacuolar H+-pyrophosphatase, complete cds. | |
| 700356520H1 | g2245126 | 20 | 16 | gb105pln | Arabidopsis thaliana DNA chromosome 4, ESSA I contig fragment No. 9. | |
| 700355842H1 | g1302311 | 7 | 6 | gb105eukp | ATX1 | |
| 700353049H1 | g2853071 | 23 | 15 | gb105pln | Arabidopsis thaliana DNA chromosome 4, BAC clone F24J7 (ESSAII project). | |
| 700282543H2 | g16931 | 12 | 6 | gb105allp | 60S ribosomal protein L32 | |
| 700354330H1 | g397958 | 33 | −48 | gb105pln | Z. mays mRNA for beta-amylase | |
| 700382048H1 | g287829 | 43 | −71 | gb105pln | Z. mays gene for polygalacturonase. | |
| 700354420H1 | g1184598 | 14 | −2 | gb105eukp | T11G6.8 | |
| 700382474H1 | g433041 | 16 | 13 | gb105pln | Zea mays W-22 clone PREM-1B retroelement PREM-1, partial sequence. | |
| 700383095H1 | g248338 | 52 | −72 | gb105pln | polyubiquitin [maize, Genomic, 3493 nt]. | |
| 700355972H1 | g623600 | 31 | −20 | gb105allp | C protein | |
| 700353218H1 | g2198410 | 6 | −0 | gb105eukp | C31C9.2 | |
| 700356759H1 | g20321 | 40 | −1 | gb105pln | Oryza sativa RAc1 mRNA for actin. | |
| 700382764H1 | g398848 | 60 | −57 | gb105pln | Z. mays mRNA for beta 5 tubulin. | |
| 700354963H1 | g22149 | 47 | −16 | gb105pln | Z. mays mRNA for alpha-tubulin 3. | |
| 700382319H1 | g22416 | 80 | −75 | gb105pln | Z. mays mRNA for polygalacturonase (clone PG1). | |
| 700353151H1 | g21477 | 25 | −3 | gb105eukp | hsp70; 70-kD heat shock protein | |
| 700355955H1 | g2245566 | 24 | 1 | gb105allp | NADH dehydrogenase III | |
| 700382035H1 | g20185 | 33 | −65 | gb105pln | O. sativa mRNA for calmodulin. | |
| 700354406H1 | g577062 | 43 | 7 | gb105allp | glutathione peroxidase | |
| 700356114H1 | g2317873 | 17 | 9 | gb105pln | Prunus armeniaca Rab7 GTP binding protein mRNA, complete cds. | |
| 700354712H1 | g1514638 | 17 | 5 | gb105pln | S. oleracea mRNA for alpha-glucan phosphorylase. | |
| 700353950H1 | g288366 | 42 | −45 | gb105pln | Z. mays PGg14 gene for polygalacturonase. | |
| 700356595H1 | g22418 | 85 | −56 | gb105pln | Z. mays gene for polygalacturonase (clone 17). | |
| 700355983H1 | g1769568 | 15 | 5 | gb105eukp | FUM1; fumarase; EC 4.2.1.2 | |
| 700356053H1 | g603220 | 32 | −21 | gb105pln | Medicago sativa 6-phosphogluconate dehydrogenase mRNA, complete cds. | |
| 700356668H1 | g2341023 | 44 | −4 | gb105pln | Sequence of BAC F19P19 from Arabidopsis thaliana chromosome 1, complete sequence. | |
| 700382816H1 | g288378 | 31 | −9 | gb105pln | Z. mays gene PG for polygalacturonase. | |
| 700355487H1 | g1184598 | 21 | −7 | gb105eukp | T11G6.8 | |
| 700382152H1 | g1572767 | 11 | 7 | gb105eukp | F29B9.5 | |
| 700356253H1 | g22312 | 59 | −0 | gb105pln | Maize ABA-inducible gene for glycine-rich protein (ABA = abscisic acid). | |
| 700383172H1 | g386857 | 59 | −11 | gb105allp | laminin receptor | |
| 700383123H1 | g2154729 | 42 | −51 | gb105pln | C. dactylon mRNA for profilin 1. | |
| 700382886H1 | g22425 | 50 | −58 | gb105pln | Z. mays gene for polygalacturonase (clone 47). | |
| 700353508H1 | g1182006 | 55 | −50 | gb105pln | H. vulgare mRNA for putative zinc finger protein. | |
| 700356445H1 | g1167835 | 22 | 6 | gb105pln | H. lanatus mRNA for Hol lI protein. | |
| 700382460H1 | g1872523 | 20 | −5 | gb105eukp | LSD1; negative regulator of cell death; zinc-finger protein Lsd1 | |
| 700356230H1 | g1546918 | 73 | −58 | gb105pln | Z. mays mRNA for translation initiation factor 5A. | |
| 700382034H1 | g601787 | 25 | −8 | gb105eukp | AFC1; activator of yeast transcription factor STE12; protein kinase | |
| 700355876H1 | g1550739 | 35 | −25 | gb105pln | A. thaliana mRNA for GDP dissociation inhibitor. | |
| 700356137H1 | g303838 | 44 | −26 | gb105pln | Rice mRNA for 40S subunit ribosomal protein, complete cds. | |
| 700353183H1 | g288378 | 27 | −42 | gb105pln | Z. mays gene PG for polygalacturonase. | |
| 700352933H1 | g22416 | 98 | −21 | gb105pln | z. mays mRNA for polygalacturonase (clone PG1). | |
| 700352802H1 | g603403 | 9 | 5 | gb105eukp | YER163C; Yer163cp | |
| 700354555H1 | g166548 | 27 | 11 | gb105pln | Avena sativa vacuolar H+-ATPase 16 kDa proteolipid subunit (vatp-P1) mRNA, | |
| | | | | | complete cds. | |
| 700355520H1 | g415896 | 4 | 7 | gb105eukp | PHL PII, pollen allergen | |
| 700354517H1 | g1314677 | 22 | 7 | gb105allp | Sec61p gamma homolog | |
| 700353562H1 | g168490 | 63 | −21 | gb105pln | Maize glutathione S-transferase (GST-I) mRNA, complete cds. | |
| 700355401H1 | g409070 | 7 | 5 | gb105allp | HBp15/L22 | |
| 700382379H1 | g288373 | 94 | −76 | gb105pln | Z. mays PGg6 gene for polygalacturonase. | |
| 700382344H1 | g1167835 | 26 | −8 | gb105pln | H. lanatus mRNA for Hol lI protein. | |
| 700382305H1 | g957312 | 4 | 8 | gb105allp | laminin beta 2 chain, S-laminin [human, placenta, Peptide, 1798 aa] | |
| 700352862H1 | g1841464 | 26 | 7 | gb105eukp | SF3; LIM-domain SF3 protein | |
| 700382279H1 | g2098713 | 11 | 8 | gb105eukp | pectinesterase | |
| 700282489H2 | g755149 | 23 | 11 | gb105pln | Gossypium hirsutum vacuolar H+-ATPase proteolipid (16 kDa) subunit (cva16-4) | |
| | | | | | mRNA, complete cds. | |
| 700282486H2 | g473168 | 22 | −8 | gb105pln | S. tuberosum E1 alpha subunit of pyruvate dehydrogenase (lipamide). | |
| 700355409H1 | g1841464 | 11 | 5 | gb105eukp | SF3; LIM-domain SF3 protein | |
| 700354710H1 | g2529657 | 17 | −9 | gb105pln | Arabidopsis thaliana chromosome II BAC T30B22 genomic sequence, coomplete | |
| | | | | | sequence. | |
| 700354551H1 | g313139 | 38 | 6 | gb105pln | Z. mays ZmPRO2 mRNA for profilin 2. | |
| 700355054H1 | g405634 | 89 | −57 | gb105pln | Z. mays zmcpt mRNA triose phosphate/phosphate translocator. | |
| 700355346H1 | g1181672 | 19 | −10 | gb105pln | Sorghum bicolor heat shock protein 70 cognate (hsc70) mRNA, partial cds. | |
| 700354963H1 | g485376 | 64 | −29 | gb105pln | Zea mays alpha-3-tubulin gene, complete cds. | |
| 700352888H1 | g1872521 | 36 | −8 | gb105eukp | PSD1; negative regulator of cell death; zinc-finger protein Lsd1 | |
| 700282545H2 | g1815758 | 14 | 15 | gb105pln | Phalaris coerulescens pollen-specific protein mRNA, complete cds. | |
| 700356190H1 | g2623962 | 20 | 5 | gb105allp | isocitrate dehydrogenase (NADP+) | |
| 700354479H1 | g1399276 | 20 | −1 | gb105pln | Arabidopsis thaliana calmodulin-domain protein kinase CDPK isoform 7 (CPK7) | |
| | | | | | mRNA, complete cds. | |
| 700356468H1 | g2245024 | 14 | 6 | gb105eukp | cyanohydrin lyase homolog | |
| 700382256H1 | g1100224 | 50 | −29 | gb105pln | Pinus sylvestris chloroplast NAD+-dependent glyceraldehyde-3-phosphate dehydrogenase | |
| | | | | | mRNA, complete cds. | |
| 700354871H1 | g886404 | 34 | −33 | gb105pln | Oryza sativa MADS-box protein (MADS3) mRNA, complete cds. | |
| 700355015H1 | g169295 | 38 | −11 | gb105pln | Pharbitis nil heat shock protein 83 (Hsp83) gene, complete cds. | |
| 700382669H1 | g439480 | 64 | −56 | gb105pln | Barley mRNA for ferrochelatase. | |
| 700382901H1 | g18260 | 21 | 4 | gb105eukp | cs DnaJ-1 | |
| 700382528H1 | g886404 | 18 | 5 | gb105pln | Oryza sativa MADS-box protein (MADS3) mRNA, complete cds. | |
| 700353257H1 | g168639 | 36 | −72 | gb105pln | Zea mays autonomous transposable element En-1 mosaic protein gene, complete cds. | |
| 700382927H1 | g2316016 | 20 | 3 | gb105allp | MRP-like ABC transporter | |
| 700282491H2 | g299191 | 36 | −15 | gb105pln | 18S ribosomal RNA [Aramanthus caudatus, Genomic, 416 nt, segment 1 of 4]. | |
| 700382845H1 | g2058277 | 21 | −13 | gb105pln | A. thaliana mRNA for AtRan1 protein. | |
| 700356094H1 | g1632767 | 13 | −3 | gb105pln | Maize mRNA for calcium dependent protein kinase, complete cds. | |
| 700353272H1 | g2618603 | 14 | 9 | gb105pln | Arabidopsis thaliana genomic DNA, chromosome 5, P1 clone: MSL3, complete | |
| | | | | | sequence. | |
| 700352957H1 | g2781432 | 65 | −56 | gb105pln | Oryza sativa subsp. joponica RSW1-like cellulose synthase catalytic subunit mRNA, | |
| | | | | | partial cds. | |
| 700355840H1 | g304668 | 24 | −4 | gb105eukp | ben | |
| 700382101H1 | g2245394 | 32 | −14 | gb105eukp | putative transcription factor; ARF1-binding protein | |
| 700382331H1 | g555699 | 31 | −28 | gb105pln | Arabidopsis thaliana phosphatidylinositol 3-kinase (AtVps34) mRNA, complete cds. | |
| 700353072H1 | g1931623 | 15 | −0 | gb105eukp | PCS1; proteasome cap subunit | |
| 700353568H1 | g533775 | 30 | 4 | gb105eukp | Mha1; H(+)-transporting ATPase | |
| 700354727H1 | g1762944 | 28 | −16 | gb105pln | Nicotiana tabacum ORF mRNA, complete cds. | |
| 700382436H1 | g2370518 | 7 | 6 | gb105allp | ribosomal protein | |
| 700354886H1 | g16836 | 12 | 6 | gb105allp | probably protease inhibitor P322 precursor (Bowman-Birk) | |
| 700355938H1 | g2369766 | 12 | 8 | gb105eukp | hypothetical protein | |
| 700352954H1 | g416265 | 48 | −15 | gb105pln | Rice mRNA for ribosomal protein A2, partial sequence. | |
| 700353202H1 | g596079 | 87 | −83 | gb105pln | Zea mays thiamine biosynthetic enzyme (thi1-2) mRNA, complete cds. | |
| 700355865H1 | g998429 | 28 | −49 | gb105pln | GRF1 = general regulatory factor [Zea mays, XL80, Genomic, 5348 nt]. | |
| 700357423H1 | g288366 | 55 | −64 | gb105pln | Z. mays PGg14 gene for polygalacturonase. | |
| 700352868H1 | g551301 | 16 | 5 | gb105eukp | SSE1; Sse1 protein | |
| 700352788H1 | g561923 | 16 | −1 | gb105eukp | M01F1.2 | |
| 700354435H1 | g2275008 | 36 | −28 | gb105pln | Hordeum vulgare mRNA for expressed sequence tag. | |
| 700382240H1 | g2326873 | 26 | −23 | gb105pln | S. tuberosum mRNA for plastidic ATP/ADP-transporter. | |
| 700355555H1 | g644491 | 47 | −63 | gb105pln | Corn mRNA for elongation factor 1A. | |
| 700355983H1 | g1488652 | 16 | 3 | gb105eukp | fum1; fumarase; EC 4.2.1.2 | |
| 700352829H1 | g2578365 | 19 | 2 | gb105allp | GTP cyclohydrolase II/3,4-dihydroxy-2-butanone-4-phosphate synthase | |
| 700356585H1 | g217910 | 42 | −32 | gb105pln | Carrot mRNA for nuclear antigen 21D7. | |
| 700353237H1 | g22747 | 28 | −6 | gb105pln | L. longiflorum mRNA for actin depolymerizing factor. | |
| 700355823H1 | g2623989 | 36 | −22 | gb105pln | Arabidopsis thaliana mRNA for ferrochelatase. | |
| 700352613H1 | g177207 | 17 | 8 | gb105allp | 4F2 antigen heavy chain | |
| 700354469H1 | g19255 | 37 | −23 | gb105pln | Lycopersicon esculentum hsc-1 mRNA for heat shock protein 70 kD. | |
| 700352883H1 | g1895083 | 59 | −24 | gb105pln | Zea mays golgi associated protein se-wap41 mRNA, complete cds. | |
| 700357450H1 | g1184775 | 31 | −30 | gb105pln | Zea mays glyceraldehyde-3-phosphate dehydrogenase (gpc4) mRNA, complete cds. | |
| 700353263H1 | g20255 | 55 | −54 | gb105pln | O. sativa gene for heat shock protein 82 HSP82. | |
| 700356773H1 | g881521 | 37 | −1 | gb105eukp | AtHXK1; hexokinase 1; EC 2.7.1.1 | |
| 700352826H1 | g288612 | 15 | −3 | gb105eukp | PG; polygalacturonase | |
| 700356084H1 | g288373 | 50 | −58 | gb105pln | Z. mays PGg6 gene for polygalacturonase. | |
| 700353278H1 | g1246115 | 23 | −5 | gb105pln | major allergen Pha a1 [Phalaris aquatica = canary grass, pollen, mRNA Partial, | |
| | | | | | 1088 nt]. | |
| 700353560H1 | g1002369 | 14 | −2 | gb105allp | coatomer protein | |
| 700356246H1 | g1143864 | 43 | −10 | gb105eukp | catalyzes the release of either giberellin or cyanogenic substances from their gluco- | |
| | | | | | conjugates; beta glucosidase; EC 3.2.1.21 | |
| 700354824H1 | g1388084 | 22 | −3 | gb105eukp | TRX5; thioredoxin h | |
| 700282482H2 | g1799575 | 8 | 6 | gb105allp | DNA GYRASE SUBUNIT A (EC 5.99.1.3). | |
| 700382055H1 | g790582 | 18 | 4 | gb105pln | Arabidospsis thaliana putative pathogenesis-related protein (ATOZI1) mRNA, | |
| | | | | | complete cds. | |
| 700353987H1 | g22425 | 53 | 6 | gb105pln | Z. mays gene for polygalacturonase (clone 47). | |
| 700356510H1 | g22456 | 26 | −46 | gb105pln | Z. mays pollen specific mRNA C-terminal (clone 3C12). | |
| 700357431H1 | g19103 | 47 | −37 | gb105pln | H. vulgare mRNA for ribosomal protein L17-2. | |
| 700355915H1 | g288378 | 100 | −87 | gb105pln | Z. mays gene PG for polygalacturonase. | |
| 700356258H1 | g476002 | 74 | −71 | gb105pln | Hordeum vulgare HSP70 mRNA, complete cds. | |
| 700354263H1 | g439480 | 57 | −51 | gb105pln | Barley mRNA for ferrochelatase. | |
| 700355509H1 | g2282583 | 52 | −81 | gb105pln | Zea mays elongation factor 1-alpha (EF1-A) mRNA, complete cds. | |
| 700356502H1 | g1747418 | 75 | −50 | gb105pln | Z. mays mRNA for eukaryotic initiation factor-5. | |
| 700382235H1 | g313137 | 70 | −89 | gb105pln | Z. mays ZmPRO1 mRNA for profilin 1. | |
| 700353918H1 | g288611 | 43 | −43 | gb105pln | Z. mays PG gene for polygalacturonase. | |
| 700353688H1 | g1815759 | 16 | −0 | gb105eukp | pollen-specific protein | |
| 700383130H1 | g22356 | 11 | −26 | gb105pln | Maize mRNA for light-harvesting chlorophyll a/b binding protein LHCP. | |
| 700383159H1 | g22426 | 8 | 6 | gb105allp | polygalacturonase | |
| 700382242H1 | g1370195 | 15 | 11 | gb105pln | L. japonicus mRNA for small GTP-binding protein, RAB8D. | |
| 700354682H1 | g22458 | 14 | −20 | gb105pln | Z. mays pollen specific mRNA C-terminal (clone 4H7). | |
| 700383004H1 | g143814 | 9 | 3 | gb105allp | HisH | |
| 700352603H1 | g248338 | 98 | −86 | gb105pln | polyubiquitin [maize, Genomic 3439 nt]. | |
| 700353206H1 | g16211 | 22 | −4 | gb105eukp | CNX1; calnexin homolog | |
| 700352790H1 | g600710 | 16 | 7 | gb105eukp | SAR1 | |
| 700382279H1 | g2098709 | 11 | 8 | gb105allp | pectinesterase | |
| 700357413H1 | g499111 | 39 | −29 | gb105pln | Flaveria bidentis clone pNDK-b nucleoside diphosphate kinase mRNA, complete cds. | |
| 700355461H1 | g644492 | 80 | −67 | gb105pln | Corn elongation factor 1alpha gene, complete cds. | |
| 700355501H1 | g1498391 | 33 | −26 | gb105pln | Zea mays actin (Maz65) gene, partial cds. | |
| 700383128H1 | g22423 | 29 | −22 | gb105pln | Z. mays mRNA for polygalacturonase (clone PG4). | |
| 700355748H1 | g1620661 | 39 | −39 | gb105pln | Triticum aestivum 1,4-alpha-D-glucan 6-alpha-D-(1,4-alpha-D-glucanotransferase | |
| | | | | | mRNA, complete cds. | |
| 700282447H2 | g927571 | 47 | −37 | gb105pln | Z. mays mRNA for calreticulin precursor. | |
| 700382327H1 | g218129 | 25 | 0 | gb105pln | Rice mRNA for F1-ATPase (480 gene), partial sequence. | |
| 700352788H1 | g963095 | 16 | −1 | gb105eukp | 60S ribosomal protein L13A | |
| 700382892H1 | g312180 | 24 | −58 | gb105pln | Z. mays GapC4 gene. | |
| 700352826H1 | g22428 | 14 | −4 | gb105eukp | polygalacturonase | |
| 700355188H1 | g968901 | 69 | −63 | gb105pln | Rice mRNA for ribosomal protein S8, complete cds. | |
| 700353960H1 | g1053058 | 36 | −36 | gb105pln | Triticum aestivum histone H3 gene, partial cds, clone W2. | |
| 700354931H1 | g22427 | 93 | −60 | gb105pln | Z. mays gene for polygalacturonase (clone 65). | |
| 700355407H1 | g2335104 | 23 | −5 | gb105eukp | T11A07.16; villin isolog | |
| 700355095H1 | g20163 | 54 | −27 | gb105pln | O. sativa Rr15 mRNA for 5S ribosomal RNA. | |
| 700354602H1 | g550060 | 22 | −6 | gb105allp | GTP-binding protein | |
| 700355847H1 | g1173829 | 36 | −29 | gb105pln | Arabidopsis thaliana meristem L1 layer homeobox protein (ATML1) mRNA, | |
| | | | | | complete cds. | |
| 700356169H1 | g22427 | 57 | −61 | gb105pln | Z. mays gene for polygalacturonase (clone 65). | |
| 700355236H1 | g18296 | 59 | −1 | gb105pln | Water melon mMDH mRNA for mitochondrial malate dehydrogenase (EC 1.1.1.37). | |
| 700354856H1 | g21599 | 19 | −6 | gb105eukp | UTP-glucose-1-phosphate uridylyltransferase; EC 2.7.7.9 | |
| 700355015H1 | g300082 | 37 | −6 | gb105pln | hsp82 = 82 kda heat shock protein [Zea mays, seedling, leaves, Genomic, 3468 nt]. | |
| 700354603H1 | g22458 | 21 | 2 | gb105pln | Z. mays pollen specific mRNA C-terminal (clone 4H7). | |
| 700353260H1 | g757510 | 18 | 0 | gb105eukp | cys-9; Thioredoxin Reductase (NADPH); EC 1.6.4.5 | |
| 700356177H1 | g2828188 | 20 | 5 | gb105pln | Arabidopsis thaliana genomic DNA, chromosome 5, TAC clone: K3I3, complete | |
| | | | | | sequence. | |
| 700352973H1 | g1246116 | 24 | 1 | gb105allp | major allergen Pha a1 [Phalaris aquatica = canary grass, pollen, Peptide, 269 aa] | |
| 700356190H1 | g1750380 | 18 | 5 | gb105eukp | EgICDH; NADP-isocitrate dehydrogenase | |
| 700355088H1 | g415896 | 9 | 7 | gb105eukp | PHL PII, pollen allergen | |
| 700353562H1 | g168486 | 76 | −32 | gb105pln | Maize glutathione S-transferase gene (GST-I), exon 1. | |
| 700352922H1 | g1679658 | 16 | −10 | gb105eukp | gamma glutamyl hydrolase | |
| 700355046H1 | g22149 | 82 | −76 | gb105pln | Z. mays mRNA for alpha-tubulin 3. | |
| 700383193H1 | g255568 | 60 | −49 | gb105pln | pollen specific protein [Zea mays = corn, mRNA, 943 nt]. | |
| 700355740H1 | g414702 | 25 | −9 | gb105pln | H. lanatus mRNA for allergen Hol-lI. | |
| 700383138H1 | g1002914 | 31 | −25 | gb105pln | Oryza sativa cap-binding protein p26 mRNA, complete cds. | |
| 700382924H1 | g1418319 | 12 | 1 | gb105allp | CER1-like | |
| 700355338H1 | g1930071 | 35 | −22 | gb105pln | Oryza sativa thioredoxin h mRNA, complete cds. | |
| 700356893H1 | g974781 | 26 | −2 | gb105pln | c. blumei kinetoplast met gene for cabalamine-independent methionine synthase. | |
| 700353930H1 | g405634 | 76 | −17 | gb105pln | z. mays zmcpt mRNA triose phosphate/phosphate translocator. | |
| 700355966H1 | g516306 | 21 | 5 | gb105eukp | Su(var)3-9; 51 KDa protein | |
| 700353685H1 | g886400 | 23 | 1 | gb105pln | Oryza sativa MADS-box protein (MADS2) mRNA, complete cds. | |
| 700353543H1 | g575730 | 94 | −70 | gb105pln | Z. mays mRNA for transmembrane protein. | |
| 700352783H1 | g996081 | 13 | 4 | gb105eukp | syx1A; syntaxin 1A | |
| 700356507H1 | g1184773 | 39 | −13 | gb105pln | Zea mays glyceraldehyde-3-phosphate dehydrogenase GAPC3 (gpc3) mRNA, | |
| | | | | | complete cds. | |
| 700382015H1 | g16511 | 24 | −40 | gb105pln | A. thaliana mRNA for suppressor-like protein. | |
| 700282520H2 | g1518539 | 42 | −20 | gb105pln | Glycine max UDP-glucose dehydrogenase mRNA, complete cds. | |
| 700356964H1 | g2654011 | 42 | 1 | gb105allp | Rho-like GTP binding protein | |
| 700354891H1 | g2827513 | 17 | 10 | gb105pln | Arabidopsis thaliana DNA chromosome 4, BAC clone F8F16 (ESSAII project). | |
| 700355312H1 | g2315152 | 28 | −24 | gb105pln | Arabidopsis thaliana mRNA for MAP3K gamma protein kinase. | |
| 700382357H1 | g435428 | 30 | −8 | gb105pln | Arabidopsis thaliana GTP-binding protein mRNA. | |
| 700354944H1 | g312180 | 46 | −49 | gb105pln | Z. mays GapC4 gene. | |
| 700355976H1 | g218152 | 19 | −2 | gb105pln | Rice serine cbp3 gene for carboxypeptidase III. | |
| 700356086H1 | g1857256 | 9 | 3 | gb105eukp | mudrAzc; MURAZC | |
| 700382901H1 | g1125690 | 24 | 1 | gb105pln | S. tuberosum mRNA for DnaJ protein. | |
| 700352911H1 | g1277236 | 10 | 7 | gb105eukp | SEC13; Sec13p | |
| 700354267H1 | g393449 | 29 | −4 | gb105pln | S. cereale mRNA for beta-amylase. | |
| 700353247H1 | g2244881 | 9 | 7 | gb105eukp | PDR5-like ABC transporter | |
| 700356033H1 | g453244 | 10 | 4 | gb105allp | catechol O-methyltransferase | |
| 700382373H1 | g1155241 | 11 | 17 | gb105pln | Dianthus caryophyllus S-adenosylmethionine 2 decarboxylase mRNA, complete cds. | |
| 700282442H2 | g1314048 | 20 | 6 | gb105pln | O. sativa mRNA for archain/delta-COP. | |
| 700382933H1 | g1651457 | 5 | 7 | gb105allp | Aminopeptidase N | |
| 700355840H1 | g546724 | 24 | −4 | gb105eukp | ben | |
| 700356174H1 | g169988 | 28 | −5 | gb105pln | Glycine max NADP-specific isocitrate dehydrogenase (idh1) mRNA, 3′ end. | |
| 700353560H1 | g1237029 | 14 | −2 | gb105allp | alpha-cop protein | |
| 700352660H1 | g414702 | 26 | −10 | gb105pln | H. lanatus mRNA for allergen Hol-lI. | |
| 700354265H1 | g1354861 | 24 | −4 | gb105eukp | COI; cytochrome oxidase | |
| 700353690H1 | g602425 | 38 | −22 | gb105pln | Mesembryanthemum crystallinum phosphoglyceromutase (pgm) gene, complete cds. | |
| 700353528H1 | g22418 | 90 | −84 | gb105pln | Z. mays gene for polygalacturonase (clone 17). | |
| 700354366H1 | g498039 | 19 | 0 | gb105pln | Senecio odorus mRNA, complete ORF. | |
| 700356089H1 | g2264311 | 15 | −14 | gb105pln | Arabidopsis thaliana genomic DNA, chromosome 5, P1 clone: MLN1, complete | |
| | | | | | sequence. | |
| 700383167H1 | g1486286 | 19 | 6 | gb105pln | C. sativus mRNA for T-complex polypeptide 1. | |
| 700354368H1 | g2130984 | 28 | −19 | gb105pln | B. napus mRNA for ribosomal protein S15a (pA8130). | |
| 700282471H2 | g17919 | 13 | 8 | gb105eukp | S-receptor kinase related protein | |
| 700352904H1 | g4401 | 27 | −3 | gb105pln | Yeast gene for ribosomal protein S10-2. | |
| 700382907H1 | g17561 | 18 | 3 | gb105allp | PROTEINASE INHIBITOR | |
| 700354523H1 | g972255 | 20 | 7 | gb105allp | ribosomal protein L21 | |
| 700382611H1 | g414702 | 26 | −6 | gb105pln | H. lanatus mRNA for allergen Hol-lI. | |
| 700353994H1 | g170772 | 69 | −25 | gb105pln | Triticum aestivum S-adenosyl-L-homocysteine hydrolase (SH6.2) mRNA, complete cds. | |
| 700383173H1 | g1136786 | 23 | −20 | gb105pln | Fission Yeast mRNA for elongation factor 1 alpha-C, complete cds. | |
| 700382532H1 | g2618603 | 12 | 15 | gb105pln | Arabidopsis thaliana genomic DNA, chromosome 5, P1 clone: MSL3, complete | |
| | | | | | sequence. | |
| 700356094H1 | g639721 | 13 | −4 | gb105pln | Zea mays calcium-dependent protein kinase (CDPK) gene, exons 1-7 and partial cds. | |
| 700355415H1 | g16446 | 7 | 14 | gb105pln | A. thaliana gene for photosystem II 10 kDa polypeptide. | |
| 700356114H1 | g623587 | 14 | 12 | gb105pln | Nicotiana tabacum SR1 Nt-rab7a mRNA, complete cds. | |
| 700353003H1 | g2781347 | 24 | 7 | gb105eukp | F24O1.3 | |
| 700356033H1 | g2565273 | 8 | 7 | gb105allp | o-methytransferase | |
| 700356611H1 | g1418408 | 50 | −10 | gb105pln | B. vulgaris mRNA for subunit A of the V-type ATPase. | |
| 700356115H1 | g22416 | 98 | −27 | gb105pln | Z. mays mRNA for polygalacturonase (clone PG1). | |
| 700354794H1 | g1438881 | 15 | 1 | gb105eukp | GmCK2p; EC 2.7.1.32 | |
| 700354414H1 | g433044 | 19 | 1 | gb105pln | Zea mays W-22 clone PREM-1D retroelement PREM-1, partial sequence. | |
| 700353213H1 | g288373 | 79 | −67 | gb105pln | Z. mays PGg6 gene for polygalacturonase. | |
| 700356285H1 | g3972 | 21 | −7 | gb105eukp | mitochondrial release factor 1 | |
| 700353024H1 | g2414643 | 25 | −2 | gb105pln | Yeast (Saccaromyces pombe) chromosome I cosmid c3H5. | |
| 700353268H1 | g255568 | 32 | −71 | gb105pln | pollen specific protein [Zea mays = corn, mRNA, 943 nt]. | |
| 700356438H1 | g1173557 | 30 | 7 | gb105allp | Ory s 1 | |
| 700382649H1 | g2330695 | 7 | 5 | gb105eukp | SPAC16E8.07c; vacuolar atpase | |
| 700382325H1 | g2429285 | 10 | 16 | gb105pln | Oryza sativa peroxidase (POX22.3) mRNA, complete cds. | |
| 700357409H1 | g498774 | 38 | −27 | gb105pln | Z. mays (cv DH5xDH7) hsp70-5 mRNA for heat shock protein 70. | |
| 700383037H1 | g1532072 | 19 | 5 | gb105pln | Z. mays mRNA for S-adenosylmethionine decarboxylase. | |
| 700383130H1 | g218171 | 14 | −29 | gb105pln | Rice mRNA for type I light-harvesting chlorophyll a/b binding protein of photosystem II | |
| | | | | | (LHCPII). | |
| 700353695H1 | g1911582 | 10 | 0 | gb105allp | Cyn d 1 = major allergen [Cynodon dactylon = Bermuda grass, pollen, Peptide Partial, | |
| | | | | | 246 aa] | |
| 700356576H1 | g1370324 | 38 | 3 | gb105allp | ORF YPL152w | |
| 700383062H1 | g395316 | 4 | 8 | gb105eukp | P405CR10; cytochrome P450 | |
| 700354759H1 | g17561 | 18 | 5 | gb105allp | PROTEINASE INHIBITOR | |
| 700354570H1 | g19500 | 32 | 1 | gb105pln | Lupinus polyphyllus lupin-specific pPLZ12 mRNA. | |
| 700355840H1 | g1480355 | 20 | −2 | gb105eukp | UBC13; ubiquitin-conjugating enzyme | |
| 700353823H1 | g2384759 | 22 | −13 | gb105pln | Oryza sativa GDP dissociation inhibitor protein OsGDI2 (OsGDI2) mRNa, complete cds. | |
| 700356435H1 | g20237 | 15 | 1 | gb105pln | O. sativa (rice) constitutive GOS2 gene. | |
| 700354748H1 | g2342737 | 13 | 7 | gb105eukp | T14G11.30; Ser/Thr protein kinase isolog, 5′ partial | |
| 700382823H1 | g312180 | 30 | −33 | gb105pln | Z. mays GapC4 gene. | |
| 700353084H1 | g2130943 | 23 | −2 | gb105pln | Arabidopsis thaliana mRNA for sulfate transporter, complete cds. | |
| 700352920H1 | g2264308 | 38 | 7 | gb105pln | Arabidopsis thaliana genomic DNA, chromosome 5, P1 clone: MIK22, complete | |
| | | | | | sequence. | |
| 700356479H1 | g886402 | 46 | −15 | gb105pln | Oryza sativa MADS-box protein (MADS4) mRNA, complete cds. | |
| 700353918H1 | g288378 | 35 | −28 | gb105pln | Z. mays gene PG for polygalacturonase. | |
| 700353060H1 | g1335965 | 54 | −46 | gb105pln | Zea mays acetyl CoA carboxylase mRNA, partial cds. | |
| 700354929H1 | g1167835 | 24 | −6 | gb105pln | H. lanatus mRNA for Hol lI protein. | |
| 700352637H1 | g313759 | 50 | −49 | gb105pln | Z. mays hsp 70-1 gene for heat shock protein 70. | |
| 700355733H1 | g1395190 | 23 | −1 | gb105pln | Spinacia oleracea L. mRNA for 26S proteasome ATPase subunit, complete cds. | |
| 700354457H1 | g288366 | 37 | −53 | gb105pln | Z. mays PGg14 gene for polygalacturonase. | |
| 700382947H1 | g224256 | 96 | −44 | gb105pln | Z. mays gene for polygalacturonase (clone 47). | |
| 700355971H1 | g170919 | 13 | 5 | gb105pln | Yeast (Candida maltosa) ribosomal protein L41 (LEL41) gene, complete cds. | |
| 700382331H1 | g736336 | 33 | −30 | gb105pln | Glycine max phosphatidylinositol 3-kinase mRNA, complete cds. | |
| 700355760H1 | g20168 | 50 | −32 | gb105pln | O. sativa mRNA for alcohol dehydrogenase 2. | |
| 700382567H1 | g2342683 | 44 | −22 | gb105eukp | F7G19.12 | |
| 700382122H1 | g558649 | 26 | −5 | gb105pln | T. aestivum VDAC2 mRNA for voltage dependent anion channel. | |
| 700355242H1 | g1906827 | 10 | 14 | gb105pln | A. thaliana hsp81.4 gene. | |
| 700357449H1 | g1313907 | 65 | −5 | gb105eukp | CDPK-related protein kinase | |
| 700355978H1 | g1718238 | 12 | −0 | gb105eukp | (1,4)-beta-xylan endohydrolase, isoenzyme X-II; EC 3.2.1.8 | |
| 700355519H1 | g20323 | 29 | −30 | gb105pln | O. sativa RAc1 gene for actin. | |
| 700356032H1 | g456567 | 30 | −11 | gb105pln | Pisum sativum ubiquitin conjugating enzyme (UBC4), complete cds. | |
| 700356685H1 | g22418 | 93 | −38 | gb105pln | Z. mays gene for polygalacturonase (clone 17). | |
| 700383014H1 | g414702 | 23 | −6 | gb105pln | H. lanatus mRNA for allergen Hol-lI. | |
| 700382615H1 | g1070357 | 28 | −13 | gb105pln | H. vulgare mRNA for oxalate oxidase-like protein. | |
| 700354249H1 | g407411 | 72 | −7 | gb105pln | C. roseus SAHH gene for S-adenosyl-L-homocysteine hydrolase. | |
| 700352617H1 | g313137 | 49 | −47 | gb105pln | Z. mays ZmPRO1 mRNA for profilin 1. | |
| 700356050H1 | g2258073 | 27 | −4 | gb105pln | Hordeum vulgare var. distichum soluble inorganic pyrophosphatase (Ipp) mRNA, | |
| | | | | | complete cds. | |
| 700382254H1 | g556685 | 53 | −46 | gb105pln | Z. mays mRNA for ADP-ribosylation factor. | |
| 700382242H1 | g2808637 | 15 | 8 | gb105pln | Daucus carota mRNA for Rab8-like small GTP-binding protein. | |
| 700355982H1 | g1107484 | 26 | −11 | gb105pln | A. thaliana mRNA for 40S ribosomal protein S15. | |
| 700354301H1 | g2370231 | 27 | −39 | gb105pln | Hordeum vulgare mRNA for putative acyl-CoA oxidase. | |
| 700354362H1 | g288366 | 38 | −58 | gb105pln | Z. mays PGg14 gene for polygalacturonase. | |
| 700352908H1 | g3075 | 36 | −12 | gb105pln | N. crassa mRNA for a ribosomal protein. | |
| 700355771H1 | g20635 | 19 | −3 | gb105eukp | actin | |
| 700353084H1 | g2114103 | 32 | −12 | gb105pln | Arabidopsis thaliana DNA for sulfate transporter, complete cds. | |
| 700357410H1 | g2213581 | 14 | −5 | gb105eukp | T7N9.1 | |
| 700356473H1 | g1002369 | 18 | 5 | gb105allp | coatomer protein | |
| 700382422H1 | g7758 | 29 | −12 | gb105eukp | crn | |
| 700382525H1 | g475046 | 12 | 7 | gb105eukp | putative cell wall protein | |
| 700354866H1 | g22416 | 31 | −33 | gb105pln | Z. mays mRNA for polygalacturonase (clone PG1). | |
| 700355839H1 | g18259 | 18 | −16 | gb105pln | C. sativus mRNA for cs DnaJ-1. | |
| 700382905H1 | g2746086 | 12 | −6 | gb105eukp | HvHAK1; putative high-affinity potassium transporter | |
| 700355576H1 | g927571 | 65 | −69 | gb105pln | Z. mays mRNA for calreticulin precursor. | |
| 700382640H1 | g2760173 | 20 | −4 | gb105pln | Arabidopsis thaliana genomic DNA, chromosome 5, P1 clone: MYH19, complete | |
| | | | | | sequence. | |
| 700356415H1 | g406661 | 15 | 1 | gb105allp | Calcium-binding protein | |
| 700354274H1 | g2285790 | 36 | −17 | gb105allp | p47 | |
| 700354392H1 | g22427 | 80 | −77 | gb105pln | Z. mays gene for polygalacturonase (clone 65). | |
| 700354277H1 | g181041 | 63 | −32 | gb105allp | cAMP response element regulatory protein | |
| 700382932H1 | g6711 | 25 | 1 | gb105eukp | F02A9.5 | |
| 700383151H1 | g2062155 | 29 | −11 | gb105eukp | T02O04.2; mitochondrial processing peptidase alpha subunit precursor isolog | |
| 700353231H1 | g22340 | 71 | −77 | gb105pln | Maize gene for heat shock protein 70 exon 1 (hsp70; clone pMON 9502). | |
| 700353092H1 | g1542940 | 33 | −22 | gb105pln | R. sativus L. (Saxa knacker) AACT mRNA. | |
| 700356177H1 | g1518539 | 26 | −3 | gb105pln | Glycine max UDP-glucose dehydrogenase mRNA, complete cds. | |
| 700355005H1 | g2827001 | 48 | −34 | gb105pln | Triticum aestivum 70 kDa heat shock protein (TaHSP70d) mRNA, complete cds. | |
| 700354625H1 | g1167836 | 9 | 7 | gb105eukp | hol lI; major group I allergen; protein with incomplete signal sequence | |
| 700382329H1 | g288373 | 99 | −84 | gb105pln | Z. mays PGg6 gene for polygalacturonase. | |
| 700282568H2 | g2444419 | 29 | −16 | gb105pln | Glycine max ribosome-associated protein p40 mRNA, complete cds. | |
| 700354871H1 | g854645 | 63 | −71 | gb105pln | Z. mays ZMM2 mRNA (partial). | |
| 700355160H1 | g2160155 | 16 | 15 | gb105pln | Sequence of BAC F21M12 from Arabidopsis thaliana chromosome 1, complete | |
| | | | | | sequence. | |
| 700352784H1 | g1523915 | 36 | −17 | gb105eukp | F25H2.10 | |
| 700354544H1 | g2760086 | 34 | −0 | gb105eukp | G8B7T7; leucine-rich repeat protein | |
| 700382850H1 | g664900 | 27 | −22 | gb105pln | C. plantagineum tkt3 gene for transketolase. | |
| 700354906H1 | g16427 | 25 | −3 | gb105eukp | protease inhibitor II | |
| 700356917H1 | g2677829 | 60 | −17 | gb105pln | Prunus armeniaca ribosomal protein L12 mRNA, complete cds. | |
| 700353067H1 | g1895083 | 63 | −57 | gb105pln | Zea mays golgi associated protein se-wap41 mRNA, complete cds. | |
| 700355855H1 | g21361 | 13 | 15 | gb105pln | Silene latifolia ssp. alba mRNA for ferredoxin precursor. | |
| 700382216H1 | g1805654 | 11 | 6 | gb105eukp | calmodulin-stimulated calcium-ATPase | |
| 700357106H1 | g493368 | 75 | 4 | gb105allp | S-adenosylmethionine synthetase 2 | |
| 700353222H1 | g527680 | 33 | −12 | gb105eukp | ribosomal protein S3 | |
| 700354990H1 | g16064 | 6 | 8 | gb105eukp | tam3; Tam3-transposase | |
| 700282420H2 | g1245689 | 9 | 3 | gb105eukp | F36D4.5 | |
| 700356123H1 | g414702 | 29 | −11 | gb105pln | H. lanatus mRNA for allergen Hol-lI. | |
| 700356820H1 | g1498389 | 76 | −82 | gb105pln | Zea mays actin (Maz81) gene, partial cds. | |
| 700354338H1 | g169975 | 11 | 7 | gb105eukp | vspA; vegetative storage protein | |
| 700356164H1 | g287829 | 54 | −59 | gb105pln | Z. mays gene for polygalacturonase. | |
| 700354295H1 | g3618 | 17 | −8 | gb105eukp | cyclophilin (AA 1-162) | |
| 700352862H1 | g2088643 | 28 | 6 | gb105allp | transcription factor SF3 isolog | |
| 700356113H1 | g168314 | 17 | −3 | gb105eukp | Lol pI; pollen allergen | |
| 700382079H1 | g2264304 | 30 | −30 | gb105pln | Arabidopsis thaliana genomic DNA, chromosome 5, P1 clone: MBG8, complete | |
| | | | | | sequence. | |
| 700382265H1 | g1051257 | 62 | −37 | gb105pln | Hordeum vulgare vacuolar ATPase catalytic subunit mRNA, partial cds. | |
| 700352954H1 | g790507 | 27 | 2 | gb105pln | Z. mays mRNA for 60S acidic ribosomal protein. | |
| 700355409H1 | g2088643 | 12 | 5 | gb105allp | transcription factor SF3 isolog | |
| 700282585H2 | g1167835 | 22 | −5 | gb105pln | H. lanatus mRNA for Hol lI protein. | |
| 700354921H1 | g2586083 | 11 | 8 | gb105allp | receptor kinase-like protein | |
| 700382546H1 | g398844 | 46 | −23 | gb105pln | Z. mays mRNA for beta 3 tubulin. | |
| 700356416H1 | g553123 | 12 | 2 | gb105eukp | ORF | |
| 700355006H1 | g499011 | 26 | −16 | gb105pln | S. vulgare SoAc1 mRNA. | |
| 700355484H1 | g173231 | 15 | 10 | gb105pln | Yeast (Saccharomyces cerevisiae) ribosomal 5S RNA-binding protein (YL3) gene, 5′ cds. | |
| 700354441H1 | g386812 | 30 | −19 | gb105allp | immunoglobulin kappa chain (V-J-C) | |
| 700382290H1 | g495227 | 31 | −0 | gb105eukp | TE13; acyl-ACP thioesterase | |
| 700354483H1 | g1890351 | 20 | −0 | gb105pln | A. thaliana mRNA for transcription factor L2. | |
| 700355083H1 | g902789 | 23 | −10 | gb105eukp | ILL1; ILL1 | |
| 700354492H1 | g486050 | 27 | −8 | gb105eukp | ORF YKL040c | |
| 700352978H1 | g2827001 | 65 | −6 | gb105pln | Triticum aestivum 70 kDa heat shock protein (TaHSP70d) mRNA, complete cds. | |
| 700382342H1 | g397958 | 42 | −69 | gb105pln | Z. mays mRNA for beta-amylase. | |
| 700354778H1 | g1438883 | 11 | 1 | gb105eukp | GmCK3p; EC 2.7.1.32 | |
| 700354471H1 | g2353354 | 12 | −11 | gb105eukp | cytochrome oxidase I | |
| 700356485H1 | g899607 | 92 | −56 | gb105pln | Zea mays polyubiquitin (MubC5) mRNA, complete cds. | |
| 700355865H1 | g168602 | 34 | −39 | gb105pln | Zea mays regulatory protein GF14-12 mRNA, complete cds. | |
| 700382091H1 | g22426 | 17 | −8 | gb105eukp | polygalacturonase | |
| 700353793H1 | g167040 | 22 | −16 | gb105pln | Barley elongation factor 1 alpha, (EF-1A) mRNA sequence. | |
| 700382319H1 | g288373 | 80 | −75 | gb105pln | Z. mays PGg6 gene for polygalacturonase. | |
| 700352636H1 | g1945365 | 9 | 4 | gb105allp | copper transport protein HAH1 | |
| 700354816H1 | g2244792 | 7 | 7 | gb105allp | ankyrin homolog | |
| 700354422H1 | g1167835 | 22 | −29 | gb105pln | H. lanatus mRNA for Hol lI protein. | |
| 700356170H1 | g1167835 | 22 | −2 | gb105pln | H. lanatus mRNA for Hol lI protein. | |
| 700354805H1 | g22651 | 24 | −31 | gb105pln | H. vulgare mRNA for GRP94 homologue. | |
| 700354918H1 | g22426 | 12 | 7 | gb105allp | polygalacturonase | |
| 700355245H1 | g393449 | 50 | −42 | gb105pln | S. cereale mRNA for beta-amylase. | |
| 700354260H1 | g304037 | 10 | 1 | gb105eukp | ENOD8; early nodulin | |
| 700353885H1 | g2239181 | 10 | 3 | gb105eukp | SPAC15A10.04c; hypothetical protein | |
| 700353917H1 | g22420 | 64 | 1 | gb105pln | Z. mays mRNA for polygalacturonase (clone PG2). | |
| 700354566H1 | g623585 | 13 | 3 | gb105pln | Nicotiana tabacum SR1 Nt-rab6 mRNA, complete cds. | |
| 700355163H1 | g22416 | 94 | −44 | gb105pln | Z. mays mRNA for polygalacturonase (clone PG1). | |
| 700355740H1 | g414907 | 27 | −11 | gb105pln | P. pratense mRNA for pollen allergen Ph1pI. | |
| 700355411H1 | g1771781 | 25 | −31 | gb105pln | T. aestivum mRNA for beta-amylase. | |
| 700355446H1 | g17789 | 26 | 2 | gb105allp | protein homologous to ascorbate oxidase | |
| 700356216H1 | g2191160 | 19 | 5 | gb105allp | Similar to pectinesterase | |
| 700353837H1 | g441486 | 6 | 8 | gb105allp | coatomer | |
| 700352726H1 | g514319 | 32 | −15 | gb105pln | Arabidopsis thaliana RNA polymerase II third largest subunit gene, complete cds. | |
| 700354627H1 | g1707854 | 41 | −48 | gb105pln | T. aestivum mRNA for obtusifoliol 14-alpha-demethylase (CYP51), clone w51, partial. | |
| 700282564H2 | g939780 | 28 | −22 | gb105pln | Zea mays MADS-box protein (ZAG5) mRNA, complete cds. | |
| 700354919H1 | g293888 | 47 | 5 | gb105pln | Zea mays, glyceraldehyde-3-phosphate dehydrogenase mRNA, 3′ end (clone GAPC2). | |
| 700356473H1 | g1237029 | 18 | 5 | gb105allp | alpha-cop protein | |
| 700382560H1 | g1185555 | 24 | −24 | gb105pln | Zea mays glyceraldehyde-3-phosphate dehydrogenase (gpc4) gene, partial cds. | |
| 700382871H1 | g2218151 | 12 | 16 | gb105pln | Vigna unguiculata type IIIa membrane protein cp-wap13 mRNA, complete cds. | |
| 700353952H1 | g1049080 | 14 | 6 | gb105allp | SRp40-1 | |
| 700355756H1 | g1532072 | 43 | −66 | gb105pln | Z. mays mRNA for S-adenosylmethionine decarboxylase. | |
| 700355825H1 | g515758 | 36 | −31 | gb105pln | Vitis vinifera (clone pGME1) malate dehydrogenase mRNA, complete cds. | |
| 700382107H1 | g508543 | 19 | 3 | gb105allp | integral membrane protein 1 | |
| 700354559H1 | g1213460 | 16 | −0 | gb105eukp | C subunit of V-ATPase; EC 3.6.1.35 | |
| 700352842H1 | g2262154 | 39 | −28 | gb105eukp | T10P11.20; predicted protein of unknown function | |
| 700355806H1 | g1788490 | 17 | 4 | gb105allp | hypothetical 32.9 kD protein in nfo-fruA intergenic region | |
| 700355934H1 | g170746 | 77 | −59 | gb105pln | Wheat histone H4 TH091 gene, complete cds. | |
| 700355522H1 | g22423 | 57 | −80 | gb105pln | Z. mays mRNA for polygalacturonase (clone PG4). | |
| 700353789H1 | g22425 | 31 | −30 | gb105pln | Z. mays gene for polygalacturonase (clone 47). | |
| 700355918H1 | g1922313 | 10 | 2 | gb105allp | kinesin-2 | |
| 700382055H1 | g790583 | 37 | −8 | gb105eukp | ATOZI1 | |
| 700355072H1 | g668984 | 48 | −23 | gb105pln | S. tuberosum TYKY1 mRNA for NADH:ubiquinone oxidoreductase. | |
| 700355324H1 | g1289304 | 20 | 7 | gb105eukp | TCP20; Tcp20p | |
| 700352977H1 | g166624 | 29 | 4 | gb105pln | A. thaliana ATPase gene, complete cds. | |
| 700353091H1 | g167107 | 40 | −58 | gb105pln | Hordeum vulgare vacuolar ATPase B subunit isoform mRNA, complete cds. | |
| 700355312H1 | g2828185 | 15 | −17 | gb105pln | Arabidopsis thaliana genomic DNA, chromosome 5, P1 clone: MUD21, complete | |
| | | | | | sequence. | |
| 700357422H1 | g2739367 | 27 | 6 | gb105eukp | T9J22.9; putative phosphatidylinositol-4-phosphate 5-kinase | |
| 700356134H1 | g1167473 | 15 | −0 | gb105eukp | C47E12.8 | |
| 700282529H2 | g1370165 | 34 | −26 | gb105pln | L. japonicus mRNA for small GTP-binding protein, RAB1C. | |
| 700352642H1 | g22277 | 78 | −73 | gb105pln | Maize mRNA for ferritin (clone FM2). | |
| 700354712H1 | g169472 | 23 | −18 | gb105pln | Potato alpha-glucan phosphorylase type H isozyme mRNA, complete cds. | |
| 700352660H1 | g414907 | 27 | −11 | gb105pln | P. pratense mRNA for pollen allergen PhlpI. | |
| 700352793H1 | g2369877 | 66 | −50 | gb105pln | Hordeum vulgare mRNA for m12 protein. | |
| 700352824H1 | g2688979 | 13 | 6 | gb105eukp | AtKUP1; high-affinity potassium transporter | |
| 700355270H1 | g313139 | 47 | 6 | gb105pln | Z. mays ZmPRO2 mRNA for profilin 2. | |
| 700354870H1 | g1015864 | 9 | 4 | gb105eukp | MNS1 | |
| 700282469H2 | g288366 | 62 | −85 | gb105pln | Z. mays PGg14 gene for polygalacturonase. | |
| 700352914H1 | g313137 | 44 | −7 | gb105pln | Z. mays ZmPRO1 mRNA for profilin 1. | |
| 700355426H1 | g496385 | 8 | 3 | gb105eukp | protein kinase | |
| 700355846H1 | g22427 | 58 | −60 | gb105pln | Z. mays gene for polygalacturonase (clone 65). | |
| 700353639H1 | g288611 | 91 | −79 | gb105pln | Z. mays PG gene for polygalacturonase. | |
| 700354467H1 | g459425 | 11 | 12 | gb105pln | B. oleracea L. gene for aspartic protease (partial). | |
| 700353565H1 | g1665777 | 33 | 2 | gb105allp | Similar to S. cerevisiae EMP70 protein precursor (S25110) | |
| 700382607H1 | g1209258 | 20 | 2 | gb105allp | protease inhibitor II | |
| 700356163H1 | g908894 | 6 | 5 | gb105eukp | SPAC13C5.05c; unknown | |
| 700354947H1 | g531031 | 79 | −17 | gb105pln | Pennisetum ciliare apomixis-associated mRNA. | |
| 700354738H1 | g2696803 | 37 | −56 | gb105pln | Oryza sativa mRNA for water channel protein, complete cds. | |
| 700354736H1 | g688011 | 9 | 4 | gb105allp | AgX-1 antigen [human, infertile patient, testis, Peptide, 505 aa] | |
| 700352755H1 | g600768 | 44 | −23 | gb105pln | Oryza sativa cyclophilin 2 (Cyp2) mRNA, complete cds. | |
| 700356230H1 | g2668737 | 59 | −37 | gb105pln | Zea mays translation initiation factor 5A (TIF5A) mRNA, complete cds. | |
| 700354821H1 | g520478 | 15 | 2 | gb105eukp | pyruvate dehydrogenase E1 beta subunit | |
| 700353924H1 | g2264304 | 20 | −11 | gb105pln | Arabidopsis thaliana genomic DNA, chromosome 5, P1 clone: MBG8, complete | |
| | | | | | sequence. | |
| 700356762H1 | g2829910 | 12 | 8 | gb105eukp | F22K20.5 | |
| 700353961H1 | g288373 | 51 | −59 | gb105pln | Z. mays PGg6 gene for polygalacturonase. | |
| 700382168H1 | g1399563 | 40 | −55 | gb105pln | Hydrastis canadensis nuclear 26S ribosomal RNA gene, partial sequence. | |
| 700282529H2 | g303731 | 35 | −26 | gb105pln | Pea mRNA for GTP-binding protein, complete cds. | |
| 700353178H1 | g22458 | 71 | −50 | gb105pln | Z. mays pollen specific mRNA C-terminal (clone 4H7). | |
| 700354941H1 | g435542 | 71 | −52 | gb105pln | Z. mays mRNA for calmodulin. | |
| 700356073H1 | g288373 | 40 | −61 | gb105pln | Z. mays PGg6 gene for polygalacturonase. | |
| 700383118H1 | g2688829 | 31 | −20 | gb105pln | Prunus armeniaca putative sugar transporter mRNA, complete cds. | |
| 700354503H1 | g603848 | 25 | −44 | gb105pln | H. vulgare mRNA for L-Glutamate: tRNA-Glu ligase. | |
| 700383151H1 | g587562 | 30 | −12 | gb105eukp | MPP; mitochondrial processing peptidase | |
| 700282404H2 | g1314064 | 4 | 8 | gb105allp | unknown | |
| 700382383H1 | g1145692 | 30 | −20 | gb105pln | Arabidopsis thaliana actin (ACT1) gene, complete cds. | |
| 700352776H1 | g902583 | 59 | −53 | gb105pln | Zea mays clone MubG1 ubiquitin gene, complete cds. | |
| 700355463H1 | g22427 | 30 | −61 | gb105pln | Z. mays gene for polygalacturonase (clone 65). | |
| 700355459H1 | g2738247 | 53 | −41 | gb105pln | Arabidopsis thaliana cobalamin-independent methionine synthase (ATCIMS) mRNA, | |
| | | | | | complete cds. | |
| 700356858H1 | g1236961 | 10 | −1 | gb105eukp | hydrolysis of the cyanogenic glucoside (R)-prunasin; prunasin hydrolase precursor; | |
| | | | | | EC 3.2.1.21 | |
| 700354412H1 | g22416 | 56 | −17 | gb105pln | Z. mays mRNA for polygalacturonase (clone PG1). | |
| 700382152H1 | g1854550 | 14 | 2 | gb105allp | red-1 | |
| 700356233H1 | g293886 | 87 | −55 | gb105pln | Zea mays glyceraldehyde-3-phosphate dehydrogenase mRNA, 3′ end, (clone GAPC3). | |
| 700382901H1 | g1125691 | 21 | 4 | gb105eukp | dnaJ; DnaJ protein | |
| 700354778H1 | g1438879 | 9 | 1 | gb105eukp | GmCK1p; EC 2.7.1.32 | |
| 700355484H1 | g2599103 | 16 | 10 | gb105pln | Dunaliella salina 60S ribosomal protein (DSRP1) mRNA, complete cds. | |
| 700353109H1 | g1616613 | 40 | −22 | gb105pln | N. plumbaginifolia mRNA for small GTP-binding protein, clone Np43GTP. | |
| 700354287H1 | g2811223 | 36 | −22 | gb105pln | Arabidopsis thaliana fimbrin 1 mRNA, partial cds. | |
| 700353032H1 | g710349 | 41 | −12 | gb105pln | Lupinus albus farnesyl pyrophosphate synthase (fps1) mRNA, complete cds. | |
| 700382064H1 | g2832717 | 28 | −14 | gb105eukp | alinv; sucrose hydrolysis; alkaline/neutral invertase | |
| 700383088H1 | g206436 | 55 | −18 | gb105allp | protstatein C3 subunit | |
| 700282442H2 | g1314049 | 22 | 5 | gb105allp | archain/delta-COP | |
| 700352827H1 | g2598045 | 11 | −3 | gb105eukp | spPMP20; PMP20 | |
| 700382221H1 | g288366 | 75 | −51 | gb105pln | Z. mays PGg14 gene for polygalacturonase. | |
| 700353951H1 | g2316016 | 11 | 6 | gb105allp | MRP-like ABC transporter | |
| 700282510H2 | g22606 | 17 | 7 | gb105pln | H. vulgare mRNA for 14-3-3 protein homologue (14-3-3a). | |
| 700356180H1 | g2384759 | 38 | −16 | gb105pln | Oryza sativa GDP dissociation inhibitor protein OsGDI2 (OsGDI2) mRNA, | |
| | | | | | complete cds. | |
| 700383116H1 | g2160172 | 21 | −12 | gb105eukp | F21M12.20 | |
| 700354224H1 | g22418 | 63 | 5 | gb105pln | Z. mays gene for polygalacturonase (clone 17). | |
| 700282504H2 | g2073489 | 18 | 6 | gb105allp | glutaredoxin like-protein | |
| 700355159H1 | g22456 | 50 | −57 | gb105pln | Z. mays pollen specific mRNA C-terminal (clone 3C12). | |
| 700354405H1 | g2815251 | 22 | 11 | gb105pln | A. thaliana gene for ubiquitin carrier protein. | |
| 700353685H1 | g886401 | 25 | 4 | gb105allp | MADS box protein | |
| 700353180H1 | g1181332 | 43 | −61 | gb105pln | Z. mays CRH mRNA. | |
| 700353068H1 | g899607 | 70 | −61 | gb105pln | Zea mays polyubiquitin (MubC5) mRNA, complete cds. | |
| 700356256H1 | g248336 | 61 | −72 | gb105pln | polyubiquitin [maize, Genomic, 3841 nt]. | |
| 700382107H1 | g624704 | 17 | 4 | gb105allp | putative transmembrane protein precursor | |
| 700353266H1 | g2444419 | 50 | −45 | gb105pln | Glycine max ribosome-associated protein p40 mRNA, complete cds. | |
| 700356544H1 | g2288988 | 26 | 7 | gb105allp | hypothetical protein | |
| 700382804H1 | g2886511 | 51 | −28 | gb105pln | Z. mays PG gene for polygalacturonase. | |
| 700354301H1 | g2244991 | 18 | −33 | gb105pln | Arabidopsis thaliana DNA chromosome 4, ESSA I contig fragment No. 6. | |
| 700355295H1 | g16210 | 52 | 1 | gb105pln | Arabidopsis thaliana calnexin homolog. | |
| 700356028H1 | g2463334 | 59 | −26 | gb105pln | Oryza sativa mRNA for ribosomal protein S4. | |
| 700352674H1 | g18440 | 43 | −30 | gb105pln | Euglena gracilis mRNA for beta-tubulin. | |
| 700352982H1 | g1136121 | 66 | −39 | gb105pln | O. sativa mRNA for alpha-tubulin (clone OSTA-136). | |
| 700383014H1 | g414907 | 22 | −6 | gb105pln | P. pratense mRNA for pollen allergen PhlpI. | |
| 700355407H1 | g2335089 | 11 | 16 | gb105pln | Arabidopsis thaliana chromosome II BAC T11A07 genomic sequence, complete | |
| | | | | | sequence. | |
| 700382376H1 | g857393 | 27 | −4 | gb105eukp | mitotic cyclin a1-type | |
| 700356216H1 | g886130 | 16 | 5 | gb105eukp | putative pectinesterase | |
| 700354738H1 | g1667593 | 36 | −53 | gb105pln | Oryza sativa transmembrane protein mRNA, complete cds. | |
| 700354307H1 | g500750 | 84 | −36 | gb105pln | Zea mays ferredoxin-NADP reductase mRNA, partial cds. | |
| 700354604H1 | g2809258 | 23 | −17 | gb105eukp | F21B7.27 | |
| 700354696H1 | g2154727 | 49 | −35 | gb105pln | C. dactylon mRNA for profilin 2. | |
| 700355413H1 | g22427 | 98 | −87 | gb105pln | Z. mays gene for polygalacturonase (clone 65). | |
| 700354340H1 | g438312 | 13 | 1 | gb105allp | Immune suppressor factor J6B7 precursor | |
| 700356143H1 | g1815759 | 17 | 5 | gb105eukp | pollen-specific protein | |
| 700282438H2 | g2695928 | 18 | 5 | gb105pln | Hordeum vulgare mRNA for putative thiol protease, clone RG42. | |
| 700382789H1 | g22275 | 79 | −72 | gb105pln | Maize mRNA for ferritin (clone FM1). | |
| 700355977H1 | g1747295 | 69 | −56 | gb105pln | Rice mRNA for vacuolar H+-pyrophosphatase, complete cds. | |
| 700382231H1 | g974779 | 21 | −10 | gb105pln | B. vulgaris mRNA for small G protein (clone 1S5). | |
| 700354351H1 | g184657 | 15 | 2 | gb105allp | transfer RNA-Trp synthetase | |
| 700353164H1 | g22174 | 11 | 16 | gb105pln | Maize Aux311 gene for auxin-binding protein. | |
| 700382634H1 | g22514 | 48 | −54 | gb105pln | Maize Zc1 gene for Zein Zc1 (14 kD zein-2). | |
| 700382209H1 | g2275006 | 38 | −31 | gb105pln | Hordeum vulgare mRNA for expressed sequence tag. | |
| 700354874H1 | g248336 | 33 | −49 | gb105pln | polyubiquitin [maize, Genomic, 3841 nt]. | |
| 700354734H1 | g288366 | 76 | −69 | gb105pln | Z. mays PGg14 gene for polygalacturonase. | |
| 700353531H1 | g1805653 | 14 | 11 | gb105pln | B. oleracea BCA1 mRNA for Ca2+-ATPase. | |
| 700353239H1 | g2739370 | 15 | −5 | gb105eukp | T9J22.12; putative pectinesterase | |
| 700382105H1 | g1167835 | 26 | −7 | gb105pln | H. lanatus mRNA for Hol lI protein. | |
| 700354304H1 | g596084 | 22 | −13 | gb105eukp | ribosomal protein YL6 (L5) | |
| 700356575H1 | g2415697 | 18 | −21 | gb105pln | P. pratense mRNA for profilin 2. | |
| 700382373H1 | g1532047 | 15 | 1 | gb105pln | O. sativa mRNA for S-adenosylmethionine decarboxylase. | |
| 700354652H1 | g473359 | 29 | −13 | gb105pln | P. pratense mRNA for Phl pI allergen. | |
| 700355061H1 | g287834 | 48 | −24 | gb105pln | Z. mays yptm2 cDNA. | |
| 700353883H1 | g1209258 | 20 | 2 | gb105allp | protease inhibitor II | |
| 700354553H1 | g1737218 | 56 | −8 | gb105eukp | vacuolar sorting receptor homolog | |
| 700355988H1 | g1039357 | 10 | −5 | gb105eukp | flavonol synthase | |
| 700356270H1 | g1449162 | 28 | −11 | gb105pln | Glycyrrhiza glabra mRNA for squalene synthase, complete cds (GGSQS1). | |
| 700354259H1 | g886470 | 33 | −37 | gb105pln | C. roseus MetE mRNA for methionine synthase. | |
| 700352933H1 | g288373 | 98 | −21 | gb105pln | Z. mays PGg6 gene for polygalacturonase. | |
| 700382895H1 | g1839188 | 17 | −4 | gb105eukp | RHD3; putative GTP-binding protein; root hair defective 3 | |
| 700382972H1 | g313141 | 24 | −30 | gb105pln | Z. mays ZmPRO3 mRNA for profilin 3. | |
| 700382254H1 | g2293565 | 58 | −51 | gb105pln | Oryza sativa ADP-ribosylation factor 1 (Os-ARF1) mRNA, complete cds. | |
| 700354938H1 | g2154727 | 35 | −21 | gb105pln | C. dactylon mRNA for profilin 2. | |
| 700353802H1 | g2351580 | 16 | −8 | gb105eukp | thymidine diphospho-glucose 4-6-dehydratase homolog | |
| 700352707H1 | g736271 | 34 | −50 | gb105pln | O. sativa hsp70 gene for heat shock protein 70. | |
| 700356196H1 | g2384757 | 27 | −9 | gb105pln | Oryza sativa GDP dissociation inhibitor protein OsGDI1 (OsGDI1) mRNA, | |
| | | | | | complete cds. | |
| 700353823H1 | g2446980 | 21 | −7 | gb105pln | Arabidopsis thaliana mRNA for AtGDI2, complete cds. | |
| 700382428H1 | g575354 | 19 | −20 | gb105pln | O. sativa SC34 mRNA for tumor suppressor. | |
| 700355542H1 | g433041 | 18 | −24 | gb105pln | Zea mays W-22 clone PREM-1B retroelement PREM-1, partial sequence. | |
| 700356750H1 | g288366 | 70 | −25 | gb105pln | Z. mays PGg14 gene for polygalacturonase. | |
| 700356606H1 | g1864023 | 48 | −13 | gb105pln | Cynodon dactylon calcium-binding pollen allergen gene, partial cds. | |
| 700355887H1 | g166385 | 29 | −40 | gb105pln | Medicago sativa isocitrate dehydrogenase mRNA, 3′ end cds. | |
| 700356223H1 | g21629 | 36 | −54 | gb105pln | Sorghum vulgare mRNA for phosphoenolpyruvate carboxylase (PEPC). | |
| 700357439H1 | g2645162 | 34 | 4 | gb105pln | Oryza sativa mRNA, similar to initiation factor eIF-4c. | |
| 700354379H1 | g1184771 | 80 | −73 | gb105pln | Zea mays glyceraldehyde-3-phosphate dehydrogenase GAPC2 (gpc2) mRNA, | |
| | | | | | complete cds. | |
| 700356123H1 | g414907 | 28 | −14 | gb105pln | P. pratense mRNA for pollen allergen PhlpI. | |
| 700382263H1 | g473359 | 32 | −7 | gb105pln | P. pratense mRNA for PhlpI allergen. | |
| 700352940H1 | g17561 | 16 | 8 | gb105allp | PROTEINASE INHIBITOR | |
| 700354961H1 | g1173557 | 26 | 5 | gb105allp | Ory s 1 | |
| 700356193H1 | g2828188 | 19 | 5 | gb105pln | Arabidopsis thaliana genomic DNA, chromosome 5, TAC clone: K3I3, complete | |
| | | | | | sequence. | |
| 700355590H1 | g2384757 | 34 | −17 | gb105pln | Oryza sativa GDP dissociation inhibitor protein OsGDI1 (OsGDI1) mRNA, | |
| | | | | | complete cds. | |
| 700354469H1 | g313759 | 55 | −41 | gb105pln | Z. mays hsp 70-1 gene for heat shock protein 70. | |
| 700354922H1 | g2213582 | 7 | 7 | gb105eukp | T7N9.2 | |
| 700353531H1 | g509809 | 16 | −3 | gb105pln | Arabidopsis thaliana chloroplast envelope Ca2+-ATPase (PEA1) mRNA, complete cds. | |
| 700352617H1 | g453975 | 41 | −42 | gb105pln | P. pratense mRNA for profilin-Phl p XI. | |
| 700382820H1 | g562074 | 14 | 3 | gb105allp | ribosomal protein L35 | |
| 700354945H1 | g1184773 | 62 | −44 | gb105pln | Zea mays glyceraldehyde-3-phosphate dehydrogenase GAPC3 (gpc3) mRNa, | |
| | | | | | complete cds. | |
| 700356777H1 | g450548 | 65 | −22 | gb105pln | O. sativa (pRSAM-1) gene for S-adenosyl methionine synthetase. | |
| 700382376H1 | g1665741 | 25 | −4 | gb105eukp | cyclin | |
| 700356248H1 | g248338 | 62 | −22 | gb105pln | polyubiquitin [maize, Genomic, 3439 nt]. | |
| 700356747H1 | g21599 | 37 | 1 | gb105eukp | UTP-glucose-1-phosphate uridylyltransferase; EC 2.7.7.9 | |
| 700354570H1 | g19501 | 33 | 1 | gb105eukp | pPLZ12 gene product (AA 1-184) | |
| 700352888H1 | g1872523 | 36 | −8 | gb105eukp | LSD1; negative regulator of cell death; zinc-finger protein Lsd1 | |
| 700354338H1 | g169898 | 11 | 7 | gb105eukp | 28 kDa protein | |
| 700382068H1 | g2494106 | 11 | 7 | gb105pln | Arabidopsis thaliana chromosome 1 YAC yUP8H12R, complete sequence. | |
| 700382173H1 | g288378 | 97 | −79 | gb105pln | Z. mays gene PG for polygalacturonase. | |
| 700355854H1 | g550306 | 6 | 7 | gb105eukp | ATPME1 | |
| 700356643H1 | g288611 | 48 | −30 | gb105pln | Z. mays PG gene for polygalacturonase. | |
| 700382758H1 | g1707639 | 70 | −64 | gb105pln | O. sativa mRNA for transcription activator, GAMyb. | |
| 700382237H1 | g1906830 | 20 | 1 | gb105eukp | hsp88.1; heat shock protein | |
| 700352923H1 | g288373 | 100 | −57 | gb105pln | Z. mays PGg6 gene for polygalacturonase. | |
| 700382818H1 | g633135 | 39 | −30 | gb105pln | Zostera marina mRNA for putative plasma membrane H+-ATPase, complete cds. | |
| 700355414H1 | g1835730 | 17 | −5 | gb105pln | Oryza sativa photosystem II 10 kDa polypeptide mRNa, complete cds. | |
| 700354324H1 | g2505865 | 13 | −11 | gb105eukp | putative topoisomerase | |
| 700352677H1 | g303852 | 63 | −53 | gb105pln | Rice mRNa for ribosomal protein L3, complete cds. | |
| 700356611H1 | g1051257 | 55 | −12 | gb105pln | Hordeum vulgare vacuolar ATPase catalytic subunit mRNA, partial cds. | |
| 700354856H1 | g1388021 | 19 | −6 | gb105eukp | UGPase; UDP-glucose pyrophosphorylase; EC 2.7.7.9 | |
| 700356819H1 | g1679760 | 10 | 3 | gb105eukp | chk-1; two-component histidine kinase CHK-1 | |
| 700354681H1 | g313137 | 48 | −28 | gb105pln | Z. mays ZmPRO1 mRNA for profilin 1. | |
| 700382283H1 | g2317906 | 10 | 6 | gb105eukp | T7I23.6; ARA-5 | |
| 700353045H1 | g1419367 | 23 | −20 | gb105pln | Z. mays ZmABP2 mRNA for actin depolymerizing factor. | |
| 700356413H1 | g1899026 | 28 | −37 | gb105pln | Zea mays superoxide dismutase 4A (sod4A) gene, complete cds. | |
| 700354878H1 | g2661608 | 16 | −1 | gb105eukp | SPAC10F6.03c; hypothetical ctp synthase | |
| 700353643H1 | g872315 | 8 | 6 | gb105allp | 40S ribosomal protein S12 | |
| 700356468H1 | g498745 | 12 | 6 | gb105eukp | PIR7b; Pir7b | |
| 700354304H1 | g599981 | 22 | −13 | gb105eukp | putative 60S ribosomal protein | |
| 700282455H2 | g22427 | 52 | −80 | gb105pln | Z. mays gene for polygalacturonase (clone 65). | |
| 700353260H1 | g2262173 | 19 | −4 | gb105eukp | F5J6.18; NADPH thioredoxin reductase | |
| 700356666H1 | g1777706 | 62 | −27 | gb105pln | Zea mays 18S ribosomal RNA gene, partial sequence. | |
| 700354754H1 | g460042 | 27 | −7 | gb105eukp | DBF3; involved in the control of S phase and pre-mRNA splicing | |
| 700382546H1 | g416144 | 50 | −27 | gb105pln | Zea mays beta-4 tubulin (tub4) mRNA, complete cds. | |
| 700382181H1 | g2145472 | 34 | −16 | gb105pln | S. tuberosum mRNA for aconitase/aconitate hydratase. | |
| 700354787H1 | g2464934 | 23 | −6 | gb105eukp | serine C-palmitoyltransferase homolog | |
| 700354280H1 | g22420 | 73 | −57 | gb105pln | Z. mays mRNA for polygalacturonase (clone PG2). | |
| 700352970H1 | g1279254 | 33 | −8 | gb105eukp | C35A5.9 | |
| 700355701H1 | g287829 | 41 | −11 | gb105pln | Z. mays gene for polygalacturonase. | |
| 700354822H1 | g1483150 | 7 | 5 | gb105eukp | monodehydroascorbate reductase | |
| 700355950H1 | g2583106 | 16 | 10 | gb105pln | Arabidopsis thaliana chromosome II BAC F4L23 genomic sequence, complete sequence. | |
| 700352694H1 | g288373 | 74 | −66 | gb105pln | Z. mays PGg6 gene for polygalacturonase. | |
| 700357140H1 | g22062 | 21 | −7 | gb105eukp | sulfydryl-pre-endopeptidase (AA −20 to 342) | |
| 700353620H1 | g168423 | 87 | −86 | gb105pln | Zea mays polypeptide chain-binding protein mRNa, 3′ end. | |
| 700352788H1 | g2791948 | 15 | −0 | gb105eukp | rp113a; ribosomal protein L13a | |
| 700354960H1 | g1666175 | 54 | 5 | gb105allp | ubiquitin | |
| 700354636H1 | g2618602 | 11 | 13 | gb105pln | Arabidopsis thaliana genomic DNA, chromosome 5, P1 clone: MSJ1, complete | |
| | | | | | sequence. | |
| 700382804H1 | g288378 | 36 | −15 | gb105pln | Z. mays gene PG for polygalacturonase. | |
| 700355188H1 | g1498052 | 94 | −86 | gb105pln | Zea mays ribosomal protein S8 mRNA, complete cds. | |
| 700355978H1 | g1813595 | 14 | −2 | gb105eukp | xylan endohydrolase isoenzyme X-I; EC 3.2.1.8 | |
| 700383195H1 | g531757 | 14 | 11 | gb105pln | Yeast (Saccharomyces cerevisiae) YTA5 gene. | |
| 700382512H1 | g289212 | 23 | −4 | gb105pln | Atriplex nummularia homologous sequence (ANJ1) mRNA. | |
| 700353565H1 | g2814799 | 29 | 4 | gb105eukp | ZK858.6 | |
| 700382034H1 | g601789 | 23 | −11 | gb105eukp | AFC2; protease kinase | |
| 700352909H1 | g429148 | 43 | −18 | gb105pln | Z. mays pep gene for (C3 type) phosphoendopyruvate carboxylase. | |
| 700353867H1 | g17789 | 15 | −2 | gb105eukp | Bp10 | |
| 700353165H1 | g2661840 | 14 | −6 | gb105eukp | adk; adenosine kinase; EC 2.7.1.20 | |
| 700355238H1 | g2252639 | 14 | −2 | gb105pln | Genomic sequence of Arabidopsis BAC F8A5, complete sequence. | |
| 700352855H1 | g16119 | 23 | −36 | gb105pln | Oat spe1 mRNA for arginine decarboxylase (EC 4.1.1.19). | |
| 700383102H1 | g288611 | 60 | −49 | gb105pln | Z. mays PG gene for polygalacturonase. | |
| 700382091H1 | g287830 | 17 | −8 | gb105eukp | polygalacturonase | |
| 700355401H1 | g409072 | 7 | 5 | gb105allp | HBp15/L22 | |
| 700383152H1 | g22324 | 30 | −38 | gb105pln | Z. mays mRNA for H2B histone (clone cH2B2210). | |
| 700382658H1 | g722325 | 53 | −68 | gb105pln | Zea mays clone Zm-Rab2-A GTP binding protein (rab2) mRNA, complete cds. | |
| 700355346H1 | g2624199 | 18 | −5 | gb105pln | M. acuminata mRNA; clone pBAN UU93. | |
| 700354941H1 | g2809480 | 54 | −36 | gb105pln | Oryza sativa calmodulin (CaM2) mRNA, complete cds. | |
| 700282526H2 | g166581 | 22 | −7 | gb105pln | A. thaliana AAc1 gene encoding actin-1, complete cds. | |
| 700355411H1 | g397958 | 40 | −69 | gb105pln | Z. mays mRNA for beta-amylase. | |
| 700354828H1 | g22456 | 50 | −52 | gb105pln | Z. mays pollen specific mRNA C-terminal (clone 3C12). | |
| 700354737H1 | g603280 | 9 | 2 | gb105eukp | YER047C; Yer047cp | |
| 700354387H1 | g1143156 | 14 | −4 | gb105eukp | acyl-ACP thioesterase | |
| 700354363H1 | g499011 | 56 | −46 | gb105pln | S. vulgare SoAc1 mRNA. | |
| 700353209H1 | g1246115 | 21 | 1 | gb105pln | major allergen Pha a1 [Phalaris aquatica = canary grass, pollen, mRNA Partial, | |
| | | | | | 1088 nt]. | |
| 700282578H2 | g22243 | 13 | 4 | gb105pln | Zea mays Cin1 repeat from Cin1 middle repetitive family. | |
| 700355035H1 | g602564 | 32 | −1 | gb105pln | C. paradisi (Macf) INO1 gene. | |
| 700355748H1 | g436051 | 38 | −39 | gb105pln | Rice mRNA for branching enzyme-3, complete cds. | |
| 700356174H1 | g1750379 | 28 | −6 | gb105pln | Eucalyptus globulus NADP-isocitrate dehydrogenase (EgICDH) mRNA, complete cds. | |
| 700353917H1 | g22416 | 64 | 1 | gb105pln | Z. mays mRNA for polygalacturonase (clone Pg1). | |
| 700382241H1 | g2191175 | 11 | 2 | gb105allp | No definition line found | |
| 700352764H1 | g600768 | 52 | −38 | gb105pln | Oryza sativa cyclophilin 2 (Cyp2) mRNA, complete cds. | |
| 700353025H1 | g22606 | 33 | −31 | gb105pln | H. vulgare mRNA for 14-3-3 protein homologue (14-3-3a). | |
| 700353019H1 | g16427 | 16 | 8 | gb105eukp | protease inhibitor II | |
| 700356564H1 | g20321 | 45 | −48 | gb105pln | Oryza sativa RAc1 mRNA for actin. | |
| 700355719H1 | g1817548 | 15 | 4 | gb105allp | phosphoethanolamine citidylyltransferase | |
| 700352834H1 | g2342717 | 15 | 16 | gb105pln | Arabidopsis thaliana chromosome II BAC T14G11 genomic sequence, complete | |
| | | | | | sequence. | |
| 700353151H1 | g21479 | 24 | −3 | gb105eukp | hsp70; 70-Kd heat shock protein | |
| 700357145H1 | g2431770 | 92 | −88 | gb105pln | Zea mays acidic ribosomal protein P2b (rpp2b) mRNA, complete cds. | |
| 700353954H1 | g1052973 | 34 | −13 | gb105eukp | fructokinase; EC 2.7.1.4 | |
| 700357143H1 | g288366 | 76 | −72 | gb105pln | Z. mays PGg14 gene for polygalacturonase. | |
| 700355236H1 | g2827079 | 62 | −3 | gb105pln | Medicago sativa mitochondrial malate dehydrogenase precursor (mmdh) mRNA, nuclear | |
| | | | | | gene encoding mitochondrial protein, complete cds. | |
| 700355307H1 | g2351070 | 13 | 12 | gb105pln | Arabidopsis thaliana genomic DNA, chromosome 5, P1 clone: MTH12. | |
| 700355958H1 | g20321 | 72 | −62 | gb105pln | Oryza sativa RAc1 mRNA for actin. | |
| 700382325H1 | g2425100 | 13 | 12 | gb105pln | Oryza sativa cationic peroxidase (OsCPX1) mRNA, complete cds. | |
| 700352955H1 | g1165139 | 74 | −19 | gb105allp | ribosomal protein L4 | |
| 700356415H1 | g169481 | 15 | 7 | gb105eukp | calcium-binding protein | |
| 700354943H1 | g1314090 | 15 | 6 | gb105allp | unknown | |
| 700356472H1 | g2351066 | 30 | 4 | gb105pln | Arabidopsis thaliana genomic DNA, chromosome 5, P1 clone: MOP9. | |
| 700354719H1 | g2370497 | 7 | −3 | gb105eukp | SPAC25H1.08c; beta transducin | |
| 700355191H1 | g1732518 | 32 | −12 | gb105pln | Arabidopsis thaliana Rho1Ps homolog mRNA, complete cds. | |
| 700354407H1 | g2341032 | 12 | −5 | gb105eukp | F19P19.11 | |
| 700355982H1 | g313151 | 26 | −10 | gb105pln | A. thaliana ribosomal protein S15 mRNA, complete cds. | |
| 700352708H1 | g1789489 | 10 | −1 | gb105allp | hypothetical 37.4 kD protein in exuR-tdcC intergenic region | |
| 700382886H1 | g22427 | 48 | −59 | gb105pln | Z. mays gene for polygalacturonase (clone 65). | |
| 700355542H1 | g433037 | 19 | −29 | gb105pln | Zea mays W-22 clone cDNA4 retroelement PREM-1-containing mRNA. | |
| 700357165H1 | g899607 | 56 | −53 | gb105pln | Zea mays polyubiquitin (MubC5) mRNA, complete cds. | |
| 700353072H1 | g2394434 | 21 | −4 | gb105eukp | F23F1.8 | |
| 700352759H1 | g2431768 | 35 | −29 | gb105pln | Zea mays acidic ribosomal protein P1a (rpp1a) mRNA, complete cds. | |
| 700354866H1 | g287829 | 31 | −35 | gb105pln | Z. mays gene for polygalacturonase. | |
| 700353844H1 | g22458 | 27 | −21 | gb105pln | Z. mays pollen specific mRNA C-terminal (clone 4H7). | |
| 700355829H1 | g168557 | 44 | 4 | gb105pln | Zea mays putative GTP-binding protein homolog mRNA, partial cds. | |
| 700355812H1 | g22427 | 70 | −88 | gb105pln | Z. mays gene for polygalacturonase (clone 65). | |
| 700354918H1 | g287830 | 12 | 7 | gb105eukp | polygalacturonase | |
| 700357449H1 | g2443388 | 65 | −6 | gb105eukp | calcium-dependent protein kinase-related kinase | |
| 700354517H1 | g506792 | 26 | 6 | gb105allp | Sec61 protein complex gamma subunit | |
| 700355573H1 | g643596 | 88 | −84 | gb105pln | Corn mRNA for cysteine proteinase, clone CCP, complete cds. | |
| 700382866H1 | g1173555 | 35 | −14 | gb105eukp | galE; catabolism of galactose to glucose in Leloir pathway, and in galactose synthesis | |
| | | | | | from glucose.; UDP-galactose-4-epimerase; EC 5.1.3.2 | |
| 700282485H2 | g2739020 | 11 | 17 | gb105pln | Rhododendron metternichii var. hondoense CT, AT, GT repeat, genomic sequence. | |
| 700382688H1 | g2266994 | 9 | 2 | gb105allp | O-linked GlcNAc transferase | |
| 700355467H1 | g1246887 | 8 | 6 | gb105allp | alpha-L-arabinofuranosidase A | |
| 700356285H1 | g1498241 | 21 | −7 | gb105eukp | MRF1 | |
| 700382518H1 | g22314 | 32 | 2 | gb105pln | Maize mRNA for GSH gluthathione S-transferase I (GST; EC 2.5.1.18). | |
| 700382730H1 | g1469809 | 23 | −4 | gb105allp | nuclear protein, NP220 | |
| 700282516H2 | g166581 | 13 | −3 | gb105pln | A. thaliana AAc1 gene encoding actin-1, complete cds. | |
| 700352942H1 | g1769965 | 36 | −18 | gb105pln | B. napus mRNA for enoyl reductase. | |
| 700353071H1 | g1848211 | 38 | −20 | gb105pln | N. tabacum mRNA for protein disulfide-isomerase precursor. | |
| 700352952H1 | g288373 | 100 | −87 | gb105pln | Z. mays PGg6 gene for polygalacturonase. | |
| 700356833H1 | g1888359 | 19 | −13 | gb105eukp | KAS III; 3-ketoacyl-acyl carrier protein synthase III | |
| 700356253H1 | g21624 | 26 | 13 | gb105pln | S. vulgare mRNA for glycine-rich RNA-binding protein (clone S2). | |
| 700382512H1 | g1872162 | 17 | 2 | gb105pln | Arabidopsis thaliana DnaJ homolog (atj) mRNA, complete cds. | |
| 700382412H1 | g22421 | 92 | −16 | gb105pln | Z. mays mRNA for polygalacturonase (clone PG3). | |
| 700382473H1 | g1669599 | 15 | −4 | gb105eukp | AR791 | |
| 700355867H1 | g1707854 | 57 | −51 | gb105pln | T. aestivum mRNA for obtusifoliol 14-alpha-demethylase (CYP51), clone w51, partial. | |
| 700355844H1 | g2292907 | 14 | −4 | gb105eukp | P-glycoprotein homologue | |
| 700353047H1 | g459197 | 60 | −19 | gb105pln | Gossypium hirsutum vacuolar H+-ATPase subunit B mRNA, complete cds. | |
| 700356193H1 | g1518539 | 27 | −3 | gb105pln | Glycine max UDP-glucose dehydrogenase mRNA, complete cds. | |
| 700355413H1 | g22456 | 100 | −86 | gb105pln | Z. mays pollen specific mRNA C-terminal (clone 3C12). | |
| 700356814H1 | g1167835 | 27 | −23 | gb105pln | H. lanatus mRNA for Hol lI protein. | |
| 700353917H1 | g22421 | 64 | 1 | gb105pln | Z. mays mRNA for polygalacturonase (clone PG3). | |
| 700354271H1 | g22426 | 16 | −0 | gb105eukp | polygalacturonase | |
| 700354577H1 | g1777413 | 35 | 3 | gb105pln | Aspergillus niger 26S proteasome subunit (tbpA) gene, complete cds. | |
| 700353524H1 | g22636 | 42 | 7 | gb105eukp | 70 kDa heat shock protein | |
| 700355436H1 | g1184771 | 65 | −73 | gb105pln | Zea mays glyceraldehyde-3-phosphate dehydrogenase GAPC2 (gpc2) mRNA, | |
| | | | | | complete cds. | |
| 700354663H1 | g21953 | 23 | 3 | gb105eukp | Li; beta-glucosidase; EC 3.2.1.21; linamarase | |
| 700353620H1 | g1575127 | 89 | −86 | gb105pln | Zea mays lumenal binding protein cBiPe2 mRNA, complete cds. | |
| 700282489H2 | g857573 | 33 | 2 | gb105pln | Oryza sativa vacuolar H+-ATPase (vatp-P1) mRNA, complete cds. | |
| 700355723H1 | g10061 | 25 | −17 | gb105eukp | ribosomal protein; L21 | |
| 700356643H1 | g288378 | 38 | −13 | gb105pln | Z. mays gene PG for polygalacturonase. | |
| 700356133H1 | g2827631 | 32 | −22 | gb105eukp | F10N7.130; putative protein | |
| 700382385H1 | g397632 | 63 | −50 | gb105pln | T. aestivum translation initiation factor 4A. | |
| 700354263H1 | g439482 | 32 | −22 | gb105pln | Cucumber mRNA for ferrochelatase. | |
| 700383058H1 | g2230959 | 21 | −12 | gb105eukp | P69B; subtilisin-like protease | |
| 700382235H1 | g313139 | 47 | −37 | gb105pln | Z. mays ZmPRO2 mRNA for profilin 2. | |
| 700354919H1 | g1185553 | 47 | 6 | gb105pln | Zea mays glyceraldehyde-3-phosphate dehydrogenase (gpc2) gene, complete cds. | |
| 700353105H1 | g2827551 | 9 | 4 | gb105eukp | T12H17.130; predicted protein | |
| 700355467H1 | g567830 | 8 | 6 | gb105eukp | abfA; alpha-L-arabinofuranosidase; EC 3.2.1.55 | |
| 700354333H1 | g2347119 | 38 | −25 | gb105eukp | nDiTPx; thioredoxin peroxidase | |
| 700353820H1 | g2668740 | 22 | 3 | gb105eukp | TIF; translation initiation factor | |
| 700355961H1 | g21190 | 81 | −16 | gb105pln | Secale cereale 5 S rRNa. | |
| 700382112H1 | g436051 | 30 | −57 | gb105pln | Rice mRNA for branching enzyme-3, complete cds. | |
| 700356125H1 | g2641618 | 76 | −66 | gb105pln | Zea mays ubiquitin-conjugating enzyme protein E2 (ubc7) mRNA, complete cds. | |
| 700382933H1 | g1651459 | 5 | 6 | gb105allp | Aminopeptidase N | |
| 700382882H1 | g2331140 | 17 | 8 | gb105pln | Oryza sativa water-stress inducible protein (WSI) mRNA, complete cds. | |
| 700355501H1 | g20323 | 25 | −32 | gb105pln | O. sativa RAc1 gene for actin. | |
| 700354265H1 | g1354863 | 24 | −4 | gb105eukp | COI; cytochrome oxidase | |
| 700355062H1 | g603997 | 21 | 7 | gb105pln | Yeast (Saccharomyces cerevisiae) chromosome IX complete sequence. | |
| 700356442H1 | g288366 | 100 | −60 | gb105pln | Z. mays PGg14 gene for polygalacturonase. | |
| 700354856H1 | g218001 | 19 | −6 | gb105eukp | UDP-glucose pyrophosphorylase precursor; EC 2.7.7.9 | |
| 700353074H1 | g434327 | 57 | −53 | gb105pln | Z. mays mRNA gs1-3 for glutamine synthetase. | |
| 700353218H1 | g2804258 | 19 | −18 | gb105eukp | phosphoglycerate dehydrogenase | |

[0187] TABLE 2
UNIQUE AND HOMOLOGOUS CLUSTERS IN SATMON021024
COPYRIGHT 1998 INCYTE PHARMACEUTICALS, INC.

Cluster number: 69
Cluster clones: 700342711H1 700343915H1 700344781H1 700344461H1 700344178H1
700342976H1 700346893H1 700345950H1 700347239H1 700345988H1 700342385H1
Percent of clones expressed: 0.87
Homologous match to
g1632830 R. communis mRNA (unknown).
Cluster number: 70
Cluster clones: 700344704H1 700346502H1 700346702H1 700380601H1 700380774H1
700342388H1 700345470H1 700343568H1 700346695H1 700346233H1
Percent of clones expressed: 0.79
Cluster number: 264
Cluster clones: 700345510H1 700343780H1 700345052H1 700344946H1 700344949H1
700344870H1 70034703651 700347281H1
Percent of clones expressed: 0.63
Cluster number: 251
Cluster clones: 700345605H1 700346889H1 700343657H1 700379655H1 700347017H1
700347163H1 700344976H1 700380110H1
Percent of clones expressed: 0.63
Homologous match to
g2407800 H2Av; histone H2A.F/Z
Cluster number: 258
Cluster clones: 700345963H1 700344237H1 70034565051 700344480H1 700343713H1
700346641H1 700345630H1 700345242H1
Percent of clones expressed: 0.63
Homologous match to
g2276349 Yeast (Saccharomyces pombe) chromosome II cosmid c30D10.
Cluster number: 150
Cluster clones: 700345233H1 700343424H1 700380681H1 700343761H1 700346147H1
700343655H1 700345273H1 700342828H1
Percent of clones expressed: 0.63
Homologous match to
g2414643 Yeast (Saccharomyces pombe) chromosome I cosmid c3H5.
Cluster number: 29
Cluster clones: 700343054H1 700345546H1 700343480H1 700347111H1
700281968H2 700346527H1 700345772H1
Percent of clones expressed: 0.55
Homologous match to
g458972 F37C12.4
cluster number: 37
Cluster clones: 700345749H1 700342268H1 700342223H1 700346721H1 700345477H1
700343040H1 700380603H1
Percent of clones expressed: 0.55
Weak match to
g532097 weakly similar to S. cerevisiae hypothetical 24.1 kd protein in
APN1 3′ region
Cluster number: 52
Cluster clones: 700344416H1 700344369H1 700342295H1 700379675H1 700345556H1
700342395H1
Percent of clones expressed: 0.48
Homologous match to
g971699 ribosomal protein S7
Cluster number: 50
Cluster clones: 700344525H1 700342790H1 700379867H1 700342291H1 700342521H1
Percent of clones expressed: 0.40
Cluster number: 254
Cluster clones: 700344013H1 700343679H1 700346877H1 700380604H1 700343721H1
Percent of clones expressed: 0.40
Cluster number: 302
Cluster clones: 700347033H1 700345017H1 700344273H1 70034H121H1 700347383H1
Percent of clones expressed: 0.40
Homologous match to

| | |
|---|---|
| g1388084 | TRX5; thioredoxin h |
| Cluster number: 15 | |
| Cluster clones: 700342656H1 700346909H1 700347166H1 700343904H1 | |
| 700281843H2 | |
| Percent of clones expressed: 0.40 | |
| Homologous match to | |
| g313151 A. thaliana ribosomal protein S15 mRNA, complete CDS. | |
| Cluster number: 222 | |
| Cluster clones: 700344093H1 700343401H1 700346896H1 700346053H1 700346364H1 | |
| Percent of clones expressed: 0.40 | |
| Homologous match to | |
| g310322 Oryza sativa triosephosphate isomerase (Rictipi2) gene, exons 1-9. | |
| Cluster number: 129 | |
| Cluster clones: 700344654H1 700347193H1 700345675H1 700345743H1 700342679H1 | |
| Percent of clones expressed: 0.40 | |
| Cluster number: 166 | |
| Cluster clones: 700346429H1 700346004H1 700342935H1 700347047H1 700379632H1 | |
| Percent of clones expressed: 0.40 | |
| Homologous match to | |
| g2661840 adk; adenosine kinase; EC 2.7.1.20 | |
| Cluster number: 202 | |
| Cluster clones: 700346101H1 700345431H1 700346748H1 700343219H1 | |
| Percent of clones expressed: 0.32 | |
| Homologous match to | |
| g551482 Zea mays ABA- and ripening-inducible-like protein mRNA, complete | |
| cds. | |
| Cluster number: 26 | |
| Cluster clones: 700342283H1 700380411H1 700390596H1 | |
| 700281941H2 | |
| Percent of clones expressed: 0.32 | |
| Weak match to | |
| g2583081 microsomal glutathione S-transferase 3 | |
| Cluster number: 400 | |
| Cluster clones: 700380405H1 700347043H1 700347339H1 700347112H1 | |
| Percent of clones expressed: 0.32 | |
| Cluster number: 20 | |
| Cluster clones: 700343752H1 | |
| 700281888H2 700346930H1 700343674H1 | |
| Percent of clones expressed: 0.32 | |
| Weak match to | |
| g2827559 T12H17.210; predicted protein | |
| Cluster number: 44 | |
| Cluster clones: 700342263H1 700346807H1 700344069H1 700346291H1 | |
| Percent of clones expressed: 0.32 | |
| Cluster number: 7 | |
| Cluster clones: 700343173H1 700345245H1 | |
| 700281819H2 700345179H1 | |
| Percent of clones expressed: 0.32 | |
| Homologous match to | |
| g438279 Ribosomal protein L7 | |
| Cluster number: 117 | |
| Cluster clones: 700343247H1 700344866H1 700342630H1 700343872H1 | |
| Percent of clones expressed: 0.32 | |
| Cluster number: 354 | |
| Cluster clones: 700345561H1 700380563H1 700347003H1 700346226H1 | |
| Percent of clones expressed: 0.32 | |
| Homologous match to | |
| g1321660 Rice mRNA for ascorbate peroxidase, complete cds. | |
| Cluster number: 188 | |
| Cluster clones: 700345696H1 700343091H1 700346267H1 700380511H1 | |
| Percent of clones expressed: 0.32 | |
| Homologous match to | |
| g533689 Brassica napus Naehan RNA polymerase II subunit RPB10 homolog | |
| (BRP10) mRNA, complete cds. | |
| Cluster number: 185 | |
| Cluster clones: 700343202H1 700379793H1 700345638H1 700343071H1 | |
| Percent of clones expressed: 0.32 | |
| Weak match to | |
| g19867 extensin (AA 1-620) | |
| Cluster number: 216 | |
| Cluster clones: 700344234H1 700347371H1 700343374H1 700344184H1 | |
| Percent of clones expressed: 0.32 | |
| Homologous match to | |
| g2529657 Arabidopsis theliana chromosome II BAC T301122 genomic sequence, | |
| complete sequence. | |
| Cluster number: 164 | |
| Cluster clones: 7003429241H1 700346794H1 700343408H1 700344614H1 | |
| Percent of clones expressed: 0.32 | |
| Cluster number: 304 | |
| Cluster clones: 700379957H1 700344316H1 700344456H1 700344389H1 | |
| Percent of clones expressed: 0.32 | |
| Homologous match to | |
| g940843 orf 06116 | |
| Cluster number: 303 | |
| Cluster clones: 700346221H1 700347168H1 700344314H1 700345111H1 | |
| Percent of clones expressed: 0.32 | |
| Homologous match to | |
| g2160155 Sequence of BAC F21M12 from Arabidopsis thaliana chromosome 1, | |
| complete sequence. | |
| Cluster number: 105 | |
| Cluster clones: 700379754H1 700342557H1 700344522H1 700380186H1 | |
| Percent of clones expressed: 0.32 | |
| Homologous match to | |
| g218176 Rice mRNA for 2lkd polypeptide. | |
| Cluster number: 269 | |
| Cluster clones: 700345844H1 700343818H1 700380531H1 700379985H1 | |
| Percent of clones expressed: 0.32 | |
| Homologous match to | |
| g218160 Oryza sativa mRNA for elongation factor 1 beta′. | |
| Cluster number: 358 | |
| Cluster clones: 700347158H1 700346795H1 700380779H1 700345561H1 | |
| Percent of clones expressed: 0.32 | |
| Homologous match to | |
| g857573 Oryza sativa vacuolar H+-ATPase (vatp-P1) mRNA, complete ods. | |
| Cluster number: 11 | |
| Cluster clones: | |
| 700281992112 700346681H1 700344941H1 | |
| 700281833H2 | |
| Percent of clones expressed: 0.32 | |
| Homologous match to | |
| g575730 Z. mays mRNA for transmembrane protein. | |
| Cluster number: 229 | |
| Cluster clones: 700343461H1 700346979H1 700345232H1 700346269H1 | |
| Percent of clones expressed: 0.32 | |
| Homologous match to | |
| g161631 217 g protein | |
| Cluster number: 248 | |
| Cluster clones: 700345114H1 700343626H1 700343695H1 700346604H1 | |
| Percent of clones expressed: 0.32 | |
| Cluster number: 21 | |
| Cluster clones: | |
| 700281910H1 700343988H1 700342664H1 700342817H1 | |
| Percent of clones expressed: 0.32 | |
| Weak match to | |
| g313148 MSK-3; protein kinase | |
| Cluster number: 133 | |
| Cluster clones: 700342705H1 700346924H1 700344370H1 | |
| Percent of clones expressed: 0.24 | |
| Homologous match to | |
| g1778373 Pisum sativum glycine-rich RNA-binding protein PsGRBP mRNA, | |
| complete cds. | |
| Cluster number: 114 | |
| Cluster clones: 700345742H1 700342604H1 700346891H1 | |
| Percent of clones expressed: 0.24 | |
| Homologous match to | |
| g2760330 F1N21.15 | |
| Cluster number: 320 | |
| Cluster clones: 700344853H1 700345514H1 700346207H1 | |
| Percent of clones expressed: 0.24 | |
| Homologous match to | |
| g304153 sorbitol dehydrogenase | |
| Cluster number: 228 | |
| Cluster clones: 700343443H1 700344968H1 700347375H1 | |
| Percent of clones expressed: 0.24 | |
| Homologous match to | |
| g1165205 Arabidopsis thaliana multiubiquitin chain binding protein (MBP1) | |
| mRNA, complete cds. | |
| Cluster number: 209 | |
| Cluster clones: 700343281H1 700344105H1 700347368H1 | |
| Percent of clones expressed: 0.24 | |
| Weak match to | |
| g2370518 ribosomal protein | |
| Cluster number: 6 | |
| Cluster clones: 700345253H1 | |
| 700281814H2 700345138H1 | |
| Percent of clones expressed: 0.24 | |
| Cluster number: 340 | |
| Cluster clones: 700345916H1 700345263H1 700345849H1 | |
| Percent of clones expressed: 0.24 | |
| Cluster number: 67 | |
| Cluster clones: 700345394H1 700344820H1 700342373H1 | |
| Percent of clones expressed: 0.24 | |
| Cluster number: 408 | |
| Cluster clones: 700380484H1 700380031H1 700380409H1 | |
| Percent of clones expressed: 0.24 | |
| Homologous match to | |
| g304108 Arabidopsis thaliana poly(A) -binding protein mRNA, complete cds. | |
| Cluster number: 76 | |
| Cluster clones: 700342419H1 700345701H1 700342873H1 | |
| Percent of clones expressed: 0.24 | |
| Homologous match to | |
| g432367 Rice mRNA for elongation factor 1 beta, complete cds. | |
| Cluster number: 81 | |
| Cluster clones: 700342448H1 700344208H1 700344059H1 | |
| Percent of clones expressed: 0.24 | |
| Weak match to | |
| g22317 GST III (AA 1-222) | |
| Cluster number: 162 | |
| Cluster clones: 700344935H1 700342903H1 700343396H1 | |
| Percent of clones expressed: 0.24 | |
| Cluster number: 115 | |
| Cluster clones: 700342616H1 700342915H1 700342708H1 | |
| Percent of clones expressed: 0.24 | |
| Cluster number: 249 | |
| Cluster clones: 700344155H1 700343631H1 700346544H1 | |
| Percent of clones expressed: 0.24 | |
| Homologous match to | |
| g498906 RPL27-5; ribosomal protein L27 homolog | |
| Cluster number: 85 | |
| Cluster clones: 700345113H1 700347107H1 700342480H1 | |
| Percent of clones expressed: 0.24 | |
| Homologous match to | |
| g391875 40S subunit ribosomal protein | |
| Cluster number: 282 | |
| Cluster clones: 700344017H1 700344618H1 700380432H1 | |
| Percent of clones expressed: 0.24 | |
| Weak match to | |
| g2264305 Arabidopsis thaliana genomic DNA, chromosome 5, P1 clone: MBK23, | |
| complete sequence. | |
| Cluster number: 348 | |
| Cluster clones: 700346344H1 700345483H1 700380044H1 | |
| Percent of clones expressed: 0.24 | |
| Homologous match to | |
| g2058311 CCR; cinnamoyl-CoA reductase; EC 1.2.1.44 | |
| Cluster number: 157 | |
| Cluster clones: 700342870H1 700346859H1 700344745H1 | |
| Percent of clones expressed: 0.24 | |
| Homologous match to | |
| g895891 RPS5; ribosomal protein S5 | |
| Cluster number: 109 | |
| Cluster clones: 700345760H1 70034257731 700345661H1 | |
| Percent of clones expressed: 0.24 | |
| Homologous match to | |
| g1405747 PR264/SC35 | |
| Cluster number: 75 | |
| Cluster clones: 700342413H1 700345249H1 700343816H1 | |
| Percent of clones expressed: 0.24 | |
| Cluster number: 80 | |
| Cluster clones: 700344040H1 700342584H1 700342440H1 | |
| Percent of clones expressed: 0.24 | |
| Homologous match to | |
| g2632156 Aspergillus niger mRNA for ribosomal protein L15. | |
| Cluster number: 128 | |
| Cluster clones: 700342671H1 700345488H1 700342885H1 | |
| Percent of clones expressed: 0.24 | |
| Homologous match to | |
| g2351063 Arabidopsis thaliana genomic DNA, chromosome 5, P1 clone: MCL19. | |
| Cluster number: 374 | |
| Cluster clones: 700346568H1 700346845H1 700346032H1 | |
| Percent of clones expressed: 0.24 | |
| Homologous match to | |
| g2564003 proteasome p45/SUG | |
| Cluster number: 91 | |
| Cluster clones: 700344541H1 700345258H1 700342510H1 | |
| Percent of clones expressed: 0.24 | |
| Cluster number: 41 | |
| Cluster clones: 700342243H1 700347105H1 700344953H1 | |
| Percent of clones expressed: 0.24 | |
| Homologous match to | |
| g2511572 prcga; multicatalytic endopeptidase; EC 3.4.99.46 | |
| Cluster number: 184 | |
| Cluster clones: 700346860H1 700343310H1 700343060H1 | |
| Percent of clones expressed: 0.24 | |
| Cluster number: 22 | |
| Cluster clones: | |
| 700281915H1 700342481H1 700346092H1 | |
| Percent of clones expressed: 0.24 | |
| Homologous match to | |
| g290275 M(3)95A; multifunctional activity and location; ribosomal protein | |
| S3/AP endonuclease DNA repair protein | |
| Cluster number: 146 | |
| Cluster clones: 700379637H1 700380108H1 700342784H1 | |
| Percent of clones expressed: 0.24 | |
| Homologous match to | |
| g2673867 Antirrhinum majus mRNA for fimbriata-associated protein 1, | |
| partial. | |
| Cluster number: 352 | |
| Cluster clones: 700345529H1 700346036H1 | |
| Percent of clones expressed: 0.16 | |
| Cluster number: 224 | |
| Cluster clones: 700343420H1 700345705H1 | |
| Percent of clones expressed: 0.16 | |
| Cluster number: 369 | |
| Cluster clones: 700346049H1 700345906H1 | |
| Percent of clones expressed: 0.16 | |
| Weak match to | |
| g2792216 b8; NBS-LRR type resistance protein | |
| Cluster number: 299 | |
| Cluster clones: 700345289H1 700344218H1 | |
| Percent of clones expressed: 0.16 | |
| Cluster number: 403 | |
| Cluster clones: 700347367H1 700380530H1 | |
| Percent of clones expressed: 0.16 | |
| Cluster number: 193 | |
| Cluster clones: 700343124H1 700345807H1 | |
| Percent of clones expressed: 0.16 | |
| Weak match to | |
| g2230869 ferritin L-chain | |
| Cluster number: 333 | |
| Cluster clones: 700345048H1 700346885H1 | |
| Percent of clones expressed: 0.16 | |
| Homologous match to | |
| g2564233 Ci-zeta; proteasome Z subunit | |
| Cluster number: 391 | |
| Cluster clones: 700346496H1 700347296H1 | |
| Percent of clones expressed: 0.16 | |
| Cluster number: 131 | |
| Cluster clones: 700380055H1 700342695H1 | |
| Percent of clones expressed: 0.16 | |
| Homologous match to | |
| g1167953 putative 32.6 kDa jasmonate-induced protein | |
| Cluster number: 201 | |
| Cluster clones: 700345404H1 700343218H1 | |
| Percent of clones expressed: 0.16 | |
| Cluster number: 116 | |
| Cluster clones: 700342620H1 700346951H1 | |
| Percent of clones expressed: 0.16 | |
| Cluster number: 372 | |
| Cluster clones: 700345964H1 700346062H1 | |
| Percent of clones expressed: 0.16 | |
| Homologous match to | |
| g2564046 Arabidopsis thaliana genomic DNA, chromosome 5, P1 clone: MCI19, | |
| complete sequence. | |
| Cluster number: 314 | |
| Cluster clones: 700344747H1 700344740H1 | |
| Percent of clones expressed: 0.16 | |
| Homologous match to | |
| g303855 ribosomal protein L7A | |
| Cluster number: 244 | |
| Cluster clones: 700345737H1 700343607H1 | |
| Percent of clones expressed: 0.16 | |
| Weak match to | |
| g1001957 ZNF127 | |
| Cluster number: 389 | |
| Cluster clones: 700346426H1 700346581H1 | |
| Percent of clones expressed: 0.16 | |
| Weak match to | |
| g1134968 protein disulphide isomerase PDI; EC 5.3.4.1 | |
| Cluster number: 283 | |
| Cluster clones: 700344122H1 700344022H1 | |
| Percent of clones expressed: 0.16 | |
| Cluster number: 167 | |
| Cluster clones: 700343909H1 700342936H1 | |
| Percent of clones expressed: 0.16 | |
| Homologous match to | |
| g1125690 S. tuberosum mRNA for DnaJ protein. | |
| Cluster number: 392 | |
| Cluster clones: 700346653H1 700347087H1 | |
| Percent of clones expressed: 0.16 | |
| Homologous match to | |
| g2656031 Arabidopsis thaliana genomic DNA, chromosome 5, P1 clone: MXC20. | |
| Cluster number: 43 | |
| Cluster clones: 700342258H1 700343458H1 | |
| Percent of clones expressed: 0.16 | |
| Homologous match to | |
| g6815 R08D7.3 | |
| Cluster number: 334 | |
| Cluster clones: 700345908H1 700345075H1 | |
| Percent of clones expressed: 0.16 | |
| Weak match to | |
| g2226414 SPBC3lF10.03; hypothetical protein | |
| Cluster number: 384 | |
| Cluster clones: 700346316H1 700347116H1 | |
| Percent of clones expressed: 0.16 | |
| Cluster number: 315 | |
| Cluster clones: 700344750H1 700344754H1 | |
| Percent of clones expressed: 0.16 | |
| Cluster number: 326 | |
| Cluster clones: 700344924H1 700345329H1 | |
| Percent of clones expressed: 0.16 | |
| Cluster number: 373 | |
| Cluster clones: 700346023H1 700346152H1 | |
| Percent of clones expressed: 0.16 | |
| Cluster number: 245 | |
| Cluster clones: 700344628H1 700343609H1 | |
| Percent of clones expressed: 0.16 | |
| Cluster number: 217 | |
| Cluster clones: 700345577H1 700343377H1 | |
| Percent of clones expressed: 0.16 | |
| Weak match to | |
| g407800 G. hirsutum mRNA for ribosomal protein 41, large subunit (RL41). | |
| Cluster number: 34 | |
| Cluster clones: 700343411H1 700342211H1 | |
| Percent of clones expressed: 0.16 | |
| Homologous match to | |
| g2102693 Frk2; fructokinase; EC 2.7.1.4 | |
| Cluster number: 12 | |
| Cluster clones: 700342744H1 | |
| 700281839H2 | |
| Percent of clones expressed: 0.16 | |
| Homologous match to | |
| g2791947 Lupinus luteus mRNA for ribosomal protein L13a. | |
| Cluster number: 200 | |
| Cluster clones: 700380616H1 700343216H1 | |
| Percent of clones expressed: 0.16 | |
| Cluster number: 130 | |
| Cluster clones: 700344785H1 700342680H1 | |
| Percent of clones expressed: 0.16 | |
| Cluster number: 306 | |
| Cluster clones: 700347360H1 700344337H1 | |
| Percent of clones expressed: 0.16 | |
| Homologous match to | |
| g2343181 MDL3; catalyzes dissociation of (R)-mandelonltrile to hydrogen | |
| cyanide and benzaldehyde; (R)-(+)-mandelonitrlle lyase isoform MDL3 precursor; | |
| EC 4.1.2.10 | |
| Cluster number: 364 | |
| Cluster clones: 700346658H1 700345859H1 | |
| Percent of clones expressed: 0.16 | |
| Cluster number: 207 | |
| Cluster clones: 700346745H1 700343266H1 | |
| Percent of clones expressed: 0.16 | |
| Weak match to | |
| g577612 CRT1; calcium sequestration; calcium-binding protein; calreticulin | |
| Cluster number: 265 | |
| Cluster clones: 700343792H1 700345881H1 | |
| Percent of clones expressed: 0.16 | |
| Homologous match to | |
| g2827618 Arabidopsis thaliana DNA chromosome 4, BAC clone F10N7 (ESSAII | |
| project). | |
| Cluster number: 58 | |
| Cluster clones: 700344016H1 700342338H1 | |
| Percent of clones expressed: 0.16 | |
| Cluster number: 405 | |
| Cluster clones: 700380270H1 700379610H1 | |
| Percent of clones expressed: 0.16 | |
| Cluster number: 108 | |
| Cluster clones: 700342570H1 700380047H1 | |
| Percent of clones expressed: 0.16 | |
| Homologous match to | |
| g791101 Yeast (Saccharomyces cerevlsiae) PMS1, TPM1, MKS1, YMK1, MSK1, | |
| ODP2, YL9A & FKH2 genes. | |
| Cluster number: 335 | |
| Cluster clones: 700346935H1 700345079H1 | |
| Percent of clones expressed: 0.16 | |
| Weak match to | |
| g2618602 Arabidopsis thaliana genomic DNA, chromosome 5, P1 clone: MSJ1, | |
| complete sequence. | |
| Cluster number: 383 | |
| Cluster clones: 700347092H1 700346264H1 | |
| Percent of clones expressed: 0.16 | |
| Cluster number: 393 | |
| Cluster clones: 700380571H1 700346656H1 | |
| Percent of clones expressed: 0.16 | |
| Cluster number: 72 | |
| Cluster clones: 700343601H1 700342401H1 | |
| Percent of clones expressed: 0.16 | |
| Homologous match to | |
| g2190545 F5I14.8 | |
| Cluster number: 195 | |
| Cluster clones: 700344031H1 700343151H1 | |
| Percent of clones expressed: 0.16 | |
| Homologous match to | |
| g1502354 Yeast (Saccharomyces cerevisiae) genomic sequence from chromosome | |
| VII. | |
| Cluster number: 328 | |
| Cluster clones: 700345293H1 700345004H1 | |
| Percent of clones expressed: 0.16 | |
| Cluster number: 316 | |
| Cluster clones: 700344763H1 700346304H1 | |
| Percent of clones expressed: 0.16 | |
| Homologous match to | |
| g1223910 chaperonin-60 alpha subunit | |
| Cluster number: 176 | |
| Cluster clones: 700342986H1 700380488H1 | |
| Percent of clones expressed: 0.16 | |
| Cluster number: 386 | |
| Cluster clones: 700346539H1 700346336H1 | |
| Percent of clones expressed: 0.16 | |
| Homologous match to | |
| g2828188 Arabidopsis thaliana genomic DNA, chromosome 5, TAC clone: K313, | |
| complete sequence. | |
| Cluster number: 241 | |
| Cluster clones: 700343559H1 700347255H1 | |
| Percent of clones expressed: 0.16 | |
| Homologous match to | |
| g440952 cytochrome c1 [Solanum tuberosum = potatoes, Desiree, monohaploid | |
| line AM 80/5793, Genomic, 6007 nt] | |
| Cluster number: 210 | |
| Cluster clones: 700344191H1 700343291H1 | |
| Percent of clones expressed: 0.16 | |
| Weak match to | |
| g872116 sti (stress inducible protein) | |
| Cluster number: 140 | |
| Cluster clones: 700342747H1 700343755H1 | |
| Percent of clones expressed: 0.16 | |
| Cluster number: 24 | |
| Cluster clones: 700343834H1 | |
| 700281924H2 | |
| Percent of clones expressed: 0.16 | |
| Homologous match to | |
| g1100222 Pinus sylvestris chloroplast NAD+-dependent | |
| glyceraldehyde-3-phosphate dehydrogenase mRNA, complete cds. | |
| Cluster number: 31 | |
| Cluster clones: | |
| 700281973H1 | |
| 700281986H2 | |
| Percent of clones expressed: 0.16 | |
| Weak match to | |
| g1946354 Arabidopsis thaliana chromosome II BAC T06B20 genomic sequence, | |
| complete sequence. | |
| Cluster number: 350 | |
| Cluster clones: 700345516H1 700346894H1 | |
| Percent of clones expressed: 0.16 | |
| Weak match to | |
| g2749918 Arabidopsis thaliana chromosome I BAC F3I6 genomic sequence, | |
| complete sequence. | |
| Cluster number: 266 | |
| Cluster clones: 700346704H1 700343793H1 | |
| Percent of clones expressed: 0.16 | |
| Weak match to | |
| g1903420 p71 | |
| Cluster number: 406 | |
| Cluster clones: 700379874H1 700379739H1 | |
| Percent of clones expressed: 0.16 | |
| Homologous match to | |
| g556217 spliceosomal protein | |
| Cluster number: 196 | |
| Cluster clones: 700347236H1 700343154H1 | |
| Percent of clones expressed: 0.16 | |
| Weak match to | |
| g475212 N. tabacum eIF-4A10 mRNA. | |
| Cluster number: 190 | |
| Cluster clones: 700343880H1 700343108H1 | |
| Percent of clones expressed: 0.16 | |
| Homologous match to | |
| g218099 Rice mRNA for ribosomal protein S12 (320 gene), partial sequence. | |
| Cluster number: 138 | |
| Cluster clones: 700342736H1 700345985H1 | |
| Percent of clones expressed: 0.16 | |
| Homologous match to | |
| g2564336 Brassica campestris mRNA for Tat binding protein 1, complete cds. | |
| Cluster number: 336 | |
| Cluster clones: 700345291H1 700345094H1 | |
| Percent of clones expressed: 0.16 | |
| Cluster number: 230 | |
| Cluster clones: 700343475H1 700380514H1 | |
| Percent of clones expressed: 0.16 | |
| Cluster number: 132 | |
| Cluster clones: 700347059H1 700342701H1 | |
| Percent of clones expressed: 0.16 | |
| Homologous match to | |
| g2464876 patatin homolog | |
| Cluster number: 55 | |
| Cluster clones: 700343509H1 700342309H1 | |
| Percent of clones expressed: 0.16 | |
| Weak match to | |
| g1151003 hypothetical protein UNF346 | |
| Cluster number: 367 | |
| Cluster clones: 700346091H1 700345902H1 | |
| Percent of clones expressed: 0.16 | |
| Homologous match to | |
| g1235572 P. curvlcoila EF1-alpha gene. | |
| Cluster number: 297 | |
| Cluster clones: 700344186H1 700344295H1 | |
| Percent of clones expressed: 0.16 | |
| Cluster number: 375 | |
| Cluster clones: 700380786H1 700346050H1 | |
| Percent of clones expressed: 0.16 | |
| Weak match to | |
| g310934 Nicotiana tabacum ribosomal protein L25, complete cds. | |
| Cluster number: 317 | |
| Cluster clones: 700379650H1 700344782H1 | |
| Percent of clones expressed: 0.16 | |
| Cluster number: 239 | |
| Cluster clones: 700343552H1 700345739H1 | |
| Percent of clones expressed: 0.16 | |
| Cluster number: 211 | |
| Cluster clones: 700343985H1 700343292H1 | |
| Percent of clones expressed: 0.16 | |
| Cluster number: 40 | |
| Cluster clones: 700343431H1 700342231H1 | |
| Percent of clones expressed: 0.16 | |
| Cluster number: 191 | |
| Cluster clones: 700343608H1 700343110H1 | |
| Percent of clones expressed: 0.16 | |
| Homologous match to | |
| g2832667 Arabidopsis thaliana DNA chromosome 4, BAC clone T10I14 (ESSAII | |
| project). | |
| Cluster number: 331 | |
| Cluster clones: 700346887H1 700345013H1 | |
| Percent of clones expressed: 0.16 | |
| Weak match to | |
| g1143863 Oryza sativa beta-glucosidase mRNA, nuclear gene encoding | |
| chloroplast protein, complete cds. | |
| Cluster number: 122 | |
| Cluster clones: 700342655H1 700346488H1 | |
| Percent of clones expressed: 0.16 | |
| Homologous match to | |
| g2243116 | ak-lys1; aspartate kinase; EC 2.7.2.4 |
| Cluster number: 260 | |
| Cluster clones: 700345785H1 700343746H1 | |
| Percent of clones expressed: 0.16 | |
| Weak match to | |
| g1469187 The KIAA0132 gene product is related to Drosophila melanogaster | |
| ring canel protein. | |
| Cluster number: 261 | |
| Cluster clones: 700346943H1 700343757H1 | |
| Percent of clones expressed: 0.16 | |
| Cluster number: 203 | |
| Cluster clones: 700343225H1 700343325H1 | |
| Percent of clones expressed: 0.16 | |
| Cluster number: 14 | |
| Cluster clones: | |
| 700281844H2 700346077H1 | |
| Percent of clones expressed: 0.16 | |
| Homologous match to | |
| g710626 ERD15; ERDl5 protein | |
| Cluster number: 79 | |
| Cluster clones: 700342434H1 70034250H1 | |
| Percent of clones expressed: 0.16 | |
| Homologous match to | |
| g2130984 B. napus mRNA for ribosomal protein S15a (pA8l3). | |
| Cluster number: 401 | |
| Cluster clones: 700347395H1 700347064H1 | |
| Percent of clones expressed: 0.16 | |
| Cluster number: 93 | |
| Cluster clones: 700343715H1 700342515H1 | |
| Percent of clones expressed: 0.16 | |
| Cluster number: 407 | |
| Cluster clones: 700380278H1 700379763H1 | |
| Percent of clones expressed: 0.16 | |
| Homologous match to | |
| g1911165 S. tuberosum mRNA for soluble-starch-synthase. | |
| Cluster number: 139 | |
| Cluster clones: 700342745H1 700344965H1 | |
| Percent of clones expressed: 0.16 | |
| Homologous match to | |
| g430992 protein kinase | |
| Cluster number: 278 | |
| Cluster clones: 700346026H1 700343965H1 | |
| Percent of clones expressed: 0.16 | |
| Cluster number: 337 | |
| Cluster clones: 700345136H1 700345235H1 | |
| Percent of clones expressed: 0.16 | |
| Cluster number: 267 | |
| Cluster clones: 700343807H1 700346108H1 | |
| Percent of clones expressed: 0.16 | |
| Homologous match to | |
| g1341398 A. thaliana mRNA for AtTFIIB2 protein. | |
| Cluster number: 103 | |
| Cluster clones: 700346351H1 700342543H1 | |
| Percent of clones expressed: 0.16 | |
| Weak match to | |
| g895693 ribosomal protein S15a | |
| Cluster number: 301 | |
| Cluster clones: 700344265H1 700347232H1 | |
| Percent of clones expressed: 0.16 | |
| Cluster number: 238 | |
| Cluster clones: 700343540H1 700343790H1 | |
| Percent of clones expressed: 0.16 | |
| Cluster number: 231 | |
| Cluster clones: 700343477H1 700345376H1 | |
| Percent of clones expressed: 0.16 | |
| Homologous match to | |
| g2352928 Petroselinum crispum plastidic chorismate mutase 1 (pCM1) mRNA, | |
| nuclear gene encoding plastid protein, partial cds. | |
| Cluster number: 168 | |
| Cluster clones: 700344203H1 700342945H1 | |
| Percent of clones expressed: 0.16 | |
| Homologous match to | |
| g602302 DIM; cell elongation; diminuto | |
| Cluster number: 318 | |
| Cluster clones: 700380480H1 700344836H1 | |
| Percent of clones expressed: 0.16 | |
| Homologous match to | |
| g2689242 A. thaliana mRNA for ubiquitin conjugating enzyme UBC2. | |
| Cluster number: 308 | |
| Cluster clones: 700344425H1 700347072H1 | |
| Percent of clones expressed: 0.16 | |
| Weak match to | |
| g1381148 Hs-CUL-4A | |
| Cluster number: 376 | |
| Cluster clones: 700346060H1 700346167H1 | |
| Percent of clones expressed: 0.16 | |
| Cluster number: 142 | |
| Cluster clones: 700342755H1 700347050H1 | |
| Percent of clones expressed: 0.16 | |
| Weak match to | |
| g2244788 Arabidopsis thaliana DNA chromosome 4, ESSA I contig fragment No. | |
| 1. | |
| Cluster number: 410 | |
| Cluster clones: 700380452H1 700380146H1 | |
| Percent of clones expressed: 0.16 | |
| Weak match to | |
| g786228 tRNA-Gly | |
| Cluster number: 38 | |
| Cluster clones: 700342228H1 700343428H1 | |
| Percent of clones expressed: 0.16 | |
| Cluster number: 270 | |
| Cluster clones: 700343832H1 700347126H1 | |
| Percent of clones expressed: 0.16 | |
| Cluster number: 212 | |
| Cluster clones: 700343333H1 700345469H1 | |
| Percent of clones expressed: 0.16 | |
| Weak match to | |
| g2828287 T18B16.90; putative protein | |
| Cluster number: 312 | |
| Cluster clones: 700344691H1 700345118H1 | |
| Percent of clones expressed: 0.16 | |
| Homologous match to | |
| g624956 C. reinhardtii mRNA for ribosomal protein S18. | |
| Cluster number: 287 | |
| Cluster clones: 700344086H1 700346687H1 | |
| Percent of clones expressed: 0.16 | |
| Homologous match to | |
| g1843628 bsh; SNF5 homolog BSH | |
| Cluster number: 357 | |
| Cluster clones: 700345571H1 700345671H1 | |
| Percent of clones expressed: 0.16 | |
| Weak match to | |
| g2583135 F4L23.30 | |
| Cluster number: 242 | |
| Cluster clones: 700346525H1 700343572H1 | |
| Percent of clones expressed: 0.16 | |
| Cluster number: 296 | |
| Cluster clones: 700344174H1 700346848H1 | |
| Percent of clones expressed: 0.16 | |
| Cluster number: 181 | |
| Cluster clones: 700343049H1 700343995H1 | |
| Percent of clones expressed: 0.16 | |
| Homologous match to | |
| g633606 P. sativum mRNA for chloroplastic outer envelope membrane protein | |
| (OEP75). | |
| Cluster number: 95 | |
| Cluster clones: 700342523H1 700343723H1 | |
| Percent of clones expressed: 0.16 | |
| Cluster number: 396 | |
| Cluster clones: 700346838H1 700347011H1 | |
| Percent of clones expressed: 0.16 | |
| Homologous match to | |
| g1946689 Arabidopsis thaliana glutathione peroxidase GPx mRNA, complete | |
| cds. | |
| Cluster number: 268 | |
| Cluster clones: 700343811H1 700380748H1 | |
| Percent of clones expressed: 0.16 | |
| Homologous match to | |
| g2459531 Mf-FatB1; acyl-ACP thioesterase | |
| Cluster number: 172 | |
| Cluster clones: 700342959H1 700346389H1 | |
| Percent of clones expressed: 0.16 | |
| Weak match to | |
| g1749440 similar to Saccharomyces cerevisiae unknown, EMBL Accession Number | |
| Z47815 | |
| Cluster number: 338 | |
| Cluster clones: 700345221H1 700345489H1 | |
| Percent of clones expressed: 0.16 | |
| Homologous match to | |
| g434905 A. thaliana (Columbia) gene for S18 ribosomal protein (1471bp). | |
| Cluster number: 83 | |
| Cluster clones: 700342456H1 700345264H1 | |
| Percent of clones expressed: 0.16 | |
| Homologous match to | |
| g2258073 Hordeum vulgare var. distichum soluble inorganic pyrophosphatase | |
| (Ipp) mRNA, complete cds. | |
| Cluster number: 290 | |
| Cluster clones: 700346847H1 700344120H1 | |
| Percent of clones expressed: 0.16 | |
| Homologous match to | |
| g1914684 D. carota mRNA for RAD23 protein, isoform II. | |
| Cluster number: 104 | |
| Cluster clones: 700346210H1 700342551H1 | |
| Percent of clones expressed: 0.16 | |
| Weak match to | |
| g1783230 | aminopeptidase |
| Cluster number: 370 | |
| Cluster clones: 700347308H1 700345910H1 | |
| Percent of clones expressed: 0.16 | |
| Weak match to | |
| g2245126 Arabidopsis thaliana DNA chromosome 4, ESSA I contig fragment No. | |
| 9. | |
| Cluster number: 329 | |
| Cluster clones: 700345008H1 700346815H1 | |
| Percent of clones expressed: 0.16 | |
| Homologous match to | |
| g2262141 T10P11.8; hypothetical protein | |
| Cluster number: 259 | |
| Cluster clones: 700345403H1 700343742H1 | |
| Percent of clones expressed: 0.16 | |
| Cluster number: 90 | |
| Cluster clones: 700343704H1 700342504H1 | |
| Percent of clones expressed: 0.16 | |
| Homologous match to | |
| g2832679 T10I14.120; putative protein | |
| Cluster number: 319 | |
| Cluster clones: 700347049H1 700344849H1 | |
| Percent of clones expressed: 0.16 | |
| Cluster number: 189 | |
| Cluster clones: 70037986251 700343103H1 | |
| Percent of clones expressed: 0.16 | |
| Cluster number: 179 | |
| Cluster clones: 700345023H1 700343021H1 | |
| Percent of clones expressed: 0.16 | |
| Homologous match to | |
| g927567 actin | |
| Cluster number: 411 | |
| Cluster clones: 700380682H1 700380589H1 | |
| Percent of clones expressed: 0.16 | |
| Cluster number: 213 | |
| Cluster clones: 700343342H1 700344920H1 | |
| Percent of clones expressed: 0.16 | |
| Cluster number: 153 | |
| Cluster clones: 700346288H1 700342832H1 | |
| Percent of clones expressed: 0.16 | |
| Cluster number: 5 | |
| Cluster clones: | |
| 700281810H2 | |
| 700281945H2 | |
| Percent of clones expressed: 0.16 | |
| Homologous match to | |
| g2529427 rpc10+; Rpc10; EC 2.7.7.6 | |
| Cluster number: 47 | |
| Cluster clones: 700342846H1 700342278H1 | |
| Percent of clones expressed: 0.16 | |
| Weak match to | |
| g2072023 symbiosis-related protein | |
| Cluster number: 288 | |
| Cluster clones: 700344091H1 700346623H1 | |
| Percent of clones expressed: 0.16 | |
| Homologous match to | |
| g1132482 Rice mRNA for ADP-ribosylation factor, complete cds. | |
| Cluster number: 322 | |
| Cluster clones: 700344878H1 700345384H1 | |
| Percent of clones expressed: 0.16 | |
| Cluster number: 124 | |
| Cluster clones: 700342666H1 700342682H1 | |
| Percent of clones expressed: 0.16 | |
| Cluster number: 252 | |
| Cluster clones: 700343672H1 700343822H1 | |
| Percent of clones expressed: 0.16 | |
| Homologous match to | |
| g2832242 Zea mays 22-kDa alpha zein gene cluster, complete sequence. | |
| Cluster number: 409 | |
| Cluster clones: 700380263H1 700380096H1 | |
| Percent of clones expressed: 0.16 | |
| Cluster number: 339 | |
| Cluster clones: 700345325H1 700345225H1 | |
| Percent of clones expressed: 0.16 | |
| Homologous match to | |
| g683502 protein phosphatase 2A 65 kDa regulatory subunit | |
| Cluster number: 291 | |
| Cluster clones: 700346008H1 700344124H1 | |
| Percent of clones expressed: 0.16 | |
| Cluster number: 187 | |
| Cluster clones: 700343087H1 700345330H1 | |
| Percent of clones expressed: 0.16 | |
| Cluster number: 233 | |
| Cluster clones: 700346413H1 700343484H1 | |
| Percent of clones expressed: 0.16 | |
| Homologous match to | |
| g836939 Arabidopsis thaliana calcium-dependent protein kinase (CDPK6) | |
| mRNA, complete cds. | |
| Cluster number: 298 | |
| Cluster clones: 700380408H1 700344217H1 | |
| Percent of clones expressed: 0.16 | |
| Homologous match to | |
| g514394 Catharanthus roseus cyco7 gene, exon1-7, complete cds. | |
| Cluster number: 73 | |
| Cluster clones: 700342403H1 700343603H1 | |
| Percent of clones expressed: 0.16 | |
| Weak match to | |
| g2635371 similar to hypothetical proteins | |
| Cluster number: 59 | |
| Cluster clones: 700342463H1 700342340H1 | |
| Percent of clones expressed: 0.16 | |
| Cluster number: 390 | |
| Cluster clones: 700346475H1 700347222H1 | |
| Percent of clones expressed: 0.16 | |
| Weak match to | |
| g170107 CPN10; chaperonin 10 | |
| Cluster number: 262 | |
| Cluster clones: 700347094H1 700343765H1 | |
| Percent of clones expressed: 0.16 | |
| Homologous match to | |
| g2342735 T14G11.28 | |
| Cluster number: 378 | |
| Cluster clones: 700347212H1 700346117H1 | |
| Percent of clones expressed: 0.16 | |
| Homologous match to | |
| g2814799 ZK858.6 | |
| Cluster number: 342 | |
| Cluster clones: 700379013H1 700345369H1 | |
| Percent of clones expressed: 0.16 | |
| Homologous match to | |
| g2244991 Arabidopsis thaliana DNA chromosome 4, ESSA I contig fragment No. | |
| 6. | |
| Cluster number: 359 | |
| Cluster clones: 700345716H1 700345686H1 | |
| Percent of clones expressed: 0.16 | |
| Cluster number: 289 | |
| Cluster clones: 700344096H1 700344196H1 | |
| Percent of clones expressed: 0.16 | |
| Cluster number: 381 | |
| Cluster clones: 700347093H1 700346218H1 | |
| Percent of clones expressed: 0.16 | |
| Cluster number: 125 | |
| Cluster clones: 700343703H1 700342667H1 | |
| Percent of clones expressed: 0.16 | |
| Cluster number: 402 | |
| Cluster clones: 700347176H1 700379975H1 | |
| Percent of clones expressed: 0.16 | |
| Cluster number: 257 | |
| Cluster clones: 700346386H1 700343711H1 | |
| Percent of clones expressed: 0.16 | |
| Homologous match to | |
| g1008175 ORF YJL045w | |
| Cluster number: 97 | |
| Cluster clones: 700342528H1 700346629H1 | |
| Percent of clones expressed: 0.16 | |
| Homologous match to | |
| g218180 Rice mRNA for oryzain alpha (EC 3.4.22). | |
| Cluster number: 292 | |
| Cluster clones: 700344130H1 700345441H1 | |
| Percent of clones expressed: 0.16 | |
| Homologous match to | |
| g457708 S. oleracea mRNA for protein kinase. | |
| Cluster number: 106 | |
| Cluster clones: 700342560H1 700380575H1 | |
| Percent of clones expressed: 0.16 | |
| Weak match to | |
| g2558659 No definition line found | |
| Cluster number: 234 | |
| Cluster clones: 700346918H1 700343487H1 | |
| Percent of clones expressed: 0.16 | |
| Cluster number: 279 | |
| Cluster clones: 700379925H1 700343991H1 | |
| Percent of clones expressed: 0.16 | |
| Weak match to | |
| g2264302 Arabidopsis thaliana genomic DNA, chromosome 5, P1 clone: MAC12, | |
| complete sequence. | |
| Cluster number: 349 | |
| Cluster clones: 700345706H1 700345506H1 | |
| Percent of clones expressed: 0.16 | |
| Homologous match to | |
| g1375074 Oryza sativa mRNA for glyoxysomal malate dehydrogenase, complete | |
| cds. | |
| Cluster number: 379 | |
| Cluster clones: 700380584H1 700346146H1 | |
| Percent of clones expressed: 0.16 | |
| Weak match to | |
| g2394431 F23F1.5 | |
| Cluster number: 343 | |
| Cluster clones: 700380683H1 700345405H1 | |
| Percent of clones expressed: 0.16 | |
| Weak match to | |
| g525196 epsilon-COP; ldlFp | |
| Cluster number: 273 | |
| Cluster clones: 700343841H1 700344655H1 | |
| Percent of clones expressed: 0.16 | |
| Weak match to | |
| g2394230 Arabidopsis thaliana WD-40 repeat protein (MSI2) mRNA, complete | |
| cds. | |
| Cluster number: 49 | |
| Cluster clones: 700342288H1 700347334H1 | |
| Percent of clones expressed: 0.16 | |
| Homologous match to | |
| g2463332 Oryza sativa mRNA for M79 protein. | |
| Cluster number: 173 | |
| Cluster clones: 700346256H1 700342961H1 | |
| Percent of clones expressed: 0.16 | |
| Homologous match to | |
| g54006 ribosomal protein S12 (AA 1 - 132) | |
| Cluster number: 56 | |
| Cluster clones: 700344212H1 700342313H1 | |
| Percent of clones expressed: 0.16 | |
| Homologous match to | |
| g2651294 Arabidopsis thaliana chromosome II BAC T2P4 genomic sequence, | |
| complete sequence. | |
| Cluster number: 63 | |
| Cluster clones: 700345747H1 700342363H1 | |
| Percent of clones expressed: 0.16 | |
| Cluster number: 112 | |
| Cluster clones: 700343789H1 700342589H1 | |
| Percent of clones expressed: 0.16 | |
| Cluster number: 240 | |
| Cluster clones: 700346939H1 700343558H1 | |
| Percent of clones expressed: 0.16 | |
| Homologous match to | |
| g499111 Flaveria bidentis clone pNDK-b nucleoside diphosphate kinase mRNA, | |
| complete cds. | |
| Cluster number: 399 | |
| Cluster clones: 700346996H1 700379719H1 | |
| Percent of clones expressed: 0.16 | |
| Cluster number: 305 | |
| Cluster clones: 700345020H1 700344334H1 | |
| Percent of clones expressed: 0.16 | |
| Cluster number: 107 | |
| Cluster clones: 700342567H1 700345336H1 | |
| Percent of clones expressed: 0.16 | |
| Homologous match to | |
| g2281103 P18019.22; Glucan endo-1,3-beta glucosidase isolog | |
| Cluster number: 170 | |
| Cluster clones: 700347040H1 700342952H1 | |
| Percent of clones expressed: 0.16 | |
| Weak match to | |
| g2317855 MMS2; provides resistance to DNA damaging agents; Mms2p | |
| Cluster number: 388 | |
| Cluster clones: 700346392H1 700347238H1 | |
| Percent of clones expressed: 0.16 | |
| Homologous match to | |
| g553063 GST2; glutathione s-transferase | |
| Cluster number: 344 | |
| Cluster clones: 700345873H1 700345412H1 | |
| Percent of clones expressed: 0.16 | |
| Cluster number: 92 | |
| Cluster clones: 700343762H1 700342512H1 | |
| Percent of clones expressed: 0.16 | |
| Homologous match to | |
| g556018 Barley glutamate 1-semialdehyde aminotransferase (GSA) mRNA, | |
| complete cds. | |
| Cluster number: 78 | |
| Cluster clones: 700343632H1 700342432H1 | |
| Percent of clones expressed: 0.16 | |
| Cluster number: 274 | |
| Cluster clones: 700344454H1 700343842H1 | |
| Percent of clones expressed: 0.16 | |
| Weak match to | |
| g189306 nucleolin | |
| Cluster number: 60 | |
| Cluster clones: 700342354H1 700344629H1 | |
| Percent of clones expressed: 0.16 | |
| Homologous match to | |
| g1061037 A. thaliana mRNA for sterol-C5-desaturase. | |
| Cluster number: 325 | |
| Cluster clones: 700344911H1 700346157H1 | |
| Percent of clones expressed: 0.16 | |
| Cluster number: 276 | |
| Cluster clones: 700343875H1 700344928H1 | |
| Percent of clones expressed: 0.16 | |
| Cluster number: 255 | |
| Cluster clones: 700344952H1 700343701H1 | |
| Percent of clones expressed: 0.16 | |
| Homologous match to | |
| g313266 T. aestivum gene for phosphoglycerate kinase. | |
| Cluster number: 154 | |
| Cluster clones: 700344649H1 700342835H1 | |
| Percent of clones expressed: 0.16 | |
| Cluster number: 127 | |
| Cluster clones: 700342670H1 700344828H1 | |
| Percent of clones expressed: 0.16 | |
| Cluster number: 4 | |
| Cluster clones: 700355947H1 700353526H1 700332063H1 700352605H1 700353271H1 | |
| 700382691H1 700353955H1 700382739H1 700382890H1 700355520H1 700355738H1 | |
| 700382702H1 700353625H1 700356140H1 | |
| 700282414H2 700355431H1 700355029H1 700355925H1 700356466H1 700355428H1 | |
| 700382605H1 700354129H1 700355088H1 | |
| Percent of clones expressed: 2.45 | |
| Weak match to | |
| g415896 | PHL P11, pollen allergen |

Cluster number: 25
Cluster clones: 700382183H1 700356708H1 700357108H1 700357122H1 700356474H1
700353005H1 700355779H1 700353128H1
700282575H2 700352675H1 700352843H1
Percent of clones expressed: 1.17
Weak match to
g2829898 T26J12.9
Cluster number: 66
Cluster clones: 700355738H1 700353019H1 700352940H1 700354759H1 700382843H1
700356461H1 700382351H1 700354906H1 700382907H1 700353011H1
Percent of clones expressed: 1.06
Homologous match to
g509769 seed-specific low molecular weight sulfur-rich protein
Cluster number: 42
Cluster clones: 700352709H1 700352735H1 700355462H1 700355558H1 700353828H1
700356627H1 700382275H1 700356219H1 700383158H1
Percent of clones expressed: 0.96
Cluster number: 125
Cluster clones: 700382282H1 700356290H1 700356027H1 700354886H1 700382607H1
700357164H1 700382281H1 700353883H1
Percent of clones expressed: 0.35
Homologous match to
g533692 protease inhibitor
Cluster number: 141
Cluster clones: 700355547H1 700355026H1 700354647H1 700355009H1 700354337H1
700356158H1 700354908H1
Percent of clones expressed: 0.74
Weak match to
g2707295 root allergen protein
Cluster number: 30
Cluster clones: 700356129H1 700382106H1 700352616H1 700354518H1 700356066H1
700356023H1 700382827H1
Percent of clones expressed: 0.74
Cluster number: 105
Cluster clones: 700353446H1 700355016H1 700353409H1 700383149H1 700382979H1
700355249H1
Percent of clones expressed: 0.64
Cluster number: 75
Cluster clones: 700353007H1 700383013H1 700383021H1 700354239H1 700382708H1
700356020H1
Percent of clones expressed: 0.64
Cluster number: 71
Cluster clones: 700382061H1 700356143H1 700353275H1 700353688H1 700357428H1
700352972H1
Percent of clones expressed: 0.64
Homologous match to
g255569 pollen specific protein
Cluster number: 15
Cluster clones: 700382195H1
700282503H2 700353432H1 700382995H1 700354850H1
Percent of clones expressed: 0.53
Cluster number: 126
Cluster clones: 700353887H1 700355754H1 700354961H1 700355306H1 700354422H1
Percent of clones expressed: 0.53
Homologous match to
g1173556 Oryza sativa Ory s 1 mRNA, complete cds.
Cluster number: 86
Cluster clones: 700353284H1 700382179H1 700354875H1 700382668H1 700353052H1
Percent of clones expressed: 0.53
Cluster number: 122
Cluster clones: 700382209H1 700356196H1 700353823H1 700356180H1 700355590H1
Percent of clones expressed: 0.53
Homologous match to
g2384757 Oryza sativa GDP dissociation inhibitor protein OsGDI1 (OsGDI1)
mRNA, complete cds.
Cluster number: 11
Cluster clones:
700282464H1 700354271H1 700355316H1 700383159H1
Percent of clones expressed: 0.43
Homologous match to
g22428 polygalacturonase
Cluster number: 181
Cluster clones: 700355095H1 700382374H1 700355484H1 700355710H1
Percent of clones expressed: 0.43
Homologous match to
g20163 O. sativa Rr15 mRNA for 5S ribosomal RNA.
Cluster number: 82
Cluster clones: 700353142H1 700353028H1 700382229H1 700357402H1
Percent of clones expressed: 0.43
Weak match to
g2055230 src2; SRC2; soybean cold-regulated gene
Cluster number: 33
Cluster clones: 700357489H1 700382191H1 700382543H1 700352625H1
Percent of clones expressed: 0.43
Cluster number: 202
Cluster clones: 700382975H1 700355963H1 700382392H1 700355889H1
Percent of clones expressed: 0.43
Weak match to
g2827559 T12H17.210; predicted protein
Cluster number: 2
Cluster clones:
700282406H2
700282408H2
700282409H2
700282410H2
Percent of clones expressed: 0.43
Homologous match to
g313137 Z. mays ZmPRO1 mRNA for profilin 1.
Cluster number: 100
Cluster clones: 700356964H1 700355191H1 700382231H1 700353256H1
Percent of clones expressed: 0.43
Homologous match to
g1370199 L. japonicus mRNA for small GTP-binding protein, RAC1.
Cluster number: 156
Cluster clones: 700355893H1 700355171H1 700354536H1 700356157H1
Percent of clones expressed: 0.43
Homologous match to
g2760330 F1N2l.15
Cluster number: 118
Cluster clones: 700354689H1 700382139H1 700353629H1 700354676H1
Percent of clones expressed: 0.43
Cluster number: 87
Cluster clones: 700357445H1 700353057H1 700382230H1 700382190H1
Percent of clones expressed: 0.43
Cluster number: 63
Cluster clones: 700383154H1 700352912H1 700354742H1 700354895H1
Percent of clones expressed: 0.43
Cluster number: 121
Cluster clones: 700353779H1 700355415H1 700357160H1 700355414H1
Percent of clones expressed: 0.43
Weak match to
g1835730 Oryza sativa photosystem II 10 kDa polypeptide mRNA, complete cds.
Cluster number: 13
Cluster clones: 700352678H1
700282478H2 700355878H1
Percent of clones expressed: 0.32
Homologous match to
g293901 Zea mays Zea mI gene, complete cds.
Cluster number: 6
Cluster clones:
700282435H1
700282569H2
700282571H2
Percent of clones expressed: 0.32
Cluster number: 52
Cluster clones: 700352780H1 700352862H1 700354483H1
Percent of clones expressed: 0.32
Homologous match to
g1890351 A. thaliana mRNA for transcription factor L2.
Cluster number: 45
Cluster clones: 700355053H1 700357189H1 700352737H1
Percent of clones expressed: 0.32
Cluster number: 38
Cluster clones: 700353424H1 700352654H1 700352719H1
Percent of clones expressed: 0.32
Cluster number: 78
Cluster clones: 700383062H1 700353023H1 700355781H1
Percent of clones expressed: 0.32
Weak match to
g395316 P450CR10; cytochrome P450
Cluster number: 62
Cluster clones: 700355973H1 700356535H1 700352911H1
Percent of clones expressed: 0.32
Homologous match to
g544501 SEC13; Sec13p
Cluster number: 90
Cluster clones: 700382353H1 700355513H1 700353114H1
Percent of clones expressed: 0.32
Cluster number: 116
Cluster clones: 700353610H1 700356435H1 700356494H1
Percent of clones expressed: 0.32
Homologous match to
g2852444 Salix bakko mRNA for SUI1 homolog, complete cds.
Cluster number: 124
Cluster clones: 700353853H1 700383155H1 700382218H1
Percent of clones expressed: 0.32
Cluster number: 163
Cluster clones: 700356609H1 700354660H1 700356827H1
Percent of clones expressed: 0.32
Homologous match to
g606969 Arabidopsis thaliana cytoplasmic ribosomal protein L18 mRNA,
complete cds.
Cluster number: 10
Cluster clones: 700382655H1
700282457H2 700355978H1
Percent of clones expressed: 0.32
Homologous match to
g1718236 (1,4)-beta-xylan endohydrolase, isoenzyme X-I
Cluster number: 196
Cluster clones: 700355783H1 700382507H1 700356725H1
Percent of clones expressed: 0.32
Weak match to
g2351063 Arabidopsis thaliana genomic DNA, chromosome 5, P1 clone: MCL19.
Cluster number: 77
Cluster clones: 700382817H1 700353014H1 700354142H1
Percent of clones expressed: 0.32
Weak match to
g1749610 similar to Saccharomyces cerevisiae unknown, EMBL Accession Number
Z68195
Cluster number: 214
Cluster clones: 700382245H1 700356534H1 700382140H1
Percent of clones expressed: 0.32
Cluster number: 91
Cluster clones: 700382267H1 700353130H1 700354478H1
Percent of clones expressed: 0.32
Weak match to
g2058693 poly A binding protein
Cluster number: 97
Cluster clones: 700353206H1 700382119H1 700382127H1
Percent of clones expressed: 0.32
Homologous match to
g669003 calnexin
Cluster number: 99
Cluster clones: 700356188H1 700382662H1 700353245H1
Percent of clones expressed: 0.32
Homologous match to
g255568 pollen specific protein [Zea mays = corn, mRNA, 943 nt].
Cluster number: 107
Cluster clones: 700353509H1 700355885H1 700353612H1
Percent of clones expressed: 0.32
Cluster number: 17
Cluster clones:
700282520H2
700282517H2
700282518H2
Percent of clones expressed: 0.32
Homologous match to
g2656030 Arabidopsis thaliana genomic DNA, chromosome 5, P1 clone: MUL8.
Cluster number: 20
Cluster clones:
700282549H2
700282547H2
Percent of clones expressed: 0.21
Cluster number: 109
Cluster clones: 700353532H1 700353844H1
Percent of clones expressed: 0.21
Homologous match to
g22458 Z. mays pollen specific mRNA C-terminal (clone 4H7)
Cluster number: 224
Cluster clones: 700382055H1 700382544H1
Percent of clones expressed: 0.21
Homologous match to
g2252869 ATOZI1
Cluster number: 205
Cluster clones: 700356171H1 700382075H1
Percent of clones expressed: 0.21
Cluster number: 193
Cluster clones: 700382330H1 700355577H1
Percent of clones expressed: 0.21
Cluster number: 135
Cluster clones: 700354374H1 700354295H1
Percent of clones expressed: 0.21
Homologous match to
g1480465 cyclophilin Ovcyp-2
Cluster number: 237
Cluster clones: 700382426H1 700382525H1
Percent of clones expressed: 0.21
Weak match to
g475046 putative cell wall protein
Cluster number: 36
Cluster clones: 700354519H1 700352645H1
Percent of clones expressed: 0.21
Cluster number: 174
Cluster clones: 700354942H1 700355507H1
Percent of clones expressed: 0.21
Cluster number: 50
Cluster clones: 700352769H1 700352953H1
Percent of clones expressed: 0.21
Homologous match to
g606810 Zea mays carbonic anhydrase mRNA, complete cds.
Cluster number: 220
Cluster clones: 700357155H1 700356835H1
Percent of clones expressed: 0.21
Cluster number: 225
Cluster clones: 700382078H1 700382273H1
Percent of clones expressed: 0.21
Cluster number: 155
Cluster clones: 700355780H1 700354516H1
Percent of clones expressed: 0.21
Weak match to
g387431 metallothionien II
Cluster number: 186
Cluster clones: 700355345H1 700355344H1
Percent of clones expressed: 0.21
Cluster number: 7
Cluster clones:
700282548H2
700282438H2
Percent of clones expressed: 0.21
Weak match to
q2695929 putative thiol protease
Cluster number: 194
Cluster clones: 700355594H1 700356974H1
Percent of clones expressed: 0.21
Weak match to
g1872473 TA-MT; delta-24-sterol methyltransferase
Cluster number: 111
Cluster clones: 700356473H1 700353560H1
Percent of clones expressed: 0.21
Homologous match to
g1002369 coatomer protein
Cluster number: 206
Cluster clones: 700356174H1 700356190H1
Percent of clones expressed: 0.21
Homologous match to
g2623961 A. graveolens mRNA for isocitrate dehydrogenase (NADP+).
Cluster number: 136
Cluster clones: 700354305H1 700355422H1
Percent of clones expressed: 0.21
Cluster number: 217
Cluster clones: 700356695H1 700382260H1
Percent of clones expressed: 0.21
Cluster number: 41
Cluster clones: 700352804H1 700352705H1
Percent of clones expressed: 0.21
Homologous match to
g1030068 NAD(P)H oxidoreductase, isoflavone reductase homologue
Cluster number: 175
Cluster clones: 700356081H1 700354954H1
Percent of clones expressed: 0.21
Cluster number: 117
Cluster clones: 700353848H1 700353614H1
Percent of clones expressed: 0.21
Homologous match to
g1710150 Arabidopsls thaliana proline iminopeptidase mRNA, complete cds.
Cluster number: 27
Cluster clones:
700282584H2
700282592H2
Percent of clones expressed: 0.21
Cluster number: 245
Cluster clones: 700382873H1 700383182H1
Percent of clones expressed: 0.21
Homologous match to
g1296806 H. vulgare xylose isomerase gene.
Cluster number: 200
Cluster clones: 700357415H1 700355871H1
Percent of clones expressed: 0.21
Cluster number: 236
Cluster clones: 700382902H1 700382425H1
Percent of clones expressed: 0.21
Homologous match to
g1649012 egg receptor for sperm
Cluster number: 120
Cluster clones: 700353713H1 700354534H1
Percent of clones expressed: 0.21
Cluster number: 195
Cluster clones: 700355966H1 700355766H1
Percent of clones expressed: 0.21
Weak match to
g2832707 T9A21.180; translation initiation factor eIF-2 gamma chain-like
protein
Cluster number: 207
Cluster clones: 700356177H1 700356193H1
Percent of clones expressed: 0.21
Weak match to
g2828188 Arabidopsis thaliana genomic DNA, chromosome 5, TAC clone: K3I3,
complete sequence.
Cluster number: 108
Cluster clones: 700355518H1 700353516H1
Percent of clones expressed: 0.21
Homologous match to
g2384676 Arabidopsis thaliana putative potassium transporter AtKT5p (AtKT5)
mRNA, partial cds.
Cluster number: 65
Cluster clones: 700352935H1 700354658H1
Percent of clones expressed: 0.21
Cluster number: 166
Cluster clones: 700356767H1 700354769H1
Percent of clones expressed: 0.21
Cluster number: 101
Cluster clones: 700354301H1 700353262H1
Percent of clones expressed: 0.21
Homologous match to
g2370231 Hordeum vulgare mRNA for putative acyl-CoA oxidase.
Cluster number: 238
Cluster clones: 700382439H1 700382450H1
Percent of clones expressed: 0.21
Weak match to
g35597 PR 264
Cluster number: 246
Cluster clones: 700383019H1 700383011H1
Percent of clones expressed: 0.21
Cluster number: 132
Cluster clones: 700355447H1 700354247H1
Percent of clones expressed: 0.21
Cluster number: 168
Cluster clones: 700354777H1 700354793H1
Percent of clones expressed: 0.21
Cluster number: 210
Cluster clones: 700356541H1 700356241H1
Percent of clones expressed: 0.21
Cluster number: 140
Cluster clones: 700354446H1 700354326H1
Percent of clones expressed: 0.21
Cluster number: 24
Cluster clones:
70028256432 700356229H1
Percent of clones expressed: 0.21
Homologous match to
g939778 Zea mays MADS-box protein (ZAG3) mRNA, complete cds.
Cluster number: 221
Cluster clones: 700356901H1 700356933H1
Percent of clones expressed: 0.21
Weak match to
g1402878 orf4; unknown
Cluster number: 151
Cluster clones: 700354425H1 700356025H1
Percent of clones expressed: 0.21
Weak match to
g1657854 Triticum aestivum cold acclimation protein WCOR413 (Wcor4l3) mRNA,
complete cds.
Cluster number: 98
Cluster clones: 700353215H1 700356847H1
Percent of clones expressed: 0.21
Weak match to
g288611 Z. mays PG gene for polygalacturonase.
Cluster number: 138
Cluster clones: 700383051H1 700354310H1
Percent of clones expressed: 0.21
Cluster number: 149
Cluster clones: 700354409H1 700355040H1
Percent of clones expressed: 0.21
Cluster number: 230
Cluster clones: 700382365H1 700382210H1
Percent of clones expressed: 0.21
Cluster number: 160
Cluster clones: 700354623H1 700354655H1
Percent of clones expressed: 0.21
Homologous match to
g2529228 Clycine max mRNA for 6-phosphogluconate dehydrogenase, complete
cds.
Cluster number: 55
Cluster clones: 700352838H1 700352825H1
Percent of clones expressed: 0.21
Homologous match to
g2252856 A_TM018A10.8
Cluster number: 219
Cluster clones: 700382882H1 700356796H1
Percent of clones expressed: 0.21
Weak match to
g454880 Rice mRNA for WSI724 protein induced by water stress, complete
cds.
Cluster number: 177
Cluster clones: 700357173H1 700355011H1
Percent of clones expressed: 0.21
Cluster number: 119
Cluster clones: 700355989H1 700353653H1
Percent of clones expressed: 0.21
Cluster number: 247
Cluster clones: 700383023H1 700383015H1
Percent of clones expressed: 0.21
Cluster number: 241
Cluster clones: 700382542H1 700382643H1
Percent of clones expressed: 0.21
Homologous match to
g1899187 Nicotiana tabacum DNA binding protein ACBF mRNA, complete cds.
Cluster number: 211
Cluster clones: 700356252H1 700356551H1
Percent of clones expressed: 0.21
Cluster number: 228
Cluster clones: 700382123H1 700383147H1
Percent of clones expressed: 0.21
Cluster number: 158
Cluster clones: 700355758H1 700354558H1
Percent of clones expressed: 0.21
Cluster number: 180
Cluster clones: 700355173H1 700355067H1
Percent of clones expressed: 0.21
Cluster number: 21
Cluster clones:
700282550H2 700356152H1
Percent of clones expressed: 0.21
Cluster number: 113
Cluster clones: 700353567H1 700382302H1
Percent of clones expressed: 0.21
Homologous match to
g1532167 AT.I.24-5
Cluster number: 129
Cluster clones: 700353986H1 700354709H1
Percent of clones expressed: 0.21
Homologous match to
g2330689 Yeast (Saccharomyces pombe) chromosome I cosmid c16E8.
Cluster number: 64
Cluster clones: 700383037H1 700352916H1
Percent of clones expressed: 0.21
Weak match to
g1532047 O. sativa mRNA for S-adenosylmethionine decarboxylase.
Cluster number: 209
Cluster clones: 700356848H1 700356236H1
Percent of clones expressed: 0.21
Weak match to
g2160155 Sequence of BAC F21M12 from Arabidopsis thaliana chromosome 1,
complete sequence.
Cluster number: 139
Cluster clones: 700354317H1 700355077H1
Percent of clones expressed: 0.21
Weak match to
g2342495 Ananas comosus mRNA for bromelain, complete cds.
Cluster number: 197
Cluster clones: 700356076H1 700355829H1
Percent of clones expressed: 0.21
Weak match to
g168557 Zea mays putative GTP-binding protein homolog mRNA, partial cds.
Cluster number: 161
Cluster clones: 700356624H1 700354637H1
Percent of clones expressed: 0.21
Cluster number: 231
Cluster clones: 700382220H1 700382268H1
Percent of clones expressed: 0.21
Weak match to
g2160144 Strong similarity to Arabidopsis oligopeptide transporter
(gb|X77503)
Cluster number: 248
Cluster clones: 700383166H1 700383061H1
Percent of clones expressed: 0.21
Cluster number: 222
Cluster clones: 700356903H1 700356935H1
Percent of clones expressed: 0.21
Cluster number: 178
Cluster clones: 700355022H1 700382176H1
Percent of clones expressed: 0.21
Cluster number: 170
Cluster clones: 700354795H1 700354779H1
Percent of clones expressed: 0.21
Homologous match to
g2827700 P6Hl1.20; DEAD box ATP dependent helicase protein
Cluster number: 239
Cluster clones: 700382513H1 700382654H1
Percent of clones expressed: 0.21
Cluster number: 212
Cluster clones: 700356273H1 700352891H1
Percent of clones expressed: 0.21
Weak match to
g12956 reading frame protein 5 (896 is 2nd base in codon)
Cluster number: 159
Cluster clones: 700356802H1 700354606H1
Percent of clones expressed: 0.21
Cluster number: 169
Cluster clones: 700354794H1 700354778H1
Percent of clones expressed: 0.21
Homologous match to
g1438861 GmCK2p; EC 2.7.1.32
Cluster number: 123
Cluster clones: 700353839H1 700356483H1
Percent of clones expressed: 0.21
Cluster number: 198
Cluster clones: 700355856H1 700355888H1
Percent of clones expressed: 0.21
Weak match to
g2330673 rp122; 60S ribosomal protein
Cluster number: 240
Cluster clones: 700382649H1 700382537H1
Percent of clones expressed: 0.21
Weak match to
g469232 vacuolar H+-ATPase subunit
Cluster number: 104
Cluster clones: 700356062H1 700353279H1
Percent of clones expressed: 0.21
Cluster number: 162
Cluster clones: 700355770H1 700354638H1
Percent of clones expressed: 0.21
Homologous match to
g2213424 Citrus paradisi mRNA for hypothetical protein.
Cluster number: 191
Cluster clones: 700355496H1 700382665H1
Percent of clones expressed: 0.21
Cluster number: 69
Cluster clones: 700354930H1 700352961H1
Percent of clones expressed: 0.21
Cluster number: 232
Cluster clones: 700382226H1 700382307H1
Percent of clones expressed: 0.21
Homologous match to
g2702272 T21L14.13
Cluster number: 76
Cluster clones: 700356644H1 7003530l2Hl
Percent of clones expressed: 0.21
Cluster number: 179
Cluster clones: 700356265H1 700355065H1
Percent of clones expressed: 0.21
Cluster number: 249
Cluster clones: 700383075H1 700383157H1
Percent of clones expressed: 0.21
Homologous match to
g1814402 Mesembryanthemum crystallinum methionine synthase (MetE) mRNA,
complete cds.
Cluster number: 213
Cluster clones: 700356468H1 700382579H1
Percent of clones expressed: 0.21
Weak match to
g498747 Pir7b
Cluster number: 1
Cluster clones:
700282401H2
700282591H2
Percent of clones expressed: 0.21
Weak match to
g409499 3-Hydroxy-3-methylglutaryl coenzyme A lyase, HL {EC 4.1.3.4}
[mice, liver, Peptide Mitochondrial, 325 aa]
Cluster number: 16
Cluster clones:
700282522H2
700282514H2
Percent of clones expressed: 0.21
Cluster number: 35
Cluster clones: 700355842H1 700352636H1
Percent of clones expressed: 0.21
Weak match to
g2209343 copper transport protein Atox1
Cluster number: 23
Cluster clones:
700282561H2
700282562H2
Percent of clones expressed: 0.21
Cluster number: 182
Cluster clones: 700355286H1 700383026H1
Percent of clones expressed: 0.21
Cluster number: 199
Cluster clones: 700355861H1 700355866H1
Percent of clones expressed: 0.21
Cluster number: 242
Cluster clones: 700382834H1 700382554H1
Percent of clones expressed: 0.21
Cluster number: 233
Cluster clones: 700383043H1 700382324H1
Percent of clones expressed: 0.21
Cluster number: 88
Cluster clones: 700353107H1 700356032H1
Percent of clones expressed: 0.21
Homologous match to
g456567 Pisum sativum ubiquitin conjugating enzyme (UBC4), complete cds.
Cluster number: 73
Cluster clones: 700352993H1 700355070H1
Percent of clones expressed: 0.21
Cluster number: 95
Cluster clones: 700356702H1 700353201H1
Percent of clones expressed: 0.21
Cluster number: 189
Cluster clones: 700355456H1 700356821H1
Percent of clones expressed: 0.21
Homologous match to
g1498325 Glycine max actin (Soy86) gene, partial cds.
Cluster number: 223
Cluster clones: 700382636H1 700357183H1
Percent of clones expressed: 0.21
Weak match to
g2584827 Sequence of BAC Fl2F1 from Arabidopsis thaliana chromosome 1,
complete sequence.
Cluster number: 153
Cluster clones: 700355708H1 700354508H1
Percent of clones expressed: 0.21
Cluster number: 61
Cluster clones: 700352903H1 700382354H1
Percent of clones expressed: 0.21
Cluster number: 54
Cluster clones: 700382424H1 700352802H1
Percent of clones expressed: 0.21
Weak match to
g2226414 hypothetical protein
Cluster number: 18
Cluster clones:
70028253252
70028252152
Percent of clones expressed: 0.21
Homologous match to
g2760334 F1N21.5
Cluster number: 201
Cluster clones: 700355877H1 700382550H1
Percent of clones expressed: 0.21
Cluster number: 106
Cluster clones: 700382041H1 700353431H1
Percent of clones expressed: 0.21
Cluster number: 234
Cluster clones: 700382604H1 700382377H1
Percent of clones expressed: 0.21
Cluster number: 164
Cluster clones: 700356224H1 700354663H1
Percent of clones expressed: 0.21
Homologous match to
g804655 Hordeum vulgare L. beta-glucosidase (BGQ60) gene, complete cds.
Cluster number: 145
Cluster clones: 700354366H1 700356927H1
Percent of clones expressed: 0.21
Homologous match to
g498040 ORF
Cluster number: 215
Cluster clones: 700357194H1 700356542H1
Percent of clones expressed: 0.21
Cluster number: 56
Cluster clones: 700352826H1 700354918H1
Percent of clones expressed: 0.21
Homologous match to
g287830 polygalacturonase
Cluster number: 49
Cluster clones: 700352760H1 700356015H1
Percent of clones expressed: 0.21
Cluster number: 70
Cluster clones: 700352967H1 700356167H1
Percent of clones expressed: 0.21
Cluster number: 134
Cluster clones: 700355815H1 700354260H1
Percent of clones expressed: 0.21
Homologous match to
g1145627 lipase
Cluster number: 184
Cluster clones: 700382773H1 700355307H1
Percent of clones expressed: 0.21
Weak match to
g2351070 Arabidopsis thaliana genomic DNA, chromosome 5, P1 clone: MTH12.
Cluster number: 204
Cluster clones: 700356984H1 700356047H1
Percent of clones expressed: 0.21
Cluster number: 22
Cluster clones:
700282554H2
700282553H2
Percent of clones expressed: 0.21
Weak match to
g2463582 precursor of cysteine proteinase; FB31 precursor (FB13 precursor)
Cluster number: 235
Cluster clones: 700382401H1 700382494H1
Percent of clones expressed: 0.21
Cluster number: 165
Cluster clones: 700354678H1 700356591H1
Percent of clones expressed: 0.21
Cluster number: 243
Cluster clones: 700382687H1 700383087H1
Percent of clones expressed: 0.21
Homologous match to
g699510 M(1)1B; minute(1)1B protein; minute(1)1B
Cluster number: 115
Cluster clones: 700353590H1 700355093H1
Percent of clones expressed: 0.21
Cluster number: 94
Cluster clones: 700353195H1 700356014H1
Percent of clones expressed: 0.21
Cluster number: 131
Cluster clones: 700354244H1 700355444H1
Percent of clones expressed: 0.21
Cluster number: 146
Cluster clones: 700354371H1 700383009H1
Percent of clones expressed: 0.21
Cluster number: 110
Cluster clones: 700382240H1 700353546H1
Percent of clones expressed: 0.21
Homologous match to
g1051108 A. thaliana mRNA for adenine nucleotide transiocase.
Cluster number: 60
Cluster clones: 700352888H1 700382460H1
Percent of clones expressed: 0.21
Homologous match to
g1872521 LSD1; negative regulator of cell death; zinc-finger protein Lsd1
Cluster number: 46
Cluster clones: 700352751H1 700382640H1
Percent of clones expressed: 0.21
Homologous match to
g1321917 su12; cytoplasmic ribosomal protein S7
Cluster number: 167
Cluster clones: 700354774H1 700354790H1
Percent of clones expressed: 0.21
Cluster number: 127
Cluster clones: 700356544H1 700353924H1
Percent of clones expressed: 0.21
Homologous match to
g2264304 Arabidopsis thaliana genomic DNA, chromosome 5, P1 clone: MBG8,
complete sequence.

The application's sequence listing, which the Patent Office published only in electronic form, follows.

SEQUENCE LISTING (6207 sequences)

SEQ ID NO: 1 - DNA, 114 bp, Zea mays
  misc_feature: Incyte ID No: 700281802H2
  unsure 9, 16, 40-41, 67, 72, 86, 95: a, t, c, g, or other
ctgtcggcngcgactnggcggccgtcgctgccgtcctacnnccagctgcccaggtcttccttcgcgncctanttccggcggaaacnaccgccaangtaagccaaccatcagcca

SEQ ID NO: 2 - DNA, 288 bp, Zea mays
  misc_feature: Incyte ID No: 700281803H2
  unsure 37, 39: a, t, c, g, or other
agcttgcaatcttccaggaacgttttttttttttgtncnagccgagagagaatcaagaggaagagagagagaaaaccatgcgctgtggcctgacaaccggtgtcgcggggtgtgaagctcgccggacttgggtcgtctggcgctgcttgtccacggcgtgggggctgccgctggccgtgggagctctctgctcgggcgccgtcgttcgatcgtgtggcagacgggtgcaagcgtggggtggtgccgacggtgcggttggctgtctggcgctgcttgtccagcgcgtgg

SEQ ID NO: 3 - DNA, 315 bp, Zea mays
  misc_feature: Incyte ID No: 700281808H2
  unsure 204: a, t, c, g, or other
ccaggcttccagccagccgccgcggcgccgcccagcttcatagctcctacctgtgcggctgtgctgttgcatgctgcacttgttcttcacgtgcagctcctccctgtgcggttgtgctgctgcacgcttgcactagttcttcacgtggcgccctccataagacagcagcaagcgccggacagcgacgagctgggtggaggcgcnggcactgtccctgcgatgttgtgggactcggacagcgatgatgaagtgcgcgtggttgaccatcctactgagcgtcgtgctgctatcaggcagagaaaggaaagccatggc

SEQ ID NO: 4 - DNA, 233 bp, Zea mays
  misc_feature: Incyte ID No: 700281810H2
  unsure 8-9, 19, 22, 34, 38, 52, 98, 104, 121, 130: a, t, c, g, or other
aagaaacnnccaaacaccnacntctctacgaacnaccngccgccggaaaacnctagagcgctcgaccatggatccgcagcagccggagcctgtcagtnacctcngcggagattgcggagcngagaacacnctgaagcccggagatgtcatccagtgccgtgaatgtggctaccgcatcctctacaagaagcggacccgccggattgtccaatatgaagcgcgctgaagagtga

SEQ ID NO: 5 - DNA, 240 bp, Zea mays
  misc_feature: Incyte ID No: 700281813H2
  unsure 39, 189: a, t, c, g, or other
gcatccaacctactttcagaattgttgctctcgtgtacntctacgcaaccaggcgactcaagtcccgacgaatatgaaggacatggcgtcgacctcctgaaatctgaagcgtcaatggagtatctatgcaacttaccaccacataggtatgaagctgttttcgcgaaagaaattccggagacgatcacnggcgatgcgtttttagagaagtatggagaccacaacgatgcggtaacagaa

SEQ ID NO: 6 - DNA, 249 bp, Zea mays
  misc_feature: Incyte ID No: 700281814H2
  unsure 6, 27, 35, 37, 44, 49, 59, 64, 72, 77, 90, 95, 128, 162, 169, 175, 193,: a, t, c, g, or other
cacacnccagccagccatcgtcacacnggtgagcncngcagtcngcacnctgcttagcnccgancttcagtnacctncgttgttagctgntagcnccacagtccacagttccacacacacgtccagcngcacagcaccaatggccgccgtcgaggtccaggncccgacngccgcncccgtcgaggaggctgcngcngctgctgcagcgggagtggaggctgcccagctggccgccgtcgagacaccgaa

SEQ ID NO: 7 - DNA, 286 bp, Zea mays
  misc_feature: Incyte ID No: 700281816H2
  unsure 89, 218, 271, 285: a, t, c, g, or other
gtcataactcacggcaggcagagacgcgcaccaccagaccagcagcagaaacgaaagggatcttccggtccccaggccccggcttcctncccctttccgattccaatctggtctcgccgggcctggcggcgagggagagatggggaagaaccaggcgtacaaggcgatgcagcgggcgcggttggggtcctcgtccggcgcgccgggcgccgccgacncccccgaagacggcatgacggacggttcattccattctccagagtggcatgcngcgcgcctggccanc

SEQ ID NO: 8 - DNA, 286 bp, Zea mays
  misc_feature: Incyte ID No: 700281817H2
  unsure 22, 86, 93, 168: a, t, c, g, or other
gaaaaattcagtacactttatntcgatctgaaacacttattatttttgtgaatcaggttagaacaaagcggacatcaagtaatccngggatcnacaaggaggtgcctgcggtggtaatgcactaggattctatgctgcagtcagaatgaggacttcaaggagagaacngcgctatagtgaagatgaggctaccggcgtaggtatatcagtgcagatcatcaagaacaaattggctccagcgaacctgaagaaggaagccggcatcgacatcacattcggtaagggg

SEQ ID NO: 9 - DNA, 257 bp, Zea mays
  misc_feature: Incyte ID No: 700281819H2
  unsure 49-50, 68, 93, 101, 112, 153, 155, 181, 196, 198, 204, 233: a, t, c, g, or other
cccgcgcaaagcagtacaccgaggaatacgatgcccaggagaaggaacnngtgcagcttaagcgcgangcccgtttgaagggtggtttctatntcagtccngaggcaaagcngctctttgtggtccgcatccggggtattaatgccatgcacncnaagaccaggaagatcttgcagcttcngcgattgaggcagancntcaatngcgtgtttctcaaagtcaacaaggctacnattaacatgctacgcaggttgagc

SEQ ID NO: 10 - DNA, 306 bp, Zea mays
  misc_feature: Incyte ID No: 700281820H2
  unsure 21, 37, 50-51, 59, 78, 105, 178, 261, 282, 284-285: a, t, c, g, or other
gccgtgcttctgctgcttggnggcagggagctgagtngcctgagcggacnncgtcctcngcaccttatagtaagaggntgaactttccacatcgggtggcatcangatgagatttagggaaaagcggaaggagcggaactttgataagaagatccggtacaatgtccggaaggaagtngcacttaggatgcagcgtaatagaggtcagtttacatcttcaaaaccaaagcctgatgaaatagcagcatcagaatggcagcngcagatggtctctgaattggnanngttgaaggcgactccatcctg

SEQ ID NO: 11 - DNA, 312 bp, Zea mays
  misc_feature: Incyte ID No: 700281824H2
  unsure 17, 94, 159, 241: a, t, c, g, or other
caccaccagcgtccagngaggaggaaagggaaggaggaaccgaggaacccgccgcaccgcaggcacaggcaggcagggcagcagatcgcgagtnccgacttccgacgcgtctccgaccaggccgccgccatttctctgtctccacacagcgggatcccnccgccgctcgccgcttctcccttggtccaccgtccacccaaccatgtataacaattaccggaatcctccggggacgcatatncccccgcagaattctcaacctgtccagtttgacaatccattgtaggtgcaagtcgggtctaatccgatctg

SEQ ID NO: 12 - DNA, 290 bp, Zea mays
  misc_feature: Incyte ID No: 700281825H2
  unsure 78, 112, 163, 217, 236: a, t, c, g, or other
ttcctacacccagcgacgaaaaggctgcgacaattcgaatcaaaaatccatccgagtcgaatcgagccagcggaaacnccgcggccgatcttctgtgctctcaccgcccgcntcccccgattctgcagcccctcgctgcgaatctggacgcgatttcgaggcnagggtttgggaggctccggatcgcgagcccgtgcggaggcaagggtttggatcnggggttgttgctgcatgtnggggttgctggatgagctactcggcgccggttgtgatggtggtgacggcgtgga

SEQ ID NO: 13 - DNA, 227 bp, Zea mays
  misc_feature: Incyte ID No: 700281827H2
  unsure 7, 13, 23, 34-35, 52, 87, 91, 93-94, 106, 115, 130, 151, 214, 216: a, t, c, g, or other
gaaaacngtcacnacaagaagtnacgttgcatcnncctcaacaagcaatccngcttcatatggttcggccaattcacagaaacagtngtcncnnccagcaaaagcnggacaaacntcctcagcgggtacnatgaatgaagcagatggaacnagaaatgcatacaacgcaaatggaaaccagtcagcaagatatgcagccaacactcagagcatncngcaaacgtcgg

SEQ ID NO: 14 - DNA, 297 bp, Zea mays
  misc_feature: Incyte ID No: 700281829H2
  unsure 17, 23, 25, 33-35, 52, 69, 107, 116, 129, 132, 182, 212, 214, 216, 228,: a, t, c, g, or other
cgcaattacagagatcnagagananagagagannnagagagagggcacatcnacgctagagcgacaganccacaaccaaccgagagggacagtccagtatggtggtngcgctcggncccggccggttcnacngcagcggcctgccgaggccgcgcttcttcccgggcgaccgcgtggacccnccggcgtccgtcaccgacccgctgctcgantngncgcgcgaacacnaggtccatgggcggcatcagcgtgaagcncctccgcctgcngnccgcatcganggctccgtcgacaagc

SEQ ID NO: 15 - DNA, 249 bp, Zea mays
  misc_feature: Incyte ID No: 700281831H2
  unsure 15, 39, 106, 149, 166: a, t, c, g, or other
gataatttgcaagtngtctatcggcattgtgaaaggacnggaccaccttcacacagcatcgcagaaaccaatcattcatggcaatctgaaaacaaataacattatncttgacgctgatttccagcccaggatatcagacttcggcctcnaccttctgctgaacccngctgctgcgcaggagatgcttgagacatctgcaatgcagggttataaggctccagagctgatcaagattagggaggcaccagg

SEQ ID NO: 16 - DNA, 278 bp, Zea mays
  misc_feature: Incyte ID No: 700281833H2
  unsure 157, 241, 258: a, t, c, g, or other
gacacacaccgctgcttcaagaaaccaccgagagcccaaccgcacaggcaggagagagagcagggagccagggacagtagcgtggggccggggagcaacgatggaggggaaggaggaggacgtgcgcctgggcgccaacaagttctcggagcgtcancccatcggcacggcggcgcagggcgccggcgccggggacgacgacaaggactacaaggagcccccgccggcgccgctgttcgancccggggactcaagtcnggtcttctaccgcgcgggca

SEQ ID NO: 17 - DNA, 185 bp, Zea mays
  misc_feature: Incyte ID No: 700281835H2
  unsure 11, 16, 26, 38, 45, 48, 99, 109, 118, 151, 163, 171: a, t, c, g, or other
aaaaggatccngattnggcttcagcntcagatgattcngatggcngcngctcggcagatagttcagatgggcctttgtgcaagcaggaacatgaggacnatcctgagangcctgaatnccctttccttcttagatttggtaattgtaagtntgcatcatcatnccaatatnaccacccaaaagac

SEQ ID NO: 18 - DNA, 129 bp, Zea mays
  misc_feature: Incyte ID No: 700281836H2
  unsure 16, 53, 74, 106: a, t, c, g, or other
gttttgaaggaatacnatggtttaaaaagtcaaaatctgtttgcttgtataangtaaaacgcagttcgaatacncacgctttagatagaccatggtattcgaaacngcgttttaccttatacagttttg

SEQ ID NO: 19 - DNA, 56 bp, Zea mays
  misc_feature: Incyte ID No: 700281837H2
  unsure 24, 26-27, 36, 39-40: a, t, c, g, or other
ctcgagcggcccctccctcccgangnnctcggctcncanngacgcccggctagggt

SEQ ID NO: 20 - DNA, 300 bp, Zea mays
  misc_feature: Incyte ID No: 700281838H2
  unsure 2, 71, 107, 298: a, t, c, g, or other
cnggactcctgatccaagggccaatattcatgagctttttctttgccatatcaaacatggttgagaaagtnccttcattcaaaggaggtggaacattgtggtttacngacctgacgactccagattctctttacatcttgcctatgttaacaggactgaccttcttggccacagtggagcttaacttgcaagaaggaatggagggaaatcctatggctggtaaaatgaagtacttttctagaggagtagctgttttgacagtcccattacaatgaatttgccaggcagtttctgttangg

SEQ ID NO: 21 - DNA, 214 bp, Zea mays
  misc_feature: Incyte ID No: 700281839H2
  unsure 2-4, 7-8, 20, 22, 28, 32, 72, 74, 76, 80, 83, 100, 102, 110, 121, 143,: a, t, c, g, or other
annnacnncaaacacttgcncngccgcnggcntcacaggtaaggccgccatggtctccggttcgggcgtgtncncnaaanatncgtggtcgacgcgcgcnancacatgcngggccgtctcncctcgatcatagccaaggagcngctcaatnggcagaaggtggtcgtcgtccgcngcgaggagatnngcatgtngggcggcctcgtccgtcana

SEQ ID NO: 22 - DNA, 295 bp, Zea mays
  misc_feature: Incyte ID No: 700281840H2
  unsure 2, 4, 10, 47, 51, 58, 67-68, 73, 78, 86, 89, 141, 144, 146-147, 160-161,: a, t, c, g, or other
ancngctcanccccagccctcggaaacccatcgcaaattcgcaaacnaacnccaaacnccaatccannccatnccctncctcatcnacnccgggcggccatggcctgctccttctccgccgccatcaccgtctcttccgcnccnannccggccgccaganncctcgctgtgccacgcagtccgtctgcatcgtcgcnccgggtcgccaacanngtnaggncgctccggctcgncggctcaagtccgnggggtaacagatcgttgccgggcagtatcgatgattgcgtggtnggaa

SEQ ID NO: 23 - DNA, 300 bp, Zea mays
  misc_feature: Incyte ID No: 700281842H2
  unsure 67, 78, 96, 100, 218: a, t, c, g, or other
gggcaatcaaagcttgcaaacatattgcatgctaatgaacttgccaggcgatttgaggaagataatntcaacataacngcaaattctcttcatccnggtnccattatcacgaaccttcttcgctaccacagtatcctagatgttctccatcggacgctgggtaaattggtgctgaaaaatgctgagcagggtgcggcaactacatgctatttggcacncccacccgcatgtgaagggcgtgtccgggaagtattctgcgatgtaactgtacgagccaagcgcgaacgccaaggacatgga

SEQ ID NO: 24 - DNA, 281 bp, Zea mays
  misc_feature: Incyte ID No: 700281843H2
  unsure 2, 9, 12, 20, 38, 46, 50, 123, 141, 165, 184, 242: a, t, c, g, or other
cncggcgcnccnctcccacnccccagcagccgccagcncgcacacncctnccctcgcgcgctcagggtttcggaatggaagccgaggcggcggccaagaggacgcgggacagcggggaggacnccgccgcggcggggatcnccgccgtcatcccgggatggttcnccgagatcagccccatgtngcccggtgaggcgcatctttgaaggtggacaaggtgctgttccaagggaagtcagatnaccaaagcgttatggtctatcatctctagtagggaagtg

SEQ ID NO: 25 - DNA, 299 bp, Zea mays
  misc_feature: Incyte ID No: 700281844H2
  unsure 19, 73, 136, 155, 168, 238, 284: a, t, c, g, or other
ggaaaggaagggttgaacnatgagcgccgtggcggtttcgtcgtcgctgaacccggacgcgccgctcttcatnccggcggcgctgctgcaggtggaggacttctcgccgcagtggtgggacctcatcaccaccacngcctggttccgcgaccacnggtcccgcgagcncgcccacctggacgagatgaccgagcagatcgacgcggccggcctcctccccgacgacgaggactcttcnacgacgaccagctcgagcagggccccgtcgccgccgcccttaacanagtatgatgtctctt

SEQ ID NO: 26 - DNA, 299 bp, Zea mays
  misc_feature: Incyte ID No: 700281845H2
  unsure 33, 116: a, t, c, g, or other
agcagagaggattcgtgtgaagctgaaaaatcngcaaagcaggccacaaccggtgtcaaaggataataaggctgcaaagttggaggctatgaaccggaagaatcgtgctgataacntcaagaacgcttcggaactgaaacctgtaaatacatctttgaaggctggagaggctggttatgaccctttctcgaggaggtggacaagatcaagaaactattatgcatcaaagccaggaggagataatgctgaagaaatgccaacaagtccagtagtatgtagagcctagcaatggagatata

SEQ ID NO: 27 - DNA, 245 bp, Zea mays
  misc_feature: Incyte ID No: 700281846H2
  unsure 53, 65, 123, 143, 188: a, t, c, g, or other
gtcggtccaggagcccagatgatagaaatccagggaataacctttatgtaacnggattgtctacncgtgtaacggaagatgatcttgagaagttctttagtaaagaaggaaaggttaagaacngtcatgttgttcttgatccnaggacaaaagaatcccgtggctttgccttcgtgactatggatacnctgaaggtgcaagacgctccatcaagtatctgcaccgcactgtacttgaaggtcgcc

SEQ ID NO: 28 - DNA, 219 bp, Zea mays
  misc_feature: Incyte ID No: 700281848H2
  unsure 58: a, t, c, g, or other
tgacccctagtgtccggatttaacttcaaacatggcggacgtcgatgtcgagccggangtcgccgccggtgctcccaagaagaggacgttccgcaagtacagctaccgcggcgtcgacctcgatgcgctgcttgacatgtccaccgacgacctcgttcagctcttcccagcgcgcgccaggagaaggttccagaggggtttgaagaggaagcccatggc

SEQ ID NO: 29 - DNA, 145 bp, Zea mays
  misc_feature: Incyte ID No: 700281849H2
  unsure 2, 11, 32-33, 60, 71, 73, 98, 103, 110, 113: a, t, c, g, or other
gnccatgaggnggcacggcgtcacgggagacnnacgacaatcttcgtcgtcaagcctccnccatgggcatncnttttgtccctcgttcgcctgatgtncctcnccatccnccncccccggagatcaatgagtggtaccagcaggc

SEQ ID NO: 30 - DNA, 106 bp, Zea mays
  misc_feature: Incyte ID No: 700281851H2
  unsure 15, 20, 22, 60, 62, 77: a, t, c, g, or other
ggctgtgcaaaagtngattnangaggaatttgaaggtaatgtccattgcggacatcctcntnccccaaagagagttntccacagccacggcatgactttatccaac

SEQ ID NO: 31 - DNA, 173 bp, Zea mays
  misc_feature: Incyte ID No: 700281852H2
  unsure 105: a, t, c, g, or other
ggcatgcagtgagatctaagctggtagagcttgggatatgaaatcagtgacaaggaatttgaagatttctttaaacgctacaaagaggtcgcagagaagaaaaancgtgtaacttcatgaggactagaagctttattgtcagatgagatattccagcctaaggttattggtcc

SEQ ID NO: 32 - DNA, 120 bp, Zea mays
  misc_feature: Incyte ID No: 700281855H2
  unsure 3, 15-16, 23, 26, 37, 61, 64, 80, 85, 88, 92, 101: a, t, c, g, or other
acntcactcttcacnnagcctcngcncctctgaaatngcggcggcgacttcctcttccacnacnttcggcaatcgggcgnaaacnctnaacnccggccccnccgtagccacagccgcaac

SEQ ID NO: 33 - DNA, 274 bp, Zea mays
  misc_feature: Incyte ID No: 700281856H2
  unsure 55, 158: a, t, c, g, or other
gcgcactcaatttggctttacatcgtcccatcgggcatgtatggagtcgtgaacnacctaaaggaaaagtaccataatccaatcatcatcatatcggaaaacggaatggatcagcctggaaacctcacgcgcgaggagtacgtgcacgacgccgtgangatcgatttctacaagaactacctgacggagctaaagagagggatcgacggcggcgcgaacgtgatcggctattcgcgtggtctctctggacaattcgagtggtgtcgggtacacg

SEQ ID NO: 34 - DNA, 321 bp, Zea mays
  misc_feature: Incyte ID No: 700281857H2
  unsure 227, 318: a, t, c, g, or other
gatcaccgacatggtgaaggagatggagaccgaacggcctctcgtcgggcaatgcctcccgctctgggaggacctgcgtggcaaggtcaggggctggtgccgcaagttcaacgtggacgaagccatcgccatgagcgtgctggagaggaggttcaggaggagctaccacccggcgtggtcggcggcattcatcctggacccgctgtatcttatcaaggacgtcagcnggcggtacctcccgccattcaagtacctgacgccggagcatgagaaggacttgcggaacgacgacgacagggacgcggactgctcatggangga

SEQ ID NO: 35 - DNA, 88 bp, Zea mays
  misc_feature: Incyte ID No: 700281858H2
  unsure 29, 31, 38, 42, 46, 70, 72-73, 82, 84: a, t, c, g, or other
gaccaacagcatctaatcaatcaagacancnccgtgcnagcncacncgccggggctcgccacgatgagangnncctcgcgtncnccac

SEQ ID NO: 36 - DNA, 133 bp, Zea mays
  misc_feature: Incyte ID No: 700281859H2
  unsure 8, 43, 61, 82-83, 91, 99, 114-115, 122: a, t, c, g, or other
gtgtcacngcaggtacgtctacttgggcctgttcgacaccgangaggaagccgccatgtanaataattggaccgcactgtgnncccgcgangcgtttcncggagcaccgccacnnccctctnggccgcgaaac

SEQ ID NO: 37 - DNA, 281 bp, Zea mays
  misc_feature: Incyte ID No: 700281861H2
  unsure 29, 163: a, t, c, g, or other
tgagccaatcaagcaaatcatcaagaccngcatgaatgaccagaaggagaaattgtggcccatgctgcaaaagctcaatgttaccatgaaggctgatgagaaggagttgattggcaaagctttgatgaagcgtgttatgcaaacgtggcttccagctagcacngctctgcttgagatgatgatattccaccttccttccccagcaaaggctcaaaagtatcgtgtggagaattgtacgagggaccccttgatgatgtgtatgcaatgctatcagaaatgtg

SEQ ID NO: 38 - DNA, 320 bp, Zea mays
  misc_feature: Incyte ID No: 700281862H2
  unsure 42, 106, 182, 190: a, t, c, g, or other
gcaggagttcttctacgaccaggtgcccgacaagctgcgcancttcgggctggcgctctacctcagcatcttcggcgtcggcagcttcatcagcagcgcgctcgtntcggtcatagacagggtgacgacggacaggggcgggagctggttctccaacaacctgaaccgtggccacgtggacnattctacnggctgctcgccgcgctcagcgggtcgagctcctcgcctatgtcttcttcgcggtgacatacaagtacaagaacagaggagccgtacatgcaactgttgatggttacgggaggagtaaatacatatatagt

SEQ ID NO: 39 - DNA, 300 bp, Zea mays
  misc_feature: Incyte ID No: 700281864H2
  unsure 96: a, t, c, g, or other
aaaggaaagttagtagtgaaggaaccaccaagagctgttagtgagcgggaagacaagctattcctcgaccagattgattccctaatggagcaaaangcagaggtcgatggtgacgctgacagtgaagaggaggaagatacaggaatgggggacgtcgacattacaaattctggcgtcgctgcttactaaggctacactggttgatttggatgagctttgctgtacagcaccagctaagttctaagccgttctgttggaagcagttctttctgttaggtgtggtgaatcgctgaacttgtt

SEQ ID NO: 40 - DNA, 98 bp, Zea mays
  misc_feature: Incyte ID No: 700281865H2
  unsure 22, 71, 97: a, t, c, g, or other
ggatcatggtgtaatttctatncctgatgtctcctatcaccacataacggaaaaggatgaattgttgtgcnggtaccgtggggttgggacgtgctanc

SEQ ID NO: 41 - DNA, 211 bp, Zea mays
  misc_feature: Incyte ID No: 700281866H2
agccactcaaaataaggaacaatccaaaactttgctgcaaggaattccacagctgccgaaggcctatttcaggcacaaataatgcttggaatggtgacaccacagatgatgcacatggcaaagagccaacagccctcgggctccttatcacaatcttcatctcacctcaatgagccatatccacagacagatgctatgattccgctagtct

SEQ ID NO: 42 - DNA, 249 bp, Zea mays
  misc_feature: Incyte ID No: 700281867H2
  unsure 12-13, 21, 30, 61, 105, 121, 142, 154, 161, 184, 193, 208, 212, 220: a, t, c, g, or other
cgcctttccatnncctccacnggcctcatnccccaacttccgtcgagcattaccgtcaganggcggcggcgcggcgcggcgccgcggcgacggggaccgcgtgangcaggctcccctcaangctcgtcctcctcgtcgggangcgtcgccgttnccccgcnctctgggctggcgcggcgtggangggacagcntgagatccgcccgtntctncttggatngttccttctcccgcagagggtatgagcaa

SEQ ID NO: 43 - DNA, 65 bp, Zea mays
  misc_feature: Incyte ID No: 700281869H2
  unsure 22, 29, 38, 41, 50, 55: a, t, c, g, or other
ctatcaacgcatagcagcttgntgatccntctttgcangancgattctantgtgnagccgtgata

SEQ ID NO: 44 - DNA, 315 bp, Zea mays
  misc_feature: Incyte ID No: 700281870H2
  unsure 53, 56, 104, 116: a, t, c, g, or other
cggcgccgtggcgatggcgctgctccacgccgggcccgtggagttcctctacnacnggttccaccgggcgctgcaccaccacttcctctactcgcgctaccacncgcaccaccacncctccatcgtcaccgagcccatcacatccgtgatccatcccttcgctgagcacatggtctactacgtcctgttcgccatccccatgctgtcgactctctacatggggaacgcctccgtcctgggcatcgtgctctacatcgcctacatcgacttcatgaacaacatggggcactgcaattcgagtggtgccaggtggat

SEQ ID NO: 45 - DNA, 99 bp, Zea mays
  misc_feature: Incyte ID No: 700281871H2
gcccggcagatcgcccgcccagtccaccggctcctgcagtcctgtcctcccctacccttcggaatcaacgcgagagcaaccggccctatcgaatggccg

SEQ ID NO: 46 - DNA, 179 bp, Zea mays
  misc_feature: Incyte ID No: 700281874H2
  unsure 60: a, t, c, g, or other
ggtcgatttcttgagagggatattcaacatgtttgacattgataatgatgcagctttacnacctactgagctggaggaccttttctcaacagcacctgaaaacccttggatttctgatccctataaagactgtgctgaaaagaatgtgttgggtggtctgtcacttgaaggtttctctc

SEQ ID NO: 47 - DNA, 285 bp, Zea mays
  misc_feature: Incyte ID No: 700281876H2
  unsure 49: a, t, c, g, or other
ggaaacttccttgttaaccttcttgggatgtggaaggagtctgaatacnctggccattctgttcctgttggtggtcttgcttactatgtaactgccccatcaagtttggctgatgtcctgcaaatccattccatgcactgttttatgtggtcttcatgctgtcagcttgcgctctgttctcaaaaacgtggattgaagtttctggttcatcagcaaaggatgttgctaagcagctcaaggaacaacaaatggtgatgccaggacatcgtgagtcaaacttgcaga

SEQ ID NO: 48 - DNA, 312 bp, Zea mays
  misc_feature: Incyte ID No: 700281878H2
  unsure 80, 99, 190, 193, 254, 268: a, t, c, g, or other
atccagggatggttacctggatttaaaggagagggtgatagcgaacagttccgactattgccatagttgcaaactatgancaccttcggtgctgtaccngcactttctgtgggaagcgacagcaatggaagtggagttgtggctcttctagagattgcgagactatttcagtctgtattcaaatcctaanacnaggggcaagtacatattctctttggggtaacatctggtggaccctacaattacaatggaanagcaagtggcttangagtttgatcagcgtgtacgcgagagcattgactacgcatttgc

SEQ ID NO: 49 - DNA, 217 bp, Zea mays
  misc_feature: Incyte ID No: 700281879H2
  unsure 14, 38, 144, 158, 166, 169, 176, 192, 216: a, t, c, g, or other
gtcgccgcgtatcncccttcagcttctctcccgtatcnccctgccaacggggcggcaacgcgagggtaagatggcggcggcggtgtctcgcgacgacgagctggtgatcaagtcaccaaacgacaagcggtcttatcgcctccnccgccttggcaacngctccgtnccnccttgtncacgaccctgagatcnacgccgacggttacccactcaganc

SEQ ID NO: 50 - DNA, 319 bp, Zea mays
  misc_feature: Incyte ID No: 700281881H2
  unsure 149, 155, 285, 305, 308: a, t, c, g, or other
tacccaatcaccgagccatggccatctcagtcactgccgtggccgccttgtccgctttctcggctcaaagaagcctcccgcagccgtaccgccagagggtcgtaacgttcatcgtcgtccggccggtgcgcgcgcaccgccggtttgtnggcgtngcggccagctcgccgcccacgccgccggatcttcgcaaagaaggtgtccgagagcatcaagcaggcccaggagacgtgcgcagatgacccggtgagcggcgagtgcgtggcggcatgggacgaagtggangagttcagcgcggcgccgantantgactcgtcga

SEQ ID NO: 51 - DNA, 84 bp, Zea mays
  misc_feature: Incyte ID No: 700281883H2
  unsure 41: a, t, c, g, or other
acagacaaagggcgtaccatgcatcgattgtggatatgcangggtggtggcaaggaaacttcttccactgtgtgaagtgtggat

SEQ ID NO: 52 - DNA, 180 bp, Zea mays
  misc_feature: Incyte ID No: 700281884H2
  unsure 44, 81, 95-96: a, t, c, g, or other
ggactcgggttaaaaccatacgcgatgtgaaaagcatgattganacgaaggctgatgttgctccgaagctacacgtaaggnagcttcggctaacnngcggaaaaaggaaccgacctaaaggggaaaaggctatttagctctcattggttcatccataagtcaatagtaaatataaagggc

SEQ ID NO: 53 - DNA, 297 bp, Zea mays
  misc_feature: Incyte ID No: 700281885H2
  unsure 14, 43, 49, 53, 62-63, 65, 80, 89, 105, 111, 147, 271: a, t, c, g, or other
ccgtcgctgacacnggggcccaacgctctcccccgcgtccgcncccgcntccnccccctcanncncctcctcctcttgtngcctccacngactctagccgaccgnccccgnccaccgacatcggaagccctagttgctgcaggaacngccctgccggcccgccgctcctccgctcgaaggtctccggtttcttggatgaccggctgctccgatggctgccttccgccgccgcagaggacaccgacgccgtggaatcgtgaagttgggcganaactggagaagagtcgcatgatccgg

SEQ ID NO: 54 - DNA, 307 bp, Zea mays
  misc_feature: Incyte ID No: 700281886H2
  unsure 292: a, t, c, g, or other
cgcctcccgtctttcctcaagaagtcgattcccttccccaagaacccaagcccccaccatgacaagctcctcctctccttcccgaaaggcgctgagcaagatcgcttgcaatcggctgcagaaggaactcgccgagtggcaactcagcccccctgctggattcaagcacaaggtctccgataacctacaaaggtgggtaattgaggtcactggagcggcgggcaccctttacgccggcgagactaccagttgcagttgattccctgagcattatcctatggaggcacctcangtcattttctcatcc

SEQ ID NO: 55 - DNA, 310 bp, Zea mays
  misc_feature: Incyte ID No: 700281888H2
  unsure 125, 199, 269: a, t, c, g, or other
gcgattcctctcccctcgcctcctcgtctccccctaggggatcgtcggagaggaatcgcaaagagggccgtctcatccgagttaaggaagccatggagcacaaggaggctgggtgccaggccccngagggacccatcctctgcatcaataactgtggcttcttcggcagcgcggcgaccatgaacatgtgctccaagtnccacaaggagatgataacgaagcaggatcaggccaagctggctgcctcctctatcgacagcatcgtgaangcagcgacgccgtcatggagccggttgttgttgcagcaaca

SEQ ID NO: 56 - DNA, 125 bp, Zea mays
  misc_feature: Incyte ID No: 700281889H2
  unsure 42, 59, 61, 65, 76, 84, 92, 112, 119: a, t, c, g, or other
gggaagaagaaaagaaaagagaaggaacaatgaagcatcccnaaacccaatcagaatcnanggtnggtaggcggangaaggaanggggaacncgacgagtcgtgacgacgangagcaanccgcgt

SEQ ID NO: 57 - DNA, 223 bp, Zea mays
  misc_feature: Incyte ID No: 700281890H2
  unsure 36, 123, 141, 153: a, t, c, g, or other
gtcttcggccagcttggcctccgtcttgcctgagcnaccacaccactgtcggtgctcgagtttttctgtcggtttggttgccttcagcagcttcgtttccgtagctgtttgtcttggcaatcngcatctgcatcatcagcngcttctgaaccnggtacacgcggtgcagctcgtgaacctggagaagtgaccattgaacagttttttttcagcattacgaatc

SEQ ID NO: 58 - DNA, 286 bp, Zea mays
  misc_feature: Incyte ID No: 700281891H2
  unsure 73, 138-139, 250, 270: a, t, c, g, or other
gcttgttggaggagtggatcgggtgcagcaagtgttatccatcggaaaacgtccacatattgtagttggaacncctggccgtcttttggaccatttgacagagactaaaggttttagccttaggaaaatcaagtattnnggtattggatgaagctgataaattacttaatgtggagtttgagaaatcccttgatgacatctaagcgagatgcctaaagacaggaggactttccttttttcagcgactatnaccaaaaaggtaaataaacngcaacgtgctgtctca

SEQ ID NO: 59 - DNA, 216 bp, Zea mays
  misc_feature: Incyte ID No: 700281892H2
  unsure 6, 11, 17, 37, 55, 61, 64, 95, 101, 113, 119-120, 130, 145, 152, 155,: a, t, c, g, or other
gaatcnttatntcaganatttaccggcattgtgtgtnttcaacataacccgcagnggcaanacncccactgaattatttgggcaagaaaagatcntttagntgtatccaaganagcacnnatcagaaacnccagaagtcagatcnatcgtcngcnttcggtttgtgaatnngcacngtggtgatgatcnncccgtcaatgagagtnatannggttg

SEQ ID NO: 60 - DNA, 309 bp, Zea mays
  misc_feature: Incyte ID No: 700281893H2
  unsure 9, 39, 58, 80, 88, 120, 134, 162, 183, 185, 195, 201, 203, 207, 212,: a, t, c, g, or other
ctgaccacncaggcgatccaggtcgtcgaatgttccacncgaaccgcagccgcgagtncccgtctccggctccgccacanggcagaanggtgcttcgttcgttgcaggcttggcgccacnccgtaccgtacacncgcgtttgctgatgttcatctaattacngtatatatctccgggcgaaananctagcaatcntcggcngnggangacgngcgagattnctgctcaagtttcangctctgntgtttgaaacntccagatngntaatttcggaaagaattgtngctgatcaagtggaagatngaaang

SEQ ID NO: 61 - DNA, 124 bp, Zea mays
  misc_feature: Incyte ID No: 700281894H2
  unsure 8, 20, 62, 84, 100-101, 112, 119: a, t, c, g, or other
caggtacnctttggtgaacngtgatgcatttctgttatgaaagtaatataaatggtgatgcnctcgtatcaaaaaaaaaaaatnccttgtgcacatggcnncggcaaagtgnatgatcncttga

SEQ ID NO: 62 - DNA, 253 bp, Zea mays
  misc_feature: Incyte ID No: 700281895H2
  unsure 2, 4, 22-23, 29, 36, 45, 48, 54, 85, 101, 117, 119, 148, 175, 177, 186,: a, t, c, g, or other
cncnaccaaaaaaacagcgacnnctaacncttagcnagctctttnatntcagcncctgagcatcgagctattggcatggcgcacnccaccaccttggcccnggtgattgtcgttgtncnggcgctcacctttggtgccacggtcagtntctccgctcccgtgaacaagtcgtgcntnacggtagcnccggcgccagcgtnancatnngctacngcggggcaaganccagcgccggcgtagctntnccttggcg

SEQ ID NO: 63 - DNA, 311 bp, Zea mays
  misc_feature: Incyte ID No: 700281901H1
  unsure 38, 61, 73, 96, 99, 122, 221, 228, 252, 263, 280: a, t, c, g, or other
cttactcgcgctcggcacaccggttctcagggcggcancgctcaggctcgggctctcagcnacggcgtcaacngcttcccctacccgcctaccgcnccntccgcacaccggccggtgacccngctgaactatagtcttatggcggcaagcgcgggcgagagccagggggtggaaagactcctctcctatgctgaagatctcgtggccgtcctttgcgtcanaccgacngcgacgacaatgcacaggtcgttnccgaattcaanaggtgctgtctgctgtngatccgagtctgagatctcgagatgcactca

SEQ ID NO: 64 - DNA, 125 bp, Zea mays
  misc_feature: Incyte ID No: 700281902H2
  unsure 2, 27, 32, 47, 89, 121: a, t, c, g, or other
tncgcttccttccccccaccgccagcntcgcntcttccgtgtgcgcnccccgccgggggtggcgtcactgcacccttgggcagcgggcncgtacctacctacgtgcggggggagccacacncctc

SEQ ID NO: 65 - DNA, 309 bp, Zea mays
  misc_feature: Incyte ID No: 700281903H1
atttggaagccaagggcaatggatttcatgatgcagaaaatgatgtagatcaagaaatggatgatgacaatggcgtggagcgtatacttagtgggaaattgagtgagagcagtggatatgctggcagtgacctctatgactacaaggcagtcaatgctgaggagtcagatgctgaacgccctgtgaagatgttggaaggaaatttgaatttgagcaaagtacagaacagcctttcaactgaaaacggttcagcgaatgtggatagcttactaagcgaaaataatccttctaacccaacagttggtcatg

SEQ ID NO: 66 - DNA, 127 bp, Zea mays
  misc_feature: Incyte ID No: 700281904H2
  unsure 7, 14, 16, 29, 32, 48-49, 90, 104, 109, 117: a, t, c, g, or other
ccgaacnccaaacncnagcttcgctcgtngcngcggcgagcggcgatnncgaagtctctgcgatccaaacgcgagaagcggcttcggacnttgcgccgggaganagcgnaccgttcnacgacaagaa

SEQ ID NO: 67 - DNA, 310 bp, Zea mays
  misc_feature: Incyte ID No: 700281907H2
  unsure 2, 30, 295: a, t, c, g, or other
gnccagtcgagtctcagcaaggaagatgtnggggaggggaaagaagcgtttcggcggtggcggcagcggcgagcccgcggccaagcgccaggccgcgaggggacgatggcccctccgaatccgctgaagacggtaccgtcgtagccgagatatcgaagaacaagaaggtatccgttaggagctggaaaggcagggtcttcgtcgacttacgcgagttctacttcaaggacggcaagactctccccacccgcaaagtatatcattccaattagatcatggaagatattgaaggacnacatcaaagccataa

SEQ ID NO: 68 - DNA, 312 bp, Zea mays
  misc_feature: Incyte ID No: 700281908H2
  unsure 19, 80, 256: a, t, c, g, or other
ggcatcattggccagcacnctgtcctcatggaaggttcgctggtggagaccaactcgatcctcgaagctggctctatatngcccccaggaaggcggattccaaccggcgagctctgggcaggaagcccagccaggttcgttcggaagctgaccaatgaggagatcatggagattccgaagctggcaactgccatcaacgatctgatgcagagccatttctcggagttcctggccttactctaacgcttatctggangtagagaagctgaagaagtcgttctccatcccctgtaagagcctgttgcctcattc

SEQ ID NO: 69 - DNA, 315 bp, Zea mays
  misc_feature: Incyte ID No: 700281909H2
  unsure 49, 96, 135, 156, 158, 195, 213, 281, 283, 291: a, t, c, g, or other
atatgaggttgtcacaggaacagccaagaaagagtccaaagaaaaaacncctaaaagcagcaacaagactaacaaatctggctcaaagccttcacnccaggtagaacccaactcaagggtcccaaagatgccacntcccaaaggacgaggagagtnancgggaggaaggtgaaccacaggaagaccatgagagtncgctgtgcggcgcatgtngcctaggttatggacgacttctggatctgttgcgacttatgcggagacatggttccacggcaagtgtntnaagatcancccaaataaagcggacacattcag

SEQ ID NO: 70 - DNA, 306 bp, Zea mays
  misc_feature: Incyte ID No: 700281910H1
  unsure 26, 49, 284, 295, 300: a, t, c, g, or other
agagtaggggggaaccaaatcttganggggaacggagagttctttcgtncgaggaggaaggggggcagcaggaggagggtagagaggtagctcaatagatctactgctgtcaggggagttaatgcaaagctgagttgctgcacgttggttttcttcagagatggcttcagctggtgtagccccatctgggtacaaaaacagcagcagcactagcattggtgccgagaagttgcaagatcagatgaacgagctaaagattagagatgataaggaagttgaagcancataattaatnggaangggctg

SEQ ID NO: 71 - DNA, 163 bp, Zea mays
  misc_feature: Incyte ID No: 700281911H1
  unsure 29, 53, 113, 125, 138: a, t, c, g, or other
cagctgacagacttcatcgagagtgagtncctcgaggatcattgcaccttgtngccacaccatgccaggttgtgcagcttctcattgaccagctgcacaacctgcatggtgtngaaaagtgaatnatctcagtctgancagactttcattcgagagtgcagtt

SEQ ID NO: 72 - DNA, 298 bp, Zea mays
  misc_feature: Incyte ID No: 700281914H2
  unsure 10, 43, 73, 97, 106, 114, 152, 165, 187, 195, 286, 294: a, t, c, g, or other
ctaaaatacncctatatgcaattactgttcatattcatccacncctactgaaatagtttatagttcataaggnattggagaaaacaaatcatgtcanattatatgncatggagntccgatgatagccaattgtctgtcaacactgagaagtncccagactcgtangtagctcgagatcaccatatcnccaacaangaagacaactcaccatcggatgtcgacggtctcccaggagctcgctccattgtccaacttcgacatggccacaatcctcaaatttgtcacntcctcagncccc

SEQ ID NO: 73 - DNA, 304 bp, Zea mays
  misc_feature: Incyte ID No: 700281915H1
  unsure 17, 25, 32, 35, 39-40, 60, 129, 131, 134, 165, 182, 239, 267, 288: a, t, c, g, or other
cccagtcgctcaaaacnctagagcnctcgccngcncgcnnccgccgccggagcgagctcnccatcttcatccgtcaaccatggcgacccagatcagcaagaagaagaagttcgtcagcgacggtgttancnacnccgagctcaatgagatgctgacgcgggagcnggcggaggatggctacnctggcgtggaggtgcgcgtcacgacgatgcgcacggagatcatcatccgcgccacgngcacgcagaacgtgctcggcgagaaggnccgcaggatcagggagttacnccgtcgtccagaagag

SEQ ID NO: 74 - DNA, 193 bp, Zea mays
  misc_feature: Incyte ID No: 700281916H2
  unsure 90, 99, 105, 111, 178, 184: a, t, c, g, or other
attttaaccgcttgcttctattcggaggaacacagtcatcaggcgagccagccagggacgggagttagagagaaggggtcttccatttanttttttccnctcggntgatcntccgcgccggccggtcgaagaaaggaggaagaagtatgtttggggattccaggtcctatcctcgatngccgcngtgggcggg

SEQ ID NO: 75 - DNA, 307 bp, Zea mays
  misc_feature: Incyte ID No: 700281918H2
  unsure 26, 41, 82, 144, 260, 284: a, t, c, g, or other
ccttatcccttccattcgcccaaacncccgccgccgtgacncctgccagcccgcggccttcccctcgttctaggcttcaacngccggcctcgtgtcttctgggcaagtgaagagagagatggcgtcgccaataccgcgcgagtnggtcgggctgcagcagtttcctccggccacccagaccgagctgcacgagctcctcggcaagctcaaggaggaggatgtgagcacattgacaattctggtgatggggaaaggcggantggggaagtcatctactgttaacnccatcgtcggggagaggatcgcc

SEQ ID NO: 76 - DNA, 270 bp, Zea mays
  misc_feature: Incyte ID No: 700281919H2
  unsure 87: a, t, c, g, or other
aattgctacccgtaaaggtgtacatagaacatgttaggggttctctctgctctgatgctgtacatgcatttgatcatggtgtctggngccggcagtgttgtgcctggcaggtccgcagtctttgatccgttcgttgctgaagtcgatgcacttctgagttgaaaaactggacgttcttcctattgaatattccagtaacatgaattatgttgcctgagaaatgtgcaaggcatagcctgatggctatatgaacaattcattagccactct

SEQ ID NO: 77 - DNA, 304 bp, Zea mays
  misc_feature: Incyte ID No: 700281920H2
  unsure 11, 48, 56, 83, 189, 210, 226, 230, 282, 293: a, t, c, g, or other
cgaggaatggngctaaagatgaccagaaccggaaatgtaatgggactnatgatgtnggtagcgagacgaatgctcagataacncccaagtagccaatcaaagcacgtaggcaggaggaatggagctttaaaccacaagaacaactctggcaggttgatgcagcgtatgcaacctgaagcagctgagacnccctattgattgtggtaatcncttgcctcgaaatgcnaatngacagatgcgacacaacagcgggcgcggtggagacatggatgaggaggaaangatgatggacnagctttgatgc

SEQ ID NO: 78 - DNA, 279 bp, Zea mays
  misc_feature: Incyte ID No: 700281921H2
  unsure 149, 231, 235, 275: a, t, c, g, or other
ggcagctgctgctcatgcagttgcagaggcagaggctatcatggcagaagctgaagcagctgctagggaagcagaagctgcggaagcagaggcccgagctgcacaggcctttgctgaagcagcagttttgacactgaagaacagaaatnctgcgaaattggtatagctcgagtccatgaatcttagatatgccctcttgtccttccacacgtagaatccagttccgtagcnctgnatgcaactaattggttactaaaagaacctgaaatcggaantttt

SEQ ID NO: 79 - DNA, 306 bp, Zea mays
  misc_feature: Incyte ID No: 700281922H2
  unsure 14, 59, 61, 73, 135, 137, 167, 174-175, 214, 299: a, t, c, g, or other
ccctgtcgcgcacnccacgggcgcacccgtactgggaggagggaggattcttgtttgananccgtcgctcacnccgattcgcggcttttcaggaccaccggcaattcaagcagcgctacttcgagttcctcgacnancatcgggcccccggcggcccggtcttcctncgcatcnncggcgagtccgcctgcgacggcatccccaacgattaccnggccgtgctcgccaagaagttcggcgccgcggtggtgacgccggaacaccggtactacgggaagagttctccattcaagcagtgnccaacgg

SEQ ID NO: 80 - DNA, 305 bp, Zea mays
  misc_feature: Incyte ID No: 700281924H2
ggatttgacatgccggattgagaaaagcgcctcctatgatgatgtgaaagcagccatcaagacggcatcagagggtgcactcaaaggtattcttggctacacagacgaggatgttgtttccaatgattttgttggtgattcaaggtcaagcatctttgatgccaaggctggtattggactgagctcttccttcatgaagctcgtgtcttggtatgacaacgagtggggctacagcaaccgggttctggatctgatcgctcacatgggctcttgtgagcgccaagcactgatgttcgtactcgttc

SEQ ID NO: 81 - DNA, 306 bp, Zea mays
  misc_feature: Incyte ID No: 700281925H1
  unsure 4, 7, 17, 19, 44-45, 64, 109, 152, 210: a, t, c, g, or other
agcnccncctcctcctncnccccagtccctcccaggctcccacnncgccttgctcgcagcctcnccaaaaccctagccctagccctagccctagccctagctctcccanacccgcactgggagatggacggcggcggcacgcaccgcacgcnggaagacgtgttccgggatttccgcgcgcggcgggctggtatgatcaaagcgctcacnaccgacgtggagaagttctaccagcagtgtgacccagagaaagagaatctgtgtttgtatggtcttcccaatgaaacatgggaagtgaacctgctg

SEQ ID NO: 82 - DNA, 300 bp, Zea mays
  misc_feature: Incyte ID No: 700281927H2
  unsure 15, 72-73, 98: a, t, c, g, or other
gttgcaacggatgtntcaaaaggcatgagctacttacaccagaataatattattcatcgtgatttgaaaacnngcaaaccttctgatggatgaaaatnggactgttaaagttgctgattttggtgttgcacgtgttaaagctcaatctggagttatgactgcagaaactggtacttaccgttggatggccccagaggtcattgagcacaaaccctatgatcacaaggctgatgtttttagttttggaatttgatgtgggaatcactcacagggaagatccttatgagtacctgactccac

SEQ ID NO: 83 - DNA, 300 bp, Zea mays
  misc_feature: Incyte ID No: 700281929H2
  unsure 195, 215, 229, 247, 253, 279, 282, 285: a, t, c, g, or other
accagagatgagtaaacggaacttattctgggtggttagccagatgcaggctatcatcgagcgttatccatgctggggtgatactgttgaagtaaatacatgggttagtgctaatggtaaaaatggaatgcgtagggattggcatatacgtgattctatgacaggtcacacaatactgaaggcgacaagtaaatnggttatgatgaacaaactcnctaggaagcttgcnagaattccagatgaagtncggacngaaatagagccatacttgttgggcgntcngcnaatgccgtgaagaca

SEQ ID NO: 84 - DNA, 298 bp, Zea mays
  misc_feature: Incyte ID No: 700281930H2
  unsure 9, 18, 37, 54, 145, 196, 226, 245, 247-248, 294: a, t, c, g, or other
agcaaatcnccaattccnccgagttcgagcgaccatntcggggcgtggcaaggncgggaagggtctgggcaaaagcggcgcaagcgtcaccgcaagttctccgcgacaacatccagggcatcacgaagccggcgatccggaggcnggcgaggaagggcggcgtgaagcgcatctcggggtcatctacgaggagacncgcggcgtgctcaagatcttctcgagaacntcatccgcgacgccgtaancnncacggagcacgcccgccgcaagaccgtaccgccatggagtctctanacct

SEQ ID NO: 85 - DNA, 300 bp, Zea mays
  misc_feature: Incyte ID No: 700281932H2
  unsure 87, 91, 95, 117, 202, 232, 244: a, t, c, g, or other
gatggtaaccaatacttgatcaaccttattgactcgctggacacggtgatttttcttcggaagtcacagtgtcctcgcatcaacgtngtgntctngttgtgggtgactgtattgaangtgtctgtgtgcaaactgaaactgtgcttcgccaagcccctggtgagaagattaaggcagttctcacggtgaacaagatggacangtgctccttgagcttcaggttgagggtgangaagcgtatcanactttctcccgtgtcattgagaagccaatgtcatcaggcaacatatgaagataagc

SEQ ID NO: 86 - DNA, 288 bp, Zea mays
  misc_feature: Incyte ID No: 700281933H2
  unsure 23, 32, 50, 137, 187-188, 193, 225, 282: a, t, c, g, or other
catccgccaagattccgtgcacntcgaccgcngccgccgctatctgttantccccgcccccgcgaccgcggcagcctagcaggaggggaggatccatgtctagtttctagagcagctgcttgcgtcccttgcaaatnacatcgaccgatggggatacccagcgacgacgtggtgcaaatccgccacnncgacnccgctggcgagcccaccgtcgtcaccgtcagngccccgacaagacgggcttggctggaactatgcgggtcgtcctctcttccgctcagntcgtaa

SEQ ID NO: 87 - DNA, 297 bp, Zea mays
  misc_feature: Incyte ID No: 700281935H2
  unsure 25, 27, 51, 61, 113, 248, 255, 261, 273-274, 278, 284-285, 294: a, t, c, g, or other
ctctatcttccttccccagctcacncnccagcgcatctgattttttccacngccgcgcgcnagtgtgcatcttctgaagatttttccaccggatgtctcatcttatgccctcncctctccatttcttacgtagcccagatattccagcagccgttcgctcgaatccaccgccgctcctgccccaatggcgcacgcccacctcctcagccatggagctcacgagcatctccctacgccctctgcaatcngtgttcncatctngcagctcgcttnntgtncccaannatggaggtnggc

SEQ ID NO: 88 - DNA, 300 bp, Zea mays
  misc_feature: Incyte ID No: 700281938H2
  unsure 6, 30, 45, 52, 82, 169, 255, 276, 286, 291, 293: a, t, c, g, or other
gcagcnccaagagagcttgacaaatcaccnggttctgtccgaacngctgccnggcttcatagtgaccaaactatattgagtncctgcactgacatgggtggagtaaggctatgggatgtgagaacaggtaaaattgtccaaactcttgaaaccaagggcttctattacncagtgcacgaagtaagccaggatggcaggtttcatcatacagcagatgggctccagtgtaaaattttgggacgcgaatcattcggncttgtgaaaagctaggtatgncgggcaatgnggggncnccccccc

SEQ ID NO: 89 - DNA, 143 bp, Zea mays
  misc_feature: Incyte ID No: 700281941H2
  unsure 24: a, t, c, g, or other
cctgcagccctccatccacgaacncccgttctccatttccagccatggcggtgtcgatcgagctcaccaaggagtacggctacgtcgtgctggtgctggtggcctatgtcttcctcaacctttggatgggcttccaggtcggc

SEQ ID NO: 90 - DNA, 300 bp, Zea mays
  misc_feature: Incyte ID No: 700281942H2
  unsure 6, 37, 44, 100, 134, 161, 187, 200, 226, 230, 241, 268-269, 279, 284,: a, t, c, g, or other
gcagcnggaggaccaggcggcggccatcatgaaggcngcgcgcnccgagatcgcggcggcgcttaacaagatgaagaaggagaccaccgcggagctggangccaagctggacgagggacgcagccgtgtggagnccgagctcgtagaggcgctcgccaacntcgaggcgcagaaggaggaggctgtnaaggcgctcgacncccagatcgcctcgctcagtgatganatcntcaagaaggtnctcccatccgcgtgatgaaaccaaacnngccctgcctnatccnacgactatnntnacat

SEQ ID NO: 91 - DNA, 298 bp, Zea mays
  misc_feature: Incyte ID No: 700281943H2
  unsure 12, 158, 219, 267, 287: a, t, c, g, or other
ggcgctcatacnccaacctcgacaagctggtcgccgacgtgctcctctcgggtggcggcaagagttctcaggagggtttcagttcgcacaccgccactgtccaatgattcggactgaacatggatggtagtacaccaaaagagaagtttgtgtgaatntcgaggcaaacccataaatcatggagcatgtgatggaatggaaggaccgaaggagccagtngcggaagaagttacttctcgtataggcaaaaattggatatgaaaaccnggaagctaagagggttaatncctaattacta

SEQ ID NO: 92 - DNA, 300 bp, Zea mays
  misc_feature: Incyte ID No: 700281944H2
  unsure 34, 62, 64, 150, 170, 178, 263, 275, 284, 293: a, t, c, g, or other
ctccttcgccaccagacctcaagcgcgccacacnccgccgcacgggagccgcgcgccgcacncnccgccgcttcttcctcaaaaccagaggtctccccccgtcccccgatccagcgtctccatggccgcgccgcagcctgtcgcccccgnctccgaggcgccgccgtctncgcaaatngtgggcaacgcgttcgtgcagcagtactacctcgtgctgcaccagtcgccggatctggtgtaccgcttctaccaggaggccagcngcctcgctcgcnccgcatccnccgccgganccgccgg

SEQ ID NO: 93 - DNA, 144 bp, Zea mays
  misc_feature: Incyte ID No: 700281945H2
  unsure 10, 101: a, t, c, g, or other
accgcatccnctacaagaagcggacccgccggattgtccaatatgaagcgcgctgaagagtgaagacaagggaaaacactgaagatggttgatctattacncgccacattacctatgtaaacagtcttctgggggaaatgaaaa

SEQ ID NO: 94 - DNA, 297 bp, Zea mays
  misc_feature: Incyte ID No: 700281946H2
  unsure 57, 107, 178, 205, 216, 224, 226, 248, 258, 260, 285, 293: a, t, c, g, or other
tgatcaaccagccagccgatctcagcgatccgccatggccaccgcgtattacgagangccccgtggcggcgccgtcgaggaggcggacgacttcgatgagttcgacnccacgccgtacggggtgggtacgacctcgccgtcaccttcggtcgcccgctgccaccgtccgaggaaaccngctacccgtgctcggcgccctcgaccntcctacgacgnaccgcacnangccgctccgagccgtcccctanggtcacaagncnagccaaaagcccaattatgggttcngccccaanagga

SEQ ID NO: 95 - DNA, 357 bp, Zea mays
  misc_feature: Incyte ID No: 700281949H2
  unsure 25: a, t, c, g, or other
cacaaagacaattatctcgttgtcngccggtgtcagcttcctccagatcaagaagcggcaggtagagcagagaagccagctagctagcgagctgaggagagatggaagcgcagaacggctacagcccgcttcttgccggggacgaccacgaggcgtcggaggtggcgatccacgccaccggcggcgctggtgatgaaggcgacgacgtcaagctcaggctgctcgggtacaagcagcagtcaagcgcgacctctcggtggtagccaattctccgtgagttctccatcgtgtcggtggtaacgggcgtgacgacgctgttcgggacgggcttcagttcggcgggccggcgacgatggt

SEQ ID NO: 96 - DNA, 351 bp, Zea mays
  misc_feature: Incyte ID No: 700281953H2
  unsure 66, 185-186, 237, 291, 318, 336: a, t, c, g, or other
gaatggcacagcttcatgggatcgagtctgtcggatatgtatcggaagccagttttggagaaatcngctgacacatctgatgaggagcctgacattgatatcatgaagctgctgaaagatgttgagatcattggtgcccctacatttaaggggcgaaagcaaatcgagaaccgcagagtagttgnnttgggtggaaagtccgttaagaagcaccgcacaccattaagtgttgcgaancagctctgaagaatcagaagaaacgagaacagaagaaaatggaagaggaaaaancacttgggatctttaggaagagggacnaggacaccaaacctcacnagaccaggccagagg

SEQ ID NO: 97 - DNA, 353 bp, Zea mays
  misc_feature: Incyte ID No: 700281954H2
  unsure 151, 179, 197, 199, 267, 285, 288, 322, 330, 348: a, t, c, g, or other
gcagagcgagaggagttcaaacaatcaaagagggaatttaaattgtaagatattgagatattggagtcaaacacaagatagcaatgtgatgcgattgtagagatccctcatgactcatgatgtcatgatcaataataaaaataattaaaanacgaacacaacatttaggattatgagangcggtcagcaagtgtatncnaactggctagacttaaagatcaccttcaacatgtgttttgaataggatgtaccatctatgtataaatnggggtcgtgtctgtctcntgntatgattttcatcacacgacagtatagttagaangggattcntgtcaccattattatggnccccg

SEQ ID NO: 98 - DNA, 348 bp, Zea mays
  misc_feature: Incyte ID No: 700281955H2
  unsure 236, 257, 327, 329: a, t, c, g, or other
gggacgcccttggctgattaattaggaaagctagtggaggactaccttacccgaaaggggcaagggcagtaggggagtggtcagtgtagggaggccctcgggaggattttgctgcgatggcggtcctgcaagggaattcctgcattggagcttcctataaactgtagcgggttttctgaagctagtggaactttgtaaaggcctcgtagtgttaccctgcctcgcctcctcggtanaagtgtatgggaatcgcgatnccttggcagatgggtaacatgacttgtgggtaaagatgcgcaactctgcagagtggtaaactggtatacnanccgtgctcacggtcatgag

SEQ ID NO: 99 - DNA, 348 bp, Zea mays
  misc_feature: Incyte ID No: 700281957H2
  unsure 270, 341, 345: a, t, c, g, or other
gcttatcagactccaatgcgggaccctggagcaacaccaatacatgatggaatgcggactcccatgcgaagttcgagcctgggtcctatgagtcctccaagggacaattgggaagatggaaatcctgctacttggggtagcagtccagcttaccagccaggaaccccacaagctcggccatatgaagcccccacacctggatcggggtgggcaaatactccaggagttagtttcaatgacgctcctactcccagggataatatgcaaatnccccaagtccatacgtgccttccacacctgttggtcaaccaatgacgccaaactcagctcgtaacttccangcanact

SEQ ID NO: 100 - DNA, 350 bp, Zea mays
  misc_feature: Incyte ID No: 700281958H2
  unsure 11, 136, 157, 196, 289, 327: a, t, c, g, or other
caccgagaccntcgcattcaccgtcgtcatgaagaacccgctccgggcagccttcgtcgagcgggccacgacggagacggcgacaaccgcgtgatgagcgacaacgaaaagtaaaaaaaaacagagagaagttacnagtacaagttactctttcacngggctctggcagggtgggtaagttgctgcaacgtgcgtntcgtgcggggttaattcggtcccgcactctgcggtataaattacagttattaattaattagtccacggggaaggtgcgtgatcatcatatacngtatggatggattgatcggttcatcctacctgttggcnggtcgacggatggctggatggac

SEQ ID NO: 101 - DNA, 346 bp, Zea mays
  misc_feature: Incyte ID No: 700281960H2
  unsure 316: a, t, c, g, or other
tcactagcgaggcgagtgacaagtgccagagggagaagcggaagaccatcaatggcgacgacctgctgtgggccatggccacgctggggtttgaggactatattgaacccctcaaggtgtacctgcagaagtacagagagatggagggtgatagtaagttaacttcaaaatccagcgatggctccattaaaaaggatgcccttggtcatgtgggagcaagtagctcagctgtacaagggatgggtcagcaaggaacatacaaccaaggaatgggttatatgcaacctcagtaccataacggagatatctcgaactnatgaagacatggacctttctgcaacagctg

SEQ ID NO: 102 - DNA, 343 bp, Zea mays
  misc_feature: Incyte ID No: 700281961H2
  unsure 23, 29, 38, 51, 69, 284, 299, 302: a, t, c, g, or other
atcaagttccacaaaatcgcatntcatcngcttcgacncccaccgaggacncccttctttcctcccacnacccatctgctctcctcgccgccacctgcgccgtcagagcacggagcagtccgcgaccacgctttcgctgccgctctccgacaggcgacggagccgcagctccagtcgcagtcggctcccctgaattcgggctcgccaaataccctaccaatcgtctgcgtccgtcgtccgggattccggtgcaactgaatccggcaccaactgtgccgcctgtnatggcattggaaganganggaggagggatcaagagttaagtacgtattatagattggcc

SEQ ID NO: 103 - DNA, 348 bp, Zea mays
  misc_feature: Incyte ID No: 700281962H2
  unsure 50, 142-162, 345: a, t, c, g, or other
gcagcggctgccccccgaaagcaaccacagtcacgtcgctatcgccagcnccaccagaaaaacgcatcccacgcagaacccctcgcactcctactccctctctgcctccctttcctctccttgtgcccgtcgcattgaaatnnnnnnnnnnnnnnnnnnnnncttgcgccggtgctagctgcgacgtgagcccgcagcagccactgccaaggacttcctggcccgcccggcttcgctgttgccggaaaggcggtggctttgggggaagcaaaagcaagcgacggttgcggaaggttcttgcggattcgcgcgcgggaggaatggcagcgcggtcgtcggcggcancgg

SEQ ID NO: 104 - DNA, 343 bp, Zea mays
  misc_feature: Incyte ID No: 700281963H2
  unsure 4, 145, 179, 275, 290, 332: a, t, c, g, or other
atcnctctccagtttcccccagttcccgtttccatctccatccttccccccgggagcaggagctgcagccaggagtcgagtcggcgtcgtcacgggagatatcagcttcgctatcaccggatcccccctctgctccctccgcacntcccatctgcgctctctgttttcttccgcgcacnccggctgttggtgtcccgtccggcggcgttgctggtggctgaatccgagccttgaggggtctgctgctgcaaccgctgccaacgttcttgagatanctttcttgattgganggattaaagagggatcttgcttcctaatggagcaagagaaangggagaagtgt

SEQ ID NO: 105 - DNA, 309 bp, Zea mays
  misc_feature: Incyte ID No: 700281965H1
  unsure 86, 88, 102, 169, 234, 254, 300, 304, 307: a, t, c, g, or other
ctacccggaacttcaggcctgaaagtctccttggagaagggggttttggatgtgtttttaaagggtggattgaagaaaatggaacncncacctgtgaaaccnggtacagtctcacagttgctgtcaagacgctgaaccatgacgggcttcaagggcataaagaatgggnggctgaagttgattttcttggaaatcttcaccatcccaatttggtcagattgattggatattgtnttgaagatgcccaaaggttnctggtctatgaattcatgcctctggcagtttggataaccatctttntagnacncc

SEQ ID NO: 106 - DNA, 335 bp, Zea mays
  misc_feature: Incyte ID No: 700281968H2
  unsure 110, 125: a, t, c, g, or other
cggttcacttctccaggtaaggaaagggttcgtactcatggcgccgccgcagccaaagtcgggccttttcgttggcatcaacaagggtcatgtcgtcaccaagcgcgagngcctccccgcccgtnccaccgcaaggggaaatcaacgaagagggtgtctatggtcaggggcctgatcagagaggttgctgggtttgctccttatgagaagcgtatcatgagcttctgaagttggcaaggacaagcgtgccctgaagcttgctaagagaaacttggaactcacaagagggcaagaagaagagagaggagtggcgggcgtctcagaagatgagtcgg

SEQ ID NO: 107 - DNA, 343 bp, Zea mays
  misc_feature: Incyte ID No: 700281969H2
  unsure 333: a, t, c, g, or other
agattatgttgctgggcagatctttgatttagctgataaactagagcaagctgaaggccagctggcacacagtcgatttggtggtatgattatgccatcgcaacgaaagaaagagcaagaagagtctccactggctaaggtaacacgagatagctccaaaatcacagctgagcaggttcacggcctcatgtcacaggtcataaaagacatccttttcaatctgttcacccgtcaagcaaggcaagcacaagtgctccaccagattcatccggtcctgagcctatggttgaagctgagttccagcggaaggggacaatggatattgtggtatgntatctgatcc

SEQ ID NO: 108 - DNA, 339 bp, Zea mays
  misc_feature: Incyte ID No: 700281970H2
  unsure 2, 311, 325: a, t, c, g, or other
cnggggagaaacggaagggcaacagcagagcgcgaattcctcagacaaatccaaggtttcgagcacagacacaggcgaaactccgatggcggaggggtccaagccggacgtgccgctgttccagctcctcagcgatcttctccagcaggtggagtcaatgagcaatcaggaagaagtagagctgcgcgctaagattgaagcattaggattagaagtcactaaggtaccagagcagcccgctaatcatctcagcgagctagaaatagtgcagagttggacaagctgtcatcgggttgataacgtcgacaagngatatcatctgccnggctcagttccgag

SEQ ID NO: 109 - DNA, 344 bp, Zea mays
  misc_feature: Incyte ID No: 700281972H2
  unsure 7-8, 29, 62, 70, 97, 163, 202, 223, 256, 308, 312, 321, 325, 330, 337,: a, t, c, g, or other
acgaatnncctagcagcaaagttgaaatngctgaagctcatgatcacagcagaaaagaaccncagttatntcaacgtgcctgattcaggggcaagtnagtctaaacaccgccatggatctgacgagaggcagccacttcttcccgtatgattttgtagaagangcgcactgtttcctcaacagagcagcatgtaaagagagnatttttagcgggtattgaccnaattgtctctgaagcaacattggtgccagctgntggccgggtaaagtatatgcaaatcggcggccgttcacgagcttcgtgaatnacancaatagagnaatnggccntggatgnatgagnc

SEQ ID NO: 110 - DNA, 106 bp, Zea mays
  misc_feature: Incyte ID No: 700281973H1
  unsure 20, 88, 101: a, t, c, g, or other
ggcaatcatcccatggcacngtcattttagagacacttttcttcaggaagaagttcagtcggagtatccagatgtccctttctgtgcntcttcttggtgtnggtga

SEQ ID NO: 111 - DNA, 335 bp, Zea mays
  misc_feature: Incyte ID No: 700281975H2
  unsure 76, 143-144, 222, 323: a, t, c, g, or other
tcttcgtctatctctctcccgactcggaaggaaaccctaggcgccacgcgagggttctcgaaccttcgtccccacncccccgattcggaagccctagcctggaagttccgggatcttctggcgcgggaggatggcgggagganncgtggaccagtcgctgctgccccagatccatgccctcttctccgacccgcttcgcgtggtttcgtacaaatgggctcngtcggaattctctgtgtcatcaaatgatgccaagaggttgcttcaggactttgtcaacaaacatggaatgactgcaagtgattacagtgtgtcggggtggntgaagaacatcc

SEQ ID NO: 112 - DNA, 340 bp, Zea mays
  misc_feature: Incyte ID No: 700281978H2
  unsure 3-4, 25, 31, 43, 144, 198, 247, 272, 289, 299, 330, 333: a, t, c, g, or other
acnnggaagatctcatcgtggaatntcatcnggtggtgatgtngcctatggactgatcagactgatgatgaccccatatgaggatgaatttgatgaagaagatgagatgaacatgtaccgtgtccaaggtacattgagggagtnggtcacaagagatgaagtccgtcgctttattgcaaagaaatttaaagaatttcntctgacatatgttcatccgaagaacgatcaaggagagtttgagtatgtncggcttattaatgagaggtttagcnaacaagtgtagcctggnaatagatacnagcagtttatttatatacatcccaacattgncanccggtgg

SEQ ID NO: 113 - DNA, 343 bp, Zea mays
  misc_feature: Incyte ID No: 700281979H2
  unsure 96, 319, 338: a, t, c, g, or other
cctttgtcttcacgtccatcgaacgagcttgaggagattgctctcgctgaagctgatgttgcaaggttaaaacagaaggttgcagagctttcaccnccaactcaatcaacaacgtcaacaccagtatggctctgtagtggatgcaaatgatcgtcatcaccgcctccctggtcattctcacagcaaaactttgttcaacaaggatttgatatgaaccttgcttctgcaatcaagagaagcagagaaatgaggagagttcggtggagtcatcacaatggagaaacctccagcagcatgtgctaccttatggttcttcganggccattcacacgaaagcnttcat

SEQ ID NO: 114 - DNA, 125 bp, Zea mays
  misc_feature: Incyte ID No: 700281981H1
  unsure 2, 23, 25, 27, 54, 58, 91, 93: a, t, c, g, or other
anacgaccagcaggaggtacgananangcctcctaggtggtcttgctcgtaccnaccngctggtcgtctgaagaagataggtggaggaaangngggcgagcgtatggtttgagggaggaagaagg

SEQ ID NO: 115 - DNA, 300 bp, Zea mays
  misc_feature: Incyte ID No: 700281982H1
  unsure 42, 54, 81, 111, 182, 199, 207, 260, 262, 270, 277, 280, 284: a, t, c, g, or other
cttgcaaagcgtgcaatcacaacattttctagaaagaaagcnccggcatgaacncgcaaaaaagggttcttaatgcagacngcacaaaggcaagctagagaagctgaaggnagcattggttcatcggacacagagcctaacagtaaaaaagaccaattagtgttggacatatgtgtcatatnccttgagcaagagtacnatgctgtntttgtgccgtgcggtcacatgtgttgctgtatggctgctcttcacatttgacnanctgaccgnttgccgnagnagantgaccagctgtcggac

SEQ ID NO: 116 - DNA, 297 bp, Zea mays
  misc_feature: Incyte ID No: 700281983H2
  unsure 277, 285, 290: a, t, c, g, or other
gcgcacttttcaaatcgacaaaggggaaaggttcgcttcttctcgcatcttgctttacttcgagtgccatggccgatccggcggaggagaacgttgtctcgccgccaccgacccctgcggccccagccgtgggcgcctcagactcgcccctgcagcctgttgctgacggcgcctcaacggagaaggtgtctgccccggcgccggaagtaaagtcccggggattcaggcttcttggagaggacattccgtgcacaaatcccttgggggcggtaaaatntctgacgntctgntatggaa

SEQ ID NO: 117 - DNA, 333 bp, Zea mays
  misc_feature: Incyte ID No: 700281984H2
  unsure 3, 7, 10, 21-22, 62, 79, 130, 189, 206, 233, 310: a, t, c, g, or other
gancgcntcnacagcacaganncggcggcggctagggcacagaggaggcggcggcacgagcnccgtctgcacgagatcnggcggcgacatctacaccggctcaccggcgtccacgaggggaacgccactngctgaccggcgccatcccgtcggtgtccgcttctcgccgtagatctttacatcgatgtngccggccatggagtacncccaagtggtaggcaatcgtcgagacnctcggctaacacccaagaggaagcgaggacgcggacggtctgctccctcggtggaaattacggcgaagatggcagcnggcgggcttgttccattaaaaat

SEQ ID NO: 118 - DNA, 328 bp, Zea mays
  misc_feature: Incyte ID No: 700281986H2
  unsure 42, 86, 91, 99, 181, 195, 222, 229, 269, 285, 305: a, t, c, g, or other
gggcaatcatcccatgcactgtcattttagagacacttttcntcaggaagaagttcagtcggagtatccagatgtcccttctgtgnttctncttggtgntggtgttgcaactgtcactgatctgcaactcaatgctgtgggatccatactgtccttgctggcaattatcacgacttgcatngctcaaattatganaaacactatccagaagaagttcaaggnctcatcnacccaatggtttaccagtcttgcccttaccaatcatggancctgttctccatgggncctcctggatggcttttganaacccaaatgccttgctttaata

SEQ ID NO: 119 - DNA, 298 bp, Zea mays
  misc_feature: Incyte ID No: 700281987H2
  unsure 35, 157, 229: a, t, c, g, or other
ctcagatgttgacatgagggacaagctcacaaccntcatcctgaaaaacccaccagaacagaagaagggaggaaaagaccagaagaaggccatgaggagagctgagaaggaacgcctgaaggaaggtgaggctgctgatgaggagcagaagaaactnaagaaggatgcaaagaagaagggtgcatcttccaaggagtctactgccaagggttcaaagaagaaggctacngctggtggctctgatgaggaccactcaacctctccaattcgcagccgtgatggtgaccatgcagcttcg

SEQ ID NO: 120 - DNA, 96 bp, Zea mays
  misc_feature: Incyte ID No: 700281988H1
  unsure 23, 58: a, t, c, g, or other
gaagtcatcatccatcgcttgtngtccccccatcaaaccttcgagagccatggcgaanaggcgtgcagatgcgaatgcaacaacatcagtggaggg

SEQ ID NO: 121 - DNA, 317 bp, Zea mays
  misc_feature: Incyte ID No: 700281990H2
  unsure 58-79: a, t, c, g, or other
gcacgcctcgctcggagctggagactggaggtgttaggcgcttaggtgtagctctcgnnnnnnnnnnnnnnnnnnnnnngtagacgacgacggtttcttaggtgagctagataccgtgactagtctcgtatagtgcgatttgttatacgtgctatggtctagcgccgccgacgactgagagtccgagtgtccgacacacctattgactggccacggcatgtcgaattgaacgacaaaaagaattctgatgtcctggagctgcatgcatgctaccttgaagcagaacaataagctaatggaatcctttggcctctgct

SEQ ID NO: 122 - DNA, 330 bp, Zea mays
  misc_feature: Incyte ID No: 700281991H2
  unsure 72, 155: a, t, c, g, or other
gcgaggacaacaggaagttaatggcaatagttcagacactgagctctttgttgaggatcacacattgaatcnaatgtagattaaatgatgctcccctaagtcgtttaacagaaaatggaaagggtccatcaaatctgatgtccgctcatgaaacnccattatcagtgggagagattcttctgtctttggatgctggaattccattaccttgtcgtgcagctgaatattctagcaaacccaatggaactcagcagcatgtgaagcgtactaacttatggggatggagcaatgtgagaaagggccaacgatcggagttagttgatccatcag

SEQ ID NO: 123 - DNA, 327 bp, Zea mays
  misc_feature: Incyte ID No: 700281992H2
  unsure 7, 236: a, t, c, g, or other
caccgcngcttcaagaaaccaccgagagcccaaccgcacaggcaggagagagagcagggagccaggggacagtagcgtggggccggggagcaacgatggaggggaaggaggaggacgtgcgcctgggcgccaacaagttctcggagcgtcagcccatcggcacggcggcgcagggcgccggcgccggggacgacgacaaggactacaaggagcccccgccggcgccgctgttcgancccggggagctcaagtctggtccttctaccgcgcgggcatcgccgagttcgtcgcaactttctcttcctctacatcacgtctcaacgtatg

SEQ ID NO: 124 - DNA, 333 bp, Zea mays
  misc_feature: Incyte ID No: 700281995H2
atcgaagatgggtacctcaacgggcgtactctctgtgacccgggctttaagggactgggacatgaagtgccccaaggctctccgtcgcccctttatcgcagagccagagatccactggaccaccctgacggaagacgacgagttcctcatcatcggctgcgatgggatatgggatgtgatgagcagccagcacgcggtgagcacggtccgcaagggcctccggaagcacgatgaccccggggcggagtgcccaggagtcgccatggaagcgaagaagctcgagaccttcgacaaacttcacgtgatcgttgtctgtttgtccccgactcgccc

SEQ ID NO: 125 - DNA, 330 bp, Zea mays
  misc_feature: Incyte ID No: 700281996H2
  unsure 310: a, t, c, g, or other
ggcaaagcagagggcgatgctggagaacatcatgagggcctgcgttggcctggccccagagaacaacatgatcctggagtacaagtgagccaagcggcgtggcctgcagctggatatggaggaggctgcacgaagggaactagagaggcgagattagttgtgggattgtgttggcttctcgtattttcctttgcgttcttttctggtcaccgctgtcgcgcttttgtatttattgttggacccgtaactatcagggctcagctattagcgcatgaagcctgtaatggcatcgtatgataatgtgatcganggtgctagtaagcattaaaa

SEQ ID NO: 126 - DNA, 112 bp, Zea mays
  misc_feature: Incyte ID No: 700342201H1
  unsure 72, 74-75, 77-78, 87, 92: a, t, c, g, or other
tgtaaatgtgtgtatagtccggcatggtagcctgcgaaaggattgtagataaccgttttaaaggaaaggaananncnnagcctttangttantcctatgtcgttgtgggggg

SEQ ID NO: 127 - DNA, 285 bp, Zea mays
  misc_feature: Incyte ID No: 700342202H1
atcagagctagatgcattccacgtgacagtttggatgaacacattgttatccacatggatggtgtaaatatcttggcagtcaattatggctctgttgatgggtgccaataccctaggcctatgaaattgccatcaaaatggacattcagctcttacactatcctaaagactgctgaacaggcaccaagaaccccatcgtttgcagatcagttaatagaagctgacaatggtcttggcgaagtaatgaaaccacctgagaaatctttctgggctaaatattggatg

SEQ ID NO: 128 - DNA, 281 bp, Zea mays
  misc_feature: Incyte ID No: 700342204H1
ctgatcattttcctaaggaacagacttaagtatgccctgactggagatgaagtaaaaaagatttgcatgcagcgattcattaagattgatgggaaagtcaggaccgatataacctaccctgctgggtttatggatgtcatcagcattgacaagactggagagaacttccgtctgatctatgacaccaagggtcgctttgctgttcatcgaattacacctgaggaggccaagtacaagttgtgcaaagtgagaaagatctttgtgggcacaaaaggaatccc

SEQ ID NO: 129 - DNA, 282 bp, Zea mays
  misc_feature: Incyte ID No: 700342208H1
  unsure 57-58, 64, 236: a, t, c, g, or other
ctgaggcgaagaaagaagagaaggtggaggagaaggaagaaagtgatgacgacatgnncttcancctcttccgactaagtctgtacaatacccttggctattgcacagacttagtcgaagaggctgaagccaagggtattgtttttgagtcgaggaagcagagggaagaaaaatagtagtcatgtttggactttaactttgttttatgttggaaagtacttgaaagacttttcctntggtaattctaggcgtaggttgctgtgctggttggggtttactggt

SEQ ID NO: 130 - DNA, 160 bp, Zea mays
  misc_feature: Incyte ID No: 700342209H1
  unsure 2, 14, 16, 20, 22, 27, 45, 52, 63, 70, 104, 118, 120, 131, 140, 146, 149: a, t, c, g, or other
angtggcaaccgtntnaccngngtctngcactcccgccccttttncttttgntccttccttcntacgggnagcctagggttaggctttaagcgccgcgatgtanggcggcggcggcgncnggcactacganggatgcagnggtggngcngggaacgctaa

SEQ ID NO: 131 - DNA, 280 bp, Zea mays
  misc_feature: Incyte ID No: 700342211H1
  unsure 27, 64, 169: a, t, c, g, or other
aaggacttcaagggcagcgtgcccggnttcaaggtcgacaccgtcgacaccaccggcgccggcnacgccttcgtcggctccctcctcgtcaacgtcgccaaggacgactccatcttccacaacgaggagaagctcccgcgaggccctcaagttctccaacgcctgcggngccatctgcaccaccaagaagggcgccatcccggcgctgcccacggtcgccaccgcccaggacctcatcgccaaggccaactagatggccgcacgccccgccgttccacca

SEQ ID NO: 132 - DNA, 279 bp, Zea mays
  misc_feature: Incyte ID No: 700342212H1
gaggtggaagccaaggcggccgagatcgtggttgtccatgaccacgaggaggaggcagcgctgacgacggcgacgacgctccacggcggcgcctgcccgccggacctctccgccgtcaccaaaatgctggaagggctgcgccgcggcaacctgtacaacgcagacgagatcaagacgacgatgtcgctggcttctcctgtctggctgcagtttcttcagtcgtacgtgaggattccccaggcaccttgaaatgccagccagattcgtcactggaacatc

SEQ ID NO: 133 - DNA, 278 bp, Zea mays
  misc_feature: Incyte ID No: 700342213H1
  unsure 90, 97, 104-105, 119, 126, 167: a, t, c, g, or other
attctcgaattccgattcccaatccagcaaaccctaccagccttttgcaaactcagagagggacccgatggcacccaaggcggagaagangccggcnggaaganncccgcagaggaggngcccgcngccccggcggagaaggcccccgctgggaagaagccgaaggnagaaagcggctcccggcgggaaaatccgccggcaaggaaggcggtgttgacaagaaggggcggaagaaggccaagaagagcgtggagacgtacaagatctacatcttcaag

SEQ ID NO: 134 - DNA, 286 bp, Zea mays
  misc_feature: Incyte ID No: 700342214H1
  unsure 13, 26: a, t, c, g, or other
gaaagtaactgcngcatctcaagttntcaaccctccgcctccaatcgcaacgctcccgaggagagccaggaggaagtgacggcggcgccgcgaggaaggagggatcgatcgaggatggtggacgtctcgcgcgtgcagaaggagctcaccgagtgcaaccgcgaccgggaggtatcgggcgtctccatcgcgctccacgacggcgccaacatctcccacctcaccggcaccatcgccgggcccgccgacagcccctacgagggcggcacgttcgttcatcgatatc

SEQ ID NO: 135 - DNA, 282 bp, Zea mays
  misc_feature: Incyte ID No: 700342215H1
cgagtacaaattctttgtggacggggaatggcggcatgatgagcgtcaacctaccatatctggggagtttggcatagttaacacactttacttgacaagggaatataaccaaataaacaccttatcaagtccaagcacacctggaagcaggatgaacatggatgtggataatgaaaattttcaacgggggttacgttgtcagatggtaccgtttcagaaggtactctgagagtttcagaggctgcaatacaaatatctaggtgtcgtgtttctgaatatctg

SEQ ID NO: 136 - DNA, 278 bp, Zea mays
  misc_feature: Incyte ID No: 700342219H1
  unsure 9, 190, 207, 271, 277: a, t, c, g, or other
gtgggagtngtttcgaaaaagtctgtttcgcgagcggtgaggactgaggagtgtggaggcctaaaaccatggcggcgagcatcgggatcatggacggcgcctacttcgtcggcaggggcgagatcctgcactggatcaatgcgaccctccagctctccctgcgccaaggtgcgaggaggcagcgtctggngcatgcagtgccagctncatggatatggttcaccctggagtggtgcccatggcataaggtcatttcgatgcgaagacaganatgacng

SEQ ID NO: 137 - DNA, 277 bp, Zea mays
  misc_feature: Incyte ID No: 700342221H1
gggaatttctaatggtggtgtggatacgactacagaacatcatcctactgtagataattaccagacaagtaaaaatggctctgaatgggttgagctatttgtcagggagatgacaaatgcttctgacatagatgatgcacgggctcgtgcgtccagagctttggaggcttggagaaatcaattgtagagcgtgcaggagctgaagctacacagaaccttcataaggaaaacatgatgctcaaagagcaactgactgttgttctgcgagagaatgctg

SEQ ID NO: 138 - DNA, 276 bp, Zea mays
  misc_feature: Incyte ID No: 700342222H1
  unsure 18: a, t, c, g, or other
acgacgccgacgcgaganggcagggaacacagccactccgccgacgagaccccggcgcgcgcgagagaaagagaagagaggaggatcttttgttcgtgaaaaatattggaggcggagggaaggtgaaggagggggatcggagatgaacgtgttccggctggcgggggacatgacccacctcctcagcgtggtagtgctgctcctgcaagatccataccatcaagtcctgcgcagcatatctctgaagacacaggagctgtatgcattgtttttgca

SEQ ID NO: 139 - DNA, 275 bp, Zea mays
  misc_feature: Incyte ID No: 700342223H1
cctcacaccgcctacttgactcctcccgaacttccacatctctgctctgccttcccagtctcccatccctgaaaacctcacaaaaccctcgtttgctccccaccaccccgccgcgccgccgcctgtaccagctgcgtcaagatgagtcggcaccctgaggtgaagtgggctcagaggatcgacaaggtttacatcactgtacagttacctgacgcaaaggatgctaaggtcatttggatccagatggtgtcttcacatctctggcagcgctggta

SEQ ID NO: 140 - DNA, 275 bp, Zea mays
  misc_feature: Incyte ID No: 700342224H1
  unsure 13, 113: a, t, c, g, or other
tgcaattaaagcntcttgtgctgctcttgcatttgctggaatccctatgaaacatctcgctgtcgcgattagctgtggagtgatggacaatggtgtggttatcttagacacangcagagcagaagagcagcaagctaggtcgtttgctcacctggtgtttccgaactcgcgcaagtcagtcgaatcgaaggacacgttacagcgagatgaggagtaccgagcgaggattgataacttgcatcacgcatggagcaatgtccgaggatgactattca

SEQ ID NO: 141 - DNA, 272 bp, Zea mays
  misc_feature: Incyte ID No: 700342226H1
caaccctacttgttccagaaaagaaaaagaactatccatcccgctgtgagccaagccagcccagctccggcgactggcagatgtttcagggtccccgtccgtttgccgcaggttccctgatatcggtggccagcagccgactttgtggttagtccattctcttccggcgggatacgttgcggaccacttcgctcagctgctcgcgacggcggcttgtaccctgatttgggtgtggttctgtagagcggtcgtgtcgtccgagcgttgatctg

SEQ ID NO: 142 - DNA, 276 bp, Zea mays
  misc_feature: Incyte ID No: 700342227H1
  unsure 264: a, t, c, g, or other
agctaatggacgagtcagctgctaccaaatggcgccgctcttcttcctgaggttggaaccaggcaaagcaaatagcgtttcaagcaaaacaaccttgcatcaccagattcagaagaatctctcgtcaattattgcctggtctgcttaccgggtccaagcaatggatatgctcataggaacgcacgtatgcaagggtatgggaggccttaaacaaggctacagagagctacagttgaactgatcaaaacacggaaatggttgaanaaaaaatgtttc

SEQ ID NO: 143 - DNA, 273 bp, Zea mays
  misc_feature: Incyte ID No: 700342228H1
  unsure 272: a, t, c, g, or other
gttgccccatcagatggcctttttgctcccctggagtacttggcatctcagttccctggattttcagcagagagccttgcagagctttactacgcaaatgggtgtgatttcaaccatactattgaaatcctcacccagctagagatgcaagttgatgctacacccaatcacactgaatctgccccacagcacaccgaacttcagcatggggattccctgcattccaacagctgaggaccaaaatggtttcaatcaggtaatgtggatgtacnt

SEQ ID NO: 144 - DNA, 278 bp, Zea mays
  misc_feature: Incyte ID No: 700342230H1
  unsure 25, 209: a, t, c, g, or other
cactcagccaagggtggaagctgcnatggttaacgccaggattcggaagactgttaaagcaacacaagcaaaggttgggtacattggtcctccagctgactttaactatgaccatgaacatcttggcacaggaccacagacccttgttgagattgcagagggtcgtcatcctttctgttcagtactgcaatctgccaagaaccctgttnatgcattgctggagctggattatttgaacgggaagaccaagatgccctattctcatgattgagactgta

SEQ ID NO: 145 - DNA, 278 bp, Zea mays
  misc_feature: Incyte ID No: 700342231H1
  unsure 183, 186: a, t, c, g, or other
aagggttttgccatgggtgttctctttcttggtagctttgttcccagtcacctatctgctcgaaggacacttaagagccaaaagttttgcagatgaggatgaagcagagaagttcaccaacatgttggctatagaaggggctagaatgtcacttttgggtctctatgctgccatcttcatgantantgcattagaaatcaagtttgagctgacttgctattgcgtgaaaaggctgcagacagaggtatgcatggtccatctagtcggagtgctgcctc

SEQ ID NO: 146 - DNA, 284 bp, Zea mays
  misc_feature: Incyte ID No: 700342232H1
gaggcaagacaatcactcatagttagaggcctcttccctatgcttgctgatccgcgacacccagctgaatctaccagtgctacaaatgagtctgtgttgaaggttgctcttgaccatggcaaagcctcgggcgtgatcaagtcccacgaccgcgtcgtcgtttgccagaaagtgggtgattcctctgtggtgaagatcattgagctggatgattagacaatcaggctatgctattgtctactagggctttttgccaattttttgcctaggccgaaacttattgg

SEQ ID NO: 147 - DNA, 275 bp, Zea mays
  misc_feature: Incyte ID No: 700342234H1
caaggatatcagatacgggctggaaaactgtggtcacaggtccaagatacattcaagcagatggacactgccgcaacagagctcgaatgcttccaagagctgcagaaacaggaacatctcgctgcttcatatcgaatccaaaatttgtctgaagaagtgagtaaacagaaggcactagaaaggaccctccagagccgctacggcgagctggtttctggtttccagaggatccaagaacaggtcgaggagcacaagaggcaactcaaggtacaaga

SEQ ID NO: 148 - DNA, 269 bp, Zea mays
  misc_feature: Incyte ID No: 700342235H1
gtctgctcattgtttcaggtcatatatgacgtttttaagtgatgtatgcacaaactcagttatgttctctaattcactcatcctgtgaaactgtgcttttataactgcataaatcctatcctcatatatgtagtgatctgccctatggtggccctgtgaatgttgtgacaatgttgttgagtatgttggccctatgactcctttgaccatgctgttgagctgatggccctgtgagtcctatgaatcttatagacgatgaccagtttttt

SEQ ID NO: 149 - DNA, 270 bp, Zea mays
  misc_feature: Incyte ID No: 700342237H1
aacaatacttccctgttggcctggtcatatctggaatgctgaagatatttcaggatctatttgcactacgattcgacgaaattaaggatgttgatgtttggcatgatacagttcgtgtgttttctgtttgggatgcaagttcaagtgatcttttgggttacttttttcttgatatcttttccagggaaggaaagtatgcccacacttgtgttgtgacccttcagaatggatgcttatgttctaatggtacacgtaaggttccggctgctg

SEQ ID NO: 150 - DNA, 271 bp, Zea mays
  misc_feature: Incyte ID No: 700342238H1
  unsure 98: a, t, c, g, or other
cttcaaagcaacacttgagctgcttgttgcttacaaggaccaagttgcagaagctaagaagcaaaatgaagaggctgctgatgatatggatggttttnatgctgatgaagaagatgatgacgaagttgactctgataaggagatgggtcttgatgatgaagacggggatgaagtaagcagtcttcagctggcagaaattagccgcagaggctagaggctccaaccagccgatgacgatgactcagatgatgatttcagcgacgatgagcta

SEQ ID NO: 151 - DNA, 270 bp, Zea mays
  misc_feature: Incyte ID No: 700342239H1
  unsure 24, 171: a, t, c, g, or other
cgtatgctgtcgcccgcaccacangtccacgaccagcactcccttcatagacccccctccggcgaatccctcaccaatccagcgttcacacgtccttcttgcttcagtccactccaaggttaggtggacaatatgtcaagctctaaccagatgtgttctgatggcaagttncggagaggtcctcgggagcttagtggtgctgtggacttaattagtcgctacaagctgctgaatcatcatagtttctttgcaagaagcctttggccatgg

SEQ ID NO: 152 - DNA, 264 bp, Zea mays
  misc_feature: Incyte ID No: 700342241H1
  unsure 15: a, t, c, g, or other
acgacctcgtccaanccgtcggtggcgtccaccgcggctactgcagcagcgggtgaggtgaatgtggccgtggcggaggcggaggctgggaatttggagaggttcctcgacctccacgacgccctctgtgaccgctcagttcttgcccatgtcaagcctaaggatgcggcgaggtggtgatgctatggattcacgaccttatttctgcctgggagatctttgggaatcatcagggaatggagtgcttatggggccggtgttcca

SEQ ID NO: 153 - DNA, 268 bp, Zea mays
  misc_feature: Incyte ID No: 700342243H1
  unsure 45, 65, 144, 167, 213, 234, 267: a, t, c, g, or other
ctttcttctaccccaagacgaactcggtgaactctttccggttcnttcccctacgcccgtttctntctcgtcgcgcaacatcagagcacaagcgaggaacccagtccagtcccgggaatggagtgcgtattgggcgtggttggncgcgacttcgtgctggtggcggncgacacctccgccgtgcagagtattctcgtacacaagaccgacgangacaaggtgatggtgctcgantcgcaaaagctgatgggcgcttcaggggagctng

SEQ ID NO: 154 - DNA, 270 bp, Zea mays
  misc_feature: Incyte ID No: 700342244H1
  unsure 46, 110, 117-118, 261-262, 267: a, t, c, g, or other
catcgccaaggcgaccctactaactttgtggctaagagagccttgntagaggcagtctggttgttgtagttttgatggctgattcttctttgggatggagggaaatgaanggctctnnagctccagccaggtaaggactgttgctcaatgcctacgcctcccttactgcccttaggaggaatttggctataatgcagagacacaaaagctgctgtgcaagaatggggagacgctgctgggggctgtcaacttcttgtgcannagcancaa

SEQ ID NO: 155 - DNA, 210 bp, Zea mays
  misc_feature: Incyte ID No: 700342245H1
  unsure 117, 187: a, t, c, g, or other
gcttcctccgcgtacgcctcatggtccaagcggtggatccgtcccgaggtgtacccgctgttcgtgccgatggccgtggccctgggtatctgctcgtaccagcttgtgcgcaacatncacgggcaaccccgaggtgcgggtgaccaaggagaagagggcggccggcgtcctggacaaccacgacganggcgagaggtacgccatgcaacg

SEQ ID NO: 156 - DNA, 273 bp, Zea mays
  misc_feature: Incyte ID No: 700342246H1
  unsure 177: a, t, c, g, or other
aatggtttgatcaagagcttgaagttatggtgcatgtgcatgaagtccgaaatgagtacgaaaaacaaagccaactgcgtgctgcgcttggtgaggagcttgccattttgaaacaagaagatatacgggctggtggatctagtccccaaagagggaagaatggaaactctaggacantaccttgtcaccaaatgcaagacaagctaggatagcatcacttgagagcatggtgacaatctcttcaaacactcttgttgcaatgggctctccaac

SEQ ID NO: 157 - DNA, 289 bp, Zea mays
  misc_feature: Incyte ID No: 700342247H1
  unsure 4, 92, 99, 184, 244, 259: a, t, c, g, or other
taanattgcatctgcgagatgaggccaaggagtacttggaagaggataagctaaaggatttggtgaagaagtactctgagttcatcaacttnccctatnctatttctggtcgaccaaggaggttgatgttgaagtgcccaactggatcgaggatgagaccaagtgaagaagaggatttcaactnccagaaactaacagaggaagagacagaagaagacgaagaacgaagagaaagagaaaaagncccaagatccaaganaataccaggagacaatttctgagtgggaat

SEQ ID NO: 158 - DNA, 280 bp, Zea mays
  misc_feature: Incyte ID No: 700342248H1
  unsure 267: a, t, c, g, or other
caaagggaatgtgttcaaaaacaagcggattctcatggagcacatccacaaactgaaggcagacaaggcccgcaagaagctactggctgaccaggctgaggctcgcaggtctaagaccaaggaagcacgaaagcgtcgggaggagcgcctccaagccaagaaggaggagatcatcaagactctgtccaaggaggaagagaccaagaaatgaagcgtccctcgtgtctgtacatagtggccaggctgtggccttcacgtggatcatcntaaaataaaacaa

SEQ ID NO: 159 - DNA, 295 bp, Zea mays
  misc_feature: Incyte ID No: 700342258H1
caacaaacttgctcgctggactgcccaggctttgcttgctggtgctgacatgatgaagttgggctatgtgtcacgggtgaacccccgtgatcagtacaaccattctgtgctcactgtgatgggatacaagccaagggattttgctgcacagatcaacctcaacactgcaaacatgtggggaatcgtcaagtcaattgtggacatctgcatgaagtttgaagagggcaagtatgtgtttgtcaaagatccagcaaagccacagttgaggatctatgaggtaccatctgatgcgttt

SEQ ID NO: 160 - DNA, 293 bp, Zea mays
  misc_feature: Incyte ID No: 700342260H1
attgggtgtaagtgcttagttgagtttgaagttgctgattgcaccacaaagacatacccagaccacatgtttgatgtcatctacagtcgtgacactatcctcatatacaagataaaccctccttgtttaaaagtttcttcaaatggctgaaacctgggggaaaggttctaatcagtgattactgcaagagtcctggaaaaccatcagaagagtttgcaacatacattaagcagaggggttatgatctccatgatgtggaggctatggacagatgctcaagaatgctggtttca

SEQ ID NO: 161 - DNA, 102 bp, Zea mays
  misc_feature: Incyte ID No: 700342261H1
  unsure 10, 13, 19, 28, 76: a, t, c, g, or other
tctatttagnagnagcttnaggcagccngatgttgagagtgtcttcattttccatacatgacagtagactgcttantatgtatcatgaatgttagataatgg

SEQ ID NO: 162 - DNA, 294 bp, Zea mays
  misc_feature: Incyte ID No: 700342262H1
  unsure 30, 60, 65, 72, 78, 80, 86, 173, 268: a, t, c, g, or other
gcgccgagcgatgggcatctctcgggacanctggcacaagcgccgcaagaccgggggtangaganaaccctnccacangnagcggnagtatgagctgggacggccggccgccaacactaagattggccctcgccgcatacatacagtccgagttcgaggaggcaataagaatntcgtgctctgagattggatgtggggaacttttcctggggctcagagtgttgtactgcgcaaaacaagggtcttgatgttgtctacaatgcatccnataacgagctgtccgcaccaagaccc

SEQ ID NO: 163 - DNA, 297 bp, Zea mays
  misc_feature: Incyte ID No: 700342263H1
  unsure 35-36, 77, 85, 98, 144, 242, 270-271, 275, 281, 285, 287, 289, 291, 294: a, t, c, g, or other
ttcttgtagtagaggtcggcagcaagcggtagagnngagaggtcgagaagatgaagagcagcactctgttggcgatncctagttnctccaggcccttnctggtctctacggccgtggccaaaggacctgcagggacgaagaagnagtgctggtgcggcgagtgcaccagctggtcgggcgtgtggacctgcgacgacctcctcaccaagtgcgccgccacctgcaagaactgcgtccccgtntccacgggacaagggcgccaccaatacnngatngggcanctcntncngnggnggg

SEQ ID NO: 164 - DNA, 288 bp, Zea mays
  misc_feature: Incyte ID No: 700342266H1
  unsure 21, 156, 222, 225, 231, 266, 272, 275-276, 281, 283, 286-287: a, t, c, g, or other
ggaaacagtggagatggaggnggagcaggagtttgtttggaaatctaacctgctcccctacaaggacgatgatgctttcgttcttcctgagagtagtaaggaggagtacgcatcaacatcaggagacacagctccgtctggcaaaatggacccganggcagaaaggtctggaagcaatgggacaagcaaggtccctagactgggttccatgcttgggacagncancatggntggatttggcaaggcagtggagattctagacacgntaggcngcnngatgngnccnng

SEQ ID NO: 165 - DNA, 292 bp, Zea mays
  misc_feature: Incyte ID No: 700342268H1
  unsure 107, 159: a, t, c, g, or other
caagatgagtcggcaccctgaggtgaagtgggctcagaggatcgacaaggtttacatcactgtacagttacctgacgcaaaggatgctaaggtcaatttggatccanatggtgtcttcacattctctggcagtgctggtacaaacttgtatgaattganactagatctgaatgacaaagtaaacgttgaggctagcaaaataagtgtgggggtcaggtccatattctgtatcgtagaaaaagctgaagccaaatggtggaagaaacttcgtttcgagatgatcaagggcacc

SEQ ID NO: 166 - DNA, 294 bp, Zea mays
  misc_feature: Incyte ID No: 700342271H1
  unsure 25, 59, 61, 79, 182, 225, 233-234, 238-240, 245, 247-248, 251, 256, 260,: a, t, c, g, or other
gaactgcaaatgtccgaggtaccanacatcggtacctctggcatgaatgaagagaacgncncatgactatattagagantgggagagtgaataattggtcgatctgtaattaacaacttgtatttcgacatcgtaggcatattaatcaggtctaagatatggtgtaatatagacgtgcctangttggagacacctttgttatatagatctgtttgatttgatagnagaaaaannaaannnaccananngcncgggnccgntcncnaaaaagaaaangggggnccccnnntatta

SEQ ID NO: 167 - DNA, 297 bp, Zea mays
  misc_feature: Incyte ID No: 700342272H1
  unsure 41, 44, 100, 103, 128, 130-131, 140, 142, 144-145, 151, 157-158, 167,: a, t, c, g, or other
taccgagcctggtgatagctggttgtccaagatagaatctnagntcaactttaaatttgcccacagaaccctctaaatccccttgtaaatttaactgttngtncaaagcaggaacaggtgctttgganannagggaagancntnntcaggntaaganngcaatatgngcangcatagnaggcctannagctcccaccaattaagganagcgttcaanctcaacacccantacctaannnatcccatgatngntggcgnacctcctcanncccaattggaccaatctcatcaccctnt

SEQ ID NO: 168 - DNA, 285 bp, Zea mays
  misc_feature: Incyte ID No: 700342273H1
  unsure 30, 43, 48, 55, 64, 81, 87, 109, 116, 118, 123-124, 151, 164, 259, 271: a, t, c, g, or other
ctgacttccctaattccccccatccttacnaccctcgttaacnctaanaaaaaanactcatacncccattatgtaaaatcnattgtngcatccacctttattatcagtntcttccncncaacnntgggtgcgcctagaccaagaagttatnatctcgaactganactgagccacaacccaaacaacccagctctccctaagcttcaaactagactattctccatatattcatccctgtagcattgttcgttacaggtcnatcatagaattntcatgtgatatata

SEQ ID NO: 169 - DNA, 292 bp, Zea mays
  misc_feature: Incyte ID No: 700342274H1
gcggctggcggtaaacgtattggtgtgttttctgttgagggacagtcatgtttctccagtattacctcaacgagcagggcgatcgcgtctatactctaaagaaatttgaccccatgggacaacagacttgctctgcccatcctgctcggttctccccagatgacaaatactcaagacaccgaatcaccatcaagaaacgcttcaaggtgctacatgacccagcaaccgcgacctgtcctctgagggcttgttaatctcttgtgttactcgtcccccggccgattattcagca

SEQ ID NO: 170 - DNA, 287 bp, Zea mays
  misc_feature: Incyte ID No: 700342275H1
  unsure 174: a, t, c, g, or other
gaccaaagcccgtgcaatgctgtgtgacatatatcaccatgcgatctctgatgagttttcagtggctcgcgacttgcttttaatgagtcatttgcaagatggtattcagctcatggacatatcatcgcagattttattcaacagagtcatggcccagttagggctgtgtgcttncagggctggtttgataaatgaagcccatggttgcttgactgagctctattctactgggagggtgaaagaattgcttgcacaaggtgtgcaacaaagccgataccatgaaaaaa

SEQ ID NO: 171 - DNA, 281 bp, Zea mays
  misc_feature: Incyte ID No: 700342276H1
  unsure 34, 65, 98, 278: a, t, c, g, or other
atgcaaatcctgcagacaccaccgctcgtttttntctccgggacaggagaaaaggggagagagangtgaggcgcggtgtccgcccgatctgctctgcnccgacgcagctgttacgacctcctcagtctcagtcaggagcaagatgggtgccggcggcaggatgaccgagaaggagcgggagaagcaggagcagctcgcccgagctaccggtggcgccgcgatgcagcggtcgccggtggagaagcctccgttcactctgggtcagatcaagaaggccntcc

SEQ ID NO: 172 - DNA, 290 bp, Zea mays
  misc_feature: Incyte ID No: 700342278H1
  unsure 67, 239, 258: a, t, c, g, or other
ggctacagctcccgtctctccgccgcttgcttggaaaacgaagaaaccctcctccaccaacccaatnccagctacatccgtctgggtgaactccagggccaggagcagttcgccgccttcgttcgcatcacctacgcggttcgatccaactggcaggaaggaacgtgatggccaagacgagctcgttcaagctggagcacccccttgagaagaggcagtctgaggtaatcggatccagngagaagtaccctgacagantccagtgattgttgagaaggctgagaggagtg

SEQ ID NO: 173 - DNA, 287 bp, Zea mays
  misc_feature: Incyte ID No: 700342279H1
  unsure 273, 282, 285: a, t, c, g, or other
tgatatcgtaaccaggtctgagtttccaagtctgttgagccaaagcagaagttccatgatgaaggatcattctgcactgaatcgtcaaaagtctcaggcaggcagattgccagttccttctgctgctactgcaaaccaatctggcaaagggaaagcagaggctacaaacaagcagactgaggcaatggacttcagagattggttggatagtgaatgggccaagcttactggaacaaatggttataactgtgtctgcttcaagttaggatattnaaccttggnatncc

SEQ ID NO: 174 - DNA, 284 bp, Zea mays
  misc_feature: Incyte ID No: 700342282H1
tgcagctgggaagctgcactgccaagattgataaggttgctggcgttctggagactaaccgacctgatgagaggaatgctttctaccaggcgaccatcaagcaaggggacttcttgctgaaccgcatccagaagctttcacgggtcattgacctgtaaggactgtttgtgttggagctattcctgcaatcggcgcctgcaaatgtttaccaccctacgtcttccacaagacatctctgcttgagtggggatggggaacaagccctaagaacatctgtgttttaa

SEQ ID NO: 175 - DNA, 285 bp, Zea mays
  misc_feature: Incyte ID No: 700342283H1
  unsure 78: a, t, c, g, or other
cctccatccacgaactcccgttctccatttccagccatggcggtgtcgatcgagctcaccaaggagtacggctacgtngtgctggtgctggtggcctatgtcttcctcaacctttggatgggcttccaggtcggcaaggcccgcagaaagtacaaggtgttctaccccaccatgtacgccatcgagtgcgagaacaaggacgccaagctcttcaactgcgtgcagagggggcaccagaactctctagagtggatgcccgttttcttcgtcatactgctgctgggg

SEQ ID NO: 176 - DNA, 284 bp, Zea mays
  misc_feature: Incyte ID No: 700342284H1
  unsure 212: a, t, c, g, or other
tctggagctactgccttgccctcagaggatctaagacatggcacccaagaaggccaagagaagggcagcagcagaagggagctccaatgttttctccatgtttgaccagactcagatccaggagttcaaggaggctttcactgtaattgatcagaacagggatggcattattgacaaggaggatcttcgggacacctttgcggccatgggcntctcaatgtgaagaatgaggaactcgacgccatgatgaaggaagccagtgggcctatcaacttcatgtcttc

SEQ ID NO: 177 - DNA, 292 bp, Zea mays
  misc_feature: Incyte ID No: 700342285H1
  unsure 117, 180, 183, 185, 199, 219, 223, 250, 259, 262, 268, 279: a, t, c, g, or other
attctctacaaaccacaaagacattggaacactatacctattattcggcgcatgagctggagtcctaggcacagctgctaagcctccttattcgagccgagctgggccagccaggcnaccttctaggtaacgaccacatctacaacgttatcgtcacagccctgcatttgtaataattcntcntnatagtaatacccancataattcggaggctttggnaaantgactagttcccctaataatcggtgcnccccgatanggngttttncccggctaaanaacataagctttc

SEQ ID NO: 178 - DNA, 287 bp, Zea mays
  misc_feature: Incyte ID No: 700342287H1
  unsure 51, 175, 229: a, t, c, g, or other
cttaatcatttttattgccacaactaacctcctcggactcctgcctcactncatttacaccaaccacccaactatctataaacctagccatggccatccccttatgagcgggcgcagtgattataggctttcgctctaagattaaaaatgcctagcccacttcttaccacaaggnagacctacaccccttatccccatactagttattatcgaaaccatcagcctactncattcaaccaatagccctggccgtacgcctaaccgctaacattactgcaggccaccta

SEQ ID NO: 179 - DNA, 284 bp, Zea mays
  misc_feature: Incyte ID No: 700342288H1
  unsure 282: a, t, c, g, or other
agcagctcgattcgtccttgaagcacataagatctacaaggacacaacacatggttgatcaactgacagaacttccagaaaaaagaacaaatgttttgtgaagcaaataagtgtcttcgaagaagactggaggagagcaaccaggttatatggcagcatgcgtgggagcaaagcgagcggcattctgaagtgcagccgcagcagctcaatggcaataacttcttccatcccctcgatggtgctggtgaacccaccctcagatagggtatccttcagaggcanga

SEQ ID NO: 180 - DNA, 283 bp, Zea mays
  misc_feature: Incyte ID No: 700342291H1
  unsure 110, 165-187: a, t, c, g, or other
tctctccccacctcccctgagcttctcccgacctttggtcaggcaaaggaggcggccaacaaggacgagcgatggtgaccaaggtcatctgcttcctggtgctcgcatcngtgctcctcgccgtcgcttttcccgtgtctgctctgcggcagcaggtgaagaagnnnnnnnnnnnnnnnnnnnnnnncggaggcagtgttagcggaagcggaggcggcaacctgaatccctgggagtgctcgcccaagtgcgggtcgcggtgctccaagacgcagtacaggaa

SEQ ID NO: 181 - DNA, 278 bp, Zea mays
  misc_feature: Incyte ID No: 700342294H1
agcttgtctaatttatttggagttgagtttcatatttaaatgagagtttttgtattgaggttaacttctatgaccaatttttgttcttgttaaaatgctagctgatagtttcaacatgtatctagtattgcttcatgaagtatgcaatttcgagccattagtattaacattgcatatatctatctctgacatctgatgctcaggaagcaatgtgtgaagaggtacagttctttgattcctaactgaagttgtcagcaaggtaccaggtctggtggtgc

SEQ ID NO: 182 - DNA, 285 bp, Zea mays
  misc_feature: Incyte ID No: 700342295H1
  unsure 218, 221, 259, 265, 268, 272-274, 281, 283-284: a, t, c, g, or other
aaaccctagcgccggcgcctccacttcgttttcctcactctctcctccagctcagggtccggcggcgaagggaaggcaagatgtacaccgcgaggaagaagatccagaaggagaagggtcttgagccctccgagttcgaggactccgttgcccaggctttctttgatctggagaacgggaaccaggagctcaagagcgacctcaaggacctgtacatnaanaatgctatccagatggatgttaccgggagtaggaaggntgttancantcannncccacancnng

SEQ ID NO: 183 - DNA, 283 bp, Zea mays
  misc_feature: Incyte ID No: 700342296H1
  unsure 2, 107, 159-160, 187, 222, 230, 232, 235-236, 240, 244, 258: a, t, c, g, or other
gnagaacccaatcctctggaatgtggctgatgtggtcatcaagttccctgaggaagaagctccctgcgactgtcttgtcccagaaccttttcactccaaaacagganattcagcacctgttccgcgagcctgagaagaggccccccaccgtggaggtcnnatacattcactgccctgatcctctcgncgttgctctgctctcgctctgtggatccggatggngccaatgncncgnncttnactntgctcctagcacgntatatttcactgggacatgctgcta

SEQ ID NO: 184 - DNA, 299 bp, Zea mays
  misc_feature: Incyte ID No: 700342302H1
  unsure 83, 98-100, 102, 118, 125, 146, 153-154, 161, 172, 174, 179, 186, 204,: a, t, c, g, or other
gttcatcttccgtttcagacaaccagtgcagtggaagaccacaaagctgttgagggcagcaatggcactggtccaggcaaggnctccacggcggcgannnangtctcggaggagctantggcgtncctgctggccatcttctcgcngaagagnncatccancggccaggacnangagcnggtgtcnccgccgtcggtctctggntcctgcggaagcagctcancagacccctacggtgtcccagaattcgggtggcgggacattggccggtacnagcagttccggtcagtcgacacgaa

SEQ ID NO: 185 - DNA, 116 bp, Zea mays
  misc_feature: Incyte ID No: 700342304H1
tcagaacagcatgacgacaacatgtcaataagtagcagatagtttctgtatttagagtaatgctacttgtacacaggagaatgtcaagcattatctatggctgttcgatcaaaaaa

SEQ ID NO: 186 - DNA, 292 bp, Zea mays
  misc_feature: Incyte ID No: 700342305H1
  unsure 185, 282, 289: a, t, c, g, or other
atttaattggtgccaggataagaatgtagtcacagtcttcagtgcgcctaattactgttaccgctgtggtaacatggctgctattcttgaaatcggggaaaacatggaccagaacttccttcaattcaaccccgcacctcggcaaattgagccagacacaactcgcaaaaccccagactactttntgtaattgtggtggtgaccttaactttctggtgtttgatgctcctctcttccgcagcatcagggtatgtagtcttgtccttagatagggtcccagtncccggcntta

SEQ ID NO: 187 - DNA, 293 bp, Zea mays
  misc_feature: Incyte ID No: 700342307H1
gaaagtgatggccgctcagcaccaattgttaagcttggtgatgcttctatggcttcacctttcacagcaaagcatgcctctgttgcccctactcttgacatcatccgtcaggggagaagcaccctagtcactacacttcaaatgttcaagattcttgggctcaattgccttgcaacggcttatgttctcagtgtcatgtacctggatggtgtcaaactgggcgatgttcaggctacaattagtggtgtctttactgcagccttcttcctcttcatctcccatgcccggccatc

SEQ ID NO: 188 - DNA, 292 bp, Zea mays
  misc_feature: Incyte ID No: 700342309H1
  unsure 288: a, t, c, g, or other
aatactttgatgatgcattactggcgatgcagaagttgggaaagaaaagggcaagcttagtagacattgcagagtcctttaaatcaagagggaatgaattcatgagatcaaaccaacaccttaaagcggtagagctgtacacctgtgccattgcattgaaccaacaaaatgccatttactattgcaacagggctgctgcatatacccttcttaatatgaacaacaaagctattgaggactgcctgaagtcattgaaattgaccctcatacagcaaagcatatagccgnctcg

SEQ ID NO: 189 - DNA, 295 bp, Zea mays
  misc_feature: Incyte ID No: 700342313H1
  unsure 15, 65: a, t, c, g, or other
cacactagagccgcngccgctgccgtttcgcgcaccgtaccctagccctcgtcagcggcggcacncgagctcctccagccatgacgttcaagcggaggaatggcggacgcaacaagcacgggcgcggccacgtcaagtacatccgctgctccaactgcgccaagtgctgccccaaggataaggctatcaagcggttcttggtgaggaacattgttgagcaggctgccgtgagagatgtgcaggaggcctgtgtacatgatggatatgttctacccaaattgtatgcaaaggttca

SEQ ID NO: 190 - DNA, 286 bp, Zea mays
  misc_feature: Incyte ID No: 700342314H1
  unsure 39, 53, 84-85, 106, 122, 130, 133, 135, 138, 163, 184, 186, 198-199,: a, t, c, g, or other
gacgcacatgcgacggtctcctgtcctgctctgtccccnctggcctccctagnagcttatactttcttattatactttcttatnntctccacggccgcagttagcnacatctcgccgtcggnacgagggncangnagncaggatactcctgtcaggccgcgangtagccctcctcctcttgctntncccgccatcctnngcttctngtccacctgggattagatctatttcttggtanntgagcgancgngtgaatcgatctagccaagtgcggcggngggntatt

SEQ ID NO: 191 - DNA, 284 bp, Zea mays
  misc_feature: Incyte ID No: 700342315H1
  unsure 54, 168, 179, 195-197, 210, 241, 258, 261, 263, 266, 268, 276, 281-282: a, t, c, g, or other
tgacgaatgatttggcaagaagctactcctttggcagtccttccgttgctttgnaccaaatctttgtcgctgaggcaacttgtgcatttcgcttgtgaaacggttgtggttgtacgcagtcaggaaaagtatacgacaacggctgggccacttttgtgttatatatangaaagttatgnaaaagtttatatcagnnnggggtgctgtagnaagttagcctgttgttggaggctacatgccnaaaatgctcaccgctgnagngnctnanggggcctnttttnncc

SEQ ID NO: 192 - DNA, 292 bp, Zea mays
  misc_feature: Incyte ID No: 700342316H1
  unsure 72, 205: a, t, c, g, or other
gccgctcgtcgccttcccatctcgccgcgccatggatttctgcagccacctccgtctcgcggctgtgctcgngctcctcaccggatgcgcttctgcggcgagccggggcgctggttccttcgacccatcccgcgtggttcaactctcttggcgccccagggcgttcttgcacaagggtttcctgttggatgcggagtgcgaccanctcatcgcgctggccaaggacaagctggagaagtctatggtggcggacaacaatccggtaagatgtccagatgaggtgcgcaccagt

SEQ ID NO: 193 - DNA, 295 bp, Zea mays
  misc_feature: Incyte ID No: 700342317H1
  unsure 37, 39, 48, 51, 78, 109, 143, 212, 218, 248: a, t, c, g, or other
gcctctctttcggttctcacggcgacgactgggcgancnccgcctccnctncctcgctccgtgaggtcctcgccggcnacgagtgctgccgcccgtttccatgtatttnccgccgattagtgtccaccagatctagtgaaggntggtaacttgacgcaaggtgttcaagaaatttaagccacacactcttcatcataggcccaggcaatatntgtgtnaatctcagggacctccagtagattgctganagttatccttgatacagggaatatagacacagattttttgaacttga

SEQ ID NO: 194 - DNA, 300 bp, Zea mays
  misc_feature: Incyte ID No: 700342318H1
  unsure 8: a, t, c, g, or other
caattgtnagtgtctctgatgatggcgagagcactggtggaggtggaacactgcagatttggcgcatgagtgatttgatctaccgcccagaggatgaagttcttgcagagctggagaatttcaaggctcatttggccagctgtgcaccgaagaattgagtcatgtgggttacctgcggaatgcaatcctgtggaaactgagtaggtgatgtagtttcatggccataagtatgagccccagttgacattgaatctgtcctctgatgctcctagagctgtacccttgaggggctgtgctttt

SEQ ID NO: 195 - DNA, 292 bp, Zea mays
  misc_feature: Incyte ID No: 700342320H1
  unsure 276: a, t, c, g, or other
gagctgtgggcttttgagcaagcagggagcgagggccactgcctgtggtcttgtttcttcaggtaaagaaaaacagttcttcctgagtgaggggtagccaagatcgacgactggcggcaggtgtacaagcccacaaccacaagtcgtcgtccaggctctcgactcgagggagaagcaactccgatcacttgttcagagttgcatgtcccgtgaactcagggccagaagtccatgcagtggcaaaagcagaacgcgtgttggaagtccaagcgcaancccatcccgggaagct

SEQ ID NO: 196 - DNA, 290 bp, Zea mays
  misc_feature: Incyte ID No: 700342321H1
  unsure 22, 26, 28, 34, 50, 71, 98, 118, 134, 250, 279: a, t, c, g, or other
ctcctctggccgccgcgcgggnaganangccganatggcagatgagattnccaaggctcaggtcgctcggnctggtggcgacacgatactttgggaanatcatccgcaaggaaatacnagccaaaatcattttngaggatgaccggtgccttgctttccatgacatttcccctcaagcaccaacacattttctggtgatacccaagaaacatatatcccagatttctgtggcagaagatgatgatgaaantcttcttggacattaatgatgttggcaanaaagtgctgcc

SEQ ID NO: 197 - DNA, 290 bp, Zea mays
  misc_feature: Incyte ID No: 700342322H1
  unsure 43, 71, 84, 103, 117, 123, 182, 194, 263, 283: a, t, c, g, or other
gcagatgcaaagtggtgaagttgcttaatcgaataggttgtancttttcctctctgctccagaacccaggnttcagggctctgnccaggctgccactcctcanctgccctcctccangccggnaggaacagtcttacagattttccaagacaaagacagccagggaacagtttctagtttcngacccacggtanagtcacacagacataggtggagatccactctgaagacctgacatttttgtattggggaatcgtcatcgnaaacaaaaagagggaagtanaaagctg

SEQ ID NO: 198 - DNA, 289 bp, Zea mays
  misc_feature: Incyte ID No: 700342324H1
  unsure 177: a, t, c, g, or other
gtggagtgaaaccctaggtttaccgtggaagaagaaagtccattcggcgcgctctaggtgtttggcaaaaagcttaaaccggaaatcgtcatcgcccttacacatatcgatttggtttatgacatgtctgatctatataccttggttgatggcttcgttacacgtaattcagctagnactttagggcaaagtgatcatcactgcaaaacctggcgtcaagctagaaatcccagacggagcagtgattgggaataagattccaagttcacacagcaggagttgccagctt

SEQ ID NO: 199 - DNA, 288 bp, Zea mays
  misc_feature: Incyte ID No: 700342325H1
ctccactctcctctccctctcccgagcacctctccttcctccactttctccccaactccggtgagcgagagtgtggtcacgacacaatcatggcgctgcccgtggggccaatcgtcggtgcgcgagtccccttcggggtgagcatgtcaccgtcgagcgacctcttggcggtgccctagtgtcctgtgcgtggcgttatgtaccggtggctgcgttgtttctacccagtcgtctgcaaacaagattagcaggaatggacgaaatggtttgagttggttctctgagcag

SEQ ID NO: 200 - DNA, 290 bp, Zea mays
  misc_feature: Incyte ID No: 700342326H1
  unsure 289: a, t, c, g, or other
gaagaagcgaaagcaaagggaacagagaattttgacagagaactcgaggatatgatagaaaggctcattgtggagtgcgacaggaaaattcagagggccctgaaacgacttgcggatgacgatgccaaggctgctattgcgatatccgtctcggaggttactctgacggatgacatactgcagctgtcaaaacagatcaaggaaaaaatggtagaagttgatgcctttgattttgaagggagaactgatgataaaataaaggcccaggaagtagtggaagcactcagant

SEQ ID NO: 201 - DNA, 289 bp, Zea mays
  misc_feature: Incyte ID No: 700342329H1
  unsure 156: a, t, c, g, or other
gtttatcacctggatgagaaacagaaggcctcagctgtggctgagctaacccggagactttcaacaaatcagaacacactcacagttggtggactgtacacagttgattctcagacagccgtgaaggcaaggctcaacaacaatggaacgcttgcngcgcttcttcagcacgagcttaaacccaagtcactcttgacgatctctggtgaattcgacaccaaggccctggacagaccccccaagtttggcttggcgcttgcactgaagccctgatcagatcatcccacag

SEQ ID NO: 202 - DNA, 288 bp, Zea mays
  misc_feature: Incyte ID No: 700342330H1
  unsure 70, 81, 130, 182, 254: a, t, c, g, or other
gtgtgtgtcaaagagagaaccagcacacagcagagtagcacctgatcgatcgatctcctactactagctncgttcgctttnacaaccagggagcagcaatggcatctgctgctactactctcctcaagtngtcattcctccccaagaaggctgaatggggatccaagcaccagctggttgcngctcatcccaggccggcgaccgtcgtcgtctccatggttgcccgcgctaggcctacgctgacgagcttgtcnagaccgcgaaaaccatcgcgtcgccgggaagggc

SEQ ID NO: 203 - DNA, 282 bp, Zea mays
  misc_feature: Incyte ID No: 700342331H1
  unsure 126, 136, 145, 174, 200, 212, 225, 228, 230, 234, 237, 245, 248, 250,: a, t, c, g, or other
ggcgcccttgactacaagtccttctctacagccctctatggggagagcgacctgtgaggccctcagccaccctgaacagactcccttggcctcccggagggctgaggagccctgccccaccctgantcagtatctntgcaaaganctctttgtggtccttctagggggtcaggnagggatgggctaggcaggctcttttntcagtctggtangggagatggaggnttntngatnagngttcgggncgnanaaanannagggtgtatgggggtncncannaaa

SEQ ID NO: 204 - DNA, 286 bp, Zea mays
  misc_feature: Incyte ID No: 700342333H1
cgaagacaagatgaaggagcttgaggggatctgcaaccccatcatcgcgaagatgtaccagggcgagggcgcgggcatgggcgctgctgctggcatggatgaggatgccccgtctggtgggagcggtgctggtcccaagatcgaggaggtggattaagttggttagtgttcgaggtttggtttggtgaggtgtgaagtgcctgaactctgatggttgtttgtgaggtgtggtcgcaatagtgcggcctgtggtgaacttctcagaaataataagttttcttcctaa

SEQ ID NO: 205 - DNA, 287 bp, Zea mays
  misc_feature: Incyte ID No: 700342335H1
agctccttcaaaaggacctgtccagttgcacaaggcaaaagctgctctcgatgctgatgatgattatgaggccgagcccccgaaggagaaggcaaagcctacgggggctgatgtggcgaagttgaaagagatgaagaggcaggaggagattgagaagaacaagcttgccttggagaggaagaagaggcaggctgagaagcaggcagcaaaagctgtggcccgagcacagaaggaagctgagaagaagctgaagaaagaggagaagaaagccaagaagaaatctggtg

SEQ ID NO: 206 - DNA, 284 bp, Zea mays
  misc_feature: Incyte ID No: 700342337H1
  unsure 108: a, t, c, g, or other
gcactggagtgctataatgcaacgattacgtcatcaattggctgcaaggttttccattccgcgctggaggtcttgtactgtatggttgtcgagggagttatgcctgancaacgtgacgctatctgcgaccatgaaggccatatctttgtcagcttcgccgagtctaatcagctgccagatgctgcattcctgggtcttcaagctgggcttcgaagcggacatggttgtgtgctcctccttgatcagcgcatacgctcgagccggtcaggtgcacagctcccgct

SEQ ID NO: 207 - DNA, 283 bp, Zea mays
  misc_feature: Incyte ID No: 700342338H1
atacattaaatgcttttgatatggcaaatgcaactgacccccccaccaatcgccaaaatggtcatgcagaacctcccgaaacgtatggtcttagccacagaaaacttttgcgtcagttatcatgagtggagatattgactctacattcaaaagacttggggagtggtatccacaagtgataaaggatgagaaatcggttatttgcttactactccattctcaaagattcatagaatatatcagggctgaacaactggaagatgctgtgcactatggtcgtgct

SEQ ID NO: 208 - DNA, 283 bp, Zea mays
  misc_feature: Incyte ID No: 700342340H1
  unsure 6, 24, 29, 39, 45-46, 63, 66, 68, 77, 91, 167, 184, 188, 230, 232, 241,: a, t, c, g, or other
cctttntctctcctcgaccctccngacgnggcaaagcanaaacannaggaggagaggaggganagnangaagaaggngaggccaaaaatcncctccccctccccaaatcctagcccaataatctctcaatcaggggattcttaggtctgatcaagtcggaggattcngcagggcgcagcatganacgngaaggcgtccgtctccaaggagctcaacgccaagcacaggangntattggaantcttctacggcatctgtagaatngagatgcncagattnntnt

SEQ ID NO: 209 - DNA, 281 bp, Zea mays
  misc_feature: Incyte ID No: 700342341H1
ccgtgtcaacccacacaaaacgaatgtttgaacaggacccaagcagatggccgaggtctcaggcagacccaaactcagccatccacttctcatgcttctctatgtctgaaggcgagacactcttctgaaccttcaccagagcctccacaaagtcgcacatggccaccgggtccttggctatctcgtcctttgacatgttcttgatctcgtcgcgggtcttgcctgctatcttgcgcctcatgccatcatgaggcatcgcggcaaacgtttgtcagatcatc

SEQ ID NO: 210 - DNA, 284 bp, Zea mays
  misc_feature: Incyte ID No: 700342343H1
  unsure 64, 159: a, t, c, g, or other
ggctgttctccaggttatcccttatgtgaaggttttttcacgtgttgctccagaacaaaaagancttgtactaactacattcaaaagtgttgggagggtgacactgatgtgtggagatggaaccaatgatgttggtgcactgaagcaggcacatgtcgncgttgctcttttgaatgctgaaccagttcagaaagtggattcaaaatctaaagctgaaaataaatctgggaaattgaaaaacaagaagcctgctaatgaagcatcatcacaagtgactccggtag

SEQ ID NO: 211 - DNA, 261 bp, Zea mays
  misc_feature: Incyte ID No: 700342344H1
  unsure 52: a, t, c, g, or other
ggatcctgtcgggcagcaggccggggacgcgcggtacgtgttcgaggcgaanacgatccagaggatggagctcctggtcctcagcacgctcaagtggaggatgcaagcggtcacccccttgtcgtacgtcgactacttcctccaccggctccgaggcggcgccgcgccgagcagacgcgccgtcctccgatccgcggagtcatcctgtgcatcgccagaggtgagcaacgaccaggaagttctcagttctcattctcaccc

SEQ ID NO: 212 - DNA, 283 bp, Zea mays
  misc_feature: Incyte ID No: 700342345H1
gggcttaaatttgatgggacccaataggccaccctagtctggttatcttttcaccttgtttacccttgaatttttgggtagtctttgctattgctatatatggttttgggtgttgagataattattacacttgatcattctttattattgttctacttctgctcatgataagaccactatgttaattggaacatcgaacttaacttgagaaacacgtgccaccataggggtggaatgggacgtccttggctgactaactaggaaagctagtggaggactactg

SEQ ID NO: 213 - DNA, 274 bp, Zea mays
  misc_feature: Incyte ID No: 700342346H1
  unsure 52, 273: a, t, c, g, or other
ctcaatttcagagtgatagtttacctatcgggcccttggacgtatcctctanctttttcacttgcagatcttgtctgaacttcatcctttgtggtacttatatccttggttcttatgcacatttacttcctctcttacattcttgttcggtatcacctttagcccttgtaatattcatacccttaccttcatgcttactttgaacctccctttaaaagccttctctttgccatccttgttcgaggataatgtcttacctatttcgccatggang

SEQ ID NO: 214 - DNA, 166 bp, Zea mays
  misc_feature: Incyte ID No: 700342347H1
  unsure 22-23, 39-40, 60-61, 82: a, t, c, g, or other
cttgccaatctctgaaaagaanngcgtgatttgtttgcnnggcctgaaaatgaaacaagnnatacttttgtgccttgttgancagataatacattcaagtgagaatgtggacattgatgacttaatcaaggatcttcaccccaaggtaatgttgggtataccttta

SEQ ID NO: 215 - DNA, 200 bp, Zea mays
  misc_feature: Incyte ID No: 700342348H1
  unsure 93, 113: a, t, c, g, or other
gaatccatctgcaccgcagttcctggtatcgggccgaaaggcgttagcaccactggtggccagtctccagcagacgatctcagcgaacatgangccgggatcatggactacancatgggtagccaggaagccaactgtggaagcagcttcttgcgcgagtctgttgctaagatgcacttctcgaccgccgaagcttcctg

SEQ ID NO: 216 - DNA, 300 bp, Zea mays
  misc_feature: Incyte ID No: 700342350H1
  unsure 128, 229, 238: a, t, c, g, or other
gaaacaatcaaccagcaacactcttctcgtataacataatacagcgaaggtaactcacatggcaacttccatgggttgtctcgtcttgctctgccttgtttcttctctccttcccagtgccgtccttngccacccatggggtggttgttcccacagttctatgaccattcgtgccccaaggcgaaggagatgtgcagtccattgtggcaaggctgtggcaaagagacangatggcggntctttggtcgactgcaattccagactgtttgtaaaggctgcgatgcttcggtgcatggacaa

SEQ ID NO: 217 - DNA, 300 bp, Zea mays
  misc_feature: Incyte ID No: 700342351H1
  unsure 43, 154, 169, 178, 187, 197, 203, 216, 245, 272, 289, 298: a, t, c, g, or other
agcatagtgcaggggcttgccacctaagtaaggcccgcctganagccatggcatccaaggccgtcctcttcttggctctcaacctcctgttcttcacggtggccaacgcctgcggcaactgcccgaccccaacgcccccggtcgagccaccgcngccgcctcctgctgntaccccagncccttcgtncagcgggaangtgccngctgaagacgttnaatttcggcgtgtgggcgatgtgtcgctngtaaagcgaggtggcaaggtgcttgcngagcaatctgtaccctnatcaaggcntg

SEQ ID NO: 218 - DNA, 300 bp, Zea mays
  misc_feature: Incyte ID No: 700342352H1
ggctggcagcgcggaggccgcacgatgcctggagttactgtaaaagacgttaaccagcaggagttcgtcagagctctggcagccttcctcaaaaagtctgggaagctgaaagtccccgaatgggtggacacagtcaagttggccaaacataaagagcttgccccatatgatgagaactggttctacacacgagctgcttccacagcacggcactgtacctccgtggtggtgcaggggttggttccatgaccaagatctacggaggacggcagagaaaggtgtcaggccagcacttcagca

SEQ ID NO: 219 - DNA, 304 bp, Zea mays
  misc_feature: Incyte ID No: 700342353H1
  unsure 240: a, t, c, g, or other
acgatgaggaatacaatgacattgtggaggacatgagggaagaaggacgcaaatatggtaacttggtgaaagttgtaattccacgacctgaccccagcgatgctccagttgctggtgttggaaaggtgtttttggaatatgcagatgtcgagggctcgaccaaagcaaagacggggatgcatgggcggaaatttggcgggaaccaggtggtggccgtgttctatcccgaggacaagttcntgctgagcatatgactgaaagttgtagaacctgttctagagttgcacacaaatgtgtgtgtttt

SEQ ID NO: 220 - DNA, 304 bp, Zea mays
  misc_feature: Incyte ID No: 700342354H1
  unsure 276, 301: a, t, c, g, or other
ctttatctgaatatatgattgagagcggatggactcggagctacttcgatatcagcgaaattggtttttctatgtacctctgttatatggctatgtatctcatctttgtggagtttggaatttactggatgcacagagagttgcatgacataaaaccattatacaaatatctgcatgcaacccaccatatttacaacaaggagaatacttgtctccatttgctggactgcatttcatccatggatggtgtctgcaagcaataccacagtgttcggntccttcctcttcccacgcacttcangac

SEQ ID NO: 221 - DNA, 285 bp, Zea mays
  misc_feature: Incyte ID No: 700342359H1
ttcaccacccaccactactaccaccgccacccactagactactgcttctgctaccaaatactacggcggaacggaacggctggttgccgccgccgccgtcgtccttggaaaggttgaggcgtctcttggtcatccgtatcgttaccgttgtcatggtcctttgagtcgttgcaaccctgattgcaagccggcaagggggaaaaaaccaacaaagccgtgtgggaaaatggaggaggcaggcgtacaatgtacgtctcccgcccactgttgctttataatctctat

SEQ ID NO: 222 - DNA, 311 bp, Zea mays
  misc_feature: Incyte ID No: 700342361H1
  unsure 228: a, t, c, g, or other
aattttcttgttataatgctcagacagaacaagggatcatcaagtgcagcaccagctaaggtaaccgcgaatcaggcaccctctactcagacagtgcctgctactccacctcaaacgtcagcagccccagatgcaccggcacctattgtacctgtcagtgcaccggctgcaactgctacagcctcagcagctcctgctgttgctgtctccactgaggcggatagttanggtcaggctacctcaaacctagttgctggcagcaattggaaggaacaattaaatccatcttgaaatgggtggcgggacatggg

SEQ ID NO: 223 - DNA, 314 bp, Zea mays
  misc_feature: Incyte ID No: 700342362H1
ggcctccatacagtggacctggtcaatggacccccaggggtgctcccgccgcagatggctcctaccaggcgccaccttcatcttatgggccaccgtctcagcaacctcctgcttatgggcaaacatatggtgcagcaacgggacctgatgggtatggtcaacagggttacccacagcagggtggccaggtaccagcttcatatggtcagagtgcaccagcagctccaggatatcctcagcaaggcacgcagcaaggtggctatgcacagtacccgcagacccaaccagcatatggtgatcaagcagctcaagcc

SEQ ID NO: 224 - DNA, 314 bp, Zea mays
  misc_feature: Incyte ID No: 700342363H1
  unsure 177-199: a, t, c, g, or other
gggatctcctccatattagtgagcaggatgtataatcctcccagtgggcaggacatgtcctactacgatcatgtgcagaagcgccatgaggagaagggctgcctatatgcatgcctgttcactgcgtgctgctgcttctgctgcttcgagacctgtgagtgctgcctcgaggccatnnnnnnnnnnnnnnnnnnnnnnntggagggcatgggcgtccatcatcgtggagatgtggccatgcgggacacccaccgccgaataaaatgctgtacttatatgcacgcacgttagaaatgcatagtgtctgtttgatg

SEQ ID NO: 225 - DNA, 305 bp, Zea mays
  misc_feature: Incyte ID No: 700342365H1
  unsure 263, 299, 304: a, t, c, g, or other
ggcagtcttgcaactgctggttatggaactgcccttggggttatacgcgctcttcattcggggggagttttagagaaggccttttgcaccgaaactcgtccatttaaccagggatccagacttacagctttcgagttagttcatgaaaaaatacctgcaacactgatagcagattctgctgctgctgcgctgatgaaacaagggcatgttcaggctgtcattgttggtgctgatcgaatagccgccaatggtgacacagccancaagatggcacatacaacctcgccatttccgcgagnatctng

SEQ ID NO: 226 - DNA, 304 bp, Zea mays
  misc_feature: Incyte ID No: 700342373H1
  unsure 282: a, t, c, g, or other
gcggagagcaagggagcggtcgagcgggtgacatcatcgtcatccagggtttctcaatcggcagcgatggcgaccagggcggcggcgaggttcctgcagcgcagtttctgtcttctggcggtaaggtcctcagcgaggaggagaaggccgccgagaacgtgtacatcaagaaagtggaacaagagaagctggagaagctcgcacgcaagggccccagctcaggagagcaaccctcgtcaaccacaggctctgcagcaagtgatgtgaaggccgatgctgggncaacggagtcagcatctgcaat

SEQ ID NO: 227 - DNA, 300 bp, Zea mays
  misc_feature: Incyte ID No: 700342379H1
  unsure 8, 10, 56, 65, 68-69, 75, 78, 106, 127, 134, 146, 155, 184, 190, 197,: a, t, c, g, or other
attatttnanccaccagaacacagaatgttcttggggagaagggtcgtcggatcanagagctgantgnngttgtncanaagcggtttggcttccctgaaggcagcntagagctgtatgcagaaaaantggccanaagaggtctgtntgccattgnccaggcagagtctctacgctacaaactcntagganggcttgnagttcgaagggcctgctatggtgtgctcggttcatatggaaagtggggccaaggctgtnaggttgtggtcttnggaactccnangacagngggccaatncatg

SEQ ID NO: 228 - DNA, 308 bp, Zea mays
  misc_feature: Incyte ID No: 700342380H1
  unsure 11, 20, 83, 141, 158, 163-164, 188, 196, 199, 203, 242, 257, 271, 286,: a, t, c, g, or other
gcttcatccgncgaaccgangagctgtcccaagttttaagtttcagggacatttttcttcctagtgcagaaaaggcagggcanaggcctggtgtctgccccaaaaggcagcccgggtgcggtttcctggtgcagttgtggngacactgaatccgcccncctcnnctgctccaggacacgtgctcctgncgtttctntgnatgnctgcctactgcccggtggcttcccgccttatatgctacnccgggctctgctgtncatggcttctggangcctccgtcccagcngtngnggnntcggggtccggta

SEQ ID NO: 229 - DNA, 288 bp, Zea mays
  misc_feature: Incyte ID No: 700342382H1
  unsure 243, 261, 271: a, t, c, g, or other
gccatatgaaccccagtcccggccgccaactgctgctgagctgttgcgggcctactgcgcgtctcgtgggcatgtcagccatgctgggctgcctgatgagaccagggctgctcgacaaatactgaaggattacattgatggtaaaatcccacactttgagctccctcctggcgtgacaggccctgaggtggactttgaacaaatcgctggatcagaaagtccaactattcagcagctaatgancagttatgatgatctcgngaagagatgngatgcagtgatctgctg

SEQ ID NO: 230 - DNA, 289 bp, Zea mays
  misc_feature: Incyte ID No: 700342384H1
  unsure 3, 9, 12, 18, 34, 50, 77, 83, 85, 90, 95-96, 99, 101, 107-108, 132, 139,: a, t, c, g, or other
gtnccaganctncgcgtngtccgcgccgatcgantgagaagcccggtttncgctctcagaatgactgaatgggaaanagccananccgcngtggnnganancccggnnatcaagctctttgggaaatggagnactgatnatntgcagatcaacgatatttctctacnngattacatngctgtgaatgaganatntgccaagtaactgcaccacagtgcaggacntatgctgccancgtttccgnaaanccantggtccatcntggagcgcntnactaatcnatgatgtg

SEQ ID NO: 231 - DNA, 240 bp, Zea mays
  misc_feature: Incyte ID No: 700342385H1
  unsure 2, 20, 61, 68, 94, 122, 132, 135, 141, 152, 177, 192, 207, 222, 224-225,: a, t, c, g, or other
gngtgggagacccgcgagangctgccgtgtagggaccgtagactcagcgactgcgaagganggataangggatggccgggatcggaccgatcangcaggactgggagccgtcgttgtgcggnagaaggcacncancgccgncgccagaaggntgagaaggctttcaacgccgcgcgncgcgccggtgcgganatcgatacctgagantaccactctgtactnannaaggcgnattccagg

SEQ ID NO: 232 - DNA, 293 bp, Zea mays
  misc_feature: Incyte ID No: 700342387H1
  unsure 217: a, t, c, g, or other
gaaaagacatttacaactaggccagggattagccactgtgggagggtggacaggcaatggttcagtggcctggctgttggcaggaactccaagtgcccaggcctcttgggcagcttagggccctgcctctgtttcatgatgcaaaggtcatttgtcttgggtgtcctatcccatatggagaagaaaggggctctaagttctggctcttctttctttngggtctctgtacctgaggaaaccaggccctgggtgatttgcagatctgctcaccctcggtgagcaacaatgtcagc

SEQ ID NO: 233 - DNA, 295 bp, Zea mays
  misc_feature: Incyte ID No: 700342388H1
  unsure 123, 284: a, t, c, g, or other
gagagatccggagcagccgcagtcccaccgaccccgccgccggtcgccctccatctcctcgccgctgcctctcgtttctcttttcaataatcaagatgagccgtggtggtagtgccggtggtngtcaaagttctctgggttatctctttggaagcggtgagccccccaaaccagcagtggcaccagctgcaagtgctccacctgttgagaaaccatctgctgcaaagatgatgcggccaagcaggttgctgctggggttaccagccaaaccattaactaccaanggctgatggtc

SEQ ID NO: 234 - DNA, 295 bp, Zea mays
  misc_feature: Incyte ID No: 700342391H1
  unsure 281: a, t, c, g, or other
cacaacacagccataaagcatacggtttttacttatttgtggccctacggttgtagaacatattcaatgtgttagcattgccacaccattgattttaatgcaggaatcactccgcaaatgtgaatccatgaaactggttgagatttttgttccagagtggaaaccactgttttgtatgtttgaagagccacatgaatctaccgatgcagaacagcagaagctggaatattaataatattttctttaaaaaatgaaagtagtggcagccgacgagcacctancaatgaaccacgac

SEQ ID NO: 235 - DNA, 295 bp, Zea mays
  misc_feature: Incyte ID No: 700342395H1
  unsure 2, 96, 110, 116, 148, 180, 210: a, t, c, g, or other
anaccctagcgccggcgcctccacttcgttttcctcactctctcctccagctcagggtccggcggcgaagggaaggcaagatgtacaccgcgaggnagaagatccagaangagaanggtcttgagccctccgagttcgaggactccgntgcacaggctttctttgatctggagaacgggnaccaggagctcaagagcgacctcaaggacntgtacatcaacaatgctatccagatggatgttacgggataggaagctgttgtcattcagtcccatacgctgcgcaggcttcagga

SEQ ID NO: 236 - DNA, 141 bp, Zea mays
  misc_feature: Incyte ID No: 700342396H1
gggatgtgatgtgtatctcttcttcgcttgcaaagagtagctaagcaaacgaagaagggatgtgatgtgtatctcttaggctagactgcttcagctagttttctgtgactgctacatgaatccatggattactgatttaaa

SEQ ID NO: 237 - DNA, 294 bp, Zea mays
  misc_feature: Incyte ID No: 700342401H1
  unsure 262: a, t, c, g, or other
gaactctccgcccaagacgcaggtgcattgccgcgttgatcggtcgggccttatttcaggagcaccttggataagtgttccctatccctttcagtggggtgctccgacgtttgaacgccggagaagctttcgctatgatgatgacttcgttcattgctcttgtagagtcaactggcgccttcatcggtgcttcgagatatgcgagtgcaatatgattcctccatcgattatcagtcggggcgtgggatggcaggcatggtcngttgctcgattcattttcgggacagcgaacgg

SEQ ID NO: 238 - DNA, 294 bp, Zea mays
  misc_feature: Incyte ID No: 700342403H1
gcgagaggggggaacccgaggagatgaggctggtcggcctgacgggcgggatcgcgtccgggaagagcactgtctccaacctattcaaggacgccggcgtccccgtcgtcgatgcagacatcgttgctcgggatgtagtgcagaaaggcactggaggtttggaagaagattgtaaaaagccttcgggaatgatattttgttggagggtggagaaattaacagagcttacttaggacaaattgtcttttctgacccatcaaaacgtcaacttctgaaccgtcttctggcgccaca

SEQ ID NO: 239 - DNA, 291 bp, Zea mays
  misc_feature: Incyte ID No: 700342404H1
  unsure 46, 54: a, t, c, g, or other
cgaaggatggaaatcagaacgatgcaaacacagggctcttcttganggccgctnttcggccattcacttacagaaatcttgtcaaggaaattgttctgatgagacaccacatcattgatggggaaatagtttagtttgcatgaggctgtattctcacatcattgatggggagatagtttagtttgcatgaggctgtattcagtttttcagattagggatttgcccatttcaatttacaaatgcagagcttgcatttcgaaggtctaaggccatctcccgcagatcttgtaa

SEQ ID NO: 240 - DNA, 292 bp, Zea mays
  misc_feature: Incyte ID No: 700342405H1
gtgcgtccgtcccctggccgtctggagaggtgggtggggagtctaccggacgcgggtagccggggcggtcgccccaccttgccgatacgaggtgtccgctcctatttcattcggtccattccgcctctcggaagagttgagagaggagtaaggaaggcgaggacctcgcgccccgcgatgggcggcgacctgtacgccctcgacttcgacggcgtcttgtgcgacactgacggggagagctccctctcagccatcaaggctgcgaagtgaggtggccgtcgctgtttgagca

SEQ ID NO: 241 - DNA, 293 bp, Zea mays
  misc_feature: Incyte ID No: 700342411H1
  unsure 96, 196, 201, 245, 257, 282, 292: a, t, c, g, or other
aatcaagccaccaccctctcctcctcctcagcggcgagcaccaccagcaacagcgagacacgatgaggccgatcttgatgaagggccacgagcgcncgctcacgttcctccgctacaaccgcgacggggacctcctcttctcctgcgccaaggaccacacccccacggtctggtacgccgacaacggcgacggtcntcggnacctaccgcggccacaacggcgctgtctggacctgcgacgtctnccgcgactcggngcgtctcatcaccggatccgccgancaaccgccang

SEQ ID NO: 242 - DNA, 292 bp, Zea mays
  misc_feature: Incyte ID No: 700342412H1
gagtttagaaagtaattcttatctatcattttgtggtggcagccgtaggccatttaatttaagtggagcaagaatggagaatgtggagtgtcaaatactggtgcacgacgagaaagcagagtaatggagcatcgttcaaaagctgtgagaacccggggtataaaaaggagatatccagagccacctgccagaagaaagcagaggaagaaaaaagcaaaaaaacaaattattaacaggtgtatggatatacagtggtatacggccagaaaagtggaagaagagcacccgtaca

SEQ ID NO: 243 - DNA, 290 bp, Zea mays
  misc_feature: Incyte ID No: 700342413H1
  unsure 275: a, t, c, g, or other
gagatgaccgatcggatcccctgctcatccgccgagcaccaccaggcagcaggctccagtcatcgagcaccagcaggagcacggcgcgctgcccagtaggagcacggccaagaggatgacgcccgcatcctgcctcttctcctctgctactggagcctctactgctaggagcacggctaggaggacaacacccgcatccagcaggagcaccagcaggaggaggacgcccatgctgctgccgttgagcgatgatctgatgcgcccccatcatggcncttctcctccctcag

SEQ ID NO: 244 - DNA, 287 bp, Zea mays
  misc_feature: Incyte ID No: 700342414H1
  unsure 203: a, t, c, g, or other
tcttgctgttgatatttggagccttggctgcacaatcattgagatgtttacaggaaagccaccttggagtggtcttgaagggccggctgcaatgtttaaggtgttgcgcacggacccaccaattccagataacctgtcccctgaagggaaggattttctgagatgctgcttcaagagaaaccctactgagcgaccaacagcancacaagttgctcgaacacccatttatccaaactttgaaccactacagcccacatagcgttgtacatcatttcgggattaaatct

SEQ ID NO: 245 - DNA, 290 bp, Zea mays
  misc_feature: Incyte ID No: 700342415H1
attcacttggcagtaacaattgatgatatatccgaggaccaaaatacatcaagtttggaccaatcattgaagcaagcggatactgaactaccagtatcaacatctgtttgtagcgaagtggatgctagtgaacctcctgaagaaaagaaagtcttaatggatgaagtggagcacataaacattgatggacaagaacagcctggaggtttatatgtacatcgccctggcactggggttccaaggacatgggaatcccggaaaggacgagcacgaaacccagacacacagat

SEQ ID NO: 246 - DNA, 285 bp, Zea mays
  misc_feature: Incyte ID No: 700342418H1
  unsure 18, 30, 100, 161, 181, 252, 260: a, t, c, g, or other
gctccacgcactccgacntcctccaggtangcccgccaggccccatcctcctaacccgatcgctactctcctgaaccctgtgtcgtcacaagagcgcgangaggtcgtggcggaggcgctctacactgtgtgtatgcggaggcggtggccatggcagaggngaaccatgttgttgccggcnccggccagaagctctactggtcccggcaaaccagagccatgcggttcaacgctgcgttcgcggctcatgcnggctgcangctctgacattaccctcccaaaaaa

SEQ ID NO: 247 - DNA, 290 bp, Zea mays
  misc_feature: Incyte ID No: 700342419H1
  unsure 2, 25, 28, 60, 198, 205: a, t, c, g, or other
gncgccaccaggtgcagagtctttngtnatctcttctccggcgaagaacccccagtcgcncaccagatcacttgttaaactttgttgaggggtgatggcggtttctttcgcaaacctcagctccgaggcagggcttaaaaagcttgatgagtaccttctcactcgcagctacatcactggctaccaagcttccaaggntgacttngctgtctacacttcgttttcgtctgctccctcgtccaagtatatcaacgtagcaaggtggtttaatcacatgatgcgctcgtgag

SEQ ID NO: 248 - DNA, 291 bp, Zea mays
  misc_feature: Incyte ID No: 700342420H1
  unsure 190, 200: a, t, c, g, or other
catcactcatccacagctcgcagccgtattcctgtctcgaatcctctctcgccgctccgatggcccgcacgaagcaaacagcaaggaagtcgaccggcggcaaggccccccggaagcagctggccactaaggctgcgcgcaagtcggccccggccaccggcggcgtgaagaagccccaccgcttccgccnccggcaccgncgcgctccgcgagatccgcaagtaccagaagagcactgagctgctcatccgcaagtccccttccagcgcctcgtccgcgagatcgcgcagg

SEQ ID NO: 249 - DNA, 291 bp, Zea mays
  misc_feature: Incyte ID No: 700342421H1
ggcgacgcaaaagttcgggctatgctagttaccatcacatgcctgttgccatccgagaaaggttcggtttcgtgcagcttcctcttgaagttactgaaggcaacaaacttgctcaagtgtggagagatgtgcaggaaagagcttatgaagcgcatcgcacggcaactggaagaagcgtcagtgtcagatcttctgatccctacggtggatggggataccaccgtttacgacatcgacctgattcttagcattgttgaagaatttgtcagacaagatagcaagaatgcccag

SEQ ID NO: 250 - DNA, 286 bp, Zea mays
  misc_feature: Incyte ID No: 700342422H1
  unsure 20, 62, 71, 77, 156, 188, 203, 229, 263-264: a, t, c, g, or other
gccagtctagttcctgatgncccaggctgcctgagcacctcccagcccctgcccctcatgcnaaccccgcnctaggnctggcatggcacctgtcgcccagtgccctggggctgatctcagggaagcccagctccagggccagatgagcagaagctntcgatggacaatgaacggccttgctgggggcngccccctaccctctntcacctttccctaaagaccctaaatntgaggaatcaacagggcagcagatctgtatatannttctaagagaaaatgtaaataa

SEQ ID NO: 251 - DNA, 288 bp, Zea mays
  misc_feature: Incyte ID No: 700342425H1
cttgtgagttccaccccaaaacgaagcaacacgccttgcccggtgtgcaccgacgaaaccagcgacagcagcacagagacgaacggcgtggtatcctcctgtctcagctgcttcctagctgggggtgctctctaccgtttcgagtacgcagtcaacccggcgctcttcctcgccaaagcgcgaggagggacgtgcacgctcgctccctctgaccctgacgacacggtggctcgccgcgccagatacctgctgagcaacggtttcaggtgctacaacctgttcaagagc

SEQ ID NO: 252 - DNA, 135 bp, Zea mays
  misc_feature: Incyte ID No: 700342428H1
cttcaactcgccagtagagagctcgttgtgcctctctgatcccatgtttgcgtatgtctgctcaacaacatgtttttaccatggagaacaagttgaacatctgttagatctatcaacagtgtcatatatatgttc

SEQ ID NO: 253 - DNA, 285 bp, Zea mays
  misc_feature: Incyte ID No: 700342429H1
  unsure 115, 200, 246: a, t, c, g, or other
gcaaagcatgctggagcctactggtttggaagtccaaactatggagtatttacctgggatgacaaacttccaggagctcaggttcttctcagcaggttgcgactcttcctaagtncagggtacccttacgaagaaatactgaggacattccacaaccaaaccgacaatgttatgtgctcatatctgcctctattcaattnctcaacttcactaaaggaggactaatacgactcaaccatggaaggnctcagccattcagtatgctgtcaacgcactttccttgct

SEQ ID NO: 254 - DNA, 285 bp, Zea mays
  misc_feature: Incyte ID No: 700342432H1
  unsure 187-206: a, t, c, g, or other
gctcgccgcgctgaacgcgtacaaccgtggcggtaggaggagcagcagcagaccgagggggagcagcagcacggcggcgacggcggggttaacgatgacggagacgaagatggtgacgacagcgctgaagagaacaatggcaacaacagctcacagtaagctgtaagcccgcgacgacaagcttggnnnnnnnnnnnnnnnnnnnngcagggattccgccaccatgatcgcattttcctggtagcgctaaagaatttcggcgtgtctgttcgctggaggatcgcc

SEQ ID NO: 255 - DNA, 285 bp, Zea mays
  misc_feature: Incyte ID No: 700342434H1
ctaatcgcatctgcttccagagccccccgccgccgctgcgccctcctctcggtcctgccgtccgtcgaggtaaaaggacagcatggtgagggtcagcgtgctcaatgatgctctcaagtccatgtacaatgctgaaaagatagggaaacgtcaggtcatgatcaggccgtcatccaaggtgatcatcaagttcctgacggtcatgcagcgccatggctacattggcgagttcgagtacgtggatgaccacagagctgggaagatcgtggtggagctgaatggaaa

SEQ ID NO: 256 - DNA, 283 bp, Zea mays
  misc_feature: Incyte ID No: 700342435H1
cagagactccatccatccttacttagcaatgaccatgatcagtatcaagctgtggttgctgccgcagctgcttcccaatcggatggttatccgaagcagcaattcctacaccttcaacaacctatgcagtccccacaggagcagtgcaatctcaatccgctgttgcagcagcaaatactacagcaagggagccaacagcagatggttagtcctgatgctcaaaatatccagtccgtgctcaacccaaatgctattcagcagcagctccaacaactccagcaga

SEQ ID NO: 257 - DNA, 278 bp, Zea mays
  misc_feature: Incyte ID No: 700342440H1
  unsure 229, 235, 267, 277: a, t, c, g, or other
gtggcagccatcaggtgagccaagatgggtgcatacaaatacatccaggagctgtggaggaagaagcagtccgacgtgatgcgcttccttctaagggtccgctgctggcagtaccgccagcttctctgcgctgcacagggctccccgccccacccggcctgataaggcgcgaaggctgggatacaaggctaagcaaggttatgtcattacaggatccgtgtccggcgcngtggtngcaagggccattctaagggtgcaactacggcnagcctgttcnc

SEQ ID NO: 258 - DNA, 281 bp, Zea mays
  misc_feature: Incyte ID No: 700342441H1
cgagagtgacattgctcctccagtgctcgaggaaaacaaggatgctgttgtatcagtgctcgaggaaaacaaggatgctgttgtatctgcaacaaaaactgcaaagtccctggatgggtctgccttaaaaacagggcaggaggaggagggtcctgaagaggctgatgctactgaaaaagcaatggatgaagaggtagaatcaaaggagatgcagaagcagcaaaagcaggatctatagcatgagcctcaggaagcttaaagccaagcacaagaaatatctc

SEQ ID NO: 259 - DNA, 279 bp, Zea mays
  misc_feature: Incyte ID No: 700342443H1
  unsure 28, 62, 98, 104, 124, 141, 172, 176, 201-202, 257, 259: a, t, c, g, or other
gagacatttcaaatgcttgctgattgtnatgatctgtgttgcaaatgctcgacaagtgaggnttacttcaatgaacaagaggaagaacttaggcatanggtacnacttgaagcagaggacaganaattggaagaggctctngaatatcaacggtggatagaggaggaagcanagcngaaacatcttgcagaacaatgtagnngtacacatgcatcttctgttatggtacagctagtctttcaagcactgtgagtttnancagggatccggataacctga

SEQ ID NO: 260 - DNA, 280 bp, Zea mays
  misc_feature: Incyte ID No: 700342445H1
  unsure 6, 8, 23-24, 27, 37, 44, 57, 64, 88, 90, 108, 192, 194: a, t, c, g, or other
gaatantngctacatgaggagtnnctntgaccatcantttagcnaggcagttggatntgcctcncctagcatggctcgaagtcgaatnanaaagtacagtacagtganttataccaagtagtcatgatcccagaatacagttcaccactgtctctgtgatttacatccaactcctgccctccaaatctaagngngcatttacgatgcagagcaggctataggagactgtggagtaaggaagaaccacagtgacagtaacacacggtaacatcaccgtgga

SEQ ID NO: 261 - DNA, 281 bp, Zea mays
  misc_feature: Incyte ID No: 700342447H1
  unsure 19: a, t, c, g, or other
cctagctcccgcaactgcngccgccactcccacgctcgcagccatgccgcccaagctcgacccgtcgcaggtggtggaggtgttcgtccgtgtgaccggcggcgaggtcggcgcaggtcttcgctggcccccaagatcggcccgctcggtctttcccccaagaagatcggagaggacatcgccaaggagacggccaaggactggaagggcctccgcgtcaccgtcaagctcaccgtccagaaccggcaggccaaggtctccgtcgtcccctccgccgcggg

SEQ ID NO: 262 - DNA, 274 bp, Zea mays
  misc_feature: Incyte ID No: 700342448H1
  unsure 49, 208, 219, 224, 227, 233, 246, 271: a, t, c, g, or other
gtcatctcatatcctgagccagagatcaaacaaaccagagggagcgaanatgggcggcaggcttgcaggtgtttggccagccggcgtctactgatgtctccagggttctgacatgcctgtttgagaagaaactggagttcgatcttgtccgcatcgatacgttcaagacgcatcacaagctttccgagttcatcaagtttgggatccnaattggcaatnacctnaancacggngacaaatctcgtnattcaagggcatttgcgggaatctncac

SEQ ID NO: 263 - DNA, 293 bp, Zea mays
  misc_feature: Incyte ID No: 700342449H1
  unsure 63, 67, 120, 140-141, 153, 164, 243, 246, 253, 259, 284: a, t, c, g, or other
cgcggtttcctgcttcaacagtgcttgaacggaacccggtgctcgacccctccgacccccgcnggcngctttgagcctgagccctttgcaacttcgtcgctccgccgctccagcgtcgcntccgcgcctcgcccagccgnnatcatgaccacnggtctcctcgnaatgggccagaactaccaccaggactcggaggttgcaataaacggccagatcaactggattgtatgctcttagtctatngtncagtctnttattngacgggatgatgtggcctgaaaaanttgcaaata

SEQ ID NO: 264 - DNA, 212 bp, Zea mays
  misc_feature: Incyte ID No: 700342450H1
  unsure 14, 16, 18, 78, 188, 191-192, 194-211: a, t, c, g, or other
tttttggctgaganananaacattatccatgcaacatcatgaagctagtcctctctgggtggtgttgctgttttctgngtttgtcaagacgagctttaattttgctctatgtggatgactgtttaccgttagtcgaacctgtatgatgttgcatggataatgttttttggctgaggaaaaaaaaaaanaanntnnnnnnnnnnnnnnnnnna

SEQ ID NO: 265 - DNA, 292 bp, Zea mays
  misc_feature: Incyte ID No: 700342451H1
  unsure 100, 109, 114, 121, 147: a, t, c, g, or other
cgataacccatataacaaaggtgttctgaacaattttctagagatattctgcactgctatccccccttcgaagaacaatttccgggcaagggtgacagcngggcaaggnctgcngcaaacnctctcacagtccaggggtttcatganccccagcatgggcaagcccattggagatcttgaaatggacaggaagccagtagcaccttgggacgagccaaggacggcggctgatatcagggattggaagcagggttggggtcagttcgatgagaagagggcaggtagctcatgc

SEQ ID NO: 266 - DNA, 295 bp, Zea mays
  misc_feature: Incyte ID No: 700342452H1
  unsure 79: a, t, c, g, or other
gaagggtttccagacagtgttactccttcatatgtaccttacatgacctggagggctctgaagcatttctttggtggancgatgggggtgttacgacaagaaccttgctgagttctgttggagtctctcaaagcaaggtaacaccaggtgccattgctatcaactggatcctcaaggatggtgctgggcgtgtcgggaaaatgcttttgcacgtcaaggaaagaagtttgactatgacctaaagcagttgcggttttctagtgatctcttgttggaaataggagctgggatagaa

SEQ ID NO: 267 - DNA, 295 bp, Zea mays
  misc_feature: Incyte ID No: 700342453H1
ccggcaacttcggcgttgcccgcctcatgcgcgaccgccgcaccaccgaactcgtcgccgtcaagtacatcgagcgtggcgagaagatagatgagaatgtccagcgcgaaataattaaccatagatcattgaaacaccctaacattattaggtttaaagaggttattttaacaccgacccatcttgctattgtcatggaatatgcctctggcggtgagctttttgagagaatatgtaagaacgtgcgattcagtgaagatgaggctcgctacttcttccaacaatcatttcagga

SEQ ID NO: 268 - DNA, 290 bp, Zea mays
  misc_feature: Incyte ID No: 700342456H1
caaggttaaatatgaacttgacaagaaaactggactgatcaaggtggaccgtgtgctgtattcatcagttgtttaccctcacaactatggattcattcctcgcacgctttgtgaagacagtgatcctttggatgtactggttataatgcaggagcctgttatcccaggctgtttcctacgtgcgaaggccatcggcttatgccgatgattgatcagggagaggcagatgacaagatcattgcagtgtgcgctgatgatcccgagtacaggcatacaatgatatcaaggag

SEQ ID NO: 269 - DNA, 294 bp, Zea mays
  misc_feature: Incyte ID No: 700342458H1
atttaccagtgatgatgagagagatggaatggtcggggtaccaggggtctcaggaaatattttccaggagatagatgggaggcagttcgacagcccaatactggggagtagaaagcagaaaggtggatttggcaaaggcaaaggaaaagctaactttgcaactgaaagagagaggagggagcagtttaatgtgaagtatggggctttaaggtcactgttcccaaaccctactaagaatgacagggcctctatagttggagatgccattgaatacatcaatgagcttaatagaac

SEQ ID NO: 270 - DNA, 293 bp, Zea mays
  misc_feature: Incyte ID No: 700342460H1
atttccaggaagccaagaaattatccaagccatatgttgatcaaattgctacagctactaaaccacatgtcgagaaagttagaactgctctcaagccttatactgaaagagcacgacatgtatatggacagtttcttgagacagctactacatatcatcagcaggctcaggcaactatctcggattaccttcaccggcatgagtttacaaaacagtttgtaactaaagagttggtgtggtatctggcttctgctttattggttacacccttctttgttttgtacacactccta

SEQ ID NO: 271 - DNA, 293 bp, Zea mays
  misc_feature: Incyte ID No: 700342461H1
  unsure 43: a, t, c, g, or other
cttgtttattgctgcatataccttttaggtgcttggaaaaatntggtctgtggcatttaaatatcacttccgtatgccaccttactacacacttgttctccggtcacttgcctctttggaaggactagccgtggcagcagatgggactttcaaaacatttcaagcagcatacccatatgttgttcggaagcttctgtccgaaaattcacttgaaacaagaagactcttgaatcaggcaatttttaacaaaaggaaagagttccaatggcagaagattgacgcgtttctaaaat

SEQ ID NO: 272 - DNA, 293 bp, Zea mays
  misc_feature: Incyte ID No: 700342462H1
  unsure 2, 55, 235, 241, 249-250, 254, 266, 282: a, t, c, g, or other
antaatccgactcccactgctgggtgccctgtcccctacctcgggttccgcgcanaggaaggtgagacaccaattccactcccaaaccccacgaaaaccctcgccgtcttcgtccaaatcactcgcttgatctctcctctccgaacccggcaaccccttgaactagggttccagcgacccaatgacggacggcgacgacgagtacaagcgcgaggagtcggtggccctgctggtnatcgtnttcctcgnngcgntctcgtcctttncgtcatcgtgcttcgnctatactgcta

SEQ ID NO: 273 - DNA, 298 bp, Zea mays
  misc_feature: Incyte ID No: 700342463H1
  unsure 32, 56, 80, 160, 189, 191, 218, 224-225, 260, 288, 290: a, t, c, g, or other
cctttctctctcctcgaccctcccgacgcggnaaagcaaaaacacaaggaggagangagggagagaaggaagaaggcgangccaaaaatcccctccccctccccaaatcctagcccaataatctctcaatcaggggattcttaggtttgatcaagtcggnggattcggcagggcgcaccatgaacgagnangcgtccgtctccaaggagctcaacgcnaagcannagaagatattggaaggtcttctacggcatcctganaatagagaatgcgcagactgcaagtcananggtctcga

SEQ ID NO: 274 - DNA, 299 bp, Zea mays
  misc_feature: Incyte ID No: 700342464H1
ggaatgttcaagaacctcttcagtagattgtggcttgcacgagtcaccaatcaccaacactgctagctctatctcaaagattactctaccacagtctgttccacatgttttaggtgtcggtcaattgttggaatcagcactacatgtggctggccaggttgcaggtgcatctgtttcaacctcacctcttccatatggtacaatgactagtcaatgtgaagcccttggattgggcaccaggaagaagctatcgagctggcttgtcaatggacacgaatcaaccccggacaatcctatgc

SEQ ID NO: 275 - DNA, 294 bp, Zea mays
  misc_feature: Incyte ID No: 700342465H1
  unsure 3, 6, 19, 29, 48, 50, 53-54, 56, 61, 64, 76, 118, 124, 127, 156, 181,: a, t, c, g, or other
tgnaangggtccgtacggngttgttcttngttcccatcgtaacttaananggnnanttacncantgtccgtaggcnttgacgtcctgcagatgaaggatgaggatgtcctcaaattcnttgctncangaacccacttaggtggcaccaaccttgantttcagatggagcagtacatctacnaaaggangagtgacggtatntagatcntcaacctgaannggactgggagaaactgntgntagncgctcgngtatngngncattgagancctgctgatnncaggntctctcctc

SEQ ID NO: 276 - DNA, 282 bp, Zea mays
  misc_feature: Incyte ID No: 700342466H1
  unsure 12, 19, 22, 55, 57-58, 71, 75, 80-81, 83, 87, 92, 184, 205, 219,: a, t, c, g, or other
atggatcatcancggtacntcngggcggacggcatcgatgtggatatccctactngnntcgcaggatggtncttntgcannantctnaggangcttgtctgggttatccttcagcctctcttctatgcgtttagacccctgttcatcaaccccaagccaattacccatctggaagtcatcaacnctgtgatccaggtcatttgangtcctcgtctaatnanntntgntgagngattcctagtntanatgttggnagctccntgancgggntgngcttgnacc

SEQ ID NO: 277 - DNA, 290 bp, Zea mays
  misc_feature: Incyte ID No: 700342469H1
  unsure 81: a, t, c, g, or other
gtgaagggacagctgaaggttactagagcttttggtgctggttttctaaagaagccaaaatttaacgaggcactacttganatgttcagcatcgactatgttggaacatcaccatatatcagctgcaacccttctgtacttcaccatcgtctctgtgcaaatgatcggtttcttgtactgtcctcagatggattgtatcaatatttcagcaatgatgaggtagtttcgcatgtgttgtggttcatggaaaatgtaccagagggagacccagcgcaataccttgtagctga

SEQ ID NO: 278 - DNA, 288 bp, Zea mays
  misc_feature: Incyte ID No: 700342470H1
  unsure 249-250: a, t, c, g, or other
cattaatttcccagcttctccagaaactccgatcaaatattcagttacctgagtgcctccgtattgtagcacatctgcgtcgaattggagttttcagtgagtcagaattgcgcttacagttcctgaggtgcagggaagcttggcttctggaattcttgaagatctggaccaaaggaatgtttatgattacctcaaaggcatggtgacttgccacagggtacatctattcgatgttgttaatcaatatanngcaatattcaacaatgataaatctggaaatgatgagaa

SEQ ID NO: 279 - DNA, 227 bp, Zea mays
  misc_feature: Incyte ID No: 700342472H1
aaacactggaaatgatgcagttttggcatggtcttgggactgcgcgcagatgattggtagtgaccgtttgtggactagtgttttcctttttggcatgtgtcatgattgcttacactgtaaatgcaattgtacaatagattggttataagctcactgtgaaagcagctctctgtatcactagctatttaatatccgtttcttcaaggagccgattggctgaagttgac

SEQ ID NO: 280 - DNA, 285 bp, Zea mays
  misc_feature: Incyte ID No: 700342473H1
tgaaaaagtatcttctgtggagggtgagaagatggtgcttgtggcatgtggatggcgccatacaattacggtttctgactctggtaatctgtacacttatggttggagcaaatatggtcagctagggcatggtgattttgaagatcatttagttccacataaagtagaagctctgaaagatagcactatatcccagatttcaggcggctggaggcatacgatggcactacatcagagggaaagctttacggatggggatggaacaagttcggacaagtcggagtc

SEQ ID NO: 281 - DNA, 287 bp, Zea mays
  misc_feature: Incyte ID No: 700342475H1
  unsure 4, 13, 37, 244, 246: a, t, c, g, or other
gtcnccacacaanaagctttcagacaacacacacgtnaagccatctgtcactctgtaaattattttgtacattctctactcttaagtgtttcccagtcagttcctttaacaaacatgagcttccatgatgccaaaggagttcactgccacctgggaacagatagggtgtcgccctgtgagaggatgaacgaggccagctgagggctcccaagtgcacttagacatcagcagttccaggagcacnanctgagaaggacggcatgtggcatcaggacgaggctcagacc

SEQ ID NO: 282 - DNA, 289 bp, Zea mays
  misc_feature: Incyte ID No: 700342477H1
  unsure 66, 210: a, t, c, g, or other
aggagaatagcggcgaggacgaagtggcccgcccaggaaatggcgtcgatgcagagctggcgcaangcctacggcgccatcaaggacaccacaaccgttagcctcgccaacctcaactcggacttcaaggatctggatgtggcgatcgtgaaggcgactaatcacgtggagtgcccacccaaggagcgacacctgcgaaaggttgttgcngcgacatccatcaccaggcctagggcggatgtcgcctactgcatccacgcgcttgcccgccgtcttgccaagacccgca

SEQ ID NO: 283 - DNA, 291 bp, Zea mays
  misc_feature: Incyte ID No: 700342479H1
ctggttgccttaaccctactgaagcatgatgatctgcaaggtcctggtgatcactgtcttctgtgtgctgactgtggctttccccagtttggacatagattcaatcaatgaagaactacaggattcaatctttgatatactaaactcaacctctgacttccaactggcatcatatgaaccatcaacatctcctccagaggatagcacataccaggaatcaaacactgacttcatgcaaaccacatattccaaaagcatacagatttctgagctctctaatggagctgagac

SEQ ID NO: 284 - DNA, 295 bp, Zea mays
  misc_feature: Incyte ID No: 700342480H1
cctacaccgagcagccaagcgaggaagcgaagacccatttccccgagcgcaagagtaccatggcggcggcggcagtttatggcggcctcaaggggaagcttggcgtcgaggatgcccccgagctgcagctgaatcgcatccgcatcaccctctcatccaagaacgtcaagaacctggagaaagtttgtgcggatttggtaaagggagccaaggataagcatctgagggttaaggggcctgtcaggatccctactaaggttctccacatcaccacccgcaaatccccttgcggtga

SEQ ID NO: 285 - DNA, 288 bp, Zea mays
  misc_feature: Incyte ID No: 700342481H1
gccgctcctctcacaacccagtcgctcaaaaccctagagctctcgcctgctcgcctccgccgccggagcgagctccccatcttcatccgtcaaccatggcgacccagatcagcaagaagaagaagttcgtcagcgacggtgttttctacgccgagctcaatgagatgctgacgcgggagtggcggaggatggctactctggcgtggaggtgcgcgtcacgccgatgcgcacggagatcatcatccgcgccacgccacgcagaacgtgctcggcgagaagggccgcaga

SEQ ID NO: 286 - DNA, 283 bp, Zea mays
  misc_feature: Incyte ID No: 700342482H1
  unsure 96-117, 172, 203: a, t, c, g, or other
gaaaaaaccaacacactctcgcttgcggcaagaattttccggcccgaaaccgaaagcacccgcaccaatctctgcgtctcttcgtcttcggctgcnnnnnnnnnnnnnnnnnnnnnnaggttgaggagatgctgtccggcgacatccccccgagccagaccatctacctcancaacctcaacgtgtcggtcaagaaagaagantgaagagatcgctttatgccttgtgctcacagtatggaaggatatggatgtggtggcctgaaaacacaaaaactgagagg

SEQ ID NO: 287 - DNA, 280 bp, Zea mays
  misc_feature: Incyte ID No: 700342483H1
  unsure 161: a, t, c, g, or other
gttgaaaacttgctcgactttgactttatggacccaccgccccaggagaatatcctcaactcaatgtaccaactctgggtgttaggtgcattgaacaatgttggtggccttacagaaattggctggaagatggtggagttcccgttggatccaactctggncaaaatgcttcttatgggggagcagctagagtgcctgatgaggtgctgaccattgtatccatgctatcatgccgtcagtcttcttccggccaaaagaccgagcagaggagagtgacgca

SEQ ID NO: 288 - DNA, 282 bp, Zea mays
  misc_feature: Incyte ID No: 700342484H1
  unsure 163-164: a, t, c, g, or other
gtgatttcccccggcggcgttgggcgctggtttaggagaagaaaaggcggcgcgcggcggaaaaccctagcttagctcctctccggcgtcaagtgctctccggtttgagggcgcgatgagggtgaaggtgatttcgcgttccaccgacgactacacgcgcganncagccaggacctgcagaaagtattccgcaactatgatccagcgcttcgtagtcaagagaaagctgttgagtatactcgggcactcaatgctgccaagttagagaagatatttgctaag

SEQ ID NO: 289 - DNA, 250 bp, Zea mays
  misc_feature: Incyte ID No: 700342486H1
  unsure 75, 78, 90, 105, 166, 244: a, t, c, g, or other
tgcaaagtagtctccgatttcggttttctgctccttgtaaaaagagaagaataaaccgtctgtcgtttgattggngtncagttagttttnaccgaacaatacttncaatcaaacgacagacggtttattcttctctttttacaaggagcagaaaaaaccgtctgtngtttgattgaagtattgttcggtgaaaactaactgcactccagcctgatctgagaaaaaccggggaactaataacagnccctga

SEQ ID NO: 290 - DNA, 275 bp, Zea mays
  misc_feature: Incyte ID No: 700342487H1
  unsure 134-169: a, t, c, g, or other
ggacagcacagaactcatagaagtcggcctgtcctgcctcccaagttctgagacttacgtgtgcatctacatctggtaagagagtctacatctggtaagagagtataatcttagtgttttaattgtgcacatannnnnnnnnnnnnnnnnnnnnnnnnnnnnnnnnnnncagatgcagtgtttgcagaagccagaagatgtcagattccctggagctggaatcagaggcatttgtgacttgggtactgagagccaatgctaatctctgtaagaac

SEQ ID NO: 291 - DNA, 279 bp, Zea mays
  misc_feature: Incyte ID No: 700342489H1
  unsure 18, 31, 39, 70, 170, 181, 241: a, t, c, g, or other
atctcaaaacctgacaanacatttcaaaganagtattanattcattcacgagtgccggctccgcggtganagctgccttgtacactgcctggccggggtctccaggagcgtgacactggtgatcgcatacatcatgaccgtcactgactttggctgggaggatgccctgnacaccgtgcgngctgggagatcctgtgccaaccccaacgtgggcttccagagacagctccaggagtttganaagcatgatgtccatcagtatcggcagtggctgaagga

SEQ ID NO: 292 - DNA, 280 bp, Zea mays
  misc_feature: Incyte ID No: 700342494H1
ctccaatcacctgccggagcagctcgaggacaggctgacgatatagaaaacgaagcaaacgagcttatccgcatcaagaactatctctatggcaagctcgcggggcacacaggccattctgtcgagaagatccatgaggacctgtctagggtgaagcgcttcgacgccgaaggggctctcgagtacgggatcatcgaccgtattgtcaggccgtctaggatcaagaaagagggctccactgctcaaaggagggacatgcggatctgggattggctaataa

SEQ ID NO: 293 - DNA, 279 bp, Zea mays
  misc_feature: Incyte ID No: 700342495H1
  unsure 2, 76-79, 152, 162-163, 171, 176, 180, 183, 190, 201, 203, 207, 219-220,: a, t, c, g, or other
ancggtctgtgtggggagatgcccatgcagagcggccacagggcatgttgccatcctcagcccttcctggcaagcnnnngggggaggaagagaggagaggcggtctctgtacaaaacaaagtatttttattcatttgtatttattaaatganaaaaaaaaannaattctcnggtgncccnctnctaaggnggacttaaatncngttnaataaaattgtnncccngtcctcaaaaaanagngttanntantaaanaanaggnttttgnattggaaaaanc

SEQ ID NO: 294 - DNA, 304 bp, Zea mays
  misc_feature: Incyte ID No: 700342501H1
  unsure 173, 179-183, 193, 208, 212, 217, 236, 241, 247, 251, 258-261, 266, 273: a, t, c, g, or other
gccacaagtctgtgatgcgcaaggagttccgcaagatggccaaggctgtgaaaaaccaggttagtgacaactactacaggcctgatctgaccaagccagctcttgctaggctaagctcggtgtaccgcagcctccaggttgccaagtccggtgtcaagaagaggaccaggaantcttannnnntaagttgtgntcctcacaggggcanattngtgcncgcagacccccattttatntatcnaagttnccanaattttnnnnttttnaaaatgngcaaacctgttaagatgctgctgtgtgtcat

SEQ ID NO: 295 - DNA, 293 bp, Zea mays
  misc_feature: Incyte ID No: 700342504H1
  unsure 23: a, t, c, g, or other
aaaacagaagcataatacacgantgttttcagggagaacttgaagttgttaaggaggttcataggaagcatataatggaaaaaagagaggatggcggtgagctgaatggtgaggcaggttcagtggtgggaactgcagatggaattgttactgaaacatccaaggtcccattcctgatgctcggtcttgacctgccacctccacctcttttcaaagacgccatggagaaaaatatcattccacaggtaccattgtttaacatactgaagaagttcgatggtgagacagttaca

SEQ ID NO: 296 - DNA, 291 bp, Zea mays
  misc_feature: Incyte ID No: 700342505H1
ctaatcgcatctgcttccagagccccccgccgccgctgcgccctcctctcggtcctgccgtccgtcgaggtaaaaggacagcatggtgagggtcagcgtgctcaatgatgctctcaagtccatgtacaatgctgaaaagatagggaaacgtcaggtcatgatcaggccgtcatccaaggtgatcatcaagttcctgacggtcatgcagcgccatggctacattggcgagttcgagtacgtggatgaccacagagctgggaagatcgtggtggagctgaatggaagactgaa

SEQ ID NO: 297 - DNA, 289 bp, Zea mays
  misc_feature: Incyte ID No: 700342507H1
  unsure 63, 87, 90: a, t, c, g, or other
gcttgatcagcattttgatgaagacactgctttaaacaaatgtaagactactttgggcctttnggagaggataaataaagatattantgntgctatcatcaacggtaatcagccagcattgtcattgatctctgaccttcaagaacaggaaatgacccttaaacattgtatcaaacaactcgaaagtgtagatatggcgaggatatccctggtcaatcaattgaaagaagctctcaacgaacaggagtcgaaatcattagttcttcgcgatcaattgcaagttgctcaa

SEQ ID NO: 298 - DNA, 290 bp, Zea mays
  misc_feature: Incyte ID No: 700342510H1
atcttgaccagcgatggcaggaagccactggagagtctgtttctgaggtcatattcctcagcaaacacactgcagtctccaaacgtccagcactcacagtgcatccaattggtgtgccacatctgaaggaggatgaaaccccaccccaaggaggaactcctggatgggcagcaattccaagtcctcgaattggaccttggctccggttgatgcaaaagatagctgtagaacaaggccttgttccagagtttgaggttacgcttgaggctactcaccatggaccagttacc

SEQ ID NO: 299 - DNA, 290 bp, Zea mays
  misc_feature: Incyte ID No: 700342511H1
  unsure 190: a, t, c, g, or other
accggccctgtgttcctctgatgcttcaccgggtgtcagagttgagaccttggagtccctaataagagcagaagcctgtaggagaagtagctttagaacactagaggaggaacacatgcttggcccaattggtgtgaaactgaagccagccaatttgctaatgcagcttatcacttgtggatctatatcngttaaagaacaccgaggctttgggttcatcccaacgtacaggcctcggtttacacaagttgagttcccttcgtcagtgttctccactcctgtggcattgc

SEQ ID NO: 300 - DNA, 289 bp, Zea mays
  misc_feature: Incyte ID No: 700342512H1
ggttgcccccgcaggcccgatgtaccaggcaggaactctcagcgggaaccctctagccatgaccgctgggatccacacgctcaagcggctgacagagcccggcacctacgagtacttggacaagatcaccggcgaactcgtccgtgggatactggacgtcggtgcgaaagcagggcatgagatgtgcggaggacatatcagaggaatgtttggcttcttcttcaccggcgggcccgtccacaacttcggggacgccaagaagagcgacaccgagaagttcgggaggttc

SEQ ID NO: 301 - DNA, 289 bp, Zea mays
  misc_feature: Incyte ID No: 700342514H1
  unsure 63, 271, 274: a, t, c, g, or other
aaagcatcctgctgcaggcacagcagcaggtgcaaatgcagaaactcgtataccaagtcggangtgccctgccgacaaaagttgtctgcctgacacaggtagtgacagcagatgaactgagagatgatgaggaatacaatgacattgtggaggacatgagggaagaaggacgcaaatatgtcccacataatgccattgcagagtgttttatagtccgaccctatgcaatattggcaatcgggctttaacccacagaagacactattctttncanacctgattaatcatt

SEQ ID NO: 302 - DNA, 288 bp, Zea mays
  misc_feature: Incyte ID No: 700342515H1
  unsure 236, 238, 240, 244, 247, 251, 253-255, 261, 286: a, t, c, g, or other
ggcatgactccgcgtatggctttgtgaccagaataagatcgaggttattggctcttatttaaccaaatccatcgtccaactaacatgtaaactctctcctccctctatataaaaggggaacaaactgaatactatgggcatacattcagaggcacatgagtctcccaacacagatacacaatcctaacaaactaaagaggtcgctacgccacctctttggaggattcatccagaancntngggntcnatcncnnntagggnccaataacctataactcttgctagngg

SEQ ID NO: 303 - DNA, 287 bp, Zea mays
  misc_feature: Incyte ID No: 700342521H1
  unsure 174-199: a, t, c, g, or other
ctcaccacctctcccctcagcttctccccacctttggtcaggcaggctcaggcaaagggggcggccaacaaggacgagcgatggcgaccaaggtcatctgcttccttgtgctcgcatccctgctcctcgccgtcgcctttcccgtgtctgctctgcggcagcaggtgaagaagnnnnnnnnnnnnnnnnnnnnnnnnnncagtgttagcggaagcggaggcggcaacctgaatccctgggagtgctcgcccaagtgcgggtcgcggtgctccaagacgcagtacagg

SEQ ID NO: 304 - DNA, 284 bp, Zea mays
  misc_feature: Incyte ID No: 700342523H1
ctccaaaacgtgcagcggagaacatagattcacaatattggcgttatgatgtcaagcggcaaaggcatggggaagctggtgggggtggattgtgtttcaaatttgtatcctcaggatcctgtcaaagagggagtagatgcagttataggcatgatgaagaggcagtggagcattaccagagaaatgtctgttttgattttctaaacaaaggaaaatgtgagaggggcccagaatgcaagtttgttcacagtctttctggggagactgctctaagggatgcaaga

SEQ ID NO: 305 - DNA, 285 bp, Zea mays
  misc_feature: Incyte ID No: 700342525H1
  unsure 72, 180: a, t, c, g, or other
ccacggactcatctgtccgtgtgctgctgatccgtaactacacgtgcatgcagaggggagttcgctggagancgctacgccgccaccgcatgtctgctgtcaaagggcgtagaggactggggggttcacgctgcggcagctgcaagcgcgtgcatggtgggtggcggcggcgtggaggangagggctcggccgccatgcctctgtacagcttatatggtggtggtagtcacagtcacagtcacagccacctcgctgcagctggtgaccatgagatgccgccggcg

SEQ ID NO: 306 - DNA, 283 bp, Zea mays
  misc_feature: Incyte ID No: 700342526H1
atgagcctggttattatgaagatggggcctttggtataagattggagaatgtacttatttgcaaagacgccaatgctaagtttaattttggagataaaggttatttggcatttgaacatataacatgggctccataccagaccaagctgatagacaccgggcttctgacccctgttgagatcgactgggtgaacacgtaccactcagactgccggaagatcttggagcctcatctgaacgagcaggagaagcaatggctgatgaaagctactgagcccgtagc

SEQ ID NO: 307 - DNA, 286 bp, Zea mays
  misc_feature: Incyte ID No: 700342527H1
  unsure 159: a, t, c, g, or other
gttgcatggtaccccatatatagaattccaacagggccaacattgaaggatctcgatgcctgttttttgacattccattgcctagcaacaccttgcaaggattgtgaccctcctacgccagcatgccctggctttgggggaattaaccgcggcacgacngcagctgggaaactatctttgccaatctttgggctggcaccttacaaattacgtgcctccatttggacatctgacaaaacccaagaacgggaccgcgtcacctctctgatgcaggaggctgacagct

SEQ ID NO: 308 - DNA, 283 bp, Zea mays
  misc_feature: Incyte ID No: 700342528H1
  unsure 132: a, t, c, g, or other
ggaacgttaacgccagcactgggaagtgcgggatcgcgatgatggcgtcctacccgacgaagaagggcgcgaaccctcccaggccgtctccaaccccgccaacaccgccggctgcccctgacaatgtctgcnacgagaacttctcgtgctccgcgggcagcacctgctgctgcgcgtttggcttcaggaacgtctgcttggtctggggctgctgccctgtcgagggcgccacctgctgcaaggatcacgccagctgctgcccgccgggctaccctgtctgcaa

SEQ ID NO: 309 - DNA, 81 bp, Zea mays
  misc_feature: Incyte ID No: 700342530H1
ggaaagcagtgttgcaagatcgctgcaggagaatttagagattggtgccacatgggcaggagatgtcctggtgtttctgct

SEQ ID NO: 310 - DNA, 290 bp, Zea mays
  misc_feature: Incyte ID No: 700342532H1
  unsure 56: a, t, c, g, or other
gtccacatcgacgtgggcggccacatgtacaccagcagcctggccaccctcaccanataccccgaatcaagaatcggaagactcttcgatggcacagagcccattgtcctggacagtctcaaacagcactatttcattgacagagacgggcagatgttcagatatatcttgaattttctacgaacatcaaaactcctcattcccgatgatttcaaggactacactttgttgtatgaagaggcaaaatatttccaactccagcccatgttgttggagatggagcgatggaa

SEQ ID NO: 311 - DNA, 76 bp, Zea mays
  misc_feature: Incyte ID No: 700342535H1
  unsure 2, 8, 27, 41, 48, 60-61, 63: a, t, c, g, or other
ancaacgngaaaaatccccacatccanctcctattctcctncgctgcnagtcttcaccanngntcggcgctgacgc

SEQ ID NO: 312 - DNA, 269 bp, Zea mays
  misc_feature: Incyte ID No: 700342539H1
cttcgtctccttcctcgtctgggtgtggccgtctcacttcgccccttcctcactccttcggttctcctccagatctctaagaccaggagcccggtgaatccaccgcgcccgcagcgatgtcggcgagcagcacccccgtagacgcctcgggggagccgatcccgacttcgtcggtgctgatggcggcgtcgaagcacatcgcggtccggtgccgcccggagaacgttgccttcctcaactgcaagaagaaggaccctaaccccgagaag

SEQ ID NO: 313 - DNA, 276 bp, Zea mays
  misc_feature: Incyte ID No: 700342540H1
gcattgactatctcactgatcttgatatttcactgtgcaccccgttatggccagacaaacatcgtggtgtatgtgggaatttgctcagtgataggatctttgacggtaatgagcatcaaggcagtaggcattgctatcaagcttacaattgagggcataaaccaggctggctatttccagacttggctgtttgcaactgtttcagctacatgcataattattcagttaatttacctgaacaaggcattggatactttcaatactgcagtgtttctc

SEQ ID NO: 314 - DNA, 277 bp, Zea mays
  misc_feature: Incyte ID No: 700342541H1
gaaggcaaggatcagggatatattgtcttaaataggccttgggcttttgtccagtggatccagaaagcaaagatcgtagaagagtatatattaatggcagagccagatcatgtctttgtgaagcctttgccaaacttatctcatggtgatgagccagcggcatttccatttttctacatcaaaccgactgagaatgagaagatattgaggaagtttttcccagaagaaaaagggcctatttcaaatattgatcctattggcaactctccggttataa

SEQ ID NO: 315 - DNA, 280 bp, Zea mays
  misc_feature: Incyte ID No: 700342543H1
  unsure 7-8, 132: a, t, c, g, or other
cgcagannccgccggcgggtagcgctactgctagaggagaggaagcggaaagggcggcggcggcgctcgtggtcagttcaaagatccaacctccggactcgcgatggggcggcggatcctcaacgatgctcngcgcacgatggtcaacgcagaccggcgggggaacgcgtcggcgcttctccgacccatctccggcgtcatggtctccttcctcaacatcatgaagtaccgagggtatatcaaaaactttgaggtcattgatgagaatagagttgggaaa

SEQ ID NO: 316 - DNA, 276 bp, Zea mays
  misc_feature: Incyte ID No: 700342545H1
gattattaaggttcctattgatgtatttaaaggaatcacagatgaggatgcagctaaagttgttgatggtctagctctaaaggcagcggataggcagtcttctatagaacagattaagaagctgtatgaacttttctgcaagtgtgattgcacattgctggagataaatcctctggcggagacagctgacaacaagcttgttgctgctgatgcaaaattgaactttgatgataatgctgcatttagacagaaagaaatatttgcactgcgtgatac

SEQ ID NO: 317 - DNA, 277 bp, Zea mays
  misc_feature: Incyte ID No: 700342546H1
  unsure 73, 258, 261-262: a, t, c, g, or other
gctattgatgctactacaacagcaggtgttgaccttggtcagggtatgcgtgaagttgatatcaagaaatacnttaaagttgaaaaggttcctggtggtcagttggaggattctagagtccttaaaggagttatgatcaataaggatgtcgtggctcctgggaaaatgaggagaaagatagtaaacccccgtatcatcctgttggactgccctgttgagtataagaaaggagaaaatcagaccaacgctgagttgatntgnnaaagaagattggcag

SEQ ID NO: 318 - DNA, 300 bp, Zea mays
  misc_feature: Incyte ID No: 700342550H1
  unsure 46-48: a, t, c, g, or other
cccacttgtgcaacctattctgtgggaggctaacaagacgatggannnccttcttgcgggggtcagcagttacgttatttatttgtcattgctgacccccgcaagaaggggctccgcaatgacaaataaataacgtaactgcgcgcggatgatcgatcgatccacaatatcaatcaatctccggccttcaccagtactagttcccttcatgcataatgttgggaactggcgtctttagattttctgtgcagtaaattaaatgaaccacggtaacgtcaatgtaaacgaatcacgcatgtt

SEQ ID NO: 319 - DNA, 299 bp, Zea mays
  misc_feature: Incyte ID No: 700342551H1
  unsure 26, 31-32, 36, 48, 57, 147, 174, 266, 281: a, t, c, g, or other
gaaagggggtctgggttgcgtacagncgaanngcangcgccgccgctnccgcgcgancctctccgtccccatcgccgcgcagatggatccgtcgtcggagcccctgtacgcgcaggtcgagccgtacgactccgggttcctcaaggnctccgatgtccacaccatctactacgngcagtccgggaacccgcaggaccatgcggccgtgtttctccacggcggtcccggagccggcacgtcgcccggcaacaggaggttctttgacncgcagttctacaggntcgttctgtttgaccaga

SEQ ID NO: 320 - DNA, 299 bp, Zea mays
  misc_feature: Incyte ID No: 700342552H1
  unsure 90: a, t, c, g, or other
ctgctgcacccaagcttcggggagctccctcagtgggctgtcgtcggtgacaccttccccgtcggctgcgcatacgacgagtgcaacgtnccacttcaagtacttcaaggagaaccccgactaccacaacccgaagctcaacaccaagttgggggtctactcggagggctgcggcctcgacaaggtgctcatgtcatggggccacgacgactacatgtacctggtggccaaggagaacaagtgcacccttccttccgcggggctgttcatcatcagataccactcgttctacccactgc

SEQ ID NO: 321 - DNA, 296 bp, Zea mays
  misc_feature: Incyte ID No: 700342553H1
  unsure 15, 53-55, 64, 72-73, 79, 87-88, 92, 94-95, 98, 111, 114, 129, 133, 135,: a, t, c, g, or other
ctccttgttgccccnactggtgccttgagaattgaagacatgtaggtgactcnnnaacttcttngaaagagnncctgtntgaatggnnatgntnncantatgacttttaantgngatgtgaataatgcnttgngncanagtcactgtctttcgggatcctctttggaccacagatanccaagtcagtcagtatcanattatnggccagtggactttcctncttcntctccatcacgtcttcccttaagttaaagtgttagagaagaccttctncccatannaaggtnggtggatcg

SEQ ID NO: 322 - DNA, 297 bp, Zea mays
  misc_feature: Incyte ID No: 700342554H1
  unsure 112, 118, 149, 164, 172, 207, 251, 287: a, t, c, g, or other
aggaaactggagcgcccatcctgacagacgatgtcagcctgcaggtgttcatggatcatttgaagaagctggctgtgtccagtgcctcttaagctagtagcacagcctagangtggangaaaatgctgtcagattgtgctcacattgtngatagtgtcctagcntcattcanctttctgggagattctaataaataacccaaggctntttttatatgtatgtcttcaggttatagtatgtcttcaggttanaatttatttgtagtcctctctacctgttttcctatncatgaaatta

SEQ ID NO: 323 - DNA, 300 bp, Zea mays
  misc_feature: Incyte ID No: 700342555H1
  unsure 6, 13-14, 16, 18, 44, 52, 75, 86, 95, 103, 110, 116, 119, 135, 158,: a, t, c, g, or other
cacagnctcaganngnanccaccatggtgctgtctcctgccganaagaccangcgtcaaggccgcctggggtaangttcggcgcgnacgctggcnagtatagngcgtagncccggngangatgttcctgtccgtnccccaccaccaatacctacttcncgcacttcgacctganncanggctctgnccaggttaagggccacggcaagaangtgtgccganttcgctgaccaacgccgtggcncacgtggncgacatgncccaacgcgctntccgccctgagcgacctgcacgngcacaa

SEQ ID NO: 324 - DNA, 296 bp, Zea mays
  misc_feature: Incyte ID No: 700342556H1
ggaggatgggagaatgatgaaactgttgaagaggcagcagctcgagaagctatagaagaagctggagttcgaggtgatatagtgcattttctggggctctatgacttcaaaagcaagacgcatcaagatgcgtgctgccctgagggtatgtgcagagctgcagtgtttgcgctgcatgtaaaggaagagctggcctcatggcctgagcagagcacccgacagaggacctggctcacggtccctgaagctgcatcaagttgccgataccagtggatgcaagaggcctgctgactggc

SEQ ID NO: 325 - DNA, 296 bp, Zea mays
  misc_feature: Incyte ID No: 700342557H1
  unsure 239: a, t, c, g, or other
gataatccgccggcgttgagatgttggtttatcaggatctcctatctggcgacgagctcctgtcggattcattcacctacaaggagctcgagaacggcgtcctgtgggaggtcgagggaaagtgggtcacccaaggtcctgttgatgtggacattggtgccaatccatccgccgagggtggtgaggacgaaagcgttgatgacacagctgtgaaggtggttgatattgttgacacattncgtctacaggagcaacctccttttgacaagaaatcatttgtgtcttacatcaaaaaa

SEQ ID NO: 326 - DNA, 298 bp, Zea mays
  misc_feature: Incyte ID No: 700342560H1
  unsure 78, 143, 265, 285: a, t, c, g, or other
catgccacaggaggcattgaatgatgcagtgcatgctctggtaatatctccgacatggtcaacagcattctatcttcnggcagcagcacttttatcacaaggcatggagaatgaagcccaagaagcactcagggatggttatngcctagagcaaagtagcagcggtggacattgagtgtgaacagatttgtagtcccccaaatgcacataatttcaggtatacatactttttagaaatcctaatatcttgctcccttcgttccanattataagttgttttttgcntttctagatacat

SEQ ID NO: 327 - DNA, 71 bp, Zea mays
  misc_feature: Incyte ID No: 700342561H1
  unsure 15, 18, 50, 52, 54, 57, 62, 66: a, t, c, g, or other
tcgatcatagcaggnagnctgggtctggtccaatagatagcttacatatntncnctnggagngtgnattct

SEQ ID NO: 328 - DNA, 300 bp, Zea mays
  misc_feature: Incyte ID No: 700342563H1
gatctggatcagaccaattcctctcaacccaagaaggccaagttcagttcacagccgaaaccagaggggacaagggcaactccagagtgtaacacgacgagttcaggtgtttccctcttcgacgtcctgcgcaggacttcagagcagagcagtcaggaaagctgtagcacaatcacagaaagtcaagctgtgcaccagttctcggcattcaagttatcaaggaggttttccaaggtgggttcaaaaaatcgacaatctctagatggctgttagtatcgagagggtgggttactgttggag

SEQ ID NO: 329 - DNA, 300 bp, Zea mays
  misc_feature: Incyte ID No: 700342564H1
  unsure 8-9, 36, 45, 149, 151-152, 264: a, t, c, g, or other
cagagcgnncaccatggcggtcgggaagaacaagcncctgacganaggtggcaagaagggagccaagaagaaagtggttgatccattttctaagaaagactggtatgatgtgaaagctccagcaatgttcaatattaggaacatcgggnanncactagttacaaggactcaaggaaccaaaattgcatcagatggcctcaagggtcgtgtgttcgaagtgagtctgcagatctacagaacgatgaagttgctttagaaagttcnagctaattactgaggatgttcagggcaaaactgtct

SEQ ID NO: 330 - DNA, 296 bp, Zea mays
  misc_feature: Incyte ID No: 700342565H1
  unsure 12, 23, 118-119, 134, 140, 281, 286: a, t, c, g, or other
ccggtaactacnatcagtatgtncaaactcgctccgatcttgaacagaatcaaatgaagcagtacaaatgggagcaggaacagattgcttcaatgaaggagtacattgctcgcttcgnncatggttctgcaaancttgcncgtcaggctcagagcaaagagaaaactcttgcaaagatggagcgaggtggtctcaccgagaaggttgttagggacagagttctagtgttcaggtttacagatgtaggcaaacttcctccacctgtgctgcagtttgttggnagtcnagtttgggta

SEQ ID NO: 331 - DNA, 293 bp, Zea mays
  misc_feature: Incyte ID No: 700342566H1
aaaatacaatcaataatagagaggggaggtagcaacaccggctgcttaatctcttccttttcttcttcctatctccagcgcatcccaagaggcggaaagggaggagcgtggagcggcgaattattgtttgtttccccaagatgtcttctccaagcaagcgccgggagatggacctcatgaagctgatgatgagcgactacaaggtggagatggtgaacgatgggatgcaggagttctttgttgaatttcgtgggcctaacgaaagcatttatcaaggaggtgtatggaaggtt

SEQ ID NO: 332 - DNA, 291 bp, Zea mays
  misc_feature: Incyte ID No: 700342567H1
  unsure 58: a, t, c, g, or other
cgactctcactcacaaaattcacagctccaatcctggtgcaagcgcacagtagcgganaagatgcggggaggagaccggccatctgcgtcgctccagctcctctcgctggggctcgtgctcctctacttcttcacctcaggcagcaccgttggtctcgtggagggacagaagacgtggtgcatcgccaagccgtcggcgtcgaacgagatcctggcgcagaacctggactacgcgtgctcccaggtgagctgcgccgtgatccagaagggcgggccgtgctactacccgga

SEQ ID NO: 333 - DNA, 288 bp, Zea mays
  misc_feature: Incyte ID No: 700342569H1
  unsure 52: a, t, c, g, or other
aggatctgcgagctttgcttcgtcttctgacaaatatatgttcgaaggattnggttggctttctgtcctgattgtggcggtgaaggttcacctgatatcgcagaggttatctacattggtcttgatattgtgacccccttgatatctttggatcttctgaaataccctaaacttagtcgtgattattttgtgcttatatcgcacttgttggaactgtacccggaaaaggttgctcacttaaatagtgatgcttttacaaggattattggaagtcttgacttcgggctc

SEQ ID NO: 334 - DNA, 289 bp, Zea mays
  misc_feature: Incyte ID No: 700342570H1
cgaagatggcggaggggcaggttctagtattggatggccggggccatcttctgggccgcctggcggccattgtggccaagcaggtactgctgggccgaaaggtggtggttgtacgctgtgagggcatcaacatttctggaaatttctacagaaacaagttaaagtatctggcctttctccgaaagcggatgaacaccaacccgtctcgaggcccctaccacttccgagccccaagccgcattttttggcgcactgtgcgaggcatgctgccgcacaagaccaaaagagg

SEQ ID NO: 335 - DNA, 279 bp, Zea mays
  misc_feature: Incyte ID No: 700342571H1
  unsure 53: a, t, c, g, or other
gatctgacatgccacatatctgggacttctacgttgcccctatggcttttaanttgtgcctgtgggatgaacatgtcccaacatttgctccatttttttactgtcggctgttggccataattgtttagctgatcattaagaatgggaaatggttaaaagtagaattttcttgctatgttatatgttctgcttgcctctgcttgagcacatcttatttgaaataccatgtttttgggactaatacgctgccccgatggcaataacagtgcctgcggaatg

SEQ ID NO: 336 - DNA, 288 bp, Zea mays
  misc_feature: Incyte ID No: 700342572H1
  unsure 8, 21, 146-169, 237, 254-255: a, t, c, g, or other
cgaccgangccaacgacaganaagagagtccatctgctcgttgccttgattttgtggaacgaagcgatggctcgcagcggcgccatggtttcctgcatgctgctcctggtggtggcggcgcaactgctcatggtggtgatggccannnnnnnnnnnnnnnnnnnnnnnngcgaccaacgcggagagcacgccggctgctgtggcaggtgacctgccactacagcgcctgtaactgcngcacttgcccgacatanngctgggcgtgctgcagcacttgctgctagctag

SEQ ID NO: 337 - DNA, 147 bp, Zea mays
  misc_feature: Incyte ID No: 700342575H1
cttctcttagcttagttgtgattgtgagacttgtgtgataaacttgtcttgaacttatgtttgttaaaaacttatgtttgagagttggtaatacttatgttggtaaaacttggtatgaacatagacatgtttatgaaaaacttgtga

SEQ ID NO: 338 - DNA, 292 bp, Zea mays
  misc_feature: Incyte ID No: 700342577H1
  unsure 50: a, t, c, g, or other
ctcgattccgctgctctctccctcttcctctcccccgcggcggagcatanaaccctaggcctcgccgtcgtcggaggcgccgccgcgatgtcgcactttggaaggacgggtccgccggacatccgcgacaccttctcgctgctcgtcctcaacatcagcttccgaaccacggccgacgaccttttcccgctcttcgagcgctgcggcaaggtcgtcgacgtcttcatcccgagggaccgcaggaccggggactcgaggggttttgcgttcgtgcggtacaagtacgccgacg

SEQ ID NO: 339 - DNA, 294 bp, Zea mays
  misc_feature: Incyte ID No: 700342579H1
gcgtccgccattggcgcaaacacacccacacccacacacacattcagctactgatacccgggagcttccggccggtcgaggagctagagcagccgaggtgggcgtacgtggtgcagcgcaggcagcaggcctcagcagcattcagcaaggccggggtcgaaaggaaggaggagcgaggaccggaaccggaggcatgaacgcgggcaccagcatctcgccgcggccgggcacggactggggccccatcatcgtggcggtgatcctcttcgtggtgctctcgccgggcctgctgtt

SEQ ID NO: 340 - DNA, 288 bp, Zea mays
  misc_feature: Incyte ID No: 700342581H1
acaagcttgagaaagttagtcaccagagtactgtgtctcactgttctggcaccttgccgccactatcagcaagagacggttctagtgcccaggcttgtggtacaaatgttcagagtcacctgcttccatcatcatttgcaatccatgatggattgtcaaccatcaggagtggtggtgttggcagtggaactgatgcgataaccatagcttcgttgagatatagtgatgcgaatttgctacctgaaaactccatagcaacttccagttgtttgggtgaatcaggaacct

SEQ ID NO: 341 - DNA, 285 bp, Zea mays
  misc_feature: Incyte ID No: 700342582H1
  unsure 111, 185: a, t, c, g, or other
acagtatgtctgctgctcggctctccgcggtggcacagtccaccgtgtatgccttctccgcgcgcccgctggcgggcggagagcccgtgagcctgggtcccctgcggggcncggtgctgctcattgagaatgtcgcgtccctctgaggcaccacgacccgggactacaccgaaatgaatgatctncagaagcgtctggggcctcgtggcctggtggtgctcggtttcccgtgcaatcagttcggacatcaggagaatggcaagaatgaagagattctgaattccc

SEQ ID NO: 342 - DNA, 284 bp, Zea mays
  misc_feature: Incyte ID No: 700342584H1
  unsure 11, 21, 23-24, 28, 32, 39-40, 55, 78-79, 81, 85, 101: a, t, c, g, or other
gccatcaggtnagccaagatngnngcanacanatacatnnaggagctgtggaagnagaagcagtccgacgtgatgcgnncnccgnctaagggtccgctgcnggcagtaccgccagctctctgcgctgcacagggctccccgccccacccggcctgataaggcgcgaaggctgggatacaaggctaagcaaggttatgtcatttacaggatccgtgtccgccgcggtggtcgcaagcgcccagttcctaagggtgcaacctacggcaagcctgtccaccacggtg

SEQ ID NO: 343 - DNA, 280 bp, Zea mays
  misc_feature: Incyte ID No: 700342587H1
  unsure 49, 105, 150, 157, 162, 164, 167, 198, 200, 224, 242, 275: a, t, c, g, or other
ctgtgcatcatagtgcttgcgtttaatatgatttattgtagaatctcancttttcttggtgtttgttgtctttgaaacattgtcttggtcattagggctggtgtnttcacatttctgtggtcaaggtggatttcttatgtgtgccttttngcttacnttgtntntgnattttgtaatttaaattgcaagtaagttatntntatgtatttaccataaatagtatnaaaagatgagaaactgtnagactgaagttctgttgtaacataaccattatntccat

SEQ ID NO: 344 - DNA, 283 bp, Zea mays
  misc_feature: Incyte ID No: 700342589H1
  unsure 56: a, t, c, g, or other
aggtgtcagtgctagaggatttggaaaggcgctgtttgataagaagacaaacccgngtcctggcaagtggatacctgtagcccgaaacaggtcacccattcacattcgtcatgtgcaattctctcatgccgtgcagcccattaattccactgaagaaaacatagaatgtgcatcataatgtcacagaaggcctaaaatgttatagtgtgcggccatgctcacgaggaggcagagtgccgtgttgccgagtgccactggaccacatacgattgttgatggtaaa

SEQ ID NO: 345 - DNA, 199 bp, Zea mays
  misc_feature: Incyte ID No: 700342591H1
  unsure 158: a, t, c, g, or other
aaaacaaagctagaacacgctcttaagcaacacctcacaaggtacacagggaatatttggttttaatgactggcaaactcaaatggctaccctttcaaaagcagaagcccaagagatggatcaaaatccagaacaggggctggggatttagctcagtngtagagcgcttacctaggaagcgcaaggccctgggttcagt

SEQ ID NO: 346 - DNA, 286 bp, Zea mays
  misc_feature: Incyte ID No: 700342595H1
ttgtaatcggtgtccctgtaaaacaatccccacagattactttcagaaatagatgtatttctctacgtaagggccaggtttattttctccttttttgagatttctagaaaaaatgctgcttgcacatgttggttcttgaaaccttagctagaagaatttcaggtcataccaacatgtggataggctatagctgttcagaggtctcctgggggagcttaaaacgggggaaacactggttttcacagatgctccacatggctgtcttaaaagactcaaaacttttttt

SEQ ID NO: 347 - DNA, 289 bp, Zea mays
  misc_feature: Incyte ID No: 700342596H1
ggcacctcggtgcataatgcatcgtgaaggtggtacatttgaggagctgccagcatatgatcttgtcatgcaatctaatgctgcagtggtactggaccatggaacagatattttcatttggttgggtgctgagctagcagcccaagaaggacaaagtgcagcagctttagcagcatgccgtactctggcagaagagctcagcgagaaacgttttccagctcccaggatactttcattcaaacaaggaagctctcaggctagatattttgtctcacgcctgatcccagct

SEQ ID NO: 348 - DNA, 209 bp, Zea mays
  misc_feature: Incyte ID No: 700342601H1
  unsure 60, 155, 174-175, 181-183, 188, 191, 193, 195, 197, 203-204, 206-207: a, t, c, g, or other
cagagttgtcttgtgtctctctgacagtgctgtgtagtagtttggttggatgcgcgagangagggaagttatcagcagcagcaggcggttggtcgatgaatagctgtaaaaggcactgtcaaaagtgttgggggttataaaaaaagcggcgcttnaactttaaaaaaaattggnngttgtnnnggaanaangngngnaacccnncnngg

SEQ ID NO: 349 - DNA, 211 bp, Zea mays
  misc_feature: Incyte ID No: 700342602H1
  unsure 181, 186, 194, 196, 209: a, t, c, g, or other
gaaatggacatcgtcttggatgctgtgaacaaaataaggtctctgaagccaccaacagattcaaatgaaagacgtcctgcttttgcactttgccgaggccaagagatcgctgccacaatccagtgctatcaatctctaatcgtgtatctttcttccatatcacatctcaagatcctgaccngagantgatgaancnccaggggattgtncc

SEQ ID NO: 350 - DNA, 289 bp, Zea mays
  misc_feature: Incyte ID No: 700342604H1
  unsure 164, 186, 198, 284: a, t, c, g, or other
gtcgcgacagagagagaggcggagttgcggagaagatgcagagcagcagcatgaagagggagatcagcgaggcccacgacaccattcgcttcggcatcaacgccggcgtcaaagccgacctcgccccgccgcacccgctccagtctaccatccaatcggagacnaagttctgggcggacaagaagnagttcgggacanatgccatatacggatccgccctcaacatccgcaaggatctcgatgcccaaatcctctccaggttccaaaggccccctggtgctttnccgtc

SEQ ID NO: 351 - DNA, 285 bp, Zea mays
  misc_feature: Incyte ID No: 700342605H1
caaatggtggaatatctggaagtgatccggttaacagtgttgaaaatgttcctacttctgggaaggacttgacattggaagcgttattcggggctgcatttatgaatgagctccactcgaaagatgcaccagtttctattcgaggagccacaactggtggtcctactgagtttgcagagatgggtaaaactctgttgtcatctagccatgaaggatactaccctgttgaacagaccgtacacttcaacaatactaaagatgctgctgtcgttagagacccagttt

SEQ ID NO: 352 - DNA, 204 bp, Zea mays
  misc_feature: Incyte ID No: 700342606H1
  unsure 181, 196: a, t, c, g, or other
gagagccccacatgaattcaagattgcttgcctggaggacattaaggcactctttccttctgattacaatccattttatgctgggtttggtaacagagatactgatgagctcagttacaagaagatgggaatacctaaaggcaagatttttatcatcaacccaaagggtgaagtggctgtnaacagttctgttgangtgaagcc

SEQ ID NO: 353 - DNA, 218 bp, Zea mays
  misc_feature: Incyte ID No: 700342607H1
  unsure 175-176, 181, 187, 189, 191-192, 194, 201, 204, 209: a, t, c, g, or other
aggctcccgccgccgccgtagccatggcgtccaccaaggtgcagcgtatcatgacccagcccatcaacctcatcttccgtttcctccagagcaaagcgcgcatccagatctggctcttcgagcagaaggacctccggattgagggtcgcatcatcggattcgatgagtacatgannttgtnctcganangnngnggaatcnagntaaanaaaaactgg

SEQ ID NO: 354 - DNA, 285 bp, Zea mays
  misc_feature: Incyte ID No: 700342609H1
  unsure 281: a, t, c, g, or other
aaatggtcgagacagatctcatcaagcagcattggataatatggagcgggacaaaccattgtgtgatttctcaaacttcagagcaaatgtctgtgagatgagaggtaacatcagaatacacccaaatggcagttcggtcatatacatggaacctacgagttcaggttcaaagagaaacgaacaatggaagattaagccttaccctcgcaaaggtgatgaattatgcctcaatcatattacagaggtgacagtgaaatccagcatagtggcacccgagtgtnccaa

SEQ ID NO: 355 - DNA, 278 bp, Zea mays
  misc_feature: Incyte ID No: 700342611H1
  unsure 195, 216, 225, 229, 231, 240, 246, 254-255, 262: a, t, c, g, or other
tatttcataagcaagaccaatttgggagacttttacctacatttattcaaataattgatttggcggaagaggaagaggaagagtattggatggttgtatctgccatattcgagggaaaggaaacttgcagtctaccatctgaatcgagttatgctgataaatcatcatctgaacctccaagttctactccattangcgaccccatcaacataaggngcttggttnagancntgttccatngggggnccaatttnnggggggnctttttgggaaaaaaa

SEQ ID NO: 356 - DNA, 282 bp, Zea mays
  misc_feature: Incyte ID No: 700342612H1
  unsure 50, 213, 219, 224, 228, 245, 259-260: a, t, c, g, or other
caagtgtatcgctgtggctgcggcgcccggcagtccgccacaagcacacncgcacacaggggccaagcgcctacacctacagaggagagacaaggtctgccgtccgcgcgtgcgcgaaagaggggacggaggaagaaggctgccagcaatcagagatggaggtggggttcttgggtctgggcatcatgggcaaggcaatggcgaccaacctcntccgcnagggnttcngcgtcaccgtctggaanaggaccctcgccanntgccaagagctcgccgcttggg

SEQ ID NO: 357 - DNA, 178 bp, Zea mays
  misc_feature: Incyte ID No: 700342613H1
  unsure 108, 120, 128, 163, 167, 169: a, t, c, g, or other
ggcagccagctcaggggcttctgctgagggggcaggcggacttggaggaaaccgcagataagtttttttctctttgaaagatagagattaatacaactacttaaaaantatagtcaatangttactangatattgcttagcgttaagtttttaacgtaatttnaatngnttaagattt

SEQ ID NO: 358 - DNA, 283 bp, Zea mays
  misc_feature: Incyte ID No: 700342614H1
  unsure 209, 218, 256, 275, 281-282: a, t, c, g, or other
gcagaagtgcagcagaacgatcggatctagcagaattctctcaacctcatcggcggcggcgaagagcgtgcggatcggagatggagacaagcgggtggaggaggagagcggcggcgcgggcctcctggagccccgccacggtgtacctgtggctcgcgctcgccgcagcagcactgacgctcgcccaggctaagaaggacctaacggangttacccanaaggtctacttcgatgtcgagattgacggcaagcccgnagtcgaatttcaatggggnttttanna

SEQ ID NO: 359 - DNA, 286 bp, Zea mays
  misc_feature: Incyte ID No: 700342615H1
  unsure 14, 202, 223, 229, 235, 241-242, 244, 253, 269: a, t, c, g, or other
gcccggcgcctctnccctcctccgggctccacagagtgaaaaagtctcctcttttcctcttcctctcccgttgccaggcatggggttggcctagttgtgcccgttgagcactagcagcctccttgaaacctccagatctgtgcctccaaggcccccgttcctcggcaacaagccgtccagatggacaccgccgcgcccctgnaactgaaagcttgcggccggngacgcngggganaagtgnngntcgctgttngaagcggggggtctangggggggtacaaaaact

SEQ ID NO: 360 - DNA, 289 bp, Zea mays
  misc_feature: Incyte ID No: 700342616H1
  unsure 209, 260, 265, 285: a, t, c, g, or other
acaccaatcaccgtcgctctcgaagccaaccggctccgtcggggcgtactctcagaccttcgtcgccgccgctggggggtaccaggcggcgctgtacctcgaggcgctctcgcgcttcgtgttgtccatgcacgaccccgaggtgctccgccgcttcgaccagtgtcgcgcctcgcctcgtagctagttacccttcttgttctcaaggnatctttgggaagcatgagatgggctagcaagtggctgaggcagtgcgaaanagaanaaaacccagacgagggtggntttg

SEQ ID NO: 361 - DNA, 100 bp, Zea mays
  misc_feature: Incyte ID No: 700342617H1
  unsure 47, 50, 60-63: a, t, c, g, or other
tggccaagtccatccaccatgctcgtgtcctgatcaggcagcgccanatncagggtgggnnnncagctacgccaacatcccctacgttcatggttcaggg

SEQ ID NO: 362 - DNA, 178 bp, Zea mays
  misc_feature: Incyte ID No: 700342618H1
ggaacttcgatatcgaggatctcaaggctcaagcatcattgattcatgatgacgagccaccagaaataaaagaagatgatgacattccaagaaacattgaggatttatcttcacggaaccatttggcaaagtcatctgcaaatgaatgcaactccagccagcgatcttttgccaccat

SEQ ID NO: 363 - DNA, 158 bp, Zea mays
  misc_feature: Incyte ID No: 700342620H1
  unsure 41-42, 50, 123, 156: a, t, c, g, or other
tccagtcccagctgctcaggtctccatcggcctcgagcccnntgccggcnacgagcactcacaacaccagggtgtaacaatgtcttcttcaatggaatcgtcataccttcctgctacaactgngtcattagcccaagctcaagagggtaaggatgntt

SEQ ID NO: 364 - DNA, 281 bp, Zea mays
  misc_feature: Incyte ID No: 700342621H1
  unsure 93, 210, 227, 260, 270: a, t, c, g, or other
ggcaaccgagagcccgagaccgcccaggcgcccaccactccaccagccaaccctagagcctctccagtctccactgctcggccgccgcctgcngcagcccgccgtccactggtcccgcctccctgcgtccgctccactactcctggcgtccgctccattgctaccatcgtccggtgttctgctcctgcgccctccctttgattcgttgcnagttgtagtgtccggtnagatttgagctatggcagcaagcaaggtttgangaagcgtgcnttcccatcgca

SEQ ID NO: 365 - DNA, 173 bp, Zea mays
  misc_feature: Incyte ID No: 700342623H1
  unsure 84: a, t, c, g, or other
attcctctccactgcgctgccatcgtctcgcgccggccccccgtggggaactagaactgactccctcgatcccagcggcagcgncggaaggaacggtgaccgcgacctcccctgaggctgcatatactcggatcgggtttcacatctccggttttggattggttggttgcccg

SEQ ID NO: 366 - DNA, 277 bp, Zea mays
  misc_feature: Incyte ID No: 700342625H1
atcagaacaatcttaggacaccttctgacacaatgctggtagcactgtgagtgagaaggcaattctttgctgatggtactgcaattactccatgattctgccctttattttcgtttttgtctctccggtcttaagcattgattgctcgagatagttatctttacaaccttgcattgccatctgatctgtacataagccaatgatgattagctattacatctggaattaccgtcagatttactcatgacgaaaatcgtctggctctctgaggcatatg

SEQ ID NO: 367 - DNA, 128 bp, Zea mays
  misc_feature: Incyte ID No: 700342626H1
  unsure 71, 75-76, 81, 85, 88, 92, 100, 104-105, 109, 111, 113-114, 122: a, t, c, g, or other
cgcctcgggtcaaaccctaagcagggagttgatttatccgtgcagcccatgagtaagttgcagtctgagtntgtnnaaggntgcnatntccnaaattgtngggnntgcnangnngaggattnggaatt

SEQ ID NO: 368 - DNA, 170 bp, Zea mays
  misc_feature: Incyte ID No: 700342627H1
  unsure 10: a, t, c, g, or other
aacttttttnaactggtactcagttaaccagattcgatgaatgtgaggcagagctacagcttcaactactcttctagtgtttcaggagttcgtctcttttcatatgattggttgcccgcggcatctcatctcctatatgtttggttgcttgtgtttggcgggtgattaaa

SEQ ID NO: 369 - DNA, 271 bp, Zea mays
  misc_feature: Incyte ID No: 700342629H1
  unsure 173, 205, 217, 237, 247, 257: a, t, c, g, or other
agcttgtgcagatagagcacgcgctcacggctgtcggatccgggcagacctccctagggatcaaagctgccaacggtgtagtgattgccaccgagaagaaactgccttctattttagtggatgaaacatctgtgcaaaagattcaggcactaacaccaaatattggagttgtntatagtgggatgggtccagattttcgtgttcnggtgagaaaaantcgaaagcggcacaacagtntatcggttgnacaggagccntttccctgtaacac

SEQ ID NO: 370 - DNA, 278 bp, Zea mays
  misc_feature: Incyte ID No: 700342630H1
  unsure 23, 55, 229, 256, 273: a, t, c, g, or other
gcggaaccgaacggaagcgaganccccggcggctagcgagatggacggcggcgcngcgaggaggggaagcaggagcggcacctggtgctggcccacaagctcttccttctatcccacccctccgttgatgacctctccaaggtcgccctccgcgccgaagtcctcgacaccgtgaaatccgatgatatggcgacgctgtttgagtcgctggtcgccgggggtgtgctgnagggggaacgccgcgctgctggccganatgcgtgggaagatttnacgag

SEQ ID NO: 371 - DNA, 284 bp, Zea mays
  misc_feature: Incyte ID No: 700342632H1
  unsure 25, 171, 183, 205, 213-214, 224, 236, 242, 254, 263-264, 269, 273,: a, t, c, g, or other
atggatcggggcacagagattccgngtgatcggggcacagagattccgtcgtaaaaaaatcggtatggcgttggtattcgttctctcgccactagccgctagtgaaagaaggggatatatattcgtgtcctccgaattagtccttcctgcagtgtcctcgccgacatgganagccgtgttgcnagaaggggaattccgctgcganatccgtgnnacggttcagngatggcacaganggtgtncaccccctcttnggaagcgannaaccntttnggnnagagagg

SEQ ID NO: 372 - DNA, 188 bp, Zea mays
  misc_feature: Incyte ID No: 700342633H1
  unsure 156: a, t, c, g, or other
ctttcctgtgcagcaaagccaggcaccacgatcgcaacaagtggcacgaacaacaaccccgcctctacagcgggcgccaccgcacctgcaacctcccagtgtaccaccgactgttccaagcacacctcaggctggaccttcgcatggtcttccacnggagctccctgtggatgatagctggcgccccg

SEQ ID NO: 373 - DNA, 273 bp, Zea mays
  misc_feature: Incyte ID No: 700342635H1
  unsure 217, 223-224, 227-228, 240, 252, 260: a, t, c, g, or other
gagttattgtacatgtcaccaacttctattggttggcgattgcttattgaagtaactagatatgtgctcgtgcattgcgacggaagtaaaaaaaattgtatgaaactggtagaactacggattctaccgggcagattgtagggtggggatttggtgcgaccagggcggcaacgctgaggcgccgtcgtgatcctagctgggtcgcgcgtagggaggngatcannggnnactctggctccntctaagaaagcnagattagntgaattctcttac

SEQ ID NO: 374 - DNA, 276 bp, Zea mays
  misc_feature: Incyte ID No: 700342636H1
  unsure 62, 198, 201, 218, 220, 223-224, 240, 242, 247, 258-259, 261, 267, 272: a, t, c, g, or other
gggcggcctcatgggcgccggccacgactactacgagcgcggcaacctggacatcttcagcngccggggcccctgcatgagccaggcgccctgcgccatgaacctcacctccgacggcaccggcgcgcaccacggctggtactgcaactacctcgaggccacggtcacggggccccacctcgggtgcgcgcagagctnttnaccgtcgagcatggctngnaanngacgcttcgccctacngnttgtnacgcggtcgtnnanaagtgnaagangaag

SEQ ID NO: 375 - DNA, 275 bp, Zea mays
  misc_feature: Incyte ID No: 700342637H1
  unsure 200, 225, 231, 233, 237, 239, 243, 247-248, 256, 259-260, 268, 271-273: a, t, c, g, or other
gataaactatgtcgaaggtgacatgttcagtttcattccacctgctcaaactgtcgtgctaaagcttgtgctgcaccacctgaccgatgaggagtgcgtcaagctcctggctcaatgccggaaggcgattcctccacggaaggacggcgggaaagttataatcggtgatattatgattgaccactctgggcttatgctgnaaactcacctcctgatggacagggnatggtnancatnanaaanaggnnggcagagngannaaaattantgnnncc

SEQ ID NO: 376 - DNA, 273 bp, Zea mays
  misc_feature: Incyte ID No: 700342639H1
  unsure 206, 208: a, t, c, g, or other
ccgtcttcctcctccagcgacggcagtgccggggaacaagagcacatcgcttctgacgtcactcagctcataggatggacgccgctggtcgaattgaagcgaatcgccagcgaggctgggatcgatgcgcggatcgtcggcaagatggaggcttaccagccactttgctccatcaaggaccgctctgctttgagaatgatagaggntnctgaggagaggggattgatttcgcctggaatcacaacactggtggagccgacgagtggtaacatg

SEQ ID NO: 377 - DNA, 267 bp, Zea mays
  misc_feature: Incyte ID No: 700342644H1
gatttggaagggaagctatattttattgattttgagtatgggtcatacagctaccgtggttatgacattgcaaatcatttcaatgagtatgcaggatttgattgtgactataatttgtacccagataaagatgcccagtatcacttcttcaggaattatctacaccctgatagacctagtgaggtggatgcacaagatatggaagtactttatgtggaaacaaacactttcagactagcatcgcacatttactgggcattatgggcc

SEQ ID NO: 378 - DNA, 270 bp, Zea mays
  misc_feature: Incyte ID No: 700342646H1
  unsure 173, 185, 197, 236, 241, 249, 255, 267: a, t, c, g, or other
cagaagcttatagcattttcaggagccccactattgattccgtagatgaatctgtacagctcgatgacacattaagcgcaaagccagcatgttctggcactggatctggttttgagatattgtgccaaggatttaactgggaatctcataaatcagggaaatggtatgttganccttggcacaanggccaaggagtngtcgtccttgggtttcaccattgtcgggtcaccaccacnagtgnttcgtgtnccctgngggatactgccnggg

SEQ ID NO: 379 - DNA, 264 bp, Zea mays
  misc_feature: Incyte ID No: 700342647H1
  unsure 51-52, 247, 260: a, t, c, g, or other
cttgtgaccctccctcagccgcgtcgcgtcgcatcctacgatccaaagctnnctctgctcgcagccatggcgaagaactacccgaccgtgagcgccgagtacagcgaggctgtggagaaggccaggcgcaagctccgagccctcatcgccgagaagagctgcgccccgctcatgctccgcctcgcgtggcactccgcggggacgttcgacgtgtctcgaggaccggcgtccattcggcacgtgaagntcattgaatttgncccg

SEQ ID NO: 380 - DNA, 278 bp, Zea mays
  misc_feature: Incyte ID No: 700342648H1
  unsure 44, 234, 244, 258, 261: a, t, c, g, or other
cttggtttggctagggaagagacactaacggagatgatgactgntgagacaggaacataccgttggatggctccagagttgtacagcacagtaacactgaggcatggagaaaagaagcattacaaccacaaagtagatgtctacagctttgcaattgtgttgtgggaactcctccacaataaactgcccttcgagggaatgtctaaccttcaagctgcctacgctgccgctttnaagaatttcngacccaagggcganaanttgccggaggggtttaa

SEQ ID NO: 381 - DNA, 228 bp, Zea mays
  misc_feature: Incyte ID No: 700342651H1
  unsure 2, 16, 18, 184, 190, 197: a, t, c, g, or other
ancgccagccagactngntcgatcacagtcacctccctcatgtactcctttgtcgtcatcaccagctcgtgatagatgacccaggagtacatgagggaggtgactgtgatcgatccaaaatggcttgttgagctggcgccaaggttttacaagggtgctgaccccaccaagatgagcaaaaggnaaaggnaggagangatcgagcctctatatgatagataccacgag

SEQ ID NO: 382 - DNA, 235 bp, Zea mays
  misc_feature: Incyte ID No: 700342653H1
agatccccaggccttcgttgaacccttcgccgtaacgagatcagatggctgggtatatgtcaagagggccccaaaatggttctgtgtatgtctgcaatctacctcctggaactgatgaaaatatgttggctgaatattttggcaccataggcttgctaaagaaggacaaaaggactgggcgtccaaaaatttggatatacagggacaaagttactaatgaaccaaagggtgatgc

SEQ ID NO: 383 - DNA, 285 bp, Zea mays
  misc_feature: Incyte ID No: 700342655H1
  unsure 56: a, t, c, g, or other
gtcattgattcttgaaaaggcattcaacgttctgcgaagaaatggtgttaatgtcnagatgatctcacaaggggcgtccaaggtgaacatatccttggtagtcaatgacagtgaggcaaaacagtgcgtacaagccctccattcagcgttctttgagaatggattcttgtcggaggtagagggagctgacgttccccagaacggagcctctctgaactcaaatggcgctgtctatggaaactagtcgactctgcaactgctttcttcacaatttgtgtaccattg

SEQ ID NO: 384 - DNA, 287 bp, Zea mays
  misc_feature: Incyte ID No: 700342656H1
  unsure 14, 30-31, 179, 187, 210, 216, 220, 234: a, t, c, g, or other
ccgctccgccccancgcatcgcccgccgcnncagcgtaccgcgaacctcatctattcaccttcagctttcaatcatggcggacgtcgatatcgaaccggaggttgccgccggagctcccaagaagaggacgttccgcaagtacagctaccgcggcgtcgacctagatgcgcttctcganatgtccantgacgacctcgtccagctcttcnccgcgngcgncatgagaaggttcnagaggggtctgaagaggaagcccatggcgctcatcaagaaactgcgcaaggcg

SEQ ID NO: 385 - DNA, 163 bp, Zea mays
  misc_feature: Incyte ID No: 700342657H1
  unsure 150: a, t, c, g, or other
attgtacctacaaggagggcctggatttgagagtccccgtcccacggaagcaggtgggtggttaaagaaagcttgtgaagaccaccgcgttgtcctgctagatcagcggggaacaggattatccacaccgttgactccatcatctctttngcaaattaaatct

SEQ ID NO: 386 - DNA, 286 bp, Zea mays
  misc_feature: Incyte ID No: 700342658H1
  unsure 57-58, 77, 196: a, t, c, g, or other
ggaccgtcacaagcgtgtccgaggagaccgagacctacaccatcatgacgagaatgnngccggaggttgccctggangtgacgcctccggcgtgacggtgctgcccggagcatcgagagagctagctgtgaccctgacggcgaggtccgtgaccggcacctacagtttcggagagatcgccatgaaaggcgaccgnggccacctcgtcagaatcccagtggtagctatgggattcaagtaggttaggtagaagacgactgcgaccggcgctagagagtaggaggag

SEQ ID NO: 387 - DNA, 291 bp, Zea mays
  misc_feature: Incyte ID No: 700342662H1
ccaaatcacccttccccttccccttccaccaccaccaggccgccgcctcgtgtcctcaattctcctttccgaatttagaatccccgtgctgagagctgagtgccgccttggttgctccgtactggactcgattcctcatcgcagcagaagcatcccgtcccctccgcttctccttgctctgctctgctaacacacagacaaaaaaaatagcagcatgtcggaggtgaaggactccaatgtgcctgctgcacttgatggaaatcctcaacctatggaccaaactgaagacaa

SEQ ID NO: 388 - DNA, 290 bp, Zea mays
  misc_feature: Incyte ID No: 700342663H1
  unsure 50, 181, 200, 243, 254, 288: a, t, c, g, or other
ccctggtcataagctggtctatcactgagatcatcagatactctttcttnggaacgaaggaggcatttggctttgcgccttcctggttattatggcttaggtacagcacctttatgttgttgtatcctactggcatctctagtgaagttggtctgatctacattgccttgccttacatganggcatcggagaaatactgnattaggatgcccaacaaatggaacttctcatacgattacttcnattcatctgtncttgccctcctgatctatgttccaggaagcccanac

SEQ ID NO: 389 - DNA, 294 bp, Zea mays
  misc_feature: Incyte ID No: 700342664H1
  unsure 291: a, t, c, g, or other
gaggactagaggagtcggagcctcggaggagggagagggcgaagagtagggggaaccaaatcttggaggggaaacgtagagttctttcgtggaggaagcgggtgcaactggaggagggtagaggtagctcaatagatctactgctgtcgggggagttaatgcaaagctgagttgctgcacgttggctttcttcagagatggcttcagctggtgtagccccatctgggtacaaaaacagcagcagcactagcattggtgccgagaagttgcaagatcagatgaacgagctanaga

SEQ ID NO: 390 - DNA, 170 bp, Zea mays
  misc_feature: Incyte ID No: 700342666H1
  unsure 29-30, 41, 46, 49, 55, 82, 84, 89, 131, 160: a, t, c, g, or other
ctcaaaagggtttgtttgagttcaattcnnccaggacaacnatagnttnggatanaataatagtacatagatagtacccaancnctatngttgtcctggctgaattgaactcaaaagggtttgtttgaganaaaattgtcccaagattggattgcttgtnaaagctcaat

SEQ ID NO: 391 - DNA, 118 bp, Zea mays
  misc_feature: Incyte ID No: 700342667H1
  unsure 3: a, t, c, g, or other
ggncgctggtggtgacggtgcttctcctcctctcttccaccctcgccgcggcacagtggtgcgtgtgcaggcaggacgcgtctcaggccgcgctgcagaagacgatcgactacgcgtg

SEQ ID NO: 392 - DNA, 279 bp, Zea mays
  misc_feature: Incyte ID No: 700342670H1
  unsure 40, 95, 140: a, t, c, g, or other
caatgcggcgcacatctacggtccagttcacgacgtgcgnttccctaccagcagaagcgcatgttcgggttcgtcaccttcgtgtacccagaganggtgaagctcatcctggccaagggcaacccgcacttcatctgcgncgcacgcgtgctcgtcaagccctacaaggagaagggcaaggtccccgacaagtgcaggaagccgcagcaaggggacttctccggctgcacgacgcccactggcgggctggacggcgggtacccctttgatctgcaccag

SEQ ID NO: 393 - DNA, 278 bp, Zea mays
  misc_feature: Incyte ID No: 700342671H1
  unsure 229: a, t, c, g, or other
tgtgttgttcggagcgggcagcagcacacagccccatcccaatcctagtcgatcttcttcccctcctcaaggaagaaaagaagctgaaccatggggaagagaaagtcagctgctaagccacctcctaagaagcggatggacaagcttgacactgtcttttcctgcccattctgcaaccacgggagtagtgttgagtgccgaattgacatgaagaatctgattggcgaanatcttgtagaatctgtcaggaaaacttcagcacaactgttaatgcatca

SEQ ID NO: 394 - DNA, 279 bp, Zea mays
  misc_feature: Incyte ID No: 700342674H1
ggaaactgggatgagttcatttatgtatggtggcacccaggttattggggctgcgggcctttcccagggcgatcaaaattttcctggcactccagctctgctgccagtgatgcaatttgggagtcagcatcctggtggtcttggagttcctactgttggtatggccctccctggctatgtagctcaacagcagatgggaatgggaaacaacgaaatgacatggttgccattattggctggtgcagcaggtgcttttggaggatcatatccaccctatat

SEQ ID NO: 395 - DNA, 94 bp, Zea mays
  misc_feature: Incyte ID No: 700342675H1
  unsure 62, 70-71, 84: a, t, c, g, or other
attttaccttgatttgaaattttaccttgatttgagataactatcaaatactgcgaatgccnttattccnnccggaattccttnttttcttaaa

SEQ ID NO: 396 - DNA, 282 bp, Zea mays
  misc_feature: Incyte ID No: 700342676H1
gcatcacttacgacgtgaacccaagctttgtgctgatggacatcgacgggctccgtgtggtggtgtacgtctacgagctgattgacggcgaggtgaaggtggacaaaatcgacttcaagaagactgcgacgatgcacggctagccctatccttccactccgtgattgagtgcaagacatgtctagcttctgtttcttttctttcagcttcttgattcagagcctcctgaacacgctttctacctgttcatgcgcaaagaactttttaggtctggttgttaac

SEQ ID NO: 397 - DNA, 284 bp, Zea mays
  misc_feature: Incyte ID No: 700342678H1
  unsure 6: a, t, c, g, or other
cgaggngcttcaagctttgcaagaaagcgaacaggcaagagaaactaaggattctcagcgaggagtggtgcttcctataagcgagtactacgaacttagcaagagggcacatgaagccgaagaacaggcgagcgagaaggtagcagaagcactggcacaggtagtgtcggcaaaggaatcagaagcaatgagcctggagagcctaaaggaagcgtccgatgaaatggacgagaagaaggaagctcttgagatcgccttggagagagccgggagggcgaacgaag

SEQ ID NO: 398 - DNA, 287 bp, Zea mays
  misc_feature: Incyte ID No: 700342679H1
cgcttttactagatcatcagtagccagctcaggagccgagcctggtcagggtagccaagcccatcccggtcctctcccggcgtcttctccctccgcaccgcggctccggcgatggcgggcgtcggctccgcgctgcgtcggctctacctctccgtctacaactgggtcgtcttcttcggatgggcgcaggtgctgtactacgcggtcctgacgctgcgtttgagcgggcacaaggccgtctatgccgccgtcgagaggccgctgcagttcgcgcagacagccgccat

SEQ ID NO: 399 - DNA, 290 bp, Zea mays
  misc_feature: Incyte ID No: 700342680H1
  unsure 51-77: a, t, c, g, or other
cgcgtccgcacaaatcccgtgctcccccgtctgaaaaccctccccacctcnnnnnnnnnnnnnnnnnnnnnnnnnnnggtgtcttctccggcgagtctcccccctagtaacaagaaaatatggatgtacctgttgatgaccctgtggagaacctcactggaagtcctagtacccttggcaatgaggaagaagccactacttatgctaatgtgcaagatcagtccaaggaagaaccagaaaagctttacgaggaacccaaagacccaatgcaagacgagttgggtaaccaa

SEQ ID NO: 400 - DNA, 286 bp, Zea mays
  misc_feature: Incyte ID No: 700342681H1
gtacagcagccgccgtcatcgcacgttcatcgctgcatggaggagttcgcgctgctacgccgtcgtttctccggcaagacctcctctgatcgtgatttgttcccgcgcttcgaggaatcgacgatcaagcttcgacgatcaagtgatctagctcttcgagttccacgaagttgaagaccctaagcatctgtttggtgaaggttgtccacattacaaccactgttcaagagaagacgaatcgtggaaggagacttccaggagttccaggactacgacgagttctagg

SEQ ID NO: 401 - DNA, 170 bp, Zea mays
  misc_feature: Incyte ID No: 700342682H1
  unsure 29-30, 71, 82-84: a, t, c, g, or other
ctcaaaagggtttgtttgagttcaattcnnccaggacaactatagttttggatataataatagtacatagntagtacccaannnctatagttgtcctggctgaattgaactcaaaagggtttgtttgagaaaaaattgtcccaagattggattgcttgttaaagctcaat

SEQ ID NO: 402 - DNA, 281 bp, Zea mays
  misc_feature: Incyte ID No: 700342683H1
  unsure 39, 273: a, t, c, g, or other
atcctccacccaatcgaaggacctagcgagcggcagcgncggcggcgatcggagaagatggtgcgcaaggcgaaggttgagttcgacgagcagccgccggataacttcgacccgaagaacccgtatgccgacccggtggcgatgctcgagtaccgggaacacctggtgcgagagaagtggatccagatcgagaccgccaagatcatccgggagcgcctccgctggtgctaccgcatcgagggcatcaaccaccaccagaagtgccgccacctngtcgacca

SEQ ID NO: 403 - DNA, 278 bp, Zea mays
  misc_feature: Incyte ID No: 700342684H1
  unsure 243, 246, 266, 275: a, t, c, g, or other
aatcaaggcttttgtaaaaaaagaggtccaagaagttagaacagttgatgagaggaaagctagcgaaattactcagcttacaatgccaaagctttgtgttcgtcttaacagtctatattacggtatcagccagttgagtaagttggaggacagcattaatgagaggtgggctcggaagaaaagtgaaaacactaacatcagacgaaaaagtgaaaagtcaaagagtgccgtccctaatcagangantcaatttgatggcagcaganaagaaatcntac

SEQ ID NO: 404 - DNA, 274 bp, Zea mays
  misc_feature: Incyte ID No: 700342688H1
gcaagccattgccctcgcctatcgcctcgtgcaagtccaagctcccacgactccaccgcgaccgggagagagtcagagagagacgcccgcctccagatcgtccggcggggatggcggcgtcggtctttccagcgctgctgctggccgtagcggcggtgcttctcctaccggtggcagaggccgtgtggctcgagctcccgccgtcggggaccaagtgcgtctccgaggagatccagcccaacgtcgtagtgctcgccgactacgctatcatgta

SEQ ID NO: 405 - DNA, 277 bp, Zea mays
  misc_feature: Incyte ID No: 700342692H1
cactcactgctgccattaccaaggttctggcagaggcagggaaggccaaagcagttgcttttgacgagatcgacaaggccccggaagagagagccagaggaatcaccattgcaacagctcatgtcgagtatgagacggctaaaaggcattatgctcatgttgattgtccaggtcacgcagattatgtcaagaacatgatcactggagctgctcaaatggatggtggtattcttgtcgtgtcagctcctgatggcccaatgccacaaacaaaggagca

SEQ ID NO: 406 - DNA, 281 bp, Zea mays
  misc_feature: Incyte ID No: 700342694H1
ctcctggctaccaaggtggacctccggggtatcaaggtggtaaccaagggaacccaggccctgcctaccaaggtggtaacactggttatcaaggtggcaacccaccacctccctaccaaggaagcaacccaccacctccctaccagggaagcaacccaccacctccttaccagggaggcagcccaccagggccaccacctccctaccgaggaggcagcccaccagggccaccacctccctaccgaggaggcagccccaacgtaccgccatattcgggtggt

SEQ ID NO: 407 - DNA, 283 bp, Zea mays
  misc_feature: Incyte ID No: 700342695H1
cctagctgaagatctcgagtgcaacgcaacgttggcgcttggcggccagtagtagcagctaatttagcgtcgctccttcctactagacgagagatcgagaaaccatggccaagctccaagtcactcctggcgccgcgttcaccgagtgcaatgaactcaacttccagggcctgtacatgtaccacacgcccctgggtcccaaggccaaccaagctgcgatcctagagagcaaggccaagatcggcatcggtgccaccgtggttaacaactgggcagtgtatga

SEQ ID NO: 408 - DNA, 91 bp, Zea mays
  misc_feature: Incyte ID No: 700342696H1
  unsure 42-43, 46-47, 49, 55, 58, 61: a, t, c, g, or other
cgaggactaagtccttgactacgcctggtggcacctccaggnncannangttatngangtngggccattacaccatgcgctagcggtggtg

SEQ ID NO: 409 - DNA, 328 bp, Zea mays
  misc_feature: Incyte ID No: 700342701H1
  unsure 255, 269, 312: a, t, c, g, or other
acccaagaaacacacagaagcgaggagcactacttgttggttggattctcttcagtctagcagctagtccagttaagtttcagacacacatggggagcattggcagaggcacggccaactgcgccaccgtgccgcagccgccgccgtcgacagggaagctcatcacgatcctgagcatcgatggcggcggcatccgcggcttatcccggcgacatcattgcgtacctcgaggccaagctccaggagtggacggcncggacgtcggatgncgactattcgaacgtgattgccgggacgagaaccggggcctgntcggtcgatgtggggg

SEQ ID NO: 410 - DNA, 330 bp, Zea mays
  misc_feature: Incyte ID No: 700342703H1
  unsure 26: a, t, c, g, or other
aggtggactgaggattggtgaaagcngactggtagctgacaatggcatttctctggatgtggatatcaaccttaacgccaacgttaacgatctttgtggtcaaagttcaaatgttaactgtgcctctcaaggtcctgagcagtattgtggcagtgatcgtaatgctataaattctcagccgactgacctgggattacacccattcaggacattcctactagatgcacagcaagcagaatcttttactttgaatcctagtgaaaaccctttgggtgatttttcatcaatgcaagaaagcattgaacgaagaccaggtggttccctggatgg

SEQ ID NO: 411 - DNA, 328 bp, Zea mays
  misc_feature: Incyte ID No: 700342704H1
  unsure 5, 12, 14, 32, 53, 62, 64, 117, 129-130, 140-141, 155, 208, 217, 225,: a, t, c, g, or other
ttctnactcttngnttatattaagtttcatcngcttttgatgccagttctgcnatccatcanantactaggtacagtgtgctcaatttctcaaattatgttcctcattgttgaatcntggtcaattatnnccaccttganntacagagtaaaganaggtatggattcttgaagtgtgcttaaatagttaatcatccaacctcagtgtncaccttganagtggtanacactgnntgatagcaccnatacccatactatattgnntgtagcatcaccttgcattgngtagctgnatngantgtancagcancactcatacttgtaatcat

SEQ ID NO: 412 - DNA, 327 bp, Zea mays
  misc_feature: Incyte ID No: 700342705H1
  unsure 34: a, t, c, g, or other
agactagttctagggctcttctcctgcagtgttnaatgctgcacggctcatgtctaccaagctatttattggtggtcttgactggggtgttgatgacgtgaaactaagagaagcatttagcagctttggagaggttactgaagcgagggtgatcacagacagggagactgggaggtcaagaggctttggctttgtgaactactccgacagtgatgctgccaaggaagctatttctgcaatggatggcaaggaaattgatgggcggcaggtacgtgtcaacatggctaatgagagacctgctgggaaccgtggtggtggtggctatgg

SEQ ID NO: 413 - DNA, 328 bp, Zea mays
  misc_feature: Incyte ID No: 700342708H1
acaccaatcaccgtcgctctcgaagccaaccggctccgtcggggcgtactctccagacctcgtcgccgccgctggggggtaccaggcggcgctgtacctcgaggcgctctcgcgcttcgtgttgtccatgcacgaccccgaggtgctccgccgcttcgaccagtgtcgcgcctcgcctcgtagctagttacccttcttgttctcaaggcatctttgggaagcatgagatgggctagcaagtggctgaggcagtgcgaaacagaacaaaaccaagacgacgagtggccagttgggcgttaggtggtggtgagcgactcgaaaacgttag

SEQ ID NO: 414 - DNA, 326 bp, Zea mays
  misc_feature: Incyte ID No: 700342709H1
atgagattagtatcaaggccatgggacgggccataaataagacagttatggttgttgaattgatcaagagaagggttggaggtcttcatcagaacactgctactgaatctgttgatatcacagacacatgggaacctttggaagaaggccttctcccactagagacaactcgccatgtgtcgatgatcactgtgacactgtcaaagaaccctctggatacatcatctccaggataccagccacctatcccagctgaagaggtgaaacctgcttttgactatgatcatgaagaatcgtatcccactggtcgtggaagaggacgtggt

SEQ ID NO: 415 - DNA, 276 bp, Zea mays
  misc_feature: Incyte ID No: 700342711H1
  unsure 211: a, t, c, g, or other
gagtgggagacccgcgagaggctgccgtgtagggaccgtagactcagcgactgcgaaggagggataaggggatggccgggatcggaccgatcaggcaggactgggagccggtcgttgtgcggaagaaggcacccaccgccgccgccaagaaggatgagaaggccgtcaacgccgcgcgccgcgccggtgcggagatcgataccatgaagangtacaacgctggtacgaacaaggcggcatccagcggtacatccctcaacaccaagcgcctcgacg

SEQ ID NO: 416 - DNA, 326 bp, Zea mays
  misc_feature: Incyte ID No: 700342712H1
  unsure 90: a, t, c, g, or other
ggggaaccaaacatatcgtacatctgctcccgatactatagggctccagagctcatatttggtgccactgagtataccacagcgattgancatttggtctgctggatgtgttcttgctgagcttatgctagggcagcctttgtttccgggtgaaagtggtgtggaccaacttgtcgaaatcatcaaggtcctcggtacgccaacaagggaagaaattaaatgcatgaacccaaattacacagagtttaagttcccacaaatcaaagcacacccatggcacaaggtattccacaaaaggatgccgccagaagctgttgatctggtct

SEQ ID NO: 417 - DNA, 325 bp, Zea mays
  misc_feature: Incyte ID No: 700342713H1
gctccggcggcgcggacaagcccggcagtggcggcggcgcggtgaagacgccgtcggacttcctcaagtccatcaggggccgccccgtagtcgtaaagctcaactccggcgtcgactacagaggtatattggcttgtctggatggttatatgaacatcgcaatggagcagaccgaggagtacgtgaatggccagttgaagaacaagtatggcgatgccttcataaggggcaacaacgttctgtacatcagcacgacgaagcggacccttgccgatggcgcgtaccggattggattccctctgtcctcctcccgtgtgtgtgccgt

SEQ ID NO: 418 - DNA, 326 bp, Zea mays
  misc_feature: Incyte ID No: 700342714H1
  unsure 42, 141, 202-203, 241, 249, 255, 276-277, 288, 314: a, t, c, g, or other
gtcaactccactcctcttggccgccgcatcacctcctcttcnccgctgccgccaccgctccaccgggcagccagccagccatggatgaggagtacgacgtgatcgtgcttggcacggggctcaaggagtgcatcctcagtngtctcctttccgtcgacggcctcaaggttttgcatatggacagaaacgactactatggagnncattccacctcgctcaaccttaatcagctctggaagangtttagangggaanacaagcccccagcacatctanntgcagcaacanactacaatgtggacatggtgccaaantttatgatggcg

SEQ ID NO: 419 - DNA, 327 bp, Zea mays
  misc_feature: Incyte ID No: 700342715H1
acacttcccgcgtctcgtgcttcgcgctgtcgcaggacgggaggctcattgcaactgctagcaccaagggaacacttgttagaatctacaatgcagctgaaggcaatctcttgcaggaagtaaggagaggtgctgatagagcagaaatatatagcttggctttctcgaataatttgcagtatttggctgtgtccagtgataaaggaacaatacatgtcttcaatctaaagataaatgtgggatcgactgcaaatgataaacctatacctgctccagatcctgaagtttcgcatataagcccccctctttcgttcattaagggtgtgt

SEQ ID NO: 420 - DNA, 330 bp, Zea mays
  misc_feature: Incyte ID No: 700342716H1
  unsure 102, 107: a, t, c, g, or other
gcccgcggcaaccgccgccattctaccccaggtcggacggacccttgccggagacgagcacacgccacagcaggaattatcgggcgtagagcagcgcgaagnagganatccaatggcggcggcggaggggcagtgggtgctcatggcaacggggcggacgccgaccaacattgcggtgatcaagtactgggggaagcgggacgaggcgctcatcctccccatcaacgacagcatcagcgtaacgctcgaccccgaccatctctccgccaccaccactgtcgccgtcagcccctcattcccttccgaccgcatgtggctcaatggcaagga

SEQ ID NO: 421 - DNA, 314 bp, Zea mays
  misc_feature: Incyte ID No: 700342717H1
agaagtatatatgagaatacagacttgggccggcgacatggttgaagctcgtagttttgaattgttggcataatgatttgccaatggattcattgagcgagatggcacagcaaggtgagtttctgattggactcctcaatgaactagcatgttgggctttggcacctggagcagagtcattcttcaggtcccttctgttaggaaggatttggatgcgctccttgtttgagtgctccaaatctgaaaaccaagcaggtaagaaaatgtaaaggcattggtccatcagtaatccaagcatatttagggcacatgca

SEQ ID NO: 422 - DNA, 314 bp, Zea mays
  misc_feature: Incyte ID No: 700342718H1
  unsure 19, 56, 61, 67, 70, 106, 111-112, 117, 132, 162, 188, 198, 213, 241,: a, t, c, g, or other
tcgctttcttctgcctcgnctttgttgatcttttccccttccagtctcccacattnccctncccccngcnctcgccatcctctcccgctaaccccaccccgtcgcnccggnntcctncggtccagcggcgancgggtccgtccggtcccgacgccgcaccanatcaccgcctgctcccacggccgtcntcactcgacntcgatcggaactccnggatcggaggtaccttcgcgcgcggctncgctccganntcgtnctccatcggttggcatcggaagcggcggcggcgcgttnncagccagtttcgataaggg

SEQ ID NO: 423 - DNA, 313 bp, Zea mays
  misc_feature: Incyte ID No: 700342719H1
  unsure 39, 107, 147, 266-267, 277, 306, 312: a, t, c, g, or other
caaaatagtttatgggtttggaaacttgcatgaaaatanattagccccctcagatgttcctgcagtgctgaaattcatcctacagaagtaaccgcaaaactctagancagggagttgagcaggcgccagggctgtcatcaacatggntatgacatttcacaacagtgactagttgaatcccttgtaacgtagtagttgtctgctctttgtccatgtgttaatgaggactgcaaagtcccttctgttgtgattcctaggacttttcnntcaagagganatctggatttccacctaccgcttacctgnaatgcng

SEQ ID NO: 424 - DNA, 311 bp, Zea mays
  misc_feature: Incyte ID No: 700342721H1
  unsure 30: a, t, c, g, or other
acagctctgatgagagttctgatgaaagtnacgaggaacctccacaaaagaaaactaagaattctgcaccttctggtgctgcaaaggctgccactaatgtttcaaagaaaaaaagcagcagtgatgaagatgatgaaaattcagaagaaagctctgatgatgaggatacagaacaagttgaaactaaggaaacttctgtagtcactacccagaagccggcacataatgaacctaaaactcctgccaaaagccaaagtcaggctactggttcaaagactatttttgttgggaatttagcctacagtatagag

SEQ ID NO: 425 - DNA, 308 bp, Zea mays
  misc_feature: Incyte ID No: 700342722H1
  unsure 8, 25, 29, 81, 113, 116, 135, 139, 189, 272: a, t, c, g, or other
atcccgtnctccgcgtcgagatctntgcngaggcggtgaccgtcgagggatcgccatggcgttgagggcgtcccccgtgtngcatggcaccgcggcaggccgtgccgcctttngcncggaggaggatggcccgtngggnggtggtggccatggcgtccaccatcaacagggtcaaaactgtcaaagaancctatacccctccacgagaggtacatcgccaaattacccattcactaccacctcaaaagcgggagattttcgattcacttcanccttgggccaaggataacctactgaacctactgaag

SEQ ID NO: 426 - DNA, 307 bp, Zea mays
  misc_feature: Incyte ID No: 700342724H1
aggataagaagaaggaaaatgctgagcgtgatgagcgtgccaagaagtcggtgagcatcaacgagttcctgaaacctgctgaaggagaaaggtactatggcggccgtggccgtggaaggggccgtggggagcgtggtggttttagaggcggatacggagggggatacagtcgtggcccagctgctgctgctccatccattgaagatcaagctcagttcccaagccttggtgggaagtgaagggcgcccagctgctgctgtcaccgagcgttgtgttgtctgctgttgtcatatttaaattttgtccg

SEQ ID NO: 427 - DNA, 308 bp, Zea mays
  misc_feature: Incyte ID No: 700342725H1
gctctctcgtggcttcctggcggcgactgggcgagcgccgccgccctcttcgtcgggcccgcccttcaccggcgacgtgcatccctccggagaagaatattgcgctcacataactgaataactgatattaggatgagtctctgtacaatagcacgacggctatgtctttcaaaaccatcctctggcagtcgtctttcagcaatttgggctcatctatacagcactgaggctgcaaaggacatgggtgctaagaagtacaagtaccccgatgtatacgacccctacgggcctatgccgccgccttcgga

SEQ ID NO: 428 - DNA, 309 bp, Zea mays
  misc_feature: Incyte ID No: 700342726H1
accacaacatttgaagtgagatcaagagggtacatggctccagaatattactacagaggtgaagtctcaaccaaatcagatatatacagtctgggcatccttataatcgagatagtaacagggttaaaagtcgattctaacactgtagacttatcgtctaagaaccttatcgacaatgtacaaaggatttggacaaaaatgccacagatagcttctaagtacccgacgttggaagcaagcaacctccaacaagttaaaagatgcattgatgctgggttaaattgtgtgagcgaaaaaccaagagaaagg

SEQ ID NO: 429 - DNA, 307 bp, Zea mays
  misc_feature: Incyte ID No: 700342727H1
  unsure 9, 29: a, t, c, g, or other
atagttttngctcttcctctctcatggtnacaatgcttgcagctagttctctagtgaacagcaacctcgcttgctcatcaaggatatcatcctgttcagacttcacatatagccactcctggcgtcccatacatgctatgaaactccatcagatgcgtgctgtgagctcaatacgtataagttgtgctgccactaaacctgcaaagactcctgctgaagaagaatggaaagttaagcggcaactgctatcagaaaagcgggtacgaagtgtcgatgtgaaggaagcactgcgccttcaaaaggaaaa

SEQ ID NO: 430 - DNA, 307 bp, Zea mays
  misc_feature: Incyte ID No: 700342729H1
  unsure 16, 31, 33, 63, 179, 297: a, t, c, g, or other
aacagagttgattgtncgcatcagtggtaancngcctccacaagccaagaacaacccaggtanggggcctggttctcatgccgggggtcctggaagcaacttcaaaaccaaattgtgcgagaacttcaacaaaggctcctgcacctttggagacaggtgccacttcgcccatggcgaangtgagctgcgcaaacctgctgctgcttgacaggcatgcttattgtggcctgtggtgattaatctgcctgtatggctgaataacaccatgaccaaggacagtggcgccacgccatggtnaagtgtgctg

SEQ ID NO: 431 - DNA, 311 bp, Zea mays
  misc_feature: Incyte ID No: 700342730H1
  unsure 2, 7, 37, 44, 59, 268-269, 306: a, t, c, g, or other
gnacgcncctctccttctccctagtccctccccctanccccgcnccgtcaaagcgagancgccgtatcacctgttccctccgtccaccgccgtctcgatccgcgcccaaagatacctttcccccaccccttcctcgcgccgccgttttggtgcgaccatgacagcggagggggaggccaagaacccgtcggccggtggcggaggggataacccccagcaccagcaggctgcgccggcgccggcgccagcacagggggaagtggcgcannaggctgcagtgcaggggacgggacaagagcaggagcnggaca

SEQ ID NO: 432 - DNA, 310 bp, Zea mays
  misc_feature: Incyte ID No: 700342731H1
  unsure 4: a, t, c, g, or other
gganggggagggggagggggagggagaggcgaggtcatggcctccggcaccggctccggccagccgcaacccgcagcagctgatgctgacccgggagccggcgacaacaagctcgtcttcgagacgccgctgcagccgcagcccgtgagggaggactacgtcgagaacgccgtcaagttcctctcccacccaaaggtcaggggctcccccgtcgtctacagacgatccttcctcgagaagaagggcctcaccacacaggagatcgacgaggccctacgaagagtccctgatcctgaacccatcactacgg

SEQ ID NO: 433 - DNA, 305 bp, Zea mays
  misc_feature: Incyte ID No: 700342733H1
aaggttgcttgcaagttcttgcagcctggagcatatgatctggttggttacatagtgtatgagatcgaccagcacccttaccagaatgtattctacaatggcactatcgaggttgttgaggctggaggcttactcagtgttgagtctgtgttcctcatcacccttggatttgcacttcttggtctgtttggattgtgggcatatggccaggttcagcagctctcgaagaaaacaaagaaggcacccaaggtggagctcggaactggaacaactgatgccaacatcgatgagtggctggagggcac

SEQ ID NO: 434 - DNA, 300 bp, Zea mays
  misc_feature: Incyte ID No: 700342735H1
  unsure 16, 20-23, 26-27, 29, 32, 42, 44, 47, 57, 60, 92, 102, 129, 145,: a, t, c, g, or other
atatattctgtgaganaacnnnntgnncngancaggacaaangngtntggttttgtnttngcttgtgtaataaagcatgtccttcgtatgtnacagtttggngcaacggaagtcttttagtgatggctnatgggtctgggcagcntcccttcatgnnttttttnttaatccaatatccgttgatttgattgtgattagngaaccttggacattttgctgctaaagaatcntttttcccctntngcccttcctgaccctacttgcactgctgtggatttttttaagngnagcaaanacaaa

SEQ ID NO: 435 - DNA, 300 bp, Zea mays
  misc_feature: Incyte ID No: 700342736H1
  unsure 104, 167: a, t, c, g, or other
aaccgaactcgcacctcgcacctcgcatcgtcttgtcgacacacctccagctccgaaaccctactccgccggcgatgtcgtcatccggcgccccggccccggcngcggcaatggccgttgacgacgcggaggacgaccagctcgcctccatgtccacggaggatatnatccgggcctcccgccttcttgacaacgagatccgtgtcctcaaggacgagttgcagcggacgaacctggagttggagtcgttcaaggagaagattaaggaaaaccaagagaaaattaagctcaacaagcagt

SEQ ID NO: 436 - DNA, 300 bp, Zea mays
  misc_feature: Incyte ID No: 700342737H1
  unsure 4, 48-49: a, t, c, g, or other
aganatcagtttctttcttttctttgatttacacgcacactctcccannctactgtttgcttgtttggtatagcaggaagtatctttgatatataaaaacgagaaataggccaaggagtatgctatcacgatgagccgcccagatatatatatcgtgtgcctccgtcacatcgtgctagctggttcttttcttcatgaggcatatagggtatttattcaaatgcccgcaaagggagggcagtgcactgagtgcatcgggagggctcatagttcttctttgactgcaagggataggcagca

SEQ ID NO: 437 - DNA, 300 bp, Zea mays
  misc_feature: Incyte ID No: 700342738H1
  unsure 115, 204: a, t, c, g, or other
cttgctgaagcacatagaggtgttctttatgttgatgaaataaatctattggatgatggcataagcaatctacttctgaatgtcttgacggagggagttaacattgtggaaaganagggcattagctttcgccatccctgcaaaccacttctaattgctacttacaatccagaggaagggtctgtacgtgaacacttgcttganccgtattgcaattaatttaagtgctgatcttccaatgagttttgatgaccgcgttgaagcagtggatattgcaacacggtttcaggagtctagcaa

SEQ ID NO: 438 - DNA, 300 bp, Zea mays
  misc_feature: Incyte ID No: 700342739H1
  unsure 43: a, t, c, g, or other
caaggccttcagaccgggacggctccctgtcctgtcccccgcnccgccgcggatggccggagccaccacgccggcatcaggcgccctcgtcaggctctgcctgccttcgctcctcctctttctgtaccggtgctgcagatgtgaggctgttgagatggagagaacccttgcgatgatcaagcccgatggtttgtcaggtaagtacacagaagcaatcaaggaggtcatcttggattctggatttcatatcgtcaaagaaaccgaggtccagcttgatgctgagagggcatctgtcttcta

SEQ ID NO: 439 - DNA, 300 bp, Zea mays
  misc_feature: Incyte ID No: 700342741H1
  unsure 27, 40, 119: a, t, c, g, or other
gcccgtacgccgacgctgccgcctggntcgcaccgcccgncggcagtgcctcagtccagatcaagcctccctcttcccagatcgggtcctagttgggctaccacagccgtacgccaggngccgagcccctcgccgatttcttcgccggcgaagagtgcccaccagatccgcccctgatggacaacgtcgagtctgcccctgactcgccggcgcaggcgccgccgtcatccgcctcttctctccccaaggagcaatcgcaggtggagttggagtgaggctgcttcaggctcttgagttcta

SEQ ID NO: 440 - DNA, 300 bp, Zea mays
  misc_feature: Incyte ID No: 700342743H1
cacagctttatctgttggatccaactgaagaaaagccgacctggagaattttgaatgttccagggcaccctccccgattccgcctggggccacagcacctgtgttgttggaggaacaaaagcgatagtgcttggtggacaaactggggaagagtggatgcttacagaaatacatgagctctctttggcaaacaactcagtctgagttcatggtggacaaaccggggaagagtggatgcttacagaaatacatgagctctctttggcaagcaactcagtctgagttcatggtggccaaacc

SEQ ID NO: 441 - DNA, 300 bp, Zea mays
  misc_feature: Incyte ID No: 700342744H1
  unsure 11, 170-171: a, t, c, g, or other
aaacacttgcnccgccactgcctcacaggtaaggccgccatggtctccggttcgggcgtgtgcgcgaagcatccgtggtggacgcgcgccaccacatgctgggccgtctctcctcgatcatagccaaggagctgctcaatgggcagaaggtggtcgtcgtccgctgcgannagatctgcatgtcgggcggcctcgtccgtcagaagatgaagtacctccgcttcctccgcaagcggatgaacaccaagccgtcccacgggcccatccacttccgcgcccccgccaagatcctgtggcgaa

SEQ ID NO: 442 - DNA, 300 bp, Zea mays
  misc_feature: Incyte ID No: 700342745H1
  unsure 258: a, t, c, g, or other
gcggattcgggacagtctataagggaaccatccgaagcgggcgagaggtcgcggtgaaggtcctctccgccgagtccaggcagggcatcagggagttcctgacggagatcgacgtcatcagcaacgtcaagcaccccaacctcgtcgaactcatcggctgctgcgtcgagggaagcaaccggattctggtgtatgagtacctcaagaacagcagccttgaccgtgcgctgctggcttctaacagtgagcctgccgacntcacctggagcgtcaggtctgctatatgcctcggagtcgctc

SEQ ID NO: 443 - DNA, 300 bp, Zea mays
  misc_feature: Incyte ID No: 700342747H1
catcaccaaaatcacccggtacgataaggtcgtcaacatcccgaattcaatgacagtactggacgagctccttcccatctcgatcgaaatggcgaagagaaacctcacgggaatatggaatttcactaaccccggcgtggtgagccacaacgagatactagagatgtacagagactacatcgatccaggcttctcctggaaaaacttcaacctggaggagcaggcaaaggtcatagtcgcaccgaggagcaacaatgagcttgaccagaccaaactgaagagagagttcccggagctttt

SEQ ID NO: 444 - DNA, 103 bp, Zea mays
  misc_feature: Incyte ID No: 700342751H1
  unsure 20: a, t, c, g, or other
gcacttctgaagaaacatgntattcgaatgactaaatatgattatagactctcaaataagttggatactgacctgcaaaaactacgttgcagagtcaattatc

SEQ ID NO: 445 - DNA, 161 bp, Zea mays
  misc_feature: Incyte ID No: 700342753H1
  unsure 2: a, t, c, g, or other
cnaataatgaatcctcttgcatttgcctagagcactatgtatttctgtggcgtggttcgatttcagttttaccaatggaggtcatgtgtgttcagagaacaatgatattgttgtcttgtatctgcatgtaaacgttgttatctttgagtcagatactctac

SEQ ID NO: 446 - DNA, 295 bp, Zea mays
  misc_feature: Incyte ID No: 700342755H1
  unsure 173, 245, 288, 291: a, t, c, g, or other
tgcaagcattttgagattggtggagacaagaagggcaagggaacatctctcttctaagtttctcatcgcccatctcgatgttggatcgaacctgtgggtctactactgttctaaaaactcgtcaaatttcaatgttactagtagttctgaaagcaggtcatgctgtgtatcanattccaatgcctgacatttgcgctgagtgtgggttgtcttttggctaaatgaagttttgcaccctgaatctncattgaatgtgttgtgtgtttgtttgatttggttctgcgatgnctnagtc

SEQ ID NO: 447 - DNA, 293 bp, Zea mays
  misc_feature: Incyte ID No: 700342760H1
cgacgttttgcatctccaagcagcatcgtctcctccccagatccatcaattcgttcggaccgcccttctcgtgtccccgttccaaagcgcggcaggctgagcggttccgtcagatttgagtcgtcatgaatcccgagtatgattaccttttcaaacttctgcttatcggtgattctggtgttggaaaatcatgcttgcttctcagatttgcagatgattcatatctggacagctacatcagcacaattggagttgactttaaaattaggacagtagagcaagacgggaagacc

SEQ ID NO: 448 - DNA, 139 bp, Zea mays
  misc_feature: Incyte ID No: 700342762H1
  unsure 4: a, t, c, g, or other
aggngcggcgcgtagaggcacgccgccgagcttcgggcatcccatctgacgcgaccggtcttcgggcacgccgccgatcgagctatggacgcgtcgagctccctgtccctcctagcactggtgaccatactcagcctct

SEQ ID NO: 449 - DNA, 296 bp, Zea mays
  misc_feature: Incyte ID No: 700342763H1
  unsure 291: a, t, c, g, or other
tgaattgtgtgaagtgcattaggatcctatccccccaagaagtgcagcagatgagcttagatggtgatttggggaacaatgtcctctccaaccaggcttgcagcagctcagatggtgggaatgcctggaagcctcgccgcgaccagaaccctggtaacccttccatcgggttctacgaccaatttgagtgacctgatcacggaaattcgagatgagaattatagctgcaaaaagcaaccagtgtccagccatctacagaattatcgccacggaaagggtaagcagatgcangatgt

SEQ ID NO: 450 - DNA, 150 bp, Zea mays
  misc_feature: Incyte ID No: 700342764H1
  unsure 64, 67, 82, 84, 119, 134: a, t, c, g, or other
gtaaccctagccgcctgaggccgacgccaactctctcctgaccgcaacggggaactcgaccccngcntccgccaccgccacngngccggtcgccgacccactcagatgaacacgtctcngtccagatacagggnaatgatgggaggctgg

SEQ ID NO: 451 - DNA, 103 bp, Zea mays
  misc_feature: Incyte ID No: 700342767H1
gctgtgttgtttcatttattatacagcttaataagatatatacaaatccaccctctgcatatatttgcggcttgtgcggttctacaagaggattcccagcttg

SEQ ID NO: 452 - DNA, 293 bp, Zea mays
  misc_feature: Incyte ID No: 700342768H1
  unsure 129, 286: a, t, c, g, or other
atcattgaaccagatgaatcctaatactgattatggttgcttgaagacatttggttcttgttttagtgaagacattcgtatacctgctggtacaaagattgacttccggcaaacatctgatggccagcnaataactgaaattgatggcaaacaaattggcactgtccagagcaaagatctttgcagagccttcttcgatatgtatatcggtgaccccccagtttcagtagagaccaaacaagacattgcgcaaaatgtggctggactcataagaagatgctagggnaacgggg

SEQ ID NO: 453 - DNA, 290 bp, Zea mays
  misc_feature: Incyte ID No: 700342769H1
  unsure 213, 266: a, t, c, g, or other
tgggctgcagattctgtgctactggaacaatgggcttcaaaagcaatctgtcttctggagaaattgtagagcagctggtccatgcatctcgctattctcagatccgaaatgttgttttcatgggaatgggggagccgatgaacaactataatgctttggttgaagcaatcggagtgtttactggatctccttttcagctttcacctaagaganttactgtatctactgtcggaatcattcatggaatcaacaaattcaatggtgancttccaaaggtgaatttagcagtg

SEQ ID NO: 454 - DNA, 142 bp, Zea mays
  misc_feature: Incyte ID No: 700342770H1
gcgaggcggtgagcgcggaggaggcagggctaagctccggcgccgggcgcccgccctctccgccgcgctgcgtggggtccaggatttctacctcgaggtggacttccacttcgagagctccgtcgtgccgctgctctcgcgc

SEQ ID NO: 455 - DNA, 98 bp, Zea mays
  misc_feature: Incyte ID No: 700342771H1
  unsure 61, 68: a, t, c, g, or other
ctaataaggtaataaggggcgacgaaaatggctccaacgaccgccaccaaggacgacagtncgctacngcgacgagcgccggcgcgagctgcaggcgt

SEQ ID NO: 456 - DNA, 102 bp, Zea mays
  misc_feature: Incyte ID No: 700342773H1
  unsure 2, 53, 77, 82: a, t, c, g, or other
angcgaggcactgcctgtgcgcagagccaccggttcaagggcctgtgcatgancagcaacaactgcgccaacgtgtncccanaccgagaacttccccggcgg

SEQ ID NO: 457 - DNA, 96 bp, Zea mays
  misc_feature: Incyte ID No: 700342774H1
  unsure 16, 23, 31, 33, 44, 47, 51, 68-69, 88: a, t, c, g, or other
attccttccccaactntgcaggntgctcgtngncctccctccangcnggangcgccccgatccagatnnaggggcgtaacatggcatnaaaacgta

SEQ ID NO: 458 - DNA, 99 bp, Zea mays
  misc_feature: Incyte ID No: 700342776H1
  unsure 65, 90: a, t, c, g, or other
aggaggcgcagtgggccaccgcgcagaggacactggcacgggctccagccgccggaggttccctnccaacacgctgttcaacgacaagangcagctacc

SEQ ID NO: 459 - DNA, 288 bp, Zea mays
  misc_feature: Incyte ID No: 700342777H1
  unsure 30: a, t, c, g, or other
acaacgactctagtgaaccatgcaaaaggngcgtccaagtcgtttgacggaggctgtagatcacttgaacgctataagggccatgtaaacgggaatggtatgaacgtatctaccgattccagtgaagataaagattcaaacaactcagatgagaagtgtaacgagtttgcatctgctgagtcggaggactcggtgtcaggtgttctatatgatatgttgcaaaaggaggtcatttctctaaggaaggcgtgccacgaaaaggatcagagcctgaaagacaaggacgac

SEQ ID NO: 460 - DNA, 288 bp, Zea mays
  misc_feature: Incyte ID No: 700342778H1
  unsure 99, 196, 224, 232: a, t, c, g, or other
ccaaaaccatgtccatgggaagtgctgagttgtttcaaagaaggtcggaatttatagttggcatcctgcagagactaggcaccaacaacatcatgaganagcaagaagggtccatgagtcacagaaaaatggactgcagacatgctcttgctattcccgaaggccattttgataacttgatagactacaagcgaanaactttaatccattagctaagctgaggnatggtaanattccatcctcttatgcaagtgatgaagcatgtgagttcatggctttaccatcagg

SEQ ID NO: 461 - DNA, 292 bp, Zea mays
  misc_feature: Incyte ID No: 700342780H1
  unsure 266-267: a, t, c, g, or other
ctgatttctatagtgtacttggtgtctcaagaaatgctagtaaatctgaaatcaagagcgcctatcggaagcttgctaggagctatcatccagatgtaaacaaagatcctggtgctgaacaaaagttcaaggatatcagtaatgcttatgaggttctgtctgatgatgagaagcgatcgatctatgataaatatggagaagcaggtctgaagggtgctggcatgggcacaggagattactcaaacccgtttgatctctttgagtcnntgtttgaagggtttggtggaatggg

SEQ ID NO: 462 - DNA, 82 bp, Zea mays
  misc_feature: Incyte ID No: 700342781H1
  unsure 11, 33, 77: a, t, c, g, or other
attcagttggnataatgtacgttgtgccgcatnatcagtctctctatatatatgctggaaataaaatgaggacaagngacca

SEQ ID NO: 463 - DNA, 287 bp, Zea mays
  misc_feature: Incyte ID No: 700342782H1
  unsure 46-47, 105, 254: a, t, c, g, or other
tttaatcttgcttacagattcaagcagtttagaatgatgagcgganntaagcacaatgaagctgcttccatatgtgacaaagtagtttttagtaaggtgaaaganggtcttggtggaaatgttagagttattttatctggagctgctccacttgctacccatgttgaagaatacttgcgtgtggtcacatgtgcacatgtcgtacaaggatatggcctcacggaaacttgtgctggatcttcgtctcgctaccnaatcaaatgtccatgataggaactgttggcccc

SEQ ID NO: 464 - DNA, 91 bp, Zea mays
  misc_feature: Incyte ID No: 700342784H1
  unsure 41, 46, 57, 60, 63-64: a, t, c, g, or other
tcctcgatccgatccgccgagtgcacaccacctttccccantccgntcgaatcgatngcngcnnagggcgagaagaagatgataaccctgg

SEQ ID NO: 465 - DNA, 93 bp, Zea mays
  misc_feature: Incyte ID No: 700342785H1
  unsure 37: a, t, c, g, or other
cttgtggcggccaagcgttcatagcgacgtacgcttnttgatccttccgatgtacggctcttcctatcattgtgaagcagaattcaccaagcg

SEQ ID NO: 466 - DNA, 283 bp, Zea mays
  misc_feature: Incyte ID No: 700342786H1
cctgcacagcggaacctaactccgccccccacactctatccacagcagccaatgtcctcttcatcagaaaactacagataccacagattttcctcttcgtcaatacctgattcaagtggtggttcaaaaagccgagcgaaccttaatatatgatgggatatgtaagtccttatccattatcacctggagtgtgggaaaaaaacatgacacctgggttttttggttctcaggtttttgatctttttgagttgttcatctgtctttgatttgattgtaatatgtg

SEQ ID NO: 467 - DNA, 138 bp, Zea mays
  misc_feature: Incyte ID No: 700342787H1
ggcatttgatcccaaggataggccaactcctgaagaggcattggctgatccgtattttaaaggcctcgcgaaagtagagagagaaccatcatgccagccaataacaaaaatggagttcgagtttgagcgaagaaaggt

SEQ ID NO: 468 - DNA, 279 bp, Zea mays
  misc_feature: Incyte ID No: 700342788H1
  unsure 24-25, 70-71, 119, 126, 203, 212, 216, 231, 275: a, t, c, g, or other
ccttaacacaacacagaggaagcnngcggcggcgatcgggcgatggcatggcgggcgagcctgtctcggnncctaaaggagatccgcgtcctcttctgtcagtcctccccggccagcgncgccgcncgaagaactatggtgacatcaaggctcgcaacccctccctcgccttcattgtccgcgagtgctccggtgtccagccntagctctgngcgngctacgatatgggtntggagatatgcgtgaacttggatggcctgacggaagcacagttnatag

SEQ ID NO: 469 - DNA, 281 bp, Zea mays
  misc_feature: Incyte ID No: 700342790H1
  unsure 26, 43, 154, 179-204: a, t, c, g, or other
atctctcaccacctctcccctcagcntctccccacctttggtnaggcaggctcaggcaaagggggcggccaacaaggacgagcgatggcgaccaaggtcatctgcttccttgtgctcgcatccctgctcctcgccgtcgcctttcccgtgtctngctctgcggcagcaggtgaagaagnnnnnnnnnnnnnnnnnnnnnnnnnncagtgttagcggaagggaggcggcaacctgaatccctgggagtgctcgcccaagtgcgggtcgcggtgctccaagac

SEQ ID NO: 470 - DNA, 191 bp, Zea mays
  misc_feature: Incyte ID No: 700342791H1
  unsure 44, 104-106, 171: a, t, c, g, or other
tccttcaccaaggcgtcttcactgtctgagcaagtcactatcancctgtcgtccgagcttccagtggtggtcgagtacaagatcgctgagatgggttacattannntttacctggcccccaagatcgacgatgacgaggagatgaagccctgatggcctgtgacgacatantgctcgtgttgcctgctctt

SEQ ID NO: 471 - DNA, 87 bp, Zea mays
  misc_feature: Incyte ID No: 700342792H1
  unsure 59, 84: a, t, c, g, or other
aggagctaacaaacttggtgctgcccaagctgcgtcatgatcttccctgtgagaaacgntgctggtgcttttagttgcagtggntgc

SEQ ID NO: 472 - DNA, 90 bp, Zea mays
  misc_feature: Incyte ID No: 700342794H1
  unsure 2, 57, 86: a, t, c, g, or other
gntcagacagcattgttgtcctgcagggtttgcaatctgcagtgcaactgcgcagantatgcttgcaggccattgtaaggaggagncggg

SEQ ID NO: 473 - DNA, 297 bp, Zea mays
  misc_feature: Incyte ID No: 700342801H1
  unsure 102-129, 217, 257, 268, 274, 276, 278, 293, 295: a, t, c, g, or other
caggtatccattctttccttttctatttgcatatatgtagcaacccacttttctatttgcatatatatatgtagtgtgtcttcagatatattgaattgtggnnnnnnnnnnnnnnnnnnnnnnnnnnnngcagagcattccattaatccaaccttattccagagtagttctgtgcactttaaagccgaacgtttgtggatccagaaagaagaaaatnttgtatgtatatatgggtagatccaggtgaccgcatggtnagctttgttanaatggncncncccaaaaaggtggtncncg

SEQ ID NO: 474 - DNA, 293 bp, Zea mays
  misc_feature: Incyte ID No: 700342802H1
  unsure 7, 17-18, 20, 66, 89, 101, 136, 158, 185-187, 192, 195, 206, 219, 233,: a, t, c, g, or other
tttcacnagagcccggnnanctgctgccctgcggccccgtctgtagctttcagcctctgggtctanagtcatggccgggtgggcggcanagccttctccantggccggagtcagtgccaggtccttgccctttgtngaaagtcacaggtcacacgagnggccccgtgtcctgcctgtctgaagcnnntcctntcnggttgcgccantttgggggtttanggttaattttaggngggcacggtttttttttcnactancnngggggggnttcgttnntttnggnnanaggtttt

SEQ ID NO: 475 - DNA, 295 bp, Zea mays
  misc_feature: Incyte ID No: 700342803H1
  unsure 80, 89, 104, 220, 222, 226, 282, 284: a, t, c, g, or other
ctcggctacacctgcaaaatggatatggcaatggcttccttcgtcgccgctacgcaccaccacggcagtcacctggccgncggcttccnctactccgcgcgagnaggcaggagcgttggccgcagcggcgtcaccatctccattagagcccagaagaagagtaatagcgactctgggagtagtagcggaggtggggacgtgcggaccagcagcgggaggntngctntggcgtcgtcggaaactgaccaaagaagatgacatgttgcgttacagttggatcgnancccttcttaga

SEQ ID NO: 476 - DNA, 289 bp, Zea mays
  misc_feature: Incyte ID No: 700342804H1
  unsure 260, 273, 279, 282, 288: a, t, c, g, or other
gactagttctagcagaaacgagagggccggagcagccgcagtcccggcgatcccgccgccggtcgccctcatacttcctgcgtcactgccttcgtttctctttccaacaatcaagatgagccgtggcgtagcgcgggtggtggtcaaagttctctgggttacctctttggaagcggtgagccccccaaaccagcagtggcaccagctgtaagtgctccacctgctgctgcaggtgctccacctgtgagaaaccactgtgnaaagcctgatggnccattnaantggtgng

SEQ ID NO: 477 - DNA, 51 bp, Zea mays
  misc_feature: Incyte ID No: 700342805H1
  unsure 33, 50: a, t, c, g, or other
ctatcttaaatagatcagtggatagtgtttttngtaaaaaaaacaaaaang

SEQ ID NO: 478 - DNA, 180 bp, Zea mays
  misc_feature: Incyte ID No: 700342806H1
  unsure 43: a, t, c, g, or other
cttgtcatcatgttgttgggctcacggctcatcatcgcaacgntaaccagatgaggtgccctgctgtgagcatggatccgctgcggtgattagcatgagtttattgggtaactagtggggagtactaaatttcctcacgtttggacgttttaactgttatgtactacgctttctcgtgtc

SEQ ID NO: 479 - DNA, 293 bp, Zea mays
  misc_feature: Incyte ID No: 700342808H1
  unsure 36-37, 51, 132, 154, 162, 166, 243: a, t, c, g, or other
aattcaactccgcatctgaatcggcactcggcagcnngccagctgccatancgaggagatggcgctcacaagaatcggtcttgctggccttgcggtcatggggcagaaccttgccctcaacattgcagaganagggttccccatctctgtgtanaacagganaacntccaaggtggacgagaccgtgcagcgtgccaaggcagaaggaaaccttcccgtctacggcttccatgaccccgcgtnctttgtgaagtccattcagaagccacgggtggtgatcatgctcgtcaagg

SEQ ID NO: 480 - DNA, 257 bp, Zea mays
  misc_feature: Incyte ID No: 700342810H1
  unsure 140: a, t, c, g, or other
aagatgaacgatgacaacttcccaaagaacttggggaaagctctgaaaaacaagggctctcaaaagaaagatttgaaacagcaagtcgtgcagcagttcaaggataccagtaagaagttgaaagggcatgtaaacaaggnctctggtatggtaaggaaatggtggaaaggggcaaagaagcctgccaaatccagcaaaagcaaaactgagctctgaagcattgttgaatcacgtcagtaaatttcatccgtcttcca

SEQ ID NO: 481 - DNA, 286 bp, Zea mays
  misc_feature: Incyte ID No: 700342811H1
  unsure 7, 15, 28, 38, 45, 62, 84, 93, 103, 107, 110, 117, 121, 131, 134,: a, t, c, g, or other
tcagcgntatgctgnaacatggactggngataatcttncaaattnggagcatctgcacatgngtctaccaatggttcttcagtngggtctcanaggtcaaccnttgncangtcctgntatnggtgggttcncgngnnatnctantccataactttttggaagntgnatgtntgtgggtgcattntntccattnncacgtggccatacaganactggaagnantgaccacgaaccatggtccttnggtaaagagtgtgaggaagtntgtcgccttgcgctantaaga

SEQ ID NO: 482 - DNA, 290 bp, Zea mays
  misc_feature: Incyte ID No: 700342813H1
attcattacttgcaagattatgctcggccacaaatgcttgctttcatgttcaggcatggccattacactgaagcatgctctctgttcttcccattcagtcaaccaaccacggaaggggaaacatctttgtcttcagctccatggagtgatcctttaacaactgattatgggacaattgatgacttgtgtgatctctgtcttggatatggtgccatggctgttttggagaatacaatacggacaataacacaatcgcccacatatcatgaggcacacatgattcagtacat

SEQ ID NO: 483 - DNA, 292 bp, Zea mays
  misc_feature: Incyte ID No: 700342814H1
attttgagacccttgtgttgtggcacttccacgagcatgagcgtgccatcctcgacgcttgcagggcttacatgtctgggacagtcgttgggtcgtctgctgggactgggagcaaccgcagatacgtccatgacaagtgctttgcagaattccacaagtcgctgacgctctacactgaacatctcagggctgagtttgctgcaaacacaagacgagtgatggagctggaaacagaagacgagatcgtgcctagcatagcagctagcgtgaaatcgtgttgaaggcaaatgcc

SEQ ID NO: 484 - DNA, 293 bp, Zea mays
  misc_feature: Incyte ID No: 700342815H1
  unsure 32: a, t, c, g, or other
acaaattcaacaaaaaatgaaaataggaatgnaaaacacgaaacagctccaaaggaaaaaacatcaaagaagaaccggaagaaggagaaagaagtggcagagagtgttcctgtaaagcctaaaaaggaaaataggcctttggttctgccttttgaattatctgttatgggtattttattgctcatcgtattaggtggtttctatgtggtccattgtgtatgggcggcagtgaagcgtactccgcgccttcaattgtgttgacatctcgttcacgagatgggttgcatgttttt

SEQ ID NO: 485 - DNA, 305 bp, Zea mays
  misc_feature: Incyte ID No: 700342816H1
gcatggaagaaagaggcactgccacctgttgaggttcctgctgcagcaaaatggaagttcagaagtaagccttctgaccaggttatacttgactacgactatacatttacgacaccatattgtgggagtgatgctgtggttgtgaactctggcactccacaaacaagtttagatggatgcggcactttgtgttgggaggatactaatgatcggattgacattgttgccctttcagcaaaagaacccattcttttctacgacgaggttatcttgtatgaagatgagttagctgacaatggtatctc

SEQ ID NO: 486 - DNA, 246 bp, Zea mays
  misc_feature: Incyte ID No: 700342817H1
  unsure 179, 183, 199, 203, 206, 217, 232, 237, 239-240, 242-244: a, t, c, g, or other
gcgaaagaaggggaaccaaatcttggacgggaacacatagatttctttggtggaggaaggcggagggcaacaagaggaggttacaggtagcccaatagatctactgctgttgagggagttgatgcaaagctgagttgctgcgcgttggctttctttagagatggcttcagctggtgttncccnttctgggtacaagaanagcngcngcaccattttngtgccgaaaagttgnaagtnanntnnncg

SEQ ID NO: 487 - DNA, 186 bp, Zea mays
  misc_feature: Incyte ID No: 700342820H1
atagagagaaggtgttatatgcaccgggtcgccttaccggccccgctgcggattggtgggatgcatactgcgctgctcacactgctgtcaacacaattacctgggcagaattctccactcaattcagaaattaccatattcctgctggacttatgaagattaaaaggaaggagtttctaaccatca

SEQ ID NO: 488 - DNA, 286 bp, Zea mays
  misc_feature: Incyte ID No: 700342821H1
  unsure 216: a, t, c, g, or other
ggcgccgcctggccacgccttatccagatccaggattcaaagaaaccattacttcaccaccatggttcttgattcattgtcatctccgcacaggaggtcccaaaacatattcttcgtgtcatcatcaaaaaagcctcagtcatctcgtgatgacagttggtctgcactggttgagcggcaccggttcctcctgacaacacttcttgtgcttgcctnccctatgcagtatctatctgtactttgcagtgaccttgggggcatcagatgcatgcagtggttttaaagg

SEQ ID NO: 489 - DNA, 283 bp, Zea mays
  misc_feature: Incyte ID No: 700342827H1
catcgttctcaagatcaatggggaggacaccagcgtcattagcccaacccttggattcaacatcaagaccatcaagtaccacaaatactctttgaacatatgggatgttggaggacagaagacaatcaggtcttactggagaaactactttgagcagactgatggattagtttgggttgttgatagttcagacataaggaggcttgatgattgccgtgctgaactccacaatctcttgaaagaagagagactagttggagcttcattgttggtttttgcaaat

SEQ ID NO: 490 - DNA, 284 bp, Zea mays
  misc_feature: Incyte ID No: 700342828H1
acctaacgtaccctcttccgcgccgccatgtctgggaggaagaagacgcgggagcccaaggaggagaacgtgacgcttggccccgctgtccgcgagggagaacacgtctttggcgttgcgcacatcttcgcctccttcaacgacactttcatccatgtgacggatctgtctggaagggagacgctcgtccgcatcactggtggcatgaaggttaaagctgatcgtgatgagtcctcgccttatgctgctatgcttgcctcacaggatgtcgcgcaaagatgcaa

SEQ ID NO: 491 - DNA, 289 bp, Zea mays
  misc_feature: Incyte ID No: 700342831H1
  unsure 23, 44, 211, 273: a, t, c, g, or other
cttaactgttgcttctgttccanatgaaagcttcatgcaaccangagtgcagaggctgggcatgaaggagggtctgtaggaaactggaattgctgttctgtggggagccaggcatccatgcagaggcagaaactccagaaccatttagctttaaccactcccattcttgttattagtactctggtcacactgtgatgccatgaagacccancagcattagaatttgttgaataccgctctgcaacctgggcagttacttagccacctgattcntagtgtcctcatctgt

SEQ ID NO: 492 - DNA, 293 bp, Zea mays
  misc_feature: Incyte ID No: 700342832H1
agcgtgacggtctaactggtctttatagaggttttgtgccaaatgcgttaaaaaatctaccaaatagcagcattaaactgaccgtgtttgacacggtgaagacactgatagctactgggcagaaggagatggacaaattaattcaagaaaatgaggagaaaagaagctaggaaaagagccttggtcaatcttgaaggctttggtagaaagcatgcctctttgcagactccatattgctatgtttcctcgtttgctggtgacatattttaggatctaggcagcgcatctttctg

SEQ ID NO: 493 - DNA, 287 bp, Zea mays
  misc_feature: Incyte ID No: 700342833H1
  unsure 185, 225, 262, 266, 268-269, 283: a, t, c, g, or other
agggttccccttcatgcattgttggactaaactcaagaacgaacccaaatggcaagctattgttcaaggcacttcactacgaggggcagcagggatgtcaccggttggcagtgccacaccaactgcaagtgtaaacgatttggatagcgattctctaggtttaactgggaaaaggccattaggcngagactccacaaaggcatcaaggaagaaggccatgtccangtcgtcccagtccatgaagtatttgaccagaattcangacntnnaaagggcccggtanaaag

SEQ ID NO: 494 - DNA, 169 bp, Zea mays
  misc_feature: Incyte ID No: 700342834H1
  unsure 45, 76, 116, 125, 140: a, t, c, g, or other
ctgaaccgcaccaggcaccacagtcccgtgcggcagtggcagacncacagcagatacagcagcgcctccctctgcngctctgcctcttgccaaagccccccacagaattcttctcnctccccgtntctctcgcgctcggntggtgaggtgaggtggagttccgaccccg

SEQ ID NO: 495 - DNA, 279 bp, Zea mays
  misc_feature: Incyte ID No: 700342835H1
  unsure 8, 34, 45, 68, 83, 92, 179, 211, 228, 240, 242, 248, 254, 257, 264-265,: a, t, c, g, or other
cgactggntgggctaccgccgccctacgcaaggngccgagaactncgccgatatctgcgccggagtanagcgcccaccagatncaggcgctnagaaggcgcgctggccggtggatgacgatggcgggtggcgggggactgaaccggtcttcatcgagggggcagctgccgccgcaaganctgcttgacgatctctgcagccggttcctttncaatgtgcccaaggagnagtggagtcgtncnagggancctgtnccngggggannaggnnntntttaat

SEQ ID NO: 496 - DNA, 282 bp, Zea mays
  misc_feature: Incyte ID No: 700342836H1
  unsure 212: a, t, c, g, or other
gcaatcagaagctagaatgatagagcacaaagcaagcatggccgtgttagggaaggaagcagcagctgcacttgcagctgtcgagtctcaacagcaacgagtgacccttcagaggctggttggcacggcggaagcagaaaagttattccatctgagattagctgctatacttgatgacgttgaggcagagatgtcctctgagaagcaaagtnagagaatctgcaccacctatcatatcttcacataagcgtgctgagaaagctcagtacttccttgctgagg

SEQ ID NO: 497 - DNA, 279 bp, Zea mays
  misc_feature: Incyte ID No: 700342837H1
accgccgaccggcctggcctacttcttgagataatcaagatcatcgcggacacaaatattgatgtggaatcagctgagattgatactgaaggtttggttgcgaaggacaagtttcatgtaagttacagaggtggaaaactaaacagctccttatctcaggcgctgaccaattgcctgcgttattacctccgaaggcctgagacagatgaagacagctattgattgttgtgtttgtcgaaccttcctatagtgcattagaatcagaaactttggcttcag

SEQ ID NO: 498 - DNA, 277 bp, Zea mays
  misc_feature: Incyte ID No: 700342838H1
  unsure 222-225: a, t, c, g, or other
accgtccgccactgcgcacctgccggcgtctgggcgacgccccgccgccagcctgccaccaccacgacgcctgcaccggaatccgacactgtctcaaccactccgtcgtgcctatccgaagctcaacggcggagccggtgggatagggcggaggcgctgaggcctgagggggagactggacctgggctgcacgaggtaggctgtgcggtggcggaaggaatnnnntatgagcgatgcgcaggcgacaggggatggtccgcgctgcgttggctgcggt

SEQ ID NO: 499 - DNA, 278 bp, Zea mays
  misc_feature: Incyte ID No: 700342841H1
  unsure 2: a, t, c, g, or other
ancgcaaccccttccctgacagcggcggcgacatggtgctcgaggcgacgatgatctgcatagacaactcggagtggatgcggaacggcgactacgccccgtcgcggttccaggcgcaggccgatgccgtcaacctcatatgcggtgccaagacccagtcgaacccggagaacacagtaggcgtgatgacgatggccgggaagggcgtccgcgtgcttgtcactcccaccagcgacctcgggaagattctcgcctgtatgcacgggttggaagttggt

SEQ ID NO: 500 - DNA, 213 bp, Zea mays
  misc_feature: Incyte ID No: 700342842H1
aggtctctgaataacatgagtatcacaactctagaggcgcgttagacatttcgcttcatcgttccttaaatttgtagacatttttaatctgtgttattgtacatttacactagccgttcatatttgtacacaaaagtgttccattaaatacgttgtattttccaacagcaatttgtgttataaaaatattccccatattgtcagtttgtcact

SEQ ID NO: 501 - DNA, 281 bp, Zea mays
  misc_feature: Incyte ID No: 700342843H1
  unsure 2, 140, 145, 154, 212, 222, 251, 259, 279: a, t, c, g, or other
cngcagtcacaaatacgatctaggagagcaaagatgtccgaggagaaccaggccctccaacgccagctcctacttaaacaggaactggagaatttcagaatgggtgagaactgggacgacagcactcaatccaaggagcnaatcnaggcaagcntaataagcaggcaagaggcagcgataagacagagaaagagctcttgcatatgcatttncacatcagtngaagagcacatcaagatctgcgaacccantgtttgtngacccatataacttgcagtngg

SEQ ID NO: 502 - DNA, 276 bp, Zea mays
  misc_feature: Incyte ID No: 700342844H1
  unsure 81, 120, 126, 144, 181, 213, 216, 219, 252, 255, 265, 273, 275: a, t, c, g, or other
gagacgccgccgccgcaagccgtccgccttgcccctcgaaggcttggtcctccttgtatcccgacctcctccgccacaganccgtttccccgctagagttatcgttcctctgcagcgatngcgatnaagcggaccaaggcgganaagaagatcgcgtacgacaagaagctgtgcaggctgntcgatgagtacaccaaggtgctcatcgccctngcnganaacgtcgctccaagcagctccaagacatccgcnggngctcaggggngatcagtngnt

SEQ ID NO: 503 - DNA, 280 bp, Zea mays
  misc_feature: Incyte ID No: 700342845H1
  unsure 8, 232, 254, 268, 275, 279: a, t, c, g, or other
cgcaattngcccttcctcacggggttcgccatcaccggcttcatcatcactaagatgacggccaacttcaccgaggaggacctcaagaactccaagttcgttcaggagcacaagaagcgctgaccaaccaggtgttgtccgaattgcctgtctggacagccagttatgttatgatgtttgaatgaaaaattagcttctttttcttcatctaaatgcgtgcagcctatgctcnatttgtaatgtaataagaggcntctgacttgatccntaagctntttnt

SEQ ID NO: 504 - DNA, 282 bp, Zea mays
  misc_feature: Incyte ID No: 700342846H1
gctacagctcccgtctctccgccgcttgcttggaaaacgaagaaaccctcctccaccaacccaatccagctacatccgtctgggtgaactccagggccaggagcagttcgccgccttcgttcgcatcacctacgcggttcgatccaactggcaggaaggaacgtgatggccaagacgagctcgttcaagctggagcacccccttgagaagaggcagtctgaggctaatcggatcagagagaagtaccctgacagaattccagtgattgttgagaaggctgag

SEQ ID NO: 505 - DNA, 284 bp, Zea mays
  misc_feature: Incyte ID No: 700342847H1
  unsure 229, 248, 251, 255, 278: a, t, c, g, or other
caagattgaacaagaagagagacacagatgaaatggtggatatattgattgctgttgtattcagtgctttgcgtgataaatattctattgaaggacatgaagagtggatcacagagctagactcatccactgaagaaaagttttcacgccatctaatcattcgtatacccaagattgcatttaaagacaactcccatgttggtgcgtttgtctgtgaggtctgttcacnaattgcagctcagcggacnacnaatnatggccttgataaactttatatnacaaaa

SEQ ID NO: 506 - DNA, 285 bp, Zea mays
  misc_feature: Incyte ID No: 700342848H1
  unsure 266: a, t, c, g, or other
gttgttctgttagtcgctaacttagtaagtgcttttcttatagaaccccttctgactgagcaatatgcctccttgtattataaaatctttctgataatgcattagaaggtttttttgtcgattagtaaaagtgctttccatgttactttattcagagctaataagtgctttccttagttttctagtaactaggtgtaaaaatcatgtgttgcagctttatagttttaaaatattttagataattctaaactatgaacctccttaanatcactgtctgccagatta

SEQ ID NO: 507 - DNA, 137 bp, Zea mays
  misc_feature: Incyte ID No: 700342849H1
  unsure 17, 96, 115-116, 121: a, t, c, g, or other
cgtattggaagcatttnttgactgttaccctgacagtcaagcacctgatgtgttactgaactcattggcgattccggattcacttggggttctganacctgctagagaccttgtnncatantgatgcaccctggatg

SEQ ID NO: 508 - DNA, 107 bp, Zea mays
  misc_feature: Incyte ID No: 700342851H1
  unsure 2, 18, 70, 78, 81: a, t, c, g, or other
anagcatcgaggactgcntgacggctggttgctacgccgccaatgttgtcatccagcgcccaggctgtanctacccanagnagcctgaacttcaactagtgcaatat

SEQ ID NO: 509 - DNA, 288 bp, Zea mays
  misc_feature: Incyte ID No: 700342853H1
  unsure 134, 218, 237: a, t, c, g, or other
ataggtttcttgtgctgtcttcagatggattgtatcaatatttcagcaatgatgaggtagtttcgcatgtgctttggttcatggaaaatgtaccagagggagacccagcgcaataccttgtagctgaacttctntgtcgggcagccaagaagaatggaatgaattttctcgagctactggatatcccccaggggcgatcgtcggaaataccatgacgntgtttctgttatggtagtntcgcttgaaggaagaatctggcgatcttctggatgagtgtttgaaacatga

SEQ ID NO: 510 - DNA, 110 bp, Zea mays
  misc_feature: Incyte ID No: 700342854H1
  unsure 45, 57, 61, 69, 97: a, t, c, g, or other
cggacagggtaatctttcatgccacatcattggctttttttttcnttaatatctgcntttnttcttctnttgcaaccaaataactgcagcacatgangcattgcacttta

SEQ ID NO: 511 - DNA, 103 bp, Zea mays
  misc_feature: Incyte ID No: 700342855H1
  unsure 71, 101: a, t, c, g, or other
ctccaaattcccaattgtgcaacctgctcctgcagagttcgagtgaccatgtgcggggcgcggaaagggcnggaatgggctgggaaaggggcggcgcgaantt

SEQ ID NO: 512 - DNA, 125 bp, Zea mays
  misc_feature: Incyte ID No: 700342856H1
  unsure 3, 53, 68, 70, 97: a, t, c, g, or other
ggncagatttgcatggtacggttcatttatcaagttatgcccaccccctcttngtatgttgtggctcnangtacaagtacaaccaatcaagccaagnaagtttgattggttgtacttgtacctgt

SEQ ID NO: 513 - DNA, 284 bp, Zea mays
  misc_feature: Incyte ID No: 700342858H1
  unsure 185, 230: a, t, c, g, or other
caacaacccactgatagcagagatcaggaagaagatccccagcgagttccttcgaagcattctgccgaacggtagccatgaccacccgctaaagatgccccttccaaatgtcatcaaatcagatgtgttgaaaaaggctccggagtttaagtttggctggaggactgacgaagagttcgcgaganagacacttgcaggcgtcttcgagcgcaccgtgttccctgcaaagnacgcgctggggatgtcggcagacgtgtacaagacctggaattcaacgagcaggc

SEQ ID NO: 514 - DNA, 286 bp, Zea mays
  misc_feature: Incyte ID No: 700342859H1
  unsure 14, 21, 88, 233, 261, 276: a, t, c, g, or other
cgactttggacatnaccagtnatcgattatgacctggctgtgctcatgcagcctatgctaatgcttgggatcagcattggtgttattnttaatgttatattccctgactggctggtcacagttctgctgataattcttttcctaggcacatccacaaaagcctttctgaagggcattgagacatggaagaaagagacagtaatccaaagggaggctgcgaaacttttggagcnaactgcaggtgaggaagcagagtatgcngcacttcctactggnccagatgttg

SEQ ID NO: 515 - DNA, 101 bp, Zea mays
  misc_feature: Incyte ID No: 700342860H1
  unsure 3-4, 7, 19, 33, 49, 52, 87, 93: a, t, c, g, or other
aanntcncaaaccctagcngcctcctgcaagtntcagtagctcaggaanctncgccatggcgagttagacggagaccttgcgcatgncaggtntgagatct

SEQ ID NO: 516 - DNA, 288 bp, Zea mays
  misc_feature: Incyte ID No: 700342861H1
  unsure 191: a, t, c, g, or other
atcaaggaaggtagcactgtaagtgtgatgggggttgtccaaaggaacgttaacgttactgatgattgttcctccatcagagcccatctcaactggttgtcagtgggccaagtgcgttctcccgaccaaccttgacgggcttgttttaagatgcgaagatacttcgaacattgatgtggtgccagtttaantagcggtgaagagtcgttgccaaagaaagtgtctgttaaatatgagtctgaattgtttcatgcaatgttagttgacaaaaatgtgcaaatgttgggg

SEQ ID NO: 517 - DNA, 107 bp, Zea mays
  misc_feature: Incyte ID No: 700342863H1
  unsure 22, 52: a, t, c, g, or other
gagagcagcagaagcttcagtngcgcttgtttcaactgcggcgaatccggtncaccgtgcatcggactgcccaaacaagtagatggcgcattcttccctgcccaagc

SEQ ID NO: 518 - DNA, 117 bp, Zea mays
  misc_feature: Incyte ID No: 700342865H1
cgtctggctggacaatgagaacaaaaacagcatggtgctgcaggccgttgtggatgcagacttgcggttcagagacgtcgtcagtggctggcctgggagcatggacgacacgtgcat

SEQ ID NO: 519 - DNA, 281 bp, Zea mays
  misc_feature: Incyte ID No: 700342869H1
tcggattgataacttcattgatggtctatctgctctgctggacgagctcaatgaagagacttttgagcaccatagaagtggtttaatagctgataaactggaaaaggaaccttcacttagctaccaaactagtgattattggtctcagatcgctgataaaaggtacatgtttgatatgtcaaaactggaagctgaagagcttaagacagttcagaaggctgatgttatagcttggtacaacacatacataagatcatcgtccccaaagcgaagacgtctag

SEQ ID NO: 520 - DNA, 116 bp, Zea mays
  misc_feature: Incyte ID No: 700342870H1
  unsure 14, 16, 19-20, 31, 53, 58, 80, 89, 111: a, t, c, g, or other
aaacagcacatcgnanaanncgaactcagcnatggcggaggtggagcagcccnaggangcggtgaagctcttcaaccgcnggaccttcnacgatgtccaggtgaacgatanctcgc

SEQ ID NO: 521 - DNA, 135 bp, Zea mays
  misc_feature: Incyte ID No: 700342871H1
  unsure 127-128: a, t, c, g, or other
cccgatcacttcaacctaaatttgcttacttggccacatgaagttgatctactcataatattgggttgtacaatatacttagggatcggcggcacaagggccccagatttaccatactccacctgcnnagatact

SEQ ID NO: 522 - DNA, 278 bp, Zea mays
  misc_feature: Incyte ID No: 700342872H1
  unsure 235: a, t, c, g, or other
cgctgatcaagcatgagggtacccagtctgctggcagagctggtaagaagcctcggcggaacatcaacgtgcacagcgcatacctccacgtgctcggggactccgtccagagcgtcggggtcatggtgggcggggcgatcatctggtacaagccggagtggaaggtcatcgacctcatctgcacgctcgtcttctcggtggtggtgctgttcaccacgatccggatgctgcgcanatcctcgaagtgttgatggagagcacgccccgcgagatcgacg

SEQ ID NO: 523 - DNA, 127 bp, Zea mays
  misc_feature: Incyte ID No: 700342873H1
  unsure 61: a, t, c, g, or other
tccagccgccaccaggtgcagagtctttcgtcatctcttctccggcgaagaacccccagtngcccaccagatcacttgttaaactttgttgaggggtgatggcggtttctttcgcaaacctcaactc

SEQ ID NO: 524 - DNA, 276 bp, Zea mays
  misc_feature: Incyte ID No: 700342874H1
  unsure 2, 242, 266: a, t, c, g, or other
tnggaacaaaggtctggcctccagaaaatgaaggctgtaaaacattgttttgtggtgatcctattggcaaaggcagagaagttgtttgtggttgcgtttatcctggatcagtggaatgtgttcggtttcatgtagcagaatggagacttaagttgaaacatgaacttggtgcagctttctatgcatggggattcaatcgtatgggtgaggagattgcactttcttggacagatgaagaggangcaagttcaaggccgcagcacaanatagtgctgg

SEQ ID NO: 525 - DNA, 277 bp, Zea mays
  misc_feature: Incyte ID No: 700342875H1
  unsure 175, 231, 252, 262, 271: a, t, c, g, or other
gccaggagaccgagggcgccgagaagctcattgaacggatgctgcaaacaggaacatttccagacgatgaatcctacaatttggttgtaggcctgcttatcagacagaacctcgttgattcatctctgaagtatttggatctgatgcttaaatcgggctacatgttatcactaantgttttcacagattatatccgagcatgtatgagatctgggaggttggacacgttgncatcaattatagagaaatgcnagacaactgntaagaacanagtctg

SEQ ID NO: 526 - DNA, 281 bp, Zea mays
  misc_feature: Incyte ID No: 700342883H1
  unsure 12, 18-19, 21, 49, 143, 145: a, t, c, g, or other
cgaacgtatganccttcnncncgcggaccatctctttctgagctttganaacagatggtccgcgtgcagaaggtcataaagagatgcaaactggctgcagttttcgccgaggtcgaccgtgtactgaggccacagggcaagcngntcgtgagggacaccgcggacacgataaatgagctggagagcatggccaagtccgtgcagtgggaggtgcggatgacctacaccaagggcagcgagggcctgcttctgcgtcgagaagtcgatgtggcggcccaaag

SEQ ID NO: 527 - DNA, 276 bp, Zea mays
  misc_feature: Incyte ID No: 700342885H1
  unsure 233: a, t, c, g, or other
gtcttgtgttgttcggagcgggcagcagcacacagccccatcccaatcctagtcgatcttcttcccctcctcaaggaagaaaagaagctgaaccatggggaagagaaagtcagctgctaagccacctcctaagaagcggatggacaagcttgacactgtcttttcctgcccattctgcaaccacgggagtagtgttgagtgccgaattgacatgaagaatctgattggcgaanatcttgtagaatctgtcaggaaaacttcagcacaactgttaat

SEQ ID NO: 528 - DNA, 273 bp, Zea mays
  misc_feature: Incyte ID No: 700342886H1
  unsure 16, 84, 180: a, t, c, g, or other
tgattctctgggaggnaatcactcataagcattgttaacttatggttccggtaaggtatatgttgtccatcagaagataacaanccttatgagtgattctctgggagggaatgcgaagaccttgatgtttgtgaatgtttcaccagcagagtctaacttggaggagacttacaactcgcncctgtatgcttcacgcgttcgatgcattgttaatgatacgagcaagcatgttgctccaaaagaaatcatgagattgaagaagttgatcgccta

SEQ ID NO: 529 - DNA, 272 bp, Zea mays
  misc_feature: Incyte ID No: 700342890H1
  unsure 67, 131, 219: a, t, c, g, or other
aggaaatgaaacaatccacgcggaacgccgccgccgccattcccatggttttccatgctcggttgcnagccagcaattccatttcagtgtcctccctcgtctcgagaccttgccccatccagcccaacgcnccgtccatcaactgaatagcttggcggtgtaaccctgtcgtgtgcgatgagctcctcgccgttgatcaccgccgcggcgtcggctgcngtggtggcgctggctgtcgccaaccgcgtgctctacaagctcgcgcttgtgct

SEQ ID NO: 530 - DNA, 276 bp, Zea mays
  misc_feature: Incyte ID No: 700342893H1
  unsure 200: a, t, c, g, or other
ccttggcgacgcagaggatgtcagggaagtctcgggaacatacggcgcatttgaaggtgccattacgctgacctcgctcaggctcgtcaccagcagcagaacctggggcccctggggggtcgagaacgggacgcgtttctccatcacggcgcccaacggcagcagcatcgcgggattctatgcgcgggcgggaaccaggntcgtcgacgctatcggtgtttacatacgtccagtgggtgccaggcaggcctcgtgaacaagcgagccgagtcgctt

SEQ ID NO: 531 - DNA, 140 bp, Zea mays
  misc_feature: Incyte ID No: 700342894H1
  unsure 2, 35: a, t, c, g, or other
cngggtagatgctgatggaggagacgatccgtgtnacgcgcgccaagctaaggaggcgcaccgccaccgaggattctgctgggaattagctgcatgccgttgttttccctgcacattgtattgatctttttccgagtttt

SEQ ID NO: 532 - DNA, 304 bp, Zea mays
  misc_feature: Incyte ID No: 700342903H1
  unsure 50: a, t, c, g, or other
ccacttgagcgagccctaggccctagcaggcgaaagccatggcgtccttnggtgttcgtgccgccgccgccgctcgtcttccctccctccgtcctcgccgcgacggcagcagggtgctcaccggcttgagggtcgggacagggcactacggcgtgcgtctcgcgctttcttcgtccacatcagcttctcccagagagttcaaggtcgctggccttcctgtcgatgacagcagtttgggcccgggggatgaatatgagtttggactctatactcctaagctgcttgcagttactggagatgatta

SEQ ID NO: 533 - DNA, 300 bp, Zea mays
  misc_feature: Incyte ID No: 700342905H1
  unsure 3-4, 11, 14, 30, 103, 140, 192, 220, 222, 230, 240, 267, 274, 294: a, t, c, g, or other
cannattacanatntctcttacatcttgtnagcagtatcgaagagcagatgctaaggccttggttgatagggttgctgatgatgcagtctccacaactagganggtaggattaggccttaaactttgatgtgtctttccncctaaatttgatgcatgtaaaccttattctcagtaaaactttagaatagcgnaaaaaatctaggagatgaagtaatggtngnactctaantaatattagnggctttattttctgctgatttgacagnaatttanatgttgtttttcctatatgnttctag

SEQ ID NO: 534 - DNA, 305 bp, Zea mays
  misc_feature: Incyte ID No: 700342906H1
  unsure 73, 86, 101, 186, 241, 253-254, 264, 284, 293, 296: a, t, c, g, or other
tcaactgtcaacaaaggcaagtggggaatctagacttctacctccacctggcagtaacaagatggcaccctcncttcccctgacanagcagtgtcagaganagctggctaaaacaggcgggttaaataagattcaagtctcagaacatgatacaaacatgtccaggtttcagtaaaaaatcattcnttataccaagaagcaaagaaatctccaacagattgtaaaaagaaaaagaaccagntatcaagactannatgataaggntgttagaattacccaacaantattttacngcngcactgaca

SEQ ID NO: 535 - DNA, 300 bp, Zea mays
  misc_feature: Incyte ID No: 700342907H1
  unsure 36: a, t, c, g, or other
gagaacgcgatttgttctgttgttcggtccccaatnttcgcctccgctccgcccgccccgacccagatcaggagctgagagatggacgccaacaggcgccaaggtgggattcagcagttgctggctgcggacaggaggctcagcaaattgtgaatgcggctagagctgctaagtcagcaaggcttaggcaagcgaaagaggaggcagagagggaaatagccgaataccgtgcccagatggaggctgagttccagaggaaggtcgcagagagcattgtgactctggtgcgaacgtcaagcg

SEQ ID NO: 536 - DNA, 297 bp, Zea mays
  misc_feature: Incyte ID No: 700342910H1
ttatactgttcccgttctttcacagggggcactggactcgaataagtgagccggtcggtggccgcttgtcctacaaacctccaatctatgacataaacgcaccagatctgtacatccctttcatggcatttggaagcttcatcatcctttcagggtttacattgggtttcatgggaaagtttactccagcagctataaatctgcagtttacaagggcgctcatcggctggggcttccagctcatggtcctgaaagtctgctctactcgatgggtggtggcgaggtgccactgctcga

SEQ ID NO: 537 - DNA, 204 bp, Zea mays
  misc_feature: Incyte ID No: 700342911H1
  unsure 148, 158, 168, 177, 181, 189, 193-196, 198-199, 202-203: a, t, c, g, or other
aaaatcagggattctctttttttttttgcactacaatctgtgacgttttaatatttgatgactagttgttcatgcattgctattgtatttgcatgaaattggatacagagggctttctccttagtgattttattcttaaatccttctnaaaaaaaaanaaaaaaaaanaaaaaaaanaaanaaaaaaanaaannnngnnggnna

SEQ ID NO: 538 - DNA, 100 bp, Zea mays
  misc_feature: Incyte ID No: 700342913H1
cagcccgtgtcccagtccctcgtcttgcactgcagaatttacatctaagaagaaaatgtatttttgaaagggcgatggctggcctcatccctcactaatt

SEQ ID NO: 539 - DNA, 294 bp, Zea mays
  misc_feature: Incyte ID No: 700342914H1
  unsure 86, 152-153, 270: a, t, c, g, or other
ccttgtctccaagtattggagcctgaccttctgtgtctgctgctcttctacttgtcaccatgaagttcctggcactccttgtgttncttggtgtttccactattctagtctcttgccaggacgcagggacagacactgctgacacttctgannctgctgatggaaccactgactctggaactcaggcagacgctgcctgatggacagcaagatgctgagtcctctgatggaactagtgatgccggcgatggtgatgcgcctgctgaccangatcatgaacagacagatgatgag

SEQ ID NO: 540 - DNA, 296 bp, Zea mays
  misc_feature: Incyte ID No: 700342915H1
  unsure 35, 63, 66, 175, 266: a, t, c, g, or other
acaccaatcaccgtcgctctcgaagccaaccggcnccgtcggggcgtactctcagacctcgtngcngccgctggggggtaccaggcggcgctgtacctcgaggcgctctcgcgcttcgtgttgtccatgcacgaccccgaggtgctccgccgcttcgaccagtgtcgcgcctcgnctcgtagctagttacccttcttgttctcaaggcatctttgggaagcatgagatgggctagcaagtggctgaggcagtgcgaaacagaacanaaccaagacgacgagtggccagttgggcgt

SEQ ID NO: 541 - DNA, 210 bp, Zea mays
  misc_feature: Incyte ID No: 700342918H1
  unsure 124, 181, 207: a, t, c, g, or other
actagtgctcatcaagcacactgtacgtacgtacgtatgtactcgatcgcgtggtcattcatcgaccatcatcgtttatatgctgtcacgcacagtgcgggacggccagtgttgcattattgtntgttttatttcgcatggattaggatcgagccgcgccaatggtagattctacggaatnaatataataacattgttatgattganaaa

SEQ ID NO: 542 - DNA, 298 bp, Zea mays
  misc_feature: Incyte ID No: 700342921H1
  unsure 43, 94, 269, 297: a, t, c, g, or other
gctgggacaccgctcccgcaccaaaccaaatcacctgttcccncgacctcctccccggcgtacctccagtctccagagatccacacgaccacancgatccaccaccatctgcatcggcaatggacgccgcgccacccaccataaccaagtccccgccgtccctggttccaccagcggggcccactcccggtggttccctcccgctctcctccatcgacaagaccgccgccgtccgtgtctccgtcgacttcatccaggtcttccccgcncctacgtcggggaaggaggactggagcnc

SEQ ID NO: 543 - DNA, 297 bp, Zea mays
  misc_feature: Incyte ID No: 700342922H1
ctaaacaagcaagatatgacaaagaagccgtgatcaagtttttccgcttgcttattagaagaagatacttctcaaacgaacctcctgccccaagtccctggtcccttgctccaagagaagataccatccttcctatggagactcttggagatggcgcagatagcttccaaaggaaaaggtaaaacatgaaaaaggtcacccttcctaaaaagcaaacctcaaatgaaccaaacagaacgatgacgtaaatggggaaatactctattcatctgtgcaaaattggttcaaaaaatgtaa

SEQ ID NO: 544 - DNA, 258 bp, Zea mays
  misc_feature: Incyte ID No: 700342923H1
  unsure 154-155, 158, 166, 168, 170, 173, 175-176, 189-190, 193, 198, 203,: a, t, c, g, or other
taacagcctaacaggggatacaatagtgctgcctagggcagcgggcgaacaggcacactatcgctattacgtttctagcagccattactaggcgatatgcttgtttatattgttttttttgtacaattttgtgcatcatttttcaaaataaaannaanaaaaaaanananaanannaaagaaaaaaaannaanaaaanaaaangggggnnncccnntntagtnggccnnncccccnngggttttttnnnggggggngt

SEQ ID NO: 545 - DNA, 294 bp, Zea mays
  misc_feature: Incyte ID No: 700342924H1
ttgctacaccaccacacccacaccccatcccagcacacaacaagcagcctggtttacggtagctgctagcaaaacaatggagaaccctgctccgagcatcgtagtggccatcgccgcacccgtggcggcggagttcgtgaaactcaccttccgtgccctgtatatgcgccgggctggtcctggcagcagggagatgactgtgccgggaaggccatccgaccagctgggcaggagagtcgtcactgacagccccgtgtacgacggccgtggcgccgacgcccgcctcgtggctcg

SEQ ID NO: 546 - DNA, 292 bp, Zea mays
  misc_feature: Incyte ID No: 700342927H1
  unsure 7, 16, 84, 86, 93, 121: a, t, c, g, or other
ccaaaanatccaagtnaccctacacattcatgtgctatgagttttgataattttgttcagataactggtggtgctgaagctgtngnaaaagcnctgtttggagtatcaaccatcatttacnagcacccagcaaaagagaacattcctcttgaaacttcaattcctgatcctactccaagcattataatcccttcagaacttcctgtctatcctgctagtaacttttactcggccccagatgctgctataccttctgtacatccaagcatgtctgtcttagggtcaacacgtc

SEQ ID NO: 547 - DNA, 292 bp, Zea mays
  misc_feature: Incyte ID No: 700342932H1
  unsure 70: a, t, c, g, or other
cccaagtcgtcgatcattcctgtcgaagccaatccaccctgtttcatttccagaacatgcactagaagcncaggaaactcgaagtcatgttgcaagcgcaagtccaacaatcctctgtgctctgaatacaagggaacaggagaactttgcttcccggactacggtagcggccgtcatggggagtcaggaaattggagtgctgcaagcagcatggatcttactgatctatcagaacaacctgaagctggacaagctggactactgcgtcctaacaatgtaatgcagaaaacaa

SEQ ID NO: 548 - DNA, 295 bp, Zea mays
  misc_feature: Incyte ID No: 700342933H1
  unsure 25, 27, 32, 34, 42, 113, 115, 157, 174, 239, 244, 249, 275, 279: a, t, c, g, or other
ccggcagacacgagggagcgcgtgngngggananggcatggnatctctcgtcccggcagtcccgtgctcaagcaaaagctctctcctcttcttccgctcagtgcaccaatcantncaacatactggcctgaggtcattgagttggtgaaagggaagnatggggtatcatgggcntctcatccaagtggattaaatccttggttggcataaggaagcaagaaaaagcgcagaatgcaganaagcnagaanaagggtggaacgctgagagcagtganactnagagctctgctaatcc

SEQ ID NO: 549 - DNA, 292 bp, Zea mays
  misc_feature: Incyte ID No: 700342935H1
  unsure 36, 147, 212: a, t, c, g, or other
acaagcctcagatctcagtcacctgcgccgccgctnccgttcgtgtggaggggagaagagaggaaatggcggcgaccgagggcgtgctcctggggatgggcaaccccctcctcgacatctccgccgtcgtcgatgacgccttcctgnccaaagtatgacatcaagctgaacaatgctattctcgctgaggagaagcacttgcctatgtatgncgagttggctagcaagagcaatgttgaatatattgccggaggagccacccagaactctatcagggttgcccaatggatgc

SEQ ID NO: 550 - DNA, 291 bp, Zea mays
  misc_feature: Incyte ID No: 700342936H1
  unsure 2: a, t, c, g, or other
anatcctcggggtgcccaagtcggcgtcccaggacgacctcaagaaggcctaccgcaaggctgctatcaagaaccaccccgacaagggcggtgaccccgagaagttcaaggagctcgcacaagcctatgaggttttgagtgatccagagaaacgacgagatttatgatcagtatggtgaagatgcccttaaggaaggaatgggcggtggaggatcccatgttgatccatttgacatcttctcatcattttttggaccctcttttggaggaggtggtgggagcagcagggga

SEQ ID NO: 551 - DNA, 288 bp, Zea mays
  misc_feature: Incyte ID No: 700342937H1
  unsure 4, 255: a, t, c, g, or other
cggnaggaacagccacgccaatatacagagcgagccagcacacagtattttttttttcatacggctggtctgcaattgggtgcctcgactgcttgctagccgccggattaatctttccctaccctaaggctcaggttttagtgggatatgatgaagctaaaaagtggacgacgaccgttctataaggatgttaagcctgtagactgccgttcaggctcaagtcttccacatttggctgctcaagcaaagtttgcngccatgaacatgcagactgaagatgtcaagcct

SEQ ID NO: 552 - DNA, 289 bp, Zea mays
  misc_feature: Incyte ID No: 700342938H1
ctaggtgagcagcttgatcttctccagagggaactacaagcaagggagctctcgcaaatgcaacttaaagatgaagttataagaatcgagaccgacatcatggatgcagttgccaaagctgggtctaggtctgacaaagataatgagcttttaaagatcttatctgatgtttcaccaaggaatgtccagaacctcaacaaccttttgaatgctaaggatacagaaattgcgaggttgagagaggaaatcagaatattgtctgctcactggacgaacaaaaccaaggaac

SEQ ID NO: 553 - DNA, 286 bp, Zea mays
  misc_feature: Incyte ID No: 700342940H1
  unsure 31: a, t, c, g, or other
caaatgcttaactttataactgataaagttnccaatcacaagatttacttaatttatactattatcttctgttgcagtattgattataaatgttgcaaacttgcaagtaccaacgactcttttcacttaaaatgctgattctattttccatttctactatttgtattgtatattatttattggatagagattagccgcgaattccatgcggaggccagagcacctgtaatgattctggggcagttttttgcgcgcagtaaagaagtctacataattgccaagaatc

SEQ ID NO: 554 - DNA, 287 bp, Zea mays
  misc_feature: Incyte ID No: 700342942H1
  unsure 28, 57: a, t, c, g, or other
ggagaaacagatgtttacgatgcatgtnaggttgagagagaagaatgcacacaaganagaagccaatcacaagaggattttggaagcattgctcactgtacttgcacaacagttgatgatcaggtgacagttcgagaaggatattacacgaatgaagcacaagaaggaccaagacatgctcatgatgagccagacactctgtatattgaaggacttgataaattcatttgccgcgaaaacattcgcaacgaagagtccagtccagcagaacaaagcagagacgatat

SEQ ID NO: 555 - DNA, 283 bp, Zea mays
  misc_feature: Incyte ID No: 700342944H1
  unsure 211: a, t, c, g, or other
cttgtacattcaacattggatcagtgcgacagtgctgattttaccctagaagttttcttcaatatgaaaaatcacacagtgtatgtgaagaaaaggccttacctgaaagtgtttcttgagaaggttgctcagatgtttgagcttgtcattttcacagctagtcagagaatctatgctgagcaacttatagataaacttgatcctgatgganaatatatctcacggcgtatttatcgtgaatcttgtatattctctgacggttgctatacaaaggatctgacaa

SEQ ID NO: 556 - DNA, 281 bp, Zea mays
  misc_feature: Incyte ID No: 700342945H1
  unsure 17, 23, 47, 51, 56, 74, 241: a, t, c, g, or other
ctgcatctctcgcccanctccgntccgcctactgctgctggtggtanggangcggngaaggaggcccttgcgcncgcccgccggccggatcagagccgtagcaaccaccacccatggcggacgtgcacgaacctttggtgcgccgtaaaaggaagaaggttttggtggactacttggtgaagttccgatggatcctcgtgatcttcgtggtccttcctatttcaactctgatctacttcancatcttcctgggcgacatgtggtccgccatgaagtcggag

SEQ ID NO: 557 - DNA, 283 bp, Zea mays
  misc_feature: Incyte ID No: 700342947H1
  unsure 277: a, t, c, g, or other
atgaaacttactgagttgaataacttaatatatttctgttttcattcccaagggaggccatgtctggagatagaccttgaatttaataaattttaggcactataccatttcagtggagaaaattgttgggaaatttggggggatggatatataagggggaggaagtcactggccagtttgaggtgcttccattggtctgggtaactagccatttcttcctgattgtgcctagtatatcccagacagtttgtttctatgcagaagaattttatatganattttc

SEQ ID NO: 558 - DNA, 298 bp, Zea mays
  misc_feature: Incyte ID No: 700342952H1
ccgcagccgctgcttttcgttcgtcttcatcctacgcgagggcgaaacccagaaaccctctccctcctgtactccggccgacacatccaggggcgatgacgctgggtagctccggcgccggatcgagcgtcgtcgttcctcgaaacttcaggctattagaggagctcgagcgtggagagaagggcattggtgatgggacagtgagctatggaatggatgatgctgatgacatctacatgcggtcatggactggtaccatcattggccctcacaatactgtacatgagggtcgcatcta

SEQ ID NO: 559 - DNA, 300 bp, Zea mays
  misc_feature: Incyte ID No: 700342953H1
  unsure 9, 88, 90, 95, 103: a, t, c, g, or other
cgtctgtgnaggacgtctttgagagcctgattgtgttttctgaagcctggtgggtgggaacaaaagaagataatccggaagagctcananttganctttccanaagaattccaaaatgatggcacgacagcagactgtgatttcagaggtggtgcaggtggtgccatcgatgaagcaactggaagcaaagctggaaaggaaattgcagaacctcgttccccaaagtttgcatctgatgacgatgctcctgaggattcaaatcataaggatgagaataacacacagactatgagtggaaca

SEQ ID NO: 560 - DNA, 290 bp, Zea mays
  misc_feature: Incyte ID No: 700342959H1
cgagatccagtccggcgttgaggaagctgaatcgctgattcggaagatggacctggaggcaaggagcctacagcctagcattaaggctggtttgcttgcaaagctgagggagtataaatctgacctcaacaacgtcaagagtgagctcaagaggatatctgcgcccaatgccaggcaggctacccgggaggagctcctggagtctggaatggctgatactctcgcggtgtctactgatcagaggggaagattgatgatgacaactgaaagactgaatcagtccactgaca

SEQ ID NO: 561 - DNA, 289 bp, Zea mays
  misc_feature: Incyte ID No: 700342961H1
  unsure 191: a, t, c, g, or other
gtatcaggagaccgtagctgtggttgaggcaccaaccccggttcttggggaaccgatggacctgatgactgccctgcagctcgtcatgaagaagtcaggtgctcacgatggccttgtgaagggtcttcgtgaggctgccaaagccatcgagaagcatgccgctcagctctgcgtgcttgccgaggactgcnaccagcctgattatgtcaagctggtgaaggctctctgcgctgagcacaatgtccacctggttactgtgcctagcgccaaaactcttggagagtgggct

SEQ ID NO: 562 - DNA, 292 bp, Zea mays
  misc_feature: Incyte ID No: 700342962H1
  unsure 288: a, t, c, g, or other
accacccaccacccagcgcaaggccaggcggcccaggccaccactccttaccttttccccctcttttgttccttcattcacgaatcccgtcttcttcctttcttggccttctccacctcatcgccgagacgagatctctcccacacgaggaagggagagatgggcgggcgggtggatcacgagtactcctacctgttcaagatggtcctcatcggagacagcggcgtcggcaagtccaatatcctctctcgcttcacgcgcaaccacttctccctcgactccaagtcnacca

SEQ ID NO: 563 - DNA, 292 bp, Zea mays
  misc_feature: Incyte ID No: 700342968H1
gtcaccagcctgaacacgataacgttctacggctacgccgagagcgtcttcaccatcgaggtgaaaggcgagcaggatgttgtgatggtggagctaaggagcctcttgtccaatatcgtggaggccccaagcaactgatgagattcccgatggcaacagctcgtagatagagctcacatgtttcagtgcagaaacctgactttcgacgaagaactctagcggtggagtgtttgtgcaggcagtgtaacaagagtacatggtcaaactggtttactgacggataaaggctgga

SEQ ID NO: 564 - DNA, 272 bp, Zea mays
  misc_feature: Incyte ID No: 700342971H1
atggatcccgatgagacgagcaaggaaacagaggagagagaagaggaggtgtcagtgagcgtgaggtggtgcagtattattggtaggtgaggcacaaattatgaggaggacagggatggctacctgcattggatctggtggatgcgtagatccatccactccgcactgctccacccttttctcctgcagtgcagctccaattcacaccccccctctctctttctctctcttttgtttattaattaataattattagtttccttttctttttt

SEQ ID NO: 565 - DNA, 103 bp, Zea mays
  misc_feature: Incyte ID No: 700342972H1
ggaatattgtgtggcacagcattcaacttccagtactgcgttttgtaaacatctaagcctcatttgggaactatatgcatgatggatattgtcatttcttaaa

SEQ ID NO: 566 - DNA, 286 bp, Zea mays
  misc_feature: Incyte ID No: 700342975H1
  unsure 96-97, 227, 262: a, t, c, g, or other
acaccccgcttcacgttctcaataatggcgccgttcccacgtcgtcttccggccgccgtgccacttctcctcctcctcggcgccgcagtggccagnnccggcgcggaggacaccgatggcggcaactcccgccggcggcactcccgcttgctgttcgcgttcggcaactcgctcaccgacacgggaaacggggccatcttcccggtgactgcaggcgggccattcanccggccgccgtacggggagaccttcttcggtcgtnccagcggccgggcttacaacggca

SEQ ID NO: 567 - DNA, 283 bp, Zea mays
  misc_feature: Incyte ID No: 700342976H1
  unsure 36: a, t, c, g, or other
agaagcttccccttccgtctccatatcttcttcttngtccgccgtctccactccgcgttccctggctccctgcgttgcgtcttgggggagagagagaagtgggagacccgcgagaggctgccgtgtagggactagggaccgtagagtaagcgacagcaaggagggagagggggatggccgggatcgggccgatcaggcaggactgggagccggtggttgtgcggaagaaggcacccaccgccgctgccaagaaggatgagaaggccgtcaacgccgcgcgccg

SEQ ID NO: 568 - DNA, 285 bp, Zea mays
  misc_feature: Incyte ID No: 700342978H1
  unsure 22, 95: a, t, c, g, or other
caaagagaaaagaaagcataangacacttactcaacagaagcacctttaggcgaaggaacagaacaatatgtcaatagtatctcagattgaccanttctgttacttgtcatttctactttcagaaactaaatgactttcaaatttgggtatagacaataaagaactgaagtgctcactactcagtgatttggaaattttgatgcttgtataaatgtcagataattaatttccaaaggcgtatgtattaagtaaaagtctgtaaatatgttaatgaggccaatttt

SEQ ID NO: 569 - DNA, 287 bp, Zea mays
  misc_feature: Incyte ID No: 700342979H1
  unsure 38, 42, 45, 70-71, 90-91, 99-100, 104-105, 112, 125, 163, 168-169, 175,: a, t, c, g, or other
agaaaaggggcaggaagaaatcgagcctcactcgatcnatcnccncgccgcagcacacacgaggcacggnngcgccatggccatgaagcnngacatgtnngcgnncgagacnaacttcgccaacntgaacgcctccgccggcgacgacacgtacttctccgcngaggnncccgangtgccgtccatggtgctccccatctgcgacgacttcgacggcttccaggcggccaccaaggatatggtgaagaataagaaggggacgaccacgcttgcnttnatcttcgaca

SEQ ID NO: 570 - DNA, 284 bp, Zea mays
  misc_feature: Incyte ID No: 700342982H1
ctccctctccctcacacacatctcttgcctctcccatttcaaatctttggagaggaatctttgagtgagcttgagagctgcggtttttgtgctccatctctaaatctctcttgctcttcttcattcgagctttggtactacatcgagttctttgtggattcattactcttggagcttctagctcctagacgactaggtgtctcttgtgagtctccaaatcttgtggaagaccacaagaaagttgtattacccgctcgtttgagcaaagattattgtgtgggctg

SEQ ID NO: 571 - DNA, 287 bp, Zea mays
  misc_feature: Incyte ID No: 700342983H1
agcttactaccggaaaggtgctgcatgcattaagcttgaagaataccaaactgcaaaggctgctcttgagttgggttcttcttatgcatcaggcgattcaaggtttgctcgtctattgaaggaatgtgatgagcgcatcgctgaggaatctagccaggcaccagtaaagaatgttgaggctactgtggctgctactattgaggacaaggaggatttcacaaatatggagaatacaccaccagtgatagaacccccaagcaaaccaaaatacaggcatgactactact

SEQ ID NO: 572 - DNA, 287 bp, Zea mays
  misc_feature: Incyte ID No: 700342984H1
  unsure 20, 174, 180, 238: a, t, c, g, or other
tccaactcttgacaagaggnatgaatatctcagagatgcagtgcttcaggcaaaaaacgcaggcatagaggctgattcgtctagaaaacctattgacagtagcacagtggatttgcttgaaggcaaacttaccgtgctacgcttccaaatgcaaatcaaacaagaattggagcncatgantgcacgggttgaaaatatttcgagcagttctgaatcccctagtggtctgttccctcgngacaacattcttgctgttgctgatgcagaggctgctaaggctgctaagg

SEQ ID NO: 573 - DNA, 287 bp, Zea mays
  misc_feature: Incyte ID No: 700342986H1
  unsure 99, 280: a, t, c, g, or other
catctttggtccgcctcctgagattccagcgaggccattggctgctcgtaacatggagctacaaggaaatgtcgatttttcacttccacagcgaaggtnccacacatcagttaaagtatctaatcctgccggaggtccaagcaacatctctttcagcgaagagcctgtagtgaagacagcaaagaaaatccacaaccagaagttccaggagctgacaggtaacaacatcttcaaggaggacgtccctgcctcggccgagaagtctctgagctctgcgaanttaagga

SEQ ID NO: 574 - DNA, 282 bp, Zea mays
  misc_feature: Incyte ID No: 700342987H1
  unsure 20, 46, 65, 69, 83, 88, 90, 93, 95, 103, 110, 113-114, 116, 121, 128,: a, t, c, g, or other
cgcagggctgggcgggaganactgttctgttccttgagtaactgtnttgctgaaagactacctcnttcntcatcttgatgtgncaccntngcnantgcctggnggcgggnatnngngcagngtggaancggntccccattttataccaaaggtgctacatctatgtgatgggtggggtgggnagggaatcactggtgctatagaaattgagatgcccccccaggccagcaaatgttcctttttgttcaaagtctatttttattccttgatatttntctttct

SEQ ID NO: 575 - DNA, 279 bp, Zea mays
  misc_feature: Incyte ID No: 700342991H1
tggtatccctcctgatgccatggaaccagattcagctacttacaaaaagatctgctccttagctgcagaattcaaatctggaaaacttccaagtgaagatgaggtagcaaagtggagtgggcaagaatgggaactttacttagaaaatctaccagcagatgttgaagcctcacaggtcactgctctcgacgagcggtacaagctatctgaaagccgtgactacgaggtcaaagtggcgttcctccagctggcgatccccaccgggtgcaagtgctactt

SEQ ID NO: 576 - DNA, 279 bp, Zea mays
  misc_feature: Incyte ID No: 700342993H1
  unsure 107-108: a, t, c, g, or other
tgccactcaagttcgctcctttgccaaggatgcagctccagctgaccgtcctcctgttggtggggatgatctcctgaagggcatattctttgaggtaaagaagaagnntgagacagctctcggcgtccttaaaaaggaaaagatcactattgatccagatgacccagcggcagtttctcaatatgctcaagtcatgaagactgtaagggaaaaggcggatcttctttctgattctcaaaggattaaatataccattgagaccttcaccaagggcatccc

SEQ ID NO: 577 - DNA, 280 bp, Zea mays
  misc_feature: Incyte ID No: 700342995H1
gaggaaacttttatcacggacgtcactcattgtcacgacagatatgcaaacttccactgctccaaatgatggagactacttgcaggacatgaatgcaatagaggaaaaattagcaagatggtttacttttcaattaatagagattaacaaggagtgatcaaggcgctctcaccagcacgaacgtagaatctcttgcccgagttcctgtcagagatgtagaagttcgtcacccgtgcctgccagagaaacacaacagccatgcatcacttcgactgcgaac

SEQ ID NO: 578 - DNA, 282 bp, Zea mays
  misc_feature: Incyte ID No: 700342996H1
  unsure 146, 209: a, t, c, g, or other
ctgcttttggggaagacggtgagggtgatgacctggacctgtggacagtacgatgttctgggcaacactgggagcgagaggccagtgtccgtttccagcatgttggcacctctgtgttcctgtcagttactggtgaacagtattgnaacccaatccgtgggcagcatgaggtgcatggcatgcctagtgccaatgcacacaacacgttngaaggccatggaaggaatcttcatcaagcccggagcagatccctccacaggtcacgatgaactctgagccgga

SEQ ID NO: 579 - DNA, 284 bp, Zea mays
  misc_feature: Incyte ID No: 700343001H1
tggacttgtctcttcttgttataacaaagggtttgacaaaaacgggagaagattatgcggtaaaagctgctcatgtggagcttgctgagaggatgcgaaagagagatccagctactgcacctactgttggtgaccgtgttccttatgtaataattaaagcagcaaaaggggcaaaggcatatgagaaatcagaagatccgatttatgttttggacaataatatacccattgatcctcaatactaccttgagaaccaattagcaagccattttgaggactttgag

SEQ ID NO: 580 - DNA, 288 bp, Zea mays
  misc_feature: Incyte ID No: 700343002H1
gaaatcccattccccttccccctcttcgtctccgtcggcggcgtcggaccgaacccgagcccggagccctaactaaccctaggaggcaggcggcggcggggatggtgtactacgcgctgttggtgggcgcggagtggatggcctcaccaacctgcagccccgccacggctgcgacgaccccaacttcccctactacctcaagctcaagtgcgagaactgcggggaggtcaccgccaagtccacctacgtcaccctcagcgagcaagtcgacctgcccaaaggacacgg

SEQ ID NO: 581 - DNA, 286 bp, Zea mays
  misc_feature: Incyte ID No: 700343004H1
  unsure 2, 16: a, t, c, g, or other
gncagcaatgtatggngcttggaaagctgaatccacaacagcagtgccaacatccactatggcaatcgagaagtacagagcatcaacacacatgatccaaaaaatgtttccatccctgtcttcgtcattcttgattcgtcgtcttccatatgtgaagaaattgctatcaggcgtgtttttcagctttgctcggatcgcctggcctctaatttctgttatgtacatgcatatgcaaatgcgttggctctgtgctcagatgcaatcccaccaaggttggaatttgctg

SEQ ID NO: 582 - DNA, 170 bp, Zea mays
  misc_feature: Incyte ID No: 700343006H1
  unsure 42, 83-84, 147, 150: a, t, c, g, or other
gaacaaatggactagacaattgttcaccactgattacaaggnccacctcagttacaacaacgtggagaaaagggaaacaacanngagagagaggaagtggatcaccacgttgttgtaactgaggtgtccttgtaatcagtggtgaanaantggactagacaattgtcatt

SEQ ID NO: 583 - DNA, 286 bp, Zea mays
  misc_feature: Incyte ID No: 700343007H1
gaacttcgatggctgtcctcgtcacggaattcgtcctcagattcacagccatggactacaatgtgcgtgaatgcagactataccactcctgctgattctgtcgccacctcggagcaagcaggtggtgaagctgaggccaccttagaaacaggtggtgaagctgcggccaccttggagcaaacaggtggcgaaaccgaagagccaaccattgtagcacctgctaatgaatatacagagcaggaggctgctcctcagcagaagtgtgcaaagatacacgacttttgcc

SEQ ID NO: 584 - DNA, 286 bp, Zea mays
  misc_feature: Incyte ID No: 700343008H1
catttattgttgagcatgatttcatcatggcaacatacttggctgacaaggtcattgtttatgaggggcgaccttctattgactgttctgccaatgcaccacagtctttagtatccgggatgaataaattcttatcgcatcttgacattacttttagaagagacccgaccaactataggccacgtataaacaagttggactctacaaaggacagggaacagaagtcggccgggtcctactactacctcgatgactaatgaggaagcacagattcttcttggagagc

SEQ ID NO: 585 - DNA, 290 bp, Zea mays
  misc_feature: Incyte ID No: 700343010H1
catgaatccactcctgatccttacctttgtggcagctgctcttgctgccccctttgatgatgatgacaagatcgttgggggctacaactgtgaggagaattctgtcccctaccaggtgtccctgaattctggctaccacttctgtggtggctccctcatcaacgaacagtgggtggtatcagcaggccactgctacaagtcccgcatccaggtgagactgggagagcacaacatcgaagtcctggaggggaatgagcagttcatcaatgcagccaagatcatccgccacc

SEQ ID NO: 586 - DNA, 288 bp, Zea mays
  misc_feature: Incyte ID No: 700343011H1
gaagaatgcaaagaaagaggaagacattccagtgcttgatgaaattcagcgcaatgagatttttacaagagacagtatccccacatggctagcctactctggatatcttgcactatcagctgttgctgtgtttgccattcccttgatgttccatgagatgaaatggtactatgttattatagcatacttattggccccggcattgggtttctgcaatgcctatggtgctggcctactgatatcaacatggcctacaattatggaaaggtcgcgctctttatctgcggc

SEQ ID NO: 587 - DNA, 292 bp, Zea mays
  misc_feature: Incyte ID No: 700343014H1
  unsure 3-4, 53, 55, 57, 66, 182, 224, 262: a, t, c, g, or other
cannatacattgactatttgatgacttgggttcaagatcagcttgatgatganantnctttttccntctaagattggtgtcccatttcccaaaaactttatgtctgtggcaaagactattctaaagcgtctgttcagggtttatgcccatatttatcaccagcactttgattctgtgatgcngctgcaagaggaggcccacctcaacacctcctttaagcactnattttctttgttcaggagtttaatgctgattgataggngtgagtggcacctcttcagaataatagaga

SEQ ID NO: 588 - DNA, 296 bp, Zea mays
  misc_feature: Incyte ID No: 700343015H1
agccaccacagcgtcgtcgtcttcgtctccagtccaagcaagcgaagagcacccctcgagatctctccctccccgcgccgccatggacgcagttgactcggtagtcgacccgctccgggagttcgccaaggacagcatccgcctcgtcaagcgctgccacaagccggaccgcaaggagttcaccaaggtcgccgcgcgtactgcgatcggcttcgtcgtcatgggattcgtcggcttctttgtcaagctcatcttcatccctatcaacaacatcatcgtcggctccggctgatccg

SEQ ID NO: 589 - DNA, 296 bp, Zea mays
  misc_feature: Incyte ID No: 700343016H1
gttagtgggctcagactgcatgttcgcattgaaggttatggacatcgagtacctcataagcagaaagaaaatgctgcagagcacaaactgagagggagatactgcaaatgctcgaccacccattccttccaaccctgtattctcatttcacgacggacaacctttcttgtctggtaatggagttttgccctggtggtgacctacatgttcttaggcagaagcaacctaccaaaacctttcggaagcagctgcaagattttatgtcgctgaagtcctcttagccttggagtatctcc

SEQ ID NO: 590 - DNA, 280 bp, Zea mays
  misc_feature: Incyte ID No: 700343018H1
tccagcaagtaaaccccgtttccacaacgtcaccgcaccgccgtcatgccgaccgtaagcgtgaaatggcagaaggagctctttccaggcatagagattgacactagccagcctccgattgttttcaagactcagttgtacacactaactggtgtgccacctgaacgccaaaaaattatggtgaagggaggaatattgaaggacgatgcagattggtctactttgggagtgaaagatggccaaaagttgatgatgataggcaggctgatgagatgtgaaa

SEQ ID NO: 591 - DNA, 281 bp, Zea mays
  misc_feature: Incyte ID No: 700343020H1
gtaatgatttctttgctctttttctggatccgacgatgacttactcttgtggtattttcaaggcggaagatgagagtttagaagcagcgcactacgtaaacttgacaatctaattaataaggctaaggtggatccggggcatcatgtccttgacattggctgtggttggggctcattggcaatacgtttggtgaagagaactggctgcaagtgcacaggaattacattatcggaggagcaactgaaatatggaaagagaaaggtgaaagaattggattaga

SEQ ID NO: 592 - DNA, 280 bp, Zea mays
  misc_feature: Incyte ID No: 700343021H1
ttggggacgagggccagattctcttcaccgaacccctcttcacgccaaagactcttcgggagcaattggtgcagcttatgtttgaaaagttcaatgtttcaggcttttatgcctctgaacaggctgtattgtcactctatgctgttggacgcatttcaggatgtaccgttgacattggtcacgggaaaatagatattgctccagtttgtgaaggagctgttcaacacatagcttctaagagatagagattgggggagttgacttgacaaacctgtttgca

SEQ ID NO: 593 - DNA, 280 bp, Zea mays
  misc_feature: Incyte ID No: 700343022H1
  unsure 258: a, t, c, g, or other
gattgataccagctttctggtgctgtgcaggatgttggcaagaccatcagcaccgcctttggtgactgcttcaaactcctgaagtgcggcatcttcattacagctgtaacgcaacgtctcgggtgcactggtcgccaagcttcctggtaacaaaaacaagtgtggaggaagatcgaatgtccggcagcggaacatccaacctgggaaaaggggctgtcgtcgggagtggcgggcgctctcagcagctgaccaagcgcngcttctacctggacgtagatga

SEQ ID NO: 594 - DNA, 278 bp, Zea mays
  misc_feature: Incyte ID No: 700343023H1
  unsure 203, 255: a, t, c, g, or other
gttcaagggaacaaaaaactgatattagcttttctatggcaattgatgcggtacaacattctacaactgctgaagaatcttagatttcactcaaatggaaaagagatcacagataatgacatattggcatgggccaataagaaagtaaaagattctggaaagcaccactcttatatgcaaagtttcaaggataaaagcctttncaagtggcaccttttcctgactactaagtgctgtggagcctcgagttgtgantggagcctgtgaccaaggggaaa

SEQ ID NO: 595 - DNA, 125 bp, Zea mays
  misc_feature: Incyte ID No: 700343025H1
ctccatttgtggtgtggctagagtgtaccatggtttgtgaacattgtaaaagaaataagtatgcggttcacggaaatgaatatgaacttccctttcgcgcctgccgcgaaagaattaagaggtct

SEQ ID NO: 596 - DNA, 286 bp, Zea mays
  misc_feature: Incyte ID No: 700343026H1
  unsure 74, 81, 144, 151, 211, 222-223, 244: a, t, c, g, or other
ctggtggacgtgagcggcaccgggaccctatcccagagctaccactacgaggtgtgtttgaccggagactcagntggccgnttaagtgtcaagttcctgaagccgattattcctaaccttttgccccagggcgctggtgaaganatagggnaaactgctgccttccggaatagctttggattaaattagagatctcgtgatgacgcgttgntttctgccatnnatcccaaactttttcagatcnagaatcgagagtgtcatggacaaaaattcaccttgagattga

SEQ ID NO: 597 - DNA, 284 bp, Zea mays
  misc_feature: Incyte ID No: 700343027H1
gcgggcggctgggctagcagattgattggtttgagtggttgggtcggctctaggaaacgccccgccgcggcgatggggtgcttccattccacggcgaacggcaacaccctggctacgaggaccccgtgcacctcgcctcccagaccgccttcagcgttagtgaggttgaggctctattcgagctgttcaagagcataagtggttcggtgattgatgatggcctgatcaacaaggaagaattccagctagcactatttaagaatcagaggaaagaaaatctttcg

SEQ ID NO: 598 - DNA, 286 bp, Zea mays
  misc_feature: Incyte ID No: 700343028H1
  unsure 22, 58, 68-69, 75: a, t, c, g, or other
ttgtgagatgccagagtttgangcctcccacttcttgagaagaatgcaggataaaaanatcgcatacnngggcgnttctctagggaggcagatgtttcagtcgatgatgtgtatggtcactggtggaaaggagaggctagatgtagaagatattggcgcagagtatggctttgtgttagcgccgggtgcaaaaaggccagacggctgggcctaccggttcccgagcaccaacacaacattctataccactggtccatcaacgctcgtgatttggagcccctgaacc

SEQ ID NO: 599 - DNA, 286 bp, Zea mays
  misc_feature: Incyte ID No: 700343029H1
  unsure 85, 95, 211, 252: a, t, c, g, or other
tgaaggcaaggaaaaacacccaaacggcccaaccccaggaagccccgtcggaccctacagaccctaaccctagcgctcccgacgngccgcggagnatggcgatggacgcggagggcggcaggcggagtgatcgcgcagttctccgctcaggcggcggcgctttcgtccgcgccccagctcgccgcgctggtgcttgaggccacctcccacncggccctcttcgccttctccgagctcctcaccctcccggcnctctccaagctcactggcacgcagtacgcgtcgt

SEQ ID NO: 600 - DNA, 278 bp, Zea mays
  misc_feature: Incyte ID No: 700343033H1
  unsure 13, 76, 96, 107, 111, 119, 129, 134, 142, 152, 170, 181, 207, 225, 227,: a, t, c, g, or other
gcaaggatgtcgncttcgatccatttattgggtagtcaaaatgttcctatatagcgtcaaagcatccaactttganttctccgtggtggcttcttnctatcgtgtgngcanccagacantttgatcttnatttnattgggtnggatgcttgntcaggttaggtagttggnaagggtagcanaagacaccatcaattttggtgaaaanggtttttctctgaataantncgggtcaaattagtcnnctcagttatcagtttttccactccanattatagg

SEQ ID NO: 601 - DNA, 280 bp, Zea mays
  misc_feature: Incyte ID No: 700343034H1
  unsure 5, 9, 13, 37, 39, 42, 46, 61, 66, 88, 196, 259, 266: a, t, c, g, or other
gagcncggnggcncctcattccttcctcccacttctntngcnctgngctcgcttacctcgnttcgnattgggctcgagcaggggagcngccgtgagaagggaagggagggaattaaggcaagatgttcatcgagagcttccgcgtcgagagcccccacgtgcggtacggcccgacggagatcgagttcggagtacnggtacgacacgacggagctggtgcacgaggccaaggaggcgcctcccgctgggttcgtccgcnccaagtncgtcaattacaatt

SEQ ID NO: 602 - DNA, 275 bp, Zea mays
  misc_feature: Incyte ID No: 700343035H1
gaaatttgtacgtgtatgataaaaacaaggatgggaacacagactgtacgtttccagctgtcaaggatcagtctcagtttatggttgcacatgcaaagtcgagtaagagcaacccagtcgctaggtggcatatatgtcaaggttcgatcaatgcaatttccttttcaccagatggcgcatacttggcgactgttgggagagatggttatttgagagtattcgatttttcaaaggaacaactaatatttggtggaagaagttatatggtgcactgt

SEQ ID NO: 603 - DNA, 275 bp, Zea mays
  misc_feature: Incyte ID No: 700343036H1
gtgaaatcagaaggttggcgagcaacaattgtgctgagtttctagagagctaagttcttgctgacaaggtacacttaacttaggtgggcatgaagtgaattgaaacatcattccagacaaggtttttcttcctatactttctgtcaaattaagctgtagtttgatatgatctgaactctatgcctgccttctattcttttcattgattaactgtttggatccataaaagtcaatgaaacatgtgattcgaagcggtttcgaaaggtgatgcaggt

SEQ ID NO: 604 - DNA, 276 bp, Zea mays
  misc_feature: Incyte ID No: 700343037H1
  unsure 12, 67: a, t, c, g, or other
acacagcgtggngccgccacttctcttctcagcgctcccaatccagcggcggcggcggcacgcggcnacccacccggtagaaactgtgatctgctctaatggctaccgaagtgaagcttcacctccacggaagcgtatgttgttggagttgccttgtgatgaagaaggtgttaatgtgagtcaaactgttggtgtgtctgcatcatcagccacacctgccagagcttctcaagaacaaggtgaactttatgatgaacttgttatattgtgtacttg

SEQ ID NO: 605 - DNA, 276 bp, Zea mays
  misc_feature: Incyte ID No: 700343040H1
acaaaaccctcgctcgctccccaccaccccgccgcgccgccgcctgtaccagctgcgtcaagatgagtcggcaccctgaggtgaagtgggctcagaggatcgacaaggtttacatcactgtacagttacctgacgcaaaggatgctaaggtcaatttggatccagatggtgtcttcacattctctggcagtgctggtacaaacttgtatgaatgaaactagatctgaatgacaaagtaaacgttgaggctagcaaaataagtgtgggggtcaggtc

SEQ ID NO: 606 - DNA, 283 bp, Zea mays
  misc_feature: Incyte ID No: 700343042H1
gactagttctactttccattccttggagatgacagcactatcaccgtggatgacaaccgtgtccgatccactatacaagcatatttttccacccgaagtggcacctcatttgtccttcatcggattgccttggaaagttatccccttcccactgtttgaactccaaagtaagtgggttgctagagttctatccaggacggattaatcttccatccgaagacaggatgatggaagatgtgaaggctttctatttgaaactagaagcacaggatggcctaagaga

SEQ ID NO: 607 - DNA, 282 bp, Zea mays
  misc_feature: Incyte ID No: 700343045H1
  unsure 25: a, t, c, g, or other
gggaagaggaagaagaagcggcagnagcgaggatgccgtgcctgaacgtgtcgaccaacgtgaacctggagggggtggacacctccgccatcctcgccgaagcctccaagtccgtcgccaacatcatcggcaagcccgaggcctacgtgatggttgttctcaagggttcggtgcctatggcatttggaggtacccaggagccagcagcttacggtgagctggtttccatcggaggcctgaaccctgatgtgaacaagaagcttagtgctggcatcgcttcta

SEQ ID NO: 608 - DNA, 281 bp, Zea mays
  misc_feature: Incyte ID No: 700343046H1
  unsure 270: a, t, c, g, or other
aggggccgtaatggatactatggttatggcaacgagagtcaggatggaacaatcgagttaaacagaggtcctagatctggccgtttcaagaaccagaaattgtacggccatactgtcactattgctgtgaaagggcagagccttccttctggtgaaagcaaggatgatagtgccgtgcctgatagagcacagttcaatagagacgatttccctgttcagtatgatgctgcaaattcttgtcataaatcgtacatgaggatgacatccacnagagtgtaaaa

SEQ ID NO: 609 - DNA, 286 bp, Zea mays
  misc_feature: Incyte ID No: 700343047H1
gtatttagttctcttctgcctatcttaagcaggagaaactcttttcaagcaggaacaggacagaagtctctcttggcaagaagctgaagttcacttatcttccagagattgaaaagattcacaagaagaaggagaagttgctaaaaaagcaacaaagagaagccatcctccttgacagctgcttgacagtgaatggattgacatctggccgctctcgacgtgaaagaaaacatgtgacttatacttttgatgattatgagcgttcaataaatgaagccataaaaac

SEQ ID NO: 610 - DNA, 286 bp, Zea mays
  misc_feature: Incyte ID No: 700343048H1
acggctaccgcttctccacagcagcaggttggcagccagaatcaatcagctgggccgcaaacttatgcgccaggcgatctatgcacccagcaaccgctggccctgtcgtccgaccccggttcagctggtaccaagcattcctcgctgcagggctcttgcttggttttggtgctagcacggctgtctttatcaagaaactgttccttcctaggctcaagtcttggatccgcaacgtcgtagcacaaggtgatggcgctgaaggcaaccaattaagcacaggattgat

SEQ ID NO: 611 - DNA, 315 bp, Zea mays
  misc_feature: Incyte ID No: 700343049H1
  unsure 35, 41, 45, 47-48, 50, 61, 90, 266, 291: a, t, c, g, or other
gctccacctgtttggatcgacagagttggatttanagccancatnannancgagcttcacncgtcaaagcaaattcacatatggccttantggttgaagagattacaacacgtgatgaaactaatactgtctgtacccatggttctcgagcaatgcctagcggcggtctgaacatggatggacctcccacaaccctcagtggtactggagttgaccgaatggctttcttcaggctaatataacccgtgacaatactgagtttgtgnatggtgcattgttggagacagatanttttcccgttagaccaaggtctgg

SEQ ID NO: 612 - DNA, 311 bp, Zea mays
  misc_feature: Incyte ID No: 700343052H1
  unsure 292, 302: a, t, c, g, or other
aatctacatgcaccaacgttggaaggtttcgtcaatcagctccctgatctagctcttttccatgctgcttccaacaattttggtggcgatataccccaactaaccggcctagggtacatgtacgagctcagtgtcgccgttaaagatctgcaattacaggctcggccaaaaagggatatccctccgccattctacagtgggtttgggcggcaacacttcacggtcacgggcatcttggtaactgtatattgcagattttaacttctcatttaacgtcggaatcggtaagggncacaatttcnagttttagg

SEQ ID NO: 613 - DNA, 300 bp, Zea mays
  misc_feature: Incyte ID No: 700343054H1
  unsure 131, 291: a, t, c, g, or other
ccgtcggttcacttctccaggtaaggaaagggttcgtactcatggcgccgccgcagccaaagtcgggcctcttcgttggcatcaacaagggtcatgtcgtcaccaagcgcgagtgcctccccgcccgtgcnaccgcaaggggaaatcaacgaagagggtgtctatggtcaggggcctgatcagagaggttgctgggtttgctcttatgagaagcgtatcactgagcttctgaaggttggcaggacaagcgtgcctgaagttgctaagagaaacttggaactcacaagaggnaaagagaga

SEQ ID NO: 614 - DNA, 312 bp, Zea mays
  misc_feature: Incyte ID No: 700343056H1
agcagaaatagatggaaccttcacaactatttactggtggtacaggaccgcgagccacgccgcagagcttcacagcggggttctacaacactacgaacagagacggatactctccagttttcagaatgctcaagaagcactctgtgatccttaagctcgtctgctacggacccgagtacacagttcatgagatggacgacgacgaagcgtttgcggatccggaaggtctaacctggcaggtcatcaacgcggcgtgggatcagggactaccgctctgtatcgagagcgctcttccgtgccgtaatggtgagg

SEQ ID NO: 615 - DNA, 310 bp, Zea mays
  misc_feature: Incyte ID No: 700343057H1
  unsure 26, 47, 303: a, t, c, g, or other
gttcttctcccacttcaccatcaggnagttcgccgacgacgagaggnagctggtggacgcggtgaacgggacggagtacgtacccacgtacgaggacaaggatggcgactggatgctcgtcggcgacgtcccctggaagatgttcgtggaaacctgccagcgccttcgtctgatgaaaggttcagaggccgtgaacttggcaccaagagccgcccgatgaggcacactcccgttgggcttggcacgcacgcacgccactggcgtcttgaaggaaagggggaactctgctggtcttgatgaggntttcacg

SEQ ID NO: 616 - DNA, 233 bp, Zea mays
  misc_feature: Incyte ID No: 700343060H1
  unsure 134, 197-198, 212, 222, 228: a, t, c, g, or other
cagaaagagtccgtaaacaactcccggccatggcgaccgcagaccgggtcgccgccaccttcctctcctctttccccacttcaccatccccgccccttttcctccgtttccctcgtgacaaaccctgtcctacncgtctcccttcgggccgctgtcacaggtggccacggctcgcctcccgtctccgggtcaacggnntcggcgcggcggtngcaaatttcnaaaaanattgg

SEQ ID NO: 617 - DNA, 233 bp, Zea mays
  misc_feature: Incyte ID No: 700343061H1
  unsure 186, 190, 210, 219: a, t, c, g, or other
gaagctgcttccgttgcttaccgctaccgccgctggaagcttgatgaggagacaagcttggttgctcggtgcgaggttcatgccgtgagcgttgatctacgcggcgagcgccagttccttacactcaacgccctcaacgagttcgatcccaaggtcactggtgttgactggaggaagaagcttganaccnagcggggtgctgtgcttgcnactgagctnaagaaaattgccaa

SEQ ID NO: 618 - DNA, 300 bp, Zea mays
  misc_feature: Incyte ID No: 700343062H1
  unsure 184, 188, 195, 205, 219, 232, 239, 259, 261-262, 268, 270-271, 273, 278,: a, t, c, g, or other
caagcaattttagagttttacaagatattttatgtgacactctgcaaaaccatcctgccttgcatggcattgtttgctccagtattcaggttttaatcaaacaaaacaaaaaagctctgtcagtttctagggaagaagacattcttgctgaggatgaaataagcaaatctgaaagaagagcaanggancgttatnctcaaaatcnggctgaggaaaatngaagcgatggggncttcccntcaaactttgagaagtatgngnnaaaatncnngntcccnagaagncannngatnccccccc

SEQ ID NO: 619 - DNA, 307 bp, Zea mays
  misc_feature: Incyte ID No: 700343063H1
  unsure 211, 220, 249, 276, 282, 286: a, t, c, g, or other
gaagaaaaggatgtttacttttcctttggaagtgtccaggaccatggggccagcaaagctagccaaggaatgcactcatcaaaattttgcctaaatattgctggggacaccccttcttccaatcgtctgtttgatgcgatagttacccactgtgtccctgttatcatcagtgacgacattgagctaccttatgaggatgtgttggattatncaaaattcnccatctttgtccgttcgtctgatgctgtnaagaaggttacctgatgagactgctcnagggtntaancagcaacatggacaaggtggg

SEQ ID NO: 620 - DNA, 300 bp, Zea mays
  misc_feature: Incyte ID No: 700343064H1
  unsure 182, 224, 231, 238, 241-242, 254, 261, 266, 270, 274, 289-291, 293, 296,: a, t, c, g, or other
ggataatatatcatcttctccaaaagcgaggcattcctgctccagtttgccttcaaggcatctgataaaagaaacaaatagtcatatacctaaacctgaaattagggacgtgcaggttgatgaccaagtaactgtgacccggtggtccaggcgacatgtaacacgaggctctgataagaggncaacaaatattgttgaatggaggaagaagactgttaaaaccngagctcnatctttngannaaaaagaagganagggatncttgnaaangggnaggggggggagaaannntncgngnnn

SEQ ID NO: 621 - DNA, 307 bp, Zea mays
  misc_feature: Incyte ID No: 700343066H1
  unsure 253, 275, 288, 292, 298: a, t, c, g, or other
ccgggtccacgctgaccctcttcacgggggcggcgaaagatctcagccgcgacgggttcgagcgccggcgagcgctcgcccacctgggcctataaactggccccggctcctcttctcgcgtcgcagagcccagcctcgggatgacgtggcgtatcgcgacaccgccacagctcactcaaccgcgcgggtctccaacgaaccccttgtagaagcttccaaaccctagcgcaggaggaagaggagcgtggaggantccaggaatggcgaaggcgagnaagcagaagggtnacgntagcgntagggcggc

SEQ ID NO: 622 - DNA, 307 bp, Zea mays
  misc_feature: Incyte ID No: 700343067H1
  unsure 5, 8-10, 12, 14-16, 18-20, 22, 24, 31-33, 39, 70, 126, 194, 196, 257,: a, t, c, g, or other
tggcnctnnntntnnncnnngntnagagtgnnntgaaanatgatctcagcaccattagaaatgatttccntttgcttctcaccaagactttcatgcatcgaagttcctccacaccatgcttgtctncctagtggcaaggatctccaacagcaaaaagataggggctgtccaattgaactgttagtatgcccgancngctgttctcgaacaaggcagctcgtgaaggatgttgctagggcaatcaagaaaggtgtggntccngtacctatcaaaagtgggcttggtggtgctactatttcaggaacac

SEQ ID NO: 623 - DNA, 304 bp, Zea mays
  misc_feature: Incyte ID No: 700343069H1
  unsure 2, 212: a, t, c, g, or other
anaaatcaaaatgaaatctgagggaaaaaaagaaaaatatttgccatctatccactcggtattgtgctataatgatgttaatttaatctggttggagatggcaaattatgtgcctgcaggagctgggccagtggactccgattctactgaaccgtttttctgttgagtttatgatctaaattctacatataaaggctggtttcccccgatancccccttccaaactagttgaatggttgataaactgtctatttggctatactccgtgttgagtttgtgatctaattctacatataaagccggt

SEQ ID NO: 624 - DNA, 305 bp, Zea mays
  misc_feature: Incyte ID No: 700343071H1
  unsure 3, 57, 80, 84, 87, 153, 161, 165, 178, 185, 195, 197, 216-217, 250, 255,: a, t, c, g, or other
ttnttcatctcccaggttttcccctccaatcacccccaggtcttcctctcgcgagtngcggtctcgcgcccccctccgcngacngcngcctcctcacaaccgcggaaactgcttccctctccattggacgcggccagcttccatctctcggtnacctcccnctanatcccacggccgntaccacnttcctctacntnacacggccgcaggcctctnnaaggtctgcacagggattgtgtattgtgatgtngattncacaatgnaaagtgtctaagggcgtctccagnaagtaacacatnacaggg

SEQ ID NO: 625 - DNA, 305 bp, Zea mays
  misc_feature: Incyte ID No: 700343072H1
aaaggagaactgctttaaggaaactactacaactacaagaaagaatatatttcaaaaccaacaaggatgtggcccaactgataaatactaattgtagtaaaagccaaaatcaccatttgagatagtataaaactaagcacaacaataagttaccgttacagcacggctcctggatttaggcagttgtccaagaaactcttggaaagcagtaatcctcactctacccttgatctcaacaaagcggcaccactcatttgttgatgtctttcaccactgcaaagtagaaacttaggagttaggatatg

SEQ ID NO: 626 - DNA, 305 bp, Zea mays
  misc_feature: Incyte ID No: 700343073H1
  unsure 9, 25, 34, 87, 125, 131, 164, 203, 228, 232, 238, 241, 251, 256, 259,: a, t, c, g, or other
gtcccgcancaacgccgagggagancgaggaganacagatacagatcgcgcgctgagatgtcgtccggactcctcgtcgtgggcgcncgccctggtgcagatctccgccctacaccttctccgcnatcggnatcgctgtctccatcggcgtctcggtcctcggngcggcatggggtatcttcatcacggggagcagcctcatnggggctgccatcaaggcgccaaggntaanttttanaancttatcagtntcaanttnctnnngnctgtncnattttngggngtaatggnggcaatcacntcca

SEQ ID NO: 627 - DNA, 300 bp, Zea mays
  misc_feature: Incyte ID No: 700343076H1
  unsure 198, 219-220, 230, 235, 237, 239, 242, 250, 261, 263, 266, 269, 274,: a, t, c, g, or other
caatatgctgttaaatcaaatgcgatctgaggatggggatccagaaaagctcctccggcattcattttatccaatttcaggctgaccgttctcttcctgatcttgagaagcaaatcaaggaactggaatcagagagaaattccatggtaattgaggaagcggagagcttgaaggattattacgatctcttacagcagnacaggagtttaaagaaggatnnccatgatatngtccncncnccnaaacaggngcggctttctnanacnggnagggntgncccgannnaatnganaaanngnc

SEQ ID NO: 628 - DNA, 262 bp, Zea mays
  misc_feature: Incyte ID No: 700343078H1
  unsure 51, 58, 63, 113-114, 140, 155, 172, 175, 181, 185, 193, 197, 208, 211,: a, t, c, g, or other
atggagatggacgtgtccaaagcggagatcaggacggtggactcgcaggantctttangcggnggcgtcgctgtgctcgtccacaggtcaccttcaccggccgtgatggagtnngccgcgagttctcgcaatccttcttnctcgcgccgcagganatgggctattcgtgctnaangacatnttcngcttcgtngggnaatccctgccntcnaccgtntnaaggccnnnaaaggcntnataaanccccctgnggncnnannta

SEQ ID NO: 629 - DNA, 293 bp, Zea mays
  misc_feature: Incyte ID No: 700343079H1
  unsure 158, 160, 199, 207, 218, 224, 226, 236, 239, 242, 264, 271-272, 276-277,: a, t, c, g, or other
gagctgcgtaatcttttgacccagctcagaccattttttgcagttattcctaaggcaaagactgcaaaaattgtccgtggaataattgatgctgtcgccaagatacctggaacatcagatcttcagatttcactctgcaaggaaatggtagaatggancngggcagagaagcgtatttcctccggaagcgtgtggaggnaggttggnagctccctgtnagagancnggagtatacngangcnttacccggttaatagtcttatnaggaatnnggannctanagaaaanttttt

SEQ ID NO: 630 - DNA, 278 bp, Zea mays
  misc_feature: Incyte ID No: 700343080H1
  unsure 8, 116, 133, 157, 159, 169, 172, 180, 189-190, 196-197, 201, 206, 212,: a, t, c, g, or other
cgtcaggnggcccctccgcaggcgacgcaggcgcggggcacgacggcgcgtggccccgactacgtagacagctaaccggtctccgcctccggcccttctcctgtcgcccgattgantcgctgctgcaactgcnaacttcacccccggagagctcacnanagtcttccgnaanggtatatnaatttggannatgggnntcancaacnggcccnaattnctagnaaaggnttncagnacanaaacnaagggngnnanncgnatnnatgaaganaaaanna

SEQ ID NO: 631 - DNA, 300 bp, Zea mays
  misc_feature: Incyte ID No: 700343081H1
  unsure 135-136, 292, 294: a, t, c, g, or other
gggacaagaaggaagccgaggcggtgacggtggccaccgagccgaaagggaggaagaggggcaagaaggaagccgaggcggtggcaccagcggcagaggaggaggatggggttgatgtggcggctggagcgaacnngttcatcgtcgaggcctgcactcagtgcagacagtttaagatccgagctcagaaggtgaaggaggacctggaaagttatgtttcgggggtgtctgtgataatcaaccctcagaagccacgccgtggttgccttgagatacgtgaaaaggcggcgantnttcatt

SEQ ID NO: 632 - DNA, 300 bp, Zea mays
  misc_feature: Incyte ID No: 700343083H1
  unsure 42, 46, 150, 297: a, t, c, g, or other
gcagtctaacagcaccccctcctcgctcgcactccgttcgtntganatctcctcccgtcctttcctttctgaggctcgcgaaccccgacaatggccgcaaccgcggtgtcggtcgacgagaagctcgacaagcttcgcgccgaggtcgcnaaactcagccagatcagcgagaacgagaaggccgggttcatcagcctcgtgtcacgctaccttcagtggggaggcggagcagatcgagtggagcaagatccagaccccgaccgatgaggtatggtgccgtacgataccctcagtcgnctc

SEQ ID NO: 633 - DNA, 296 bp, Zea mays
  misc_feature: Incyte ID No: 700343086H1
aatccagctaacccaaagattcactatgagactactgggcctgaaatctggaaagctacagcaggaaaaattgctggccttgtatctggtatcgggacaggaggtaccatcaccggtactgggcgatacctcagagagcaaaatcctaatgtcaagctctatggtgtggagccagtggagagtgctgttttgaatggtggaaaacctggaccacacaagattcaaggattggagctggttttatcccggagtcttggatgttgatctcctgatgagactctacaggtttcaagtgg

SEQ ID NO: 634 - DNA, 295 bp, Zea mays
  misc_feature: Incyte ID No: 700343087H1
  unsure 122: a, t, c, g, or other
actgggcaaccgccaccgccctccccctccgtcgggtcttcgccggcgccaccagcgacgactgggcggtctgtgtccctcttcgccggagacgatcacccaccaggtggatgtcgattttntggttgacaagttgaaggttacgaactactttgatcctgaggtgaagaagtaatgatccgcccaggctcaagggactcgcaaaattatgataacataatcaaagagttcatccgcaaccagttgatgagaacatgaatcagaacggggactcatggacatatgatcgggagga

SEQ ID NO: 635 - DNA, 222 bp, Zea mays
  misc_feature: Incyte ID No: 700343088H1
agtaaagttaattgccatcgaagtagtgctatctcaatccagcgatcagcaattgtgtactgtcttatgcggggacctgtagtactgcaataggcatttttgtttaagttttgcgaggtgaacaaaactgtttctgttagtttcgagcttgagctctcaatgtttactctttacattgaaatgctgccgtttggacatgttttttctgagttctacacctgc

SEQ ID NO: 636 - DNA, 294 bp, Zea mays
  misc_feature: Incyte ID No: 700343089H1
  unsure 281, 284, 289: a, t, c, g, or other
aacaagagcagtctgatggagatggaacatttagcccatatctggagagtcagcttaagagaaagtacatttccgatggagatggtcatgtggatctttgcaaatctgtaaaaagggcttcagtaagcccacctggtgtgggaaccccacctcatcttggaaatagtgtcagtaacgttgtttgtgacagtccagtcaaattcgtttcaagtgtcgtttgcagcggaggcatgcttcctcatcacatgatgatataaatatagaacaagcacattaactantcnccatngggtc

SEQ ID NO: 637 - DNA, 295 bp, Zea mays
  misc_feature: Incyte ID No: 700343090H1
  unsure 173, 219, 222, 224, 234, 251, 253, 257, 267, 273-274, 280-281, 292, 294: a, t, c, g, or other
aacaaattggagcggcactacactcctccacgcctccacctccagcctcccactgatctgggcctctctcgaggtgagcgcgcctgaatctatggattcgatgtgaagtccccaaagggtagcttttagggagggggaatgatgagatgttggaagttcacaagttgtgtctncttaaaggctggtaaccgtatgtgtagactgcccttgtcctttggnaangncttttcagtnaatcctggatcatatgngngggncacagttacngtcccnncccacnnggggggtaagngng

SEQ ID NO: 638 - DNA, 233 bp, Zea mays
  misc_feature: Incyte ID No: 700343091H1
  unsure 138, 162, 165, 179, 185, 188, 192, 200, 202-204, 208, 215, 220-221, 225,: a, t, c, g, or other
aagatgatcataccggtgcgctgcttcacctgcggcaaggtgattgggaacaagtgggacctctacctcgacctcctccaggccgactactcggaaggggatgctctggatgctttggaattgttccgctactgctgnaggcgaatgctcatgacccatgtngcncctcttgagatttnccaaantanaacncggggaanannntganaattttnggggnnccantnntcttc

SEQ ID NO: 639 - DNA, 300 bp, Zea mays
  misc_feature: Incyte ID No: 700343094H1
  unsure 148, 204, 226, 229, 232, 239-240, 245, 250, 258, 261, 265, 272, 275,: a, t, c, g, or other
ggaagattcgtctctctcggaatttcaagtggagttgattcaacttgcttcacagctcaacggtgatcacgtactgaacacgtacccagatattggcaggaccatgactgtcggggaagcaaaccgctacgcagaggatgctgtcgcnaggttcctggaagctggtcggattgctttgagagctggtgcaaatgaatctgcttnggtgacgatgaggcctgctctnacnagnggggccnnaatgncctcnggtttacnatnagancccaagnaantncccnngggnccaaccaaaaaaaa

SEQ ID NO: 640 - DNA, 237 bp, Zea mays
  misc_feature: Incyte ID No: 700343095H1
  unsure 212: a, t, c, g, or other
gattgttgggaaggatgatgagatcctgaaaacagaaacaagaactatagccagggccgatgttgcagaagtttgcatacaggcattgctattcgaagagtcaaagtttaaggcatttgatctggcatcaaaaccagaaggtgaagggacgccaactacagactttagggcactttttgcacaagttaatagtcgcttctaaagacataagntgttcttgcccaagaagttgggggc

SEQ ID NO: 641 - DNA, 187 bp, Zea mays
  misc_feature: Incyte ID No: 700343096H1
caggtagccaacctggaaaccagattccattcattaattctgctaatccagtcatgtcactggttgcatttttagctgctgaagtaggaccaagagttgcagcatcctgtgcaagtgcagcattatcggttttgacaagggaagattccaggatgaatgcagaaggcattgatgctatgggccatgg

SEQ ID NO: 642 - DNA, 240 bp, Zea mays
  misc_feature: Incyte ID No: 700343101H1
tgtagctgcaggtattgctggaggcactggtgtcatgcctggaggtaatgtggggcaggaccatgctatcttcgagcaaggtgcttctgcaggaaatgttggaaatgagaaaattgtggagaagaagagagctaaccctgttgcactgctgctgtcttctgccatgatgttgaggcactgcaattaccatctttgctgaccggctggagacggcattaagcgtgtcatgcagaaggcaag

SEQ ID NO: 643 - DNA, 240 bp, Zea mays
  misc_feature: Incyte ID No: 700343103H1
  unsure 28-29: a, t, c, g, or other
gcatctcccgtgcccctcactgtttagnngcgacgactgggcgacagtcgccgccgccgcccgctaggggccgtgcacctggtctccatcttcgggcgcttcgcccaccagatatgagcagctggcaattcgattttgaggccattatttgataacccgggacaagtgcactgttacctgaccattttagcttgttcagatggctacacagttgccatgcttcacacagctcagtccacg

SEQ ID NO: 644 - DNA, 238 bp, Zea mays
  misc_feature: Incyte ID No: 700343104H1
  unsure 4, 11, 71, 77, 84-85, 89, 92, 118, 120, 128, 144, 147-148, 185, 199,: a, t, c, g, or other
gggnggctgtngtggtgccttctgggagaggagcagagatacacctgccatgtgcagcatgagggtctgcncaagcncctcacnntganatnggagctgtcttcccagcccaccatcncnatcgtggnaatcattgctggcctnganngattggagctgtgatcactggagctgtggtcgctgcngtgatgtggaggangaagagctcagataggaaaggatggngttacatcncntg

SEQ ID NO: 645 - DNA, 240 bp, Zea mays
  misc_feature: Incyte ID No: 700343105H1
gagaacacgaattagattagatatattttcttcattattaaagtttctaaagattatgcagacattgcaactggatgtgttttatatgctcgttattgctagttgaagaaaagaatagatatgtaaagaaaccctacatagttggtaactccaattgtgtacaagatagtggaaagggtgagaggcaagtaattttgcaatttcttaatttttgttaggttctgattcaatcagtgtttg

SEQ ID NO: 646 - DNA, 239 bp, Zea mays
  misc_feature: Incyte ID No: 700343106H1
gatgtgataagaatggacaggtgctgaggtctgctgaattgtacaattcagagattgggcactgggagactatcccagacatgaacctgcccaggcggctctcttcaggtttcttcatggatggcaagttttatgtcattgggggcgtgtccagtcagagggattcattaacttgtggagaggaatataaccttgaaacaaggacctggagaagaatacttgatatgtaccctggtgga

SEQ ID NO: 647 - DNA, 238 bp, Zea mays
  misc_feature: Incyte ID No: 700343107H1
  unsure 35: a, t, c, g, or other
aacacctgctgtagccatcctctctaccgcgagtnagagttgattgaggaaaattgtgcaggggtgagaaatgcagcccagcgcaaactatttgatgagctgggaatagtggctgacgaattacctgtcgaccagttcattccgcttgggaggatgctttacaaggctccttcagatggaaaatggggcgaacacgagttggattacctcttgttcatggttcgtgacgtgaagctcg

SEQ ID NO: 648 - DNA, 240 bp, Zea mays
  misc_feature: Incyte ID No: 700343108H1
  unsure 50: a, t, c, g, or other
gtcaacatggggaagacacgtggtatgggagccgggcgcaagttcaaganccaccgcaggaaccagcggtgggctgacaaggcatacaagaagagccatttgggcaatgagtggaagaaacccttcgctgggtcatcccatgccaagggcattgtcctggagaagattggtattgaggccaagcagcccaactccgctatccgtaagtgtgctcgtgttcagcttgttaagaatggcaag

SEQ ID NO: 649 - DNA, 240 bp, Zea mays
  misc_feature: Incyte ID No: 700343110H1
ccatatgtgtttgttccatcgaagcaagctcttggccgtgcttgtggtgtgacaagaccggttattgcttgctcagtgaccagtaatgagggtagccagctgaaactacagatacagggtctcaaggactccattgagaagcttctcatctgatctgccgaagacctttcagtgtgatgggcctcatcgacacttttttcagaggcttggactggtgatggtgtctgtttactttgcgct

SEQ ID NO: 650 - DNA, 236 bp, Zea mays
  misc_feature: Incyte ID No: 700343111H1
gcaccagatcccttaactccttcagacacctcatgatttgtatctccttctatagtggtactgtctatgcttccttttgctttccttgtcatctgttttcgactcttcttgtcttttaacttgctgggatgctttttcacagagcttgaacttccaccaattcgcttttgaagtgacaactcaaaacatatcttattggcttgctttcttttcccatgtttgttctaagaactgag

SEQ ID NO: 651 - DNA, 240 bp, Zea mays
  misc_feature: Incyte ID No: 700343112H1
cagatttaacaactgtatctgcaaagaaggccaaagattttcttcccttcttgcagcggaacagaaggcattcggccatcgttgaatatgtttttagtggccatcggttcaaactaacaattcccaaggagacttgtagtatcgccttctcattatctggtgtccgttgtcctggtaaaggcgagccatactcagacgaagctattgctttgatgaggagaaggatacttcaacgagatg

SEQ ID NO: 652 - DNA, 240 bp, Zea mays
  misc_feature: Incyte ID No: 700343113H1
ctggcccatctatggaccatactcatgtgagcacagttgtcaaaggcagttttggttaccttgaccccgaatacttccgcaggcagcagctcacagagaaatccgatgtctactcgtttggtgttgtgctgtttgaggtcctctgcgcacggcctgccttgaaccctactcttgcaaaagaagaagtcagcttggcggagtgggcgttgcactgccagaagaagggcattcttgaccaga

SEQ ID NO: 653 - DNA, 230 bp, Zea mays
  misc_feature: Incyte ID No: 700343114H1
  unsure 49-50: a, t, c, g, or other
aatgtcagtagagccaaaccatctctctgatgaacttgaaccaaagttnnaggatgcttagaacggggagacttctaactgaaaagtaaaagtgggcagcgtcgtgatgccaacttacccccctgccatggttttattggtcctctgcttgtttctcgttttcctgggagtcagcttctctgttttatgtggtcgcacacggccttatttgtagtattacaccacagaag

SEQ ID NO: 654 - DNA, 233 bp, Zea mays
  misc_feature: Incyte ID No: 700343115H1
  unsure 51: a, t, c, g, or other
aatgagcgtcaatgacattgtaactctaggtgcaaaaccattgttcttacnagattactatgcaacgagcaagcttgatgttgatcttgcagagaaggttatcaaggggattagggatggctgcgaacaatcagattgtgctctcctaggaggggaggtaagatgtttttggaattgaattactaggactcgacaattcaaccatgcagtattacccttgtaagtttagtagt

SEQ ID NO: 655 - DNA, 237 bp, Zea mays
  misc_feature: Incyte ID No: 700343117H1
  unsure 19, 41, 72, 104, 108: a, t, c, g, or other
gttccagaccgtgtctganttagtgtaacctaggagatttnatagttttattttaatgaaaccctgattgangcacagcagtggggagaacagcgtcttttacntgtnaccgaagccaggaagccccgtttgtaagcgtgtgttgtggtgcttattgtacatcctccagtggcgttctttttactctaatgttcttttggtttcccccctcagaagaatcatgaatttggcaacaga

SEQ ID NO: 656 - DNA, 236 bp, Zea mays
  misc_feature: Incyte ID No: 700343119H1
  unsure 3, 20, 40, 45, 81, 184-185: a, t, c, g, or other
gcngtcgcggcggggaccangttgcttccgaacatcctgntcacnggtacaccaggggttggaaaaaccacactaggcaangaacttgcgtcaaaatcaggactgaaatacattaatgtgggtgatttagctcgagaaggtcaaaggtttacagtacagatgcctacttctcagtctccagctnnaaatgcttcaattcctgcaacctccagcagttcagaatgttctgattaatc

SEQ ID NO: 657 - DNA, 213 bp, Zea mays
  misc_feature: Incyte ID No: 700343120H1
  unsure 22-23: a, t, c, g, or other
gttgctcgtgcatatttccaannattgatcagtgctattgacttctgccatactagacaagtttatcatagagatctaaagcccgaaaatcttcttcttgacggaagtcgcaacttaaagatttcagactttggtttgagtgcacttccaaactgcaagagaaaagatgggttactccacacaatttgtgggactcctgcatatgttgctcca

SEQ ID NO: 658 - DNA, 234 bp, Zea mays
  misc_feature: Incyte ID No: 700343121H1
ccgccgctgttgcagttgcagaagttgcctctccttttcgtcttgtttctcctccaccccggcgacgcgaatggagaagggcagtggaggcagcaatcctccgccgccaccgctccacatggaggacttccaactggaggggaagaagcccgtcaagaacccctttgtgcccatcggcgcactggttactgctggagttctgactgctggtctgatcagtttccgatatgggaa

SEQ ID NO: 659 - DNA, 236 bp, Zea mays
  misc_feature: Incyte ID No: 700343123H1
gagagaggagagggagggtttcctcaaagagaacccgaacccaaacccaaaccgaagcagagcacactagcgttccctgcaccagggcgtccatcccagcagccatggcgatggcgtacaagatggcgacggaggggatgaacgtgaaggaggagtgccagcgctggttcatggagatgaagtggaagaaggtgcaccgcttcgtggtgtacaagatcgacgagcggtcgcgcgcc

SEQ ID NO: 660 - DNA, 234 bp, Zea mays
  misc_feature: Incyte ID No: 700343124H1
cccgcgggtctgtctcttgcttcaacagtgtttggacggaacagatccggggactctcttccagcctccgaccgccctccgatttcctctccgcttgcaacctccgggaccatcttctcggccatctcctgcttctgggacctgccagcaccgtttttgtggttagctccttcttgccaaccaaccatgagctcccagattcgtcagaattattccaccgacgtggaggcagcc

SEQ ID NO: 661 - DNA, 231 bp, Zea mays
  misc_feature: Incyte ID No: 700343126H1
  unsure 2: a, t, c, g, or other
anagctgctcggtaaccatggaagacttgagaagcgtgctcctgggaaggctttcctcgaggccgttgcttaagtccaatctacagttggaatgcgaatccagacgttttgctttagcctatcttattttgctttgtgcaacatgaattttaagtgtatggggtattacagtgcctgtcttgtgtgaacctgcttatctcgtgctgaacatcgttatgcatggaagtactt

SEQ ID NO: 662 - DNA, 232 bp, Zea mays
  misc_feature: Incyte ID No: 700343130H1
  unsure 21, 128, 157: a, t, c, g, or other
ttctagatcggctcgcatcanttcaaggtgagcaatggcgactcaatcttcacggagaggttgaagttctgtgatgtgaacgacaagttgttcttgaaccgaattctcatgctggttcacaaactcanacagttattgggaggccaatactacctgntgctgctgttcatgctgttgtggaagagcatgcctagatgcaaaagtgatcatattcaagaagaaacggagataa

SEQ ID NO: 663 - DNA, 237 bp, Zea mays
  misc_feature: Incyte ID No: 700343131H1
gtcagcaatgcagaataccgctacaaagatgtaatcctgccagctttaggattgaatcagagctccgaatgggactttggggtgttctcaggtgtcgttggcgttgagaagccagacccaagaatttacaagatagcgctggagatggcaggaaacgtcgctccggaagaagcgctccacataggtgacagcatgcggaaggactacaccccagctaggagcatcgggatgcatgcg

SEQ ID NO: 664 - DNA, 208 bp, Zea mays
  misc_feature: Incyte ID No: 700343132H1
gtgccaatagaaatattcagatgggtgattgctggtgttgctggtttcatgtctgctactttcgttgctgtaaatctccgtgcgcacattgtaaactctggcgagcgatggttcctgatcgttgcagggatattcctgttgcagctggggcttgctgttttgctgaaactctatttcttcacgataactgtatagggttatttacatc

SEQ ID NO: 665 - DNA, 230 bp, Zea mays
  misc_feature: Incyte ID No: 700343134H1
gcactgaaaattttatctccaacccttctgtggagtctgaccgaaattcctttagtacgattccaaattattccaatagagggagagaagaaaatggtgcagcatctggtaatgactgggagagctatgatttgaagtccagccaacctgcttacactagtaagccacagttggttcagaattcagcaaacacacaggaggaggagaaagtcacaaaagtctcacctcct

SEQ ID NO: 666 - DNA, 232 bp, Zea mays
  misc_feature: Incyte ID No: 700343135H1
ccgcaagcaaagcattttcgcccgccccaccgcagcagcagagaagaggccgccgccgcgaccaagagttcgatggatccgaagatgacagaggtgacccagatgttcgcccgcttcaaggcggcctacacccgcaacgacctcgacgcctgcgtcaccctcctctcacagctcaaggtccatctcaccaaattccccagccttccgccctcatttgagcagacacctaacg

SEQ ID NO: 667 - DNA, 228 bp, Zea mays
  misc_feature: Incyte ID No: 700343137H1
  unsure 123: a, t, c, g, or other
gcgcacagatgcccagatgagcgagggtgctactgccacctcgccggcgctggagaccgaggtggcgcctttgccggacaacgacgacctccatcgggagatctttctccgtctaccgccgcncccctcgtcgctgccccgcgcctccctcgtctgcaagcgctggcgccgcctcatctccgaccccgccttcctccgccgcttccacgtccaccacagggcgcctcc

SEQ ID NO: 668 - DNA, 230 bp, Zea mays
  misc_feature: Incyte ID No: 700343138H1
  unsure 44: a, t, c, g, or other
tcgtctccgacacgctctacctcaccgtctcctacatcgaccgnttcctctctgccaaagttctcaacaggcagaagctgcagctcctcggcgtctccgccatgctcatgcgcatccaagtatgaggagatcagcccgcccaacgtggaggatttctgctacatcaccgataacacctacaccaagcaggaggtagttaagatggagagtgatatactgaatgtcctcaa

SEQ ID NO: 669 - DNA, 230 bp, Zea mays
  misc_feature: Incyte ID No: 700343139H1
  unsure 160: a, t, c, g, or other
ggacgagtcaatctttatttgactttggatgggaaaacaccaatcagtgaggttttgagttttcactatccgtatggtgcctgacagtcaaaacttggctgaggatgagccccaaaagtcaaagcttcagatgcagatgagactagctcgattgttgttnaccacaaacaagaaaaagatagcacccaagttacttgtagaaggaagcaaggtttccaatctcttatcag

SEQ ID NO: 670 - DNA, 90 bp, Zea mays
  misc_feature: Incyte ID No: 700343140H1
gactcctgcatgatccagcaataatacttccatgcagctggacctggttagtcactagtaagttgtcaggaaacttagtactgccatgtg

SEQ ID NO: 671 - DNA, 229 bp, Zea mays
  misc_feature: Incyte ID No: 700343141H1
  unsure 39: a, t, c, g, or other
taataatactattctaacttgttcttttgtttttcagantttcgtaaaaaggagcaacaaattaaacaatgcaagggcacagcaggacaagcactcattaaggaatgaggagggaacagaactccaggccattgtgagatagatacccatttaggtatctgtacctggaaaacatttccttctaagagccatttacagaatagaagatgagaccactagagaaaagtta

SEQ ID NO: 672 - DNA, 227 bp, Zea mays
  misc_feature: Incyte ID No: 700343142H1
ctcccactgcctggtgatgttgatgtcatttgtggaggcccaccatgccaaggtatcagtgggtttaatcggtacagaaaccgtgatgagccactcaaagatgagaaaaacaaacaaatggtgactttcatggatattgtggcgtacttgaagcccaagtatgttctcatggaaaatgtggtggacatactcaaatttgcggatggttacctaggaaaatatgcttt

SEQ ID NO: 673 - DNA, 232 bp, Zea mays
  misc_feature: Incyte ID No: 700343143H1
  unsure 2, 14, 22, 25, 33, 37, 159, 213, 215, 225, 227-228: a, t, c, g, or other
gncctcctcccttnccccgcangcnccctcgcntcgngcgtgcgccccccctaccccgtctcctccctgcctgcgcgaggactagtagaaataggcgcgcgtgccgcctcggccgctcgctcctctggttaatcccccctcgccacgacttcgcagccntcccttcacattatccgcgcgcgcgtcaggggaacgtagcgtgtgggtagcgtngncgtgcggacngnntctt

SEQ ID NO: 674 - DNA, 230 bp, Zea mays
  misc_feature: Incyte ID No: 700343146H1
atcaaagaaggacagatgtccttctcatgttttacaagtccattgaagaagagcttaccaagcttcagcttttagaagccagctctagtgagttcagtgtaactcgtaattatttggactggctgacagtattgccatggggaaattatagtgatgaaaactttgatgtccaccgtgctcagaaaattctcgatgaagaccattatggtttgagtgacgtgaaagagagg

SEQ ID NO: 675 - DNA, 210 bp, Zea mays
  misc_feature: Incyte ID No: 700343147H1
  unsure 23, 39-40, 60: a, t, c, g, or other
gtcacggggatggtcgcgcaccncgaccagggcaccatnntgttccaggccggcttcgtnctcggagtcgctatcagcctccatgtttgacgaggtgcgcacctgcggttccagcgctggcgcgcagtgcgcggcgcggctggggtcatcggagagcttgggctgctccccgttgcgcagcatgaacctcgagtttgagaatccacgcta

SEQ ID NO: 676 - DNA, 234 bp, Zea mays
  misc_feature: Incyte ID No: 700343148H1
ctgcagggggcaaaagtgtaaagaagcctagattctcattacgaggatatgattttgttccattagatgttaagactgataacttgtgcattggggagcaagatggttcttctgcagtgccatcaactaaagcttcacaaaccatggtggctgaacggttggaaaacgttgaggaacaaactgaagatttggcaccagagtttgccctccacccaaagcaaatactttagtttc

SEQ ID NO: 677 - DNA, 292 bp, Zea mays
  misc_feature: Incyte ID No: 700343149H1
  unsure 45, 65, 120, 127, 131, 194-195, 207, 242, 258, 263, 265, 274, 277, 279,: a, t, c, g, or other
ctccaatctccatccttccatcttccgctcccttccctgcttgcnctcggcacgcaggcgacctncggcggcgcttgggctcggcctctcagcgacggcgtcagagattcccctcctgcntctcgcnagtnccctcgcctctggtctctgcgaaccggccggtgactctgcgaaactattccagcacaggtacnnaagtatggcggnaagacgcatgttcggtactcgcttcttctttaagnggagggggataacatnttttnanaaaagaagntgncnccccnaaaantta

SEQ ID NO: 678 - DNA, 291 bp, Zea mays
  misc_feature: Incyte ID No: 700343150H1
  unsure 82, 184, 236, 244, 247, 258, 265, 271, 281: a, t, c, g, or other
cgaaggttcttcagagtacaatatatgaagttgaccttgatcgaattcttcagagcatccatatttatttacaagaacttgngatggaagaaatacggagaagggctggtgctgatgacaagccattgagaatggtcaaaactgtcttgcatgaacttgtgaagcttcggggaacggcaataangggtcacctttcaatggttccatagatgctgaacctcagccataattctggntacatggntcncaatccccagnccctggngcccgnaaaaatttgnccccaggggg

SEQ ID NO: 679 - DNA, 289 bp, Zea mays
  misc_feature: Incyte ID No: 700343151H1
  unsure 234, 280, 285: a, t, c, g, or other
ccagaatgtttctcacgaggacggagtacgaccgcggggttaacaccttctcgccggaggggcggctgttccaggtcgagtacgccatcgaggccatcaagttgggatccactgcgatcgggttgaaaacaaaggatggtgttgtccttgctgttgagaaacgtgtgacctcgccactgctggaaccaagcagtgtggaaaaaatcatggaatttgatgagcacataggctgtnccatgagtgggttattgctgatgctagaacatagtcgagcatgctntgttnaaac

SEQ ID NO: 680 - DNA, 288 bp, Zea mays
  misc_feature: Incyte ID No: 700343152H1
  unsure 220, 233, 239: a, t, c, g, or other
gagcttcctccttcctagcctcagaccttgcgtttctctgaacctcaaaaattagagcagcaacagcgacctatgacaataacaagaagtaaacagtgtaccattagctgagagttcctgcagatgtacatgatttatgaatggtttagagaagcaccgagaagataaaggcttccccgatgagatctgtagcagcttgaacagctttctgctcatccanaggcctgatcgcnacatcngtggcatgcccataaagcgctctgtatcttgtggtgatcggtggtttgc

SEQ ID NO: 681 - DNA, 289 bp, Zea mays
  misc_feature: Incyte ID No: 700343153H1
  unsure 184, 280: a, t, c, g, or other
cccaaacctctctcggaagttcctctcgcgtggccggtttcctcaacctccgtgtcggctcgatagtttcgcaagcgggcggggcgggggtctgagctcgatggccacttctggcgagcaatcggctggcggtgggtctgcggcgagggcgtcgaagctgcgctacccgctgcggtcggcgagnaaggggaaggccgcggccgttttctcggcggcggatgcgcctcccaccaccatatctgcaccgcgtcgggcaaaaccatcttcagatgtcagcagnccatgtgtt

SEQ ID NO: 682 - DNA, 289 bp, Zea mays
  misc_feature: Incyte ID No: 700343154H1
gcaacttcccatcaatctgcattcattctggaatgactcaggaagaaaggctaacaagatataagaacttcaaggaaggccacaagagaattcttgtggctacagatttagttggcaggggcattgacattgagcgtgtcaacattgtgataaactatgacatgccagactcagctgatacttatttgcacagggttggaagggctggacgttttggcacgaagggacttgcaattacctttgtttcctctgcttcggattctgatgttcttaaccaggtgcaagaaag

SEQ ID NO: 683 - DNA, 287 bp, Zea mays
  misc_feature: Incyte ID No: 700343155H1
  unsure 282: a, t, c, g, or other
gtggtccttctgcaaaaagtatttccgcagatgtatctcagattgcatctccacaggatgctgaagttaaagtccgcaattctgactgtaagtgacactgtttcatcaggtgctggccctgataggagtggcccaagagctgtatctgtagtgaattcttcatcagagaaactgggtggtgcaactgtggttgccactgcagttgttcctgatgaagtggacaagatcaagggcattctggtacaatggagtgatattgaccagttaacctcatctgacatnggtgg

SEQ ID NO: 684 - DNA, 293 bp, Zea mays
  misc_feature: Incyte ID No: 700343156H1
  unsure 2, 10, 12, 64, 71, 79, 103, 143, 152, 166, 169, 178-179, 192, 196, 206,: a, t, c, g, or other
gngagcgaanantcgcggggcagcgagcgagatgcagcaccgaggcttcctcctcctcaccctncctcgcnctgctggngctgcacctccgacggtcgccaanaagaaagataaggtgaagaagggcggcccggggacccgantgcgctgantgggcctgggggcntgnacccccagnngcaaggattgcgncgtnggtttccgcnaggacanctgcggngnnnanntccagcgcatncggtnnagnntgccctgcaaatgnaagaaggatttggaancngcctgcaanacaa

SEQ ID NO: 685 - DNA, 214 bp, Zea mays
  misc_feature: Incyte ID No: 700343158H1
gatgatggacgatgaagagagggtgggccatgcggagatcccgaccagtttcggtcccgagctgcgcgcctgcctccgatgccgcctcgtcaagacctacgaccagttcagggagaacggctgcgaaaactgcccgtttctagagatggacagagagcacgacaacgtctcaactgcaccacccccaacttcatggaattatctctctgatgga

SEQ ID NO: 686 - DNA, 288 bp, Zea mays
  misc_feature: Incyte ID No: 700343159H1
  unsure 210, 221, 256-257, 259, 266, 271-272, 278-279, 283: a, t, c, g, or other
gtgaggcagtatttatcccggcaggatgtccccacctagcttctgttcaaatgtccaaggctcgactccatattcttccttaagctaggtgaggcagtatttatcccggcaggatgtccccaccaggttagaaatttgaagtcttgcataaaggttgcactagattttgtttctccggaaaatgtccgagagtgcatcaggttaacaganggtttccgtcngctgccgaagtggcataaggtgatgaagataaccnngnggttaanaaganngctctnnatgnattaa

SEQ ID NO: 687 - DNA, 216 bp, Zea mays
  misc_feature: Incyte ID No: 700343161H1
  unsure 15, 18, 33, 35, 85, 111, 114, 123, 132, 136, 140, 146, 158, 169-170,: a, t, c, g, or other
aaatgtctgttgaanagnattattaataatttnancagtaggaccaaaggagtgtcagagagagactcaaagatgtgtgagagancatggaagatggctgtttcatgtganacnggaatggangaagttatnaatngggntcagangggggagtgcanaatcccgtaannacanttttaaggnnaanancnangcttnganggaaatttccccgna

SEQ ID NO: 688 - DNA, 284 bp, Zea mays
  misc_feature: Incyte ID No: 700343162H1
  unsure 46, 154, 181, 203, 239, 255, 257, 265, 281: a, t, c, g, or other
gaacgggtcaactttttcttaaggttatccacacaagtgtatgggnggggcagaagcgtcttgggcagctggccaagtggaaaaccgctgaggaggttgctgcattggttcgatctcttcctgtagaagagcagccaaagcaaattattgtganaaggaagggcatgttggatcccttggnggtccatctacttgacttcccnaacttgttattaagggcagcgagctgcacttccttnccaggcttgctaaaantngaaatttnggtcctttatgctggnggc

SEQ ID NO: 689 - DNA, 292 bp, Zea mays
  misc_feature: Incyte ID No: 700343163H1
  unsure 202, 216, 220, 234, 243-244, 252, 255, 262-263, 273, 275, 280, 283: a, t, c, g, or other
tagccaaaccaagcaagcagggaatccccacaaggcagcagatggaagcgaaaggtggcggtggcccgcgcgctgccaggtcgacggctgcaacgttgacctcaccgacgtcaagcccgcctactactgccgccacaaggtgtgcaaaatgcactccaaggagccccgcgtcctcgtcaacggcctcgagcagcgttctgcnagcagtgcagcagnttcnaccagctgcctganttcgaccanntaaaaganganctgcctnntccctgcaangnaacanggnggggggggg

SEQ ID NO: 690 - DNA, 104 bp, Zea mays
  misc_feature: Incyte ID No: 700343164H1
  unsure 49, 68, 91-92: a, t, c, g, or other
gttcttccaatttgccacagcactggaagaatttgctggagggacattncaatgagcaaggggaactncagcaagtatgtgaatgttaaannttccatccaaga

SEQ ID NO: 691 - DNA, 286 bp, Zea mays
  misc_feature: Incyte ID No: 700343165H1
  unsure 178, 189, 221, 227, 231, 244, 250, 264, 267, 269, 273, 275-276, 281: a, t, c, g, or other
atttttggggatagggactttagaggacgagatgttaaggttgcactcgaactatcatttatggaagcagttcaagggtgcagcaaaacggtcaccttccaaacgtctgtaacatgtgaaatctgtggtggagccggtgtgcctcctggaaccacacctgaaacatgtctatcttgcnggggttcaggntttatattcatgcaaaccgggccttcaggatncatcanccgnacaaatgtggtgntccggnaaatctgtgaaggnttncngcangnntgcanaaaaa

SEQ ID NO: 692 - DNA, 291 bp, Zea mays
  misc_feature: Incyte ID No: 700343166H1
  unsure 276: a, t, c, g, or other
caaggaatgaggagaatcgtgcagcctttgagaatgttaccaaaatttctcctgcatttgtgctattctttgactgttctgaagaagatatggagaaacgactcctggggcgcaatcagggaagggttgatgataacattgaaactatcaaaaaaaggttcaaaacctttgttgactcaactctgcctgtcattgagcattacaactcaaaggacaaggttaaaaagattgatgctgcaaaaccaatccccgaggtgtttgaagacgtcaaagccnttttgccccatattc

SEQ ID NO: 693 - DNA, 287 bp, Zea mays
  misc_feature: Incyte ID No: 700343167H1
atcacaagcctgatcaaactgatgagcggcaggtaattgaagatgctggaggttttgtgatgtgggcaggaacatggcgcgttggtggtgtacttgctgtttcgcgtgcttttggtgacaaactcttaaagcaatatgtggttgtggatccggagatccgagaggaagttgttgatgacacactcgagtttcttatccttgcaagtgatgggctgtgggatgtggtctctaacgaggaagctgttgcgatgactagatccattaaggacccagaagaggctgcaaag

SEQ ID NO: 694 - DNA, 289 bp, Zea mays
  misc_feature: Incyte ID No: 700343168H1
  unsure 232, 277: a, t, c, g, or other
aaggacctcgaggagggaatcaaccgcctagttctttgctctggaaaggtgtactatgaactggatgaagaaagaaggaagtcggagcgcactgatgttgctatatgtagagttgagcagctctgcccgttcccctatgacctcatccagcgcgagttgaagagatatccaaatgccgagatcgtgtggtgccaagaggagccgatgaacatgggagcatacagctacatcnaacccgcggttgctgacgggcgatgaaggttctgggccgggtggnatcgaggacatc

SEQ ID NO: 695 - DNA, 284 bp, Zea mays
  misc_feature: Incyte ID No: 700343172H1
ggctatacccagcatgcctgacagaaaatcggtgatgaagcttctggaatctgtgggagtcgaatagccgcaaaaatggcgttggtcgtgcgaatttacagagcctcgttttggcggcgatagaggtgtctccggtacgcggaattcgtgggatccatcgactgccgcgacgccttcacgtgctccccgaataatgcgacggtctccatcctcgccgatcccggatgaaacaaacgcattttccggtgccgcccggatggaaccccggcccccaaacaaaataa

SEQ ID NO: 696 - DNA, 284 bp, Zea mays
  misc_feature: Incyte ID No: 700343173H1
  unsure 48, 52, 87, 183: a, t, c, g, or other
cttcacccacacgctggtcatagagatgtcggctgcagaggcgaaggnggcngcggtcccggagtctgtgctgcggaagcgcaaggngaggagcaatgggcagcggacaagaaggagaaggcgctcgcggacaggaagaaggcgctcgagagccgcaagatcatcttcgcccgcgccaagcantacgccgaggagtaccacgcccaggagaaggagcttgtgcagctcaagcgtgaggcccggttgaagggtgggttctatgtgagcccagaggccaagttctg

SEQ ID NO: 697 - DNA, 283 bp, Zea mays
  misc_feature: Incyte ID No: 700343174H1
caggttcagtcgctcaccattctgccgttcacacctctctcgctgcctttatttcctgttggcgacgctctcgccaggtcttcggcggcccgttcggcggcgactagcgcctccgtttgccaggtcttcgtcgtccgtttcgccgtcgactggtgcccagcagccaggtacatctggaagaatgggggtttaccttagcacaccgaaaactgacaaggtatccgaagatggggaaaacgataaacttaaattcggactttcatctatgcaagggtggcgtgca

SEQ ID NO: 698 - DNA, 287 bp, Zea mays
  misc_feature: Incyte ID No: 700343175H1
  unsure 202, 256, 260, 263, 279-280: a, t, c, g, or other
tattcaaggaaatgaaggcaaccggtgtgaacccaaacctggtcatgtgcaatacaaggttgtatgtacatgggccacgcattgcaaccttgggtggtgaagagcatccacagggagatgattgacaagcaggtgcagcacaacaaggtgacctactgttgtctcctgcatgcatacaccagggcacactacgatgaggatnccatggctgtgtaccggctgatgaaggatgaagcaatggacgtgatgctctaanaacntgnttctatcgggtacgtnnattttgg

SEQ ID NO: 699 - DNA, 282 bp, Zea mays
  misc_feature: Incyte ID No: 700343176H1
  unsure 228, 246, 255, 268-270, 274-275, 279: a, t, c, g, or other
ggctttgccatgctgcttatggatctttccggaagaaggtttttgctgctaggcacaattccaatcttgatagcatctctagttatcctggttgtgtccaatctaattgatttgggtacactagcccatgctttgctctccacagtcagtgttatcgtctacttctgctgcttcgttatgggatttggtcccatccccaacattttatgtgcagagatctttccaacnagggttcgtggcctctgnattgccatntgggcttaacatnnngganngganata

SEQ ID NO: 700 - DNA, 286 bp, Zea mays
  misc_feature: Incyte ID No: 700343177H1
  unsure 276, 278: a, t, c, g, or other
aaggcggtgcggtttatcgacgcggcccacttctctgtccccgcggggcagtacgcggtggagctggtggccgggcgggagagcgccatcgcgcaggtcatccgcaccgtgcccaaccgcgcctacaacctgtcgttcgccgtcggcgacgcccggaacggctgccacggctctatgctggtggaggcgttcgcgggcaacgtcacgcagaaggtgccgttcgattccgccgggaaaggcgggttcaagacggcggcgttcaggttcgtggccggngncccccccc

SEQ ID NO: 701 - DNA, 280 bp, Zea mays
  misc_feature: Incyte ID No: 700343178H1
  unsure 146, 196, 199, 220, 238, 247, 249, 252, 256-257, 259-260, 262, 264, 269,: a, t, c, g, or other
gatatgtacaaggaatgaatgaggttttggcacctctctattatgttttcaagaatgaccctgaccaaagtcaagctgctttagcagagccagatgccttcttctgttttgtcgagctgcttagcgggttccgagacaacttttgnaagcaacttgacaacagcgtggttggcatacgctccacaattactacacngtnacagttctgagaagacacgangaggacctcggcggattnagaagttgnancgngggnnanncnanattcnagangggggng

SEQ ID NO: 702 - DNA, 288 bp, Zea mays
  misc_feature: Incyte ID No: 700343179H1
  unsure 286-287: a, t, c, g, or other
gggcgagcagtgctggtgttaggctgggaaagctggatgaggctatgagagttattgagttagggcctaacacctcaaacagatcaatattagaagacaaaagtaatgtgcttttctggtctcgcagtagggcttcagattcagttcaaaagcaacttgaaaatatggatttatggttggttgactcagattcgtctgtagttctgttgtttgtcaccaaaagcagaagtagccaggttgttttggcacatcacttttgcttcactgagaacaaaaatggcgccanng

SEQ ID NO: 703 - DNA, 292 bp, Zea mays
  misc_feature: Incyte ID No: 700343180H1
  unsure 63, 165, 171, 175, 180, 189, 193, 199, 210, 213, 217-218, 221-222,: a, t, c, g, or other
agcccaagtcgtagttacagcaaaagcaggagtccgagtaaatcacccagggactcgccgttncatcatctagatcccggttcaagatctgtttcttctcgttcaaggtccccatcaaaaggacgttctccatcaagatcaccagcaagatcgaaatcccctaangttccncaanaaaanggtgaagcngcancccccnaagaggcaganccnaaannggnnccattnnggnntnagctctcntgntgcgaanntgaaaaattgccatgctgaaaaaggttggggggggcnc

SEQ ID NO: 704 - DNA, 240 bp, Zea mays
  misc_feature: Incyte ID No: 700343181H1
  unsure 74, 151, 183, 188, 191, 206, 215, 228-229, 237: a, t, c, g, or other
aacacactaaaaattcaaatctacaaaatttcttgaactcgttctaaattcaaaataaattttaaaatttcgtnttaaaatatttgtatgcgaattgatttcaacaaagaaaatatagtgctctatattctctctaaaattcttatcaaantgtcatacaaatattttccaagtaattctctntaaanccntgccaaaaatactanactaaatancccgggggttagnnccccaaanacg

SEQ ID NO: 705 - DNA, 281 bp, Zea mays
  misc_feature: Incyte ID No: 700343182H1
  unsure 160, 243, 245: a, t, c, g, or other
ctgccatactgaggacaagagaaatagtgattctgtgctacccaaactgaaagacttgcaggccaatcctccttctttgcatgtctcagtatataatgagatcaagagttctcttggagaggcatcaaaatctcctgggtttactgtgatcgcgggaganattgactcaaatgttgctgctgctgatgatattgattgggacatttctgtggatactatgaattgattgggacatggtgctgngnaacaaccggtgaagaatctggcgatggcttggatcc

SEQ ID NO: 706 - DNA, 283 bp, Zea mays
  misc_feature: Incyte ID No: 700343184H1
  unsure 161: a, t, c, g, or other
caggagttgttctgatgaagcttatctttgttggaccctggtcattaggtagagtaggagttgggcatatggtgtacatctccggtttgacttgtgccttgagttcaacaaatatccttgaagtctcatggcgtgaaaaggagccagggtctctgtttgtnaacttaagcttgctgccagcactcctaaactcatcgtgcctgcataatttatcacccttgtcagatcttccccgttcgacaaacagaacacatatatcccatgttcggttagatggcatcga

SEQ ID NO: 707 - DNA, 282 bp, Zea mays
  misc_feature: Incyte ID No: 700343187H1
cctgctcctgctgctccctttgctagcgccgcctgctgcgtctgcacgccagggcgcggggcaggatttgggacagtgccccgggctggagtacggcctgccgccgttcgccgccgctctccgggcaagctgccccgtctcgacggaggggtactcgccccccgaggaggttgttaatggggaagaacttctcaggttgttggatggcaaggaagagcacacagctgtccttttctatgcatcatggtgccctttctcagaaagaatcagaccagtctttga

SEQ ID NO: 708 - DNA, 281 bp, Zea mays
  misc_feature: Incyte ID No: 700343188H1
  unsure 33, 39, 44, 47-48, 192, 227: a, t, c, g, or other
ctccccgtcgctctcacgctcttcgtgcccgcngcctcncctcnggnncctccacctcactcctcccgtctgacgcacatggcctccatcgccggatcttccgctctctccttcgccatgcctgtcaaggcaatcaactcaaattctctagccttctccccggtgaggaagggtaacacattcctccgctgnaaccagtgcctatgagatctgtttcctgcgctgcnaagaaggatacggtggacaaggtttgtgaaattgtgaagaagcagcttgctctt

SEQ ID NO: 709 - DNA, 278 bp, Zea mays
  misc_feature: Incyte ID No: 700343190H1
  unsure 276: a, t, c, g, or other
gcgacgccacgctcaaaagcttgtttggcgggagggacaaggttgggatgctggagatcaacaggctactgaacgctcacttcccgaagaagtagcaagcagcagtccgtggtgccagtgatcgcgctttggtaaaaggactttcttgtggctgacctcttttgtggtccatgttaagtcccaagtctcccacttggtggttacgcccgaaaaccgtgtgatgacattaagacttacagatttgttcagcattgggtttttgggcgtgatgcatanaa

SEQ ID NO: 710 - DNA, 278 bp, Zea mays
  misc_feature: Incyte ID No: 700343191H1
  unsure 236, 241, 249, 263-264, 268: a, t, c, g, or other
gcttccacctatgtccattatttccgccaagtcgagaacgacatgcagtcgtagtatcatggataaccaccttatgtcgtccttcaccatcctactgctttcttcttttgctgcaacggttgcatatcctgctcgcaatgaattacagcctaaccagatgaaaaaccaccattcttctgtatcatcatacaacccacaaccgaagttttcccaattgaacaatctacggggcctancttanaagccagngtttcaagaccccnncatnggggcccccg

SEQ ID NO: 711 - DNA, 277 bp, Zea mays
  misc_feature: Incyte ID No: 700343192H1
  unsure 196, 204, 223, 228, 242, 251, 254: a, t, c, g, or other
acaagatatacaaggtgtttgcaccaaatgaaaagattgaaaacattaatgatcagtactggacactgcgtgcggaggagatgaggagaaaaaccttggtccctttgatcgattgattcatgtatatcattttacaaaagatactcaaaaccaaacgcaagttcagaactttggagaacctttttttatggttatncgtgaggntgagaccctatcttctatnaaggngcgtatacggaganttttaagcnccnaggggggttcccggagggagatt

SEQ ID NO: 712 - DNA, 280 bp, Zea mays
  misc_feature: Incyte ID No: 700343194H1
  unsure 44, 187, 222, 230, 236, 242, 249, 255, 257, 262, 265-268, 275, 277-278: a, t, c, g, or other
gatgcaatcataattattgtccatctcctctccaaccaattgcntcagctggtcagcactctgaaagcagcgctgcatacttttcttggcctacatctactctaatgcacgggtcagctgaaggccgtgctaattactttgggaacctacagaagggtgtactaccaggacatcttggtcgcttgcnaaagggccagcaagctaccaccttacttgatttantgattatnagagcnttccanggcaagncctccncnggttnagnnnnggaaagnanngg

SEQ ID NO: 713 - DNA, 284 bp, Zea mays
  misc_feature: Incyte ID No: 700343196H1
  unsure 23, 188, 221, 226, 239, 245, 258, 262, 268, 281, 283: a, t, c, g, or other
ctttcactcttcctttgagagcngtgccagcaacaccagggcccctggcaacagcccctgtgcgtgatcctccttcccgcagccaccagcccatggttgggtgggtgaggccagaagaaactgcctccggcaagaggtagcagccgctcaggtggctctgctggaatcggagcccacagaagtgaggngtggccgatggacctgccctcaaaatgtgcctnattcngggtcttgctgtnaatggntttcctgtttggnaganaaaaangaattttttttancna

SEQ ID NO: 714 - DNA, 285 bp, Zea mays
  misc_feature: Incyte ID No: 700343201H1
  unsure 113: a, t, c, g, or other
caaagggcctcgcctatcttcacgaggagtgcatgaagagagttgctcacttggacgtgaaaccacagaacatcctcttagatgacaacttcgacgctaagctctctgatttnggactctgcaagctcatcgaccgggataagagccaagtggttactagaatgagaggcacgcctggatatctagctccagaatggttgacgtcgcacatcatgaaaaggctgatgtatatagctttggcgtggttgtgatggagatcatcatggaaggaagaacctggacatt

SEQ ID NO: 715 - DNA, 286 bp, Zea mays
  misc_feature: Incyte ID No: 700343202H1
  unsure 13: a, t, c, g, or other
cctctcgcgagtngcggtctcgcgcccccctccgccgaccgccgcctcctcacaaccgcggaagctgcttccctctccattggacgcggccagcttccatctctcggtcacctccctctacatcccacggccgctaccaccttccctctacctcacacggccgccggcctctccaaggtctgcacacgcaggaaaaaccttgccacgagtcgccgacactccatcccggaagagctaacgaggtgactccccaccgcgcccatgggtgacagccagtactccttct

SEQ ID NO: 716 - DNA, 279 bp, Zea mays
  misc_feature: Incyte ID No: 700343204H1
  unsure 262: a, t, c, g, or other
gtggctgcagtggtccacactactctctgagtttcgccatgccgcccaaagacgacaagaagaagaaggatgccggaaagtcggccaaaaaagacaaggacccagtaaataaatctggtggcaaggcgaaaaagaagaagtggtccaaaggcaaagttcgggacaagctgaacaatctcgtcctgtttgacaaagctacttacgacaaactttgtaaggaagttcccaactataagcttattactccagctgtggtctccgncagactgaagattcgag

SEQ ID NO: 717 - DNA, 277 bp, Zea mays
  misc_feature: Incyte ID No: 700343205H1
  unsure 3, 29, 39, 57, 65, 67, 75, 83, 87, 90, 131, 156, 162, 181, 204, 211,: a, t, c, g, or other
ggnggacgttactttgaagtggatgttgncgaaggaacnggatgggatgtaggagtntgtatggncnaatgctgnagagtctncacnggnatgaaggcaagagcctcagtctggattctggacactcaggntgtgcagaaagagaagctatgtagnacttanttctcccccaacttccctncatctgcatgagcagcccctgcntgtgggnattttctggactatgangccggagttntnnccttttataangggaatatggctgccaattcttact

SEQ ID NO: 718 - DNA, 256 bp, Zea mays
  misc_feature: Incyte ID No: 700343206H1
  unsure 23, 39, 211: a, t, c, g, or other
ccaggctttccccttctctccgntccgggaatcggaagntcagggcagaagtttagccatggggcagacgcatcttttgttgctcgcttgtttctgggtcctgtcaacatgctccttgctacttgatgcttcctccgatggactgttaagaatcaacctgaacaagaagagactggacaaggaagctttgactgctgcgaaattggcgaanaaggagagcaaccttcgaaggtctgtgggtgctgaccagtatctc

SEQ ID NO: 719 - DNA, 277 bp, Zea mays
  misc_feature: Incyte ID No: 700343207H1
  unsure 22, 51: a, t, c, g, or other
attcttgccacatatgcaagangcagaaccctgggcatgttgaatatttcncgaactatgaggacattgagttgcattttagagaagatcatttcctatgtgaagatgaagcatgtttggaaaagaagtttgttgtcttcctgagtaaagcgcagtgaagaagcataatgctatggagcatggtgggcggatgtctcgttctctgaggaatgttgcacttgagacacctaccaacttaatatatcgcagaaatgagcaagaacaacggcgtggcagg

SEQ ID NO: 720 - DNA, 278 bp, Zea mays
  misc_feature: Incyte ID No: 700343208H1
  unsure 64-66: a, t, c, g, or other
ctttataagggctggagtatgcagtgggtctcagatgcagacagtcatagatcctacgagtatnnngtggtggaggtcctttcaaacttcacagtggaagctggtgtgactgttatccccttggtcaaggttaaaggttttgtgagtctgtttgcaccagcaaaggacaaaccatcatttgttataccatcaagtgaactacttcgcttttcccacagcatcccatttttcagaacagtgggaaacgagaaggttggtgtcccttgtgggtttcttga

SEQ ID NO: 721 - DNA, 276 bp, Zea mays
  misc_feature: Incyte ID No: 700343209H1
gactagttctagagcacagcctctctacattcagtgggcacatatcacgtctgcgcaagattgtagaaatggtatcaaaagattctctagttctaattgatgagattggcagcggcactgatccagctgaaggtgtagctctttcaaccagcattttgaagtatctgcaagtagagtgaatttagccattgtgacaactcattatgctgatctaagtcggctccagtcagttgataaccgattcgagaatgctgcaatggaattttgtgtagaaac

SEQ ID NO: 722 - DNA, 274 bp, Zea mays
  misc_feature: Incyte ID No: 700343212H1
  unsure 17, 30, 34, 66-67, 74-75, 140, 195, 218, 249: a, t, c, g, or other
cagggatgaaggcctcnctgtctaaaatcnctcnttcatcccccgctggtggcagaatctgttacnngaggacnnagcctttggctcttctaatcagagcgcaagctgggagcacaggcactgcaggagagaatgcccantgaccagtcactgaccctgtgcagaacctcctggaagcgagctttgctgggagancgggtagctagcctgagagggancctctaaagggacctcaaaggtgattgtgcnaggctctgcgcctgccccacacact

SEQ ID NO: 723 - DNA, 274 bp, Zea mays
  misc_feature: Incyte ID No: 700343213H1
  unsure 83, 236, 241-242: a, t, c, g, or other
gacaaggtgttttttgcctcagtccgctctgggggcagcagccaagtttacttcatgactctgaaccgtaactgcatcatganctggtgacggggccctgggctggggctgtcccacactggacccagctctccccctgcagccaggcttcccgggccgcccctctttcccctccctgggcttttgcttttactggtttgatttcactggagcctgctgggaacgtgacctctgangcctnnatgcttcgtgatcacgtgaccatcctcttccc

SEQ ID NO: 724 - DNA, 277 bp, Zea mays
  misc_feature: Incyte ID No: 700343214H1
tctgggatgggtgtggagcaacttcatgccatgaaacttcgagtggtggaaatttattgaggtttggaattacaatgcaggggaggggttcaaaagtatgggatgttgttcttgacacttccaccatggagatcagttgtggttgtagaaagtttgaaaggatgggtcttctttgttcgcatgccctcaaagtcttcaccctgcagaatgttgacacaattccagaaaagtatgttttgaaacgctggacaaaagatgccaggagaagcatgtatac

SEQ ID NO: 725 - DNA, 283 bp, Zea mays
  misc_feature: Incyte ID No: 700343216H1
gagacagatggagggtaccctatttacaactgagtcagccaagccactgatgggaatatacagatttaggtgctaaaccgtttattttccacggatgagtcacaatctgaagaatcaaacttccatcctgaaaatctatatgtttcaaaaccacttgccatcctgttagattgccagttcctgggaccaggcctcagactgtgaagtatatatcctccagcattcagtccagggggagccacggaaaccatgttcttgcttaagccattaaagtcagagatga

SEQ ID NO: 726 - DNA, 275 bp, Zea mays
  misc_feature: Incyte ID No: 700343218H1
  unsure 80, 152: a, t, c, g, or other
gtgacaaaccagccgctgagtgtggccatcccgccagagcggtctatcacgccggtgcttcaggactttatggatcccancctgttctatctaccagcgtattactatggaggctacgacagttccatgagcgagtgggatgattatccaanctatctaaattcagatggagtggagattgccccagcagtgtatggagatatttatggatatgggtatgctcctacggggcatactctccggccattccccagttccaacggttgatggtcaga

SEQ ID NO: 727 - DNA, 277 bp, Zea mays
  misc_feature: Incyte ID No: 700343219H1
  unsure 242, 257: a, t, c, g, or other
caccacaagaaggacgaggagcagcccgccggcgagtacgggtactccgagaccgaggtggtcaccgccaccggcgagggcgagtacgagaggtacaagaaggaggagaaggagcacaagcacaagcagcaccttcggcgaggccggcgccatcgccgccggcgccttcgcactctacgagaagcacgaggcgaagaaggaccccgagcacgcgcacaggcacaagatcacggaggaggtcnctgccgcggcggccnttcggcgccggcggctacgt

SEQ ID NO: 728 - DNA, 273 bp, Zea mays
  misc_feature: Incyte ID No: 700343221H1
  unsure 20, 126: a, t, c, g, or other
atcaccgaagcgggagcggnccaaaatgaagtttaatccctttgtgacttccgaccgaagcaagaatcgcaaaaggcatttcaatgcaccttcccacattcgaaggaagattatgtcttcccctcnttccaaagagctgagacagaagtacaacgtgcgatccatgcccatccgaaaggatgatgaagttcaggttgtacgtggacactataaaggtcagcaaattggcaaagtagtccaggtttacaggaagaaatatgttatctacattga

SEQ ID NO: 729 - DNA, 271 bp, Zea mays
  misc_feature: Incyte ID No: 700343224H1
  unsure 160: a, t, c, g, or other
cgcttcttgaagatggtaagaaattggaaatgacatattcagtgaagtgggtagcgactgatgtgtcatttgcacgccgttttgaagtgtacctggactatcctttctttgaacaccagattcactggttctccattttcaactctttcatgatggttanccttcctaactggtttggtttcaatgatattgatgcggacttgagaaacgatatgccaaatatgctcgtgaagatgatgatctagagtccctggagagagatgttaatgag

SEQ ID NO: 730 - DNA, 264 bp, Zea mays
  misc_feature: Incyte ID No: 700343225H1
ttgatcttgaacttgagaacggtgagtatttcatgagtgacaaaaagaaatcagcaaagaaatggcaagagaagctggacaagcaatctgggagagctgaagaaaataaaagaaaaagagaggctgcatttgttcctccaaaggagaacactgcaggtccatccaaatctgacaagaatgccagtgacaacagtgagatagccgatatagcgaagtcattaaagagaaaggcgaaggaatttagaaagaacgaggcccaggaga

SEQ ID NO: 731 - DNA, 270 bp, Zea mays
  misc_feature: Incyte ID No: 700343226H1
  unsure 26, 265: a, t, c, g, or other
ccccatcagcgcatcccttttcgccngcctgcacacgccgccgccggcaatggccgcctgcgacgacgacgtcgccccgttcaaccgcctccgcctaccttgacccctcttactgggacgcgcggtttgggaaggaggagcactacgagtggttcaaggacttctcgcacttccgccacctcctcgcgccgctcctctccccgtccctctcggtcctcgaggtcgggtgcggcaatcgcggcttggcgaggatctcctgcggganggcgt

SEQ ID NO: 732 - DNA, 274 bp, Zea mays
  misc_feature: Incyte ID No: 700343230H1
  unsure 170, 173-174, 176, 180, 189, 192, 204, 207, 212, 227, 229, 237, 246: a, t, c, g, or other
caagttccttctgccaagcacaacacagaccatcgtctgcccgcccaactgcacccgccgccgtcgcctcccaaaacccaaccaaaccctagattcgccgccctcagctccggtcagaccctccccccttcgaagatgccgaacctcgagtgccggatgtatgaacagcngtnncnggangtggatgcngcngtgatgatccangtnatgcncatcgctgacatggncncgtacgtntccctgctncgagtacaacaacatcgagggcatgatc

SEQ ID NO: 733 - DNA, 278 bp, Zea mays
  misc_feature: Incyte ID No: 700343231H1
agaagtccgagctgcgagacgagaagacgaggctcaaggctgagaaggagaggttggagcagatgctcaagggcgtcgtcagccacgccgcggtggctgctcacggggcccttcgtcccgcaccctgctgcggtcgctccatctttccaccaccacccggcggcgtttgctcaggctggaaagttcgtcccgtaccccagctacccgccgccggctgcgttctggcagtggataccgccgacgtccctcgacacgaccaaggaccccgcacactggcc

SEQ ID NO: 734 - DNA, 277 bp, Zea mays
  misc_feature: Incyte ID No: 700343232H1
  unsure 267: a, t, c, g, or other
catgtttcagccaagcccagagccctaagattacaaacaactatggccggaacctcctcagctctccctctgcagagttccctaccctaagagaatgttaccacctgaacagtcctcggtgaatctgagaggagaggatggggtaaggcagaagcaccagctgtactactagaagggagcttttggtggtagatcccctggtgtctccaacctgactaggtggacagagctcaaagaggccctcttaccgctagcgaggtgataggncatctggctt

SEQ ID NO: 735 - DNA, 271 bp, Zea mays
  misc_feature: Incyte ID No: 700343233H1
  unsure 89, 219: a, t, c, g, or other
gcgccttccgcgaactgaggtctcccgagaggccgagaccaccccgatgtccgccatggagaccgacatcaacgcgccgccgcccgccncagccggcgagggatcctccgtggtcggtccgtcctcctcatcctcccgcaagcccaacaagcgcttcgagatcaagaagtggaacgccgtcgcgctctgggcatgggatatcgtcgtcgacaatgcgcnatctgccgcaaccacatcatggatctatgcatcgagtgccaggcgaaccaag

SEQ ID NO: 736 - DNA, 274 bp, Zea mays
  misc_feature: Incyte ID No: 700343234H1
gcttcttatgcacagcaggctgcatatcctgcatatggaacttacgactacagccatcaaatgccccagcctgctcctcaagcagctgcctatggtgcttatcctccaacatactctgcacaggcttatacacaacaaagctacccacagcctggcagcaattccagcagcaccagtaccagcacctacagcgccgtcagcttatcctcaacaacctgcggcagctcaaccttattatggcacaacctactactgataagtagagtagtcgtgg

SEQ ID NO: 737 - DNA, 114 bp, Zea mays
  misc_feature: Incyte ID No: 700343235H1
  unsure 6, 34-35, 37, 42-43, 47, 49, 64, 86, 94, 96, 111: a, t, c, g, or other
atactnccatcttttgataaagtcgttccaccanncntcatnnatantnacataggcgaacttntctcaatatacaatgaattatntagacttnanagcccaccccctctnata

SEQ ID NO: 738 - DNA, 262 bp, Zea mays
  misc_feature: Incyte ID No: 700343237H1
ggaactgagagagtttctgttgttgcggagtttttaagaatgtcgcgtcatgacatatgatgtcctgagttgtattttgcgtacgggttccctggtgctgtttttgggaacttaccattactacaggcgcataatcttgggatcctggacaagggactcgttttatctatttgctcgtcttgtgctccgttatgttctatcggttaagttgcgcgtgacgctattatgtcatgaataaatgtatgcaattatacaaaaaaaa

SEQ ID NO: 739 - DNA, 265 bp, Zea mays
  misc_feature: Incyte ID No: 700343239H1
accgtgtctgtaccagggctacttgattgacacaatgtcgtttgttgacgccctgccttctctgcgatcgaggcagtggcaggctgtggttctggtaatgcttgacgcgctctctgtgcaccagcttcccgcccttgctccagtcttttcgaattcgaagcttgtgcaaaagatgttgaacgctgctcaggttagcagagaggagtatgactccatggtggacctgtttctaccgtttggaagatccgtccaggcgatcacgccc

SEQ ID NO: 740 - DNA, 260 bp, Zea mays
  misc_feature: Incyte ID No: 700343243H1
  unsure 165: a, t, c, g, or other
gttccacttgtgctaaatggcagtgactctgtgattcagtattatgtgccatatctttctgctatccaactatttgcagatccatcaagacctgcttcaagaaacaggcgtcctggggatgaaagtgatggggactctatggatactagcagtgagagcagcatncgagaatgacgttgagcggctaagagtctcatcatcactggaaggtaaacatcgactggaaaatggtggcatacgaatgatgatggtgaaggcga

SEQ ID NO: 741 - DNA, 266 bp, Zea mays
  misc_feature: Incyte ID No: 700343246H1
agcagcatatgcagctccaagggctcttgtctctatatcagctggtctaaaagattttgtactacttgagtctaacagtctactgctaacagcatgcataatttgccacgccagattgatcattccttttattgaagactatgttctgaattgaccataataggagagagaagcatggggagttagcatctcggcctcatccatttccaacaagccaaaagcactaactgaaagtctggcattttaagcaaaaataacatgtccta

SEQ ID NO: 742 - DNA, 270 bp, Zea mays
  misc_feature: Incyte ID No: 700343247H1
gtctagcaaacaaaccgcagcctgagcacccgaggagactccgtgcgaccgaagccagagccagcggaaccgaacggaagcgagacccccggcggctagcgagatggacggcggcgccggcgaggaggggaagcaggagcggcacctggtgctggcccacaagctcttccttctaccccacccctccgttgatgacctctccaaggtcgccctccgcgccgaagtcctcgacaccgtgaaatccgatgatatggcgacgctgtttgagtc

SEQ ID NO: 743 - DNA, 268 bp, Zea mays
  misc_feature: Incyte ID No: 700343248H1
  unsure 109, 240, 244: a, t, c, g, or other
ctgcgttgtaactgcgttatctctatgttgctgagcgtaaaatagttactgctccagggtgctttgttatttgatgcaccaacgggtggcagtgccgggcatgtttggntcgtagcctcacttgccacactttgcctaacttttctgcctaatgttagtttttcaattcgaacgactaaccttaggcaaagtatggcatagttagccacgaaccaaacaggcctgagtcatcagttttanttangtcagtgttcataaacatctgtaa

SEQ ID NO: 744 - DNA, 306 bp, Zea mays
  misc_feature: Incyte ID No: 700343250H1
  unsure 69, 71: a, t, c, g, or other
gaaatcatgcgtcttcaacatatcatcattctgcagaacaagatcgatcttatccaggaaagcgcaggntngaatcagcatgaagcaatccaaaaattcatccagggaacaatagctgaaggtgcacctgtggtgcctatatccgcccagctgaaatacaacattgatgttatctgtgaataccttgtgaagaaaatccccatccctgaaaggaactttacctcacctcccaacatgattgttatcgctccttgatgttaacaagcctggttcagaggtgatgaaattaagggtggtgtagctggt

SEQ ID NO: 745 - DNA, 300 bp, Zea mays
  misc_feature: Incyte ID No: 700343251H1
aagctaggggagcactgccttccaagtttgactgcgattatgcctatgtcttggggcatgtgtgctaccacatcatagctgccggtttgaacggttacatggccacagtgacaaatgttaagagtccagtgaacaagtggcgatgtggtgcggctcctatttcgtctatgatgactgtgcagcgatggtcgcgtggcccttcagccacccaaatcggaaagcctgctgttcacatggctagcgttgacttgaaaggaaaagcatacgatgtatgaggcagattctccagtttttgttgga

SEQ ID NO: 746 - DNA, 300 bp, Zea mays
  misc_feature: Incyte ID No: 700343252H1
  unsure 300: a, t, c, g, or other
gatgattccccagagccagagcagctccctgcagcgccttcaacacgtcgagaagcggatagtgcgggtgctggagcttgcgggagcggtgatggaggagctgggatactctcagggccctcgcaccgatgcagtcggcgcgcactgccgcgagttcatgatggctatgaaggaaattcaaacgacactgcgtgaggaaatcaaaagtgcttgcgaataccgtccattgaaaagtgtgattacagcgcaaggattgctaatgagatatgttgcaagaagctggagtatgtactcgagaan

SEQ ID NO: 747 - DNA, 300 bp, Zea mays
  misc_feature: Incyte ID No: 700343254H1
ggtcagcggtcgccgataatatgtccggcaagagcacgctcagtgaggtccgcaccagctccggcaccttcctcaggaagggccaggatcctattgttgagggtatagaggacaaaattgctgcatggacattccttccaaaagagaatggtgaagatatccaagtcctaagatataagcatggggagaagtatgaaccacactatgattacttcatgacaatgttaacactgtccgtggtggtcatcgctacgctactgttcttttgtacttaactgatgtaccagaaggaggggaaac

SEQ ID NO: 748 - DNA, 295 bp, Zea mays
  misc_feature: Incyte ID No: 700343255H1
cttcaggacaaaatcaataattggagggccacagctcttattttgacatccatccttttcgctgctgttgtgttctggttcattggcatatttatccccagcgtcgatcgtttcaatgaagagagcgagcatggccttactgtcgccgagagatcaaatctcaggccgctccttgatgaaaaggacgagccacggacatctgactaaaacctacgcaatcataaccttttatttcttggctagtccgtagtttttcccttatgccatcaacagtgaaatgtaatttgcagcccat

SEQ ID NO: 749 - DNA, 297 bp, Zea mays
  misc_feature: Incyte ID No: 700343256H1
  unsure 38, 152-153: a, t, c, g, or other
gggaaagattgacgaggctgctgatttgatgcaagaanttgctgtcgaaacatttggctccatggcaaagacggagaaaattgctttcattcttgagcaggtccggctatgcctagatcgtcaagattatgttcgagcacaaattttatcanngaaaatcagtactagagtatttgacgcagatccatcaaaggaaaaaaagaaaccaaaggagggtgacaacattgttcaggatgctcctgcagatattcctccctcctagaatgaagcgtatctactatgaactgtgattcgata

SEQ ID NO: 750 - DNA, 296 bp, Zea mays
  misc_feature: Incyte ID No: 700343257H1
actggagctgatcctttctactggatgcgtgttatcctcgcatcaaaccgtggcactgtgatggagttgggtattactccaattgtgacatctgggatggtaatgcaacttcttgttggatcgaagatcattgaagttgacaacagtgtgagagaggatcgtgctctgctgaatggtgcacaaaagttgcttggtatcctgattgctattggggaagctgtggcatatgtcctgtctggaatgtatggcagtgtaagccaacttggaacagggaatgctatcctcatatacttcag

SEQ ID NO: 751 - DNA, 300 bp, Zea mays
  misc_feature: Incyte ID No: 700343258H1
  unsure 223-224: a, t, c, g, or other
aagaagacgctcgtcttctacacgggccgcgcgccgcgcgaagggcaagacgccgtgggtcatgcacgagtaccgcctcgagggcagcctgccgcccaacctccaccgcggggccaaggacgaatgggctgtgtgtaaggtgatcaacaaagacttggcggggcaaggctgggcagcaacaaatggcgccgccgcacgccgtgtccgtgggcatggagcgcannacttcgctggccttcctcgacgacctggtgctcgacaacgccgacgacctgcccccgtcatcgactcgacaacgta

SEQ ID NO: 752 - DNA, 295 bp, Zea mays
  misc_feature: Incyte ID No: 700343259H1
  unsure 45: a, t, c, g, or other
ctttacagctcactatgtatttgcattgggagttgcaaggtttcntagctgcgcccactgggttctacaggttttggacacgcgtggtcgtctgttgacagctcttggctatggtttgtggccgtctatggtgcttttatcagaaatcgtgcagacattcatccttgcagatttctgctactactatgtgaagagtcttgttggtgggcaactggtgctacggcttccctcaggggtggtgtaagaagtgcagaagagatactctgaataacagttatgctctagtgcccaacct

SEQ ID NO: 753 - DNA, 296 bp, Zea mays
  misc_feature: Incyte ID No: 700343260H1
  unsure 211: a, t, c, g, or other
gaggatacagcaagcgggggttgcgaggaggcagcggacgctatgggcaacgccgggagtgcgccggaccagcccaagaactcggcggatggggccggcgctgccgacgcggagtctcgccgcgggccgccgtctacggtgcgtttcttccccgatgcggagcgccacaaggcacggcagccgccgccaataaagctcgaggaggaggagngcgtcccgccgccgcccgccaccgaggaggagatggccccgcgcaactctggcagtgtatgcgcttggggcgttcattgtgttga

SEQ ID NO: 754 - DNA, 294 bp, Zea mays
  misc_feature: Incyte ID No: 700343261H1
  unsure 292: a, t, c, g, or other
agatcgggctgtgggggtcgatcaaggctcttgcccggggctacgagatcctaatggggcttctcctgttcacgcccattgctttccttgcctggttcccgttcgtgtccgagttccagaccaggatgctgttcaaccaggccttcagcagaggtctgcagatctcccgtatcctgggaggacacaagaaagaccgagggacgcggagaaggagtagtagggctgctgattgaaggtccgtctatcgggattatgtcgtcctggagcggtctatcaggttcagagaatatangg

SEQ ID NO: 755 - DNA, 298 bp, Zea mays
  misc_feature: Incyte ID No: 700343262H1
  unsure 199-215: a, t, c, g, or other
atcaactgatcgatggaaccatagtggaggtagctcgctcgttggatggcagcgtacgtggccatcagcagcatgcagtcgtcgtcgtagcagagatgtcctagctacgtgtgtgtcatgcatccagactggcacataataaagaagtagatcatgcacccactagtgatcacttcgtctagtgtccctccgttcaatnnnnnnnnnnnnnnnnngtaccttacgtgacatgctgtagcacgtacgctagcagagcagcacctcaatgtccttgggttgctttgctggctctctgttt

SEQ ID NO: 756 - DNA, 227 bp, Zea mays
  misc_feature: Incyte ID No: 700343265H1
  unsure 5, 28, 50, 53, 58, 84-85, 87, 91, 96, 101, 110, 115-117, 119-120, 123,: a, t, c, g, or other
aagancgcacgctccccctctagtcatntcctcaaacaaaaaccctagcngcngcgcngccccgctccctagtggtcctccctnncncacnactgnagctncgtcacggnggatnnnannggngcggngaggatgaacgtgaagggcggcagccggattccggtacnccctccgggggccagcgcgctggtcaaggtggccgtgttcggcgncgcngccgtgtacgt

SEQ ID NO: 757 - DNA, 249 bp, Zea mays
  misc_feature: Incyte ID No: 700343266H1
  unsure 17, 137: a, t, c, g, or other
gtggagtagtggtaggnaaagctcgtcgccgagtcgccgtacgggggctcggctcgggtgagcgagcggcggccggcgggtactgaggcctgagggcgaggcgatgggccgcctccgtgacgggcgagccttcctcnaccgcgcgcttgtcctctcgtcgctgctccttctcgcctccggcgaaatcttcttcgaggaacggttcgatgatgggtgggatagccgctgggtgaaatctgattggaagaa

SEQ ID NO: 758 - DNA, 296 bp, Zea mays
  misc_feature: Incyte ID No: 700343270H1
ctctcttcctaggttcatcgttcctcctccgcgtccttccttccctccgcatcgcggcgcggcgcgatgatacagctgctcttcacgctgctagcggcggagggcgccgtggcggcggtgctactcttcaagacgccgctgcggaggctggccgtgctcgcgctcgaccacctcaagcggggccgcgggcctgtcatggtgcgcaccatcgcggccaccgtgcttgtcgtgctcgcatccagtctccacagcatggccaagatccgcggccacgccgaaggggagctcgacggtcc

SEQ ID NO: 759 - DNA, 229 bp, Zea mays
  misc_feature: Incyte ID No: 700343273H1
caccgctttaaatccgcctcctcccagcgtctccctcctcccggcctgtcccctcacctcctccccctatctctccaccgccgcagctagctgtgacgtcatgcactcgccggcgccaccgccaccgcatactatctacaattagccagccgtaggttaacctatcctgtgtcaagcaagcctctcgcaagcaacaaggaaggaagctagctagttttatagctgctgt

SEQ ID NO: 760 - DNA, 278 bp, Zea mays
  misc_feature: Incyte ID No: 700343274H1
ctgatctggtggcagggctggtaagagtttctgtgctcggtccaaaggaaggagacagtggttcagcagcaaccccttttggtgcagtcttcacaggctgtcacccccacactgcctctgcctcccggtgcagctaacttcatcaacagagtatccaaacctgcatgataatatatatgattattgtctatattgatgaatgtttatagagcttagcttttcttattcagtagcactgacaataatcaagtcatttattgtgcaaatatctggtatgt

SEQ ID NO: 761 - DNA, 293 bp, Zea mays
  misc_feature: Incyte ID No: 700343275H1
gtattagccatgaaaaagaggttattgctgcagccgatgaggttgtgggcagtattgataaagaggaactggctaagtatttatctctaaattcagatcctgaagatgaagaagcacagaaattcaagaaaaaaatagaagaaacgcgagatcagttggctgatgcactatatcaaaagtgtcttgcattggctgagattgaatcactgaagtctgatgagtcaattgaggtatctgctaaagatatttttgaggagaattacaaagaattgattaaatgggttgatgtcaaa

SEQ ID NO: 762 - DNA, 291 bp, Zea mays
  misc_feature: Incyte ID No: 700343276H1
  unsure 58, 118, 265: a, t, c, g, or other
atcgtgcaaacgtgtatgttggtttccaggtccagctagatcttacggggatattcangcatgggaaaatcccgacgttgaagatttctctgatccagatcttccgtgcacatctgtngcaaaagatccatgaaagtgttgttatggatctttgccaagttttggaccaggagttggatgcacttgagattgagactgtgcagaaggagacaatacatcccaggaagagttacaagatgaacagctcctgtgctgatatccttcncttgctgcacacagatggacgatgtc

SEQ ID NO: 763 - DNA, 294 bp, Zea mays
  misc_feature: Incyte ID No: 700343278H1
agttgctcttcctactccgcgcccggccgcctttgcctgccttcccatctcctctggtcttccgccatggcccagcccgtattcctctcctctctccgctcccgcctctgctccgcgccgccgtcgccgcaccatcacctccagcccagccgcggctaccacgtcgagctcggcgctcgcgagaaagcgcttttggaggaggatgttgctttgaagaggttcaaatcatacaagaacagtgtgaaacaggtctccaagattgggaatgttctcactttagctgttgtattggtt

SEQ ID NO: 764 - DNA, 292 bp, Zea mays
  misc_feature: Incyte ID No: 700343279H1
  unsure 170: a, t, c, g, or other
gttgttgcttctaatgagctcctccttgccaagaaaactactacactgaaaaggcgtcggcacgcgggcggtgaggatagcgtagtaagcatagcataccgcaggcgcggctggttgacaaatggcaagcttattcccacagctcgcgcagacggagcacggcgtagggnggcctcccatggcgcgccgagcttcctgttctgccatggcgcagtgcagccacggcagactcagcctcgctagagacctcgtccggtgtttcgacactccccacgaggcggaggcgtgattt

SEQ ID NO: 765 - DNA, 296 bp, Zea mays
  misc_feature: Incyte ID No: 700343280H1
gttccagatgaactccttgttgaaagggtggttggaaggcggcttgatcctgtaacagggaaaatatatcatttgaagtattctccgccagagaatgaagaaatcgcttcaaggcttacacaaagatttgacgatacagaagaaaaggttaagttgaggctggagacttattaccaaaatatcgagtcctgctatcaacatatgagaacattattgtcaaagtgcaaggagatgccacagtggatgctgtcttgctaagatcgacgagctgctgggttctatcctggagaagaaaa

SEQ ID NO: 766 - DNA, 296 bp, Zea mays
  misc_feature: Incyte ID No: 700343281H1
  unsure 113: a, t, c, g, or other
gccgccacctcaacccaggaacagagcgaggcgacgccgcggcacctcttctccggcgaagggaaatggcaaccgttccaggggatctgatctggcaggttgtgaggaagaanaactccttccttgtgaagcagttcggcaacggcaatgccaaggtgcagttcaccaaggagccgaacaacctctacaacatccactccttcaaacactcgggtttggcgaacaagaagactgtgacgatccagccagctgcaaaggactcggctgtggtctctctactaccaagaccaagaagc

SEQ ID NO: 767 - DNA, 288 bp, Zea mays
  misc_feature: Incyte ID No: 700343282H1
gagactgaatatatgcgcttgcagagacacaagatgggagttgaagattttgaacttttgactattattgggagaggtgcattcggagaggtgcgtctttgtagagagaaggtctctaagaatgtttatgcaatgaaaaagctcaagaaatctgaaatgcttcgtaggggccaggtagaacatgtcaaagctgaaaggaaccttcttgctgaagttgatagtgcttacatagttaagctctatatcttccaagacgaagagttctatatctcatcaggataccttcct

SEQ ID NO: 768 - DNA, 267 bp, Zea mays
  misc_feature: Incyte ID No: 700343283H1
  unsure 26, 40-41: a, t, c, g, or other
cccggtcgtcgtcgtcgcggcgtacngtctgagcgagcanncgagagcgagaggggggaacacaaaaccctagcaccgtcgccgacggacgccagagtagagagatggcggtggacgaggtgaattcggtctacgtcggcagccttccctacgaggccaacgaggagatgcttcgcgacgccttcgggtactacggcaccatcgtctccgtcaagtgattaatgatcatactatcaaaggcaatgttatggttttgttatttcatca

SEQ ID NO: 769 - DNA, 290 bp, Zea mays
  misc_feature: Incyte ID No: 700343284H1
  unsure 22: a, t, c, g, or other
ctcgagcttttgattgcaagangataacaggtgctggggtgagtttcgttgccccgcgcttgagtagtctcactatctccggggaaggtgttcaggggcctgccactgacagcatgtttgggaacacggtataccgtaatatttgagcataccatagtattttatataaaaggacgtttaggagcatatataagaactctatattttaaattatggttttgtcaataccacggtatttttaggatcaagaaaactttggtttgcacgcagctacagtctttctctctcct

SEQ ID NO: 770 - DNA, 286 bp, Zea mays
  misc_feature: Incyte ID No: 700343285H1
ccaaggcgtccgaaatccctgagctcgctgtcatcaaggacctgcatcttaggacggttgatgagctcggtttagataggtcgattgtttcaggtttattggatgaattggagcaacttcttaaaggagttgctatgatgaaagagctgacccttaggacaagagattaccttgtttcctttggtgaatgtatgtcgacaagaatatttgctgcatatttgaacaaacttgggaaaaaagcacgccatatgatgcattgatatggcttataaccaccgatgatttc

SEQ ID NO: 771 - DNA, 286 bp, Zea mays
  misc_feature: Incyte ID No: 700343286H1
  unsure 10, 45: a, t, c, g, or other
ctggcgaganaaccaaaccggaatgtgtgacgactgacgactgangtctgacgaggcgtaaacctcgctgactcgccctgccgccgccccgccccgcccgcgcgttctccgccgtcgtccccggaaggtttttgcctcagggcatgtggatctgttagttcacctgctgcaagcaagtatagctatagggttgaccagtgcagaagtatgaatccttactttgttgggatctgtccccgtcgcggtctccctgctgctccgcaagaggagaaaggcccaaggatga

SEQ ID NO: 772 - DNA, 285 bp, Zea mays
  misc_feature: Incyte ID No: 700343289H1
caaggacaaggcgatcaagaggtttcaggtgaggaacatcgtggaacaggcggccatcagggacgtccaggaagcatgcgtctatgatggctacgtcctcccgaagctgtacgccaaggtgcaccactgcgtctcgtgcgcgatccacgctcacatcgtccgcgtccgatcccgtgagaagcgcagggaccgcaagccgccggagcgcttcaggcgcagggaggataggcctgctggtggacaaggaggcccccgccctggtcctggtgctgctgctacagtcca

SEQ ID NO: 773 - DNA, 285 bp, Zea mays
  misc_feature: Incyte ID No: 700343290H1
gcaaggccctggcctaagacaggctggcacagccccaggcttggtgaggaagaggaaggggcctcatccactgtctgctagcaaagaatgtactcaggtgacaccacctgctccagccacgtccagtgccacagtccccagtagcctcaagcagcaccaatggggatgaccctgacaggtgccctcaggggtctgggaaatccaactctctccacagtgtgagtgcacgtgtgaagccccctcactcttccgctagggataaagcagatgtggatgccctttaag

SEQ ID NO: 774 - DNA, 283 bp, Zea mays
  misc_feature: Incyte ID No: 700343291H1
tattctctcatccaggaccaagtagttttggcatccaagttggaaactgcaccagtaaccaatgttgatgttgatgtcaatgcatcagagcttctaaaagaaaagggaaatagcgctttcaaaagaagacagtggatcaaggcaattgagttttactcagaggccatcagtttgagtgacacaaatgcaacatattactgcaacagagcagcagcttatctggaactgggccgttttaagcaggccgaagcagattgtgaccgggcctactgttggatagaaa

SEQ ID NO: 775 - DNA, 285 bp, Zea mays
  misc_feature: Incyte ID No: 700343292H1
  unsure 13, 44, 47: a, t, c, g, or other
aaccacccaagangcgtgcttccattcctagcccaacagaagcnaanacgccaccgaccaccggcctcgaagggatcatcttctctacaactcgtcctcgtggccttgttcctcctcttgtataggggactgcggcggagtggagatccgtgccgacatagtccgacttcttcgctcgctgcctacgattgatggcctcaccttcaccaaccgaagagttcagcagggaagcagctcgtcagtctctgatcgcgatctccgagtccactccggagacaccttcac

SEQ ID NO: 776 - DNA, 92 bp, Zea mays
  misc_feature: Incyte ID No: 700343293H1
  unsure 11, 14, 26, 36, 58, 79, 83: a, t, c, g, or other
ggcggtgttcnacngtggtggtggcnagcggctacnctcgatggcaactcgtggtcgnccgcgctacgtacaacttccnatcnggcaaactg

SEQ ID NO: 777 - DNA, 120 bp, Zea mays
  misc_feature: Incyte ID No: 700343294H1
  unsure 33, 84, 88, 91, 96, 100-101, 104, 107, 120: a, t, c, g, or other
cctatctgcagtccaccgtcgggcgagcccganaatcccgtctcctcggcgccgcggcccccggtttttttatgctttcctttnggtnggngacgnatannttnggngagggagaggaan

SEQ ID NO: 778 - DNA, 286 bp, Zea mays
  misc_feature: Incyte ID No: 700343295H1
  unsure 275: a, t, c, g, or other
aacctctcctatgttgatctttcaagcaattttttgcacggctcactgcctatgggcattggtgatttgagcgcgttgacattgctgaaccttcgtcagaacaactttactggcgaaatcccaagaacaatcaccaaacttaagaatctgttatacattgacttatcaagcaacaatttcaatggtagcatacctgatggcctccctgatgatctggtcgaatttaatgtttcctacaactacctgtctggctctgttccaagtatttactgaantcccagattca

SEQ ID NO: 779 - DNA, 285 bp, Zea mays
  misc_feature: Incyte ID No: 700343296H1
  unsure 49, 155, 262: a, t, c, g, or other
caaacataagcttcctcagtatgcaatacctgcacatatccgtgagctnattgaaagtaaacagacacctgatgtcctatatgatgagttgagcatgataaactatgcagaatatttcagcactcttatagtcatggaagaactcaatttggagncggaaatgagagcatatgacatggagggtgtctaatgagaaggaggggtatgcacttttgtctcttgaagtccctggtttggcagaaagaaggccatcatagtccangagacttcatatcgctagatatg

SEQ ID NO: 780 - DNA, 52 bp, Zea mays
  misc_feature: Incyte ID No: 700343304H1
aaacttttataatagaaggaagggaaaaagtgtggagccaaggcttccttga

SEQ ID NO: 781 - DNA, 258 bp, Zea mays
  misc_feature: Incyte ID No: 700343305H1
  unsure 24, 46: a, t, c, g, or other
atcaagcccccgccccgccgtcgnctgaggtagacaccaatccgcngccatggggcgtatgcacagccgcgggaagggtatctcatcgtcggcgcttccctacaagaggacgcctcctacctggctcaagaccgctgcctccgacgtggaggagatgatcacaaaggcagcgaagaagggacagatgccgtcgcagatcggcgtcctgctccgtgacagcacggtatcccccttgtcaagagcgtcaccggcagcaag

SEQ ID NO: 782 - DNA, 145 bp, Zea mays
  misc_feature: Incyte ID No: 700343307H1
ggataccaaatgcactgccagttttgcgtctgtgcccataattccatcttgatcagactagcagttaggaacaaataactgttttgattgtgttaatgtgagctcgccagcaaaatctgaggaacatttatcaggtacttcgttc

SEQ ID NO: 783 - DNA, 277 bp, Zea mays
  misc_feature: Incyte ID No: 700343310H1
  unsure 140: a, t, c, g, or other
agaaagagtccgtaaacaactcccggccatggcgaccgcagaccgggtcgccgccaccttcctctcctctttccccactcaccatccccgccccttttcctccgtttccctcgtgacaaaccctgtcatacccgtctccnttcgggccgctgtcacaggtggcccacggctcgcctcccgtctccgggtccaccgcgtcggcgccgcgtcgcccagcttcccaccacgaatccggaggtagcttctggggagaagaagatcagatggtcatcaaggg

SEQ ID NO: 784 - DNA, 277 bp, Zea mays
  misc_feature: Incyte ID No: 700343311H1
  unsure 262: a, t, c, g, or other
caaatacagcaaccgaatgagctagaggaaaataagcttggtggggtcaaaaccagaaaagcggatgaggagtgtttggagcaagaaaagtcccgtcagtctcctattcagagctttgcacttaggcttcttgagtataacattaatgcatctgaatttctgccattagccgaagcaccatcaactcctgacaggctaaatgattttggcattttgaaagtacctgatcaactttcagaagcaaatctcttttatggcgtanacccggtgcaatgca

SEQ ID NO: 785 - DNA, 278 bp, Zea mays
  misc_feature: Incyte ID No: 700343313H1
cgacctcaccctctgctgacctcgctcccctcccgtagccgccggagccctcatcggtttatcctcccgctgccacctgcaacagccccgggcggagatccatcctaactctacgtgcaggtgaccccaagtcctcaagtgggtggcgcaaccatgcccaaggttaagaatccccacgttttcatggacatatcaatcggtggaggtagcgccgagaggatcacattcgagctatttgcaaatgtagttccaaagaccgcggagaattcagagcacta

SEQ ID NO: 786 - DNA, 271 bp, Zea mays
  misc_feature: Incyte ID No: 700343318H1
  unsure 18: a, t, c, g, or other
atcaaatagttgcaaggntgttgctattcttgcagggcacacagctgaggtctcggtgcttgcatatgaatatggtcgaaacctgggtctagccttccagttaattgatgatgttcttgatttcaccggcacctctgcatcccttgggaagggttcattgtctgatattcgccacggaattattactgccccgatgctatatgcgatggaggaattcccacaatgcaagaagttgttgaccggggtttgataatcctgcaaatgtgaattg

SEQ ID NO: 787 - DNA, 66 bp, Zea mays
  misc_feature: Incyte ID No: 700343319H1
  unsure 20, 26, 28, 30, 34, 44, 63: a, t, c, g, or other
ttacataaggcagttacttnatgtgntntntaanccttaaaaanagtggagatgtatatcatntgt

SEQ ID NO: 788 - DNA, 261 bp, Zea mays
  misc_feature: Incyte ID No: 700343320H1
  unsure 6, 93, 246: a, t, c, g, or other
ctagcnctagccgccgtccgccgacttcatcgtcgccgtcgtctagacctcttcacgcactggaaagcttaaagtccgacatcaatggcgaanatcatcctgatctcatcatgtgccggaagcagcctggcatcgcgattggccgcctttgcgagaaatgtgatggcaagtgtgttgtctgcgactcgtacgtgcgcccatgtacgcttgtccgggtctgcgacgagtgcaattatggttcttccngggaaggtgtgtgat

SEQ ID NO: 789 - DNA, 271 bp, Zea mays
  misc_feature: Incyte ID No: 700343321H1
  unsure 21, 40: a, t, c, g, or other
cagcccaccactcgggcgcanaattcgtcgagcatccgcngcgctcgacggccaccggcccaccagggcaccatggcgtccgccacgcgtgctctgggggcgctcctccacagggcctcgtctctgtcttcctacgctcccgctctccggggagcctcgctctccgcggggacgggcctattggaagcgccggactgttccggaggcatgcggcgaggcggcggatttcgtcgttccagccgctctgcatgggaagacgctcctgcaaaat

SEQ ID NO: 790 - DNA, 271 bp, Zea mays
  misc_feature: Incyte ID No: 700343322H1
aagttctcattcaatacaagaactagtgcatttaattctagacacaattcaaaagatcaaagcctctccaagtcccaaattcattccaaccacctagtgacttgagagagtgtgtgttcgtgttcatttgcgctcttgttgcttggatggctttcttgcttcctcattttgttcccaagtgaattgtaattaaagcaagattaaggagacccgatctttgtgaccacctcaacggggattaggttctttggaaccgaacctcggaggtgag

SEQ ID NO: 791 - DNA, 272 bp, Zea mays
  misc_feature: Incyte ID No: 700343324H1
cggatcaattgtccgtacataagaagagtggagatgtaattagagtggacatggcgttgctaatatgatcgtttgcagcttgcggtcactatgggggacagatatcccccgggtccactagaaggcaagaaggcctcgcaaaaggctttgggcctattatctcgcaaagccatccctttgtgggccaggggaggactactgatggaatgggccgatgcgtgataaggaagcagtctcaggcccaagcatctcgacaactcaagcgctatctg

SEQ ID NO: 792 - DNA, 265 bp, Zea mays
  misc_feature: Incyte ID No: 700343325H1
  unsure 45, 65, 105, 135, 149, 223, 227, 241, 246: a, t, c, g, or other
ttggatcttgaacttgagaacggtgagtatttcatgagtgacaanaagacatcagcaaagaaatngcaagagaagctggacaagcaatctgggagagctgaaganaataaaagaaaaagagaggctgcatttgtncctccaaaggagancactgcaggtccatccaaatctgacaagaatgccagtgacaacagtgagatagccgatatagcgaagtcattanaganagaggcgaaggatntaganagaacgaggcccaggagag

SEQ ID NO: 793 - DNA, 273 bp, Zea mays
  misc_feature: Incyte ID No: 700343326H1
agctcttgatttgacacatcattgggaaatgttggatcaagagatcgaagccacgatcatgcctcttgtgtatcgctacaagatttgggtgctttgcaacgattgcaacaaggtctcagaggtgaactttcacgtgattggccacaagtgcagccactgcagatcgtacaacacccgaacgacatcgcgccctgcagatttatcgggaagcagctcaccttcaacagactcatccgacaacaacatatagagaagaaaccattgacagagcca

SEQ ID NO: 794 - DNA, 272 bp, Zea mays
  misc_feature: Incyte ID No: 700343327H1
aagtctgttgatattcctgattccaatattgaaacaagtgattatcaccacagccacacacggcagctgcgtgatattgtagataagtggatcacaaattttactgacttcatgaactgtcaaaaggaatacataaatgctctctatggctggttgaagttgaaccttatacccatagagagcagcctgaaggagaaagtagcatcgccacctaggatgcagcaacctcctatcaaagcctttctttatgcctggcatgagcacctagccaa

SEQ ID NO: 795 - DNA, 264 bp, Zea mays
  misc_feature: Incyte ID No: 700343328H1
  unsure 54: a, t, c, g, or other
atttgagagtcgacttaagcttgagacacggcttcaagttcttgagggtagacnacttgggaaatctgctggttccacaaaggggaagcccaagatagaagtgtatgaaaaggaccggaagaagggtactggggctttaacaactcctgctaagacatataaccctgcagctgatctggtactcacggaagaaacaccaaagaagtcagaattggcttcaaagaagaggaaacataatgaggtggaaactgaaccattagcaga

SEQ ID NO: 796 - DNA, 275 bp, Zea mays
  misc_feature: Incyte ID No: 700343330H1
  unsure 265, 268, 271: a, t, c, g, or other
tggaagctgtggaacagcgctggaccatggtgtcacggccgtcggctacgggacagagaacggcaaggactactggatcgtgaagaactcatggggcagcagctggggcgagtccgggtacgtgaggatggagcgcaacatcaaggcgtccagcggcaagtgcggtatcgcggttgagccgtcatacccgttgaaggagggcgccaacccgccgaaccctggccccagcccgccgtccccgaccccggcgcccgccgtgtgcganaantantatg

SEQ ID NO: 797 - DNA, 268 bp, Zea mays
  misc_feature: Incyte ID No: 700343331H1
  unsure 223, 228, 244, 258, 264: a, t, c, g, or other
aggctgtgggtggtggcggggccgtccatcttcacgcgcttctcctccttcggcgtcaccgtcatcagccaggccttcatcggccacatcggcgccacggagctggccgcctacgcgctcgtctccaccgtgctcatgaggttcagcaacggcatcctgctgggcatggcgagcgcgctggagacttgtgcgggcagtcgtagggcgcgaggcatacaaatgntgggnatctacttgaagggtngtggatcatctgtnggggcncggg

SEQ ID NO: 798 - DNA, 278 bp, Zea mays
  misc_feature: Incyte ID No: 700343332H1
cctcgacgcctctctctctttccccgagctctcgaaaccctaggtgcgtgccgaccggcggcggcggcgaggtgatggcgatggacccggacgcggtggcgaaagccttcgtggagcactactaccggacgttcgacaccaaccgcgcggcgctggtggggctgtatcaggagacctccatgctcaccttcgagggccagaagttccagggcccatccgccattgccggcaagctcggatctcttcccttccaggcctgcgagcaccagatcgtcacc

SEQ ID NO: 799 - DNA, 265 bp, Zea mays
  misc_feature: Incyte ID No: 700343333H1
catgatggaagttgatagggttctaaggcctggtggctactgggtgctgtctggccctccaattaactggaaggtgaactacaagggctggcaacgcacaaagaaggatcttgaggcagagcagaacagaatagaggaaattgctgaccttctatgctgggaaaaagtctcagagaagggcgagatggcgatatggaggaaaagggtgaataccgagtcttgccttctaggcaagaagatcagtgtgcagattgtgatcacaaac

SEQ ID NO: 800 - DNA, 268 bp, Zea mays
  misc_feature: Incyte ID No: 700343334H1
  unsure 82: a, t, c, g, or other
gtcgtggccgcagagatacacggtcgccgccggcatcgcgtcggtgctgtcgtacctccaccaggagtgcgagcagcgcgtncatccaccgggacatcaagaccagcaacatcctgctggacgtcaacctgagcccgcgcctgggcgacttcgggctggccaggctcatggaccacaacaagagccccgtgtccagctcaccgcggggaccatgggtacctcgcgccggagtacttcatccggcaaaggccaccgagcagaccgacgt

SEQ ID NO: 801 - DNA, 267 bp, Zea mays
  misc_feature: Incyte ID No: 700343335H1
  unsure 252: a, t, c, g, or other
ccgagacctattcgacattaggtattcagttcggttcttgggagagccagtctgctgctgcttgcggtgactggcaccagcgcgcaaggcttcctagagaccatctacctgcgccgttccgatgggttgcttcgggtgcttcgcgccggagggaccgaggaccttaggccctccaagcacgacgattcgtcaggggctgatgcgaggaggaaggtcgcgccggatgtggccagcggctacgcgcacactttnaccttcaaggatctg

SEQ ID NO: 802 - DNA, 267 bp, Zea mays
  misc_feature: Incyte ID No: 700343336H1
gtttgcagttgttaaacttcttggttccagatcattacctgcaatcatccgtgctttactggatcatatatcaagtaagattacaggtttgctaccgaaaataaatgcactgcaagaagcattaccaaaatctattgggcttctttcatttgatggtggtatagcaggttgccaaaagatagttcatgaaattttgacatgggaagcaaaatctgaagttaaaactgaagttcttcatgaccttaaggaattggaagtgctttgtat

SEQ ID NO: 803 - DNA, 148 bp, Zea mays
  misc_feature: Incyte ID No: 700343337H1
gtacctgggaaaccaaacagtgccaagtaacttttacggagcgttatgtgcagctcgtgtagaaaattcaattgaaccgtatttcctgtcgtgtaccttccagtaccgtattatattatatatttattattcaattggacctgcactc

SEQ ID NO: 804 - DNA, 265 bp, Zea mays
  misc_feature: Incyte ID No: 700343339H1
gatctgcaggatttcaataaagtaaacgagatctatggcaaatatttcccggtgccagcacctgcacgatcaacctaccaagtggcggcgctgccactgaatgcccggattgagattgagtgcatcgctgctctctaatcagatcatccaaccactcattaaatcatcaataagcacccaggaatttgtggtagaggtacctgtaccagttcagtgtctgaaaactgcgggtaacaaacctttgtgtcccggataagtgatgtgt

SEQ ID NO: 805 - DNA, 265 bp, Zea mays
  misc_feature: Incyte ID No: 700343340H1
  unsure 70, 108: a, t, c, g, or other
ggacaagacaactgttctggagctgacgtacaactatggagtcacagaatacagcaagggcaatgcatangctcaggttgccattggcaccaatgatgtgtacaagancgccgaggcggttgatctggcgaccaaagaactaggtggcaagattttgcggcagccagggcctctacctgggatcaacactaagatcgcctcttttgttgatccagatggctggaaagtggttctggttgacaacaccgacttctcaaggaactcc

SEQ ID NO: 806 - DNA, 266 bp, Zea mays
  misc_feature: Incyte ID No: 700343341H1
tcacactggttctgatgatgaggatgatgatctgcttcatgacactcaagagaaaaccatggatctggttactcccttctacaattcagtaaagcaaatcgtgcgggagacttctattgtaacgaccagacgagtatttgaaaggattgtagttcgtcatgtttcacaaagaacagcatggaaacttctcaaagatgcttcaaaatcatcaaaaaggaaagctgcaagggggatgccaactccacagtacacatactgtgttgcca

SEQ ID NO: 807 - DNA, 232 bp, Zea mays
  misc_feature: Incyte ID No: 700343342H1
  unsure 19, 44-46: a, t, c, g, or other
tttcttcgtcttcctcgcngcgccgccgctccatcttccgctgnnncgctcgctcccgcctctcgccacgcaggcggcggcgctcaggcccgtgatttcagcgacggcgtcagggcttcccctcccgtctcttcccagtcgcctcgcgccctcgcctccggtcctccgcacaccggccggtgaccctgcatccaccatgactggtgtcagcactggattgttgacgggcttg

SEQ ID NO: 808 - DNA, 266 bp, Zea mays
  misc_feature: Incyte ID No: 700343343H1
aaagtagaaagaacttgcttatgggacaatggctagactttgtccgtgacaatcatgtgcaggagggagatatctgcctctttttaccgacaaaagatgagataagacacacatttatggtctatattcttcatgaaacaacccattctagatgtggggctggctttcaaagggttggcccatgccttggtggtgcatccagtgcaaagatggcttcagaagttcatattgaggatgaaccaaccactggagaacatgtttcgtcg

SEQ ID NO: 809 - DNA, 95 bp, Zea mays
  misc_feature: Incyte ID No: 700343345H1
gctagcttttgtaaaaattcatataggtatttgttagggttgggatgggattccgcccttacagttagaaaaggccttatcttttaaagcggggc

SEQ ID NO: 810 - DNA, 269 bp, Zea mays
  misc_feature: Incyte ID No: 700343346H1
ccgagaatgagaacgcagcagattactttggactcttcaaaaaatttcacaccctggcacttgatggtgttccaaagtttgggtctagtaacagaacagcagcttatcggttcgtcacactgattgatgttatgtacgagaacaaagcaaggctgttatgtacagccgaggctggaccagtagaactgtttgagaatatcatgactcttgctgaagcacagaaggtttcaccaagatcttcgcgctcacagaaaagtgacgaccctgac

SEQ ID NO: 811 - DNA, 271 bp, Zea mays
  misc_feature: Incyte ID No: 700343347H1
ggatgatgagtatcttgctgctctccaagctgatcgagaaaaagagttgaaggctgtgcaggaggctgaacttcgcagggtagaggaagctgcagcaagagaggctgctcttgaacgtcaaaagaaagaagaggaggagaagctaaagaaacaacgtgaggaagaggagttggaatccaagcttgcagccaaacaagcatcactacctaaggagccactacaaaatgacgagggggctgtcacagtggtagtccgcatgcctgatggtagt

SEQ ID NO: 812 - DNA, 294 bp, Zea mays
  misc_feature: Incyte ID No: 700343352H1
  unsure 250, 252, 255, 263, 278: a, t, c, g, or other
gactagttctagggacttacgggattcaactgccggtgtgggaacttgtactgcgcactccaccgctactccgacaagcacgactgcaagttcgactaccggactgctgccagggacgccattgccaaggctaatccggtggtgaaggcagacaagctcgacaagatctagggggggttccctacggttgggtatcaggaagattgtaaaccgcggtaactcgtcatgcggaactgctgccttgcccccngngcntttctctncatgtttgctgaaanatcttgtgggggaaag

SEQ ID NO: 813 - DNA, 299 bp, Zea mays
  misc_feature: Incyte ID No: 700343353H1
  unsure 28, 34, 67, 89, 167, 176, 178, 201, 211, 215, 225, 227-228, 235,: a, t, c, g, or other
gtgttagatccgtccgcctgagccaganccagancgaaggagtcaatctcacggcacgcgccatgtnccgacgagtccgccgccgccanctccggcggccgagaagagtcagcccgccgagcaggcggcaggaggctggggcggatggggactctccatcttctcanagatctccngnaacgcgtgagaggttgctaagantgccatcgcngatnttcagcaacngnnggagcangacnnngtacngggtattggnnagangtntcaagatnatgtncngnnngngngnngnatnaant

SEQ ID NO: 814 - DNA, 298 bp, Zea mays
  misc_feature: Incyte ID No: 700343354H1
  unsure 40, 60, 234, 257, 263, 278, 291, 295: a, t, c, g, or other
ctgaactgcaggaagagaagaacaaaaaacggaagctagnccgagctgagtatgacaganggtccagggaaaggagcggggaacgtgccagggattcgagcagggatcgctacatagaccgcagcagcagccgtgacagggagtatgaccgcagaagaagccatgatcgctaccatgacagggaaagagagagagattccaggcagtctcgtagttatgattccagaagccacngcagtcatattcaccagggggantttctngggattatgatcgtntgggcgtcatgancgcngtg

SEQ ID NO: 815 - DNA, 106 bp, Zea mays
  misc_feature: Incyte ID No: 700343358H1
  unsure 51, 54, 58, 70, 78, 80, 88, 95-96: a, t, c, g, or other
aatatttgtaactcaaatgtccagaagaactgtacactactgtggcatgtnttncagnaatttcatcatntgtaagananagtgggtntgttganngacaaatttt

SEQ ID NO: 816 - DNA, 297 bp, Zea mays
  misc_feature: Incyte ID No: 700343359H1
  unsure 32, 104, 106, 204, 287, 291: a, t, c, g, or other
tagtcgagcgagcccttatagttaattaagcnagtcgatcgatccaagagaagaagaagcagcagacaggaatggcgtcgctctcgatgacgacgagcgcaggncnccgcgcgcagtggacgcctaggcagaacaagctgttcgagcaggcgctggcggtgtacgacaaggacacgcccgaccgctggcacaacatcgcctgcnccgtcggggcgggaagtccgcggacgacgtcaggcgctactacgagtgctggaggaggacgtcggccacatcgagtccggcangttnccttcc

SEQ ID NO: 817 - DNA, 298 bp, Zea mays
  misc_feature: Incyte ID No: 700343360H1
  unsure 284, 288, 291-292: a, t, c, g, or other
gcaatacaaaccatgagcatgatcagccgcctcatctccgcttgagggatcctacagtacccgaacgagtaaatgttgcactgtatgcagcgccagaatcacgctattgcccagcccgggtttacgaatatatctctgatgagaaaggtgacccaaagcttcatataaatgcacagaattgtcttcattgcaaggcttgcgacatcaaagatccaaagcagaacatcgagtggacagttccagaaggtggaggtggccctggttacacagtaatgtagattgcncagngannaaattt

SEQ ID NO: 818 - DNA, 292 bp, Zea mays
  misc_feature: Incyte ID No: 700343362H1
  unsure 19, 21, 68, 130, 253, 270, 281, 285: a, t, c, g, or other
acgttttaagctgcgagcnanatctgctttcacagcgtggctgaccagcagatccgtcgttgccggancccacgctcgccggctgcgaatgcatctgtagcctgctcttcgtccacacggacaattggangagctagactctgcgtcgccggcgatggggtgctccttctcagggctgaacgcactgtacgacaccgtcggcggtcggggtggtgacgtctgggttaacgactaccacttccgcgtgctccgnaggctcggcgatgcggncctgcgggctngtcnttcttcc

SEQ ID NO: 819 - DNA, 298 bp, Zea mays
  misc_feature: Incyte ID No: 700343363H1
  unsure 160-161, 204, 224, 233, 237, 242, 253, 283-284, 294, 297: a, t, c, g, or other
ccaaacacttgcgccgccgctgcctcacaggtaaggccgccatggtctccggttcgggcgtgtgcgcgaagatccgtggtcgacgcgcgccaccacatgctgggccgtctctcctcgatcatagccaaggagctgctcaatgggcagaaggtaggtcgtnntccgctgcgaggagatctgcatgtcgggacggcctcgtccgtnagaagatgaagtacctccgnttcctccgnaagnggatnaacacaagcgntcccaggggcccataatttcggcgccccgnnaagatttggnggng

SEQ ID NO: 820 - DNA, 294 bp, Zea mays
  misc_feature: Incyte ID No: 700343365H1
  unsure 242, 260, 265, 270, 276, 278, 281, 284, 286, 291, 293: a, t, c, g, or other
ctcatttccactttccactccgcctccgctgccgatcgccgtccccgaccgcagtgcaggactgaggatgagtgaagaggataaggctgctgcttctgctgagcagcctaagagggcccctaagctcaatgaaaggatcctctcctctctgtccaggaggtccgtagctgctcatccatggcatgatctcgagatcggtcctggtgctcctgctgtattcaatgttgttgttgagatcacanggggaagcaaagtcaatncgagnttganaagaanantgntgntnttgtncnc

SEQ ID NO: 821 - DNA, 295 bp, Zea mays
  misc_feature: Incyte ID No: 700343366H1
  unsure 38-39: a, t, c, g, or other
ttcgacgatctagttccctgccctttccagcaacctgnncggagctgcatcgtctactctgaaaagatcacaggagattgaaatcggaccatcaaagaagcatcccaaagttgatgagcaggtaccattacctgatagtcatctctcttgtattcttgaatttgatggtgcctctaaaggaaatccagggaaagccggtgctggagcaataataaggcaggtagatggttccgtgattgctcaactacgtgagggtctgggcattgcaaccaacaatgctgctgaatatcgtgca

SEQ ID NO: 822 - DNA, 213 bp, Zea mays
  misc_feature: Incyte ID No: 700343367H1
  unsure 200, 203: a, t, c, g, or other
ggacttcttgaagaacatgtgcaatagagaatcctgccggtttttacaccctgggacacatacagcggctgcgagcgccaatgttgaagtatgccgtgattttaaacgaggagaatgcaatcgacctgcctgtcgctttttgcatccatatacaagttgaagttttctgttagctaaacttgagtgctctgcccaccgcngcngctactgctg

SEQ ID NO: 823 - DNA, 291 bp, Zea mays
  misc_feature: Incyte ID No: 700343368H1
  unsure 77, 256, 258, 283, 287: a, t, c, g, or other
gctttccagggcagtggaaagcatctaaagactgcaccagttggcaatggcctcatcgagtaaacagtggtaaaagngcttaagatgctttccagggcagtggaaagtgttttatgatgatccaaataggccaaatcggtatttgcttgcccgagaactcacaagtaggcccgatgcaactgatattgagagaatatttggtggtgccgatgagcatctgaagaggcaccatcgttgatgaacaatgtcatgggcntnttcagttccgtgagtcggtttatgnggcncccc

SEQ ID NO: 824 - DNA, 288 bp, Zea mays
  misc_feature: Incyte ID No: 700343369H1
  unsure 194, 204, 253, 271-272, 281, 283: a, t, c, g, or other
agagtatcagcctaggactgagtatcactctcgcaatgcagacggtactgctcaaataaaacaacctggctttagctctgctaccagcggtgggacctgaatttcttcactctcagccacaacaatccacacttagtaacactccaaatcagcagcctgagtttggctcatctcgatcatggaattcaggtttnggtgctcctnaagcgcacctggatatggtgcacctcagctgtacagacaccacagccantttggtgcttcggggggnnaccgaggananaaaaa

SEQ ID NO: 825 - DNA, 294 bp, Zea mays
  misc_feature: Incyte ID No: 700343372H1
  unsure 9, 34, 37, 131, 143, 152, 185, 191, 261, 264, 266-268, 270-271: a, t, c, g, or other
gggaactcngccactttcgaaaatggtggtgtanatnattattcagagagaggtgaccgactgattgatcttgatgctttccgtgaaaaacttctccagatttcacaagcattgaactcacaattaaccgngcctgagaaagntggactaanagaatcagttcatcatttgctcaaatgggcgtnccgatntaacaaaaatcttgaagagcaggctgcccaacttcacatgttgactggctggtcacagattgttgaggtngcngnnncnngaaggatgtcattattcgaggac

SEQ ID NO: 826 - DNA, 240 bp, Zea mays
  misc_feature: Incyte ID No: 700343373H1
  unsure 208, 223, 234-235, 238: a, t, c, g, or other
tcggtacaaggatcaccgctgtgcctgcgcgtgctgcttcaccgaatcgagtcagatcctgtccgaatccgagctaagggatggcaaccggtagtgaagcctcgaaggcagctgaggctgtggttgactggcataaacacgacagcaagaggatgctccatgcggtttaccgtgttggggatctggaccgcaaaatcaagtactacanggattctttgggatnaaactgctgannaanag

SEQ ID NO: 827 - DNA, 291 bp, Zea mays
  misc_feature: Incyte ID No: 700343374H1
  unsure 224, 246: a, t, c, g, or other
gtaagcagcagcaggaaccctagcaccgccgcatccgcagccatgggtatcgacctcgttgccggtgggaggaacaagaagaccaagcgcacagcgccgaagtccgacgatgtttatctcaagctccttgtcaagctctaccgtttcttggtcaggaggaccaagagcaacttcaatgctgtcattctcaagaggctcttcatgagcaaaaccaatcgcccacnaatctccatgcgccgccttgtnaagttcatggaaggaaaggagaagaacattgctgtgattgttggc

SEQ ID NO: 828 - DNA, 289 bp, Zea mays
  misc_feature: Incyte ID No: 700343376H1
  unsure 66, 200, 202, 239, 252, 255, 266, 282, 287: a, t, c, g, or other
gcggaggggaggcgtcggcgcaataaaaggcggcgcttttgcatcgcccctccccggcatgcgtantagcctcgcggctggcccccacgccatgcagaccaccgggcccgcatcgccggataagccgccagttgttgacccggaggccgacgacaaggtggaggaaggggcgcgggcgaaggaggacgatgcggcgaaantnagcggcgaggatgaggatgaggaagagccaggagggnaggagaggcaggnggnagggccccggnaaggtttccggcgggnaaatntc

SEQ ID NO: 829 - DNA, 290 bp, Zea mays
  misc_feature: Incyte ID No: 700343377H1
  unsure 255, 265, 276, 278, 280, 286-287: a, t, c, g, or other
atcgtgaacccgccgccgacgcagcagcaggagacgcgccaaggagagcccgcaaggaggcgactatgagggccaagtggaagaagaagcgcatgaggaggctgaagaggaagcgccgaaagatgaggcagagatccaagtaggctgatggggattgtggatggtggtgtcggcatagttgtgttacgtttcttcgatgcgtgagttcatggagagatgtcacatcctagttcgtcgtcaccgtttgccatgggncaatggctcntcttgaaaccntncnttcagnngcc

SEQ ID NO: 830 - DNA, 284 bp, Zea mays
  misc_feature: Incyte ID No: 700343378H1
  unsure 5, 16, 18, 30, 37, 50, 57-58, 93, 100, 202, 213, 218, 230, 240, 244,: a, t, c, g, or other
caganagccgccgagntnagaacttgagangtcaggngactacggtctcntgagggnnagtgagggaggacgcagtttgtactctgctgcgtnctttccntatatcatgggattggaagacaccggatttctatcttggatctacgacaccaggagaaatggctgaccatcctaatccggagtcctgttttaggaggtcatngagatcccagnacccngaattcttgtgncataaaccgngtanaggagtctntgnnccannaaaangngggttcnctnnntgg

SEQ ID NO: 831 - DNA, 285 bp, Zea mays
  misc_feature: Incyte ID No: 700343379H1
  unsure 184, 278, 282, 284: a, t, c, g, or other
cacaaagtctaaacctgaaaacggaggctgtcatgacgatctttagtaaagcagtacggaagttattcttgagctacattcagagagcaaaagaagctggaaaccgcattgaaactgcaaaagaactgaagaagttaatttcctcaacatagttgttgttaccgagcttttagctgacattaanggagaactatctccagttgctgaaacgaagctcaagtgcagcttcagatctgaaggggaggttggtgaacatgatgggatcttggatacactgnggangnc

SEQ ID NO: 832 - DNA, 295 bp, Zea mays
  misc_feature: Incyte ID No: 700343380H1
  unsure 22, 177, 200, 207, 211, 236, 239, 242, 245, 250-253, 256, 259, 261-263,: a, t, c, g, or other
gccgacttcatcaaggtcagcnacgacgaggtggccttcctcacgcgcggggacgccaacgacgagaagaacgtgctgtccctgtggtttgacgggctcaagctgctcgtcgtcaccgacggggacaagggatgcaggtacttcaccaaggacttcaagggcagcgtgcccggtttnaaggtcgacaccgtcgacaccancggcgcnggcnacgccttcgtcggctccctctcgtnaangtngcnaaggnnnntcnttntnnnaganggnggnnnnnntccnnnntnttttnagg

SEQ ID NO: 833 - DNA, 287 bp, Zea mays
  misc_feature: Incyte ID No: 700343382H1
  unsure 17, 84: a, t, c, g, or other
ttgagttgctgaaaganaaactattggaggagcaggggcgcagggaaagagcagaacttgaattatctaaactgcaggaaattngtgctagagcacataagctggagcttgaattagcatcttgtacagcactgctcagcaacatacctgatgtgtcttcttatgctgacataccccaaaagatcgcagatctgcaaaagcaagcattgacatatttgaacgaagttggtgaggtaacatcaaggttgaaagaattagaggttgcactagaatatgctgatctcagc

SEQ ID NO: 834 - DNA, 283 bp, Zea mays
  misc_feature: Incyte ID No: 700343383H1
  unsure 250, 253-254, 258-259, 272, 281: a, t, c, g, or other
cttacactgaactgcagctggcaccttcctctggtgaggagaccatgacatgtatgtgtagtgagctgcccagccaggaggtggaggctccaagcagtgaccctttggagaataatgaagaaacgaaaaatgaagctgctgctcaaggatcagtaaatgaggattctgctcctcgtgctgaaaatgcaaagattgatgaagctgacacagaacaggaatgcttccatctggtgaggccacggtagacgantcnngggnntactcagccagangaaggggtnct

SEQ ID NO: 835 - DNA, 284 bp, Zea mays
  misc_feature: Incyte ID No: 700343385H1
  unsure 43, 79, 94, 102, 108, 120, 130, 132, 134, 136, 148, 159, 163, 171, 206,: a, t, c, g, or other
cttcggccgcccgcgccgtcccatcgtctccctctcctcaaantccccacaaaccgctctctccctctcgcttcccgcncctaattcccatccnccacctcnaaatcncacatcactcanaaccctcgcngngncnctgctgcgcgcncccccgatggnagcngtcgcgtntcggaggaggccgtcaaggcggcgaaggtgtgatnctcggaggggntggcatcggttntnagctnctnaagaggctcgtgtntngngnttgagnganananaaatnntgtnng

SEQ ID NO: 836 - DNA, 285 bp, Zea mays
  misc_feature: Incyte ID No: 700343386H1
  unsure 113, 195, 232, 240, 254, 261, 264, 268, 271-272, 280-281: a, t, c, g, or other
agcatctgggctgggtgttccccgccgccgccgacgaggagcccggcgccgagcccgaccctctcaacggcgcccggagcgtgagggagatctacgagatcgccagctccaantacgccgggaagccaaccgtccccgtgctgtgggacaagcagctgaagacggtggtgaacaacgagagctccgagatcatcnggatgctcaacgccgagttcaacggcatcgccagganaccccggnctggacctctaccnggcccantgngggnctnnatcgaganntttt

SEQ ID NO: 837 - DNA, 286 bp, Zea mays
  misc_feature: Incyte ID No: 700343387H1
  unsure 262: a, t, c, g, or other
ccatccaacatccagagtgccgaaaccgacggcagaacctgcgcgagagcttgcttggtagaggagctcgctgctcctgctcgccacccagttcatctcgatcattcccttgtggcgttttcctctccccgttcctttctgccgctgtcacgcaattactaacgccgacgaattgaagaagaaaacgtcactgcagcgagctgtgagcgatcttgcgttgatggagccagtgtcagcctgcgccaatgggaggtcggatttnggattacagataggtacaggaggg

SEQ ID NO: 838 - DNA, 281 bp, Zea mays
  misc_feature: Incyte ID No: 700343388H1
  unsure 252: a, t, c, g, or other
tgtatagcccgaacatcaatacctttgatgtgaagctggggacctttgtgccgtcttaaaatgtcatcatctaaatgacgatatgttcggaagagatttcgagcagagcctgattccgtgcgggatctgctcaaggagccatattttgcagcccctgtttgtatcagtcggtcacctacctacaaaaccccggcctgaaccgtgtacagtgttatctgaagctgcagtgtttaagcagtgtgaagctatttngaagaagattatggaaatgtagtatatat

SEQ ID NO: 839 - DNA, 276 bp, Zea mays
  misc_feature: Incyte ID No: 700343389H1
  unsure 5, 7, 9, 15, 42, 51, 61, 64, 102, 106, 112, 116, 119-120, 143-144,: a, t, c, g, or other
gctgncngngttcgngatgtcggagatcaggacagtgtacgngacggattnaactggtgancangtccgccttgctccaaggccggcatgtgccttcgctgntcancctgtncctnggnntcggaggtgcagagcgcgctgannanncngacactgcaggcccgcagcangcacgaggncatcgggctgntcaacgtgtgcgagnacctngcttgctccncgggcnctggccaaggataatttggntcncccgagaagcgtttccagcagcngatg

SEQ ID NO: 840 - DNA, 97 bp, Zea mays
  misc_feature: Incyte ID No: 700343390H1
  unsure 14, 80, 94: a, t, c, g, or other
ctggaatacaagancaatatttccattttattaaactgtggctttttaaaaaaggatttttacatgtaagagcatctatncttaacatagtttnctt

SEQ ID NO: 841 - DNA, 278 bp, Zea mays
  misc_feature: Incyte ID No: 700343393H1
  unsure 60, 133, 138, 148, 150, 157, 160, 180, 195, 198, 219, 222, 241, 244, 269: a, t, c, g, or other
tccccatccccatcccccgccaccggcggcggccgttattcagcaccgccttcctccggngaccgccgcgccgccgttccctggtctaggttctcgcctcttagcaaccagagcgcgcgcctaaatgaatgcngtggnggaggaggananggcggcngantggccggcccgctccggganctcctcccgcctgtnganttctgctgcgtgtacggctcnaantcttcacgcacgccccganggnacgtccatggtcgataatcatcggntcgtgaccc

SEQ ID NO: 842 - DNA, 184 bp, Zea mays
  misc_feature: Incyte ID No: 700343394H1
  unsure 43-44, 141, 177: a, t, c, g, or other
ctgggaggagaaggggacctgttcatattctgataccatgganngctgtaccaagttccccaggtaggcgtcgtggtacagccatccatggtatcagaatatgacctgggaggagaaggggacctgttcaaagctccagangccatcatcgaggaaccgctgctcagcctcgatcangtcgcag

SEQ ID NO: 843 - DNA, 185 bp, Zea mays
  misc_feature: Incyte ID No: 700343396H1
  unsure 13, 22, 37, 91, 100, 103-104, 110, 122, 131, 133, 139, 154, 166,: a, t, c, g, or other
tccctctcctctntcctctctntccccctacccagtngcgcgagccggcgagccctagcaggcaaaagccatggcgtccatggttgttcgngccgctgcngcnncccgtnttccctccctcngtcctcgcngnaacggnagcggggtgctcacnggtttgaggatnggganngggnaataggggg

SEQ ID NO: 844 - DNA, 294 bp, Zea mays
  misc_feature: Incyte ID No: 700343401H1
  unsure 285: a, t, c, g, or other
atttagaagcgcccctcctcctctcccccatccgtacccaatctaatcgacacccggccgagatgggccgcaagttcttcgttggtggcaactggaaatgcaatggaaccgcagatcaggttgagaagattgttcaaaaccctgaatgaaggaaatgttccctctcagatgttgttgaggtcgttgtcagtcctcctatgtgttcctcccggtggtcaagagccagctgcgccaagagttccaagttgctgctcagaatgctgggtgaagaaggaggtgcatcanggtgaaata

SEQ ID NO: 845 - DNA, 296 bp, Zea mays
  misc_feature: Incyte ID No: 700343403H1
taataagccacccagctgccaagacgtaaaggaggccccgagcagtgacattttgggaaatgatgaaaattcagacaccgagaagactcctgctgccttgcatggacggctgaacaccgaacttgctcctagtggcagaaatacagaatttagtgaagctgacactggaaaacaagagacacccgtgtctgctgaggctatggtagaatcattcgagcgagcctcgcagccatgaggcaaaggaagctccaacccctgacctgtctggggatgatgaaaaagcgaatcagcaaggg

SEQ ID NO: 846 - DNA, 300 bp, Zea mays
  misc_feature: Incyte ID No: 700343404H1
  unsure 185, 249, 280, 287: a, t, c, g, or other
gactcgaacgtcctgctctctgctctcccccgcagacaaaaaaaccctagaattcccagccgccgcttctcctttccctacgatccgttcctccaagcgcgcacgcatcctcacgccagcgcaccgccgcccaacgatctacgagctgccatggctaactcagcggcaccgggaggagtgaggtncgttccctgcaggccgtgttctacggttcaccgaggagacgcggacgccgcttccgtgttcgtnccagatggagggcctggtgtactgaagatcntaagcangtgaggagtttgc

SEQ ID NO: 847 - DNA, 287 bp, Zea mays
  misc_feature: Incyte ID No: 700343405H1
  unsure 85-108: a, t, c, g, or other
tttgaggactactttgatcaagctgggaatatgacctcaaggatcatgttgaagccgcttgaagatcctcacgttgatttgattnnnnnnnnnnnnnnnnnnnnnnnnagaaacagtggaacagaagtaaaaggggatgctttatttcgctggcagagagagctggatgacccccatacctttgtggaccttctgtgtcaacttcaaatccctgttgcagctgagattatgtgcatatcatcctaagtatcgtattggtgccttggaacataccttgctaatgggga

SEQ ID NO: 848 - DNA, 293 bp, Zea mays
  misc_feature: Incyte ID No: 700343406H1
  unsure 77-98, 197: a, t, c, g, or other
ctcctcctttttctccactccgcttttgcttggttccatcgggccggagaggagaagctagctaactagcagcagcnnnnnnnnnnnnnnnnnnnnnngagggtagctgcagctggggctagctggaaaggtcgggagccatggggaggggccgggtggagctgaagcggatcgagaacaagatcaaccgccaggtncaccttcgccaagcgccgcaacggcctgctcaagaaggcgtacgagctctccgtgctctgcgacgccgaagtcgcgctcatcgtcttctccaaccg

SEQ ID NO: 849 - DNA, 291 bp, Zea mays
  misc_feature: Incyte ID No: 700343407H1
ggaaagctgaaggtttcagttgtagcagttccaaaaacaatcgacaatgatatacttttgatggataaaacatttggttttgatacagctgttgaagaagcccaacgagccattaattccgcatatatagaggcacgtagtgttaaccatggtattggcttggtcaaattaatgggaagaagcagcgggtttattgcaatggcacgctcccttcaagtgggcaggtcgatgtctgcttaataccgaggtaatataaatgtagctttactatgtttaaaactgccatatgtt

SEQ ID NO: 850 - DNA, 208 bp, Zea mays
  misc_feature: Incyte ID No: 700343408H1
  unsure 23, 49, 52, 56, 61-62, 79-80, 123, 129, 146, 204: a, t, c, g, or other
tgctacaccaccacacccacacnccatcccagcacacaacaagcagccnggnttanggtanntgctagcaaaacaatgnngaaccctgctccgagcatcgtagtggccatcgccgcacccgtngcggcngagttcgtgaagctcancttccgtgccctgtatatgcgccgggctggtcctggcagcagggagatgactgtgccnggaa

SEQ ID NO: 851 - DNA, 289 bp, Zea mays
  misc_feature: Incyte ID No: 700343409H1
aagaggagtggaagtttgatacactttgtgatctttatgatacactcaccatcacccaagctgttattttctgcaatactaagagaaaggtggattggctcactgaaaaaatgcgtacaaataacttcaccgtatcagctatgcacggtgacatgccccaacaagaaagggatgccattatgggtgagttcaggtctggcgcaactcgtgtgctaataactacagatgtttgggctcgaggactggacgttcagcaggtttcacttgtcataaattatgatctcccaaa

SEQ ID NO: 852 - DNA, 95 bp, Zea mays
  misc_feature: Incyte ID No: 700343410H1
  unsure 4, 86, 88: a, t, c, g, or other
aganatgatcaatgaaaagcttaagaaagctgaagagcttggggaacaagggcatggttgatgaaggcttcagaaagcctcttggncngaacaca

SEQ ID NO: 853 - DNA, 295 bp, Zea mays
  misc_feature: Incyte ID No: 700343411H1
  unsure 27, 234: a, t, c, g, or other
aaggacttcaagggcagcgtgcccggncttcaaggtcgacaccgtcgacaccaccggcgccggcgacgcctttcgtcggctccctccttcgtcaacgtcgccaaggacgactccatcttccacaacgaggagaagctccgcgaggccctcaagttctccaacgcctgcggcgccatctgcaccaccaagaagggcgccatcccggcgctgcccacggtcgccaccgcccagganctcatcgccaaggccaactagatggccgcacgccccgccgttccaccacgtcactgtcccc

SEQ ID NO: 854 - DNA, 289 bp, Zea mays
  misc_feature: Incyte ID No: 700343412H1
  unsure 99: a, t, c, g, or other
gtacttcttcctgccggagaccatgggcaggagcctggaggacaccgtgaagctcttcggcaaggacgcggacgacgaggacgtcggcgacagcgtcangacgcgcccagtaagaagccctccacttccactgagcttgagctcagtgctcagcactgagtgatgtgccatgcaacacgtgtcctcccgagtgtgaccgaagcttatgtctaaagcttcgatgatacagtctactcctagtatcttgtgtgctcgaactgtggtgaatcttttgtagatcccgggcctc

SEQ ID NO: 855 - DNA, 296 bp, Zea mays
  misc_feature: Incyte ID No: 700343413H1
ggaagactgttgaaacccgagctccatcttttgatgaaaaagaaagagaaggatgcatgtccaaagtgcaaaagggaggaggcaaagatcactgcttgggaaaatctacagaaagcaaaagcagaggctgccattcgaaagctggagatgaaacttgaaaagaaaagatcatcgtcaatggacagaattctaggcaaactccgcttctgctccagaagaaagcacatgacatggcgaagtgtagtttcttatagtgaagatcattgtggtgcgaggacaaccaagaagacatcttt

SEQ ID NO: 856 - DNA, 292 bp, Zea mays
  misc_feature: Incyte ID No: 700343414H1
  unsure 111: a, t, c, g, or other
gggcctctgtcagctcacagctcagtcctcttcaaccccgtttcgccgcccctagcccaaatcccccacctactcgccgccggcgccgtctcagcctcatccttctccgcnagccatggccgccgcgggtcccgggctctactccgagatcgggaagaaggccagagatctcctatataaggactaccacacggaccagaagttcacgctcaccacctacgccgccaacggagctgccattactgctgcaagcacgaggaaagatgaagctatctttaatgaaatccagagc

SEQ ID NO: 857 - DNA, 292 bp, Zea mays
  misc_feature: Incyte ID No: 700343415H1
  unsure 23, 190: a, t, c, g, or other
atttccatttctacactttcgtngcctccgttcccctgcctccgccgtcgccgcagccatggcgttcgcggcgctgcctcctccgcctactctcgagccgcctcgtccctcagagatctcaaccttttgcaccgggctcgatcgcgaccagaaccctgaccacttcgtccgaggccctcgcccccccagntcccggggccctcccctcccctcggctgtactacctctcgcgctgccacttcgcgacccgctcctccggcgacgaggacgacgaatatgaagacgaagaaga

SEQ ID NO: 858 - DNA, 293 bp, Zea mays
  misc_feature: Incyte ID No: 700343416H1
  unsure 61: a, t, c, g, or other
caacaagatggtcagagccgggtgcaaggtgaaaatctggattgccgactggttcgcgcanttcaacaacaagatgggaggcgacctcaagaaaatccagacagtcgggcgctacatgatcgagatttggaaggcggccgggatgaacctcgacggggtggagttcctgtggtcctccgaggagatcaaccggcgcgcccacgagtactggccaatcgtgatggacattgcccggaaaaacaacgtcaaacggataatgagatgctgccaaattatgggcagaagtgaccagg

SEQ ID NO: 859 - DNA, 296 bp, Zea mays
  misc_feature: Incyte ID No: 700343417H1
  unsure 2: a, t, c, g, or other
anacttcttcctctctggatcttacacgaaacaggactacattgacagcatggaaggagcaactctctccggcaggcgaacgtcggcctacatctgcggtgccggggaggagctgctggccctccgaaagaagctactcatcgacgacggcgagaaggcgctggggaacgttcaagtcctgcaggctagctgaacaacccctcctgcactgcagagaagcttggatctttccaaccacacatacatgctggaatggacaaaccaaccaaccattggcttttctcgcttcagggtgc

SEQ ID NO: 860 - DNA, 290 bp, Zea mays
  misc_feature: Incyte ID No: 700343420H1
  unsure 53: a, t, c, g, or other
gttatttctttgtgctaatgactacacagttgaagttactgttcacgtgaggnattatttgtgaaagtctccaattttctgtacaacgttgatatgattcatgttggcattgtggagcatgctcatatgcatgaaagagaagatcatgtacccatgcttcgacgcgaacgcgaggcacgaaaccgtcgtcaacacttcgtcatggccgccatgctccatgttcaccacaacttcaggcgccgcagtgacatcgtagccatgctccggatgcagacggactgccactgaga

SEQ ID NO: 861 - DNA, 293 bp, Zea mays
  misc_feature: Incyte ID No: 700343421H1
  unsure 47, 56-58, 74, 87, 96, 112, 121, 124-125, 131, 143, 145, 150, 153, 188,: a, t, c, g, or other
gggacaccgcctcccacgacgacttcgacctcttcctccagccacangggcccttnnnccgctgcctacatgcngcggcggtccgcnccccctganatcaaccttcccctanccgccgacncgnntccgcnacctctggcgtngntcgangcnaacgttgacatgctagatgtcggcctcggcggctngnagcactacgactccggattngcccgcngccgctgggccagtntcggncccggcagcagcngcgancaccatggtcgcngtgtcccacaccaagggctccggtt

SEQ ID NO: 862 - DNA, 289 bp, Zea mays
  misc_feature: Incyte ID No: 700343423H1
atggggtttgtcccaggagccaacgccactcgtctctggtgcccacacattccgcctcagctgctgaaattaatttgatgggttctgcccttgctttgatcgcctcagccacactgtcaaattctacacctagtccaagagatttgggacgatgcacggcttgtatcggctgcactataccttggccatctttaccaaggccagtgccctcgatgaatcccattttggccatcatctttgaaccaaagcccttggtgtgcacctcaaaggagcctagatgggtggagtt

SEQ ID NO: 863 - DNA, 287 bp, Zea mays
  misc_feature: Incyte ID No: 700343424H1
gtcgctcacatctttgcatccttcaatgacaccttcattcatatcactgatttgtctgggagggaaactctggttcggatcaccggtggcatgaaggtgaaggctgaccgtgacgagtcgtcaccttacgctgctatgcttgctgctcaagacgtcgcacagcgctgcaaggagcttggcattactgcactgcacattaagcttcgcgccaccggaggcaacaagaccaagacccctggacctggtgcccagtctgccctcagggcgcttgctcgttccgggatgaa

SEQ ID NO: 864 - DNA, 285 bp, Zea mays
  misc_feature: Incyte ID No: 700343425H1
  unsure 97: a, t, c, g, or other
gtgcccatgacgctcggttaccttgccatgctcctgttccgtcgccacgccgggctcatcaccttcctcggcgccttcggcttcctcatcgcatgtnatgtgtactacatgagcggggatgcgtggaaggagggaggcattgatgcaactggagctttaatggttttaacgctgaaagtcatttcgtgctcaataaactacagtgatggtatcttgaaggaagagggtttacgcgatgctcagaaaaaaaaccgattgactaagcttccttctctaattgaatat

SEQ ID NO: 865 - DNA, 180 bp, Zea mays
  misc_feature: Incyte ID No: 700343426H1
  unsure 14, 24, 30, 94-95, 100, 106, 130, 137, 167-168: a, t, c, g, or other
cttatatctcagtnttgaactcantgaatntggtacctgtacccgtagttttgcaaatgcccccatgttatgctctggtgaattttggatggtnnatttntgctcnaagtctatgcatttggctgctccnatatgancaaaaaatttaagagaagttctaagcgaanntaaagaaaaaaa

SEQ ID NO: 866 - DNA, 282 bp, Zea mays
  misc_feature: Incyte ID No: 700343427H1
  unsure 214: a, t, c, g, or other
agcatgtgtgctgacacgaatcgaggggctgctatccgagatttgattgcaagagccttaaaaggtccacttgcacctattcaacaggagcaagtcgtagtagaactggcaaaggatcctaaactggtttattattgtgggatgactccacagaagcttcctgatcttgttgaacacaacccactcattgctgttgaggttcttcaaagctaantcactctcctgacatttcaggttacttgatgttcttgtgcacatggaaatgagcctgcattctatgga

SEQ ID NO: 867 - DNA, 286 bp, Zea mays
  misc_feature: Incyte ID No: 700343428H1
ggatgccccatcagatggcctttttgctcccctggagtacttggcatctcagttccctggattttcagcagagagccttgcagagctttactacgcaaatgggtgtgatttcaaccatactattgaaatcctcacccagctagagatgcaagttgatgctacacccaatcacactgaatctgccccacagcacaccgaacttcagcactggggatttccctgcacttccaacagctgaggaccaaaatggtttcaatcagggtaatgtggatgtactgggcatgtt

SEQ ID NO: 868 - DNA, 284 bp, Zea mays
  misc_feature: Incyte ID No: 700343429H1
tcgacaccttgcttcactgctcctctaattccagcgagaatggatcacgttcaaagccatgccctcctcgcccaggggaaaagggtgaaatgcatgtggtgcctgtaccattgcctttagtatctggtctaagcagtgttagaatcaacattcctcctgatctacgaccacctgaagcaagacagaatatactttctgcagtgcaagaactaggaaagcgctacccccaaggacatgggtattcaagaacctgaactagttgacttggtacataaacttgaaga

SEQ ID NO: 869 - DNA, 285 bp, Zea mays
  misc_feature: Incyte ID No: 700343431H1
  unsure 46, 99, 110, 115, 135, 171, 181, 231: a, t, c, g, or other
aagggttttgccatgggtgttctctttcttggtagctttgttcccngtcacctatctgctcgaaggacacttaagagccaaaagttttgcagatgaggntgaagcagagnagttnaccaacatgttggctatagnaggggctagaatgtcacttttgggtctcatgctgcnatcttcatgnctattgcattagaaatcaagtttgagctgactttgctattgcgtgaaaangctgcagacagaggtatgcatggtccatctagtcggagtgctgccttcccaccc

SEQ ID NO: 870 - DNA, 285 bp, Zea mays
  misc_feature: Incyte ID No: 700343433H1
gtggcaattgatggtggccttattacacctgtccttcaggatgctgacaagctggatatttatttgctctcgcaaaattggaaggacctagtcaagaaagcacgtgcaaaacagctccaaccaaatgattacaactctgggacttttacactgtccaacttgggtatgtttggtgtagatcggtttgatgcaatccttccacctggccagggagctattatggctgttggagcctcgaaacctacagttgtggctgataaagatggtttctttagcgtcaagagc

SEQ ID NO: 871 - DNA, 284 bp, Zea mays
  misc_feature: Incyte ID No: 700343434H1
  unsure 121-122: a, t, c, g, or other
caagaactgccggagacctgggcactttgctaaggagtgcccatctgcgcctacgtgcaataactgtaaccttccaggccacttcgcagcagaatgcacctcaaaaactgtttgctggaanngcaaagagcctgggcacattgcgagtgagtgcaagaacgaggccctgtgccacacctgcaacaaaacaggtcacttggtcgcgtgattgccctacttcaggggctaacgtcaagctatgcaacaaatgttttaaatcaggccacgttcgccgttgactgcac

SEQ ID NO: 872 - DNA, 282 bp, Zea mays
  misc_feature: Incyte ID No: 700343435H1
ggctagccattctatgcattattatgacaaagggtttcctacttatccttacaatatacaaatacattcggcgaagttttttttatcataacaaagctagtgattttccagagttattgcttctgtgcattattattacaaagctattgatttcctaatctaccgcctctgtggatctcaactgaactggtagtttatactaacattcaggaaccactaaggttccttattgtttatagaagaagggctatgttttcttaacctaccttgttctggattgca

SEQ ID NO: 873 - DNA, 281 bp, Zea mays
  misc_feature: Incyte ID No: 700343436H1
  unsure 129: a, t, c, g, or other
gcctagaagaggaaggaagaacagagataagcgacaacgcgtccctcctcgccttcctcccgcctcgagctcttcccggagcaaccggagccacagacgtcaggacagcctagcgcgttccacgccggnatgcagaaccagatcatgtgccatgcttgccggacccttctgctctacccgcgtggcgcgtccagcgtctgctgcgcggtttgccaggccatcaccaccgtgccgccaccaggattggagatggctcagcttatatgtggtggctgtcgaac

SEQ ID NO: 874 - DNA, 281 bp, Zea mays
  misc_feature: Incyte ID No: 700343438H1
  unsure 45: a, t, c, g, or other
tcgttcctgtcgcgcagccacgacctccacttcacatctcccccngcggcggcgcggtcagttgaacaatggcggactccaaggccacctcggcggtcaccctccgcacccgcaagttcatgaccaaccgcctcctggcccgcaagcaattcgtgcttgaggtgatccaccccggccgcgccaacgtctccaaggcggagttgaaggagaggcttgccaaggcgtacgaggtgaaggacccaaacaccatctttgtcttcaagttccgcacccacttcgga

SEQ ID NO: 875 - DNA, 279 bp, Zea mays
  misc_feature: Incyte ID No: 700343441H1
  unsure 2, 43, 72, 100, 126, 173-174: a, t, c, g, or other
gnctagtggacacggcaccatcaaaaccttcatcaggtaaggngcggtctgcttctcctatgcgcaggccgntgcagttcaacaggagcaccagttctgntactacgcagaaggttggcgctaagnacatatctggtgtaaaggaactttcaacattccattccttcgacaannccaaaggtcgtgcgatccaaaaggcccctgttggcactaaaagcatgctggcggctctcttcatcagacacaaatcgtccaagggcgaaaaggatcgcagttcgc

SEQ ID NO: 876 - DNA, 276 bp, Zea mays
  misc_feature: Incyte ID No: 700343442H1
ggattctgctctgatcaaggctatcgaggctgtcccggagctgaaaacctatcttggcgcccggttctctctcagggatggtgacaagccccatgagatggtcttctaagcttctagttttggagttcgtaggaagctgttttgtctgtgttcttgtacttctgagttttgtaccagtagcgaacgtttcattgtgattgaagtcttcctgccaaatattataagatctaagaaagttctatccgtgttggtggttcagcagtgcactatctgcat

SEQ ID NO: 877 - DNA, 278 bp, Zea mays
  misc_feature: Incyte ID No: 700343443H1
  unsure 46, 107, 110, 126: a, t, c, g, or other
ctggaagcattgatcgctgctgttaacagcagtgatagcagtcacnttgttcatgtccctcctggtgaaaatgctctctctgatgtcctcctaagcactcctatatnacnctggtgaagaaggtgnaagtggttttgctgcttccgcagcagctgccgtagctactggagcatctggatttgaatttggtgtggacccaaatgtagatccagagttggcactcgccctgcggttgtctatggaagaagaacgagcaaggcaagaggctattgcaaaaa

SEQ ID NO: 878 - DNA, 112 bp, Zea mays
  misc_feature: Incyte ID No: 700343444H1
  unsure 60, 65, 87, 108: a, t, c, g, or other
gcattcttttcttttaattacactagaagatgattttggtaggattcttatagaatctanctatntatctatcaccgagcgtttttnaccttttcacgctcgattttnaaaa

SEQ ID NO: 879 - DNA, 276 bp, Zea mays
  misc_feature: Incyte ID No: 700343445H1
gggcaagacatgacaggatattatccacgtgaaactgacaggtcaggataccattccctcagagagaacgacacacttggggcatcttatgaccgttacttgcgcaatgggatggcctccgtcggtgcaaatgacacttctagggctgccgggatgggtgctggattggctgcagggatgactgcagggatgggtgctggaatggctgcagggatggctggctatggtgttgatggtcagcgtatgatgggtgttgttggtatggacagcagaggg

SEQ ID NO: 880 - DNA, 281 bp, Zea mays
  misc_feature: Incyte ID No: 700343446H1
  unsure 2, 237: a, t, c, g, or other
gngcttgcaagatttgttgagcatgtggataaggacaatgatggtattattacttttgaggagtggagagattttcttttgctttatcctcatgaagcaaccatggaaaacatatatgcatcactgggaaagagtctgccttgtagatatcggtgagcaggctgctataccagaagggataaacaaacatgtaagtgccgagcaaatattctgattgcaggaggcatcgctggtganagcatctgcgcactgcaactgcacctctgatcgcctcaaataaa

SEQ ID NO: 881 - DNA, 126 bp, Zea mays
  misc_feature: Incyte ID No: 700343449H1
ctcactctactctggacgcgactcgaacttaaaccctagagccgcagccccggttcgctccaccgaccccaaatctcaaatcagcgggagggaactcgcacgcgaaggctgaactcatggctcgcg

SEQ ID NO: 882 - DNA, 167 bp, Zea mays
  misc_feature: Incyte ID No: 700343450H1
agaaacccgcagagggcgagagaggtcagcgcgattcggagatgggcatgggcgacgaactgtgggacgactcggcgctggttcgttcgccttcgaccgcgccatttccacgttcaatgaaatgcattgcaagagcagtgcgaagaaggaacacgctgctgctcctg

SEQ ID NO: 883 - DNA, 272 bp, Zea mays
  misc_feature: Incyte ID No: 700343451H1
attggatgctactgagaaggaaaattgggtaatcgcatctgatacagaggattgggaccaaggaaccgtacatggatataaaagctccaggccagaagaatactacaagtacagattctaaaacaccttcaggcccaactctagctaatgtaaatggagaacaaaagggcacaagcttgaatgctaccttgcagagttctcttgctttctatgacgagatccgtagaaaagagtacatcaaaatcagacaggctgtcctggcgaacttggca

SEQ ID NO: 884 - DNA, 263 bp, Zea mays
  misc_feature: Incyte ID No: 700343455H1
  unsure 24, 34, 39, 41, 43-44, 60, 119, 126, 148, 172, 190, 223, 238: a, t, c, g, or other
agcaatccgacctgagaccaagancgcgcaccangcggntngnngccgatggcgaacgcngacgccgacgaagcgccgctgctctctgtggaacaccttccgtccaggatcctgcaacngcgagcncgagctgcgggagttccgcgancgctacgtgatccgttcgctcganggcgccgccgctttcgcngtccttcgctccggcggctccatccgccctctntccccagaggaagcngtagctgagagcgactgcaaggttt

SEQ ID NO: 885 - DNA, 256 bp, Zea mays
  misc_feature: Incyte ID No: 700343456H1
  unsure 195, 197: a, t, c, g, or other
gagaagttcgtcaatgagcaggtctcatctcagacatataacttggatgcaaatctcagccttcttcgcttgtaccagtttgagccagaaaggatgagcatacagattgtggcccacatactgattaaggctctcatggcaatgccagcccctgacttcagtttgtgcttattcttaatccctgaacatgtgcangngaggagcaattcaaggtattgatagttcttctcactacctagagactgctaggttcagt

SEQ ID NO: 886 - DNA, 259 bp, Zea mays
  misc_feature: Incyte ID No: 700343457H1
  unsure 2, 87: a, t, c, g, or other
anagctttgaatgaatgcacagagtggggccaagttttcattttggattctttgtcaagatataaagcagcagatgccagggaagcngaaaacatagtggaacgagttacaccccgtctccaacatgcaaattgtccggttgttctttctgctgtcaagataatccttctacaaatggagctcattacgagcacggatgtagtcaggaatctctgcaagaaaatggctccccctcttgttactcttttgtcagcagagc

SEQ ID NO: 887 - DNA, 258 bp, Zea mays
  misc_feature: Incyte ID No: 700343458H1
caacaaacttgctcgctggactgcccaggctttgcttgctggtgctgacatgatgaagttgggctatgtgtcacgggtgaacccccgtgatcagtacaaccattctgtgctcactgtgatgggatacaagccaagggattttgctgcacagatcaacctcaacactgcaaacatgtggggaatcgtcaagtcaattgtggacatctgcatgaagtttgaagagggcaagtatgtgtttgtcaaagatccagcaaagcc

SEQ ID NO: 888 - DNA, 259 bp, Zea mays
  misc_feature: Incyte ID No: 700343459H1
  unsure 18, 22, 41, 70, 192-193, 228: a, t, c, g, or other
gggaagcggcagcccgtnaggntagctcgctcttgatcgcntcctggtttgctaagcgatttgcctcctncgtggttcggtggcagatcggaggcgctgcgaattcgaagctggtttctctgggctaagtcgattcggacttacttgttcagtaggtgtagtgtagctcgatagacgagaagaatatttganngtggaagtttcagctaagcaacgagaccaggaagnttcagcaaagctccggattaaattggcatca

SEQ ID NO: 889 - DNA, 262 bp, Zea mays
  misc_feature: Incyte ID No: 700343461H1
ggaaaccctagccgccatatctcacgatccactcgagcaccaagccgagggaaggtgaggagcgatggcgcgcggcgtggtgtcggcgaagggcggcgcggtcgcgggcaagaagaaggggtcggtttccttcacgatcgactgcaccaagccagtggaggacaagatcatggaggtcgcctcgctcgagaagttcctgcaggagcgcatcaaggtcgccggcggcaaggctggcaacctcggcgactccgtcaccatctct

SEQ ID NO: 890 - DNA, 69 bp, Zea mays
  misc_feature: Incyte ID No: 700343462H1
  unsure 27, 44, 51, 60, 67-68: a, t, c, g, or other
atttctccgcggccgtcgttcccaacncccaaatatgcgcccangcgatcnccccacctncgccgannt

SEQ ID NO: 891 - DNA, 265 bp, Zea mays
  misc_feature: Incyte ID No: 700343463H1
  unsure 2, 247: a, t, c, g, or other
cnagatccgtgccgtcgtcgccgatctgcgtgttcgcttccgtccaggttcccgaagctactgatttccgcaacacggatgctgcacgtgagattatgagagaaataaatgtggtaatggatctatccaagaaaatgaggctcaagcttggtgctacttctgaacctgtgaaaccattggagaagccttcagttggacttgtgaaggatgagcttgtgaaaccatcagagaagccttcatctggacntgtgacgggggaactgta

SEQ ID NO: 892 - DNA, 273 bp, Zea mays
  misc_feature: Incyte ID No: 700343464H1
  unsure 47, 157: a, t, c, g, or other
gttacaggtctggccgtgcgtccccatggtcaagccaggaccaccanatccacatggtcggcagccgcccagccaagaagcctaagaacacggggtactatgccgaagggtgtccgagagcatgctcggaagcaggaacgagagcagcagtgccatnaggcgtgagcaagaagaggtggtagagttgctgcagctcgtagaaaaggacggcgtgtctcagggatctgagctgttcttcatagctactgagctgtttaggtcgccgatccgacg

SEQ ID NO: 893 - DNA, 120 bp, Zea mays
  misc_feature: Incyte ID No: 700343465H1
  unsure 41, 65, 67, 116, 120: a, t, c, g, or other
caaaaacgtgtgaggagggaagagggtgcagacctcagctnagctgcctgttgaacttgtctggntnaatctcggcacccccgctttgccagagccccctggccagcatgtcttcnacan

SEQ ID NO: 894 - DNA, 83 bp, Zea mays
  misc_feature: Incyte ID No: 700343467H1
  unsure 10, 23, 66, 71, 76: a, t, c, g, or other
ggtgccctcncgtctcccacaancttgctgctcataaacaataaactgtagaggaatctgaaaagnaaaanaaaanaaaaagg

SEQ ID NO: 895 - DNA, 257 bp, Zea mays
  misc_feature: Incyte ID No: 700343468H1
  unsure 2: a, t, c, g, or other
gnaaaaaagaaacaagctgttattgtttgttgcattgcgtccaaccgatggttttatgttagtataaactgctagtcgaagataattaggtgcagcgtttgaattgatttgggtttacggttgagttatatcccgtgtatgccataacaaaggcagtcgccgctctgttgctagtggcaagcgctgcctgtccgtgtctgtttgtacgttgacaatttgattccgttgctcaaggatagaagaatattgataaaaaa

SEQ ID NO: 896 - DNA, 256 bp, Zea mays
  misc_feature: Incyte ID No: 700343469H1
tgcagctagatattttccaaatttctctgaaagtgaattttatttgtgactgtggatagtgacatttgctttagaagcccgatggttggtagcccacagcctcctttcaagggcattggcctctcaggtgaacttgcagacttggccaaatttgcttcctctttcccctggggcagttgcctcatatggggtcattgcaagacccctcggggtgctgctttgctgccttcaagaataaaagcctctatgatccaga

SEQ ID NO: 897 - DNA, 114 bp, Zea mays
  misc_feature: Incyte ID No: 700343473H1
  unsure 8, 16, 43, 49, 54-56: a, t, c, g, or other
tgacttcnctaattcnccccatccttaccaccctcgttaaccntaacanaaaannntgcatacccccattatgtaaaatccattgtggcatccacctttattatgcagtgctct

SEQ ID NO: 898 - DNA, 149 bp, Zea mays
  misc_feature: Incyte ID No: 700343475H1
gcagcggcggcgggggcgggggcggtgggttcccgggggtggcgtgggaggtgttgcggcggcacttctctaagaagcggtccgtggacgtgaggcggatcaaccccaaggtgcccaaggaggaggccgtcgccatttccggccgactc

SEQ ID NO: 899 - DNA, 254 bp, Zea mays
  misc_feature: Incyte ID No: 700343476H1
  unsure 78: a, t, c, g, or other
attgcgggcagccatagacgaagagagaaagaaaggtcaacagggcactgcttgcctgctgcgtagtgactagtgtgncctcaaccaaaaggatccatggctcccggagacgactctaaccccgccgcctcctatatccacacggtgcagcacctgatagagaggtgcatgacgttcgggatgagcatggaggagtgcatggaggcgctggctaagcgcgccgacgtcctgcccgtcgtcacctccacagtgtg

SEQ ID NO: 900 - DNA, 258 bp, Zea mays
  misc_feature: Incyte ID No: 700343477H1
gttgggagatacaagagcccagatgagcaccctttcttttccaaggatctgcctgagccccggttgccacctatgcaatacccaagggttttgcatcccattgctgattctatcaatatcaacaaagagatttggaaaatgtattttgatgaacttcttccaagattggtgaaagaaggaagtgatggtaatgctggatccagtgctctttgtgacacaacctgcttgcaggcactctccagaaggatccactatggg

SEQ ID NO: 901 - DNA, 113 bp, Zea mays
  misc_feature: Incyte ID No: 700343478H1
  unsure 2, 53-54, 76: a, t, c, g, or other
gncagcaagctcagccccccaggccccagccctactgccaccgcgccgaacgnnatggccgagccggcggagcacngtccagctgaggaggaggaggccgcggcggccggcga

SEQ ID NO: 902 - DNA, 93 bp, Zea mays
  misc_feature: Incyte ID No: 700343479H1
  unsure 44, 52-53, 62, 75-76, 78: a, t, c, g, or other
cagaagcgcagttcatcccattcagctatttcagctattcacanaagatgcnnaaaaggganagggcccgcgacnnangggtggctgccacgt

SEQ ID NO: 903 - DNA, 269 bp, Zea mays
  misc_feature: Incyte ID No: 700343480H1
  unsure 9, 51, 53, 63-64, 66-67, 87, 143, 151, 153, 158, 239, 241-243, 255,: a, t, c, g, or other
ggcgaaganggtgtccatggtcaggggcctgatcagagaggttgctggctntnctccttatgnnanncgtatcaccgagcttctganggttggcaaggacaagcgcgctctgaagcttgccaagagaaagcttggaactcacnagagggcnangaagnagagagaggagatgatgggcgtcctcaggaagatgagatcggctggtacgcacactgacaagaagaaataaagcatttcgngnnngtgcatgtggcntccnnngnctatca

SEQ ID NO: 904 - DNA, 49 bp, Zea mays
  misc_feature: Incyte ID No: 700343482H1
  unsure 2, 8, 16, 22, 37: a, t, c, g, or other
gnggtgcnctcccgtntcccanaacttcctgctatanacaataaatctg

SEQ ID NO: 905 - DNA, 248 bp, Zea mays
  misc_feature: Incyte ID No: 700343484H1
  unsure 2: a, t, c, g, or other
anatcaaacagttgatggaggcggctgatgttgatggaaatggtaccattgattacgcggagttcatatcagccacaatgcatttgaatagattggagaaggaagaccgtatactcaaagcttttgaatattttgataaggaccatagcgggtacataacagtagatgagttggaagaagctctgaagaagtatgatatgggagatgataaaacaataaaagagatcatgctgaagtagatacagatc

SEQ ID NO: 906 - DNA, 248 bp, Zea mays
  misc_feature: Incyte ID No: 700343486H1
acaattcattatttgtgatgtcattgaggcatcctttgctgtcttctcatttttgtgtgtgaacaattatatgttaagatgttcaatcatttcttcgatggggttattaagcattgtactgcatgttctactgcaaattagtagaccatattgtcaaacttacaaatgttcatcagaatatatccttcacttttttcctataaacaattatggtgttcatatcaatgaaaggtactattgtacaacag

SEQ ID NO: 907 - DNA, 86 bp, Zea mays
  misc_feature: Incyte ID No: 700343487H1
atcattaggaccagtagctgcttgatttgtgtctcggtgatctagctttgggtagtttgtgcagttggaaaggagacagtttgttg

SEQ ID NO: 908 - DNA, 90 bp, Zea mays
  misc_feature: Incyte ID No: 700343488H1
  unsure 46: a, t, c, g, or other
gttgcacgtatactttttccttgagaactacctaccatgagagatnctaattggaaatggattccttggtgcaaaaatgagcatttctgg

SEQ ID NO: 909 - DNA, 80 bp, Zea mays
  misc_feature: Incyte ID No: 700343492H1
  unsure 61, 68, 71-74, 76, 79: a, t, c, g, or other
tacgaaaccccgacccagaagcaggtcgttctacgaatggtttagccgccaggttccacancaatcancannnngnggnc

SEQ ID NO: 910 - DNA, 105 bp, Zea mays
  misc_feature: Incyte ID No: 700343494H1
  unsure 9, 51: a, t, c, g, or other
tcgtccgtnactcccacagtccagtagcacctatggcggctagggtttgcntcggcggttgagaactcacgcgcccacgctacatcgcctccatccccactcgcc

SEQ ID NO: 911 - DNA, 264 bp, Zea mays
  misc_feature: Incyte ID No: 700343496H1
  unsure 62: a, t, c, g, or other
gacccgatcatgaaaacaacttccatgggcagctatcagtggtggatatatgttatcctgtngggccacctggccccacatgtttttgccaaaaatatgtttatccctcttcatagaatttgcaactatatatatctcaattgtgtagtgcttgtgttaattgacttaaaaatcaactaacttggccccgctgttatttaatccttaatctgccactgctatcattgatcatgtaaaacaggaaattaatctaaatccatattc

SEQ ID NO: 912 - DNA, 298 bp, Zea mays
  misc_feature: Incyte ID No: 700343502H1
  unsure 2, 38, 42: a, t, c, g, or other
gntcgccacgaccaagggcagagggccccggaggggcngtanaatggcggcaggctaccgggccgaggacgattacgattacctcttcaaggtggtcctgatcggcgactccggcgtcggcaagtccaacttgctctcacgcttcacgcgcaacgagttcagcctcgagtccaagttccacaatcggcgtcgagttcgccacccgctctctccaggtcgacggcaaggtcgtcaaggcccagatttgggacaccgccggccaggaagatacgtgcatcatagtgcgtattaccgaggc

SEQ ID NO: 913 - DNA, 93 bp, Zea mays
  misc_feature: Incyte ID No: 700343504H1
  unsure 2-3, 46: a, t, c, g, or other
gnnagctctgccttccactgtgaatgctgatccgaaggtaaaacangcagctgctgagcaacttgacaaccttttttttggccttttttacgg

SEQ ID NO: 914 - DNA, 292 bp, Zea mays
  misc_feature: Incyte ID No: 700343506H1
  unsure 285: a, t, c, g, or other
ggacagtgaggagggtccgtgttcgtggaggtaatgtgaaatggagggctcttcgccttgatactggtaactactacatggggaagtgaagctgttacccgcaagacccgtatcctcgacgtggtctacaatgcatcaaacaatgagcttgtgaggacacaaaccctgtgaagagtgccattgtgcaagttgatgctgccccattacaagacagtggtacctacactacatatggagttgacattggtaggaagaagaaaacccctgactgccaagaggatatgntgaggga

SEQ ID NO: 915 - DNA, 286 bp, Zea mays
  misc_feature: Incyte ID No: 700343508H1
gtacggatcaagtatcaaggtcttcatcatggatccagctacttggagcacctacaatttcttgtctgctataagggctcaaggtgcatccggaccatctgtgaacttaagtgacggcctactatctgttgccgtcggtgtggctgggcaattatcaatcgagcagggccggtttgtaaccatggaagaggtcttaggtttgtagcctggtgataattcaggcatcctaatgtactgtaaaacctttgtgtattattaggtatatgttcttaataatgctgcggac

SEQ ID NO: 916 - DNA, 280 bp, Zea mays
  misc_feature: Incyte ID No: 700343509H1
  unsure 114, 116, 130, 149, 158, 160-161, 175, 185, 210-211, 253, 267-268, 271,: a, t, c, g, or other
ggtactttgatgatgcattactggcgatgcagaagttgggaaagaaaagggcaagcttagtagacattgcagagtcctttaaatcaagagggaatgaattcatgtgatcaaacnancaccttaaagcggnagagctgtacacctgtgcnattgcattnannccacaaaatgccanttactattgnaacagggctgctgcatataccctcnnaatatgaacaacaaagctattgcggatgccgaggtccattgnattgaccctcatanngcnaagctatng

SEQ ID NO: 917 - DNA, 291 bp, Zea mays
  misc_feature: Incyte ID No: 700343510H1
  unsure 2, 112, 147, 182, 232, 248, 283: a, t, c, g, or other
gncgacgcgggggagcgagcgataaagccagaacaagaggagcgatccagaggagaagacgaaagagtacaggggagctgctaaggaccgatggccgaccccagctattggntagggatggacatcgaaacctaccgtacacgatgntcgtcatcggtactacgccaccgccgtacgtgagngtgtgcctacttattcattttacatgtgacatcgtgcaatggtggtatcnccacggatgcgcgtcntacagctacgcggcgtcaccaccctgaggcagaantggactac

SEQ ID NO: 918 - DNA, 283 bp, Zea mays
  misc_feature: Incyte ID No: 700343511H1
  unsure 259, 270: a, t, c, g, or other
ggccagtgcgcattacaaagacaggcatgtacaacttgttcttcatatcctgtgataccaaaactgagaggccttactatgagtggcaagactatctggaagaatcctggtgggtatctaccgggacgaatggcgcctttgatgaaattttatgttctcatgtcgctggcgtatctgttggtaatgattgtttggtttagccagtacgtaaggttctggagggatatattgccaatacagaattggatacactctaatncatgcattggnctgtttgagatga

SEQ ID NO: 919 - DNA, 283 bp, Zea mays
  misc_feature: Incyte ID No: 700343512H1
  unsure 170, 261, 278: a, t, c, g, or other
gttgaaattagagcatcgaaacagtaaaggatgcaattatggccctccatatgagtggcaggtttataacactctacaatggttgctatggcataccatcggtccactacaagggtcgtcagggcgactactatatacttgtaatggatatgcttggtcccagcctttgngcacgtgtggaattacaatggggcaggcgatgactccaaatatggctgcttgcattgctgtagagagcatatcgattcttgagaagctccntctaaagggtttgtgcnggtga

SEQ ID NO: 920 - DNA, 286 bp, Zea mays
  misc_feature: Incyte ID No: 700343513H1
ggcatgcaaaagtagttcaaaaaagtgtttatgaacatctgcatgttatacacgagggacatctgagaataattttcacaccagaactgaagataatgtcttgggagttctgttcacgacgccatgaggagtacaccactcgcaagactatagcaccacaggttaataatcttctgcaagttgcccagaaattaccaagctgttgtcagtgaaagtggatcagctgggatatccaaataatgatgcacaaaccatctggcaacatgtttgttatgcatcccgggca

SEQ ID NO: 921 - DNA, 291 bp, Zea mays
  misc_feature: Incyte ID No: 700343514H1
  unsure 4, 222: a, t, c, g, or other
gagnggttcagcattgcctacaaccttgaccgtgaattcggcccgaggttgaaggaccatatgcagtattgtgttaatacatccagaggaaattaacaagctctccaaggtgaaagcccacctatcggatgtacaaagggatcatgatggacaacattgagaagatattggatcgcggggagaagattgagcttttggtgggtaagacagagaccctacatncacaggcggacaggcgtcccacaggcatggacagagagttgaggcgaaagatgtggcttcagaacctga

SEQ ID NO: 922 - DNA, 305 bp, Zea mays
  misc_feature: Incyte ID No: 700343517H1
  unsure 140, 153, 252: a, t, c, g, or other
gtgcgaaccaagcagaccccagcagaagaagcgaagtcgtacgccggagcaggaggaagagcgaggagcaacatgtacgtggacaggcgtacgtacgatgaccacctgctgtgcgacattcgaaggaccagcacctcagngaccgccgccatncgtcggccacgacggacagcgtctgggacacagtaccgagaattaccccgagttaaagcctgaggaggttgctgggatgataaaggattacgatgaacnggaaatcttgacaccaatggtcttttgttggagttagagtactggtgatccag

SEQ ID NO: 923 - DNA, 290 bp, Zea mays
  misc_feature: Incyte ID No: 700343518H1
  unsure 3, 50, 52, 173, 193, 195, 202, 208, 233, 284, 287: a, t, c, g, or other
gtngggagagagcgatggctgtgtctcgtgaggcagcggtggcgaagtgntnaaggcggcgggccggcggcagcagcagcaggctcacaacaacggcggcctagatccctgcaaggcacacagacaaggttgatttccctagttagcaatgaatgtggaattaaagggccatnttagaaagtgaagagatganantgcgaangagagnattttacttgcctgagattctgtgntatatagggaggcactgatgcatgatgatcttctatggaagaatcttaccnacnaaa

SEQ ID NO: 924 - DNA, 285 bp, Zea mays
  misc_feature: Incyte ID No: 700343519H1
  unsure 194, 208: a, t, c, g, or other
ggactgatgtctacagttttggggttttggtactcgaaatactacagtggaaagcggcctactgatgcatccttacattgagaagggactaaacattgttggatggttaaattttctggctagtgagaaccgggagagggaaattgtcgacctgaactgtgaaggagtgcagactgagaccttagatgctctgntctctctgccaagncatgtgttagctacctcgccagaggagaggccgacatgcacgggtggtacagatgctggatcgatgtattacacctg

SEQ ID NO: 925 - DNA, 290 bp, Zea mays
  misc_feature: Incyte ID No: 700343520H1
  unsure 2: a, t, c, g, or other
gnagcgatcatcatcacaagagccacaaccgaaaaactcaccacctacaggctgggggagagtatgagatggaaacaggtggtctgccgatggatttaacagatggcattgaaaaactcagggcaaacatgagtgcaaaatatgacagagcttacaatattcttcacagtgaccatagtgttactcctggaagtcctgggttaagtcgcaggtctgcttcaagctctggtggctctggatcggcgtttatacaattggatccagaagtacaattgccatcaggaagtgga

SEQ ID NO: 926 - DNA, 286 bp, Zea mays
  misc_feature: Incyte ID No: 700343521H1
ggcagctcaggccctacatggagtccatggtgccacttcccggtgtctatgatccggacttcatcgccgctaaccagggctctacgtgccaacaatgtcatcaagggcaccaagaaagaacaggtggagcagatcatcaaagatatcagggagtttaaggagaagaacaaagtggacaaggtagttgtgctgtggactgcaaacactgaaaggtacagcaatgtatgtgctggtctcaacgacacatggagaatctgctggcatctgtggacagaagaggcggaga

SEQ ID NO: 927 - DNA, 292 bp, Zea mays
  misc_feature: Incyte ID No: 700343523H1
  unsure 2, 135, 162, 206, 212, 223, 268, 275, 277: a, t, c, g, or other
gntaaaggagaaggtaaacaacgcggtgctgttcgaccaggctacctacgacaagctgctctcggaggtgcccaagtacaagcaaatcaccccttccatcctctccgagcgtctgaggatcaacggctcccttgntcggagggccatcaaggacttgatggngcgtggcctcattcggatggtactcggtaccactcaagaccagncagatntacaccagggncaaccaatgacataaggatggggaagaggtctaaaatgcattgtntgccctntntgacaggaggagcta

SEQ ID NO: 928 - DNA, 286 bp, Zea mays
  misc_feature: Incyte ID No: 700343524H1
  unsure 65, 200, 263, 267: a, t, c, g, or other
gggccgcagagatggtcatggaccagttcatcatcagcgtggccatcagccaacatacattaggnctcctactctggctgttgtagcaggagcacctcccccaccgcctccatttgttagccctgctactcctacaggcaccaccttatggcacacctatgggcttccctgacatggcaccacaagtttactattacgcngcacccacctcggagggcattcaaggcctgccttttatgcctacatccagcaagcccccaagntgtnttaattgatccttttagaa

SEQ ID NO: 929 - DNA, 281 bp, Zea mays
  misc_feature: Incyte ID No: 700343525H1
  unsure 265: a, t, c, g, or other
ggcagatggtgttgctaatatcaatgtcaccgacagccagatcccactgactgggccaaactacaatacattggcagagctgttgttgttcacgctgatcctgatgatcttggaaagggtgggcacgagctcagcaagagcactggaaacgccggtggccgtgttgcttgtgggatcattggactccagggctgaaaacgatcgccggacttgggggtgcctgagaggtccgtctcctgccgtccccagcagacgagcctgaacntcggagacatcgtgaa

SEQ ID NO: 930 - DNA, 279 bp, Zea mays
  misc_feature: Incyte ID No: 700343526H1
  unsure 42, 113, 139, 164, 238, 273: a, t, c, g, or other
gggctatttgatgatgtcattcttatagccgaaggtcaaatncgtataccaaggtccacgtgaatatgcagttgacttttttggtgctatgggattcaggtgtccagaaaganaaaacgtggctgattttttgcaagangttttgtccaagaaagatcaacagncagtattggtgccactatgattatccataccaatttgtttctgtatacaaaatttgctgaagccttccaaaacnttattattggtaagagttgcttcggattaatgttncctaca

SEQ ID NO: 931 - DNA, 283 bp, Zea mays
  misc_feature: Incyte ID No: 700343527H1
  unsure 137-138, 149, 156, 208, 242: a, t, c, g, or other
ggcggtctagcaactagcaagcgccgcatccctacgcctcttcccgacttgccccctcgattacgatccgagcttacttctagggttcttggccccgctccaccgtcgcccatggcagaggatgccaaccgagcggnnttacatggagntgcagtncccggatgatagataccaccgcgaagatcaagacagttacaaacccaaatgngttctaaaagaaggggaaaagaagcgtgcctacntaatttggaggtaattacgccattgccgatgataccaacac

SEQ ID NO: 932 - DNA, 283 bp, Zea mays
  misc_feature: Incyte ID No: 700343528H1
  unsure 97, 117, 132-133, 145-146, 161, 181, 271: a, t, c, g, or other
gtaaggtaaccctaatttctcccttcattcttctgggtctgagaatgaaatggggaggagatttttctgccagaagtgtggggaagaaggtcatcangcaagggattgctgcaagtntctttggtgtaaganntgtacgcaaggnncacccatgtgctggntaaatgtgtttggaccgcgnacagattaagcccatgatgccgattgtgggcatggctgacagatgggctagggttcttacacaacccatatgctaaacccatactacagnaaacctaatcta

SEQ ID NO: 933 - DNA, 281 bp, Zea mays
  misc_feature: Incyte ID No: 700343529H1
  unsure 49, 52-73, 79, 134, 145, 193, 228, 276: a, t, c, g, or other
tccggtccctcgcgaaccctagagccgcaccagcacactcccgctgcantannnnnnnnnnnnnnnnnnnnnncccagncgtaggaaacaggaggaagatgccggcggggcacgggcttcggtcgcggacccgngacctgttcgngcggccgttccgcaagaagggttacatcccgatacaccacgtacctgngacaccttacaagatacggcgactacgtagacgtncaagtgaacggcgcgtgcacagggctgccggcacagttctaccaggangacac

SEQ ID NO: 934 - DNA, 278 bp, Zea mays
  misc_feature: Incyte ID No: 700343531H1
  unsure 121, 171, 186, 261: a, t, c, g, or other
ggacgaggaagggtacccggaccttcgcgctcgtcaacagggtcaccggcgaggccatcaagcactcccagggcgagggccacccggtcaagctggtgccctacaaccccggctaccaggncgagtcggtgctgtggacggagagccgcgacgtcggctcacggcttccgntgcgtccgcatggtncaacaacatctacctcaattcgacgcttccaggcgacaaggaccaggcggcgtgcgcgaggcaccaacatcgtgnttggaatggtgcgaggc

SEQ ID NO: 935 - DNA, 288 bp, Zea mays
  misc_feature: Incyte ID No: 700343533H1
ggttatgcttttggctctcgggaggtcttagtcaagtgttgttcaccctatatctcgctggtgatggctacaaagcataaaaacatgatctccccatggttctggctgtccaagtgttcgatagtacaaagttctaaccgaatttagatctggactgtaggtttcaggttgtagctcgagttggttgctgtaaatctgaaagggccactttcaattccaaccaggtgtaatgtaagctttgttatacaatccagcagcggtaagatcttttgcagatcagtatggtcg

SEQ ID NO: 936 - DNA, 284 bp, Zea mays
  misc_feature: Incyte ID No: 700343534H1
  unsure 4, 43, 138, 241: a, t, c, g, or other
gggncgagcattccttgccccagcagtacattcacgcgttcanagacggacaatttacgacatctaccagtgtctacattctggggcttgattgtctgcacggctgccatttcttatttccttttgtttacatcagcnagcttattacctgccatctggacttatattttgtagttagcaaggtaactagatattagaacggctcaaaattttcaccattcttgtttcctttgtttacatnagctagctattacctgccatctgaattttaattaagtaaatga

SEQ ID NO: 937 - DNA, 289 bp, Zea mays
  misc_feature: Incyte ID No: 700343535H1
  unsure 2-3, 31, 63, 280: a, t, c, g, or other
gnnatggttcaaaccacccaataaacaaganaaagaagcagaatgccttgagagatgttaggnaagctttactaagtacgaggtgttactggatacatgcagatgcagttacatcccacatgcaagagttccagtccttcaatatgtgagcgagcaatttggcatctacctgtgatatatacaattggcaactttgctggtacgaattaagtaccaaaatcctctactgggtcaatactgtagatgagcggtttggtgatatggttttgctgatccaggntgggcaaaa

SEQ ID NO: 938 - DNA, 288 bp, Zea mays
  misc_feature: Incyte ID No: 700343536H1
  unsure 94, 97, 118, 132, 146, 150, 152, 161, 163, 170, 176, 222, 245, 248, 258,: a, t, c, g, or other
ggtcgagatgcttcgtggctccgccgccctcctccgccgcctcgcccctacgtatctacgggcggtggctgcggaaacacgactcaccggcgcnttnttcctcccatcgcccccttcntccgcgcccgcttnttgtctgccccgantacntnttcaccgcntncttcgtnttcagntgcctgccacgaggaggatgcggaggacagagacctccccgagatntaccaatggtgatgcaggtgccnggntacagacatnttccgtcgaccgatacgggatnttacaacc

SEQ ID NO: 939 - DNA, 283 bp, Zea mays
  misc_feature: Incyte ID No: 700343537H1
  unsure 66, 84: a, t, c, g, or other
gtccggttccgaactccggtcctccgatttgcgcgtccggatctaccagccatggcatacatcttnggacccgtggatgaaggngtacaatgaagcatccagacttgctgatgacatcagttccatgattgctgatagagggtcccttccacaattcaggcccagaaattatgcggacatacttacagccataccggagaaaaataactattcttgggactagactggatagcttggagtcgttgcttgggcagaattcctccaaagttcatccatgacagga

SEQ ID NO: 940 - DNA, 282 bp, Zea mays
  misc_feature: Incyte ID No: 700343538H1
  unsure 105, 141, 193, 266, 274, 277: a, t, c, g, or other
gggcctcctatccaggccttcctgtatcaaataccaatacattggttggattctgcagtacccattaccagctgcttggtcagttgaggcgtaaacgcacctganatgttctgcaactgccaagatactctttgactcttncatggttaaagtaccgtgttgttgtgatgtttatacatgattctcacttgtnacccttacaataccttacacgttgcgtctacaatcttgtgacatattcgtactctgagtcatctggcattgtnccttttgngancagga

SEQ ID NO: 941 - DNA, 277 bp, Zea mays
  misc_feature: Incyte ID No: 700343539H1
  unsure 17, 54, 181: a, t, c, g, or other
gggatcatcagtcaggnaaaggccgtgggcgacgatggaatgtgagggggaggnacacgagatcctggtgtcctcctgctacgttccagatcttcaaccaccagctaaccatccttttttatagtgtagccagtaattgttattccgacacgttctttgttttgtaatactactaatatcngttgttatattctgtgctgtgctcacggtggattgttcggtgattgggtagggtatgggggaggatacggtgtcgcagcctcgcaggactggaacc

SEQ ID NO: 942 - DNA, 277 bp, Zea mays
  misc_feature: Incyte ID No: 700343540H1
  unsure 2, 67, 91, 146: a, t, c, g, or other
gntacatcgccctgaacactccatccttgcacaaacgcaactacgagagagaaggacaaggaaaaanacaggggacaagatcgagtgaganagaggagatatggcgtccataataacaggagatttcgcggaggcctacgtacggnagaacgcctgcgaagaggagacgaggaaggcagaagcaagctccgccggcggggtggcggcggcggcgacaccaggagacaagaaggccgacgctatgcatcatccgagaagaaagtggccaaagaggctg

SEQ ID NO: 943 - DNA, 275 bp, Zea mays
  misc_feature: Incyte ID No: 700343541H1
  unsure 2, 38, 187, 222: a, t, c, g, or other
gncctgagcaaaaaagagactcttctttgaaatatcanacacgatgtgttcgatgttttcccaacggaacaggatatgctcttagttctgttgaagggcgagtttctatggaattctttgatctatctgagtctgctcaatctaagaagtatgctttacaagtgtacatcggaaatctgaggctggncagggacaccgtttatcctgtacaatgccaattgntttccatcccatatatggaactttgccaccggaggtgtgatggatttgtgaat

SEQ ID NO: 944 - DNA, 270 bp, Zea mays
  misc_feature: Incyte ID No: 700343542H1
  unsure 2: a, t, c, g, or other
gnagcttggttttattcctgaaaggggttaacttggatcctatcttgcctgtactggccaaggtttttgatacaggcactagaaggaggcggtgccaagaatattaacttccaagaattggcagcagatctagcacagataacttttgattatccattcaggatacctaccgtattttgctttgattattagagccatcggagtattagaaggactagcttggtgggagatccgaatttgccttgtggatgaagcttacccatacatcgc

SEQ ID NO: 945 - DNA, 269 bp, Zea mays
  misc_feature: Incyte ID No: 700343543H1
  unsure 195, 225: a, t, c, g, or other
gtactagttctaggcaaacatgtggaatgaagccctaaacaaacgacttggcactgaggatttcgaccttacaggggatcattatggagattgaaagacgtggaatgtcttttgatcagttgctcaccatacccgagcaagacgaatgggtgtacagtgatggtaaatcaactacttgtgtcgcttacattctgncatgtacaaggaggctggaatattcacccnttctcggagtcgatccggtcaccgagtttcatattcgtgacgct

SEQ ID NO: 946 - DNA, 269 bp, Zea mays
  misc_feature: Incyte ID No: 700343544H1
cttcctcggtccaagccaattgaggctcctgaaccatctcctacatatgttgcagagaagcaggtgcaccaggtccaggtaactgctaacctcatgaaggctgaggttgatcatgatgtgcatcagaatgcaatgactgctaaaacaggagttttaggagcagatgctgagagcaaggtagctgagcgaccacgtttgaatctgaagcctacgttcctatgccacaggacaatctgatgaaatggctgttaaggaaaggccatccctct

SEQ ID NO: 947 - DNA, 274 bp, Zea mays
  misc_feature: Incyte ID No: 700343545H1
  unsure 2: a, t, c, g, or other
gnccagcatcggccgaactggtctatcggcgccgcccttcacgccgagagttccctctttactcgcttgctacactcgcgtcgacgactgggctaccggcgcctccaccctccgcctggtgtccttcgccgtcgacgagcgcacaccagggtacagtacgtattgctcgtgatttgtgtaactacggagcaagctgcatacagcacaagatagaagatgggtatccttgagaggatcaggagattgaggccgagatggctcggactcagaaaaa

SEQ ID NO: 948 - DNA, 274 bp, Zea mays
  misc_feature: Incyte ID No: 700343546H1
  unsure 23, 73, 90, 149, 220, 222: a, t, c, g, or other
gtcttcaaactatttggcaaggnacctagtacaatacctgggaaccttcgtgacgatatagtaaattggctcnaacacagtcctactganatggagggttacatccgccccggttgccttgtactatccatgtacctatcaatgccggntattgcatgggatgagcttgaagaaaatctcctccagagagtacaactacattagttcaaagttctgatangnccttctggagaaaaggaaggtttttagttcgaaccggctccaattggtatct

SEQ ID NO: 949 - DNA, 275 bp, Zea mays
  misc_feature: Incyte ID No: 700343547H1
  unsure 89, 119, 132, 204: a, t, c, g, or other
ggtcaaccaaagattttaccttcgcatatactgtttattctggtgatttatctggtggagttcttgtgcagccctacaaccttgcgtgnctatgatgacagagatatgttctgtctttntcttttacctggnaataacgagaacagaaaggtcttcagaaaggctgttgtttatatcattgatacaagtggaagcatgcaaggnaagcctcttgagagtgttaagaatgccagtccactactctctctgatcttattccaggagattacttcaac

SEQ ID NO: 950 - DNA, 263 bp, Zea mays
  misc_feature: Incyte ID No: 700343548H1
  unsure 125, 208, 219, 221, 228: a, t, c, g, or other
gtaggattccggtcctattgtgttggccttcgggaccgggagggaggcgagtgggcaggagagagaagggggggcgtttaaaattggggatcggagagaacggcggaggaggcggggcctcgagntgagctggcacgtccggggacggggaaggaagacaactggaattgggaggcgggtggtgctcggatgctcgcctgcgctgttntttgttgcttnanttgcttntttttcccggggataaaagcattgctcattgttcc

SEQ ID NO: 951 - DNA, 80 bp, Zea mays
  misc_feature: Incyte ID No: 700343549H1
gtgcagcaagactacccagttgggtattagctttgctggtggttacattgccggtgtcttctgtgctattgtttctcacc

SEQ ID NO: 952 - DNA, 279 bp, Zea mays
  misc_feature: Incyte ID No: 700343550H1
  unsure 105, 159, 174, 186, 214, 218, 220, 227: a, t, c, g, or other
atctggtttctgcttattactatggtacttgagctccagtggacataatattgtacctccttaactagacctccttagaccaacaaggacatcacagcacaaatnatctctgctagtatagcggtgatatggttcttgcttctgcttactcgcatgagntgccacgatatggtnttgaagttggtncgaccaatatggcagctgcctatggcanggcntntgttggntcgcgtgtgctcagaccgtggtttagataggatatgaggcatgttgaggcca

SEQ ID NO: 953 - DNA, 288 bp, Zea mays
  misc_feature: Incyte ID No: 700343552H1
  unsure 113, 117: a, t, c, g, or other
agggctcaaaccctagggaatctacccagaaatcacaccccaagcagggtcctatcgtatcaagaagccgtcgcgggggccggatcgccgcggctcggagaggagcggagganaatncatctgcggacaggtaaggattcggaggcgggatcaggagctgagggaacctgttcgaggtggcctagactcgtagggatcgcgttgacattgggagaaatcacggagaggcggaaaccgagcaatagccaataggggaagggaagagcaacagtgcccggggcaccaaga

SEQ ID NO: 954 - DNA, 281 bp, Zea mays
  misc_feature: Incyte ID No: 700343553H1
cagcaatccttacttccattgatagacgatcgagtcgtgtgcgcaacaaccgagctagctaggatggcaggatgctgggcagtgttgctgccatcggcgctgctcgtgtggatcgtttgctgcaactgggtgctgatcatgagtgtggacgccgggtcaccgtacggcgcaaacatgactgatcctgatgcgccatgtgcagttctcgacgaggacagagacggccttctactattccggagagtactaaaggttttattgcgatcggatgacccctgcct

SEQ ID NO: 955 - DNA, 281 bp, Zea mays
  misc_feature: Incyte ID No: 700343554H1
  unsure 261: a, t, c, g, or other
caagattcgacccaacacagcatgtgcacaccagcagagcacatgtgcacaaacaaagcatttgatcccaaccaacgaggcaagttaatagtaaatgctttcgtcgccttcgatagcttaccgaaccttactgcgtttgtgagcacggtgctagtgaaagtggctgagcaggtagacgcgaacgtggaagaggctgatttggacggtgaggccggcgttcaagcaagatgtggatgcccattgttcatgttcagggccgantcacgagccaaattcagggg

SEQ ID NO: 956 - DNA, 286 bp, Zea mays
  misc_feature: Incyte ID No: 700343557H1
  unsure 178, 232, 238, 261, 275, 278-279: a, t, c, g, or other
ggcggaggcggaggagcggaggtaggagatctcgagcaaggcggaggcggaggagatgaagacgttcgacccgtggccggtcttcttccgccgggagtggaagcgcaactggcccttcctcacgggtttcgccatcaccggattcatcatcacgaagatgacggccaacttcaccgangaggacctcaagaactccaagttcgtgccaggaacacaagaagaagcatgaacnaaccangtgaaggattgtgcataaacgcngtttgggccagccnttnngttatgc

SEQ ID NO: 957 - DNA, 285 bp, Zea mays
  misc_feature: Incyte ID No: 700343558H1
  unsure 216: a, t, c, g, or other
ctacatcatctctggccctgtggtggccatggtctgggagggcaagagcgtcgtccacaactggccgcaagatcattggcgccaccaaccccctggcttctgagcccggcaccatccgtggcgactttgctgtcgacattggcaggaatgtcattcatggaagtgacagcattgagagtgctaataaggagattgccctgtggtttcccgagggcntgctgattggcagagcagccagcacccctggatctacgagaagtaaacatgaaagtttcacatgaaacc

SEQ ID NO: 958 - DNA, 279 bp, Zea mays
  misc_feature: Incyte ID No: 700343559H1
  unsure 168, 240, 254, 267: a, t, c, g, or other
gtgatccacctgctggtgttcagattcgtgagggtctgcactacaacccctacttccctggtggtgccatagccatgcccaagatgctcaatgatggagctgttgagtatgaggatggtactcctgcaactgaagcccagatgggtaaggatgttgtatcattccttncatgggcagctgagccgagatggaagagagaaagcgatgggagtgaaatggatcttctactatcactagcgnttcttcaagcggcntactaccgccgcngagtggtcatct

SEQ ID NO: 959 - DNA, 288 bp, Zea mays
  misc_feature: Incyte ID No: 700343561H1
ctctctcttgctcgcactcgcggagatcgaagagaagcgcaggaggccccagcactagcgccgccccgccgccgcatcagacatggcgctggccgctcgcctcgtctcgcgctcccgtcagctatattcggttcaagccactttggggaatggaggtgtcactgcaagttcgctcctttgccaaggatgcagctccagctgaccgtcctcctgtcagtggggatgatctcctgaagggcatattctttgaggtaaagaagaagtttgagacagctctggtgttcttaa

SEQ ID NO: 960 - DNA, 290 bp, Zea mays
  misc_feature: Incyte ID No: 700343562H1
  unsure 57: a, t, c, g, or other
caggactcccagaggcggccgtggcggcggtggcaggggtggccgcggcggtggcangaagggcgggagcaaggccgtcgtggtggcgcacaagcacgccggtgtcttcatctccaagtccaaggaggatgcgctctgcaccaagaacatggtcccgggagagtccgtgtacggagagaagcgtgtctccgttcagaatgaggatggaacaaaagttcgaatacagggtgtggaaccccttccgttccaagctggctgctgctgtgcttggtggtgttgacaacatctgg

SEQ ID NO: 961 - DNA, 292 bp, Zea mays
  misc_feature: Incyte ID No: 700343564H1
  unsure 12: a, t, c, g, or other
ccgaccaggtanaagggctccacgctcgtcatcaacggaatggtcacggatgggtcagacgaatgggcgatctacggcggaaccggggtgttcgccatggccaccggtgtcatgaagagaagaaaccttgccggcggtagcaacgacgggaactctgacgagcttgccctggaagttttctgcccggtgtttggcgcatcacagcaaccaattagcaagcagcaggagtccatctcctccgtcaccaagatcggactatggggcggacagggagggtcggcacaggactcac

SEQ ID NO: 962 - DNA, 286 bp, Zea mays
  misc_feature: Incyte ID No: 700343566H1
  unsure 6, 64, 71-73, 160, 177-178, 189, 230, 241, 264, 272, 276, 283: a, t, c, g, or other
cgcttnataactttcaagatggacgacaagttcaaggagatagttgtggaccaggtcggggatncgcgctnnnagctacgatgacttcacaaacagcctccctgagaatgactgccgatacgcgatctatgatttcgactttgttactgcagaggatgtnccagaagaggcaggatnntgctatatgcntatggtcccccatcctccgaccaaggtggaagagcagatgntttatgcaggnacaaaccgaattacaagatggcnacatggcntgcngttgaanacc

SEQ ID NO: 963 - DNA, 285 bp, Zea mays
  misc_feature: Incyte ID No: 700343567H1
  unsure 45, 66, 72, 84, 128-129, 223-224, 242, 252, 259, 265, 274, 282: a, t, c, g, or other
gtttactcaccctctgcaggctgcatcactaccaaggagcttggnacggtgatgcgctcccttggnccaganccctaccgaggncagagctgcaggatcatgattcaacgaggttcgatgcggatggnnatgggaccatcgacttcccggagttctgaacctgatggtcgaggaagatgaaggacacggactcagaggaggagctcaaggaggcctccgcgtnntacgacaaggaccagaangtttcatctnggctgcnggctcngccagttcngaccaacntgg

SEQ ID NO: 964 - DNA, 285 bp, Zea mays
  misc_feature: Incyte ID No: 700343568H1
  unsure 43, 156, 279: a, t, c, g, or other
gtgatccggagcagccgcagtcccaccgaccccgccgccggtncgccctccatctcctcgccgctgcctctgcgtttctcttttcaataatcaagatgagccgtggtggtagtgccggtggtggtcaaagttctctgggttatctctttggaagcngtgagccccccaaaccagcagtggcaccagctgcaagtgctccacctgttgagaaaccatctgctgcaaagactgatgcggccaagcaggttgctgctggggttaccagccaaaccaataatnaccaca

SEQ ID NO: 965 - DNA, 214 bp, Zea mays
  misc_feature: Incyte ID No: 700343570H1
gatcagtgcaccgacgatacgacctcctccttcctccgatctggcctttttaatccgcggatcccgtacaagatgcttcccctctcgctcctcaagaccgcccaggggcacccaatgctcgtggagctgaagaatggtgagacgtacaacgggcatctggtcaattgcgacactggatgaacatccaccttagggaggttattgcacctcaaag

SEQ ID NO: 966 - DNA, 282 bp, Zea mays
  misc_feature: Incyte ID No: 700343571H1
  unsure 10, 40, 220, 253, 273, 278: a, t, c, g, or other
ggcttctggngcctgttgcagctcttcctgtgcatccagnggcatgtccccaggcaacaagcaaccagctcgccctgctccacagaaagctacagctgaagatgatgagctgctggcactgcaagctgaaatggcattgtgatcaggtttccactgaagaggtgaaatgtgtatatgaattgcgttatgctgaaagctgagtcaagctttattgtattgnccagtgtgtataatcttggtggatattggcaangtgcaaccgaagcagcgaangccgntaca

SEQ ID NO: 967 - DNA, 284 bp, Zea mays
  misc_feature: Incyte ID No: 700343572H1
gtcggccgtcgtccctgcaggagcctcttccatggcgcctagtcttctccccatggcgagctcgtccagccactccgcctccactacatgtgctgtttcccccctcctccccttttctcaagtttggtcctcggcacccaagcttttgtgtccctgcagcacgtcgtgcctgtgcagccccggcagtggccccgtccatcccgttcggagcgctctgggtgttcgatggaatggttgtatggagctttgtgttgtgtgcagccccatctgcgacaccgtcgaac

SEQ ID NO: 968 - DNA, 285 bp, Zea mays
  misc_feature: Incyte ID No: 700343573H1
  unsure 2, 134-135, 168, 247, 260, 278-279: a, t, c, g, or other
tncacctccgccatcatgggtcgcatgcacgctcccgggaagggcctgtccccagtccggcgctgccctaaccgccgtagcgtgcccacgtggctgaagttgacgtctgacgacgtgaaggaacaaatttacannttggccaagaaaggcctgactcttcccagatancgtgtgattctgagggactcacatggtgtggcacaggtccgttttgtgaccggaaataaaatcttgagaatcttaagtnccaaaggcctgcncctgatcttctgaggatnnctacca

SEQ ID NO: 969 - DNA, 284 bp, Zea mays
  misc_feature: Incyte ID No: 700343574H1
tcgtcagacgtcagccagcagttcgaaaccaaggatcgatccaggagcttccggaaggctaggcgcgcgtgcagcgtcgaggtgctggtgccggtgccgcccatggatcgggctcgcggatccgcgttcctgctcggcgtcctgctcgcaggatccttgttcgcgttttcagttgctaaagaggagaccaagaagctcgggaccgtgatcggtatcgatctcggtaccaccttactcctgtgtcggtgtgtacaagaacggttcagttcgagatcatcgccatg

SEQ ID NO: 970 - DNA, 286 bp, Zea mays
  misc_feature: Incyte ID No: 700343575H1
  unsure 13-14, 18, 173, 193, 207, 219, 221, 225-226, 243-244, 249, 259, 265,: a, t, c, g, or other
ggcaggaggaaannagcnatcatggcgaagtacaggcagcagcaatgcacagaagcaggatatggaagctaaaccaagcagcaatgatgaagaagtaagagctatggatggaaatgtaactatgcatgcagaaagatgataacggtagcagttaccacggacaatgacaaagncgaaaattaagcatgattantccgaggtatttgntggccaaaaccnantttnngtgggaaagtctccggnncaaangatactcaantagcanggagcntncangcnnnncagc

SEQ ID NO: 971 - DNA, 287 bp, Zea mays
  misc_feature: Incyte ID No: 700343576H1
  unsure 2, 92: a, t, c, g, or other
gnacaaaccaatcatcctctccgtgtaggccgcgggattccgtgtccctctccattccggcgtagcatccgtcgccggatacaggatccggncccccgcgatggagccctcaccaacctcctcctcgccggctgtggcgcgccggttgtcgccggaggtaaggagggtgccgaagcgggcgctggaggagttgttggagcaggttccagcgggctgttgagatgctgcgcgatgccgacgctgatctcgccatctctctctcggaggagaccgcagcagcttcgccg

SEQ ID NO: 972 - DNA, 285 bp, Zea mays
  misc_feature: Incyte ID No: 700343578H1
  unsure 277: a, t, c, g, or other
cggagttccttgcagagggcactgctattgaggacctgttcaagcctgacagagtgctcatcggtggccgggagacccccgagggcaggaaagccgtccaggctctcaaggatgtgtatgctcactgggttcccgaggacaggatcctcaccaccaacctgtggtccgctgagctctccaagctcgccgccaatgcgttcttggcacagaggatctcctctgtcaatgccatcttccgctctctgcgaggcaaccggagccatgtctctgaggtggntacgcgtg

SEQ ID NO: 973 - DNA, 287 bp, Zea mays
  misc_feature: Incyte ID No: 700343579H1
accgccgtcacgccatctcgccgggggcggaaccccgaccgcgagtatggggaacatcttcgtgaagaagcccaagatcactgacgtcgatagggccatcctcaccctcaagacgcagcgccgcaagctcgcccagtttcaacagcagcttgagaaggtaatcgaagcagaaaaggaagctgcacggcagttggttcaacagaagaagagagacagagctttgattgctctgaagaagaagaaagcttcaggaagagctgttgaaacaagttgacactggcaaatga

SEQ ID NO: 974 - DNA, 290 bp, Zea mays
  misc_feature: Incyte ID No: 700343580H1
  unsure 2: a, t, c, g, or other
gnacgccgcgaccgccccaacccaactgcccttttcggagatctcgccgcctccgccgtcgacttccgtcgcccccctatcccgcgtccgggcttacccgatggcacggctgcactggcttgaggccgtcctgccgctggggatcatcggcggcatgctctgcatcatgggcaacgccagtatttcatccacaaggccgcgcacggcaggccgaagcacatcgggaacgatatgtgggacgtcgccatggagcgccgcgacaagaagctcgtggaacaaatcctccggca

SEQ ID NO: 975 - DNA, 201 bp, Zea mays
  misc_feature: Incyte ID No: 700343581H1
gtgcccaaaagctaatatatcaggttggccagaagagaggccggttaatagtggatgaaaatgatgatgagcaacctaagaaaaagattcagaatggggatgccggcaactcagtggattagtgtctacaatgcccgtcgacccatgaaacagaggtaccactacatgtagccgataatagattgctgcagctattcaaag

SEQ ID NO: 976 - DNA, 216 bp, Zea mays
  misc_feature: Incyte ID No: 700343582H1
  unsure 184, 199: a, t, c, g, or other
tcgacgcccaccgcgcagccatggcggaacagaccgagaaggcttttctcaagcagcctaaggtgttcctcagcttcaaagaaatctggcaagggtaagaagccaggcaagggtggcaattcgattttggaagagcattggccttggtttcaagactcccagggaagcattgaagggacctacntgacaagaatgtccntcatggaaccgttttat

SEQ ID NO: 977 - DNA, 277 bp, Zea mays
  misc_feature: Incyte ID No: 700343585H1
  unsure 19: a, t, c, g, or other
gtctcctccaccaaatccnctcattccccattgatttgtgagggaaaacctagggagatctcagatctgctctccctagtgcttctccttcactctctcttgcgtggattggattcaagcctctctccaaggagacataaccttattttcttgctcgggcatagctatagcacacaagggataccaccttacaatgtgtctgacttctgcaagtttggttagggcttttgatggcaaaacaaacgaacaatattatgaattaaagattaaagtgcgc

SEQ ID NO: 978 - DNA, 284 bp, Zea mays
  misc_feature: Incyte ID No: 700343586H1
  unsure 60, 102, 105, 116, 251, 257, 267, 272: a, t, c, g, or other
ggtcaccccctattcaaaatcatcaaccactcctttatcgacctccccgccccatgctancatctccatcatgatgaaacttcggttctctactaggagtanccntccatagtacnaatcctcacaggcttattcctagcaatacactacacgtctgataccataacagcattctcattcagtcacccacatctgaccgagacgtaaactacggctgactaatccgatacctacgcgccaacgggccttcnatattnttcatctgcntattnctccatgtggga

SEQ ID NO: 979 - DNA, 285 bp, Zea mays
  misc_feature: Incyte ID No: 700343587H1
tcgagtccttggactcgttgaacccgttcatgcatgctcgcggtgtggccttcatggtcgataactgcttccacaactgctcgtttgggatctaggaagtgggcaccacgcttcgattacatcttgacccaacaggcgtttgtgactgttgacaagaaagcaccgattcaaccaagaccttcattcagcaactttcatgtctgaccctgttccacggtggccatcgaattctgcgcttcagctgaggcccatgttgacatcttcagtggaccgctgatgctgatt

SEQ ID NO: 980 - DNA, 280 bp, Zea mays
  misc_feature: Incyte ID No: 700343588H1
  unsure 103, 185: a, t, c, g, or other
gggcagagaagctcaaggctgagtacaccaagaagatcgacgcttacaacaacaagcagtctggagaccccacggcgtctggtgattccgacaagtccaagtnccgaggtgaacgacgaggacgaggagggtgacgagtgatgtatgacggatgaaactctgtccaagtgtttgcagtcagggantaaaatctcgtcgttgtcggcctaaccgggttttctcgaaggactttctagatgcagtagattagtgccgtcttctgagtagtttcctgcaagtg

SEQ ID NO: 981 - DNA, 274 bp, Zea mays
  misc_feature: Incyte ID No: 700343590H1
  unsure 85, 159, 219: a, t, c, g, or other
gtacaaaaccagaccaccaaacaagtgccagcgccctctcgcagtcgccgcaatggagagcaccttcatcatgatcaagcctganggcgtccagaggggcctcattggtgagatcatcagctgttttgagaagaagggcttctacctcaaggccttgangcttgtcaacgtggagaggtcgtttgccgagaagcatacgccgatctcgcctccaagccntcttccagggcctctggactacatcatctctggcctgtggtggccaggtctggga

SEQ ID NO: 982 - DNA, 274 bp, Zea mays
  misc_feature: Incyte ID No: 700343591H1
  unsure 84: a, t, c, g, or other
ggtgctctctgtattatgcagcttgcattccctgacgctgtttacctagttgatgctattgagggtggaaaagaacttattcanccttgtaagcctgcacttgagtctgatcatatcaccaaagttattcatgattgtaaaagggacagcgaggcttgtattttccagtttgggcatcaaactgcacaatgtgatggatacacagatcgctattctctgatacaagagcaggagcaggaaggaaaaaagaagacatcgatgattacattacata

SEQ ID NO: 983 - DNA, 267 bp, Zea mays
  misc_feature: Incyte ID No: 700343593H1
  unsure 21, 26, 34, 36-37, 40, 199, 260: a, t, c, g, or other
ctgaccctggctaagactganctggngatgcagntnnccngacttgaatgaagaactggcttacctgaagaagaaccacgaagaggagatgaaggaattcagcaaccaggcagtaggccaagtcaatgtggagatggacgccaccctggcattgatctgacccgtgtgctggctgagatgagggaacagtatgaagccnggcagagaagaatcggaggatgccgaggctggttccaggccagagtgcagaactgaacaangagtatc

SEQ ID NO: 984 - DNA, 110 bp, Zea mays
  misc_feature: Incyte ID No: 700343594H1
  unsure 2, 106: a, t, c, g, or other
gnaaacactgagaatccgaaattcgactggcttaaaggacgcgtgaagggtttgagagctgagagatgccaatatgggatctgctggagttttatgtccgagatgnagac

SEQ ID NO: 985 - DNA, 278 bp, Zea mays
  misc_feature: Incyte ID No: 700343595H1
  unsure 26, 29, 32, 275: a, t, c, g, or other
ctctatctcgcccgaactcggcttcngcngcngccgccgacggggcaaggtcatgcctttccaccactaaatggtcctgctccattccagctccagccttcgccgccactgccccacggggcgatgaagaggacggctgcggaggcggcgcagagcagttgctggacgagctggcggcggcggcaaaggccgctgaagctggcaattccattggcgcgcgacgatattggcgcggctcaatcaccagcttcccccgctcgggaagccgttctccnctc

SEQ ID NO: 986 - DNA, 146 bp, Zea mays
  misc_feature: Incyte ID No: 700343601H1
  unsure 2, 63, 72, 75, 78: a, t, c, g, or other
gnaatctccgcccaagacgcaggtgcattgccgcgttgatcggtcgggccttatttcaggagnaccttgganaantgntgccctatcccttttcagtggggtgctcgacgtttgacgccggagaagcttcgctatgatgatgactt

SEQ ID NO: 987 - DNA, 246 bp, Zea mays
  misc_feature: Incyte ID No: 700343603H1
  unsure 2, 7, 173, 236, 239: a, t, c, g, or other
gngagangggggaaccgaggagatgaggctggtcggcctgacgggcgggatcgcgtccgggaagagcactgtctccaacctattcaaggacgccggcgtccccgtcgtcgatgcagacatcgttgctcgggatgtagtgcagaaaggcactggaggtttggaagaagattgtnaaaagccttcgggaatgatattttgttggagggtggagaattaacagagttacttaggacaantgnctttctg

SEQ ID NO: 988 - DNA, 107 bp, Zea mays
  misc_feature: Incyte ID No: 700343605H1
  unsure 16, 67, 70, 75, 85: a, t, c, g, or other
gtaaagcaagctccanttcatgttgagaatcaagaacctcagaatgttaatctatcggagaatgcanagntgganattccggtancagatatccagcctgacgtgga

SEQ ID NO: 989 - DNA, 300 bp, Zea mays
  misc_feature: Incyte ID No: 700343607H1
  unsure 74: a, t, c, g, or other
gggcacaccagtttcaagcaatccctaggccgtggcgacgtgctgggaaggattcaaatcaggggcgaactagngtgacggcgctgttagtcgcctctagtagctgcgcgacgcgggctggcttgtccgatcggtttgcctcggccatgtcgactaagaaagttctttgcaagttcttcatgcatggagcttgcttgaaaggagagtactgtgaattctcccacgactggagtgatcaagcaaataatgtttgcacattctaccaaaaaggtgcagctcgtatggtagccgttgcagata

SEQ ID NO: 990 - DNA, 298 bp, Zea mays
  misc_feature: Incyte ID No: 700343608H1
gtcacagagcctctcgagatcctgctccacctccccttgttagctgaggataagaacgtgccatatgtgtttgttccatcgaagcaagctcttggccgtgcttgtggtgtgacaagaccggttattgcttgctcagtgaccagtaatgagggtagccagctgaaactacagatacagggtctcaaggactccattgagaagcttctcatctgatctgccgaagacctttcagtgtgatgggcctcatcgacacttttttcagaggcttggactggtgatggtgtctgtttatttgcgc

SEQ ID NO: 991 - DNA, 297 bp, Zea mays
  misc_feature: Incyte ID No: 700343609H1
catgtcgatagatagccttaacagcatgcagaccagcacgcatggcggctccattgcaatgtctgtggacaatagcagtgtagggtcctgcagctcccatactaggatgctcaatcatcctggcctcaagggacctgttgttggcaattactccgtcggtgggcacagtattttccgtcatggacgggtgtctcatgccttgagcgatgatgcgctagcacaggcgttgatggacccaaggtacccgactgagacactcaaagatatgaggagtggacaatgatttagccaagctcc

SEQ ID NO: 992 - DNA, 289 bp, Zea mays
  misc_feature: Incyte ID No: 700343611H1
  unsure 194, 219, 262, 266, 279: a, t, c, g, or other
taccttatatctgcgggcaaagattccaacgtctacatttggaacttcgcgaactctagagatgcaagatcggttcattcgtgcgagctgttcttctccaaagctgtaactaccgcagtaccatggccgggagtgtaccaagatgggcacacgaagccttcctacctgactgagaaatcctgcagcatgcccanttgcgccacctcggggagtgccatnccgctgagccgtggtcttctggacggcagcaaggatggcgacnggcngaagagaattgcntctacagcaa

SEQ ID NO: 993 - DNA, 300 bp, Zea mays
  misc_feature: Incyte ID No: 700343613H1
  unsure 226, 253-254, 279, 287: a, t, c, g, or other
caggccacacagaccccccacactggcagagtgaagaagcaccacccatccccactgccatccttggtgctctgagcctctctccagggcctatagctccccctatgggtagtgccactccagcccaggccccactctgggcagcacaaccacagatcttagctaatagctaggcactagacttagctaaatgctagggcacaaggcactgcctcactgccaggtncaaggccacagcacagccttccctganncccagcagtgctagtgaccccaacntccattcnttatctgcattct

SEQ ID NO: 994 - DNA, 294 bp, Zea mays
  misc_feature: Incyte ID No: 700343614H1
ttacaatctccatcccttattttctcaagttcttcaagtaataagaggagtggctcacttattcccaggcacaaggtacttaccgttgagactgaagcttgtgcagatgctgaacgagctttccacttagtcagatgttctatccaattccatagttgctcttgactgcctagaattaagagaagtttctcagaaagaacaaacacaaagaacaaagatcaacttttcgtcttgttgaaggtgccaaagaacctgctgaaaccagggatttcagaggagtgtatcttcagcgat

SEQ ID NO: 995 - DNA, 300 bp, Zea mays
  misc_feature: Incyte ID No: 700343615H1
  unsure 2: a, t, c, g, or other
gnaaagtatcaggggcctcttgattctagtgtatcaatgaagatgcgtaccacatcttttgcacacaacccagctgtccacaaatctcaatgtgggagatggttactcgattaagggcagcattccgaccacaataatctggttggtcgcgttgctctttttggttgggtttgtagctggtggcttcattctcgctgctattcataatcctatcttgcttatagtcgtggtggtgatatttggcttgttgctgcacttgtgacctggaacatctgctggggaacaagaggtgtgattgat

SEQ ID NO: 996 - DNA, 295 bp, Zea mays
  misc_feature: Incyte ID No: 700343621H1
atattcaaaaattgagaagttggagcaggagctacgtgaagttgctgccctcgaggtttctctctactctgtggtgccagagcacggttgttcatcacataagttgcatacaccagctcgccgtctatctagggtttacattcatgcatcaaaattttggtcctcagataagaaagcttcagttgcaagaaattcagtttctgggctgtgcttgttgcaaagtcttgtggcaatgatgtttcaaggttgacatttggctatcgaacacagttgtccgagagaaatcatcgcacaa

SEQ ID NO: 997 - DNA, 295 bp, Zea mays
  misc_feature: Incyte ID No: 700343622H1
  unsure 3, 80, 287: a, t, c, g, or other
ggngaggaccagtacagcctcgcctcccgcgacggcaaggtctgcctcgtgcgcacggaccgtgatgacgacgcgcagantggatcaaggacatgaagtacagcaccagggtgaaggatgaggaaggctaccctgccatcgtcctcgtcaacaaagccactggagaggctctcaagcattcccttggccagtcacaccctgttcttctgacccgccataatccagactccctggacgagtctgtcctgtggacagagagcaggacgttggggatgggttccgctgcntaggaggt

SEQ ID NO: 998 - DNA, 289 bp, Zea mays
  misc_feature: Incyte ID No: 700343623H1
  unsure 222: a, t, c, g, or other
gttaacctggagagggtgggctttgggacaaagaacttcgacatggctatcgtgttcaaggatttcaagaaagacgttctccgcattgactccatcccttcagcatcgcttgacgcgataaaggaatggctggacacaactgacctcaagtactatgagagcaggctgaatctgaactggcgccctatcctgaaaactataatcgatgatcctcagaattcntgacgaggcggctgggagttcctgaacatggaggcgatgactcagagactgaggacacgaggaatca

SEQ ID NO: 999 - DNA, 289 bp, Zea mays
  misc_feature: Incyte ID No: 700343625H1
ggtttagcagaagtaaggcggtcaaggaggctcactgtttcatttatctgtacagttgcaaactatgagtatggtttttactggcacttctatcaggatgggaaaatagaggcagaagtaaagcttactggaattctcagtttaggggcctgatgcctggggaatcgaggaaatatggcacaactattgcccctggtctgtatgcaccagttcatcagcattcttgttgcccgtatggacatggctgttgatgcaaacctaatgaagctcataaccagtggttgaggtt

SEQ ID NO: 1000 - DNA, 287 bp, Zea mays
  misc_feature: Incyte ID No: 700343626H1
  unsure 52: a, t, c, g, or other
ctctctcgtctctccagcgacggcagcgggcgagggttacgcgaaggcgaanggagtagtggaagcagaggcggcagccatggccgtgatggagaagctcaagatctttgtcgttaaggagcccgtagtcgcggcctcctgcctcatcgctggattcggtctctttcttccagcagttgtccggccaatcctggattcatggcagaccgcggaacaagttcctccacctcttctaaatgatgtggttgcagtgtcaccggcaagaaaaatagtgaattgcatgtttt

SEQ ID NO: 1001 - DNA, 292 bp, Zea mays
  misc_feature: Incyte ID No: 700343628H1
  unsure 2, 221, 223-224, 232, 256, 279, 291: a, t, c, g, or other
tngagaaggaacgggagaagagagctaagcagcagcaacaggttgctatgcccggcctgaagaagggtgcgacttatctgaggcccaagagaatgggtctgtagataagacctgatataacttaactgtcctccggtgattttgttactaggctgagggaacttgtaatgtgtagcctgctacaagcagcatgtaaaacaacatgtgcgatgttgtatacntnnacatgaangtgttgttttactgcagctgaacngctacacttacagttcctcagcncgtaatgaatanc

SEQ ID NO: 1002 - DNA, 286 bp, Zea mays
  misc_feature: Incyte ID No: 700343629H1
  unsure 14: a, t, c, g, or other
catcctcacttgtnactgagagagaatccatcaattcacatccacgagatgaaaacagtgcagttaactggaatttcaaagatatctggtgctctgtcacttctacttaaagctgctgtccagttcattttgctggtttggtttcttgttttaagattcctcgccctgatgtctttttgttcagaatccaccctctgttccaacactggctgctgtaaaactggcaagctggctgagaggtgctaaattatgttgatggcataacttggatatacatgcggggttg

SEQ ID NO: 1003 - DNA, 289 bp, Zea mays
  misc_feature: Incyte ID No: 700343630H1
  unsure 29, 222-224: a, t, c, g, or other
gtcttaatcagattgcactatttgaaggnaaagttgctggtggaaatggtgaacaagttcttagccgagacatatatagactcggacaactttttgacttttcaggatgttatcttctacgtgacaactgttggattctacttctgtactatgctaaccgtgctgaccgtgtacatatttctctatgggaaaatgtatctggcctatctggtgttggagatnnnttcaaaatagagcggatatactgcagaacgcagcctgaatgctgctctgaacactcaattctttc

SEQ ID NO: 1004 - DNA, 267 bp, Zea mays
  misc_feature: Incyte ID No: 700343631H1
  unsure 15-16, 143-144: a, t, c, g, or other
cagcagcggcagcanncatccgaagatggtgaagttcctcaagcccggcaaggccgttatcctcctccagggccgcttcgccggcaggaaggcagttatcgtgcgcgtgttcgaggagggcacccgcgaccgcccctatggcnnctgcctcgtcgcaggcctcgccaagtacccaaagaaggtgatccgcaaggactccgccaagaagactgcgaagaagtcgcgcgtcaatgcttctcaagctcgtcaattcatcactcatgccca

SEQ ID NO: 1005 - DNA, 300 bp, Zea mays
  misc_feature: Incyte ID No: 700343632H1
  unsure 2, 42, 188-207: a, t, c, g, or other
gntcgccgcgctgaacgcgtacaaccgtggcggtagcgaggngcagcagcagaccgagggggagcagcagcacggcggcgacggcggggttaacgatgacggagacgaagatggtgacgacagcgctgaagagaacaatggcaacaacagctcacagtaagctgtaagcccgcgacgacaagcttggnnnnnnnnnnnnnnnnnnnngcagggattccgccaccatgatcgcattttcctggtagcgctaaagaatttcggcgtgtcttgttcgctggaggatcgccctgagctgtcgcc

SEQ ID NO: 1006 - DNA, 178 bp, Zea mays
  misc_feature: Incyte ID No: 700343635H1
  unsure 70, 80-100, 110, 117, 120: a, t, c, g, or other
tggcacgcaggctagcagcacagcagcagccagagccatccccttctccctcgctacgcttcgcttcctncggcgccgannnnnnnnnnnnnnnnnnnnnctcgtccgtncccttcnggngcacgagctcgcccgagatggcgaacgcgagatcgggtgtcgctgtgaacgatgagtg

SEQ ID NO: 1007 - DNA, 113 bp, Zea mays
  misc_feature: Incyte ID No: 700343637H1
gtaatgattgccctctctgctgtgtcttgattgcagttaaaatcatatgtagtttcaccccacccacacattcaactttctgtttcacgctgtttgtatcaatggatggcccg

SEQ ID NO: 1008 - DNA, 284 bp, Zea mays
  misc_feature: Incyte ID No: 700343638H1
  unsure 275: a, t, c, g, or other
ggagggaagctaccggccctatttcaccttccgtacgtctcaccccacggtgaggaggaggaagcaaacgtcggagcacgagcacgcgttcttcgcctctcaccccacgggagggacgggaggcgagggcgcggcgagccggcgggcgcaatcggatttggggaggcaaaaggaaaattccggagagcagttcctttccgcctccccatttcctccggatagatttgggtttgtcctgcgtcgattagtccggcgcccgaacccgcaccaatccntcgccgagg

SEQ ID NO: 1009 - DNA, 284 bp, Zea mays
  misc_feature: Incyte ID No: 700343640H1
  unsure 2: a, t, c, g, or other
tntgcctgttggtaatgatgctgagcttgaagagcgtatactgcagcatctagctgctgctgctgcaatgggaagggcacaccatcttggaagaagggaggggcacaggggacgatctggctctcatggtcgtccacatttcctagttttctctacacaaccaaattcaccttctgctggcacaatctcttcatcttctgctcatatggagggagaaaatgattcaaatcctgccacacctagagctagcgagtcatctccacgagctattcgcattggagaag

SEQ ID NO: 1010 - DNA, 279 bp, Zea mays
  misc_feature: Incyte ID No: 700343641H1
  unsure 24: a, t, c, g, or other
cttatttcgttgatacataacatncatttcccacactccaccccatgaatttgagatagacttatatctgagctttggaaagtgctggaatgtcaaattccaaaccaaatagactacgttattaagtaattaccaattcctccaaaatgaatagatccaaacgtcccgttagttccatttgatgtctatgcatacagcagcaaggtctactgggtttatagttgtgtaggtaactaatggttatagtgaatcggtatggtctcaagtgttttccgtttc

SEQ ID NO: 1011 - DNA, 91 bp, Zea mays
  misc_feature: Incyte ID No: 700343643H1
  unsure 43, 67: a, t, c, g, or other
gtaggtacaccggctcgtggtcaatcgggaccctaagttcacnaacttcgtcgagtttcgcacacanaaagttatctataggagatatgct

SEQ ID NO: 1012 - DNA, 283 bp, Zea mays
  misc_feature: Incyte ID No: 700343644H1
gtcaagtcctggacactgctgctggagtttggttggatagaaatggcattgtgacctctcgtactttgaagtcatccaatgaacatgatgcttcttcggatctacttcggcgctgtcgtcatgctgctgcctcagttggttctcagatttacatttatggtggactcaggggagatatcctcctcgatgatttcctggttgctgagaatgcaccctccaatcagaaatcacttcgtctatgtacaatgttgatagagtccctaggggggaaactcaaaataga

SEQ ID NO: 1013 - DNA, 285 bp, Zea mays
  misc_feature: Incyte ID No: 700343645H1
  unsure 56, 90-110, 129, 147-148: a, t, c, g, or other
tcactgcactggtggtgtccgtggtgctccacagagtgaagcgatagccaggagangcgacgatgcgcaagtgggcgctctcctccgcgnnnnnnnnnnnnnnnnnnnnnaccacactccccgacccanctaagaagctacaagtgnntgccgaggagagcagcgatgacttggctaacccacccaaggtagaggagaagcttggtgctgtccctcatggcctgtccaccgactctgaggttgcccagagggaagccgagtctatctctaggaagactctcagga

SEQ ID NO: 1014 - DNA, 286 bp, Zea mays
  misc_feature: Incyte ID No: 700343646H1
  unsure 275-276: a, t, c, g, or other
gtacgttgccacaagatcagcaacagcagcaattgccatctttgcaggcacagggatcagagcagcagatgcaggaagggctcagcccagccttcacgatagaccaagattgcctcaactagacagcatggagtcgcgtatgctacgattccagcaacgagctgaggtctgtacaagcacaagagtttagagtagccgatattgtcaggcgttagtggccaaaggctaatatcacgatcgaggtgtaccgtgtacgagaccatcctgattgcgcnngggcagctaa

SEQ ID NO: 1015 - DNA, 288 bp, Zea mays
  misc_feature: Incyte ID No: 700343647H1
  unsure 51, 161: a, t, c, g, or other
ggttggtgaggtaacacatcaaccaacgaggtgggtgtacgaatgggaggnccctgagtactaccaaatgttggtggagtcgtggagtacgacttctgcgtggaccggtcagacttgggtagagtacaaggcccagttgatgcgtgaccaaggtattatgntgctatcaacggaggagtacaatatggcacaggcacaatatcagtggaatgccccgtgggaatgatcttcgacggaggatcaactgtgaactataaaacatgtatctgtatctcgatgttgtttgtg

SEQ ID NO: 1016 - DNA, 282 bp, Zea mays
  misc_feature: Incyte ID No: 700343652H1
gtagatcaacgtgctcaagggcatgacaaggaactacgtgttcatggctgtcctcagcagcacggtgatcttccagttcatcatggtgcagtttctaggagagttcgccaacacgacgcccctgaccatacaccagtggctagccagcgtgctcctcggtctggccgggatgcccatcgccgccgccgtcaagctgatcccagtcggctcgttcgtgataccatgaagatgctgctgcctgggatgggaagcacggcatgaaaagcgtcaggctgttccagc

SEQ ID NO: 1017 - DNA, 284 bp, Zea mays
  misc_feature: Incyte ID No: 700343654H1
  unsure 2, 14, 34: a, t, c, g, or other
gngttgcgcccggnccccggaaccgcgccggctncgcaaactccccacaaccctcgtccgccgccggctgcttccacccccgccaccgccatgggtaaattccgcaagcttggccgcaattactcccaacgcctctgcatgctcaggacgatggtgtcgcagctggtgaagcacgagcgcatcgagaccaccgttgccaaggcgaaggaggttcggcggaaggcggatcagatggtgcagtagggaaggagggtactcagcatgcagcaagactgctgctgctt

SEQ ID NO: 1018 - DNA, 277 bp, Zea mays
  misc_feature: Incyte ID No: 700343655H1
  unsure 213: a, t, c, g, or other
gtcacccttggacccactgtccgtgaaggagagtatgtctttggtgtcgctcacatctttgcatccttcaatgacaccttcattcatatcactgatttgtctgggagggaaactctggttcggatcaccggtggcatgaaggtgaaggctgaccgtgacgagtcgtcaccttacgctgctatgcttgctgctcaagacgtcgcacagcgctgncaaggagctgggcattactggcactgcacattaagctcgcgccaccggaggcaacaagaccaga

SEQ ID NO: 1019 - DNA, 278 bp, Zea mays
  misc_feature: Incyte ID No: 700343656H1
  unsure 121, 207: a, t, c, g, or other
gtcttcttggatgtagtgggagagtgttaacattctagttaacagcaatggccagattgtgagatcagatgtggttggggcactgaagatgcgaacatatttgagtggaatgccggagtgnaaacttggctgaatgatagggttctttggaggctcaaggcagagcaactaaaggcaaagcgatagacctcgatgatatcaaatttncatcagtgtgtacgtttggctagatttgagaatgatagaactatatcgttcatacctcctgatggatcttt

SEQ ID NO: 1020 - DNA, 273 bp, Zea mays
  misc_feature: Incyte ID No: 700343657H1
  unsure 227, 252, 264, 270: a, t, c, g, or other
gggagtcggagggaaccgaaaactcagggtctcgaatttcctaggagcggaggcgatggctgggaagggaggaaaaggattgctcgccgcgaagacgacggcggccaagttcggcggagaaggacaaggggaagaaggcccccatctcacggttctcccgcgcgggcctccagtttcctgttggacgaatccaccgttcagctgaagcaaaggactcaggcaatggncgcgttggtgccatgcagcctctanctgccgccatcnggatantga

SEQ ID NO: 1021 - DNA, 277 bp, Zea mays
  misc_feature: Incyte ID No: 700343658H1
  unsure 208: a, t, c, g, or other
gggaaaaggagcaatgctctaatttctggaatggagaatggaaatgaaactggtactagaaaccggccatttgcacagaaacaatctcattctagtcaggtggacgagaaccagggaactgctgactctcctgataacttgaagccatcattgctcaaactcaagtttaagcgtccacattatgagcagctaaacacccaggcctctncaaccagaggagccgacctcctgggtttcttcagcaagaagaccatttcatgttgctaaaggccagaga

SEQ ID NO: 1022 - DNA, 273 bp, Zea mays
  misc_feature: Incyte ID No: 700343659H1
  unsure 208, 262-265: a, t, c, g, or other
ttgtcagcagagctggagtgaaggtcgtcgacgtcctctcccccaaggttttcattggtttgattgttggagccatgcttccgtactggttctctgccatgaccatgaagagtgttggaagcgctgccctgaagatggtggaggaggtccgcaggcagttcaacaccattcctgggttgatggagggaacagccaagcccgactacgncaacctgtgtgaagatctccactgatggcttccatcagggagatgatcctcggnnnnctataaaa

SEQ ID NO: 1023 - DNA, 270 bp, Zea mays
  misc_feature: Incyte ID No: 700343662H1
  unsure 87, 125, 171: a, t, c, g, or other
gtaagattctcttaaagacgacaagttccctgttcgtgaagttgctacaagaactctgggaaggatactcgttttcgagctacagtncagaagctgacaccttgcaacttgttcagttgcttgtnttggccttgcgtgatgattctagtgaagttaggagaagatcttgtngtgtatcaaagctgctgcaaagatgaaccattcagctctgctacacatcactctatattgggcccggcaatgcgatgcttgaaggactctagcagccgt

SEQ ID NO: 1024 - DNA, 207 bp, Zea mays
  misc_feature: Incyte ID No: 700343664H1
gttccaaatgaactgttggagcatgccaaagctgctgcccaggctgctcttgaggagatggatgccgactaagagacacgatgatttgcccaaacttggtgttttcggtggtgttgatatctctgatccctttgggggggacccactaggggtaggcacatttcaaccgaaaaccgagccgaactggaatcaagtttttttcgtttt

SEQ ID NO: 1025 - DNA, 289 bp, Zea mays
  misc_feature: Incyte ID No: 700343665H1
ggcgactgcttctccatccttccacgaactagacgagggaagagcgctgaagcctgaagctgtggaggaaaacgaaggattctccccgtgcttgtgtatgcccaggttcgcctgctctccgtccgcatcccgtccctcgcgaaactcggcgctcccaggtgtgcaaaatccatggcttcagacactggcaagaagctcatccagatcgatgtgagctcggacacagtatgcccttggtgcttgtcggcaaaaagaacctcgagaaagcgatggagcaaagcagggacaa

SEQ ID NO: 1026 - DNA, 285 bp, Zea mays
  misc_feature: Incyte ID No: 700343666H1
  unsure 2, 32, 39, 42: a, t, c, g, or other
cnacaaccgcgagatcttcagctaccgctctntccggtngcntttgcatccgcattcctcagatccagattcgagccccagccccgctttcgagatccagctagctctctatcaagcatccggcggagcgagcagcggggggctcggcgagagagaagatgaagcggaagacgcggaacaagattcatcgtatggacgctggccctggctgcagtggcgatttctggtgggcggcacgattgcgatggtgctccacggcggggactggaagccaagataaagaat

SEQ ID NO: 1027 - DNA, 276 bp, Zea mays
  misc_feature: Incyte ID No: 700343668H1
  unsure 199, 274: a, t, c, g, or other
cttatagtggacaacatgggtttggaccttacggcatgggcttagaagataggctggggttgtatcaatcttcatctggtacattaagtcatgacatccaaatgagtgatgagcatagcggaggtgtgaagaagaggaaaggagtggaggactgtgtcacattgttgcctaatgcaggtgatcaacaaacagaaggttncattctcagccagaaaggatttcaatggaggaggggaacagaaagattttcgcccaaaatacaaagcaaggaagntc

SEQ ID NO: 1028 - DNA, 275 bp, Zea mays
  misc_feature: Incyte ID No: 700343669H1
  unsure 56, 207: a, t, c, g, or other
ttgctagtgtaagcaccatctttctgtctgggagcatggatcttccaccctaaganctgtcggtgcctgcctgtattcactcgccgtcctcaaaaaggccctcacggcacgggttggtgcaacgtatgcgctatgcaaagctagaagacatcttttgctgaccgtgatccaaagcaaagagcggcactggaccaccaaaggcaaggnaagggggggagatgggctggagcctggagttccaacaaatgctgtgtgccgactggagagctcaaact

SEQ ID NO: 1029 - DNA, 272 bp, Zea mays
  misc_feature: Incyte ID No: 700343670H1
agcttagtaaatctgcagctattggctcctagcacccctcatattgtttttccaagactggtgggctaatctggaaagcaaggtacctgttgtgccacacaaggggatcgattctctagttgtcttggtggcttggaagcaagggagtggatgtgtgtttgagggggcctcccctagtaccaatccagattattcaaaacatcaaagacgacgctcatcgatggtgcctgcaggtgctgggggctgcatgccctttggcctagtgttggttg

SEQ ID NO: 1030 - DNA, 275 bp, Zea mays
  misc_feature: Incyte ID No: 700343672H1
  unsure 22, 43, 191: a, t, c, g, or other
tcctccaccgcacctccaagantccacctccacgactgagttngacggctcggcggcgccatggcagttcaccggctccaaccttccccctccggcctacagtgctccaccgcccggtcgccagtgctcctccatgggccacggctgacgggtgcacgcaccggcaggagaggtggatttggtggacctanattcgatgtgcagagagcgacttggaggtggctgacatcttcaagcactacaacatgcagttacaactactgttggccatacag

SEQ ID NO: 1031 - DNA, 273 bp, Zea mays
  misc_feature: Incyte ID No: 700343673H1
gtggtggggcgtggtggagcgggagggccccggccgctacgactgggaggcctacgccgagcttcgtgcgcatggtggagcgagccggcctccgactccaggccgtcatgttccttccaccagtgcggtggcaacgtcggcgacacctgcaacatcccgttgccgccatgggtgctggaggagatgagcagcaacccggacatcgtgtacacggacaggttccgccgccggaaccccgagttacatctccctcggctgcgacacgctgccggt

SEQ ID NO: 1032 - DNA, 272 bp, Zea mays
  misc_feature: Incyte ID No: 700343674H1
  unsure 44, 51, 238: a, t, c, g, or other
tttcgaagctcctcctcgcgattccaatccacgcacgccatctnccgactnccgcgtccgcctacgcgcaggacatatattcagtgatggaacacaaggaggccggctgccagcagccggagggcccaatcctatgcatcaataactgtggtttctttggaagcgctgccaccatgaacatgtgctccaagtgccacaaggagatgataatgaagcaggagcaggcccattggctgcntcctccatcgatagcatgtgcatggcggtgataa

SEQ ID NO: 1033 - DNA, 110 bp, Zea mays
  misc_feature: Incyte ID No: 700343676H1
  unsure 2, 6, 12, 16, 28, 34, 36, 50, 55, 61, 89, 99: a, t, c, g, or other
gnaatntcgtcnccanacaagcaaccancgcctncncgtatgctacgtcngagangaagcncaatgcccgaaaccgcgggctcctattnccaatggcgncccaaggccga

SEQ ID NO: 1034 - DNA, 263 bp, Zea mays
  misc_feature: Incyte ID No: 700343677H1
ttgcgcaatttaagcacatacttggagtgaaaccagcaccacagaatgcactaagcaatgttcctgtcaaaacttattcaagatcactggaacttccaaaagagtttgacgctagatctgcatggtcccgttgcagcacaattgggaacatacttgatcaaggtcactgtggctctgttgggctttggtgcgtggagtgcctccaggaccgtttttgcatcacctcaacagagcatttacttcatgcaatgacctactggcag

SEQ ID NO: 1035 - DNA, 262 bp, Zea mays
  misc_feature: Incyte ID No: 700343678H1
  unsure 235: a, t, c, g, or other
tagatcagaagagcctcggagggatgatcgtcgtgccgatagggatcgtgaaaaatctcgtgaaagggtacgggaaagagaccgtgaggagaggacccgtgaacgttcgcatgaccggactcgtgatagagatctacgagatgagaagcattcaccatagagaccgtgagaggactcgggatagggagagaggaaaggacctgaaagagaccacgcctgaccggagctgatcttntgacaggacaaggatctggtcgggata

SEQ ID NO: 1036 - DNA, 273 bp, Zea mays
  misc_feature: Incyte ID No: 700343679H1
gaacacagggcacacgcactacacgcacggcacgcagatacatatagagagaggttagctatagcttgcacatctatttaactaactaactaactggctagctagctcgatccgcagagcaaagcgaaagcagcaagaagcaaagcaatggagaaccctgcgagtgtgctagttctaccagcgcagttcaccaaacttcaccttcggaaacctgtacatccgccgggccgggccgggcagcagggagataaccgaggagggcaggtgcgacct

SEQ ID NO: 1037 - DNA, 281 bp, Zea mays
  misc_feature: Incyte ID No: 700343681H1
  unsure 2, 240, 263: a, t, c, g, or other
gnccaaggccgagaagcgcctcccggcggccaagtcgtccggcaaagaaggcggcgacaagaagggtaagaagaaggcgaagaagtcggtggagactacaagatctacatcttcaaggtgctgaagcaggtccaccccgacatcggcatctcttccaaggccatgtccatcatgaactccttcatcaacgacattcttccgagaagcttcgccggcgaggctggccaagcttgcgcgctnacaacaagaagcccaccatcacntcttcgggagattcaaac

SEQ ID NO: 1038 - DNA, 234 bp, Zea mays
  misc_feature: Incyte ID No: 700343682H1
  unsure 220, 232: a, t, c, g, or other
gaaaggattcaccgctacctgaggcgaatgatataatcacaaagtcaccaagcttgttctcaaatgaaaccgagtgagatgtgcggctacatgagctaattttggtgctattttccatcattgatcgtctagttttgagtctgtaaatgcgtaaaataacatttgacacaagtctttttgctgacaaaaacagttttccgtaagaactgagtggggttantagttatacgcntc

SEQ ID NO: 1039 - DNA, 269 bp, Zea mays
  misc_feature: Incyte ID No: 700343683H1
  unsure 78, 263: a, t, c, g, or other
tggcagtaactgggtatatatacgtaccctctttctcctataatatagtgtagtttaaagttctctatatatagattnagagcgaacaaaaaaatgcatatgctctcactttacttcctaataggatgctaacgtcaacataattaatgttgatttgttgataaatggtactctctctgtttcaaaatagtatttattttagctcttagtttttatgtctatgtttaatggatgatgataaatcaagactcatatataaaacntataca

SEQ ID NO: 1040 - DNA, 269 bp, Zea mays
  misc_feature: Incyte ID No: 700343684H1
  unsure 16: a, t, c, g, or other
cgcgcggcgcacaggnacgacaagtgcctccccgtccagtacctcgaggcgatccggggcctgcaggccgcggggttcgctcccgcccgcaccatccacatctcgcttgtccccgacgaggagatcggtggcgcggatgggttcgacaagttcgcccgatcggaggagttccgcgcccttcaacatcgggtttatgcttcgacgaggggcaggcgtcgccgacggacgtgttcagagttttctacgcggacaggctggtgtggaggctc

SEQ ID NO: 1041 - DNA, 269 bp, Zea mays
  misc_feature: Incyte ID No: 700343686H1
gccttatcgacaaaatgcttgagaagattggaacacctgaggcacttgccttgagagggaaggctgccgtcgcacaggccaaactagcaaatcggctctaccagaagaaattctctggcccgaggtgggaggcgttggccaagaaaggtgccaagaaacagaggttgttgtgggcatccaccggtgttcaagaacccagcttatcccgacactcttacatcgacagtgctcattggacctgacacggtcaacacgatgcccgaccaagc

SEQ ID NO: 1042 - DNA, 268 bp, Zea mays
  misc_feature: Incyte ID No: 700343687H1
tgcgtacctgattcttgtatgcaccatcttcatcgacaaagatggaaaagagaagactgggtttagtggtagaatggggaaccgaattgctgctccaaggctgctgaagctcaacccactggactctcatctagctggagcaaacaacaggttcagggagggcagattctcttgggtgacggagaacgggaagcaggagcggcatctagtggcgacggtggggaagtacagcgtggtgtggaactttcctggcaggtgaagaacagcc

SEQ ID NO: 1043 - DNA, 259 bp, Zea mays
  misc_feature: Incyte ID No: 700343689H1
  unsure 2, 225: a, t, c, g, or other
gnaagggtctcgaagatggtgaatttgttagggtgaggacggtccatttaaatggaaagcctcgggtacttactctgaaacaggaccttcactactggccgacctgggagctcagctttgaaccagaaactgctacatggcggaggaaaataataaaagcattgcaatcagccagggcgtgatattttcatgttttgctgcgacctttcatgcttcagaggagcntagaggtatggaagttagaggttctgccttgttt

SEQ ID NO: 1044 - DNA, 266 bp, Zea mays
  misc_feature: Incyte ID No: 700343693H1
  unsure 44, 205, 215, 221: a, t, c, g, or other
gtcgagccgagtatggaaggctttcaaacactctcccgcttctntggggcttctgatatgtgtttcattgctcctctggtttgttggtggactcactggatttcatatgtacctcattagcaccaaccagaccacgtacgagaatttccgatacagatcagacagcaggcctaacatctatagccaaggatgtctgaataacttnctacaagtgnttctgncagcaagacaaagccttctaaacacaagttccgggcctacgcgca

SEQ ID NO: 1045 - DNA, 258 bp, Zea mays
  misc_feature: Incyte ID No: 700343695H1
ctctctcgtctctccagcgacggcagcgggcgagggttacgcgaaggcgaacggagtagtggaagcagaggcggcagccatggccgtgatggagaagctcaagatctttgtcgttaaggagcccgtagtcgcggcctcctgcctcatcgctggattcggtctctttcttccagcagttgtccggccaatcctggattcatggcagaccgcggaacaagttctccactcttctaaatgatgtggttgcagtgtcacggc

SEQ ID NO: 1046 - DNA, 266 bp, Zea mays
  misc_feature: Incyte ID No: 700343696H1
  unsure 57: a, t, c, g, or other
gtagaattcacagtttaacaagtagaattcacagtttaattttgtctcaatacatanaatagtgttatattatatctgataataaagataatgttgattttgcggaaataacgaatgcccagcgtgtcgcacccattgtgcaagcagacgttctttgagggatgatcccaattatgatgcactgattgcagccctatatccagatattgataagtatgaggaagaggaatttgctttcagtgagtaggagaggattcagaataaaa

SEQ ID NO: 1047 - DNA, 299 bp, Zea mays
  misc_feature: Incyte ID No: 700343701H1
  unsure 256-257, 269: a, t, c, g, or other
tcccatcccactaccacccatctcgtcgtccgccgattcgatccggttcttccaacccaggggcagtgatggcgacgaagaggagcgtgggcaccctcggcgaggcggatctgaaggggaagaaggtgttcgtgcgcgccgacctcaacgtcccgctcgacgatgcccagaagatcaccgacgacacccgcatccgcgcctccgtccccaccatcaattcctcctcgagaagggcgccaaggtcatcctcgccagnnactgggtcgtcnaaaggtgtcaccccaaagtacagttgaagc

SEQ ID NO: 1048 - DNA, 294 bp, Zea mays
  misc_feature: Incyte ID No: 700343702H1
ttcattgtgctagaagttcctgatgatgttctaatcgacagatgtgttggaagacggctggatcctgtgactggcaagatttaccatttaaaaaactaccccccggagaatgaggagatttctgcccgacttattacacgttctgatgacacatttgagaaggttaaatcacgtctgatacgtacaagcaaaattctgaagctattcttcctacatactctgatttgctaataagattgatggaaactgcccagccgaagttgtttttcaggcgatagatttccgttaagaaga

SEQ ID NO: 1049 - DNA, 296 bp, Zea mays
  misc_feature: Incyte ID No: 700343703H1
  unsure 246, 281: a, t, c, g, or other
cgcatcgttagggcacgtcctgggagagggaggccttcgctacctccgtggcagcgacagatgaccatgaaggcgctggtggtgacggtgcttctcctcctctcttccaccctcgccgcggcacagtggtgcgtgtgcaggcaggacgctcacaggccgcgctgcagaagacgatcgactacgctgcgggttcgggggcggactgcaattccatccagagacgggggcgtgctacaaccccaacancgtcgcggcgcaatgctctgggcggccaacaagtnattaccagaacaaca

SEQ ID NO: 1050 - DNA, 291 bp, Zea mays
  misc_feature: Incyte ID No: 700343704H1
  unsure 27, 281: a, t, c, g, or other
taaacagaagcataatacacgattgtnttcagggagaacttgaagttgttaaggaggttcataggaagcatataatggaaaaaagagaggatggcggtgagctgaatggtgaggcaggttcagtggtgggaactgcagatggaattgttactgaaacatccaaggtcccatccgatgctcggtcttgacctgccacctccacctctttcaaagacgccaggagaaaaatatcttccacaggtaccatgtttaacatactgaagaagttcgatggtgagacnttacagaggt

SEQ ID NO: 1051 - DNA, 91 bp, Zea mays
  misc_feature: Incyte ID No: 700343705H1
  unsure 13, 62: a, t, c, g, or other
tacggcctcgttncctacactacgcagtcaaaagggccgaagtgtagggtgggaaggtttgnagggggtacggtgcaaattggaggttaaa

SEQ ID NO: 1052 - DNA, 300 bp, Zea mays
  misc_feature: Incyte ID No: 700343707H1
  unsure 2, 277, 297, 299: a, t, c, g, or other
gngcatccgcagagagtttgttccgtccaggcaaccaaaaagcgttgccccgccgcgcagaggaagaagagagcagaggaggatggctcgtacgaagcagaccgcccgcaagttccacgggaggcaaggccccccgcaagctgcttcgccaccaaggcggcgaggaatcggcgccgacgaccggcggcgtgaagaagccccacaggtacaggcccggaacctggcgctgcgcgagatccgcaattaccagaagagcacggagctgctgatccgccanctgcccttccagcgctgggngng

SEQ ID NO: 1053 - DNA, 296 bp, Zea mays
  misc_feature: Incyte ID No: 700343709H1
  unsure 15, 275: a, t, c, g, or other
gtctatccgatctgncacctcgccgtctcgcacgttcctttccccaactccccagcgcctctccgcgccgctgttccagatccaggttgttcagcatgggtctggtgaaggaaggcgtcgacatggaggagggaaccctagagatcggcatggagtacaggactgtatctggtgtggccgggcctctggttatcttggataaagtaaagggcccaaagtaccaagaaattgtaaacatccgacttggagatggcaccatcgccgtggtcaagtcntgaagttgatggagaaaaagc

SEQ ID NO: 1054 - DNA, 285 bp, Zea mays
  misc_feature: Incyte ID No: 700343711H1
  unsure 273, 276: a, t, c, g, or other
gcagaaacctctggaaaaagatgctggagaaaagaccatagcctggttggacaagctgaggaatgcgaatgggtcattgccaacttccaagatccgtctcaacatgcagcgtgttatgcaaaataatgctgctgtattccgtacacaagaaacacttgaagaaggttgtgagctgattagcaaaacatgggaaagtttccagatgtgaagctcatgaccagagtctcattggaatcgaccgatagagaccctgagctggaaatctttgataangcngcataacca

SEQ ID NO: 1055 - DNA, 294 bp, Zea mays
  misc_feature: Incyte ID No: 700343712H1
  unsure 42, 60: a, t, c, g, or other
ctaggaacttccaactcccaagcccagccgcctgcctagggntaaggtcgcccctccgcnccctcgctccgctcgtgaccggcagggttcgtcgccgccgttggatatgtcgcggacgctggtgcagccggtggggcagaagcgcctcaccaacgtggctgtggtgcggctgcgcaagcacggccagcgcttcgagatcgcctgcttcccaaacaaggtgctctcgtggcgctcccgcgtcgagaaggactcgacgaggtgctccatcccacaccgtctactccaagtctccaa

SEQ ID NO: 1056 - DNA, 295 bp, Zea mays
  misc_feature: Incyte ID No: 700343713H1
cattttctctcctctctccgtcgccgcctcgggccaaaccctacgcagggagttgattgatcgattgcagccatgagtaagttgcattccgagcttctcaaggattgcatctcccagatagttcaggatgccaagaagaataggaagttcactgagactgttgagcttcagattagtctgaagaattatgatccacaaaaggacaagcgtttcagtggctctgttaagttgcctcacatccctcgtccaaagatgaaggtgtgcagcttggtgatgcccagcagttgaggaggtg

SEQ ID NO: 1057 - DNA, 296 bp, Zea mays
  misc_feature: Incyte ID No: 700343714H1
  unsure 40: a, t, c, g, or other
cttctatctcaattcatttgcggacaagggtggcgcgcantatttcgtgcctgcgggaaggtggttgacggggagttttcatcttatcagccatctcactttatcactggacaaggatgcaataataattggatctccggattcatctcattggccagttatcgatcctcttccatcctatggtcgaggtagagaccttcctggaaaaagacatcagagtctgatttttggataaatctgacagatgtaattataactggtgctaatggttcaattgatggtcaaggagctattgg

SEQ ID NO: 1058 - DNA, 298 bp, Zea mays
  misc_feature: Incyte ID No: 700343715H1
  unsure 2, 9, 29, 196: a, t, c, g, or other
gngcatgantccgcgtatggctttgtgancagaataagatcgaggttattggctcttatttaaccaaatccatcgtccaactaacatgtaaactctctcctccctctatataaaaggggaacaaactgaatactatgggcatacattcagaggcacatgagtctcccaacacagatacacaatcctaacaaactanagaggtcgctacgccacctctttggaggattctccagaaacatagggattcatctcacatagggtccaataacctataactcttgctagagcaagtgcaaag

SEQ ID NO: 1059 - DNA, 287 bp, Zea mays
  misc_feature: Incyte ID No: 700343718H1
  unsure 202, 234: a, t, c, g, or other
caactctttcttcgggtgggaattaagcctcctaagggtgttctactctacggtcctccaggaactgggaagaccctattggcaagggctatcgcaagtaacatcgatgccaactttttgaagattgtttcaagtgctattatcgacaaatacattggagaaagtgctcgtttgattagagaaatgtttggctatgcacgtnaccaccaaccaggcatcatcttcaggatgaantgcagctatggtggtcgaagattagtgagggaatagtgctgatcgtgagattc

SEQ ID NO: 1060 - DNA, 286 bp, Zea mays
  misc_feature: Incyte ID No: 700343719H1
  unsure 17, 43, 155: a, t, c, g, or other
actctaccatatgtgcngtcatcatctgatgacatgttaatanaactgtgggactgggataaagggtggatgtgcactcaaatttttgagggacattcacactatgtgatgcaggttactttcaacccaaaggatattaacacttttgcaagtgnatctcttgatcgcactacaaagatatggagtttaggttctccagatccaaacttcacacttgatggacatcaaaagggtgtcaatgtgttgactacttcatggtggtgacaggccctattgatactggttc

SEQ ID NO: 1061 - DNA, 263 bp, Zea mays
  misc_feature: Incyte ID No: 700343721H1
atacatatagagagaggttagctatagcttgcacatctatttaactaactaactaactggctagctagctcgatccgcagagcaaagcgaaagcagcaagaagcaaagcaatggagaaccctgcgagtgtgctagttctaccagcgcattcaccaaactcaccttcggaaacctgtactccgccgggccgggccgggcagcagggagataaccgaggagggcagtgcgactggacaagagatacgtgatgattccccgtctac

SEQ ID NO: 1062 - DNA, 291 bp, Zea mays
  misc_feature: Incyte ID No: 700343722H1
  unsure 2, 276: a, t, c, g, or other
gncttccctcccaaacttgcacgctgcccccgcgctcgcctccgcccccgatccagatccagggtggaatagggaacggccatacaccatggcggatttctccaaggaatcttgcccttctgtgaagaacattttacttctggattctgaaggaaagcgtgttgctgtaaagtatttctcagatgattggccgactaatgcatcaaagttagcctacgaaaagtctgtttttactaaaactctaaagacaaatgcaggacagaagctgagataacntgtttgatggttata

SEQ ID NO: 1063 - DNA, 283 bp, Zea mays
  misc_feature: Incyte ID No: 700343723H1
tccaaaacgtgcagcggagaacatagattcacaatattggcgttatgatgtcaagcggcaaaggcatggggaagctggtgggggtggattgtgtttcaaatttgtatcctcaggatcctgtcaaagagggagtagatgcagttataggcatgatgaagaggcatggagcattaccagagaaatgtctgttttgattttctaaacaaaggaaatgtgagaggggcccagaatgcaatttgttcacatcttctggggagacgctctaaggtgcaagacctcctag

SEQ ID NO: 1064 - DNA, 282 bp, Zea mays
  misc_feature: Incyte ID No: 700343726H1
aagatatgctgcaatgttcccagacaaagttttctctttcaaggtgagggaaaggctttcagacttcattttggctgcattccagcggtctcccaacatcattgcagtactgaagaaacctattactgacagacttggtgaggctcatgataatcttgccaagacagagttagcatgcacttgtgctgggccatggtgagcaggagctggaggggtgggtcacaaggatgtagctcgtgaactattgaaaattggagttatatgtatgaaaaccggcaacta

SEQ ID NO: 1065 - DNA, 288 bp, Zea mays
  misc_feature: Incyte ID No: 700343728H1
gggaatgaattctcatattacatgctgatctgttcaaatttcatcctgaaccacactcaagaagctaatgagtggtccatatatccttggatacatagcaactgcaattctctttctgacaacgatcaacttcgtcctgtttcatttcctgacattcatccctcaagtgcaggtatcacagagggattttcaatgtgcgctggggactttgtagaggtctacagcgaggaaagccaagaatctgcagggatgctgttgtaattgcttttcctggatacggcacacata

SEQ ID NO: 1066 - DNA, 285 bp, Zea mays
  misc_feature: Incyte ID No: 700343729H1
  unsure 218, 252, 278: a, t, c, g, or other
gaaagaaaatgatgagagctgctgcaagaatacagagtcatttccgaacatggcagattaggaggaacttcatgaacatgcgaagacaagctattcaaaatacaagctggcatacagaggtcaccaagtgagaaggcataccgcaagtattatggtccgttggagtagtggaaaaagctatcttgcggtggaggaagaagagaaaaggccgcgtggcntgcaactggatgccatagcatggccacagacgcngaagcagcaagcatgcagaggaggantatacca

SEQ ID NO: 1067 - DNA, 165 bp, Zea mays
  misc_feature: Incyte ID No: 700343730H1
agatctgatggatgcctgaccttcttcgaacctcagttgtggttcttgtaatttgcaccgcatttcttctgagtatgttttttatgagaagactgggaagatgacagacagatactgtatcacgtgatgctcgtaaattaacactacctgtgaattctgttgctc

SEQ ID NO: 1068 - DNA, 273 bp, Zea mays
  misc_feature: Incyte ID No: 700343731H1
  unsure 23, 38-39, 256: a, t, c, g, or other
aaagtccgcatatggagcattantaaaccgtgaaattnntgattggaaagatttgcatgaaatggtcactgctgcttgctataccccagatggacagagtgcactaattggttcccataaaggcagctgccatatttatgatacatctgataataagcttctccaaaagaaacaaattgacctgcaaaataagaaaaagaagtccagtcagaagaaattaactggatttcagtttctcccaggagtacttcagggncttattacatctgcaga

SEQ ID NO: 1069 - DNA, 209 bp, Zea mays
  misc_feature: Incyte ID No: 700343732H1
gcgagttcgagttcaagtgaccaattttatccctcttgcaagcaaaccaaactcactttcatgtatttgttgacgatgatcgattttgggtgtctgtactctagtatattttcatcacgtttactactataatactgtctgtacttgagaatgttttgcctctgtaaactgacatgtagaatttctgtaatatatttatggaatttgat

SEQ ID NO: 1070 - DNA, 284 bp, Zea mays
  misc_feature: Incyte ID No: 700343733H1
  unsure 27, 33, 96, 107, 122, 126, 148, 183, 193, 198, 203, 207, 210, 217: a, t, c, g, or other
gtgcgttcttcagtgttagttctccancctctncttggcggaaaaccctaaccccctttctcggcgacgatccgacccctaccccatctaccggcngaccccacggngctctccgccatgcnggangtgcaaccttctcgtcagcganttcgtcctcaagctcaagcgccggaaggtggaggngtcgcacgcngtggnccggnaganggnggagtgntacggtcggttgtgtcgcagcatcggatgggtagcagcgccaaccaggcggccacattgccgatgca

SEQ ID NO: 1071 - DNA, 281 bp, Zea mays
  misc_feature: Incyte ID No: 700343734H1
  unsure 2: a, t, c, g, or other
cnaaactccagatggatctgccataagcctgcaatcggtcatcaagtacgatttctgaggctgcaaagttccattgggatttttcgtggcctcgtacgcgcgcgcgcatgaacggcgaagttaggagctgctggagtgtgtgcaagtacaagataggaagagaagtctaccatggtccatgaacgaattcatatggccatgtgcagcacgatctgtctgtgctggagaattacacgtgtggtgccagctaccaaaagaaagaaccgaggtccgagagcata

SEQ ID NO: 1072 - DNA, 276 bp, Zea mays
  misc_feature: Incyte ID No: 700343735H1
  unsure 2: a, t, c, g, or other
gngtaattgaaattcctggtgatacttctgttattgatgctgtaaggactctctctgaacagaacataagggcagcaccagtactgaatccagaacctggggctcctactgattggcaggggaggtaccttggtgtcatcgattactcggcaatcatcctttgggtactagaaaatgctgagcttgctgctgttgcactctcggctgcatcggcaactgctgctggagttggcagggtgctgttggtgcgttggggtggcagcttgggaacaatgg

SEQ ID NO: 1073 - DNA, 275 bp, Zea mays
  misc_feature: Incyte ID No: 700343736H1
  unsure 170-171: a, t, c, g, or other
ggctcctgtattgggaaaggacgccactcttgaacaactgcttcccatttttctttctttgctgaaggatgagttccctgatgttcgactcaacattataagcaaacttgatcaagttaaccaggttattggaattgacttgctgtcgcaatcacttctgccagccatgnngagctctctgaagataggcactggagagttcggctgccataattgagtacataccttgttggccagccattaggtgttggtttttttgatgacagttaggggca

SEQ ID NO: 1074 - DNA, 277 bp, Zea mays
  misc_feature: Incyte ID No: 700343739H1
gttgccaaagaattccctcccctagccgccgccgccgctcgtctccctgagaggtgccgggaccgaggaactggccgagttctaggtagagaatcggttttgcttgtactcagcacggggtctgctgcgtctggtggtggtgaaggggagaaattcgtgagatctgttccggatcaggcgtgcgagctcgggaatcaggggtttcacacatagctcgtcgattgaattgatgtactaatggagtctaagggtggcaaaaatctagcatagtcgttcc

SEQ ID NO: 1075 - DNA, 280 bp, Zea mays
  misc_feature: Incyte ID No: 700343740H1
gctagggacctaaagaacaaggatcttgtgggaaagtcggacccttttgcattgatatacatacgtccattgcatgataaaacaaagaaaagcaaaacaattaacaatgatttgaatcccatctggaatgagcactatgaatttgtggttgaggacatatctacgcagcacttgactgtaaaaatttatgatgatgaaggactccaatcatcagagatcattgggtgtgctcgagtagacttagctgatatacagccaggaaaagtgaaggatttatggt

SEQ ID NO: 1076 - DNA, 279 bp, Zea mays
  misc_feature: Incyte ID No: 700343742H1
  unsure 276: a, t, c, g, or other
gtgacacatcacctcaaataagccatagctctagcgtgtggaagtaaagctggctttgcgtgtatgacatgtactaatgccaacccaatcgtcagctttggaatgaagcgtgccattgatgatatactgaaatgagttgatcagtgcaattctttgacatctaactatttatttttatatgagatgggaggaactgatggagaataaatgctgctgtagattgtagaagttcaaaaaaattgggtacccctgacagtttgtagccaagggggtacntca

SEQ ID NO: 1077 - DNA, 282 bp, Zea mays
  misc_feature: Incyte ID No: 700343745H1
aacacgccccgctcagtttgttaaccaagatgatcagcagaggtgtacttgtggtctcaggttcacttggcaaaactacccaagaacctgttggaaaaggcatcctttgcaaagaacacggaccatgtactgcaccagctacctcaagtaatttcatccttggatgcttatatggacaggagtttgcaaagtgcatctcaaattaagactgtcacacagctcttgtcaaacatggagaagacacagctgaagtccatgttgccttcctctcaaatgaaggaa

SEQ ID NO: 1078 - DNA, 278 bp, Zea mays
  misc_feature: Incyte ID No: 700343746H1
  unsure 65: a, t, c, g, or other
ctagactctttttccccttcattggacatactaacaccccttaaaccaatggctgttggcaagtncatattcctcaactgttgcactagagggcaagatatttgttcttggtggtggtgacggtgcttgctggtttgatacagttgactgttatgaccgaagccgtgatgattggtccacatgcccatcgttgacttgtgacaaggggagcctgctggggttaatgtcaacgggagaatctatgcattggtggtggagatggaaccaatgtttctctg

SEQ ID NO: 1079 - DNA, 288 bp, Zea mays
  misc_feature: Incyte ID No: 700343748H1
cgcagttccatagttcttccagctgctctacacatacacatacacgctagctctagctctcacatcgattgagatcatcagagaggtggaagaagaagaagctaagataccagatcgaggaagagaggcggtgcggtggttggtagatgatggagagggtcgaggacttagggctcagcctcagcctcagctcgtccctcgcgtctcctcgcactcaccatgtcgccaccatgctgctacgcgctccagagaagaggttcctggagatgccatgctgctgcccgcgaa

SEQ ID NO: 1080 - DNA, 185 bp, Zea mays
  misc_feature: Incyte ID No: 700343750H1
atcgtacaactaacctgttacctagggggaaacactgcatgagtgttgttggtatccttgtctgatatgaggcggacgggcgattcttgcaggaggagagagtgattctcctagaggtggaggatgaagtggtgatagacttcaagccaactccaagtgtcgtgtcgacctctgcctccgctccc

SEQ ID NO: 1081 - DNA, 186 bp, Zea mays
  misc_feature: Incyte ID No: 700343751H1
  unsure 13, 47, 55, 162, 175: a, t, c, g, or other
gtcgctggttgcntacgatgcctcctccgatgaggaagacgccggcnagcctgcngccgccgcggcgccacaccctgcccccatcggtccgcagccaaggcctccgtctcctacggcagtgagccctgctcctcggcctacgcctacgcttacgccgccgcngccagcagccagncagagtgtagc

SEQ ID NO: 1082 - DNA, 293 bp, Zea mays
  misc_feature: Incyte ID No: 700343752H1
atttcgaagctcctcctcgcgattccaatccacgcacgccatctccgactccgcgtccgcctcgcgcaggacatatattcagtgatggaacacaaggaggccggctgccagcagccggagggcccaatcctatgcatcaataactgtggtttctttggaagcgctgccaccatgaacatgtgctccaagtgccacaaggagatgataatgaagcaggagcaggcccagttggctgcctctccatcgatagcatgtcaatggcggtgataatgggaaaggactgcaatgctgca

SEQ ID NO: 1083 - DNA, 295 bp, Zea mays
  misc_feature: Incyte ID No: 700343755H1
  unsure 259, 281: a, t, c, g, or other
gagctccttcccatctcgatcgaaatggcgaagagaaacctcacgggaatatggaatttcactaaccccggcgtggtgagccacaacgagatactagagatgtacagagactacatcgatccaggcttctcctggaaaaacttcaacctggaggagcaggcaaaggtcatagtcgcaccgaggagcaacaatgagcttgaccagaccaaactgaagagagagttcccggagcttttgtcgatccaaggagtcgctggtnaaaatatgttttcgaaccaaangtaaggcgtccagg

SEQ ID NO: 1084 - DNA, 295 bp, Zea mays
  misc_feature: Incyte ID No: 700343756H1
gcgccaactccagtgctccagcgaccctcaccacgccagcgacgccaacgccgacgacaccacgtatggtaccgtcaccgtccgtgagcagccagacgccgccgccatacagccgggggtccaagatgatagctgacggtttctctgtcactcttggtttcgtggcattggtgtcagtcctagctttctgaagtattgggcggcattcgtcaggcagttagaattatggcttagagaaacttagttgcttttccgatgggcgcttgtttcctagagagacaacccgcccaggaaa

SEQ ID NO: 1085 - DNA, 289 bp, Zea mays
  misc_feature: Incyte ID No: 700343757H1
  unsure 4, 6, 21, 44, 58, 78, 85, 96, 170, 193, 256, 284: a, t, c, g, or other
ggcngnccccggctgcttctnctggtcgccgcccagctccagtnattagagaaataanggccagcctggttgcccgangctgacncagcacctgcnatggaggagaaggctgtcacaaatggagcggcactgctgatgttgctgctcctgataataaggataacaccaangaagaggttagcaagagcaaggngccagtagcgaataaggatgctgaagagccagaacaaaggctcggaaatggtgctgagggccntcagtggagatgtcatatggcagaggtnagatc

SEQ ID NO: 1086 - DNA, 300 bp, Zea mays
  misc_feature: Incyte ID No: 700343758H1
  unsure 4, 171, 191, 201, 278: a, t, c, g, or other
aggngccacatgttgccaaatctcagagcaagcaaaacttcattgaaggggagaaacatgtccatatttaactcagaagggagcctggataagtttaacaagcccgggaaactctacacacaactggtgtcagctcagctcaagatccaagacatcaaatgcacaaagatncagcgcttcttttagaaatncagcagaatncaagcagattctggagcaagagaaaaacataattcctggttttcccgctgcactacagcagatggatatgaagtccntggaggaggaatacaaagctcg

SEQ ID NO: 1087 - DNA, 294 bp, Zea mays
  misc_feature: Incyte ID No: 700343759H1
  unsure 202, 249: a, t, c, g, or other
ggtaaattcgtcaggcttgtatcaagttagtagttcatggtgcctggatgagcagtagagatgctactggccgtggaaggaggagggttcttttcgtcttcagcttcggggtacagccatggccttgctctcttgctactcggacggaaagctgaggagaagcccgttcaaggcttcgccgtggaaccagtaccggctagtncgaccgggaggccgagcaggtgtaccacctgccctccgccaaggatncaggcgcctgggaatgtgctccctttgtttgtttcggatgcacgc

SEQ ID NO: 1088 - DNA, 280 bp, Zea mays
  misc_feature: Incyte ID No: 700343760H1
tgtggacatgactgtgatgcaactatttggattcctaattgattctatggttggtactttccatacacagaattttactgaaaatttatcaagaaagcaaccaaccttttatgaacctagtggcaaagttttctcagaggaagagatgttatcagaacatagatatgcatcttggggacggattggatgacccaataccaagtgctactagatatagctgctagggctctggaaatccattccccaaccttggaaacctaaatgtactacctagccagga

SEQ ID NO: 1089 - DNA, 294 bp, Zea mays
  misc_feature: Incyte ID No: 700343761H1
gtgatctcaacccaagtcgtgcctccgctccggtcacccgtcgctccacgcaaccatgtcgaggaggaagaccagggagcccaaggaggagaacgtcacccttggacccactgtccgtgaaggagagtatgtctttggtgttgctcacatctttgcatccttcaatgacaccttcattcatatcactgatttgtctgggagggaaactctggttcggatcaccggtggcatgaaggtgaaggctgaccgtgacgagtcgtcaccttacgctgctatgcttgctgctcaagatgt

SEQ ID NO: 1090 - DNA, 295 bp, Zea mays
  misc_feature: Incyte ID No: 700343762H1
  unsure 244: a, t, c, g, or other
ctctagccatgaccgctgggatccacacgctcaagcggctgacagagcccggcacctacgagtacttggacaagattcaccggcgaactcgtccgtgggatactggacgtcggtgcgaaagcagggcatgagatgtgcggaggacatatcagaggaatgtttggcttcttcttcaccggcgggcccgtccacaacttcggggacgccaagaagagcgacaccgagaagttcgggaggttctacngtgggcatgctggaagagggcgtgtatttcgctcctcgcattcgaggcggg

SEQ ID NO: 1091 - DNA, 297 bp, Zea mays
  misc_feature: Incyte ID No: 700343763H1
ggctttcgtgtcataccacttgatgtgaaaacagatggtgtatcctctggtaggacgctagatttggcatctagtcttgatgtgggctctgctgcaccccaagcctcaggggatgcatctccagatgactgcaatttgagatctgtgctgacaatcgcctttcaattcccgtatgagatgcaccttcaggacagcgttgcagcaatggcccgtccaatatgttcgtagtgtccattctgctgtgcaaagagtgtcgatgggctatatctccctcccaatctggtctaaatgctgggc

SEQ ID NO: 1092 - DNA, 296 bp, Zea mays
  misc_feature: Incyte ID No: 700343765H1
  unsure 73, 282: a, t, c, g, or other
cgcacccgccgcaacgccgagaagacgcgagaggaagggaggaggtgagccaccggaagcggagacgtgagtngtcgaccaaccccgtcgatccggctgcggcgcggcgtgctagatcgctaccgaccatggtggtggaggagatcgccgagggggtgaagaacctcaccgttaccggagatgcggcggcttcaggcggagaggggcagaggaggggcggcggcggcagcagcaaccgcatcccaggtgtccaacaccaagaagccctcttcttctaacgtnaacctcgccagagg

SEQ ID NO: 1093 - DNA, 180 bp, Zea mays
  misc_feature: Incyte ID No: 700343766H1
gtggctcgaatggtgctctgaagttttaaatgaggaacaggaaactttgaagcgcctggaccaggctgcagaatacaagtgtaaacctcccaaaggaaaaggttcttcaagaatccgcaagtatctcctgataattggggacaaaattggtgaagttgtccggcaacacagtgaatgcta

SEQ ID NO: 1094 - DNA, 282 bp, Zea mays
  misc_feature: Incyte ID No: 700343768H1
  unsure 51, 242, 262: a, t, c, g, or other
aaccgcagaaaacctagcagctcggcgctccctacttctgactccttcganggtactcccatcgctatcgaccgggtcctcgagcgcgggagatggcggatcaggagaccccagttgcagttgaggcccctaccccggtccttggggagccgatggacttgatgactgctctgcagcttgtcatgaagaagtcgggtgctcatgatggccttgttaaggtcttcgtgaggctgccaaagcantgagaagcagctgctcagcnttgcgtgcttgcggaggatg

SEQ ID NO: 1095 - DNA, 114 bp, Zea mays
  misc_feature: Incyte ID No: 700343769H1
  unsure 2, 97, 108: a, t, c, g, or other
gncatcgtccacactggtgagctctgcagtctgcactactgcttcagctaccgagcttgcagtgccttccgttgttagctgttagctgccaccagtncccaccagttnccacca

SEQ ID NO: 1096 - DNA, 274 bp, Zea mays
  misc_feature: Incyte ID No: 700343770H1
agttgcaatcacaaaaaacccttgtctccatcctggtgatgtcagagtacttgaagctgtatatgaccctggattggatgctaggggtcttattgattgtgttgtatttcctcagagaggggaaaggcctcatccgaatgaatgctccgggggcgatttggatggcgacctcttctttattacttgggatgacaaactgattccggagaaggttgatgcacctatggactacactgcaacgaggccacgcataatggaccagctgttacacttg

SEQ ID NO: 1097 - DNA, 265 bp, Zea mays
  misc_feature: Incyte ID No: 700343772H1
cagtaaaaaatattataactgttattaattgcagcagaagactgaaaagagaaaatttgcgtgttcaaagcaggagatctagaactcggttatcctaggaagcaagtggtttcacttatgcaatatatatatctgcaagcatttcagaatctatgtatgatggtgacatctagctttctacacatattttgtacaaccccgcatacatcaaaacttgtaaaactaaatctgctatgccaatgctatcgtatttttttccctatac

SEQ ID NO: 1098 - DNA, 287 bp, Zea mays
  misc_feature: Incyte ID No: 700343775H1
  unsure 230, 238, 275: a, t, c, g, or other
gcaaacgtatctgtggacgacacctgcagtttgaacacagcaaactccaatggcagtccagtcgagcaatcctgagggaacgaaggttgctaagagaagagctagagctggggagagtacccgacctagaccaaaagaccgacaactgatacaagatcgcgttaaagaattacgagagattgtccctaatggtgcaaagtgcagcattgatgctttgttggagcgaacantaagcacngctgtttctacaaatgtaaacaattatgcagagaaantaagcaagctga

SEQ ID NO: 1099 - DNA, 288 bp, Zea mays
  misc_feature: Incyte ID No: 700343776H1
  unsure 11, 55, 252: a, t, c, g, or other
cctcaacaganagcaaaagagaaacgtcacttctcctcgtataaaagcatccgcntcaacccaccttcagcggactgctccaccagttgcagagtccagagtccagacgccagacgccctctacttctcttctctctagttatacatttcaaactcttggccgccgcagcggtctctgttcgccgcgccccgccgcagaaatggcgctgccgaattcagcagttgtggattaccccagcttcaagctcgtcntcgttggcgaggtggaatggcaaaaccactttgtga

SEQ ID NO: 1100 - DNA, 294 bp, Zea mays
  misc_feature: Incyte ID No: 700343779H1
  unsure 2: a, t, c, g, or other
gnaaagcataggatgctcctactgccgctgccggacaagaatccctgagctccatttattcctccttgcagcagcaaagcaagcatcgtcagcctgcctcgcgtctcgtcgaccatccaaatccactcccttctctagtccaaggagctcaggaggtcgaggaagaaggaatggcgccgtcgtaccggccctaccacgtcgccggcgaggatcagcagcgtaaggtgaaggcgggtgggaagtggttggccgcgtggagcgtgctgggtgttggcggcgacccggcggagatga

SEQ ID NO: 1101 - DNA, 99 bp, Zea mays
  misc_feature: Incyte ID No: 700343780H1
  unsure 6, 25, 48, 58, 83-84: a, t, c, g, or other
caggcncccgctagaatccaaagcnaaaaccccaatcgcacaggaganaccgagaganaggttttccatccatggctcccggnntcgttccgtgctggt

SEQ ID NO: 1102 - DNA, 285 bp, Zea mays
  misc_feature: Incyte ID No: 700343782H1
gaaatcaccagagaataatgctggaaaggtacttgatagcatcagaaacattctaaaggatattgaagatgaggcagattcggtgaatgtaaatgggactcatccttcagatgggaccttaagttcagagagcaaatttgccatggatcaagatctaagaatgccatattgaaaattctagactttgtgaagttactgatcaagaaatctccaagtttcaaggccagtgcacctgattatgatggactatgtgagaaaacacaacagttctctgcatagtcgata

SEQ ID NO: 1103 - DNA, 286 bp, Zea mays
  misc_feature: Incyte ID No: 700343783H1
  unsure 34, 90, 223: a, t, c, g, or other
agtattcaaaaaactaaggctgtgttcaaaattntcttcctctttagcattcagaaaagcagactgaagtgggaactaaaaatgccagtncagaaatctgctgctgcacagagaaacatagcgttcagctctaataattctgtagcaaagcctctagagaaaacaacgaaagctgctgttgaagagacgtcatcaggattcaccaaaaatagataagaaaaanagtccctatggactgtggatacctgttctaaaggaaaactaaggggttgcctaaaatgcactt

SEQ ID NO: 1104 - DNA, 282 bp, Zea mays
  misc_feature: Incyte ID No: 700343784H1
  unsure 2-3, 220: a, t, c, g, or other
gnnagaagaagttggagtccatgaacaaacatgagaggcagaaacggttatctgtctacaaatccagtagcttcaactgaggagaagaagttggagtccatgaacaaacatgagaggcagaaactgatattggagaggaagaagctaaatttagagaaactgaagatggaacgacaaaaggtgaaggaggacacagaacaggaagttctgatattgagcnggatttgactaatgtaaccccctacttcgacgtactacgaggctaaacaacggagttctcgc

SEQ ID NO: 1105 - DNA, 282 bp, Zea mays
  misc_feature: Incyte ID No: 700343786H1
tctccctgcaaccatggtcgagctcctttttcccctgccatggacatgcccctccctgcacctcccctccatggtggctgccagtatccacctcgccgagcttctccctggccaagggcaccctggagctcgtcgtgccccatgcccgggcttgctccttgtccgtacccatctctcaagctactgccgtagggccccctatgtttcccctagcagctgtagcttcggcggcggcgtcaagatttccttgttgcgccttgcaccgtcgatgttagttgggtg

SEQ ID NO: 1106 - DNA, 167 bp, Zea mays
  misc_feature: Incyte ID No: 700343787H1
  unsure 38: a, t, c, g, or other
cagtccatttcagaagctcgagttgaagtgtaccatangagaaaagttctggattcaccttttccatcctatgagctgcagtgacagggccagatgcatatagtgtgtactgaactcatactcgcctaatgctgctgtattgaaagaaacgagtggtggtttatggc

SEQ ID NO: 1107 - DNA, 280 bp, Zea mays
  misc_feature: Incyte ID No: 700343788H1
gttccgtatggtcgaagctgctgcagcctgtattcgacattcagcatccaggaggcctcggatgagccaggttgtgcgggtgcttgatagtctcgccgaggtcgatctgactaacggcgttcagccggcaagagcgagatgttcaatgtcgcgaacacggccgagatcaggatgtttcagcggatggcgttcggcagccaggatttcaggaccgatttcagccagtccagctggagcagccagagcagaggccttgacgcatctggttccaggccatgta

SEQ ID NO: 1108 - DNA, 283 bp, Zea mays
  misc_feature: Incyte ID No: 700343789H1
aggtgtcagtgctagaggatttggaaaggcgctgtttgataagaagacaaacccgtgtcctggcaagtggatacctgtagcccgaaacaggtcacccattcacattcgtcatgtgcaattctctcatgccgtgcagcccattaattccactgaagaaaacatagaatgtgcatcataatgtcacagaaggcctaaaatgttatagtgtgcggccattgcttcacgaggaggcagagtgccgtgttgccgagtgccactggaccacatacgattgttgatggta

SEQ ID NO: 1109 - DNA, 282 bp, Zea mays
  misc_feature: Incyte ID No: 700343790H1
  unsure 41, 96, 108, 138, 263: a, t, c, g, or other
gaaggacaaggaaaaaaacaggggacaagatcgagtgaganagaggagatatggcgtccataataacaggagatttcgcggaggcctacgtacggnagaacgcctgcnaagaggagacgaggaaggcagaagcaagcnccgccggcggggtggcggcggcggcgacaccaggagacaagaaggccgacgctagtgcatcattccgagaagaaagtggccaaagaggtgcagctggtagcaacaagggagaaggaggcatctcntcgggctgctgaagaagaa

SEQ ID NO: 1110 - DNA, 275 bp, Zea mays
  misc_feature: Incyte ID No: 700343791H1
  unsure 119: a, t, c, g, or other
ccgcgtggcacgccgctccctcccccagacgcgtctggggatagcaactcccatgactacaatgggattagctcctctgctcccggtttgtttccggatggttccaacggcgaggttangttttaccttgagcaagaaagcgggcagctgggcaatcatgaaggcgctgctcttgtagcagatagcaaattcgatgttgttgtgcaggagcagcctgaggccgtggttactctcccgaatgggaacaacggaattgggcatgagatgagtgcgga

SEQ ID NO: 1111 - DNA, 282 bp, Zea mays
  misc_feature: Incyte ID No: 700343792H1
  unsure 251, 262: a, t, c, g, or other
gttatgattgataacattgataaggttcttgaaagaggtgatcgtttggaactgctggttgacaagactgcaaatatgcaaggaaatacagttcgattcaagagacaagctcggcggttcagaaacactgtttggtggagaaatgtcaaactcacggccgcattgatacttctcctcctggtaataatatatgtgcgttctagtcttcgtgtgccaggtttcaccctaccaacttggcataaggtaaggcngatgtggcacntagtgcttttgctgtgcagt

SEQ ID NO: 1112 - DNA, 275 bp, Zea mays
  misc_feature: Incyte ID No: 700343793H1
  unsure 157, 161: a, t, c, g, or other
gaagatatggggtcagcagtatcagtagttgaggctgctgctcacaaaggactgctacaatgtattgatactgttatgtctgaggttgaaagattgttgtcttcggaacagaaggctacagattatcgaacaccagatgatggagctgcaccagatncatncggccaactaatgctgtataagaatgtagcctatgctctctcgtgttctgaggttgcatcatgccctgaaggcctcaacaaacagtccttttgactgagcgggaaatcgctgca

SEQ ID NO: 1113 - DNA, 288 bp, Zea mays
  misc_feature: Incyte ID No: 700343795H1
  unsure 2: a, t, c, g, or other
gnaaaggcattgttcaatggcttgccaaacccttttactgccgcgaggtaccacagcttggtcattgagcaagaaaccttcccacatgatgctttggaggctactgcatggactgaagatggacttatcatggctgctcgccacaagaagtacaaacacatccagggtgtccaattccacccggagagcatcatcacccctgaaggcaagaaaattcatcctcaactttgtcagattcattgaggaactggagaagcagcgttcgtaggggaggtagacgcgacaggt

SEQ ID NO: 1114 - DNA, 235 bp, Zea mays
  misc_feature: Incyte ID No: 700343796H1
  unsure 226, 234: a, t, c, g, or other
gcagaagaacgtgaacgaggcggtggaggggctcagggccaagggtatcaccgcggttggtgccgtctgccacgtctccgacgcacagcagcgcaagagcctcatcgagacggccgtcaagagctttgggcacatagatattcttgtctccaatgctgccgcaaatccttctgtagatagcatacttgaaatgaaagagtctgttctcgataagttgtgggatatnaacgtccnc

SEQ ID NO: 1115 - DNA, 201 bp, Zea mays
  misc_feature: Incyte ID No: 700343801H1
  unsure 150, 158-159: a, t, c, g, or other
gtttaatcatgatgtgttttggcatggattcctttagatttatcccatttgaagtttcagcagttttctggatctgtatatttatgttttttactaaatttggggagttttcagtcatgacttgctagtaatgctttttcagcactctcntttctccnnctggaactctgatgatataaacattattttgttattgttcca

SEQ ID NO: 1116 - DNA, 300 bp, Zea mays
  misc_feature: Incyte ID No: 700343802H1
tacacatttgattcaggacatgctttcaatttgccgtgagactttcaagggttctgtccgctatgcatgggctagtgtcccaacatacccgagtggggtgattgggtttctgttatgcgccaacgctggcccaccggtcaactttctgactcctgtaaatccaattgaagaagtggaaggagctactaaagcgggaagggagatcaggttttataattcagagatgcatatggcagcgtttgttcttccgacatttgccaagagggagctagaagcatactgtgcttccacggaaacgga

SEQ ID NO: 1117 - DNA, 296 bp, Zea mays
  misc_feature: Incyte ID No: 700343803H1
tcaagaaaccctaaaaacatcatcggtctcctattggtgaagagtcttttgactgttcgtgctgaaacggagacgccggttagtgctgtttcaattagaaggattccaagggttccttcagacatgcctttgtatgatatactcaatgagtttcagaaaggaagtagtcatatggctgctgttgtgaaggctaaacctaaaactgaaccaccgcctgacagaactgaaccaaatagggaagcagttgggccagcacagttgactgttaccttgttatctaatgctgaagaaagtgc

SEQ ID NO: 1118 - DNA, 295 bp, Zea mays
  misc_feature: Incyte ID No: 700343804H1
gattctcgtgttggagcatttaggcgtcagttggagaagatcattcttgacaaacatgaggacaccatgagcaagatgggtgccatattagcatctggtatcctcgatgctggtggtaggaatgttacaatcaagctcctctcaagaaacaagcatgacaaactcacggctgtgattggtcttgccgttttcagtcagttctggtactggtatcctctcttgtatttcatcagcctggccttctcgccaacagccttcattgggctcaactctgatttgaaagtgccaaagtttg

SEQ ID NO: 1119 - DNA, 293 bp, Zea mays
  misc_feature: Incyte ID No: 700343805H1
gagccagacaatggtggccttgtccccaagtccatggagccagacaatggtggccttgtggacaatggagccagctggtctcaactactggaaactcttccccttcctaatataaaatggatatgccccactgcaccttcaagacccgtgtcagtgtttggcgggttcccctccacagcatggtttgatgttgctgatctttctgaggatgctcctgatgacattgagggaatcgatgcctcagcagcacatgttgcgaatttgttgtcaactgaacctgctgacatcaaact

SEQ ID NO: 1120 - DNA, 291 bp, Zea mays
  misc_feature: Incyte ID No: 700343806H1
tggaactcaacagggtggacatccgtgttggcctgtctggagcactgtattatatggatggtttctctcgcactgttcgtcaccttcggaatcttgtttcccaggatccagtccaaagtagtgtgactgttggagtttcacattttgagagatgctcgctctgggttcaagttttgtattacccgttttatggaagtagtggatcaacagactatgaaggagattatgcagaagaggattcacagatgatgaggcagaagcgctcacatcggcctgaacttggggaaccgg

SEQ ID NO: 1121 - DNA, 294 bp, Zea mays
  misc_feature: Incyte ID No: 700343807H1
ccatagccaacatggctgacaggctaggtcttgtggctactattaaggaccgagcaaatgaaatcttcaagaaaattgaagatctcaagtctattaggggaagaaatcaagatgccatattagccgcatgtctatatattgcttgtagacaagaagatcgccctagaactgtgaaagaaatatgttcggttgctaatggggccacgaagaaagaaattggcagagccaaagaatttatagtgaaacaactggaagttgagatggggcaatctatggagatgggaaccattcatg

SEQ ID NO: 1122 - DNA, 178 bp, Zea mays
  misc_feature: Incyte ID No: 700343808H1
gtaaaaacggctttaaagtctattttgtgcggtagttcgtgtaggccgcttcgtcccgaagcgatcttggtaaaagacttattcgtgttgccaaacgacacaattcgtattttttttgtgtgccgtgtagaacacggtttgttgttattggaatggttcatcgaaatctgtgtgcccg

SEQ ID NO: 1123 - DNA, 293 bp, Zea mays
  misc_feature: Incyte ID No: 700343811H1
ggctttcaaaaatgccggacgaagtaagggctgagataggcccgtatttcaacgcccgcgcaccataacagatgagcagagcgagaaactggctaagccagggagcactgctggtggcgatgctatgaagcagttcatgagaaaggggctcactcctaggtggtggggtgaccttgatgtcaaccagcacgtgaataacgtcaagtacatcggttggattcttgagagtgctccgatcgcgatcctggagaagcacgagctcgcaagcatgacgctggattacaggaaggagt

SEQ ID NO: 1124 - DNA, 294 bp, Zea mays
  misc_feature: Incyte ID No: 700343812H1
  unsure 144-163: a, t, c, g, or other
gtgggatttagctcaggaacccacgcctgacatcccctcttcctccccggccggcgatgtcgtcttcgtcttccgcgctggccaaaggcaagtcggcaatcggatccgcagccggatctgccaaattcgaggccaaggggaaannnnnnnnnnnnnnnnnnnnagctgcggcagtaccaagcgtggaaccaccaccagcagcagcagaggtagaggtagagggaaggccgacaagaaggtctactccttgcccggccagaagttcgatcctccggaggagagggagcctctcag

SEQ ID NO: 1125 - DNA, 291 bp, Zea mays
  misc_feature: Incyte ID No: 700343813H1
  unsure 70: a, t, c, g, or other
atggcatgacttcattgtcctctcttgtatgcgttctccatttggcagagacaaagatgcagttgcgcantcatccgaagctgcttttcgtcctttctgcagtcatcatccagtggttctgacataatcgcaaaccgtggagttggggctttattaggggactcaatcacggatcaaggtcttaggctcccaatggcacctggtttcgtctacctgagaacatgtcgaactttccatgacacatacttcgttagtgaagtgatcctcaagcaagtgattgaatgggctcac

SEQ ID NO: 1126 - DNA, 295 bp, Zea mays
  misc_feature: Incyte ID No: 700343815H1
gcggtctgctcgttcgatctgtgcagcagatctgaggtcccgggcgaccgtgaagcagcttcaatcgtcggcatggcgctcgtattgcatagtggggctggaaacaagaatgccttcaaagcacttattgctgcagaatacagtgggatcaaggttgagttgaccaaggattttgagatgggtgtctccaacaagacccctgagtttcttaagatgaacccccttgggaaggttcctgttctggagactcctgatggccctgtttttgagagtaatgctatcgcacgctatgttg

SEQ ID NO: 1127 - DNA, 300 bp, Zea mays
  misc_feature: Incyte ID No: 700343816H1
  unsure 61, 68: a, t, c, g, or other
gacctaatccccaacccccagccggcagccgccgagcaaaccagctcatccggtcggtcancccactncatcctcatcccctgcccatctgatccgatcggtcatctcatcctcatcccctacccgatcggatcccctgctcatccgccgagcaccaccaggcagcaggctccagtcatcgagcaccagcaggagcacggcgcgctgcccagtaggagcacggccaagaggatgacgcccgcatcctgcctcttctcctctgctactggagcctctactgctaggagcacggctaggagg

SEQ ID NO: 1128 - DNA, 298 bp, Zea mays
  misc_feature: Incyte ID No: 700343817H1
tgcaatatatctcaaatattgtacatactatttatgcagatttagcattgtgcataagctagtttctgaatgaaatatgttgatcatcctccctccaatccaaagaaaattacaatcgaataaagtcaggaagtattcactgtcaatctcctgcaccgagaataatgccaacaatccgaggcagtcgattcctccagatgttgatccaccaaagcaaatgaagcaactttatgttaggtgtaatataaagcgatctgcaggacgagggaaaaaagaatccgacgtaagtgaaaacata

SEQ ID NO: 1129 - DNA, 295 bp, Zea mays
  misc_feature: Incyte ID No: 700343818H1
  unsure 14, 17: a, t, c, g, or other
gttttttgattttngcngccgccgctgctcatctcacatccctcgagaagacgcctgctcctcgccgatcgatacgatggccgtcttctccgacctccacaccgccgacggcctcaagtccctcgaggctcacctcgccggcaaaacctatgtgtctggtgactccattactaaggatgacattaaggtcttcgccgcggtgccgtcgaagcctggcgctgagtttcctaatgccgcccgctggtacgagaccgtctctgcggctgtagcctcaagattccctggtaaggctgtt

SEQ ID NO: 1130 - DNA, 290 bp, Zea mays
  misc_feature: Incyte ID No: 700343820H1
attggaaactggagccatccaaattggttctaaggtgttagttctaccttctgggcaagaggcgactgtgaaagccattgagcgggactctaattcatgcaccgtagcgagagctggtgataatgtggcaatttgtttacagggtattgatggaaaacaactaatacctggcggggttctttgtcaccctggtttccctgtgcctgtagctaaccacttggagctgaaggttctagtcctggacatcactactcctattcttgttggctctcaggtggagtttcacatac

SEQ ID NO: 1131 - DNA, 291 bp, Zea mays
  misc_feature: Incyte ID No: 700343821H1
gcgcgctggcggcggccaaggccgcgaggcagcaggaggcaagccgtctcggggcctccggcggcggcgacgtccctctcgtcgactacctcaacacccagtactatggggtcgtcggcatcggcacaccgccgcagaacttcaccgtcatcttcgacaccggcagctccaacctgtgggtcccctcctccagatgctacttctcgatagcctgctacctccaccacagatacaagtcggccaagtctagcacgtacaaggcggacggcgagacctgcaagatcacctacg

SEQ ID NO: 1132 - DNA, 290 bp, Zea mays
  misc_feature: Incyte ID No: 700343822H1
caaaccctaaccggccggcccaattctcacgtgctcgccgcctaggagcattcacgttggcggcgggcggcggctcggttcctctcctccaccgcacctccaagaatccacctccacgactgagctgacggctcggtagcgccatggcagttcaccggctccaaccttccccatccggcctacagtgctccaccgcccggtcgccagtgctcctccatgggccacggctgacgggtgcacgcaccggtatgcatcccttgctgctctaattcccgacgctctagctcgtg

SEQ ID NO: 1133 - DNA, 146 bp, Zea mays
  misc_feature: Incyte ID No: 700343823H1
accacttagttttggacccctagtcggatactgttgtatttatctcaagttggacggttatgtacaatacagaccttagtagtgtgatgtccagaatggcagaatccaattcagatttgttcaatttgtttgatgttgtccgtgtc

SEQ ID NO: 1134 - DNA, 173 bp, Zea mays
  misc_feature: Incyte ID No: 700343824H1
tgaaaaagcaggacagatttttatatacactaaaatcactctcaatagcctaaagtgattctttttaagtagaagaaaatttaaaacttggaaggggaacatacccgggtatatctccacatagagaggtcatgggtgactttttactttctacattttaaaaattgtctaca

SEQ ID NO: 1135 - DNA, 282 bp, Zea mays
  misc_feature: Incyte ID No: 700343826H1
cctgactcggccaagtcaataaaacatcttattgcagctgcccaagcaaggaggaaccttatggcttctgctgcttgcaaaatttgatgggtcttcgactgataatagtgctattacctctacatcatatggtttgccaagactaagccctagtcctgtttttcgcattccatccccacctagaattgcttttcctgagagtcctggtcaacgtattctgaaaagcccaatggagcttgataatggtcatggaaagagtcccaaatctaggcaggccagcgg

SEQ ID NO: 1136 - DNA, 290 bp, Zea mays
  misc_feature: Incyte ID No: 700343827H1
gatggcagttctatggcaaataatacagtgcctttacctgagaggcgaagtatggaatcattagatactgctgagaaatggtccgagaaagtagcagaacttgacaatgtaaaggattctccaagtgcaatttccgatgaaaattttcctgagattatgccaataaggaaaggtgaaaatcgatttgttgttagtaagaaaaaagatcgctcattgacatcacagcagtacaaaaggcgcagtattctcgagcaggcagacagttctgattttgtcccatttgttccttt

SEQ ID NO: 1137 - DNA, 289 bp, Zea mays
  misc_feature: Incyte ID No: 700343830H1
  unsure 149: a, t, c, g, or other
cccgatcagacttgttcggcctcttcgacggcgtgcccgtctccccgggctcattcgccatgcattcctcagcctccgcgagaggaggacgagggctcctcttgccggcggcggttgtggtgctactgttgggtgcagtggcgccagcngcgggttgctatccgcgcgtgttcaacttcggggactctctggcggacacgggcaactacccgttcgtctatggcaacggctcagccaagctccgtccaccatacggcgagaccttcttccaccgcgccaccgggcggct

SEQ ID NO: 1138 - DNA, 290 bp, Zea mays
  misc_feature: Incyte ID No: 700343831H1
  unsure 5-6, 16, 59, 92, 112, 143, 157, 167-169, 176, 209, 228, 248-249, 271,: a, t, c, g, or other
aaaannagaagcagancactcaagctatgaagacatcgtcaattgagtctctttctttntcaccacagagaaactctaaaattgacaatgtntctgcctctcatagtagagnttcaggtaaggatggatctctgaatgctaantcaagcactgtgcnaaccatggcnnnacaactnaatactgaagttggtgtagcagtcagtgatcantggtctagtgaacctattntggttggttctcccgaagannatctgatagagataatggacangntcagttaactcaaggtc

SEQ ID NO: 1139 - DNA, 295 bp, Zea mays
  misc_feature: Incyte ID No: 700343832H1
  unsure 156: a, t, c, g, or other
agagggacgaatggcgagctctcagtgctgcgataacccgccggccctgaacccggcctgcggggagggcaaggtcgtcgacagcttcggcgggctcaaggcctacgtcgccggccccgaggactccaaggccgccgtcgtcctcgtcgccgacgncttcggattcgaagcgccgattatgaggaagatagccgacaaggttgcttcgtcagggtactttgttgtggtaccagatttgtttcatggggatccttatgcacctgagaatgttgagaagccctttcctgtgtggata

SEQ ID NO: 1140 - DNA, 289 bp, Zea mays
  misc_feature: Incyte ID No: 700343833H1
gcagaaaggcaccttacgtggaactgaagatcgagtgtgatacctttcctactggaaaacgagaaaccggtccatgaagttccatttatcccatgcgaatatagatatgctctgcagtttaggttattttttggagacagttggtctactttgtagtcgcttcccactgtagatgtaacattcagtcatcttgttctggtgtcatctgtgaaatatctgctacaatggatgtcatgtgtcttttggtaaaaggaggaggatctctttcacagcgtgtttggtttgagga

SEQ ID NO: 1141 - DNA, 285 bp, Zea mays
  misc_feature: Incyte ID No: 700343834H1
  unsure 15, 94, 238, 260, 271: a, t, c, g, or other
agagggtgcactcanaggtattcttggctacacagacgaggatgttgtttccaatgattttgttggtgattcaaggtcaagcatctttgatgcnaaggctggtattggactgagctcttccttcatgaagctcgtgtcttggtatgacaacgagtggggctacagcaaccgggttctggatctgatcgctcacatggctcttgtgagcgccaagcactgatgttcgtactcgttcctncagtaccagtagtagctagatnagaggctgcanttttgaacggcatt

SEQ ID NO: 1142 - DNA, 286 bp, Zea mays
  misc_feature: Incyte ID No: 700343835H1
  unsure 228, 274: a, t, c, g, or other
gctcttcaccgaccggttctggacagcaccggatagcagtaaccatatcatgtctcaaagccggaggcaagagcaagagctccaacttgtatcagaggattgcagcacaaagaggaagcatggggaagacaaggatataatgggagaggtaaccaagacccatgaagctatacaatcattggataagtccatctcaacgctgcagatggagcttgcagcaaagcggancacacttgagctgctccgatctagtggttcaccagtaacctttganactagccaacca

SEQ ID NO: 1143 - DNA, 282 bp, Zea mays
  misc_feature: Incyte ID No: 700343837H1
aagcccttgctctttcaaagctcggcatggaaaccgacgcgcaggacatgctcaacgacggagcaacatttgaggccaaaaagcaaaacggctggcgcagttaggaaataaaagtctcctaactactccgtgtcgttgcccttcgtggaaaaaaaaggcgcaatcgctagtgtcctccaaatcagttcattgggacgtctgttgcacgaccaaggagtgggattgaaatgcactgttttatcgtgcaatctctgccctaatgccggcaacgagcggtggtgt

SEQ ID NO: 1144 - DNA, 284 bp, Zea mays
  misc_feature: Incyte ID No: 700343838H1
aagaggtttcagatgaaggagtgttccgtcgctttgtcagactacttctggccttcattgtcaaagtctttgccttctttcacatagtacgtagtcagcaggaaacgagggtcaacaacctactacctcctgccgaaccagaactgatttctgacgatcatccggcagtagagactttcaatgtagaccacatcagtcctgtcatagagcgccttcagagacttgaagggaaggtcgatgagcttggcagcaagcctccagcgattcctgtggagaaagaacga

SEQ ID NO: 1145 - DNA, 284 bp, Zea mays
  misc_feature: Incyte ID No: 700343841H1
  unsure 74, 183: a, t, c, g, or other
ctcccaccctcctgctcctcctcccacggtcccgccatttcgtcccccgctcaccaactcaaaccccctccgcnctcaaaccctaaccctagccctagcccgctcccggcggagcgacgatgccgaaggatggcggcggggcggcggacgaagaggagttccgcgccgaggtggaggagcgcntcatcaacgaggagtacaagatctggaagaagaacacacccttcctctacgacctcgtcatcacccacgcgctcgaatggccctcccttaccgtgcagtgg

SEQ ID NO: 1146 - DNA, 283 bp, Zea mays
  misc_feature: Incyte ID No: 700343842H1
  unsure 215, 262: a, t, c, g, or other
cctaatcccacctccagtctctgggcaccaaatttccggcggcgatggcggcggctgtggcgaggtcagggttccggcgcatgttctccgtctctgccttcgcgccgccgaaggcccccgccgcgcgccccaaggccgacccatcccccaacctcttcgtctccggcttaagcaagcgtaccacaagtgaaggacttagagaagcctttgcggantttggtgaagttttgcatgctcgagttgtgaccgatcgtgtcagtgngttttctaagggatttggctt

SEQ ID NO: 1147 - DNA, 282 bp, Zea mays
  misc_feature: Incyte ID No: 700343843H1
cagagaccattctgggtactatcgtaatggcaaagaatccatgccttcatccaggggatgtccgaatccttgaagctgttgatgtgcctgaactgcatcaccttgttgattgcttggtcttccccaagaaaggtgagaggccgcacgcgaatgaagcatctgggagtgatcttgatggggatctatacttcgtaacatgggatgaaaaccttataccacctggtaaaaagagttggaaccctatggactactccccagctgaagcaaaacaactgccacgcg

SEQ ID NO: 1148 - DNA, 287 bp, Zea mays
  misc_feature: Incyte ID No: 700343847H1
ctcccgcgaagaggagatggcggagtcgttgaggtctccgcgccgctccctgtacaaactggtgggctcgccgccttggaaagaggctttccggcagagatgcctggagagaatgagaaacagccgggacaggctcctaaacaggtaccgccaggctggaagcagtgggccagggaattctcagaacagctttctagttcaagaggtgatggaagaagagtggaatgctttgcagtcagtggagaattgtccagaagacttggctcagctggaggagctgatagaca

SEQ ID NO: 1149 - DNA, 196 bp, Zea mays
  misc_feature: Incyte ID No: 700343849H1
attttcgtctcctccccacagcagcccggcgaaaaccctagtaagcaaaccaccggagcagcggcgcttgcgcgggcggagcatgggcggacgacgattacaacgaaattgacatggggtatgaggatgagcccccagaaccggagattgaggaaggagctgaagaagagcctgagaacaacgaagatgcccctgt

SEQ ID NO: 1150 - DNA, 180 bp, Zea mays
  misc_feature: Incyte ID No: 700343850H1
gaaaaggtagctgcttcagctacagctgaccaacaagatgttgcagctgaggaaaaggaagctccctcagcagcctaacaaacacgcagaacatgtccacactccgtaggtgtctttagttcctgtggtgatgtcgatcttttattacctcttgtcagtttggtttgtctagtgttttgc

SEQ ID NO: 1151 - DNA, 296 bp, Zea mays
  misc_feature: Incyte ID No: 700343852H1
ccaggaggtgactaaggtggtgcctgctgtcacccccgaggttaaggattctctggttaagaacataaggaggaggatgacaccacagcctctcaagatccgtgctgatatagagatgaaatgcttccagtttgatggagtgctccatattaagcaagctatgaagaaagctgaagctgcgggcaatgataactgtcctgtgaagattaagctagttgctcctccacttatgttttgaccacacagacccttgacaaggaccaaggcatttcagttctcactactgcagtcaaggc

SEQ ID NO: 1152 - DNA, 179 bp, Zea mays
  misc_feature: Incyte ID No: 700343853H1
  unsure 45, 168: a, t, c, g, or other
cttttgcaacagtaatttattgtcatagggaaaatttttagcatntgttcatgctataaagtcagttttcacttaaatttaattatattaaatattagcttatcatgttgaacattggtccagagttctataatgacaaaaagaaataagatagaacaagggggggtncaatattatta

SEQ ID NO: 1153 - DNA, 229 bp, Zea mays
  misc_feature: Incyte ID No: 700343855H1
  unsure 23, 217: a, t, c, g, or other
agagagagaacagttcgaagtanactgatcttggagggaagcatctatacggcaagaggacataccctcctaacaaatcgttgctcggttacctgtcaagaactctagtgcaatggcatcagccaaagaaatatgacgtataggaaggtcgaccgggggagattcagccctcgattgtgtggggggcttcttgttgtacacctcttttggtttcaantttctttcatgc

SEQ ID NO: 1154 - DNA, 293 bp, Zea mays
  misc_feature: Incyte ID No: 700343856H1
  unsure 258: a, t, c, g, or other
ctaaagaggatccttcacaccatactcgaataaaaaagtggcttcaaaagcttaaggcagaagatgtcctcttgcgtgggttaacatggagcaggcttttggaccctgataagaaagggcagtggtggttgtctggggatgttccatctacagtagctaagattgaagatgttgcagctgttataagcaaggatgttgcagagacaaaaaaacttcttcagcttgcagctgctcaacggatgaacactgacatacgangagcaatcttttgtattataatgagtgctgaagac

SEQ ID NO: 1155 - DNA, 285 bp, Zea mays
  misc_feature: Incyte ID No: 700343857H1
  unsure 179, 215, 217, 259: a, t, c, g, or other
cctgctcacccacccgtcccctcctgctcgcccatggctcccatcgctgtcggcgacgccctccccgacggccagctcgggtggttcgacgagaacgaccagctgcagcaggtctccgtccacgcgctcgccgccggcaagaaggtcatcctcttcggcgtccccggcgccttcacccngacctgcagcaaccagcatgtgcgaggcttcatcananaggctgagcagctcaaagccaagggtgtagacgagatcctgnttatcagcgttaacgaccccttcgtc

SEQ ID NO: 1156 - DNA, 291 bp, Zea mays
  misc_feature: Incyte ID No: 700343858H1
  unsure 2, 13, 165: a, t, c, g, or other
tnggaagacagcnttgaccatatctatgctttcaaggctgcaatagagaaggagtctcctggtagtgtagtggagatacaaacagagaaggttggggaaaagatcagattctgcaaaatgtttgttgcattcaaggcttgtattgatggttttttgcaagggtgnaggccctatttaggcattgactcaactgtggctcacaggtaggtggaaaggccaacttgcttctgcagttgcaatagatggccacaattggatgtttcctgtggcacttgggctgtttgaatctga

SEQ ID NO: 1157 - DNA, 288 bp, Zea mays
  misc_feature: Incyte ID No: 700343859H1
caagaaggctttcatagtgcaacctttgcaactgcactagtctttgcatgcgtggttatgcatgatgcttttggagttcggttacatgccggaaagcaggcagaggtgctgaatcaaattgtctatgagctaccagaagaacacccattatcagagacaaagccattgcgtgaaatccttggacatactgttcctcaggttgtggccggttgcatccttggagttctcatggctgccgttatgcacctgtctctcgggagttcttagtcaactgttgttcatggatgt

SEQ ID NO: 1158 - DNA, 288 bp, Zea mays
  misc_feature: Incyte ID No: 700343860H1
  unsure 71, 239, 269: a, t, c, g, or other
ctgatggtcctgcagctacttcgtacactcctgcttcaaattcctctgccccaacacattaccactcaacngctgactattcacctcaagttactcctccagctgcgccaccagctagccaatataaatatgatagcagttaccagcctgaagttgagaagattgctgaggctcacaaggcagccaggtttgcggtcggtgctcttgcatttgacgacgtatctgttgccgtggatcanctgaaacgtgcactggatcttctgacaaanccttctgctgaacctcgct

SEQ ID NO: 1159 - DNA, 176 bp, Zea mays
  misc_feature: Incyte ID No: 700343861H1
  unsure 2, 7-9, 120, 132, 146, 168: a, t, c, g, or other
angaaannnacgggtaagagaagctccaatttcagtagagaggatctcagcttcatgtctcatcctgcctcgagccgatttttttttttgatggccgaatggtctcattaaaaacatatngtacagaactantgatacaccctaangaaaaaaaagtgcaagaaccantttacact

SEQ ID NO: 1160 - DNA, 177 bp, Zea mays
  misc_feature: Incyte ID No: 700343862H1
  unsure 94: a, t, c, g, or other
caaataccccgaacgtccacagcgagcgagaggccgcaaactcccgagaccgtacgaaccagacgattcaccaatcaccatggcggcgccggcncggcgcaggttcctgcatctcctccggtggagccggagcgcctccttccgctgctgcttcgcctcttctccgccctccgccgc

SEQ ID NO: 1161 - DNA, 87 bp, Zea mays
  misc_feature: Incyte ID No: 700343865H1
  unsure 3, 25, 40, 47-48, 62, 64, 77, 82-83: a, t, c, g, or other
canaaacgtgttaggagtggaaganggtgcatacctcagntcagctnncgtgttggaacttngnctggtgtcatctntgcanncccg

SEQ ID NO: 1162 - DNA, 199 bp, Zea mays
  misc_feature: Incyte ID No: 700343866H1
ctagaaatacgttgattactatatattaatgcagagcatggagcaaagctgatcttttaaaatatacatgttacctccttatttctagccacacggtcacgtttggacgaccaataataggcttgcaacccttcaaattgtgtccatcagcttcccaacgtgcatatcgccatcctctgcttcgtgtcccatgtcacca

SEQ ID NO: 1163 - DNA, 220 bp, Zea mays
  misc_feature: Incyte ID No: 700343867H1
  unsure 167: a, t, c, g, or other
cactgaagtactgaagcttcaactttccaaccatggatgtgcagtttgtgtcactgcttgatgcttgttggttggaatgtagaataggtatctgaggaaagatatcaaacactgctaggcactactactatgacatctcagcgcattcaggcactatatgtaatgcnatgtgattgacaggtcttgttcttattatgtacttggtgtgtgggccaaaaaa

SEQ ID NO: 1164 - DNA, 174 bp, Zea mays
  misc_feature: Incyte ID No: 700343868H1
  unsure 69, 72, 88, 130, 135, 170, 172: a, t, c, g, or other
ccaaccctgaggctctttttcaaaggcagtgctgggtgcccaagggtactggaccctggagattgggantgnaggctctgggtgaganacacacttgaaaagtgatagcctggcaggtaggttggcagangtagnaacagagttaaggtcattgttagagggtaaagaananaa

SEQ ID NO: 1165 - DNA, 188 bp, Zea mays
  misc_feature: Incyte ID No: 700343870H1
  unsure 140: a, t, c, g, or other
aaaggcagctgtctaaaaaggagttgaaaaagagggaactagcagaacttgatgcagtattggctgagctgggactttctgggaactcaaccagcgctgcacaggatgctgagaaggaaggtgccaaccaagctggtgangcagagaaaaaggaagatgctactgtcccctcagagagcaagacctcc

SEQ ID NO: 1166 - DNA, 95 bp, Zea mays
  misc_feature: Incyte ID No: 700343871H1
  unsure 4, 7, 35, 37, 39, 63, 79, 82: a, t, c, g, or other
gaangtnttcgggatcacccacctcggaggagttngnangcgtgctcatgtgcctcttgcganaaggaggtggagttcnagntgatccgcgtcga

SEQ ID NO: 1167 - DNA, 275 bp, Zea mays
  misc_feature: Incyte ID No: 700343872H1
  unsure 82, 86, 250: a, t, c, g, or other
gtctagcaaacaaaccgcagcctgagcacccgaggagactccgtgcgaccgaagccagagccagcggaaccgaacggaagcnaganccccggcggctagcgagatggacggcggcgccgcgaggaggggaagcaggagcggcacctggtgctggcccacaagtcttccttctatcccacactccgttgatgacctctccaaggtcgccctccgcgccgaagtcctcgacaccgtgaaatccgatgatatngcgacgctgtttgagtcgctggtcg

SEQ ID NO: 1168 - DNA, 288 bp, Zea mays
  misc_feature: Incyte ID No: 700343873H1
  unsure 160: a, t, c, g, or other
ccaagaacttgataccatgaaagacactgatcagagtgatagctctgcaaatgtcagatctgacgctgaagaaagtgtagaagatgatgattctgtgtgtgtcagtgatgatgctcaaaatgatctgaagaataccaagtgcaaattggaagatgcttcnaaagaatcttctactgctcgagaagctgaacggagtgattagttctgcaaatgtcattgctgatgctcaaaatggatccgaacctaccacaaatgagttggcagtcattacgatcagtaacgacaagg

SEQ ID NO: 1169 - DNA, 283 bp, Zea mays
  misc_feature: Incyte ID No: 700343874H1
agtttgtttacttaactgccgttctgtcaaagatacaagaaggggggtggttgccgctggctttctcatcactgtttctctgcataatgtacacgtggaactacggaagtgtactgaagtaccagagcgagatgcgcggcaagatatccctggacttcattcttgatctgggagccacacttggcaccgtaagagttccaggcattggactcgtgtacaacgagctggtccagggaatcccatcgatctttggccagctattagtcacacttccagcgatgca

SEQ ID NO: 1170 - DNA, 283 bp, Zea mays
  misc_feature: Incyte ID No: 700343875H1
gtaaatacggactctagtgcctcaactgaagcaccacctcagcctgttgaaaccagtgacaaggcagaagacacaaaggacgaatctagtggagacaaagtggtagttggagaacccaatgaaggcagttgcatgccatctgaagttgagggcaaaacaaaagagggagatgctgaagaaaaggaaaggacagatgaagctggaaatatcgataaaattagcaaggatgacactgggaagaaagatggagatgacactgagaagaaagatggaggtgatgata

SEQ ID NO: 1171 - DNA, 75 bp, Zea mays
  misc_feature: Incyte ID No: 700343877H1
  unsure 15, 24, 35, 49, 56, 70, 72-73: a, t, c, g, or other
tgactttgagtctgntcctgaagnattgggaacanccaaggcggagganaattaanagttcttgatatanannta

SEQ ID NO: 1172 - DNA, 99 bp, Zea mays
  misc_feature: Incyte ID No: 700343880H1
agctcgtgttccgcttcttgcagccgtcgccgcgaaggcttcccagagaacttccgtcaacatggggaagacacgtggtatgggagccgggcgcaagtt

SEQ ID NO: 1173 - DNA, 167 bp, Zea mays
  misc_feature: Incyte ID No: 700343882H1
  unsure 46: a, t, c, g, or other
gcaacagatagaatttctggaagaagcttcaggctcgagcaccttntttgacgtctccatagcctctcaaactctgagaagctccaggaagaggcacaggcagagtcctcttctatccaggttaaataagttgttttgcctttcttatgtgaacttaacaatattgg

SEQ ID NO: 1174 - DNA, 283 bp, Zea mays
  misc_feature: Incyte ID No: 700343883H1
agaaaagtcaagaaaaggcagttccttgattttttcaaaaagaaaggtcattcttggtttcctacctattatagtttcttggttgttctatgagaacatagttgaagtagaattggttgttgacagctatgaagttactctgatgtcatgtcagaatttcttcaaccgctatttttacctagggacaatcttgtatatcctgtgaagccatctcacatcttattgtggaaaaaagagttaattgattcagcatagtaaagctaagaatattggttgtccattt

SEQ ID NO: 1175 - DNA, 283 bp, Zea mays
  misc_feature: Incyte ID No: 700343884H1
  unsure 219: a, t, c, g, or other
ctgggttggttgattatgtggagacgctcgtaaggaaacctgaaactgaattcaatgttgttgtgcttcaatccaatggcgtcgatcagccaaaagagtcggttcatgtactaaatgtcgggaggctgcggatgaggcttactaaagggaagtcggtagtcgccaaggaattctattcctcatcgatgcagttatgtggtgtgagaggcggaggcgaancagcctcgcaggcgatgttttggcgacccagaaacgacctcagcttggtgctagccttcgagag

SEQ ID NO: 1176 - DNA, 280 bp, Zea mays
  misc_feature: Incyte ID No: 700343886H1
tgtagatatacctcttgataaagaggccttggactggaacaccaggatgaaaattgcagcaggtgctgccaaaggactggagtacctacacgacaaagctaatccaccagttatttatagggatttcaagtcgtcgaacattctgttggatgaaagtttccacccgaagctgtctgactttggacttgccaagttgggtccagttggcgacaaatcacacgtctcaacacgtgtaatgggtacatatggttattgtgccccagatatgctatgacagggc

SEQ ID NO: 1177 - DNA, 281 bp, Zea mays
  misc_feature: Incyte ID No: 700343887H1
  unsure 216, 245: a, t, c, g, or other
ttgctcgcgtgctctttcgtcagatgtgcattcttgtatcccatcctttgcaacgttgcatgcaagatgaccttgatattcccaaacaagtcgctaagaaaatcgtggcagccgaacctgcacagaatgaagatgccgctccagtctccggccaacagtagggccttctagtcgaacggtatgcaaacatgaagttactcgcaagcggttggcatnaaccgttctactagatcagaatgcctgtnctgtgtgatggagattccatcccagaatttgtgtat

SEQ ID NO: 1178 - DNA, 277 bp, Zea mays
  misc_feature: Incyte ID No: 700343888H1
cttccggtggctgtgacaacacggtgaaggtgtggaagctcaacaacggcagttggcggatggactgtttccccgccctacagatgcacaaggactgggtgagagacgtcgcgtgggcgccaaacctgggccttccaaagtccaccatcgccagcgcctctcaggatggaacagttgttatctggacagcagcaaaagaaggcgagcagtgggaaggccggttgctgtatgatttcaggacccctgtgtggaggctgtcgtggtcatgactgggaat

SEQ ID NO: 1179 - DNA, 160 bp, Zea mays
  misc_feature: Incyte ID No: 700343891H1
  unsure 39, 68, 83, 154: a, t, c, g, or other
ccagtcttgagctccatctcaagccttcatgcgactgtnttggagtgttttaagagagaaccttgtancatgttaagatgatnttgagcttgtgacgatgcgcacggtagaagtggaacctttttttttttttgcggttggattgtgcaaactncgagca

SEQ ID NO: 1180 - DNA, 277 bp, Zea mays
  misc_feature: Incyte ID No: 700343893H1
agcacttgctgcctaaatattgtttacctggtggatcagaaggaaagatttggatgtggactagatgcttaaggtgtgaacgtgaaagtggggtccccagatcatcacgaagggtgataatgtcagctgaagcacactacctttcatttgggaagttccttgaacttagtttttcaagccactcaaccgctagaaggctgccaatatgcgggcattcactcaatacggattgtctgcgcttttttgggttgggctccaaagttgcaatgttccagta

SEQ ID NO: 1181 - DNA, 281 bp, Zea mays
  misc_feature: Incyte ID No: 700343895H1
aattgacgatgttcaaagtgacttttcagagaccacaggtggtagaacatcagctaatcaactggttgggagtgtcaatgaattaacaaggggtaaaaggcagggttctagtgcaagtttggctggggatgatactaatttttctgaagaagctgttagtaaatggtctgattctggcatgtcaaaaggaagctcacactccttactaaagcgctctacaagccaacatagtactacatctcagtctgtttctgcagatctgtcagtgatcaggctgaaga

SEQ ID NO: 1182 - DNA, 267 bp, Zea mays
  misc_feature: Incyte ID No: 700343904H1
  unsure 58: a, t, c, g, or other
tgacccctagtgtccggatttaacttcaaacatggcggacgtcgatgtcgagccggangtcgccgccggtgctcccaagaagaggacgttccgcaagtacagctaccgcggcgtcgacctcgatgcgctgcttgacatgtccaccgacgacctcgttcagctcttcccagcgcgcgccaggagaaggttccagaggggtttgaagaggaagcccatggcgctcatcaagaagctgcgcaaggcgaaaaaggatgctcctgtcggcga

SEQ ID NO: 1183 - DNA, 295 bp, Zea mays
  misc_feature: Incyte ID No: 700343905H1
  unsure 17, 29: a, t, c, g, or other
attccattgtgcaacgncctgtggttgtnaatggtgacatccttgcgaggccaatgatgtaccttgcgctgacttacgaccacaggttgatcgatggcagagaggctgtcttcttcctgcggcgcatcaaggatgttgtcgaggaccccaggaggttgctgcttgacatataaattcatgcaccagcgctgcgctgccctgccggactgttttgtgcaattgtgcttatctggaaataatgccatggaaatttttgactgatgaaaaagaattacttcctcagaaagacgaaatc

SEQ ID NO: 1184 - DNA, 296 bp, Zea mays
  misc_feature: Incyte ID No: 700343906H1
  unsure 130, 148: a, t, c, g, or other
atcgaagtgaggagcgcactgaagccagccgccgatgagtcgcctcctctcgcggcagcaccttgccgccgtccgtcgatctgcaccctttgcgtgcgtgtccaggtggctgcacacgccgtcattcgcnacggtttctccgcaagangtttcaggttccagcccagcggaagtgcagaattttgggcagctggacagcatctgctaactggaactggatagtcgatcccctgaacggtgataaattcatcaaagttgctgaggttcagggaacagaaataaagccattcgtggag

SEQ ID NO: 1185 - DNA, 295 bp, Zea mays
  misc_feature: Incyte ID No: 700343907H1
agagctgctcatgaggtgggagttcttgatggtcaaggattctcagttaatataccttggagccgtggtggtgttggagatgatgactacatctttgcttttcagactgtggtgcttccaatagcttcagagtttgccgcagacatcactataatatctgcaggattcgatgcagctagaggtgaccctctgggttgttgtgacgtcactccaactggatactcttggatgacatccctgctagctggttcctcaaatggaagattgttggtgatacttgagggaggatacaatc

SEQ ID NO: 1186 - DNA, 295 bp, Zea mays
  misc_feature: Incyte ID No: 700343909H1
  unsure 17, 24, 38, 40, 49, 82-98: a, t, c, g, or other
ctccgctcggccaccanctttgancgcctcccctcccnancgctcctgnaggtccataccccacccccccgcaggagcggcnnnnnnnnnnnnnnnnnaaagccaaaggcaagatgttcgggcgcgcgccgaagaagagcgacaacaccaagtactacgagatcctcggggtgcccaagtcggcgtcccaggacgacctcaagaaggcctaccgcaaggcagctatcaagaaccaccccgacaagggcggtgaccccgagaagttcaaggagctcgcacaagcctatgaggtttt

SEQ ID NO: 1187 - DNA, 293 bp, Zea mays
  misc_feature: Incyte ID No: 700343910H1
  unsure 197: a, t, c, g, or other
gagagagagagaaagcggcggggttcaagaacgccgcggccatccggagccaggattctcccgatacccccctcgttcccagctcttcagtggcgccgataccgagttccagagaccgcgatgggctccggatctctgctcaaggtcttcgccaacaacttcgacgtccttgcagggcctttggtggcattggcttnccctttgtatgcttccattaaggcaatagagaccaaatctcctgtggatgatcaacaatggctcacatattgggtcctgtactcactaataacatt

SEQ ID NO: 1188 - DNA, 293 bp, Zea mays
  misc_feature: Incyte ID No: 700343911H1
gcgatggacatcggcggcggccgtggagtgggaggcggcggcgcggaaggtgctggtggcgcgcaagccctgcttcgggctacctacggcctgcccaacctgcctccccgtgctcctctacctccgcatggcgcaggttcccttcgacatccacgtcgacacctccttccccgatgccgatcacataccatatgttgaatttggggattgcgtggctttcaacaacgagaaaggaggcgtaattgagtatctcaaggatgagaaaattgttgacttgaactcaaatcacccaa

SEQ ID NO: 1189 - DNA, 293 bp, Zea mays
  misc_feature: Incyte ID No: 700343912H1
  unsure 49, 181, 184: a, t, c, g, or other
agaagatcaagagttggcgaccaagtgatctggttcttcgagttctacnaggctgaagatcctgagcatctgtttggtgaaggttacctttggtgcaatctatgctcaggtaaagtagaaggtgtcgaggcggatctccaggagttccaggacttcgacgagttcgaggattaggctagcnttncaccacaggcagctgcctgtggtgggtttgtttacgttggctacatttcgattctttgtactttgatttatattatgtaaatggctctagtctgtaatattattactca

SEQ ID NO: 1190 - DNA, 293 bp, Zea mays
  misc_feature: Incyte ID No: 700343913H1
  unsure 42, 54-56: a, t, c, g, or other
tggattcaaaattctgcaatcttggcaaatgtggatacaagnccttggctgaannngcctcacagtttgagcaaagatctgttgaagcgccagtattggaaaacatcaaagaactggagggagtcaagtgggactgctcttagacaagtttctgacaaagaagtggaccaagtgactgacaggtgggatgcaaaccttgaagcatttgatataagcattgcaatcgagaacgacattcttgaggcgcttgtcggtgagttcgcagttgacctatggtgaaacggcgtattgac

SEQ ID NO: 1191 - DNA, 239 bp, Zea mays
  misc_feature: Incyte ID No: 700343915H1
gagtgggagacccgcgagaggctgccgtgtagggaccgtagactcagcgactgcgaaggagggataaggggatggccgggatcggaccgatcaggcaggactgggagccggtcgttgtgcggaagaaggcacccaccgccgccgccaagaaggatgagaaggccgtcaacgccgcgcgccgcccggtgcggagatcgataccatgaagaagtacaacgctggtacgaacaaggcggcat

SEQ ID NO: 1192 - DNA, 300 bp, Zea mays
  misc_feature: Incyte ID No: 700343916H1
tttcttttcacaaagtttgccagtagcagccagacactttttgaccttttcccggatagctttggtagcaggtggttgcatgaaagaagcaaagaaagtccaaaggcaatgaaacatctgaataagcttttcccaaacaagatttcgattcagcttccgcaggatgaagctctacttacagattggaagcagcagttggatcgtgatgttgaaacccttaaagccaaatcaaacattggtagcattcgcacgtttctgagtcgcaatggaattgaatgcaatgatattgaagaattattc

SEQ ID NO: 1193 - DNA, 291 bp, Zea mays
  misc_feature: Incyte ID No: 700343921H1
atgggtttgcgtgaagtaaagtctttgcggcgcatgaatcatcctaacattgtgaagctcaaagaggttatccgagaaaatgatatattatacttcataatggaatacatggagtgtaatctctaccaacttatgaaggataaggtcaagcctttctcggagtctgaagtacgcaactggtgctttcagatatttcaggctcttgcttacatgcatcagaggggctactttcatcgtgacctcaaacctgagaatctgttagttagcaaagatgtcataaagctagcagac

SEQ ID NO: 1194 - DNA, 291 bp, Zea mays
  misc_feature: Incyte ID No: 700343923H1
acattattcaaccccctccgaagtatgttctacctggacaaaagatctaagaaggctcctgtttctagctttattatcaaggactcgctaaagttgaaaaccagcgatgctgaaacggttgtcaacatacatgctgctagcgaaaagtttgctgagttgattcctctcctcgagtcaaacgctgacgtgtatgctctcaaagagaagctggaagatgagtaccttgagataccaggagacagcgtgaagcgtgtttttgcagggcttatactccgagaaataaaggagttt

SEQ ID NO: 1195 - DNA, 286 bp, Zea mays
  misc_feature: Incyte ID No: 700343925H1
  unsure 97, 105, 114, 188: a, t, c, g, or other
tatggcgcgcctccgcatggtggtttcggggtgggtttggagagggtggtgatgctgttctgcgccctaaacaacatcaggaagacctcgatgttcnctcgcganccgcagagncttgtgccgtaatttactgagtccaatgccctgagtttgcagcagagcgtactggttgttttgatgttctttgngcatcgaacatcgctaacttgcaatctcagctactgaagccacggttaccgtggttcagagttcctgttaaattcacaaagctacttgtatctattag

SEQ ID NO: 1196 - DNA, 287 bp, Zea mays
  misc_feature: Incyte ID No: 700343926H1
  unsure 44, 184, 203, 205, 211, 215: a, t, c, g, or other
ttgcacaccaggtgcaaacatgtggtctttgggaaggtggtccntggaatagctttgcttaaaaagcttgaagcagttggtagtgaaactggaaatccttcttatcaagtgaaaattgtagactgtggtgaagtttccaacacaaattctcaggatctgctaaagggagataaagtaaactcanagacagataaaggtataantngatgantacnatgttccatctctttgctgccaaagaatagataaaagttgatgtcatgtttgtgcagaaacaaggttgtaat

SEQ ID NO: 1197 - DNA, 287 bp, Zea mays
  misc_feature: Incyte ID No: 700343927H1
attcaattgaagctcgaagctacatcaattctgtggcttgtggtttcttagattatgactcaagtgacaatccactccaagagacggttaaacctatggtagatggtggaactgagggcttcaagggacacgctagagtcattatacctggaacaacaccttgctttgaatgcaacatatggctttttcctccacaggttaagttccctttatgtactctcgccgagacaccaagaactgcagctcactgcattgagtatgctcacttgatcaaatgggatgaggtt

SEQ ID NO: 1198 - DNA, 288 bp, Zea mays
  misc_feature: Incyte ID No: 700343929H1
  unsure 10, 140, 218, 256, 258: a, t, c, g, or other
gaggacggangggaggaggagaggagagagcccaccacccgcgaccgcgaccgcgacctaacccggagacctccctaggctagctcccctcccagaccccaggctctcccacccacctttcccctctccctccctcctcnccgtcccacgccgccgcacccccgcctggctgcttgggtggcaatcggccgtagaggaggagggtgtaggagcttganccgggccacctgccccctgcgccgtcgggatgtacgtncngccgccgcccaccggcgcgccggcgagcag

SEQ ID NO: 1199 - DNA, 283 bp, Zea mays
  misc_feature: Incyte ID No: 700343935H1
gttggccttcttcttctcctcgtccaaggtaaccaagatcggggaggaccacaagcgccgcatcgaggagaacttcaaggagggcgggcagcgcaactggatccaagttctagcaaatagcacaattgccactgtactggttgtgatatttgcactaatgactggagggcaagatcagtgcatggactcaaatggttcaaagcttataactggcatcataggtggtatcattggccactactgttgctgcaatggagatacttggtcatctgaaatcggtgtg

SEQ ID NO: 1200 - DNA, 284 bp, Zea mays
  misc_feature: Incyte ID No: 700343936H1
  unsure 12, 15, 18, 21-25, 152, 163-164: a, t, c, g, or other
agaatttataangangtnatnnnnnagtctatctctacataacaagatggagagagggatgtagagatagactgaaaaataacatcttgttatgtaattatgagttcattagatgtcattgatctaaattaatttctatccattataaactnatttttaatgnnccctgttccttcttcgttgctcacaacaggatccatgtacttggcacatgatatacatatacgagatggacttaaaaactaacaaaggtcttcttttggtggcagataattttggttttc

SEQ ID NO: 1201 - DNA, 285 bp, Zea mays
  misc_feature: Incyte ID No: 700343937H1
aaagcaccctgggacccaaggcagtacggagaccacaccagcaagatcactgaagctcacatccggcataacatgggaggcctgtcggtgcagaacgtatgctggactgcatgaacgcacgcacgtacaaccgaaagccgcttaaaaccatcgactgatctgatttccgcgtaacgaaccctgtgcaggcactgaggaacaagaggctcttcatcctagaccaccatgaccatttcatgccgtacctcgacgagatcaacgagctggaggggaacttcatctacg

SEQ ID NO: 1202 - DNA, 284 bp, Zea mays
  misc_feature: Incyte ID No: 700343938H1
  unsure 24, 219, 231, 264: a, t, c, g, or other
ttactcgcagaaaagatttattanctcgccgcgggggttgaaccgaggctcctagctgatcgcgcgggcacaaggcgagcggacaagaaagcttgctttgtgctcaccggcgggcggcggcacggaccccctgcgatggaagccgtcggcgtcactcctgcccccgtggcggcgccggagaagaagaagctgcttgacctcaaggaccccttccccgcngccgccaacagnggcgccaaggcgtcctcggcgagtaagtgggcnacgaagaagaagctggtggg

SEQ ID NO: 1203 - DNA, 283 bp, Zea mays
  misc_feature: Incyte ID No: 700343939H1
  unsure 2: a, t, c, g, or other
angaagttttaactgctgccaaaattgcatctaggaaaaggagcaatcctggagacagaatagaagatttagatgcttcacttgtgggaagcccaaaccaagatgagtgcagtggagggagatgttcagttcgaccgagattgatactagagatttcctcagattctgaagtagcacacatttgtgttggctgatgtctgcatgacttggagaaaaggaaggggggtggatgtgatgctgtctaacgcggtcagcgaactggcaagcagctagaggcctctcc

SEQ ID NO: 1204 - DNA, 281 bp, Zea mays
  misc_feature: Incyte ID No: 700343941H1
  unsure 64, 214, 259: a, t, c, g, or other
attgaatacatcaaatcacttgatgctgaagaagacatcaagcttctcaagttccatgggtggnagctgcccccacgatgcgctcgtgttctgcgcatcagcaccatgcttttgaagaaaggtgcagctcgtggcttcacaccatatgacatagggcgcattctatgcagggaaactgtgaatagggagtctgagattgaggacatcattcagnaagcagaggatgctgttctcccagggtccagtgaaaacatgttcntagaaactgtatctgaaatcat

SEQ ID NO: 1205 - DNA, 247 bp, Zea mays
  misc_feature: Incyte ID No: 700343944H1
  unsure 50, 60-89: a, t, c, g, or other
ggatatttattcattcaattccatagcggcacaggagagatgaggcgaancgagaaaaannnnnnnnnnnnnnnnnnnnnnnnnnnnnntaaagggccaaaatgtatttcttgtctggtagtatatagcagctctacaacactttggtgaacttagttactgcaaattaggcaattacagttgcaccttttgtattttatagcaaacccagacttctattggattctatgactgcccctcttgtagt

SEQ ID NO: 1206 - DNA, 284 bp, Zea mays
  misc_feature: Incyte ID No: 700343946H1
ggacatcgagcggatccaaggaagtgccggcgacgtgctggaggacgaccccgtcgggcggctcaaggtgtacgtgtacgagctgccccccaagtacaacaagaacgtggtggcgaaggactcgcggtgcctgagccacatgttcgccacggagatcttcatgcaccgcttcctgctggcgagcgcggtccggaccctgaacccggacgaggcggactggttctacaccccggtctacaccacgtgcgacctcacgccgtggggccatcccctcaccgtcaagt

SEQ ID NO: 1207 - DNA, 286 bp, Zea mays
  misc_feature: Incyte ID No: 700343947H1
  unsure 55: a, t, c, g, or other
ctaaataagagagttacattccctatggagttagatctgacaccatacatgagtngcactgatggaagtgacctgtatgatctctatgctgtagtcgttcatctggatatgctgaacgcatcattctttggacattatatatgctatatcaaaggttatcaaggaaggtggtataaaattgatgactgcaaggttatggttgttgatgaggaggaagtacatgctcaaggcgcttatatgcttttatatagcaggagaacagctcgtcctaggtcacttcttacag

SEQ ID NO: 1208 - DNA, 290 bp, Zea mays
  misc_feature: Incyte ID No: 700343948H1
  unsure 192-193: a, t, c, g, or other
gtaattgaccaagatgatgtctcgccaaaagaaaatcgaggagtccaagcagaaggaagccttcctggaaggagagcttgcgaacatgtgggttcttgtggcgaaactgaagaaaggtcaggtaattgaccaagatgatgtctcgatgccgtacccaatggatcgtgattcatgaccctagacaatgacaannacaattattgaatcggctatgcttcggcattgcactttccttgtctgtggactgtggtggtttgcaccagtgtgaatccgtgtatctatattgccgg

SEQ ID NO: 1209 - DNA, 258 bp, Zea mays
  misc_feature: Incyte ID No: 700343949H1
ggtccctacaagcctgcccactaccggtactaggcagccagcacacggcttgcagctcactcgggccgttgtgtgctatgaagttcgctacactggcctgtcagttatcttttgcatgcatatgcattatcatatacgcagtcgcgtagaggtttccttatggttatcgcttgagctgagggggagggaaggagctgtttgcttttgctgaagaataatggtgtagtcggctggggtgaggcgatgtgcgttgccaga

SEQ ID NO: 1210 - DNA, 300 bp, Zea mays
  misc_feature: Incyte ID No: 700343950H1
  unsure 18, 70, 76: a, t, c, g, or other
tctcccccgccccgttcntctccggcgagctagggtttgcccccccgcctcgccaccccacggctcccgngatccnttggatctccagccatgtacggcggagacgaggtttcggcaatcgtcatagatgtgggctcttacagctgcaaggcgggctacgcaggcgacgacacccccaaggccgtcttcccatcggttgttggttcaattgaacaaactgaagacacagatgaccccaagccagagaaggaagctgactctgcatcagattctaagaacggtgccaagcccatggatgtg

SEQ ID NO: 1211 - DNA, 300 bp, Zea mays
  misc_feature: Incyte ID No: 700343951H1
  unsure 28, 44, 47, 51-52, 75, 82-83, 94-96, 104, 145, 153, 175-176, 221: a, t, c, g, or other
gcggcgtggagtgagcacattgaggacngtctactcctcgttcngcntgcnnttcgtcccgagcgatccggcaanccatggnnatgcttcaagnnnaaggtcgnccccaaagagggctctcatgaccagcaaacgggaaatggcngtcgccangcggggagttgagagagagatnngttccctgcaaatggaggagaaaaggctggttgcagagataaagnagactgccaagactggaaatgatgctgcaaccaaaatattagctcggcaacttgtcaggctgaggcaacaaatcctcaa

SEQ ID NO: 1212 - DNA, 296 bp, Zea mays
  misc_feature: Incyte ID No: 700343953H1
tacaagttgatgctgctccattcaagcagtggtacctcactcactatggagtggacatcggtaggaagaagaaggtgcctgttgctaagaaggatgcgactgagggacaagagggtgaggctatagctgaggaaacaaagaagagtaaccatgtgcagaggaagattgagaagcgacagcaggaccgtgcactcgacactcatattgaagagcaatttggcagtgggagattgttggcctgcatttctgcccgtcctgggcagtgtggccgagctgatggctacatccttgagggg

SEQ ID NO: 1213 - DNA, 74 bp, Zea mays
  misc_feature: Incyte ID No: 700343956H1
  unsure 22, 42-43, 60, 63, 67: a, t, c, g, or other
gaatttatttccgctgcaaaangccttacatgttacaatacnntttacattatacaattnatnggantgattac

SEQ ID NO: 1214 - DNA, 294 bp, Zea mays
  misc_feature: Incyte ID No: 700343957H1
  unsure 132, 212, 225, 270: a, t, c, g, or other
atttctcaaaactcttaataaaccccagtccaaaaccctaggctccacaaccagccgccgtccaccccctcctagagggaaccacattccacggctctaaggccatgtcgccggcgtccctcgcagctctgntcctacgccgcgccgcttccacctcttcctctcctctctccgctcttgtccgccgcggtctctgttcctcggcgcccgtncccctcctccgcngtctccctgcggccacctcatcgacggcggggaccaccgcccgcngcttcctggcgtcgcagtccccgg

SEQ ID NO: 1215 - DNA, 298 bp, Zea mays
  misc_feature: Incyte ID No: 700343958H1
  unsure 25: a, t, c, g, or other
gtcagaattgatcgccaaaatcccncaatttttgggtaacaacatttgtcaaccatccacaagtgtctgcactgcgtggggaggaagatgaagaggcactgcattatttgaccagagttgaagtgacagaatttgaagatattaaatcaggttacagaatagatttttattttgatgaaaatccttactttgaaaataaagttctctccaaagaatttcatctgaatgagagtggtgatccatcttcgaagtccaccgaaatcaaatggaaatctggaaaggatttgacgaaacgttc

SEQ ID NO: 1216 - DNA, 295 bp, Zea mays
  misc_feature: Incyte ID No: 700343960H1
atgagagtgggaaacgcatggggatcgttgagcttccctctcacaagttcttcatcggtgcacagttccatcctgaattcaagtcgagaccagggaagccatctccgcttttcttagggctgatagccgcggcgtctgggcagctagaaccattgctccaacgcagcaacccgacaacgaaagcatgttcgatcagtaaagtcccgaaactgaaactgtaccccactgggcctgtgaataatccactgaacagcttggtaaacgggtacttcccaaatggcactgggatccacac

SEQ ID NO: 1217 - DNA, 298 bp, Zea mays
  misc_feature: Incyte ID No: 700343961H1
  unsure 2: a, t, c, g, or other
cngctccctcggtccctccctcggtccctcccggtctcgcagttcctccccgtcgtcttccaccgcaaatcgccgaagcaagcaggcgagctcgggaccagatccactgcgggcagctggagcggaagggccatggggacgccgccgcctttccaggagtccggccactgcgacgtctgccgctgcaccttcaacaccttccgccgccgtcatcactgccgcagctgcggacggacgctctgtcacgagcattcttcgtactacatggctctcccgcagtatgggatatatacagacg

SEQ ID NO: 1218 - DNA, 297 bp, Zea mays
  misc_feature: Incyte ID No: 700343963H1
  unsure 81, 85, 225, 251, 293: a, t, c, g, or other
gctgcggcggcgtgcctggcagtgaagcggtagcaggtagagccagccagtctagcttagccaccacactagtgtgatggngacnaccggcggcggcaaggcggcactggtgctggggcggcttctgcttctgctgtgcgtgctcggccatggagctgcgcagggtacaacgccatctggagcttcggcgactccatctccgacaccggcaacctctgcgtgggnggcgggtgcccttcctggctcaccanggggcagccgccctacggggagaccttcttcggccgccccancgga

SEQ ID NO: 1219 - DNA, 300 bp, Zea mays
  misc_feature: Incyte ID No: 700343964H1
gttgcacatccatgtgagttggcagaggtgtttgatgtgatgtgggcatttgtgttttatgtaatagatagtatcatcctcgctcgttgtgccgccttcgtccacacaagcgacggagctaaggttacgagaaccggcccagtggcaccatgttggtctaccaggatctgctatctgacgacgacctccagtaggactccctcccctacaggcaactcaggaacggcgtcacagacgtcgaggacaagtgcactatcaaatacgcgatctttgccgagtgcatataatcttgccgagagc

SEQ ID NO: 1220 - DNA, 298 bp, Zea mays
  misc_feature: Incyte ID No: 700343965H1
cggcaggataagcacttcttacaggggacaaattaaatggttggatcgattactagcactcactgaaagcaactgttgttggatataatccattacttgtttgcaatgggaaagaaacaagaaagctcgatgtgccatttcaacatatttttgcaaaatatgaagtgaatgcatacataagcatgggtgggtcttgtggttacttccaccgagacaactcgatactgtacattggacaccccagtagccctggtggtgcccaaacaagtgtagatggttttttcttgcacagagttag

SEQ ID NO: 1221 - DNA, 297 bp, Zea mays
  misc_feature: Incyte ID No: 700343966H1
  unsure 82: a, t, c, g, or other
gcttcgtggacgtgctggggctggaagaggagtctctgggctcggtgccagcgcctgcctgcgcgctgctgctgcttgtttncccctcacggcccagcatgagaacttcaggaaaaagcagattgaagagctgaagggacaagaagttagtcctaaagtgtacttcatgaagcagaccattgggaattcctgtggcacaatcggacttattcacgcagtggccaataatcaagacaaactgggatttgaggatggatcagttctgaaacagtttctttctgaaacagagaaaatgtc

SEQ ID NO: 1222 - DNA, 292 bp, Zea mays
  misc_feature: Incyte ID No: 700343967H1
  unsure 151: a, t, c, g, or other
atggccagcaatggcatggcgtcctcaccctcgcccttcttccctccaaacttcctcctccaaatgcagcagacgcctccgatcatgacccccaagaacaccaccaccttcatgctcctccccttcatcttcaccacaaccccttcctccnctcctctcaatgcccctccctgcaagacttccgaggtatggcggcgccaatgctgcggaaggcccgacgatgtacggcggcgcggacgacgtcggcgtcggaggcgaggaggcgaactgcggcgcgacgaacgaggacgag

SEQ ID NO: 1223 - DNA, 289 bp, Zea mays
  misc_feature: Incyte ID No: 700343968H1
tttactgtctactacaagcctaggacaagtccagctgagtttgttgttccctgtgatcgctatatggaatcactgaaacgaaattaccctatagggatgagatttaaaatgaggtttgaaggtgaagaggctccagaacaaaggttcactgggaccattgttggaaatgtggatcctgatcaagctggatgggctgaatctaaatggcgttacctcaaggtgaggtgggatgaagcttcctccattccacgtcctgaaagggtttctccctggcaaatagaacctgcag

SEQ ID NO: 1224 - DNA, 293 bp, Zea mays
  misc_feature: Incyte ID No: 700343969H1
  unsure 30, 87, 109, 128-129, 141, 167: a, t, c, g, or other
cacagcgaaaactaaaaacattcctccgcntcggctccaggctgcgaagtctcccaccaacgcgcgccgatccggaccgaaggcctncctgctctccgtctccctcgcngcctcgccccgtggatctnngctccggccgangggcgcgatggcggagcgggagcggngagcagcgcccgctgctagaggtagagcaatccgtcacgtccataccggaagatcatgaagccacatgttggggctgtgggctccggcttgtttttgcgggttactcgcctatctataagtgtggc

SEQ ID NO: 1225 - DNA, 174 bp, Zea mays
  misc_feature: Incyte ID No: 700343971H1
  unsure 110: a, t, c, g, or other
tggagccagaatccacagatgtcattatccatctgcacactttgtttactacccagaaggcaagaatattgcattttaaaagtgcccggacttttgttctttcttatcanaaatgacttgggaagctccgaccactcatgtttaccccgagtgaaagtcccattcaaagccttg

SEQ ID NO: 1226 - DNA, 290 bp, Zea mays
  misc_feature: Incyte ID No: 700343972H1
  unsure 55, 84, 112-134, 232-233: a, t, c, g, or other
agctggagtgctggactgcagctgccagcggcatttgcgtgcagcactgcctgcncctgctgtgccgcccagtccaatggaganggccgcgtcggtcatctcctcgctcctnnnnnnnnnnnnnnnnnnnnnnncacaggcggcaacggtgaagtccgtcctcgtgtaccccatcaagtcctgcaggggaatctccgtgccccaagcccccatcaccgccacggggttcagnngggatcgccagtggatgctcgtcaactccaaagggagagcatgcacccagagggtgg

SEQ ID NO: 1227 - DNA, 295 bp, Zea mays
  misc_feature: Incyte ID No: 700343975H1
  unsure 40, 46, 69: a, t, c, g, or other
cgcacgccacgtcccacccctgtcatggccacctccagcnacggcngcggcgaccagcggcgcctcctnctccatccccaaggaaggcgagcgcatcatcgcgcccacgcgccgccccgacggcacgctccgcaaggccatccgcatccgcgccggttacgtgccccaggaggaggtcgccatctaccagtccaagggcgccctaatgaggaagtcagggcccgacgtgccgccggggtacgacccggcgctagtggccgacgccaaacccaagacgaaggcggccaaacggaag

SEQ ID NO: 1228 - DNA, 291 bp, Zea mays
  misc_feature: Incyte ID No: 700343976H1
accgtctcccgaccgcgacgccggcgacctccgcaccgcatcgctccagccgatcgttccgagatttgttgatcaaagaaccatggaaggatcgttccagttgaatcccaacgccagtcctttcatacctggattgctgggttcatctgcacaaaaagccccagaaaaacaaggagggtcatcatcaaagggagagccttctggtagcacctttgatccttctgagtatgaggaaaatgacatggatgaacttgctctagtcaaaatggtcttttcaatgttcccaaatgt

SEQ ID NO: 1229 - DNA, 292 bp, Zea mays
  misc_feature: Incyte ID No: 700343977H1
  unsure 52, 62, 68, 83, 90, 145: a, t, c, g, or other
cttgcaggtcagcattgtcggttacaagaagggacagctcaagatgctttcncatgcatatnaccgtnctcttggtgggaggnacttcgntgaggccctcttcaagcacttcgcggcgaagttcaaagaagaatataagattgangtttaccagaatgcccgtgcatgccttaggttgcgtacggcgtgtgagaagcttaagaagatgctgagcgccaacccagaggccccactgaacattgagtgcttgatggatgagaaagatgtgagagggtttattaagagagaggag

SEQ ID NO: 1230 - DNA, 287 bp, Zea mays
  misc_feature: Incyte ID No: 700343982H1
  unsure 78: a, t, c, g, or other
atggaggcttgccccagatggggaccaaaagctgcttccctggagacgggcggggaggccaaacttcctgctgaaagntctgtggcctcttttggggtgggggcgggggtccaggcagaaagaaaccgtctgctgctcaagacccacaggacgccgggaagactaaatgatcactgcccccagtgaatatggtgaagaagctggtgatggcccagaagcggggagagacacgagccctttgcctgggtgtaaccatggtggtgtgtgccgtcatcacctactacatc

SEQ ID NO: 1231 - DNA, 282 bp, Zea mays
  misc_feature: Incyte ID No: 700343983H1
tccaacctgccgccggaatccatgggccgtaaggtcagggtgttcatgtaccccagcagcatctaaagataatctgaatgtgtggaggacccttttcttctagattttatcttcagctgtccttgtaagggttgtgttcaggttgagagttagcaggttgagctgtctatctgagaaccatttaaagttctctgagttttggtgttatggatcactggaagtattatatgaagtttaagttagaactaatttgtttgccatacttttgtatgatgactctta

SEQ ID NO: 1232 - DNA, 282 bp, Zea mays
  misc_feature: Incyte ID No: 700343985H1
  unsure 17, 51, 166: a, t, c, g, or other
acgaaaccacccaagangcgtgcttccattcctagcccaacagaagcgaanacgccaccgaccaccggcctcgaagggatcatcttctctacaactcgtcctcgtggccttgttcctcctcttgtataggggactgcggcggagtggagatccgtgccgacatagnccgacttcttcgctcgctgcctacgattgatggcctcaccttcaccaaccgaagagttcagcagggaagcagctcgtcagtctctgatcgcgatctccgagtccactccggagaca

SEQ ID NO: 1233 - DNA, 227 bp, Zea mays
  misc_feature: Incyte ID No: 700343986H1
  unsure 32: a, t, c, g, or other
atctatgcaagaacctgagaccacaacggatngcaagccatgatcatattcagtacccaattcaatatgcatgtgattaatctgtagaaagtagcgcaaaagaccatgaaataagttgtctgaccaaagaacgtatttgcattatgtattgtgccagtgcagcgggtgtattaaaaaaatgtgcattttaatagactggtttcagtggattgtacgcagttctattt

SEQ ID NO: 1234 - DNA, 283 bp, Zea mays
  misc_feature: Incyte ID No: 700343987H1
aagataagagtttcttcctcacaggctaaaaacaggctatttatcgggaacataccctataactggacagagaatgaatttaaaaaagcagcagaggaagttggccctggagttttaaaagttaatctcgtgaaggcaccacattcagatacgaacaagggttatggatttattgaatactacaaccaggcttgcgcagagtatgctaagaagatgatgtctaccccagaattcaaactagataaaaatgcccctaatgtcagttgggcagatactaagaatg

SEQ ID NO: 1235 - DNA, 196 bp, Zea mays
  misc_feature: Incyte ID No: 700343988H1
gcgaaagaaggggaaccaaatcttggacgggaacacatagatttctttggtggaggaaggaggagggcaacaagaggaggttacaggtagcccaatagatctactgctgttgagggagttgatgcaaagctgagttgctgcgcgttggctttctttagagatggcttcagctggtgttgccccttctgggtacaag

SEQ ID NO: 1236 - DNA, 83 bp, Zea mays
  misc_feature: Incyte ID No: 700343990H1
  unsure 8, 10, 31, 79, 81: a, t, c, g, or other
attgcgcncnactccaagatctgaacatggnctcgtgtttgcatatgccagtatgccaccgtgtcgagtaatcactcanantt

SEQ ID NO: 1237 - DNA, 285 bp, Zea mays
  misc_feature: Incyte ID No: 700343991H1
  unsure 8, 179-216: a, t, c, g, or other
tgcttgtntgctctagggtttttgccacgccgccgccgctctgccccttccaccccaccgatataccaagatgacggcgcaggctgcggaggagctcgccgcccagatcgagcagcagaagctcgaggagcagaagaccgaggcagaagaggttgtggtggaggaggatgacgaggatnnnnnnnnnnnnnnnnnnnnnnnnnnnnnnnnnnnnnnactggatggacaagaaggggatgggagtggcaagtcgaagcaaagcaggagtgagaagaagagccgcaa

SEQ ID NO: 1238 - DNA, 282 bp, Zea mays
  misc_feature: Incyte ID No: 700343993H1
  unsure 8-9, 11, 13, 22, 38, 54, 130, 139: a, t, c, g, or other
atatttgnnananaattcagantagtagtcatttaganacttcattccatggcnaatatctccagtctatttttatcaagcaaatggcaacggattaggactgaagatatttgccatggaatgaagtctnccaaatgantaccactctgaattgtttggttgtacacctgtggtcggttccctttacctttgggcacctttgactaatcagtatatgtggtagaacttgcagttaacctaatatatttgtcacttcatgtagaagagcttctcaactgttca

SEQ ID NO: 1239 - DNA, 282 bp, Zea mays
  misc_feature: Incyte ID No: 700343994H1
  unsure 179, 217: a, t, c, g, or other
agcatccggactctctcgctcgagggtagggcagggcagggcagggcaggcggcgatccgaatccaatcgccggagggaggaagccaccggtggccgcagtgagggcggcggaggtagaggcaaagggatgacgcgcgggaagcagaagatcgacgcgcagggcgtaacgcggagcacnaccagaaatccaaggggtctcagcttcgaggcccgcgncgtcggcctcaagatctctgtccattgcaagtacaattggcaaattgaaaacagtgaccgatcat

SEQ ID NO: 1240 - DNA, 293 bp, Zea mays
  misc_feature: Incyte ID No: 700343995H1
  unsure 5: a, t, c, g, or other
tcttngttgctggtcccaacatggatgaggctccacctgtttggatcgacagagttggatttaaagccaacataacagagagcttcacacgtcaaagcaaattcacatatggccttgtggttgaagagattacaacacgtgatgaaactaatactgtctgtacccatggttctcgagcaatgcctagcggcggtctgaacatggatggacctcccacaaccctcagtggtactggggttgaccgaatggcatttcttcaggctaatataacccgtgacaatactgagtttgtg

SEQ ID NO: 1241 - DNA, 252 bp, Zea mays
  misc_feature: Incyte ID No: 700344002H1
ctgcctcagctgcattacacagtgattttttttcaaccgagccttatgcttgtaacccttcaagtctgccaacatatccaccaagcaaggagatggatgccaagttaagagacgaggaggctagaagactacgagcggctgcaaaggccaagggagaacagaaaaggactcgaccacgtgatcgatctcggagggctggaccagcaccagaagctaatgcagagattcaagcaaacttagacaggcgacgat

SEQ ID NO: 1242 - DNA, 300 bp, Zea mays
  misc_feature: Incyte ID No: 700344003H1
  unsure 293: a, t, c, g, or other
agcaaccttggctggtcacctgtgtatgttgagtccaaccttggtgtgatgtcgattggtttcatgctgcctaatccagacgatgctgtcatatggaggggtccccgcaagaatggactgatcaagcagttcttaaaggatgtcgattggggggagattgactatcttgttgtggacgctcctccaggaacatctgatgagcacatctcgatcgtgcaataccttcaagccacaggaatcgatggcgcgataatcgtcacgactccgcagcaggtctctctgattgacgtgangaaggat

SEQ ID NO: 1243 - DNA, 246 bp, Zea mays
  misc_feature: Incyte ID No: 700344006H1
  unsure 5, 14, 21, 50, 59, 95: a, t, c, g, or other
tcganccgactgcngcaagangccgccgccgggctacacctgacaccgtntgatctggnccagctggcagcccccggcccatgcgtccatttatncgtgaacatgggttttggagtgagctagcatccagttcatcggtcgtttgaagagagatcgacatgagaggatgtcgtctgcttcgtcgttccaagctgaagaaggcacgccggaggaggaagagagtaacaacggccgggtcgatcagtt

SEQ ID NO: 1244 - DNA, 247 bp, Zea mays
  misc_feature: Incyte ID No: 700344007H1
  unsure 47, 186, 220, 222: a, t, c, g, or other
ctgttcattccttaagggccctgcttcccttaataagtaagtaagtnggtctacggccctaaatatgcaaatgagagctgaaggtttttaaaaggtagaaaggaaaagggcaagggcttccacccctgctttaaaatgatttatttattctctgcttgtatttcttgtggagagagtaaggatagnaccaacaaggggctgagtagctgagaaaggggcnanccaagagtgaaacatactttatacc

SEQ ID NO: 1245 - DNA, 298 bp, Zea mays
  misc_feature: Incyte ID No: 700344008H1
  unsure 266, 271: a, t, c, g, or other
ccgtgcggcactattctgtatccagttcttgagaagctttaggtacccgtaccccaatttcccatttttcgctaatgcatagagctctccgtcaaacttgcaaacaccactagcagcctccagaacagaacattttcaccaccagcataactactcccctcccccattgagcatgagcataataacgggataaaactgtctggtggaagagccccccaaattccccacctcccctgtcaatttcgccttttcaccgttcatatacnaaccnattcaattcaatatctttgttcatgtc

SEQ ID NO: 1246 - DNA, 297 bp, Zea mays
  misc_feature: Incyte ID No: 700344009H1
agcaagcagatcgaggtaggactgaaagagtgtttgcagtgggggatcgggtgttcctcaaattacagccctactgtcagtcttctatcactgaacgggtcaaccagaagttgtcattcaggttcttcggtccatacactatcatacggcaaattaatccagttgcttatgaactgcagttaccagccggcagttcagttcatcccatattccatgtctcgcagctgaaagccgtggtcggtccacataccccggtgagcccctctctgcctgactcagttcataatctgcagatac

SEQ ID NO: 1247 - DNA, 268 bp, Zea mays
  misc_feature: Incyte ID No: 700344011H1
gttgctggagactcaaccagattcaattgaaagtgaagctttaacatgtccggccgaggagcttgatttgcttcagcaagaaggtagcaaagaaagaatgttcttcttccagttcccaaactctcttcctttacccaaaaggtcgtccagtgccggcaaggaggtgatggaaggatccaacctgcagcagctgcctcagggttatttgggcaaaatgctagtatacaagagcggcaagatcaaaatgaagttaggagacatcatcttg

SEQ ID NO: 1248 - DNA, 244 bp, Zea mays
  misc_feature: Incyte ID No: 700344012H1
  unsure 2, 17, 30, 50, 128, 238: a, t, c, g, or other
gnctctttctccctctngtggcgctgggcnaccgcctacgcaggccaggngccgtcgccctaagctacgccaggttcccgggtcttggtcggtcccttcaccggcgaagagcacccaccagacgcgcnggtgcctggatccggaggaagtgctgcgggtttcggcggttcgtctctctcgttgtttccggcggggttatgaaggcggtgggatacaacctctacgatagcagcgggangatgag

SEQ ID NO: 1249 - DNA, 155 bp, Zea mays
  misc_feature: Incyte ID No: 700344013H1
agaagaacacagggcacacgcactacacgcacggcacgcagatacatatagagagaggttagctatagcttgcacatctatttaactaactaactaactggctagctagctcgatccgcagagcaaagcgaaagcagcaagaagcaaagcaatgg

SEQ ID NO: 1250 - DNA, 198 bp, Zea mays
  misc_feature: Incyte ID No: 700344015H1
  unsure 50-51, 157: a, t, c, g, or other
tatataatgcgtgctacttgataatctaacacctagtaaaagttaatgcnncgtgctgcttgcctgcgtgtatactggagactggtttgatctggcgcgtttgctgctcttgttgtgttgtaccactatggatgtttgtagcaaagtgacatacganggtgttgtaatggactgaagatgaatagatgatgttccagt

SEQ ID NO: 1251 - DNA, 135 bp, Zea mays
  misc_feature: Incyte ID No: 700344016H1
gctttctgaaaacagtttattttatttgataaagcttatcatgagtggagatattgactctacattcaaaagacttcgggagtggtatccgcaagtgataaaggatgagcaatcggttatttgcttcctacttcg

SEQ ID NO: 1252 - DNA, 175 bp, Zea mays
  misc_feature: Incyte ID No: 700344017H1
  unsure 30, 58, 72, 94, 97, 174: a, t, c, g, or other
tcggactcggacgacgagcgctcgtcggcnacggccgccgtgaaggccaagatctacngcatcttcgggcgngagaagcccgtgcactccgtcntangcggcggcaagccggccgatctgttcctatggaggaacaagaggatctcttgtggggtgctcgcaggcgcaactgcnt

SEQ ID NO: 1253 - DNA, 175 bp, Zea mays
  misc_feature: Incyte ID No: 700344018H1
  unsure 13, 53, 90, 92, 96, 98, 102, 114, 129, 131, 134, 143, 146: a, t, c, g, or other
ccggccaaaggcnaaggccaaggccaaggccaaggatcaaaccaaggcccagnctgcagccccagcttcagttccagctcaggctcccanangtancnaggnccctacaaaggnttcagagtagatatntntgncaacatganganagaaggactggtgcgaccccccacccccg

SEQ ID NO: 1254 - DNA, 296 bp, Zea mays
  misc_feature: Incyte ID No: 700344019H1
  unsure 238, 294: a, t, c, g, or other
gatggaagaaatgttgtggttcaaaatctacatcaaatttgtgtattcaagattgctaatgaaactggaaagccatggctgtggtgggattatgtgcatgatttcgcacttaggtgcccaatgaaggataagaaatacaatcatgactgtgccagcgatgttatcaagtcacttggattggacatcgagaaaataaacaagtgtgttggcgaccctgaagccaatgaggaaaacgtanttttaaaggcagaacaagatgcccaaattggtcatggtaaaaggggagatgtcacnac

SEQ ID NO: 1255 - DNA, 292 bp, Zea mays
  misc_feature: Incyte ID No: 700344022H1
tgggagtgcagagaatctggatttgcatgtacaaacaagggaacatcagcaatgtgcaatggacattgtcctgaaaatgaagcaagatgttgcaaaaaggcaaaaactgaattatggagggcccaagtcattcaacaacaaaaaggtttctgggaagggccattttcgtgggaacaggcgctagtgttaactgattaaaattgatgtggttttgaaggttgctactggtgcttatggatgtgtcaatggcaatcgagaattgagatcttttcagacattctgttcatgcggt

SEQ ID NO: 1256 - DNA, 293 bp, Zea mays
  misc_feature: Incyte ID No: 700344023H1
  unsure 42, 292: a, t, c, g, or other
agcagttcgcgcagtacacttgcccccgctgtaacgcccggnactgctcgctctcgtgctacaaggcttgcagcaggtaggatatggtaatgttgcactggtgtcaatagtcttccctgacgacatcttggcaccccctggctctgataccacttgtcaggaaccacgccggagagacaaccttcagcaggttgccgacaaactcctacctcccagggtcatagtgttcaatgcactgaatccttcatgcgtgagaatgttatgaacgagttaagcagatgcaacctgaggnt

SEQ ID NO: 1257 - DNA, 293 bp, Zea mays
  misc_feature: Incyte ID No: 700344024H1
  unsure 107: a, t, c, g, or other
gaaaatgtgccaaacccgtcgcttcgtcttcctctccttccggcttccggccccgctcctccccaaaatcccccaaaacctgacgagctggagggccgatccgcggntccccgccgcctgatccgagcagtctactcggcccagccggggatccaagcgggatggggtacttgagctccgtgatcggccaccccaccgatggatcctccgtcagcggcggcggcctcagccagaatggtagatttagctatggctatgcaagctcccctggtaaaagggcatccatcgaagct

SEQ ID NO: 1258 - DNA, 290 bp, Zea mays
  misc_feature: Incyte ID No: 700344025H1
  unsure 136: a, t, c, g, or other
gtttgccatcaggtttggttcggtagaaaactgcaagaagttcaaggagttggttgaggagatagctgagtcgcttacaaagaacgagggcaaggaaggtgaagatggtggttccacggctggattgctggcgaantcactgtgagcgagggcaaatctgagggaagtggcaagtctgagtccactgattctggcaaagtgactgaaaccaaagccgacacagccccagctgagtagttggtgtggttgcacttgcacgcagattcgcctggtgctgaactagtttgtct

SEQ ID NO: 1259 - DNA, 272 bp, Zea mays
  misc_feature: Incyte ID No: 700344027H1
  unsure 3, 26, 43, 62, 244: a, t, c, g, or other
ganagggacttatcgatgagttaccncattcctgagaggacangaccgaaaggcgctagagnttgttccatcatggcggtttgccaacggaatgtttgcaattgtgttgtcgtttggccttttactcactgccctgaggagcaggaaggcacggtcatggcgctatggagcaggttggctgcgtggcttcatcgctgactatggtgttccactgatggtgctagtttggactggagtgtcttanataccatatggaaatgtaccaaaagcat

SEQ ID NO: 1260 - DNA, 115 bp, Zea mays
  misc_feature: Incyte ID No: 700344028H1
  unsure 10, 32, 36: a, t, c, g, or other
ggcatttgcntgaacttggtggacatgatgcngatngggatgatgaagagccgtgaaaggcatggtgctcgggctgtcaggaggctagctcagtcctaataatagggttcctgcc

SEQ ID NO: 1261 - DNA, 172 bp, Zea mays
  misc_feature: Incyte ID No: 700344029H1
  unsure 47, 155, 164: a, t, c, g, or other
agcttgggttggctgagtttcccgaagatagccgattcactaatgtngaatcagctcttgttgcattaggttgcaaggagtgtcttctcccagcagattgtgaaaaatccattgacctaaatccccttcaagacgtcattagtaactgtaatgtnctgttgacngagaaaag

SEQ ID NO: 1262 - DNA, 297 bp, Zea mays
  misc_feature: Incyte ID No: 700344030H1
  unsure 288: a, t, c, g, or other
acaaaccataagacagagttccttccgacctgcatgcctcctttgcctgagtctgttgatgcagagagcatgctctcccaaagctgtgtgctgcgagtcgcatcattctttggcgctgccagtcagttctcatttgctgaggttaccacatggcctgatgttgactctgaggaggctgttgtcaccagttcatctggcagtgccaacaaaggtgtgcctgagacagccagagattcagacatttcaaactcatcatcatctttttgatgcgaccatggcgctaccttngtccgtttg

SEQ ID NO: 1263 - DNA, 128 bp, Zea mays
  misc_feature: Incyte ID No: 700344031H1
gggaggcgccgacgccgagtttttgctccatcccgcatccaccgccagaatgtttctcacgaggacggagtacgaccgcggggtgaacaccttctcgccggaggggcggctgttccaggtcgagtacg

SEQ ID NO: 1264 - DNA, 131 bp, Zea mays
  misc_feature: Incyte ID No: 700344032H1
  unsure 82: a, t, c, g, or other
ctcctaaacttgcctcctggagctacggttacagttcttaagaacttgagaatatgtgatgattgtcatgctgcaataatgntcatgtcaaaggctgtcgcaagagagattgttgttagagatgttagacg

SEQ ID NO: 1265 - DNA, 289 bp, Zea mays
  misc_feature: Incyte ID No: 700344033H1
  unsure 266-267: a, t, c, g, or other
acgaattgggatcgaaaaacatctccgttccccaccaccaccttcgctccttctgcttcgcccgtccccctccgtcgcgtcgactcccaagatggataagctcagtggttctgcacgtcttatgattgtttcagatcttgaccatacaatggttgatcatcatgacgaggagaacctgtccttgcttaggtttggtgccctgtgggaatctgtttactgtgaggattctctactagtcttctcgactggaagatcaccactcttannaggaattaaggaaagagaccct

SEQ ID NO: 1266 - DNA, 283 bp, Zea mays
  misc_feature: Incyte ID No: 700344038H1
  unsure 276: a, t, c, g, or other
ctgaaattgctcacaacgtgtccaccaagaagcgcaaggagatcgtggagcgtgctgcacagctcgacattgtggtcaccaacaagcttgctaggctccgcagccaggaggacgagtagtctggtttcttgtcttaacgacgaactggatgttgccattcctttctgtagggaactactttgcttgtgtcttgttagtactgaaaggaatggcaacattggttatggttctgacaagtcgaccaggcatacctccccagcaagttcaagaagtttngggccca

SEQ ID NO: 1267 - DNA, 283 bp, Zea mays
  misc_feature: Incyte ID No: 700344039H1
  unsure 28, 37, 189, 281: a, t, c, g, or other
cttcgtttaaacccaaaccctaattgcnacctccgtncccccaaaaccctacggccatggacggcggaggcggtggtgtagggggaggcggagttggggcaggtgtcatggtgggcggcggagtcgggccgggcggcggcgttggcggcgacgtggagctcgtcagcaagacgctgcagttcgagcacnagctgttctacttcgatctgaaggagaacccgcgggggaggtacctcaagatctccgagaagacctcggccacgcgctccaccatcatcgtncc

SEQ ID NO: 1268 - DNA, 282 bp, Zea mays
  misc_feature: Incyte ID No: 700344040H1
  unsure 117, 139, 268, 279: a, t, c, g, or other
tggcagccatcaggtgagccaagatgggtgcatacaaatacatccaggagctgtggaggaagaagcagtccgacgtgatgcgcttccttctaagggtccgctgctggcagtaccgcnagctctctgcgctgcacagggntccccgccccacccggcctgataaggcgcgaaggctgggatacaaggctaagcaaggttatgtcatttacaggatccgtgtccgccgcggtggtcgaagcgcccagttcctaagggtgcaacctacggnaagcctgtccncca

SEQ ID NO: 1269 - DNA, 283 bp, Zea mays
  misc_feature: Incyte ID No: 700344041H1
gggtgctacaaccacaattgccgcggattcgtgcagacgacgaacaagattgcaattggggcggctatcaccccggagtcggtgtacaatggcaggcagttcgacatcactctcatgctatggaaggacccaaagcacgggcactggtggctggagctgggcccgggcctcgtagtcgggtactggccgtcgcacctcttcagccacctggctcgccacgccaacatggtgcagttcggcggcgaggtcgtcaacacccggccgtcggggtcgcataccgcga

SEQ ID NO: 1270 - DNA, 283 bp, Zea mays
  misc_feature: Incyte ID No: 700344043H1
  unsure 249, 268, 273-274, 276-277: a, t, c, g, or other
gcttgtagtgccccctccccctcccttgaatatatataagaaagtattttagttcaagatgatttttattcctgggatacatgtaaaacaatgtttagctcatacacttttccaaggggagttgacgatgaccagtcctgttctgtattaaatatatttgatgtcaactactcatcttagaatgttgtgaactgtgatgcacttgcaagatagtcccagtactcagccctcccgtatgaggctctaggngtaacccggtctatattcnccccnntnntaaaaa

SEQ ID NO: 1271 - DNA, 200 bp, Zea mays
  misc_feature: Incyte ID No: 700344044H1
  unsure 3, 37, 42, 86-87, 91, 93, 97, 105, 120, 123, 166, 168: a, t, c, g, or other
gcnaacgcggagagcacgccatgaaggcctcgggcangctangagagtacaaggtagtgggtcgctgcctgcccacccccaaatgnnacangncgcncctctacngcatgcgaatctttncgnctaatcatgtcgtcgccaagtcccgcttctggtactttgtatntnagttaaagaagatgaagaagtcttcagggggg

SEQ ID NO: 1272 - DNA, 211 bp, Zea mays
  misc_feature: Incyte ID No: 700344045H1
agtcaactaaggtgtatgagaaatgggctaaaaagatctcagggatggagccaccaacaaatccgctagagaggagagtgaagaagaggaagaacagtgaggagaatgatctgatactggctatctcacagcgcagggctgagcggaaaaaacagttcaactccatcctctcgaacatcatgtccaagtgtgactccaaggcgagcactcg

SEQ ID NO: 1273 - DNA, 81 bp, Zea mays
  misc_feature: Incyte ID No: 700344048H1
  unsure 34, 37, 43-44, 47, 49, 52, 65-66: a, t, c, g, or other
caaaaggtacttgaagaaatattaccctagggtnccnttttgnngcncnctnatcttcatatcanncattgtcaccaactg

SEQ ID NO: 1274 - DNA, 180 bp, Zea mays
  misc_feature: Incyte ID No: 700344049H1
  unsure 20, 42, 66, 101: a, t, c, g, or other
ttcgcgacaccccgtgcagncgtgctcttccgcttgaactanggcgcctccgcctccgcgcccgcnccgccgccggctgtagccatgtccgacgaatacgnggacttgcccgtctcggacgaggatgaagaagagctcgaagatgagatggatgatggtgatgtggagagtggtggtgga

SEQ ID NO: 1275 - DNA, 240 bp, Zea mays
  misc_feature: Incyte ID No: 700344050H1
gccagcaacccatccatactttcagctgttgagacaaaaagagaagagagaatggcggagcaaaacccagagttgagtgatcttattactcaaacaaagaagaaaaatatagtgccaaagttcaccgaaaccttccccgttgaggacacggcctacccttacagcgccttcatcacctccgtccggaaagacgtgatcaaatactgcaccaaccatacaggcatcgtccagcccgtgctg

SEQ ID NO: 1276 - DNA, 227 bp, Zea mays
  misc_feature: Incyte ID No: 700344051H1
  unsure 45, 64: a, t, c, g, or other
cttctggagccggaactgcagcttgagaagcagaaaaacgagatnaaaaggaaggaagcttggngtgtttatggtgccttgctgtgtgctgcaggcaaatgcttgtatgatcggttgaaactatttcctggtttgctttctccgtcgatgcggcctcttttacagagcaacaaaagggtcttaaccaacaacccaaataagcgaaaatctagcacagatctctctgc

SEQ ID NO: 1277 - DNA, 304 bp, Zea mays
  misc_feature: Incyte ID No: 700344052H1
  unsure 262, 287: a, t, c, g, or other
gtacaatgttggaaatagtaaaccagcttgatgggtttgatgcaagagggaacatcaaagttctcatggccactaataggcctgatacattggatcctgcacttctgcgtcctggtcgtctggacagaaaggtagaattcgggctacctgacctggagggccgtacccaaatctttaagatccatacacgcaccatgaactgcgagcgagatattcgtttcgagcttctggcacggctctgccccaactctactggagcggntataaggagcgtctgcacagaagcngggatgtatgccattcg

SEQ ID NO: 1278 - DNA, 206 bp, Zea mays
  misc_feature: Incyte ID No: 700344055H1
  unsure 2-3, 15, 17, 28, 32-33, 38, 40, 59, 67, 87, 94, 99, 106, 108, 114, 120,: a, t, c, g, or other
annccgtaacgcccngntcctacaagcnctcnnctctncnctcattcctgaccccgcantgggcgcnattgcagaagctatactganggtcgcncgtcngcatctnanccatcncagcgngtctggancccccatcctcctgcngcagatgttcgaacctatnanctgcaccttcacgtacctnctgggtgacagatagtcccgna

SEQ ID NO: 1279 - DNA, 309 bp, Zea mays
  misc_feature: Incyte ID No: 700344059H1
  unsure 101: a, t, c, g, or other
ccgcagtgtaggtctagatcatccaatccaacacaccggtcgagcaatggcggcagggctgcaggtgttcggacagccggcgtccaccgacgtcgcgaggntgctgacctgcctcttcgagaagaacctcgagttcgagctcatccgcaccgacaccttcaagaagtcccacaagctccccgagttcatcaagctaagggatcctactgggcaggtgactttcaagcacggtgacaaaacaatcgttgattccagggccatttgccggtacctgtgcacgcagttcccggacgacgggtacaagaagtg

SEQ ID NO: 1280 - DNA, 309 bp, Zea mays
  misc_feature: Incyte ID No: 700344060H1
caagagcgcctaattccgcacctcttgtgaaaactccacttcactcaaaacatctagcactaatgtgaaggccattttttgagcctgctggactggaccccgttgtgttcttccgatgatcaatcagtcaatcacaaattcaaaccatacaaatcaacagctcaatatccagcgtgcttttggaagtctgttcaaggggtggagtgaggagaagatatattttgctcccacatacaagtactcttgcaattcagattcttatgctggagagactgccacatcaaagaaaaagaggagaacccagcctgg

SEQ ID NO: 1281 - DNA, 212 bp, Zea mays
  misc_feature: Incyte ID No: 700344061H1
  unsure 45, 185, 190, 192-193, 195, 197, 211: a, t, c, g, or other
cgtgcctcacctgatctagattagtagactgttagttctactgcngccttgctgttacatatttacagtgttcgcttctgtgggggttacaattgcttactcgcttactccgggtttggatgctaaatgggcttcaatgtacaaagccattatttcaattattgcactggtaccatataaactanaaaanannananatggaaggggtggng

SEQ ID NO: 1282 - DNA, 311 bp, Zea mays
  misc_feature: Incyte ID No: 700344062H1
aaccaatcaattaaaaggcaccctttggatgtaagcacaattcggttggctgcttccaattgatttggctacagatcaaatcctcttcaaaattgcatggtgtattttgcgttgctcaaagacaagaaatcattcaagatgcttacactgcccctatttattttctctgactggaacggggttggctaccatgacgacttagcaattggaatgccaaactctaggttcatcaatggttttgtaattttgaggtcaccagtgatttgttatacagaattgtgggtgaaaatgaaacatctctggcaagttcc

SEQ ID NO: 1283 - DNA, 120 bp, Zea mays
  misc_feature: Incyte ID No: 700344066H1
  unsure 13, 28-31, 37, 49, 54, 60, 80, 84, 94, 113: a, t, c, g, or other
atggatcatcacnggtacctcggggcgnnnngcatcnatgtggtatatncctantgattncgagggctggtgcttctgcnccantctcaggaancttttctgggttatccttnagccgct

SEQ ID NO: 1284 - DNA, 247 bp, Zea mays
  misc_feature: Incyte ID No: 700344067H1
  unsure 228: a, t, c, g, or other
caagacgaccaaggcggccataccgaggagaagacgatgagcgcccctacaagtacaacacaagcagccaacaaccagctgtccacaagaacgtcgattgagagggtcttctgggcaagctttgaagaccttcccaacgccctcaagtcatgcttcctctacttggctgctttccccaagggcaccttcctgtctaccggcagtatagtgcggttgtggatggccganggattcattagggccacag

SEQ ID NO: 1285 - DNA, 246 bp, Zea mays
  misc_feature: Incyte ID No: 700344068H1
  unsure 39: a, t, c, g, or other
cagttatttatcacattacaaatacgtgaaccaaacagnaccctaatcctatcgattccccttccttccctccctcgctcctggtaaccaacatggagtagaaggaagacaagtagaatcaacaagacagacaactcaaccttagcctatgcaccaacaggtggttgcggatcagccacttgacggaggggagctcggaactgctgcgtgtctgtctgggcggactggaactggaatttcagctca

SEQ ID NO: 1286 - DNA, 296 bp, Zea mays
  misc_feature: Incyte ID No: 700344069H1
cagtgacaaactcgaagcttgccttcttgtttacaccctaaaactaaaactagagtcgtcggcggcaacaagcggtacgtacgtagaggatgaagagcaggagcagcactctgttggtgatcctagttctccaggcccttctgctctctgcggctgtggccaaaggacctgcagggccgaagaagcagtgctggtgcggcgagtgcaccagctggtcgggcgtgtggacctgcgacgacctcctcaccagtgcgccgcaactgcaagaactgcgtcccgtgtcacgggcaaggggg

SEQ ID NO: 1287 - DNA, 300 bp, Zea mays
  misc_feature: Incyte ID No: 700344070H1
ctgggttagaagtgattcccttaaaacagttgaaaacacagctatacctgtgatcatgcttgtagcggatgtaccctgtgacacgaatatgtccaatgagtattcttcagtactagatggctcacaagactattcagttaacatgcttggagaacaagggagtcctcctcggtctgacacctctagttcagaaggcagcaacatgctgatgtgctcaaaattgaataaggatgattgtgatattgtgcagtcaattcgtcttgatataagttcaaatcgccatcccatacaggactgcag

SEQ ID NO: 1288 - DNA, 225 bp, Zea mays
  misc_feature: Incyte ID No: 700344071H1
  unsure 3, 10, 12, 45, 49, 108, 112, 118, 133, 157, 205, 212, 214, 219, 224: a, t, c, g, or other
cangtctctnanaaagtaatgaaccagccttctattgctataacngagngactggagaatgtatcagaaccttcagtggctgatgacagttcatccaaagctgtagcngagngaaagnatgcttatagagatnctgcagtatctaaaggacagccanattttggtttctcatctggggcgtccagcattatagtggcaaagttcnagaaatnanctggntttang

SEQ ID NO: 1289 - DNA, 298 bp, Zea mays
  misc_feature: Incyte ID No: 700344072H1
  unsure 67, 109, 231, 284: a, t, c, g, or other
gcctctacaggacaaatgattggtgctgtaaaatgcagcatttcacaccttactagcattctttgtnttttctaccaaatattaacaactttcaattccgttttcttanttctgttctactaatgtccgatttactactcatcatttttcttgacacttaacattgctttaatttgtaattgctaatggtttttgaactcttctaattgtaatggacgtggttatcatttnatttagcattgaaattgtcctgatgttgataaagatgtacgagcaaaaatccnattcgcactttttt

SEQ ID NO: 1290 - DNA, 304 bp, Zea mays
  misc_feature: Incyte ID No: 700344073H1
  unsure 285: a, t, c, g, or other
cagaactgtgcgtcaaacatggtgaacaacagagagagggagaagatttttgtagccagccaggagaaattccacgccggcgcagacaagcagtactggaaatcgatttcagatctcatcccacatgaaatagccaccatcgagaagcgggggaagaaagacaaggacaagaagccatccatcacagttgtccagggccccaagcctggcaagcccaccgacctgtcccggatgcgccatatcttggtgaagctgaagcatgctccgccgccacatatgtgcagncttccaccaccagcactgc

SEQ ID NO: 1291 - DNA, 300 bp, Zea mays
  misc_feature: Incyte ID No: 700344075H1
  unsure 19: a, t, c, g, or other
ttttaattcaaagaatganccgtccatgctaaccagtcagttctactggtcagcaaggcatacaagagctgactcctgcgctgctagcaccaacacagtcgtaattgaaaagaagcaagagccaagttctggtggttgtagattgtttggaattaatatatgctcagctgaggaagaagtattacctgaggttactgctccaggtgttggttatgagcagactgctgcctctgtagagttgaactcggataagtctcacagccatctgatgtcaacaattctgatgccctagcagtagca

SEQ ID NO: 1292 - DNA, 300 bp, Zea mays
  misc_feature: Incyte ID No: 700344076H1
attttgcatttccttcttccactagacattgtcccacgcataccactgactccacttgcatccttcagagaagaaactcaagctgttctggatcggttatcttctcaggcgccaaacaactctcctgctgggaggtctcttgttatacctgaatattatgaaactttattgagaagcacactatctattgccagttatgaggcctgttctttcatgggatgtaccagctccatcctggggacattgacttctttcattgacctatccccttacagaccttgtgggactatcattcttgac

SEQ ID NO: 1293 - DNA, 91 bp, Zea mays
  misc_feature: Incyte ID No: 700344077H1
  unsure 11, 70, 78-79, 81-82, 85: a, t, c, g, or other
gatggcgagangctcgcgctgtccgtctccgcggggagcactgtcctgtactccaagtacgctggcaatnagatcagnngnnctnagcacg

SEQ ID NO: 1294 - DNA, 227 bp, Zea mays
  misc_feature: Incyte ID No: 700344078H1
  unsure 36, 55, 61, 84, 143: a, t, c, g, or other
ctcctattcaccatgccgaccgaagagggttccganggcggtggcggcgccgganccgganccggggagaagaagagctcgcangcgcccgcaaagcctggagcgtgctgcgccgcaaagttcctcgcggggttgccgtcgcncggcaacttctcttccggctccgccccctccaatctgggagggttcagggtttacgtctgcgagcacagcacagatcccccaga

SEQ ID NO: 1295 - DNA, 308 bp, Zea mays
  misc_feature: Incyte ID No: 700344079H1
ccagatgttgcagatctctttgctccccctgcagacaatgcatcaaggaagagggaatcaaatgggtctgctcttcatgactcgcgcaataaatttccaaggatgcaatcacaatcccaaggcataggaagtgctgcagggaacgccctaattccaccgcagcttcgtggaaggagcaatgttgttaccgaagacatgagcaaactctttgtggctaaacgaaaagagtagcatcttaaccttttctggacctgaacctctgtttggactccatagactgataaacgcatgtactgagtgcaatggat

SEQ ID NO: 1296 - DNA, 310 bp, Zea mays
  misc_feature: Incyte ID No: 700344080H1
  unsure 309: a, t, c, g, or other
gaagcacatggagtacgaggaagagatgaagtcccaggaggaaatttttcatggtctaattgaggatattcacaaggccacagaggataaagaaaagcagtttgagaagttgttgcaggaagagcgctcaaaggccagacgctttgatgttgattctggaactatgaaagatcgtcagctaaggaaggaatatgtgcagaagttcattgattgccaagtcaaggatgtggcagagtttgaagttgagcgagatgagctgatcaaagtccacgaggacaagaagttgaagctcaagaaagaatacatggnt

SEQ ID NO: 1297 - DNA, 291 bp, Zea mays
  misc_feature: Incyte ID No: 700344082H1
gcattactgggtgtgcttctcttataaagaaattttgatgcaggagatatagactttgaaatattgaaggaaaccaaaacacctgccaatccacctatcttgtcatggtagagctgtgggagatggatatcctcggatccacacaagggcgaaaacttcgctcggggccacgtgacagttgcccctctcaagcgtcccatcatgggccagacgaacaaagacaatgaaagcaggccaatctagaggcgaaagaggcccacgtccaagtagtcgcggcatagacgtggatat

SEQ ID NO: 1298 - DNA, 291 bp, Zea mays
  misc_feature: Incyte ID No: 700344083H1
  unsure 290: a, t, c, g, or other
aggaactaaacgaaactgattaaatgtatgagaaatagaaactgatttctggatgatctttatactaattgcagctttcaggctactaggtggcatagtgttaattaggacctccccaagatatggggagttctactctcaatggtcttgtttctttgctttctacattagttaaccagttttataccaaaaaatgcatgtttgaggaattgtctgaaattgggacaaaacaccttcatgtaaaccagctttgcaaaattttccagcccagatactcttcatctattccna

SEQ ID NO: 1299 - DNA, 290 bp, Zea mays
  misc_feature: Incyte ID No: 700344084H1
aggagctgctgaagaagaggaaagggtggaagagcaagacctggccaggcacagtggaggaggtgcagctgctgctcgccctgatcgatgtcaaggtcgtgtcgcgggtgctccgggtggggaagctgagcagggagcagctgctgtggtgcgaggagaagctgagcaaggtgggcctcacggagaaccggctgcgccgcgacgggtccccgatcctcttcccctgttgaccgacgcagcatgtcatgccgcgccagagatctcccttgccatcaatttcgtttacctct

SEQ ID NO: 1300 - DNA, 292 bp, Zea mays
  misc_feature: Incyte ID No: 700344086H1
  unsure 288: a, t, c, g, or other
cggcgcggacagagagccatcggcggcgcactgaccgccggcgaagggtacagagatgaagacggttagcctcggcgcctctaggccttccactgtcaacttccgcatgccgacgagggacaacctcgtgcctatacgcgtcgacgtcgaggtggacggccagcgctacagggacgccttcacctggaacccgcgagatcccgactcggagataatcagcttcgctaagcggacggccaaggacctcaagtgccggccaatttcgtcccccagatgctccagtccatncagg

SEQ ID NO: 1301 - DNA, 293 bp, Zea mays
  misc_feature: Incyte ID No: 700344087H1
gacacagatggcaaagtacttcacagcatacaggatagaccacatcttgggtttctttaggatatgggagcttccagatcatgctgcaacaggtttagttgggaaatttagaccttccatccctcttagtcaggaggagcttctaagtgaaggtctatgggattttaatcggatgagccaaccatacattcgtcaggaaatactggaggagaagtttggatccttttggacagtcattgcagccaatttctaaaatgagtaccagaagcagtggtatgagttaaagaagactg

SEQ ID NO: 1302 - DNA, 291 bp, Zea mays
  misc_feature: Incyte ID No: 700344088H1
gccctttccgagtggtcaaaatgaaactcctctggtgaaatggagaatccaggggatggatgagtcatctttacctctgtcagtcaattgctggccgtcagtatctggaaatgaaacctatgtgaacattgaatatgaagcttctgagatgtttgatctgcacaacgttgtcatatctatacctctgccagcacttcgggaggctccgagtgttagacagatcgatggagagtggaagttcgactcaagaaactctgtgttggaatggtctatccccctatcgatcagtcg

SEQ ID NO: 1303 - DNA, 291 bp, Zea mays
  misc_feature: Incyte ID No: 700344091H1
  unsure 2, 46, 98, 137-138: a, t, c, g, or other
cncaccattggatttaacgttgaaactaatgttcttgtactcgacngtttcaacgttaaatccaatggtggggatggtggtgacgatctcgccgagcntgagcttgtagaggatagtggtcttaccagctgcatcgnnaccgaccatgagaatcctcatctccttcttggatttaacgttgaaactgtcgagtacaagaacattagtttcactgtttgggatgtcggtggtcaggacaagatccggcccctgtggaggcatacttccagaacaccaggggctcattttgtt

SEQ ID NO: 1304 - DNA, 244 bp, Zea mays
  misc_feature: Incyte ID No: 700344092H1
ggaagaagtatcaacattgtctgatgctgctgcattgcattcttatcctaaggaacatattgtggctgtggcaaaaggccttgcgctcccaaggaggatgctgatgtcaggctacacaagtaatataaacttggacagaaaagaggagagtcctgacataaattcttgtgagaaactgaacttaaataggagttcaggtgatgaatcaatggatgaggatgtgatggaaaggaagcatgccgat

SEQ ID NO: 1305 - DNA, 298 bp, Zea mays
  misc_feature: Incyte ID No: 700344093H1
  unsure 4: a, t, c, g, or other
aagngcccctcctcctctcccccatccgtacccaatctaatcgacacccggccgagatgggccgcaagttcttcgttggtggcaactggaaatgcaatggaaccgcagatcaggttgagaagattgtcaaaaccctgaatgaaggaaatgttccctcttcagatgttgttgaggttgttgtcagtcctccttatgtgttcctcccggtggtcaagagccagctgcgccaagagttccaagttgctgctcagaactgctgggtgaagaagggaggtgcattcactggtgaaattagtgc

SEQ ID NO: 1306 - DNA, 296 bp, Zea mays
  misc_feature: Incyte ID No: 700344094H1
aagggaactggctctgcaaacttcacaagtgtgtaaagagcttgggaaatacctaaacattgaagttatggttagcactggaggaaccagcttgaaggatgacatcatgcgtttataccaacctgttcatctactcgttgggactcctggtcgaatacttgatcttaccaggaagggcatttgtgtgctgaaagattgttcaatgcttgtcatggatgaggcagacaagctattagctccagagtttcagccttctgtggaggcacttattcattccttccactagtcgacaactg

SEQ ID NO: 1307 - DNA, 149 bp, Zea mays
  misc_feature: Incyte ID No: 700344096H1
tttgcttctgcacctgcccccttttctttagtgctagcagaaaacgttttgttgagtctgagtgcctgttcatcagaatgctatggaggctctccaatatatgttctttcgtttcattttgtttttgctttgccatctcttataaacac

SEQ ID NO: 1308 - DNA, 321 bp, Zea mays
  misc_feature: Incyte ID No: 700344101H1
attttatcctcatgtcaataacatggatggattttttgtagctaagctgaaaaagttaagcaatacaattccggtgacgtctgagccgtctaaagcatctgaagaagcagctaaggctgatggtgaagatgagaaagctatttctaatgaacaagagactggtgttcctgataaagatgagaaaactgttgagataaaaaatcataaaaatgtgactaataaaagaacaagtgtcaccaaagagactggaagccataaacgtgaatccaataagccaggaaagcatctcaagataaataagaataatgctacaaaagaaat

SEQ ID NO: 1309 - DNA, 185 bp, Zea mays
  misc_feature: Incyte ID No: 700344104H1
  unsure 179: a, t, c, g, or other
ctaaatatcacataacaatgtctctctttttagtgaacatattagtacgtgttagcgtaaacaaataaaatgatgagggaggacggcaaaatcaagaaaaacatgaggaacaaagaaaaacttgaggaataggaatttgagacattgggaatgaggcacctactgatccaaaagcgagngctgcc

SEQ ID NO: 1310 - DNA, 313 bp, Zea mays
  misc_feature: Incyte ID No: 700344105H1
  unsure 204, 208, 210-211, 248, 251, 256, 264, 272: a, t, c, g, or other
accgagaggggtgcatacactcctagcagcgggaagggactgcaaccccggaacagagcgaggcgacgccgaggcacctcatctccggcgaagggaaatggcgaccgttccaggggatctgatctggcagattgtgaggaagaacaactccttcctggtgaagcagtttggcaacggcaatgccaaggtgcagttcaccaaggngccnannaacctctacaatgtacactcctacaaattaccttggnttncaaanaaagaaanctttaacnatccagccagctgctggaaaggactcggctgtggtcctctc

SEQ ID NO: 1311 - DNA, 256 bp, Zea mays
  misc_feature: Incyte ID No: 700344106H1
  unsure 247, 251: a, t, c, g, or other
aaaaatcaaggttgagattttgaaaatcctttcgaattttgctgaaaatccagatatgttgaagaaacttctcagtacccaagtgccagcatcatttagttccctctataattcttacgtggaatcagaaatccttattaatgcccttactctatttgagattatctatgacaatctcagagcagaagtgtttaactatagagaattcaataaaggttcccttttttacttatgcactacatctggngtgngtgtg

SEQ ID NO: 1312 - DNA, 309 bp, Zea mays
  misc_feature: Incyte ID No: 700344107H1
aaattctacccgttatttggccttggggctaatattgctcttatcttttctgggcgtactgtgaagtatttctcaaatttgcgcaagacattgggtcctggaattgatggctgggaagtatctttgaaaggaatgatgagcatagtggtactccttggacttgtcataacttccatctattggggagtgaacaagtttgttttgaatgatccttcacttccaaaggctgatcgtaagaagaaaaaggaaaagcctaaacttggcatgaaagagagtctgaaggttctgctctcctcgaggtatgtgagg

SEQ ID NO: 1313 - DNA, 306 bp, Zea mays
  misc_feature: Incyte ID No: 700344109H1
aactttttatcttaaggggaactaagctatggctttatgtggcacaaatattcaaacaatccaaataagattatcgtgatgagcttaaaggatcgtaacttgggagatgaacggttttctgatttcaattgcagatagaaaaggcagctctttaatctcaaccattgaacaacaacacacaacatgagggccatgactttgattctcatttaatttggcgttattagtgatgagagcgatgagtctactgatgagtccagtttatgagtcatcctttgtttgtttcatattgtcataggaaaaaat

SEQ ID NO: 1314 - DNA, 307 bp, Zea mays
  misc_feature: Incyte ID No: 700344110H1
  unsure 306: a, t, c, g, or other
attcccagtaccctcacgccggcatccgtcgaagctgctcgacctcgactcaagccttccttgctccttgccgccgtcgagtcgtcgcaggaacgatgacccggcggaacggctgtacgatctacgtgggcaacctccccggcgacatccgcgagagggaagtggatgatctcttctacaagtatggacgtatagtggaaattgacttgaaaattccaccaaggcctcctggttttgcttttgttgagtttgaggacgcacgtgatgctgaagatgcatatatggccgtgatggatacaactttgng

SEQ ID NO: 1315 - DNA, 232 bp, Zea mays
  misc_feature: Incyte ID No: 700344113H1
  unsure 73, 124, 128, 226: a, t, c, g, or other
ctagttgtgcccgttgagcactagcagcctccttgaaacctccagatctgtgcctccaaggcccccgttcctncggcaacaagccgtccagatggacaccgccgcgcccctgcaactgaaagcntgcnccggcgacgccgcggagaagctgctgctcgccgtcgcagccgagggtcctatctgtggtgtgccagacttcaagatgaggggaaagaagagtgatganctccac

SEQ ID NO: 1316 - DNA, 312 bp, Zea mays
  misc_feature: Incyte ID No: 700344115H1
gtgatcttcttgaagaagtttcagacagcgcagatagcgcaaaacacccgtcggcaagtaacattaacaaaaccgaagccgtagaaaagtactcagcagtggacaacagtcaagtgcagaacgcttccaccagttcggctgctaagccagcgacaggcagctcgagcatgatacagatacacccagtgagacccgcggaagaagacagcactaccgaatgcgacagtggtctcgacaacgccagcactagcagcttcgagttccacggagtgagaaggcgacggcggcgacgcagaatccagcagccgggta

SEQ ID NO: 1317 - DNA, 313 bp, Zea mays
  misc_feature: Incyte ID No: 700344117H1
aggtcttctacggcatcctgagaatagagaatgcgcagactgcaagtcaaagggtcctcgatgggcaagtgtgaatctaggtatctttatatgcatgacatgttctggcattcatagaagcctgggggtgcacatatctaaggtaagatctgccaccctggatacatggctgccagagcaagttgcatttattcaatcaatgggaaacgaaaaagcaaatagctattgggaagcagagctgcctcctaactacgatagggttggaatagagaatttcatccgtgcaaaatatgaggacaagagatgggtacca

SEQ ID NO: 1318 - DNA, 135 bp, Zea mays
  misc_feature: Incyte ID No: 700344118H1
gacccaaccataccagcggcgccgcatgtggacgaggaggcggagtagagtggccggactacctcgacacctccactgcaaccatgggtatctcacgtgattcgatgcacaagcgccgggccaccgtggaaagca

SEQ ID NO: 1319 - DNA, 180 bp, Zea mays
  misc_feature: Incyte ID No: 700344120H1
  unsure 168: a, t, c, g, or other
gcacctccaagtgtccaacctcaggctgctccagctgctacggttgctgctactgatgatgctgatgtgtacagtcaggcagcttcaaaccttgtatctggcaacaattctagaacagactatccaacaaattcttgacatgggtggtggtacatgggaacgtgatantgttgtttacgc

SEQ ID NO: 1320 - DNA, 248 bp, Zea mays
  misc_feature: Incyte ID No: 700344121H1
  unsure 219, 223, 225, 227, 229, 231, 238, 242-243: a, t, c, g, or other
gaactttgcttgctcttgtagttcttgcagttccctcaacggagactacaattcaaatttgacattactattaaaaacaatagttggattgtcagattggcatcatcatgtttgttgtattcttatacctgcttctaacatctcatttcattccaggtattttctctgaccttgtctgaagctcacaggtggcaatagatatacatgtgggtttttcanaggntngnananaacgggntttnnttggg

SEQ ID NO: 1321 - DNA, 99 bp, Zea mays
  misc_feature: Incyte ID No: 700344122H1
  unsure 3, 16, 35, 40, 61, 65, 85, 87, 95-96: a, t, c, g, or other
gtnggagtgcagagantctggatgtgcatgtacanacaangggacatcagcaatgtgcaangganattgtcctgaaaatttagcnanatgttgcnnact

SEQ ID NO: 1322 - DNA, 300 bp, Zea mays
  misc_feature: Incyte ID No: 700344123H1
  unsure 44, 46, 101: a, t, c, g, or other
ctaaaatcttattgcacatttcataatattcttcattgtttgtnanattcctaccatccgtgatccttttatctatatgctatttctagaagatgattttnttcgtgatcccatagtaccagaagttcatctgactttagttgttttattcaatgtatactttcaagagctcatgcaaggtgtaaatcttactgcgagaatggtagccaagcttgaggagatcctgtggaggatgatggggttcatcgggtctgccagaggcctgacctgagctagaccatcgtgtattatttggtttta

SEQ ID NO: 1323 - DNA, 300 bp, Zea mays
  misc_feature: Incyte ID No: 700344124H1
gacgaaaggcaccagtttgacaatagaactgttcttccccagcgggtagtcaaagatgaagccatcactcttgggccacaaggtggccttgctaggggtatgtctataagagggcagccaccagtatcaaatactgaaattccttctgttattgaccaccggaggatagtatctagttctaatggctataactctgcggctgattggacatcatcatctggaagagaagattctaattcaagacttccagatcgaacctctggccgaattcctgcttctagtcaatctgctgtaacttcg

SEQ ID NO: 1324 - DNA, 300 bp, Zea mays
  misc_feature: Incyte ID No: 700344125H1
gcaacgagcatcgaatggcgaatgctgtcctagatgtgtttgaggaatgcctgagggaggcaaagagtaatggggttatcaatggtggcaatgtggacgggagtggtgaggaaagcgagctctccaagcggtggagagcgcagaggatggatgagcttgatgtcttaagccggagctgaggttgctggttgagtatgctgcggcggctgggcagtgaagcagagattttggtggttttggtgatgttcctgccacccttttccccttttgtatagaagctaggttcctgtgctatgcttt

SEQ ID NO: 1325 - DNA, 224 bp, Zea mays
  misc_feature: Incyte ID No: 700344127H1
  unsure 213, 215: a, t, c, g, or other
ttacgagcagttactatttcagctggaatacaacaacaatggcaacatttctagcaatccttggattcacggttcttcctgttggaacataaattagcaaaatgtttgatgcgaacacaaggttgacttgtcccttgtggttcgagttgatgatgagtgattgtcaatgggtagcactctagggtagtcagtggactgactagagtgattttntnggtgagcag

SEQ ID NO: 1326 - DNA, 226 bp, Zea mays
  misc_feature: Incyte ID No: 700344128H1
  unsure 23, 35, 47, 51, 57, 76, 80, 84, 114, 142, 161, 172, 189, 212, 215, 219,: a, t, c, g, or other
ctactccggaaggcgagcaggcncctcccctcgcnctcgccctcgcncccntccgcngccgagtgtttgggaagcnagcnagcngcttctccccatccttgttctacgattgcnccgcgcgcatcccattcccacgtcgaancggccgaggtagtcccggntgttgccagcnagcgatggcgagcaacngcatgtcgcttgtgcatcgagcngcngagnggtgntc

SEQ ID NO: 1327 - DNA, 300 bp, Zea mays
  misc_feature: Incyte ID No: 700344129H1
  unsure 279, 287: a, t, c, g, or other
ggagaagatggtgctgcggcggaaggtaaaggtaccgatgtggagatgaaagatgctgaaaatgctgaagacgagaagaaagatgtcccaagtgcagagaagactgaggaagttgacgataagaaagatgctgaaaatgtggagatgaaagatgctgcagagaagactgaggaagttgacgataagaaagaggaagcccctgctgtagatgcagcagagaagaacgaggaaggtgatgataagaaagaggaggagccccctgcagagaagactgttganaaagaggnggtcctgctgtag

SEQ ID NO: 1328 - DNA, 304 bp, Zea mays
  misc_feature: Incyte ID No: 700344130H1
  unsure 179: a, t, c, g, or other
actgaacatgtagcgcgattctacattgctgagacaattcttgctatccaatccatccataaacataactacatccacagagatattaagcctgataatttgcttctagataaaaatggtcacatgaagctgtcagattttgggctgtgcaagccaattgactgctcaaagctctcaangttgaatgaagatgaacccatgggtgatgacaacatgagggaatcaatggatattgatagttctttgtccaatacagcaaatggtagaagatggagaagtcaacacgaacagcttcagcactggc

SEQ ID NO: 1329 - DNA, 253 bp, Zea mays
  misc_feature: Incyte ID No: 700344131H1
  unsure 37: a, t, c, g, or other
aagtcaagggaaagattcccatggttaagcctaagtntctgatacccaaccaactagagcatggaaacataaaatttcatcagagacgtgtgacatgcttggagtttcatccaactaagaacagtgttcttttatcaggagacaagaaaggacttctgggtatctgggattatgttaagttgcatgagaaaatcacttatgattctgtgcactcctgcattctgaatagcatgaagtaagagtattccttgat

SEQ ID NO: 1330 - DNA, 305 bp, Zea mays
  misc_feature: Incyte ID No: 700344132H1
  unsure 194: a, t, c, g, or other
gatcgttgtgctgggtggagcgttctttgcggctggaaatgccactccttccgctgaagcaaatatccacagtgatccggaggcagccgacatggttttcacttctggggcggacatctacgtcgttggcctcaacatcacaacgcaagtcagcttcacagataaggatctcctggagctaagaaactcgcaanggaagtacgcacagttcctatgtgatgtatgcaagtttctacttggactggcacaccgatctatggtgctcctgtgatttcctccacgatccggtcagctttgccgcgcta

SEQ ID NO: 1331 - DNA, 245 bp, Zea mays
  misc_feature: Incyte ID No: 700344137H1
  unsure 238: a, t, c, g, or other
cttcagccaggaacagtagaagtgaagctccttctggttcacagaaagagaatggtgccagtacaagcaatatagaaaagccaccacctgtggagaaaacattactttgtactcttgaagagttgtataatggaacaaaaaggaaaatgaagatcactaggaatgttgcaaagccagatggaagaatagaagttgaaacagaggtcttggcagttgaagtgttacctggctggaaaangggaacc

SEQ ID NO: 1332 - DNA, 295 bp, Zea mays
  misc_feature: Incyte ID No: 700344138H1
  unsure 19, 71, 77, 92, 103, 107, 110, 143, 172-173, 196, 221-222, 230, 238,: a, t, c, g, or other
ctgttttaaagacatatanttatcatatgatctacccattctaccccagacagttacccaagataaatganagcatnagtctataccaaganttttacatganagtnacncagtagctttatctgtaatagccaaacactggnaataactcaatgtccatccttatacatanntggataagtaaattgtggtacanccatacaatggaatactactcaacnntgagaagnaatgaagnactggtanatatagcaacatggatgaatctcaaantagttttnggnggngnatgttg

SEQ ID NO: 1333 - DNA, 293 bp, Zea mays
  misc_feature: Incyte ID No: 700344140H1
tgtactggaggcactacttatggtcagcttcctacatactctaacacgtctgctgcaccaagtgctctcataaatggaaatttcttgagaaatatatcttcatggatgcctagcagacacatatcaactgctcaggaaggagaagacacaaggtttcctgggagagcacgaacacttggttctgtaggaactgaacccactgcaagggaggcaagtgcgcatttgcatgctaggttgttggataacacaactccaagtgacccactaacgaatacacagcatacagctgtgaa

SEQ ID NO: 1334 - DNA, 294 bp, Zea mays
  misc_feature: Incyte ID No: 700344141H1
gggagctttacagcaacaacataagtgggacaataccccctgaactggggaacctgactaacctggtcagtttggatctgtatatgaacaacttctctggcaatatccctgacagcctggggaatctagtgaagctgcgtttcctacgtcttaacaacaatagcttggttggtccgattcccgtatccttgaccaatatctccactctccaagtactggatctctcgaacaacaacctctcaggacaagtcccatcgactggctccttttcactcttcacccctataagttttg

SEQ ID NO: 1335 - DNA, 240 bp, Zea mays
  misc_feature: Incyte ID No: 700344142H1
gcctcagcaggaatccaatcaatggggtgcggctgctggtgctggtggctactatgggggctatggacaaggttatgaggcttatggcagtgggtatgcacaaccccaggatcctaacatgtatggttatggcgcttatggcggttatcccaattaccaacagcaaccagctgcacagcagcaacagcaacaacagtgatgcctgtttgctcgggtaggtcattgggttgtcgcgacaga

SEQ ID NO: 1336 - DNA, 240 bp, Zea mays
  misc_feature: Incyte ID No: 700344143H1
aaaagcaggtgccaatcattgggctgctgatgaacgacagaggttttatttctcgggttctttgcccaaaatatggtggattccttacttttgggtcactcaagaaaggaaaagagtctgcacctgcacagccaactgctgcagacttgataaatctgtacaatattaggcagatagggccagacactaaggtctttggtataattggtaaaccagttggccatagcaaaagcccaattt

SEQ ID NO: 1337 - DNA, 240 bp, Zea mays
  misc_feature: Incyte ID No: 700344144H1
  unsure 209, 211, 216, 219, 222-224, 226, 235: a, t, c, g, or other
ctcgtgcccaccagcttgtaatggagggatacaattggtgtcatgatcggaatgtggttaccattttcagtgcacccaattactgttatcgttgtgggaaccaggctgctatcatggaattagatgacactttaaaatattccttccttcaatttgacccagcgcctcgtcgtggtgagcctcatgttacacggcgcaccccagactantncctanaanttnnncntgggaaacntgctt

SEQ ID NO: 1338 - DNA, 297 bp, Zea mays
  misc_feature: Incyte ID No: 700344146H1
gatgacagctggtacaagacggtcattttagctggtggttcgtcgtgcttgcctggtttaccagagaggctggagaaagagcttcaccaacttcttccaccttatatgtcagaaggaataagagtactccccccttcatttggcactgattctgcctggtttggtgcaaagatgatcagcaacgtgagtactttcactgaggcatggtgtgcaaagaagaaacaattccgtcagaagacaggccggagtggtacattgtttgccaattcctggtaatgaaaatctcagacacaagtc

SEQ ID NO: 1339 - DNA, 299 bp, Zea mays
  misc_feature: Incyte ID No: 700344148H1
cacccatttcagaccttgcgttccatatatatgtatgcttagtaggtgatcatcgataggttgccgaggccagctagctcttgcgttgattaggaaggaaaacgtagctagccagccaggttgatatttagagttgagagggtacagaaatacatacagaggccagtccagaccatagcgctagtggctgagacggccgagaggaacgaagacgatctcgatcctgagctctgggcatgatgaagctcttgttccagtgtccctgctgctcctgcttctgcttcatgaagacggccagc

SEQ ID NO: 1340 - DNA, 246 bp, Zea mays
  misc_feature: Incyte ID No: 700344149H1
gctcagatgaatgaggagctctctggttggaagcttgttgttggagatgtcttcagagaaccaacctcaccgaagctgctctgtgtcatgattggcgatggggttcagattttgggtatggcaattgttaccattttctttgccgcatttggcttcatgtctcctgcatcgagaggaatgttgttgacagggatgatagtctttatatgttacttggaattgtgtctgggatgctgctgtcagctc

SEQ ID NO: 1341 - DNA, 245 bp, Zea mays
  misc_feature: Incyte ID No: 700344151H1
  unsure 234: a, t, c, g, or other
aatccggatacctttcaggacgatgggaatgaagtcagtattgcggcatctgaattggtgagcgacatcactgttcgtatagggactacaaagttttaccttcacaagtttccgctcctctccaagtgtgctcgctttcagaagttgattccaaccactggtgatgaaaatattgagatccacatccatgatattcctggtggcgcaaaggcttttggggtctgtgccaagttntgctacggcat

SEQ ID NO: 1342 - DNA, 293 bp, Zea mays
  misc_feature: Incyte ID No: 700344153H1
ggatggcagaaactttacctaagtgacggtctgcatctgacacaggaaggaaacgcagttgtccacaaggaggttgtcgaagcattgagaaatgctggtttcaaagctgaacagatgccgtacgactttcctcatcactccaaaatagatggcagttgtccagaaaaggccttccaatgaaatgatttcgagttgtgtgatgttttggagttttggatcctgcattgaagattacgataacgtccaatgacatgatcttgagctgttacattttgggagtttgaaatcttgcg

SEQ ID NO: 1343 - DNA, 293 bp, Zea mays
  misc_feature: Incyte ID No: 700344154H1
  unsure 7, 42, 79-112, 133, 179, 204-218: a, t, c, g, or other
gcttccncctcctctcccctgctgccacgaggcgcggctcanctcctcctcgaagcgggcggggaatacaggccgcgcnnnnnnnnnnnnnnnnnnnnnnnnnnnnnnnnnnatgatggggtgcctcttcggntgcttccgcgcgtccggcgacggcggcgatgcgaagagcgccgganaccgcaacacgtccctggctcccgnnnnnnnnnnnnnnntccaacaggatggtacgggcaggaggatcaggccaccttcgaggaacgcgctctccgccgtgttccagcgagaaa

SEQ ID NO: 1344 - DNA, 291 bp, Zea mays
  misc_feature: Incyte ID No: 700344155H1
  unsure 68, 112, 197, 211, 215, 224: a, t, c, g, or other
aagttcctcaagcccggcaaggccgtgatcctcctgcagggccggttcgccggcaggaaggcggtgancgtgcgcgtgttcgaggagggcacccgcgaccgcccctacggcnactgcctcgtcgccggcctcgccaagtaccccaagaaggtggtccgcaggactcggccaagaagacggcgaagaagtcgcgcgtnaagtgcttcatcangctngtcaacttnacccacctcatgcccacccgctacaccctcgacgtcgacttcaaggacgtggccaccggcgggcccg

SEQ ID NO: 1345 - DNA, 292 bp, Zea mays
  misc_feature: Incyte ID No: 700344156H1
  unsure 125, 278: a, t, c, g, or other
gtggaggggttttgaggtctagccacacgaaagggtcagttacagcagcccaaattgatttggcaggtgatgcccatcttattgtgagtgataatgctgctgccaagcaagtgtttagtgaggancaagaggaaacaaaatctatctcttcttcagatattgatatccttcatgaaaaatcatactccagtggacacgatgaccatgctgcttgtgctgccgaaactcagttctaccatccacagaaagcatctatatctgatggactacatttgggncctagttctttgca

SEQ ID NO: 1346 - DNA, 290 bp, Zea mays
  misc_feature: Incyte ID No: 700344157H1
  unsure 6, 45, 59, 90, 96, 98, 101, 123-124, 128, 159, 209, 216, 227, 242, 269,: a, t, c, g, or other
atccanattgtgcagggtaggcagctcgtctcagcgattaccagncgcagacacaagancaccttgctgtgaacttgtaacaggtttgancttcgnanganaagataattttggtgctgtganngatntcactgtgaggagtgaaatgaggctaagtantgggcaagtccatcgaaatgttcttgcgctggcatcttctcggtcatgtnttgttcncggagatcgtntttcgttcaggatgntgtcccaaccacgggtagctggatttnatcngactgcttggngtggna

SEQ ID NO: 1347 - DNA, 93 bp, Zea mays
  misc_feature: Incyte ID No: 700344158H1
  unsure 2, 15, 17-18, 27, 40, 87: a, t, c, g, or other
cnacgagctagcagnannaggaacctnttcccacacttcngcgctcctccctgctgtctcgagactccgagaatggttgtgtaggcnggcgca

SEQ ID NO: 1348 - DNA, 290 bp, Zea mays
  misc_feature: Incyte ID No: 700344160H1
agaattttccggacgcatggcgacggtggaagcttctccaggcctccgacgagggctgcggcggcgaggtggtactggcggcggggtcgagaaagggggagaggtggtaggagaagacaggtccagattccacctcttccttgaggtcctcccattcgaaatcgcgcgaatgtctgcccgtcccgaggacgtcgcccagagagctcaagtcgccataaggtgcgccgccgctgccgggagcccgggagggactaggagcgagcagggagcataacctctccccgcagata

SEQ ID NO: 1349 - DNA, 290 bp, Zea mays
  misc_feature: Incyte ID No: 700344161H1
gacggattcgtcatgtccgacgtcctcgccaagggccgggaggctgactacaaggcacgggatgccttctacgcgtgcatagagaagcacgcggacaaaaagcccaccgagatcgccaccatgggcctcctctaccccgccgactgcaaaaagtcccgcgccgacttcgtcagcaactgccgccccacctgggtcaagcacttcgaccggcagtactccgccaagaagcgggtgcagaggttgctcgacggcgatggggaccgccggggccccatgtcgctgccccagcc

SEQ ID NO: 1350 - DNA, 290 bp, Zea mays
  misc_feature: Incyte ID No: 700344162H1
  unsure 105: a, t, c, g, or other
cctcaggattatctcaaaaacccaaccttttgaggcgactgctacaagaacccagatggcagccctatcttaaataattatctgagctggaactggaataatcanctcagagagaagtacagaacaaaatctgacataattctcaaggaaaggatgagttggaatggaaaggggcctcacctgggcatgaggccgtcaggctggataccgtgctcgaggcagtagagctcccagcaagaattccctacctggatgcctgcctgcccgatatggatgctgatgatctccct

SEQ ID NO: 1351 - DNA, 293 bp, Zea mays
  misc_feature: Incyte ID No: 700344164H1
gatgggctgtggaggatccgtgcagagaaaagtcttcgtgataatggcttctagccttctggaatatttaccacctgcggccaagcgtgtgaaaattgctcggaaagattggcaagctgaatgaccgaaggggataagatcattgaccgcgtgcgcaagtctggttgctctctcaggtgtccctatcagggcttagaaaggacgtgtttggacaaactcaggaagaactacataatgacgatttagtgacgggttttttttaagaagggtttagtgatgacttgttgcatgca

SEQ ID NO: 1352 - DNA, 88 bp, Zea mays
  misc_feature: Incyte ID No: 700344167H1
  unsure 69-71, 74-75, 77, 82, 85: a, t, c, g, or other
cctcgcgaagccatcatcttccaaaccctcgccgcagccgcagccacccttggcttccgcacgatagtnnncgnnancagcnatntat

SEQ ID NO: 1353 - DNA, 289 bp, Zea mays
  misc_feature: Incyte ID No: 700344168H1
gaatattgcttcataatttgctgtcatctttgagccggtcaacgggaaaacatgctggtgctctagaaatggtcagatctggtgtttgggggaagttaatccgctattcggaagacatgcagctagagagccaattacgagtctatgcactacagctgatgcaatgtatcacaggaagaaaccttaaatctcttccaaatgaaatggtgtgtcaggttgagccatgggaatcatggtatgagcatggagcgggtgctgccatagctgatgagagtatcaactcctctag

SEQ ID NO: 1354 - DNA, 155 bp, Zea mays
  misc_feature: Incyte ID No: 700344169H1
  unsure 2, 27, 76, 78, 134: a, t, c, g, or other
gngctaagtaaagttacaatgtcagtngtcggtcagctacctggagattggtcgtacagtatgtcatgtgtaattntngtcgtctcgttttggttgagccatgggtggtgcttgtaacaaaaggatggcttggngtcagtactacctaccctacc

SEQ ID NO: 1355 - DNA, 288 bp, Zea mays
  misc_feature: Incyte ID No: 700344171H1
  unsure 14: a, t, c, g, or other
tggcttttaatgangatgataatagcgaaggtgatgcaaaaacttccgaggacagttctgatataaaattcagcattgcagaacgcatcaagcagtggtcccagaatgataagagctgccaagcatcgaaaaaggaatcccttcttgatagaccatggattgaagctgcagaagcacgaagcccgacacgtaggcactcactcggtggaccaaagggatgtgcacaagacttcaacatcattaaaagaaggcaatccgatacctttatcagcctcccggatgcgacag

SEQ ID NO: 1356 - DNA, 286 bp, Zea mays
  misc_feature: Incyte ID No: 700344174H1
ggatgttgttagatcaagaaattcaagtgcatcctatgacgaaacagaggacacgtcgaatgctcggcatcacaaactagatgacgcacaagaagacactggaaccaacttggatgatgaggaagcagcagcgttgcaagagcaagtcaggcagataaaggcgcaggaggaagagtttgaaacattcaatcttaagattgtgcatagaaaaaacagaactggctttgaagaagacaaaaacttccatgttgttctcaattctgtcattgctgggcgtatcatgtat

SEQ ID NO: 1357 - DNA, 286 bp, Zea mays
  misc_feature: Incyte ID No: 700344175H1
attggagttagctcattggtgactgacgccaactcgtcactttccggtggtgcccagttacagccaagtactagcatgaatggtgattcattgatgcgtgttcctgcgtcaccaatatcgttttcatccaataacatctctggctcttcagtcattgacggttgcatcatgcagcaaagtccaccccaagagcaggtgcagaaacagaggtcttcaagtgtaacatcacaacctgtgattgatgctggtggtgcattgcatgctcagaagaaatcaaggattgatg

SEQ ID NO: 1358 - DNA, 284 bp, Zea mays
  misc_feature: Incyte ID No: 700344176H1
acacatcacctccttcctcgctcctgtggtacccggaggcggaggcgccttgtgccgtcttgtcccggccgagaacgtgggacggttccgcgcgggctcgcgcggctctctggccaccagaccatagaggatctctccaaggtcgcttcctcgctcatgtcacctaagggcgaccaagtctaggcggaggaggcagcgggtcgagggtcagcgaagaggtggtgaatggtgtgcgcccccgtctggaacaacttcgtgctccgtacacagaggacaatgtgttg

SEQ ID NO: 1359 - DNA, 286 bp, Zea mays
  misc_feature: Incyte ID No: 700344177H1
  unsure 2, 9, 18, 20, 42, 51, 234, 255, 261, 263: a, t, c, g, or other
cnacaacantctgactgngnatatcatggaggcatttaaagngtgcaaganccttacggaacttaacctgcaaggaaaccatcttcatggtgagataccacattacttgtctgagctaccactagtaacagtggaattggcccaaaacaacttcacaggaaagctgccagagaaattgtgggaatcatcaactattctggagatcacacttcagctacaatcagcttactggcnctatacctgaaagcatcggtngactcncncagtttgcagaggctacagatcg

SEQ ID NO: 1360 - DNA, 227 bp, Zea mays
  misc_feature: Incyte ID No: 700344178H1
  unsure 20: a, t, c, g, or other
gagtgggagacccgcgagangctgccgtgtagggaccgtagactcagcgactgcgaaggagggataaggggatggccgggatcggaccgatcaggcaggactgggagccggtcgttgtgcggaagaaggcacccaccgccgccgccaagaaggatgagaaggccgtcaacgccgcgcgccgcgccggtgcggagatcgataccatgaagaagtacaacgtggtacga

SEQ ID NO: 1361 - DNA, 289 bp, Zea mays
  misc_feature: Incyte ID No: 700344179H1
agcagatcgtcctgatggcacaggcacaccaccctcttctcctactccttttgctcttcctctcctccactgccatttcttcctccaagagaacccagccgaagttctccgccgtcttctacttcggcgactcggttctcgacaccggcaacaacaaccatctccccacggtagctgtggcgaaccatgctccttacggaagggacttcccagggaagaaaccgacggggaggttttccgacggccggcttatcccagacctcctcaacgagaggctgcagctcaaaga

SEQ ID NO: 1362 - DNA, 290 bp, Zea mays
  misc_feature: Incyte ID No: 700344180H1
ggcgtccccacacggccacaccggaaaaaagaccccggcaagaacctcgctctccggcgtctccggccaatacccatggaggccaccgcagtgccgagggctctgttcctattcgggacatcgccggcgccgtatcgtatgcgtatgaactgcttgcgcgtagctattggaggagatgtgaggcggcagggggccgtggcagtgtgggcgaagaagaagagggggagggggcgggatagcgagacggaggaacgggtggacacgcacagcttcacccccaagccgggcga

SEQ ID NO: 1363 - DNA, 283 bp, Zea mays
  misc_feature: Incyte ID No: 700344184H1
agcaggaggcggacaaggtaagcagcaatcgcaggaaccctagcgccgccgcacccgcaggaatgggtatcgacctcgtcgccggtgggaggaataagaagaccaagcgcactgcgcccaagtctgacgatgtctacctcaagctcctcgtcaagctctaccgtttcttggtcaggaggaccaagagcaatttcaacgctgtcattctcaagaggcttttcatgagtaaaaccaaccgaccaccaatctccatgcgccgccttgtcaagtttatggaaggaaa

SEQ ID NO: 1364 - DNA, 164 bp, Zea mays
  misc_feature: Incyte ID No: 700344186H1
acaccatcctcggcatgaaggaggaagagcgactactggagctcgtgaaggatgagcaggctgatggaatcttggattcattaccaattgacctggaggccaagaatggcgatgcatcactcattactgaagcgatgaaaaaggaggaggagcagcttgaagac

SEQ ID NO: 1365 - DNA, 280 bp, Zea mays
  misc_feature: Incyte ID No: 700344188H1
ccgtccccgctcaagtgaggttcggagctcagagccttgcgatctctcggctgcgcgcgcgcaagatggctgacccagaattggaagctatcaggaagagaaggatggaagagactaatggcaaaacacggtggcggtggggcaaatcaacaaaatgcaagccaacaaaaagctcaggaagacgcgaaacaggaagctgaggaacgccgacagatgatgcttgctcagatattatcttctgaagccagagaaaggatctcccgcatagctttggtcaaac

SEQ ID NO: 1366 - DNA, 275 bp, Zea mays
  misc_feature: Incyte ID No: 700344189H1
  unsure 7, 252: a, t, c, g, or other
gattgtntcaagcaggtatggaagaacaggaaggacctcacggtcgaggaccttggcattgcgagtttatttggagttgagctctatgcatggttctgcataggcgagattgtcggcagaggtttcaccttgaccggctataaggtctagatgatttccactggtcaagacctgctttataattgatactcttagctgatgcttgtcgaaacgacgacgatggtacctgccttggttcacaatttgtttctntgtaagagtttacctagtgctga

SEQ ID NO: 1367 - DNA, 280 bp, Zea mays
  misc_feature: Incyte ID No: 700344190H1
gtcttatgtcatttactctttaggacaacctcttgaaaaactaaatcatttctttgaaggtgttgaagctcgcgtggcacagggcataagggaggaggaagtaagttaccaacttgcatttaacaaacaagaacttcgtaaagtcattaaggagtaccctggaaaggaagtaaaaaaaggtctagataacctctacaagaaagttgataaacatttatgtgaagaagagaacttacttcaggtggtgtggcactccatgcaagatgaatttatacgccag

SEQ ID NO: 1368 - DNA, 278 bp, Zea mays
  misc_feature: Incyte ID No: 700344191H1
gacaagtttctactccgtaatatcttggatacatattctctcatccaggaccaagtagttttggcatccaagttggaaactgcaccagtaaccaatgttgatgttgatgtcaatgcatcagagcttctaaaagaaaagggaaatagcgctttcaaaagaagacagtggatcaaggcaattgagttttactcagaggccatcagtttgagtgacacaaatgcaacatattactgcaacagagcagcagcttatctggaactgggccgttttaagcaggc

SEQ ID NO: 1369 - DNA, 275 bp, Zea mays
  misc_feature: Incyte ID No: 700344193H1
  unsure 245, 248: a, t, c, g, or other
gagtattagatcaacttcattttccccagctactgaggctatgtctgaaacaaaggttgcacctatcacccaggttgatctctctttcctcagtgaagggaaatctacatgggtgaatctgacatcacaagacacggagcggcctgatcttgcaaatgcacccgtagtagtcaccggaggcagaggtttaaaaagtgctgaaaattttaaattgttggagcagcttgctgagaaacttggcgcanagngggtgcgactcgggctgctgttgatgc

SEQ ID NO: 1370 - DNA, 280 bp, Zea mays
  misc_feature: Incyte ID No: 700344194H1
caagattcagcagaagatagtaaaggagaagataaagctgccaacatatttatctagtgaagttcactcaatgttgaaaggattattgcacaaagaagctggcagaaggctgggaagcggaccaggcggcagtgacgaaatcaagaaccacaagtggttcaagtctgtaaactggaagaggctggaggcccggcagatcgagccaagcttccggccgaatgttgctggcaagacctgcattgcgaactttgacgagtgctggacgaacatgcccgtgctt

SEQ ID NO: 1371 - DNA, 279 bp, Zea mays
  misc_feature: Incyte ID No: 700344195H1
gccacaggaagtgttcacacttaagattgccacctactatccctagttgtgatttaggtttctcttgatgagatctcttgagtccagtattataaaacagagagtgggctagcggagttcagtgtcagtgtgagtgagtgtcagtgtaattccacatcctccgaatgtggacagtccaatcaccagctccttttttcctccccggctttcttacaggcttgactgttgtaatgacgggtgctcagattccatggtagggcacaatgaagaggcatctgg

SEQ ID NO: 1372 - DNA, 162 bp, Zea mays
  misc_feature: Incyte ID No: 700344196H1
  unsure 2, 4, 16, 26, 40, 43-44, 51, 61, 87, 105, 107, 121, 152, 157: a, t, c, g, or other
antngcttctgcaccngccccctttncattagacccagcnggnnaacgttntgttgagtcngagtgcctgttcatcagaatgctatngaggctctccaatatatntncttccgtttcattntgtttttgctttgccatctcttataaacacnttgtntggat

SEQ ID NO: 1373 - DNA, 298 bp, Zea mays
  misc_feature: Incyte ID No: 700344201H1
  unsure 97, 103, 108, 114, 120, 140, 147, 155, 157: a, t, c, g, or other
aagccgtccgccttgcccttcacgaaggcttggtcctcctccttgtatctccactccccccttcacagatccgttccctccagctagggttagcgtncctctncagcnatggcnatcaancggactaaggcggagaagangatcgcntacgatangntgctgtgcagcctgctcgatgagtacaccaaggtgctcatcgccctggccgacaacgtcggtttccaagcagctccaggacatccgccggggcctcaggggcgactcggtggtgctcatggggaagaacacgctcattcag

SEQ ID NO: 1374 - DNA, 291 bp, Zea mays
  misc_feature: Incyte ID No: 700344203H1
gccgcaggagccatctgcatctctcgcccacctccgctccgcctactgctgctggtggtagggaggcggagaaggaggcccttgcgcacgcccgccggccggatcagagccgtagcaaccaccacccatggcggacgtgcacgaacctttggtgcgccgtaagaggaagaaggttttggtggactacttggtgaagttccgatggatcctcgtgatcttcgtggtccttcctatttcaactactgatctacttcaacatcttcctgggcgacatgtggtccgccatgaatc

SEQ ID NO: 1375 - DNA, 289 bp, Zea mays
  misc_feature: Incyte ID No: 700344204H1
  unsure 191: a, t, c, g, or other
cgatctcgcgctaggttttcgccacaccgctctcgtcctccgcgaagatgccgaagaacaagggtaagggaggcaagaaccggaagcgtggaaagaacgaggctgacgacgacaagcgcgagtcgtcttcaaggaagacgggcaggagtatgcgcaggtgacccggatgctcggcaacgggcggtgcgagntccacctgcgtggacggcacgcgtcgccttctgccatatccggggcaagatgcacaagaaggtgtggatcgcggccggggacatctcctcgtcggcct

SEQ ID NO: 1376 - DNA, 287 bp, Zea mays
  misc_feature: Incyte ID No: 700344207H1
acggttgcaagttgttccagtgctgaccactcctcagctgatccaggaattagaagaacgtctcctgattgtattcactggccaagtaaggctcgcccaccaagtcctgcagaaagtcgtgactcggtacctccgccgcgacagcatcctgatatccagcatcaagaggctagcggaactagccaagatcgggagagaggcgctgatgaacggtgagctggacgagctcggcgggcatcctgctggaggcctggaggttgcaccaggagctggaccctttctgcagc

SEQ ID NO: 1377 - DNA, 276 bp, Zea mays
  misc_feature: Incyte ID No: 700344208H1
  unsure 48: a, t, c, g, or other
ctcatatcctgagccagagatcaaacaaaccagagggagcgaacatgngcggccaggcttgcaggtgtttggtcagccggcgtctactgatgtctccagggttctgacatgcctgtttgagaagaaactggagttcgatcttgtccgcatcgatacgttcaagacgcatcacaagcttcccgagttcatcaggcttcgggatcctaatgggcaagtgaccttgaagcacggcgacaaaactctcgttgattcgagggacatctgccggtacgtctg

SEQ ID NO: 1378 - DNA, 151 bp, Zea mays
  misc_feature: Incyte ID No: 700344209H1
  unsure 8, 67, 91, 132: a, t, c, g, or other
gccgagcnaagatgcggctccggcgagtgcgcggcaaggacgaaggcgtcggggccagtggcgagangaagagcatgctgaagttcctgtnccaaggtggtggtggagtactgccctctggacccgcggaangcggcggcagtggagctcc

SEQ ID NO: 1379 - DNA, 285 bp, Zea mays
  misc_feature: Incyte ID No: 700344212H1
atccgccgccatcgcttcaagcagcgaaccctagccgccctcagcgacggattgcagatctcccagccatgacgttcaagcggaggaacggcggacgcaacaagcacgggcgcggccacgtcaagtacatacgctgctccaactgcgccaagtgctgtccaaaggataaggctatcaagcggttcttggtgaggaacattgttgagcaggctgctgtgagggactgcaggaggcttgtgtgcatgatggatatgttcttccccaattgtacgcaaaggttcatcc

SEQ ID NO: 1380 - DNA, 294 bp, Zea mays
  misc_feature: Incyte ID No: 700344214H1
  unsure 18, 51, 65-66, 147, 163, 203, 208, 218, 225, 230, 267: a, t, c, g, or other
tcccatcccactaccacncatctcgtcgtccgccgattcgatccggttctnccaacccaggggcnngatggcgacgaagaggagcgtgggcaccctcggcgaggcggatctgaaggggaagaaggtgttcgtgcgcgtcgacctcancgtcccgctacgacgntgcccagaagattcaccgacgacacccgcatccgcgcctnccgtnccccaccatncaagttncctcntcgagaagggcgccaaggtcattcctcgccagccacngggttctcccaaaagtgtccaccccaa

SEQ ID NO: 1381 - DNA, 240 bp, Zea mays
  misc_feature: Incyte ID No: 700344216H1
gatgtagaagagccagtaaatcttatcaataaaccgagacaggtcaacaagattgatatacagtatgacaaggtatcaaaacaagtggatgttcatgctttaaaagaagtgctttggaatcacatccatgcatctgctgagactggtccaggaaagagaggaacctggaccaccgctgcgcctatctcaggtgttacatgaccttccaagcagcagcccagatgctgtagcaactgatat

SEQ ID NO: 1382 - DNA, 240 bp, Zea mays
  misc_feature: Incyte ID No: 700344217H1
  unsure 152, 188, 221-223, 225: a, t, c, g, or other
gacaactctctctaccgtccgataccccaagcaccagcgcggcggcggcgaccatggctgtcggaaagaacagaggatctcccaagggaaagaagggtggcaagaaaaagaccgtcgaccctttctctaagaaggattggtatgacatcaangcaccgtacggtgttgcagtgtgcgcaacatcgggnagactctcgtatccaggacacagggtaccaggnnngncttctgagggtctga

SEQ ID NO: 1383 - DNA, 111 bp, Zea mays
  misc_feature: Incyte ID No: 700344218H1
atctcatccaatgtacatggattaacatcaaaccgaataagccctgagttggactgtgaatttcagaaataagtgaattgagaaataagtgaattggattgtagaatttcc

SEQ ID NO: 1384 - DNA, 280 bp, Zea mays
  misc_feature: Incyte ID No: 700344219H1
  unsure 29, 38, 58, 74-75, 78, 183, 187: a, t, c, g, or other
gcagatcagcaacttcgccagcatctggntcatctccntcttcatctcgatcttcgcnacgggcatcctggagnngcncgtggagcggggtgggcatcgacgagtggtggaggaacgagcagttctgggtgatcgggggcatctccgcgcacctcttcgccttgttccagggcctgctacaangtgntggccggcatcgacaccaacttcaccgtcacctccaaggcctcgaacgaggaggcgattcgcggactgtaacagttcaatggagacgcaccta

SEQ ID NO: 1385 - DNA, 280 bp, Zea mays
  misc_feature: Incyte ID No: 700344220H1
gtcaacaacacagatttcaaagtgttgtacccgacactaacagattatgacattcgatattacatctatgagttactcaaggcattagattactgccattcacaaggtattatgcaccgagatgtgaagccccacaatgttatgatagatcatgagcttcggaaactccggctgatagactggggcctgctgaattctatcatcctggcaaggaatataatgtccgtgttgcctccaggtacttcaagggtcctgagcttctgttgactgcaagattatg

SEQ ID NO: 1386 - DNA, 279 bp, Zea mays
  misc_feature: Incyte ID No: 700344221H1
gggcaactttactgctggaggtagcgacagtttgccaacagtaactttggttctgacagtagttttggtggaaacggtgctggtggctttgatgcaaccggcggttccacaggcgatgatgggttctctggcacacctgatgataactttggtggtaacaagaatgaagaaaccatggatgatatcttcaaggacgatgagccggacagctacgccgacaagaggagctagtttgtgcctctccaaagagtgctcatcaatacgatccagaacgatatg

SEQ ID NO: 1387 - DNA, 275 bp, Zea mays
  misc_feature: Incyte ID No: 700344224H1
  unsure 49, 75, 183, 262: a, t, c, g, or other
cagtttcatttaaactatcaaagagaaaggtggatgagaatctccagancctccatactgtattgtatgggagancaatccaaataaccattttctgaagagaaacatatctcaattttctgggtttgtttggacagacaatcaagaaaaacagaggaacagaataaaggaaaagcttgagantttaacaaggagaagttgctagatttttgtgaaatactggacgttattgtaaaagtaactatgcagaaggaagaagttncgccagctctgga

SEQ ID NO: 1388 - DNA, 284 bp, Zea mays
  misc_feature: Incyte ID No: 700344227H1
  unsure 91, 204, 238: a, t, c, g, or other
agcccccaattaagcagaagaagggtggtttcttgtcatcactatgtggcggtaggaagaaggcaagcaaattcaaagaagggctcggacnagaagaagtcgcagaagcatgtggacagttctgtgccagtattcaaccttgaagatatagaggagggagttgaaggcgctggatttgacgacgagaaatccacttcttatgtnctcaaatgagcctggagaagagatttggccagtnccgcagcgtttgttgcctccactctgatggagtatggtggtgttcc

SEQ ID NO: 1389 - DNA, 256 bp, Zea mays
  misc_feature: Incyte ID No: 700344229H1
  unsure 6, 111, 198, 213, 254: a, t, c, g, or other
gcgaanagctggaggaagaagaggctctggttgcacctgactatggcgcggttgcagaatacactgcaccaggcgctgacaactggggcggtgaatggggtgctggcgaantggcagctccagctgctagcattccagctgctggcgcagactgggctgctgctccagctcctcctgctgacggtgtctgggacgcanctgtggctccacctnccagcagcagcccccggatgggaacaaggcgcggcccccgntt

SEQ ID NO: 1390 - DNA, 281 bp, Zea mays
  misc_feature: Incyte ID No: 700344233H1
  unsure 12, 15: a, t, c, g, or other
gcgtggccgcangtngcgcacgagtcgtggcgacggcatccaagcaaggaaaagaaataaagcggaaaactttaaacgggtacgcaggagatccagcgaaatggcggcgccgccgccgtcatatccagcggccttgaagccggagatcggccctgacggcctcgctcgagattctcccgtaatcgcctacaccgagaaggtcattttggaggagcagctgcagctgaagaaatacattcaggagaactattccaaaattcgtgatgtagaaaaggattaga

SEQ ID NO: 1391 - DNA, 280 bp, Zea mays
  misc_feature: Incyte ID No: 700344234H1
gggaccaggtaagcagcagcaggaaccctagcaccgccgcatccgcagccatgggtatcgacctcgttgccggtgggaggaacaagaagaccaagcgcacagcgccgaagtccgacgatgtttatctcaagctccttgtcaagctctaccgtttcttggtcaggaggaccaagagcaacttcaatgctgtcattctcaagaggctcttcatgagcaaaaccaatcgcccaccaatctccatgcgccgccttgtcaagttcatggaaggaaaggagaagaa

SEQ ID NO: 1392 - DNA, 278 bp, Zea mays
  misc_feature: Incyte ID No: 700344235H1
  unsure 158: a, t, c, g, or other
ctcatcctttccatcaaaactgagcaaacccctcatcctattctcgcgcccggcgtctcccttctccaacctccgtttctaatccgcgctgctaatcccactcccagtcccagctcgtccgctgagatggacagtagcagcctcaaatccgcgcagtncctggagctgatgcgccagcacctggccaccgatgccggcaaggaggtcaccaagaaggtcggcctcgtctaccagctcaacatcgcccccaagaagatcggcgttgatgaggagatctt

SEQ ID NO: 1393 - DNA, 269 bp, Zea mays
  misc_feature: Incyte ID No: 700344237H1
tccgctgcagccatgagtaagttgcagtctgagtctgtcaaggatgccatctacccagattgttggggatgccaaggagaagaataggaagttcactgagactgtggaacttcagattggtctgaagaattatgatccacagaaggacaagcgtttcagtggctctgttaagttgccccatatccctcgtcccaagatgaaggtgtgcatgcttggtgatgcccagcagttgaggaggccgagaagatgggactgactacaggagttga

SEQ ID NO: 1394 - DNA, 130 bp, Zea mays
  misc_feature: Incyte ID No: 700344242H1
  unsure 45, 66, 77, 105: a, t, c, g, or other
gttatgtttagcattatttcaaagaaggatgctattgtgtttganaaaaaaatgataatacatgtnagatgcaagcntgtactcccacagtcgtaaaataacccnatataagtgccgctatatagttccc

SEQ ID NO: 1395 - DNA, 274 bp, Zea mays
  misc_feature: Incyte ID No: 700344243H1
  unsure 106, 116, 118: a, t, c, g, or other
gggcacaaaggatggcagcgccaaggttggtggaaaggatggcgccaaagaaggcggcgcggcagccccagcaaacggcgccaagcagcctgctgagagccaaganaaccaccgcnancggcccctcggaggcggagaaagagcagcctgcagcctctgagtgaccggaaagggtgtctttattaagacatacacaagagccttaactgtcatagatggaagcgtgttttatttcagatatttccagacccgtctttcccgcgctgctgatctt

SEQ ID NO: 1396 - DNA, 270 bp, Zea mays
  misc_feature: Incyte ID No: 700344245H1
  unsure 12, 16, 23, 29, 49, 98, 149, 180, 183-184, 186, 238, 241: a, t, c, g, or other
aaccaaaattcnaatngcgtcantccggntcccgctttacccatttgcngctgtgtttagctctcttccccgaaaggatccatcgatcggtcggacanggttggcatgtacttcttgacttgcgtgccatatttttggcttctctatgntgttcaaacttgcattggtgtaccatcagcntcnntnaagaagtactaatagttgatacctgaggctctgagttgtacgtgaaatgtcngtncttggagttaggatatgctcggatgaaaa

SEQ ID NO: 1397 - DNA, 88 bp, Zea mays
  misc_feature: Incyte ID No: 700344246H1
gtccaagctcctccagttagaatcgacagccaagcaaaatcatggtgctgctggcccgaggtgatggcggccatttacttggcggctt

SEQ ID NO: 1398 - DNA, 276 bp, Zea mays
  misc_feature: Incyte ID No: 700344248H1
gcaccgtggtgtgggcattgtcaatcactggagcctacttacaacaaactagccaagcatctaagtggagttgactcccttgtgatagccaaaatggatggtactaccaatgagcatccacgtgcaaagtctgacggatacccaacaattctcttctatccagctgggaagaaaagctttgagcctgtcacgtttgagggggagcggacagtggtagatatgtacaggttcatcaagaaacatgctagcatcccttcaattgaagcgccaggagtc

SEQ ID NO: 1399 - DNA, 192 bp, Zea mays
  misc_feature: Incyte ID No: 700344249H1
gtcaatgcttcaagaactaggcaaacaaaacccacaaatcctgcgtttgattcaggaaaatcaagctgagtttgtccgcttggtgaacgaaactcccgagggtggtcctggaggaaacatattaggtcaactggcagctgctatgccgcaatcggtgacagttaccccagaggaacgagaggccatccagcg

SEQ ID NO: 1400 - DNA, 299 bp, Zea mays
  misc_feature: Incyte ID No: 700344251H1
  unsure 37, 46, 73, 262, 267, 269, 285-286: a, t, c, g, or other
accagtacctcgccgccgtcatcaaggcgcgcaagcntgagctcgncggcaacggcaagtggcgacgcgccgncgcacgaacgacctgctgtctcggttcatgcgcaagggctcctattcggacgagtcgctgcagcacgtggcgctcaacttcatcctcgccggccgcgacacctcctccgtggcgctctcctggttcttctggctcgtgtccacgcacccggacgtggagcgccagatcgtactcgagtgtgcgccgcgntcgcngngtcccgcgcttcccannaccggcattgtgg

SEQ ID NO: 1401 - DNA, 290 bp, Zea mays
  misc_feature: Incyte ID No: 700344252H1
  unsure 282: a, t, c, g, or other
cagacatgtcgaggatattatatccaagtgaagtgaacaagttgcacatgctgggttcaaatgatatctataacagagccttggaatgtgatcatctcctgggataatgtgtgagtttgagctgacatgttctgacttgggggcgttctgtggaagtaactggttgcacaacacagtatacctgatgtggataatggtggttgtgctatgagctggtacacgagtatttttgctattggaatttacaaaaacgaacctgagttttggttcagctatttgaantaccagta

SEQ ID NO: 1402 - DNA, 295 bp, Zea mays
  misc_feature: Incyte ID No: 700344254H1
  unsure 2: a, t, c, g, or other
gngcggagaaggaggcggcggctatgtggggcggcggcgacaagctcattctgcgcggccttcagttccatggcttccacggtgtcctttcaggaggagaagacgttgggacagatgttcgtggttgacatcgacgtctggatggacctcgccgctgccggcgagtccgactgcatcgctgacactgtcagctacaccgatatctacagcattgcaaaggatgttgtcgaggcacgccacgcaacctcttggagtcggtagctcattcgatcgcagaggccacatgctcaattcc

SEQ ID NO: 1403 - DNA, 297 bp, Zea mays
  misc_feature: Incyte ID No: 700344257H1
  unsure 236: a, t, c, g, or other
aagcatgactagagatgaaaagtctcctgaagatgtagatttgtcgaagccaactgacgcagaagaagctgcaaaagaaccagagtcaaatggcactacgaaagaagccaacgattcaccagccaaagaaccagaagtatctacttcccctgaacccatggagagtgacaacgggcaaaattgccgcggctactgggcgacgacttgttagaacagctagaagccctgaagcaagntcatggaactcatgcagctatggcgtgccgcagctcgagaggctgtattccaagatatgaa

SEQ ID NO: 1404 - DNA, 295 bp, Zea mays
  misc_feature: Incyte ID No: 700344259H1
tagatgtaaaggagttgatctccatgcttgccgatagtcaaggagactgttcaataatcagtagctacaagctggatacagccgactctgtttgcccttcgagggttcgtgctatgttggcttctagggcttgccgaatgtctactatgataggcgatccactaacaaaagctgagatgaagaagatacttaaaaacatggctggattgaggtcccctggaactgcccacacgggaggccaacaatgcggcacctagctgacctgcgtactatgaaggcgaaagactcgcgttta

SEQ ID NO: 1405 - DNA, 293 bp, Zea mays
  misc_feature: Incyte ID No: 700344265H1
  unsure 228, 292: a, t, c, g, or other
gggcaaggttggcccgatcactcctcttccggacctggtgaccatccacaccccgaaggacgaggacgagccgcgccctccggtcttggcacctcctgaggtgtaaggtcccaactgtgtccttgaaatggcagtttgatcgggtcctagataggtttctatcttacgataaggacaatgctaagacagttggttacctaatcttatggacagatgctatgtgttgcntctgtggcactttgtttaagctaagttttgcggagacaagatacttatatagttccggatgaant

SEQ ID NO: 1406 - DNA, 295 bp, Zea mays
  misc_feature: Incyte ID No: 700344267H1
  unsure 21, 39, 66, 177: a, t, c, g, or other
gtctttcccgacgcaaaagtngacgacgcgtgcgccttnctcgctcgctcgccgtctgccgtcgtncctaggtttagagccaggttcaccagcgctaggagggcgcgaagtcgagtagacggccgggcctctcccgttctccacggacggctagcgctactggaggcgacgcctggncggcgaccccgcacacttcacagccacaccctccacctgtgtgactattcaagggcttaggccgagccgcccggccaatcgccgtccgccggaccgctgaggaatttttctttctcgt

SEQ ID NO: 1407 - DNA, 289 bp, Zea mays
  misc_feature: Incyte ID No: 700344269H1
  unsure 224: a, t, c, g, or other
tggctgctgttgttctaggtgcttgcatcctgtacaatgctagccacgagaagggccgtgatgcttttgctgttgcagatgctataagtcaaaagattggcctcacaacgtacttcttgaggtttgacgaattgaggagaagcttggcacatccttgccagagcagcatcatcgcaaggagctttcccgatcaagtgcgaatagcatgtcagatttccaagaantgaagaggatgaaacaaataaagacgatcaacaccctgtcctctcagaaatatttgattcacagt

SEQ ID NO: 1408 - DNA, 60 bp, Zea mays
  misc_feature: Incyte ID No: 700344271H1
  unsure 25: a, t, c, g, or other
gtttgttcggaatgctttctaagtnccatattaattcaatatccaagcgttacaccgtgt

SEQ ID NO: 1409 - DNA, 294 bp, Zea mays
  misc_feature: Incyte ID No: 700344273H1
  unsure 68, 96-125: a, t, c, g, or other
gtccgcgtccagtgtgtccgctactccgctccccctcagtcctcagttcctcacctagcggtagcgtngcgcgcgggagacgtagatggcggcttnnnnnnnnnnnnnnnnnnnnnnnnnnnnnntgacgccgacagaggggacggtgatcgcgatccacagcctggaggagtggagcatccagatcgaggaggccaacagcgccaagaagctggtggtgattgacttcactgcacatgtgtcctccgtgccgcgccatggctccatttttgctgatatggccaagaagtcccc

SEQ ID NO: 1410 - DNA, 296 bp, Zea mays
  misc_feature: Incyte ID No: 700344274H1
gagtctccttcctttctcccgtcgcctccgcctccgccttcagtttagcctccaagcaggggcgccgcgcggggtattctgtccgtcgttgagggtagagagtcacttgcaccgggggagcggagatgaagccggttgtggggatcgtggtgtcgaacaagatgcagaagtcggtggtggttgcagtggaccgtctcttccacaacaaggtatacaaccgctacgttcaagcgcaccttccaagttcatggcacacgacgatggacgactcctgcaacttggcgaccgggttaggc

SEQ ID NO: 1411 - DNA, 294 bp, Zea mays
  misc_feature: Incyte ID No: 700344275H1
  unsure 20-21, 53, 61, 134, 188: a, t, c, g, or other
gggttcttgaagcgtctggnnactctagaaccgagaagaagtgcacttgaggncgattttncaggaagaagaggaagacaaggaggaacagcctatggaaattgatgaaccaaatggtcgtgaaaatgataatncatcgtggaaggagcctgccagggaacgggatagggactgggaccatgacaggnaacatgaaaggcataacagggacaaagattatgatagagctcgggattatgatagggactatgggagagggcgggaaagacaccgagatagagatctgaaagagac

SEQ ID NO: 1412 - DNA, 290 bp, Zea mays
  misc_feature: Incyte ID No: 700344276H1
gggattggtgcggaaatatgcatgtctgttgtagaggacagctttgagtatcttgatgcaccagtcgagaggattgctggagctgatgtgcccatgccgtacgctgccaaccttgagaggatggctgttccacaggtcgatgacatcgtccgggcagccaagcgtgcttgctacagggcagcagtaccgatggcagcaaccgcctagttccagcagaaccctggcatgttgcattcttgtctattttaagtccgtgctccagaaagactgtcgcataatggtgtgacgat

SEQ ID NO: 1413 - DNA, 292 bp, Zea mays
  misc_feature: Incyte ID No: 700344279H1
  unsure 114, 116: a, t, c, g, or other
tgaagattagaaatagggtagcagattcgttttgagcggggatatatagtactagcattcaacggtgctttccgttgtgagtccgtaataagcagtcatctgagcattctagancnaaaaagggagctgtttatccccccctttttgctttaacctttggtgtaggcgctgaacttctgatcctcatctggccaataaatcttcactgccgatcaagcgggtggagcatcgactgaactgccatccaacagttgtagccgaatctgcatgaactctcgttatacaccaatca

SEQ ID NO: 1414 - DNA, 285 bp, Zea mays
  misc_feature: Incyte ID No: 700344281H1
  unsure 155-157, 231, 261: a, t, c, g, or other
ggagtgtgggagtccttctttttgaaatgcttacaggaaagccaccgtttgttggtggaaacagagacaagattcagcagaagatagtaaaggagaagataaagctgccaacatatttatctagtgaagttcactcaatgttgaaaggattattnnncaaagaagctgcccagaaggctgggaagcggaccaggcggcatgacgaaatcaagaaccacaatggttcaagtncgtaaactggaagaggctggaggcccggcnagttcgagccaagttccggccgaa

SEQ ID NO: 1415 - DNA, 284 bp, Zea mays
  misc_feature: Incyte ID No: 700344282H1
ggtggtccttcaatgcgtggcccatccccaatctttggcgctccttcccctcatcatatgcatgatcctcgcagaatacgaagctaccaagacctcgatgctccggaggacgaagtgactgtcatggactaccgaagcttgtagacttcctccagttcttgtgcatccagatacctttgtagtcaacatttttagcgcgagagaaaaacaccttgctctttctagaatcgccgcggaggaaaccccggcaggctttttgtgtcgcgaccatgagatgtcagcta

SEQ ID NO: 1416 - DNA, 288 bp, Zea mays
  misc_feature: Incyte ID No: 700344285H1
  unsure 40, 269: a, t, c, g, or other
gctgaaattctttcaacaccacaaatcctggaagcaaganaaggactactgcaaagttcaccgacaaagcacaagctgttatcagaaagcaggaatactagagaacctgaagagagtgagttgtcaccgtcaagcatccaaaacaagcacggagtattctgaagcgccgtacattccaagaactaacttactgaccctgtgccgaatgttgaggctgacaagcatcctatctcaagtactgaggcagaaatagttgacaagtgctgtantacaagaagagttggtgat

SEQ ID NO: 1417 - DNA, 276 bp, Zea mays
  misc_feature: Incyte ID No: 700344287H1
  unsure 97, 256: a, t, c, g, or other
caagttttaggtttgtaaaatgcctgttaccagtcaggaatgagatattatcttcagatgataaataaaaaaactgggaactgggaattgtaccacnatgttgtgtacttagttcttatctaattctaattccttggcttattcttcaataacaaatttctgggaggaggacaatgcactctttctacagtgatgttgtgcgcctacaggtctaagggaaaggttttcacattgcaactcaaacaggacgcggacnaggttagtactatcttcata

SEQ ID NO: 1418 - DNA, 283 bp, Zea mays
  misc_feature: Incyte ID No: 700344289H1
  unsure 164, 243: a, t, c, g, or other
ctcgctggcgccctcatcgtccattgacagcatcccatggcgctgctgccctcatggtctacctgctgcgagagttgcctcgtcgcactcgtcgtcgggctcgaaccgggtgtgcgcagcccgtccgcgacaggtcgaccccgcggcggtcttgtacttgtgtngcttcccgagctgagaccttgcacgcaacagcaagtcctggatcccctctgcatcgcgtgtttcgctgggtctgcgcanccctgcacgtcgtcgtcgaattccgcgcctccgtcgatgt

SEQ ID NO: 1419 - DNA, 282 bp, Zea mays
  misc_feature: Incyte ID No: 700344292H1
  unsure 271: a, t, c, g, or other
ccccgctccgcctccactcctcgcgccgctgccgcatctcctctacaggtaagaaggagagaaagagggcgaaatggtgaagcacaacaacgtcatccccaacgggcacttcaagaagcactggcagaactatgtcaagacatggttcaaccagcccgcccgcaagcagaggcgccgcatcgcacgtcaaaagaaggctgtgaagatattcccacgaccaactgctggccctcttcgtcccattgttcatgccagactctcaattacaacngaatcagggtg

SEQ ID NO: 1420 - DNA, 283 bp, Zea mays
  misc_feature: Incyte ID No: 700344294H1
  unsure 206: a, t, c, g, or other
gggcgggaaagcagctactgctgcagcgaacagcttgaacagggagtttggatcaaagcttaaagagcacatgcagtactgtgtggaccaccctgaggaggttagcaagcttgccaaggtgaaggcccaagtctccgaagtcaaaggagttatgatggaaaacattgagaaggttctgaccgtggcgagaagattgaactgctgtncgacaaaactgaaaatcgccttctcaggcacaagtttcagcagcagggcaccaaggtgcggcggaagatgtggctcc

SEQ ID NO: 1421 - DNA, 153 bp, Zea mays
  misc_feature: Incyte ID No: 700344295H1
acaccatcctcggcatgaaggaggaagagcgactactggagctcgtgaaggatgagcaggctgatggaatcttggattcattaccaattgacctggaggccaagaatggcgatgcatcactcattactgaagcgatgaaaaaggaggaggagc

SEQ ID NO: 1422 - DNA, 154 bp, Zea mays
  misc_feature: Incyte ID No: 700344296H1
  unsure 52: a, t, c, g, or other
gcagagtctatctccaagataaggaatgagaaagctcgacgatacatgaacnatatgaggaaaaagcctcgggttccctttactaaaaagtttccagggatagatcctatggctctccatttgcttgaacgtctcttgcttttgatcctaagga

SEQ ID NO: 1423 - DNA, 297 bp, Zea mays
  misc_feature: Incyte ID No: 700344301H1
  unsure 295: a, t, c, g, or other
aagcaaggggttccatcattgaataagccgactatacgtggtgatcatctgttcactgttaaagttgcaatacccaagcgcttaagtgggcgtgaaagggaattactggaggaacttgcatctttgagtaatggtggctttgctcgaacagatgccaagccaaaacctgcccagccaaaacgtgtacatctagagaaagaagttggtgctagccaagaagatacagacaaatctaaagcagcgggtgattggttgaagaaacttacagattttgctgggtcattgctatggtggngg

SEQ ID NO: 1424 - DNA, 288 bp, Zea mays
  misc_feature: Incyte ID No: 700344304H1
ggtgctcgcgtgacgcttggtatggcctcggaaacaaggcctgccttgttgctagtagaaagcactgcccttttggtaagggcgtttcaggagtactgtggtggactattgagagaaaggctcctcctctgtgaccgtgactgtgaccacctcacgttctgcgtactctgtaatctggtaggatgcctgtctctatcatgattcatgaaggacgattggtcctgtcttatttgtcgtgttatttattaaccgtgtaaatgtactagcgaaggaaaggcatggtagcta

SEQ ID NO: 1425 - DNA, 111 bp, Zea mays
  misc_feature: Incyte ID No: 700344305H1
  unsure 25, 73: a, t, c, g, or other
aagacgcccatgccctggtattgangtcttaatggcactatatacattcattacatacatagtgccattaagncgcccatgccctggtattgaggtcccggcatttgtatg

SEQ ID NO: 1426 - DNA, 288 bp, Zea mays
  misc_feature: Incyte ID No: 700344307H1
gttgtagaagctgcaatggaggggagtacgtcgatgtccgttggtcccaccatcacattcatggtcgtttcggtcacccacccctccacccaaactggcatctccttgctccctggtgagtttttctcttgatctatcttctttgttagttgttttcggcgttgtcaaaatctcaggtgccacaatggacgaaagaacaacatgaagaattgggttccaaaggacttgagggctacttcatcacaacctgtaactgaagatttgaataactggactacatcaccatgc

SEQ ID NO: 1427 - DNA, 291 bp, Zea mays
  misc_feature: Incyte ID No: 700344308H1
  unsure 16, 126, 163, 191: a, t, c, g, or other
cagggaagcatcagcngcgccgccgccatcactgctacgctgccggcgctagagccctaaaccctagctagggctaggccatccatggccgcctctccccagactctgtcagctcccccgcccgcngccgcggccgtcccgaacctcggcggcaagcgcaagnggcaacccaagggcaagaagaataagangaacaaactcgcgcgctccgaccaggatgactccgtccgccgccgccgcaacaagccgagcgccaattccttcaagctgctccgcaagcgggcccgcgat

SEQ ID NO: 1428 - DNA, 278 bp, Zea mays
  misc_feature: Incyte ID No: 700344313H1
gccaatacaggtcaagcctgtgcagcttgattttgagagcagtagtagtgatgagtacagtagtgatgttgggagctcagaagaagatgatgaggattagtgctcggtaagctgctccttcgcctctatcatatgcttgggctttccagtagaatcctctatgctagttattttacctgctcatgtcttcctgactacttatgaacttaaggctgatctcagatcatgtaatggtgctgtatcctaactctaatccaagtatataccgagatttacta

SEQ ID NO: 1429 - DNA, 294 bp, Zea mays
  misc_feature: Incyte ID No: 700344314H1
  unsure 21, 35, 77: a, t, c, g, or other
ggcagcaggaagatgccggcngggcacgggctgcngtcgcggacccgcgacctgttcgcgcggcccttccgcaaganggggtacatcccgctcaccacgtacctgcgcacctacaagatcggcgactacgtcgacgtcaaggttaacggcgccgtgcacaagggcatgccgcacaagttctaccacggccgcaccgggagcgtctggaacgtcaccaagcgcgccattggctcgagatcaacaagcaggttaacggtcgcatcatcaggaagcggatccatgttccgcgtggag

SEQ ID NO: 1430 - DNA, 292 bp, Zea mays
  misc_feature: Incyte ID No: 700344315H1
  unsure 140: a, t, c, g, or other
gcgatgcgtctgttcgcccacatgtgccatggaacgccggtcctggacggcgatttctactcccatgccatcgtggccgtgctgcggtcatgtacccgtgcaggcgagctacgtctcggtgagcaggtacacgctctcgncgtcaagaaaggcaggatccacggtgacattggcagctcgctagtgcagctgtactgcgatggaggcggttttccacagaagcgcgcggcgagttctcgcgacgacgatgcagcaccatgtcaggaaccagttccctgaggctgcctggacg

SEQ ID NO: 1431 - DNA, 294 bp, Zea mays
  misc_feature: Incyte ID No: 700344316H1
atcaccgctgttaggttctaccaggagaccttcggcgtccctccggccacgcgagctcgccgaaatggtcgcccacaggttccatcagtaccaggtggtgggtcgcgcgctgccgaccccaaccgatgagcaccccaagatctaccgcatgaagctctgggccaccaacgaggttcgcgccaagtccaagttctggtacttcctgagaaagctcaagaaggtgaagaagagcaatggccagatgcttgccatcaacgagatctttgagcgcaacccgaccaccattcaagaata

SEQ ID NO: 1432 - DNA, 288 bp, Zea mays
  misc_feature: Incyte ID No: 700344319H1
  unsure 14, 190: a, t, c, g, or other
aaagttgggcattncaagcaaagtggttatggctagaaaaaaccaatccaaatagacattggcagggtcgaaaattacctgtggcatcgacatgttaatgatttgattgcaaattctatgatatctatcattgggaatggggacaacactctcttctggattgataattggtcaaatgggaatgaagtcngggaccttaccctagatgtggtagccaaggtgggcaaatgatcccaatctactagaactgtgacacatgctcttgataattatagtgggtcaatgata

SEQ ID NO: 1433 - DNA, 288 bp, Zea mays
  misc_feature: Incyte ID No: 700344320H1
  unsure 149: a, t, c, g, or other
ggcatgtcctactactatctatagctagcttccaacaagatttgcgcttcagactttttggaggtctacttgggtgacatttttcagtaaggtccatgagagaagtgtgtagcttgtggactaggtagaggacagcaacatcgacagtnccagcaaatgacatcaaggtatgtcgaggaagattggagctttcaagtcgataggtacaagtcacaagccacagtccgagaatcctgaaaagctaagctaattgttggtacgtagggagataccccgctctgcttctcg

SEQ ID NO: 1434 - DNA, 287 bp, Zea mays
  misc_feature: Incyte ID No: 700344322H1
  unsure 48: a, t, c, g, or other
cctcacttaaaccctcctccgctcgacgacaccacacgaaaatatacntccagaataaaccgcagcaaattcttctccggcatcggcagcgcccaaatccggcaatccgctgctccgaatggactcaggttacaatccccggacggtggaggaggtgttccgggacttcaagggccgtcgtgccgggataatccgcgcgctcaccactgttgcggaggatttcttcaagcaatgcgacccggaaaaagaaaacttgtgcctgtatgggtttcctaatgagagctggg

SEQ ID NO: 1435 - DNA, 279 bp, Zea mays
  misc_feature: Incyte ID No: 700344325H1
aaaggcagcagcatcattcatgggtgagatatggcaagttcctccaatgttttctgccattaaggttggcggtgaaaagatgtatgacaaagcaaggaagggtgaaacagtagagctttcaccaagacgtatatcgatataccaatttgatattgagcgcagtttggaagacagacagaatttgatatttcgagttactgctcaaaaggaacatacatcggtccctatgtgcggactgggtaaagcattggaagctgtgctcattaactgcctgcggag

SEQ ID NO: 1436 - DNA, 192 bp, Zea mays
  misc_feature: Incyte ID No: 700344326H1
ctgtgttaatctcccattgtatgctgtgcagctagtgttaatcttaggtagaattgtagctgtgcgcctatctttgcttgcccacagccaagaaaaaagaattgatgtctgcacgtgatgtgctagcagtaagatatctggattgtggaagtcaatgcccatttgctaaatcgagctggagacactgttggc

SEQ ID NO: 1437 - DNA, 288 bp, Zea mays
  misc_feature: Incyte ID No: 700344328H1
ctggtctgccattcccacgctccttcctgtgaaccacaaacctaacgcggagggcgcggggccggccgccgggcgaggtgcgcgtacctgccgtcgatcgtcgccggatccatccaccatgggcggtggcaacggccagaagtccaagatggcccgcgagcgcaacttggagaagaacaagggggccaaggggagccagctcgagaccaacaagaaggccatgagcatccagtgcaaagtgtgcatgcaaacattcatgtgtaccacgactgaagtgaagtgccggga

SEQ ID NO: 1438 - DNA, 286 bp, Zea mays
  misc_feature: Incyte ID No: 700344329H1
  unsure 36, 76: a, t, c, g, or other
tggaatggctactatgttatatgccactgcccaggngtgctgctgccacaatatgatttcgccatgacaccatctnctactcaggggggttgatggcccttagctcaatctttgttgtcagcaattctttgcttctgcagctgcatgggtcgtttcagaacacagaaaaacggcagggtgatctgagctcaagattaaactgaattgttgggtttagtttgacccagccgaaggaacagtggtatgaatatagagggttctgatactggttttccagctccggcta

SEQ ID NO: 1439 - DNA, 283 bp, Zea mays
  misc_feature: Incyte ID No: 700344330H1
gccttcagctgatatatggagccttggctgcaccgtgttggaaatgctaacccggcaaataccatttcctaatattgagtggacaaatgctttcttcatgattggaagaggggaacagcctactattccctgctacctgtcgaaggaggcacaagatttcattggccagtgtgtaagagttgatcctgagagccggccttctgcatcacaacttttggagcacccatcgttaacagaccactgcgggcttcattgaatctcatctcccccagccatctgattg

SEQ ID NO: 1440 - DNA, 291 bp, Zea mays
  misc_feature: Incyte ID No: 700344331H1
  unsure 84-85, 140, 254: a, t, c, g, or other
gaaaataaagagggagaggcgaaaacaatctaacagggagtctgcaaggagatctagattacgcaagcagcaagagtgcgaggnnttagcccggaaggtagctgacctaacgaccgagaacagcgctctacagagcagancttgacaaccttcaagaaggcttgtacaagacatggaagcagaaaattcacgtctgttgggtggggtggctgacgcccaggtaccaagtgtccacgaccacactgggatgagcntcgagccgccgaattgcagctgcagtgcagcagcatc

SEQ ID NO: 1441 - DNA, 284 bp, Zea mays
  misc_feature: Incyte ID No: 700344332H1
  unsure 2, 17, 26-27, 40, 64, 74, 111, 164, 179, 196, 204, 213, 227, 229, 247,: a, t, c, g, or other
gntcaatattactgggncactatcannttggtccttcgcngataacatgctcccagctcctcanactgtaagtngtgggccaccatgcatatatttgtcgactcagtgganagagcgatgtggattggtcttctggttggaggcaaactcttctgaaagtctgngagtcgatgtcgcantacttgatcagtacctngttgatantacaaaganactcaagagcctcncncaagttgggcagactganagncntcacaacattttctcancgtatcnntatgagg

SEQ ID NO: 1442 - DNA, 281 bp, Zea mays
  misc_feature: Incyte ID No: 700344333H1
  unsure 3, 198, 272, 280: a, t, c, g, or other
ggngaattggagattagggcatccatattggaagaatctggtattgctcagcaaagcaaccttgatggtgataaaatggaaccagagattattgtgtgcaagctggaagatgtttctgaagaatctggtgcctgcactgaaagcaacctacatgataatacagagtatgttatagacgatgctgaaatgagacaaganattactttatgcaagcgggaagatgctctaaagaaactggaattgatcaagaaacctagaagatgatagctcanctgtggtnt

SEQ ID NO: 1443 - DNA, 279 bp, Zea mays
  misc_feature: Incyte ID No: 700344334H1
tgtatattataaaaagaaaacattatcgaatttggtggtgaagtcacaattacattttttgttttgtatcagtaccgaggttttggctttgtattttcaaaacaaacacatacctattatacctactaacattagttgctacctattagtgtttctctattaaataagttcgatcactaagtttggtcaatcggttgtataaatttctttattaatataacaccagacgtgaaaggagcctatctaggagtgattctcctgataggtcaccaaaacaca

SEQ ID NO: 1444 - DNA, 276 bp, Zea mays
  misc_feature: Incyte ID No: 700344337H1
ttatcgatggaaagggtgctcaatatgagtgtgcaggctaatgtgaacctgataccgaagcatacaaatgacacagaatccctggagcagttttgcaaggacactgtgatcaccatctggcattatcatggtgggtgccatgtagggaaggtggttgaccagcattaccgggtgcttggagtttcaggtctccgggtggttgacggctcaatattttctaaatcgccaggaccaaccctcaagctacagttatgatgatgggcagatatatgggag

SEQ ID NO: 1445 - DNA, 277 bp, Zea mays
  misc_feature: Incyte ID No: 700344338H1
aaaagtgtgtgtttatggttcctgagtcagatgatctttcttcagttttagaacacacctctccatctttcggtgctaggtggatcaccgtctaaacaatccaccaccagaaccgccctaccccaagatagctccatctcagtcgttgtacccattcaatggcgagctggtggcagcgatgtaggagatgatccatgacgaggtgcacaagtacatgttagtggacgacacctgccaaagatacacaatttctactggtacacattttattttttca

SEQ ID NO: 1446 - DNA, 279 bp, Zea mays
  misc_feature: Incyte ID No: 700344340H1
  unsure 47, 102, 105, 114, 164, 170: a, t, c, g, or other
cttcgtcgtgcggcaactgcgcgaccgccgacgcccgacggcagganccccaggtcttcgtcgaccccttcgcaaggtcctcggttccatccttcgccgganganacgcccgtnaacaggacttgatctactactcactagcggtgtagaggcgaagagaagancttgancatgagcagcataggcacaggttacgatttgtctgtcacgactttctccccagatggtcgtgtcttccaggtcgagtatgccaccaaggccgtcgacaacagcgggact

SEQ ID NO: 1447 - DNA, 283 bp, Zea mays
  misc_feature: Incyte ID No: 700344342H1
  unsure 34, 92, 235: a, t, c, g, or other
caaacttccaagaacccgtgaagtgaagtgaggnggtcggcggaaccggaacccaggcgatacgagatgatcgcaaacggcctccgcaaatnccagtgctgcctcctcccaggttagcaagctggtgaaatacattgctagtgctggaagcttgcaaggggggcacagtttatcagagccgtgctgccagacattacagctactgcaaccttacacttcaggcgacagaagaaangggtttaaggggcacagcatgctggctccattcacagcgggatggcag

SEQ ID NO: 1448 - DNA, 282 bp, Zea mays
  misc_feature: Incyte ID No: 700344343H1
  unsure 53: a, t, c, g, or other
catcaccatcccttccttgaaccctctgcccacacccatcacagcccccttantatcacatcccttctccttccaccatgctgccgccggttccggtcatatatccgctgccaacgccgtcaacatcctccccaccagctgtgccggtcaccaatcctgctgtcaccacgccttccacgtcccctccgtcgacaccaacaccattcaacaacccaccattgttgaacccaacgccgacccctgctcctacagtcacggccccagctgcttcaggccgggagg

SEQ ID NO: 1449 - DNA, 278 bp, Zea mays
  misc_feature: Incyte ID No: 700344344H1
  unsure 85: a, t, c, g, or other
ccgcctccgctcccatatgaatcaggggatccactcggccgcacccatcgcaccaaaccaccgaacaaccttgccttcgagaganaccaagagtgcgggaggaggcgcatccacagaatccggtgctcgatggcgtaggctccagcgaagagaactgagggagtattggtctaggctgcgcgtccgcaaaacagaacctagtatcgagggtggctagagcatggggaatcgctcgcgggacttgctctcgcctttgtggaatccagccgccacggcca

SEQ ID NO: 1450 - DNA, 279 bp, Zea mays
  misc_feature: Incyte ID No: 700344345H1
ctctcttccggctccttgccatccgttcaggtgccgccgttgcagttcgcgaaggtgtcggcagggtcggacggatcgctgctagcgttcttctgggacgcggttgcacacgtgcaaaaagcacactcgaggttggacaagcacatctcgagatggttcgggctggaccagtccaagtaccagtgggcgctcaacgactattttgagaggaccggacaggagatagattcgagcacgctggagcacagttgtaaaaattcagaaagcatgacaaatgaa

SEQ ID NO: 1451 - DNA, 279 bp, Zea mays
  misc_feature: Incyte ID No: 700344346H1
cccatttgtgttaatctgaaaaatgtcaatcccaagagttgcacaaggcgcttctcaagaggcagcgtggagagcaatcatgtcttgagagaaatagcttcacctgaactcaacatactcgaggacaaggtccatgatgatagtgaagatagtccaagcttgagcttttcggaaatacagaggaagtggaaggaagagttggaccaggaacttaaaagagagcgagaatgaggtcgggtggctatggtaaagcaccatcaccgtcctcaacgagccgga

SEQ ID NO: 1452 - DNA, 300 bp, Zea mays
  misc_feature: Incyte ID No: 700344351H1
  unsure 216: a, t, c, g, or other
atcggggtagtgcaggaacaaaggaaggacgtgaagccacgctcttaccaggcaggaaaaccagagatgtgtgacacaaccgtaacggaggaatcgtcgcccatcagcacgctaaagctggcgcacacggagagcgcgcccgcggagtgggaccacctgaacatagtccagcagagggccgacgcgctggagtcgctcctggagctctgcgcgaanttcctggagcaggagaggctcgacgagctcgcgggcgttctccggccgttcggcgagggcgcctgtctctaaggagacggcgat

SEQ ID NO: 1453 - DNA, 297 bp, Zea mays
  misc_feature: Incyte ID No: 700344353H1
gatcttgagaaactaaaaaaatttcatgtgtagagatttccatgttctataggaaaagttggagtaaatttccaagaattccagttttggactcaaggttgatttgctggaaataatatccactagctaactttggaccattgcaacttttaatctatagacaattcggagatggttaatgtagcaaagttgaagtgttgcattaggtgtacaaagttacttaagcaacctgacccaagaaccatatggaactagatgaaaactgtgtccaaagatgggatgtcagatatgggaatt

SEQ ID NO: 1454 - DNA, 291 bp, Zea mays
  misc_feature: Incyte ID No: 700344354H1
  unsure 54, 56, 126, 254, 275: a, t, c, g, or other
cttcatcaagaagcaacagcaggagccacagtcgcagcaggagcaggagcaggngnctgcagtcctcagcgaagagataggttgcgcacgaacgtgcaccccgccgcagtacgcagtcacagcagngcccgcagcccataaccgtcgcagagaacggcgtggatacaaggatctcgtatgcaagaatgccggagactgggcactttgctaaggagtgcccatctgcgctacgtgcataatgtaacttccaggcnattcgcagcagatgcacctcnaaaatgtttgctggaa

SEQ ID NO: 1455 - DNA, 292 bp, Zea mays
  misc_feature: Incyte ID No: 700344358H1
gcaaggaagactgccactagcccaagttcaggatggcgatgaaggttcaaatttatcagctgaggaaaagcatctgaatgagacattcataaaggacagtatccctccctggttggcaggatctggttacattggccttgcagcaatatcgattgcaaccgtcccaatgatctttccgcagatcaagtggtaccttgtcctctcggcatacgttgttgctcccctcctcgctttctgcaactcatatggcatggactaacggactggaatcttgcgtctacatatggaaaga

SEQ ID NO: 1456 - DNA, 297 bp, Zea mays
  misc_feature: Incyte ID No: 700344360H1
  unsure 7, 56, 128, 243: a, t, c, g, or other
gcggganatgacgaggatcttcgtgcagcgcgggaccgccggctcctcgtccagcnccggccgctcggacacgcagccagtgcagccggcagcagctgcccgggaggaggagttgccgctgcaacctncaaccacagctgccggagctattggccatagatgatacaactgataatttaaatgagggcagcgagaatatcagcaataagcctttgaggacggatgacaccattcagagagctncaagctccgcagaggagagggctgccaggagaagcctcttaaggatgactctaa

SEQ ID NO: 1457 - DNA, 298 bp, Zea mays
  misc_feature: Incyte ID No: 700344362H1
  unsure 244, 247, 266: a, t, c, g, or other
aatatcttcttatgcagtccaaggagcttcataacaatttggaactggcacagaagagcattgtagaccatacttctgctcagagaaaacgaaaggcgagagtaatttcagagtatgctgttatggcccgttctatcattcgtaagaagtttcagcagttccaagaatctgctatagctgaaagagtgaaagaagtagagaatgctgtgaatgatgccaaatactgacagagtgaaggatcctntgnccggcaattacatctgccntggaagatacagaactagataccagctgggct

SEQ ID NO: 1458 - DNA, 300 bp, Zea mays
  misc_feature: Incyte ID No: 700344363H1
  unsure 239: a, t, c, g, or other
atacattctaattgtatgcagacctgatgtttgataactattagtgtatctgtttacattgtatactaatgaacaatatttgttccatgtttgactcttatctcattacccccttacgtttggcaggacaaaagctgagccacctatttattacatgccaactaaaccaattattgatgatccagccattgttgagcagaacaaggaaaaggtattcgaagaatggaaatctatgcgcnggctgagctgactcagtttcaaaagcaagttgaggagcaatatctctcaaatgtggagagg

SEQ ID NO: 1459 - DNA, 247 bp, Zea mays
  misc_feature: Incyte ID No: 700344364H1
ccattttcctgggatcatcactgaagcaaacaagctatacgatctagtgtactagctctgtccgattagattcttaatagtttctgtgcttgttattgtttgtgctggaatatcttctgttgaagcagtgtttgatatcttgatgtttctagttcgcggtaactgctgaaaggctatctgtgagaaaatgctctcatttatgtttgcttgttactagaccagaataaccgtattgatgagtttcagc

SEQ ID NO: 1460 - DNA, 281 bp, Zea mays
  misc_feature: Incyte ID No: 700344365H1
  unsure 2, 69, 71, 199: a, t, c, g, or other
gnagcgtcctgcgagccagtgttgcgattccagttcatgcaattggcatccgtaaggggaatgcaagangnaagacactagagtccagggatgctggtgtaggtagagagggggaacaaggaatttacatacggcatagagatgagagctctctcgtaccattttgtaccttcaattcgcaatgaactttaggcaaggnttgcctgggcaattgaacatttgtcgggtgagaagatccaaagatggatcggcagaggaatagaaccatttgatatatttcc

SEQ ID NO: 1461 - DNA, 270 bp, Zea mays
  misc_feature: Incyte ID No: 700344368H1
  unsure 22-23, 37-38, 71, 137, 222: a, t, c, g, or other
aagaatggaaaggcagcgtcannaggatgagttaaannaccgatcttcctaagaaaacacaggaagctganccagtcaacatctaagagggccttcagtccccaaacagatgctgagcaaggtggtggcagcttaanatcaatgaaagacaaattctggccagcaagataaagacgcaaaagagggattcgaatttgcaggttgctggtcctgctggtgaantatgcagttacctcttaaagaaaagcgcaaaactatgggtggagtaaa

SEQ ID NO: 1462 - DNA, 292 bp, Zea mays
  misc_feature: Incyte ID No: 700344369H1
  unsure 69: a, t, c, g, or other
gttttcctcactctctcctccagctcagggtccggcggcgaagggaaggcaagatgtacaccgcgaggnagaagatccagaaggagaagggtcttgagccctccgagttcgaggactccgttgcccaggctttctttgatctggagaacgggaaccaggagctcaagagcgacctcaaggacctgtacatcaacaatgctatccagatggatgttaccgggagtaggaaggctgttgtcattcacgtcccataccgcctgcgcaaggccttcaggaagatccatgtcagact

SEQ ID NO: 1463 - DNA, 287 bp, Zea mays
  misc_feature: Incyte ID No: 700344370H1
cgcaatggcggccttcaacaagcttggtggccttctaaggcacagtgctctggtgagcggtatcactggtggctcttctcctgcagtgttcaatgctgcacggctcatgtctaccaagctatttattggtggtcttgactggggtgttgatgacgtgaaactaagagaagcatttagcagctttggagaggttactgaagcgagggtgatcacagacagggagactgggaggtcaagaggcttggcttgtgaactactccgacagtgatgctgccaaggaagctatt

SEQ ID NO: 1464 - DNA, 285 bp, Zea mays
  misc_feature: Incyte ID No: 700344372H1
gtcaaggatgtgatagatggtgatctctgcgagcagtatccctccctcccagccgatatgcaaaggaagattgctgatgagctggacagaactccgggtgaaatcctgaagaagctagaagacatcaggaacaaaatcatctgaaacagcggcttagtgtgaagaaattaggcagggcaatgccggtgctctttgctttaagactatccagttcgagctgttgccgcacttcaagatgtgacagcagcgcatccaacaagtttggagcacgctgatctgtacatc

SEQ ID NO: 1465 - DNA, 290 bp, Zea mays
  misc_feature: Incyte ID No: 700344373H1
  unsure 46-47, 79, 250, 267: a, t, c, g, or other
gtttggctaagagcgatcttgatcttcaagttgatgagctgagcannaggtcagtggcgcatgaatgcagaaaatagtncacttaaaggagtacatcatatacttggtagagattctcagaacttcgattagtcctttcagagtttgatttggacaccatcaaagtgtctgccaggagttggttgttaaacttgagaattgcatgacacagctggcgcagaaggatggtgagctaatggaagcagaggangaagttcaactatggcnagaaaagaaccaggaatctgtgg

SEQ ID NO: 1466 - DNA, 288 bp, Zea mays
  misc_feature: Incyte ID No: 700344375H1
  unsure 2, 53, 75, 112, 217, 220, 239: a, t, c, g, or other
cncaaacccacgccccccaccccctattattctatatatataatacacacacncagtgtagtagtgtggagtacnctcaattggcgttggccgaagaagaggagaagcgaanaagcaggcttcgagaacaagggggagggggaggaccaagcgaaagggggaactagagcaagatgggcggcgaactgctgcttgcgctcctcctcgtctctgctgntgncgcccctcaggtacttggngttggcaatggagacaatcacatgagatcttccaggaggacatcttgag

SEQ ID NO: 1467 - DNA, 288 bp, Zea mays
  misc_feature: Incyte ID No: 700344377H1
gctagagcacaaaaagatggttgaaggaattgtaaagcgggatggaaagcgtcgcaaaagaatcaaggcagctggtattgactatgagtgtccagctcttatagggagcattcaaccatcagcgaaaaagatcaagttcgatgaggctcagtattttattctaatgggctgttggatcctagtagacgaggcggtggaatggttgagcaatatattcacctttgaggagacggcagacaactatgtatttcactttgaattctctatgtttatgaatgacaccgacac

SEQ ID NO: 1468 - DNA, 300 bp, Zea mays
  misc_feature: Incyte ID No: 700344380H1
  unsure 70, 74, 171, 187, 275, 281-282: a, t, c, g, or other
agaaaaggccatcgaaaacgccgccgccgcctctgatgctttccgccgtgcgatgtggtgcccttccgcnggtngcgcccgccgccgcacctcctcccacgcatcctttcctcctcctttggtacatctcccgcgcgaccacaggtgggggcgctgctggagctcccggangtggagaaggtatgcncgacgtacgagcgggtggcgtgcgcgtattccccgtcggcgagagcggtctgcacggcggggcctgcgacgactacatggtcgtcgcncaggcnnctccgattggcagtcgta

SEQ ID NO: 1469 - DNA, 120 bp, Zea mays
  misc_feature: Incyte ID No: 700344381H1
  unsure 2, 6, 25-26, 28, 35, 72, 74: a, t, c, g, or other
cnagcngccaccaggtgcagagtcnntngtcatcncttctccggcgaagaacccccagtacgcccaccagancnacttgttaaactttgttgaggggtgatggcggtttctttcgcaaac

SEQ ID NO: 1470 - DNA, 284 bp, Zea mays
  misc_feature: Incyte ID No: 700344382H1
  unsure 248: a, t, c, g, or other
agaagcttgataagtgtgtaaaagacactctgctggacctctgttggacccttggtattccaactccgaaagcaaacattagaaaggaagatattgtgtcaaagctgttggacttcattgctgaacctcactctgcagctgaatcttggggctctgatgatcagggatcaaattctaaaaaacgcaagagaggaggtgaaagtgcaagtaagacgcctgatggcacacctagtaggtcgaggaagaanttgtcgatgacggtacttctagtaaaaggcagataa

SEQ ID NO: 1471 - DNA, 151 bp, Zea mays
  misc_feature: Incyte ID No: 700344383H1
gcaaaaaggatcgaggagaaaagaatcctcactggcgttttggcttttattggatgtgtgcccgaaatatctgtagtcacattcgcccacgtaacttcgaaaaaattgttatgcataagctttgctgtatgagaaatagaacttgcatgat

SEQ ID NO: 1472 - DNA, 280 bp, Zea mays
  misc_feature: Incyte ID No: 700344384H1
attcatcattgcacaataaaaaagttggagtttgacacaaagtattactatgctgttgggattggacaaactgtgaggaagttttggtttttgacccctccaaaaagcggcccagatgttccatatacactcggtctcataggtgatcttggtcagagctttgattccaatgttacgctcacccattatgagtccaatgcaaaagcacagggagttctttttgttggggacttgtcatatgcagataactacccatatcatgataatgtgagatgggata

SEQ ID NO: 1473 - DNA, 221 bp, Zea mays
  misc_feature: Incyte ID No: 700344385H1
  unsure 171-172: a, t, c, g, or other
ggagccggaacgggaaatcgcagcgatctctgtttccacattccagtttgaagtctggtctgtggcggctaccgttgtgctttggcgttccttttgcgacagtttttgccctggtgcaggctggtgcttggtgcccttttggttaataaactgcgctgcaacgaaatgtgnntggtatattacttcagttgaaggccggggctgtttgtccctgaactcta

SEQ ID NO: 1474 - DNA, 274 bp, Zea mays
  misc_feature: Incyte ID No: 700344387H1
gttgaggagagtggaaatttatgaattcagccgattgaatatggtttacactcttctaagcaagcgaaagttctttggtttgtacaaaacaagaaggtcgaagattggacagacccacgttttcccactgtccaaggcatagtacgtcggggctgaaggttgatgcattgatacagtttatactccaacagggtgcttcaaaaaatcctgaatctcatggaatgggataaactctggacaatcaacaagaagatattgatccatgtgcgcaggc

SEQ ID NO: 1475 - DNA, 276 bp, Zea mays
  misc_feature: Incyte ID No: 700344389H1
  unsure 2, 148: a, t, c, g, or other
gncgcttcctcccgttagactaggttaggctaggctagggtgtcgaccagctcgcggtaatggtggccttcaggttccatcagtaccaggtggtggggcgcgcgctgccgacgcccggcgacgagcaccccaagatctaccgcatgangctctgggccaccaacgaatccgcgccaagagcaagttctggtacttcctgaggaagttgaagaaggttaagaagagcaacggtcaggtcctggccatcaacgagatcttcgagcgtaacccgacgac

SEQ ID NO: 1476 - DNA, 278 bp, Zea mays
  misc_feature: Incyte ID No: 700344390H1
cctctcacctgctgactgctgtgccgctccgctccggtggcatctgcatctgcatctccatccctcgatctgtcttctctcagggtggaagaagcgtgacaatggaggctccacccgtggcgctgttcgacaccctcaaggcagccaaaccgttcttcttgttggctggtcccaacgtgattgaatcggaggagcacgtcctgaagatggccaaacacatcaaagcaattacgaccaagcttggaattccactcgtgttcaagtccagctttgataaa

SEQ ID NO: 1477 - DNA, 277 bp, Zea mays
  misc_feature: Incyte ID No: 700344392H1
  unsure 261, 273: a, t, c, g, or other
atctccaagaatattgtaatgaattggagaatcgactactggctcggtttgatgctgcatcacagagacgggagttgtctacaatggcagaatgtgctaaaatattgtcacagttcaaccggggaaccagtgctatgcaacactatgttgcaatacgaccaatgtttattgatgtggaaatcatgaacactgatattcaagttgttctgggtgatgaggggttgcaagctgattgcgacgtattgcagatggtcctctacntgtataaggaantgcc

SEQ ID NO: 1478 - DNA, 287 bp, Zea mays
  misc_feature: Incyte ID No: 700344395H1
  unsure 65, 70: a, t, c, g, or other
gtcgatgacggagcactgcttcatcggacggcatcagaagaaaaaccagtagacagaaggtcatnccctngatctcagttgccaaatgatcggtgcagatagtgacataagctactacgggaaggaagatcattctagaacatctgcgcacgaactaaaaccagaagcagttgcacttgcacctcttgtaacatcggtgcagatagtggcagagatatgatcttgaagatcggaccggtactggttccatcgcaggcatcctggtgagaagaagataatttgcaaga

SEQ ID NO: 1479 - DNA, 296 bp, Zea mays
  misc_feature: Incyte ID No: 700344402H1
gagagagctccacaggccaggtccccatcgccgcggcgcttgccccacctctccccccgcccggtagtagcctcgccgccgttgccgagatggggttcgtgtccttcgtcgggagggtgctcttcgtcgccgctttcctcctctccgcctaccaggagtttaatgaattcggtgctgatggtggaccagcagctaaggcccttcggcccaaattacaacgtgtttgtcaaaaatgtatctgctacatctgggagtagctgtgccacacatgagttgaagcagtgattgctgctaca

SEQ ID NO: 1480 - DNA, 287 bp, Zea mays
  misc_feature: Incyte ID No: 700344409H1
  unsure 2, 237, 284: a, t, c, g, or other
anggacaaggagcaggcggaagaggagttgtgccaaggcacaatgggtatctcgcgtgactcgatgcacaagcgccgagcccaccggtggaaagcagaaggcctggaggaagaagcgaaagtatgagcttggtcgccagccagccaacaccaagttgtcaagcaataagacagttaggagggtcctgttctggaggtaatgtgaatggagggctctcgcctgatacggtaatactcnggggaatgaagctgttacccgcaagacccgtatcctcgactggtctnaca

SEQ ID NO: 1481 - DNA, 290 bp, Zea mays
  misc_feature: Incyte ID No: 700344412H1
  unsure 53, 112-149, 237, 245, 260, 284, 286: a, t, c, g, or other
aagatgacggcgcaggctgcggaggagctcgccgcccagatcgagcagcagangctcgaggagcagaagaccgaggcagaagaggttgtggtggaggaggatgacgaggatnnnnnnnnnnnnnnnnnnnnnnnnnnnnnnnnnnnnnnactggatggacaagaaggggatgggagtggcaagtcgaagcaaagcaggagtgagaagaagagccgcaagcccatgctgaagctggcngaagcccntcatggtgttcagcnggttcatgtgagaaaagcagattngntttt

SEQ ID NO: 1482 - DNA, 300 bp, Zea mays
  misc_feature: Incyte ID No: 700344416H1
  unsure 2, 195, 263, 272, 279, 286, 290: a, t, c, g, or other
gnccggcgcctccatttcgttttcctcactctctcctccagctcagggtccggcggcgaagggaaggtcaagatgtacaccgcgaggaagaagatccagaaggagaagggtcttgagccctccgagttcgaggactccgttgcccaggctttctttgatctggagaacgggaaccaggagctcaagagcgacctncaaggacctgtacatcaacaatgctattccagatggatgttaccgggagtaggaaggctgttgtcatncacgtcccntaccgcngcgacanggcnttcaggaaga

SEQ ID NO: 1483 - DNA, 286 bp, Zea mays
  misc_feature: Incyte ID No: 700344417H1
  unsure 44, 264, 274: a, t, c, g, or other
tgctcttccatcgcgccagtgttttgagaagctggtcggcgctnctagatcccttcgcctctctcgcgttcgaggctaggtagccgccaccatgagccgctcggggcagcctccggatctcaagaagtacatggacaagaagcttcagattaagctaaatgcaaaccgtgttgttattggcacacttcggggattcgaccagttcatgaatctggtgatcgacaacactgtggaggttcatggaatgacaagacagatttgganggtggttatncagggaaacatg

SEQ ID NO: 1484 - DNA, 288 bp, Zea mays
  misc_feature: Incyte ID No: 700344418H1
  unsure 2, 14, 16, 37, 40, 44-45, 50, 62, 87, 92, 96, 106, 114, 161-162, 199,: a, t, c, g, or other
cnctttcgcctccncngccgccgcccgccgcctgatngcnccanngcccncgccgtcggctngcccggctgccgtccttcccgctangagcnaggnatgtaccttncgccgatncagcatgggtaagacacgtggtatgggagctgggcgcaagtgcaagnnccacaggaggaaccagaggtgggctgacaaagcccanaagangagccatttggcaacgagtggaagnaaccnttgctggatcngttnagccaaagggatctcttcgaaaagtcggcntcgagncac

SEQ ID NO: 1485 - DNA, 297 bp, Zea mays
  misc_feature: Incyte ID No: 700344420H1
  unsure 9, 14, 16, 24, 33, 37, 56, 61, 64, 66, 92-93, 95, 97, 99, 102, 107, 153,: a, t, c, g, or other
gtctatgtngcaangnacgctgcnaagagcatngtcncccagcggccttgctcgcngcgcnatngncccaggtgtattatcgccatccggcnngncngngcntctcnccgtgttcgtcgacacgtacggcaccggcgcgatccccgacaaggngnncnctgaagattgtacaaggagaacttcgatttcaggcctggcatgatcatnnncaaccttganctcaagaaaggnggcaacgggcgctacctcaagacggcggcctacggcnactttggaagggacgaccctgacttcacc

SEQ ID NO: 1486 - DNA, 280 bp, Zea mays
  misc_feature: Incyte ID No: 700344421H1
  unsure 87, 113, 152: a, t, c, g, or other
ggcaacctcatctcgtcctccagatccaggatggccgtcctccttgagaccttgcctccccgagtgctctcggtgagctactttgtntcgatttatcaggaaatccgtttgcntcatgttgtgcaggctcatatctgattgctggattcggnaaacccgcgttggatcctgtatcggttagtcctgcctgcaagttcttgttgttttgttttggtggtcgagcatcgcagttcgctcggatccagatctggagaaatcgcgaatcgtcgtcgttcgttcg

SEQ ID NO: 1487 - DNA, 291 bp, Zea mays
  misc_feature: Incyte ID No: 700344422H1
  unsure 3, 284: a, t, c, g, or other
ggnacctggccatgatcaccgggcagtggcccgtcaagacccgtgagggaaacaccatcggtatcgcagttcaccctccgcggcaggataatgtacaacttcctggataggctcatcaaccttgggctccctaggaccatggacttcctgggtgtcaaccccaacagcttcgacgggcacggcaactacagccttggcctccgtgaccagggcgtgttcccggagatcccgtacgaggtgggcgggaagaagaacggcatggacgtgtccatcgtcaccagcgnccaagac

SEQ ID NO: 1488 - DNA, 286 bp, Zea mays
  misc_feature: Incyte ID No: 700344423H1
  unsure 27, 32, 38, 93, 281: a, t, c, g, or other
ccagtgatgttgttgaagcctctggtnccgcncaaacncagcgaaaatgttactgcgatggaggggaatgccgctccccaatgtaaatagcantatttcaaggcctatgccacagcggcctggcagcagacaggttatggaaacacctatggagggtatggtggatccaacatgtatagttcatatggtggatttggcaacacttatggtaccggtggactcggaaatagcagtactcgagttacggaggaggttatggtggtggcagtacggtggtggcngtatg

SEQ ID NO: 1489 - DNA, 288 bp, Zea mays
  misc_feature: Incyte ID No: 700344424H1
  unsure 12: a, t, c, g, or other
tgattgcatgtnctggataaagcccaaagttgggacagtgtgctttggtgttgttgctagttcaagcagcaattatccttgcaggtggcgagaagggaatgcgctatgcaatgccaaatgctagagtaatgattcatcaacctcaaggtggatctgagggtaatgtggaggaggtgaggcgacaggttggagaaaccatctatgctacgtgcataaagttgataaaatgtttgctgcttcaccgggacaaccactggacatggtgcagcatggacagagaggatcgtt

SEQ ID NO: 1490 - DNA, 289 bp, Zea mays
  misc_feature: Incyte ID No: 700344425H1
  unsure 2, 103: a, t, c, g, or other
gntccatgtccctcatttcagctcaagttccctgttaagccagctgatatcaagaaaagaatagagagcttgatcgaccgggagtacctggagcgcgacaggngtaacccccagatctacaactatctggcttgacaacgttttggtggatcgttcccatttcattactatcagaaaaaggcactgtaaattaatttattttccggtttcttgttctttcagcttttctctctgggaggaagttgtagttgtagctgctgcaacgtgtttatatagaacaatttttcgg

SEQ ID NO: 1491 - DNA, 292 bp, Zea mays
  misc_feature: Incyte ID No: 700344426H1
  unsure 2, 5, 8, 11, 13, 33-34, 39-40, 47, 51-52, 61, 72, 79, 85, 89, 93, 126,: a, t, c, g, or other
gnaanctncgngnaggatcttctcggccatctnntggtnngcggganctgnnagcaccgtntttgtggttanctccttnttggcnaacnaacnatgagctcccagattcgtcagaattattccacngangtggaggcagcngtcaacagcntggtcaatttgtncntgcaggnctcntacacntacctntctctgggcttctatttngaccgngnngntgtggctctggaaggngtgagcaacttcttccgcgaattggccgaggagaagcgcgaggctacgagcgtctctg

SEQ ID NO: 1492 - DNA, 278 bp, Zea mays
  misc_feature: Incyte ID No: 700344427H1
  unsure 34, 39-41, 53, 119, 125, 128, 141-142, 190, 193, 209-210, 213, 215-216,: a, t, c, g, or other
aactgggatggtattcccaaatcaacacaatatncagannnttggtccttttntgcttgcaaagacattactgtggctacaagcaagaattgttgattcccaagaattgttccatgcancattgnccnatgaagccttgtnnaactttaagagttgaatgattgcttggataatctccacataatagagncgngacacactggagctgnnaantnncaagctantngtcnaaagnantangcncactganaggtaaccatggacactcncattgnnag

SEQ ID NO: 1493 - DNA, 293 bp, Zea mays
  misc_feature: Incyte ID No: 700344428H1
  unsure 17, 23, 65, 83, 116, 263: a, t, c, g, or other
ggaccgccatgcttgcntctgcngcgggacgtccacgctgccatcgcccgtgagcagctccgacngcctcatcgccgtattancacctgctcttgtgtcgcaggctcgggttaccntggtgctcacgctgaggaaggcatgatccatgcggagcagcccaaggcgcgatgccacctccgctgtcacacatgatgagctgcttcgcctctggcaccgccttgttccttcgcgatctcacattgacatggatgcacccgattttncctgcctgttctatgcctgtgcaaagagtc

SEQ ID NO: 1494 - DNA, 311 bp, Zea mays
  misc_feature: Incyte ID No: 700344432H1
  unsure 2, 10, 66, 114, 119, 124, 131, 174, 229, 233, 236, 252, 271, 281, 290,: a, t, c, g, or other
gngtttcagnatcctcgcatcgtccgcaccttatcctctcgactttacagtacctgctctcagctncctctctatctcaatgggcatccgcgaatgccatctccaccgcctccnccttnccggnccctctntcagggcagggcgacgaggtcacagcggttcgtggtgcgtgcnaagccaaagacattgcctttggaccagaaattccagggcagcgctgcagggccgngcgncanagaagctcgcaaaagncgttcggtgttccacctcngggccagganagaagaatnttgtnctcgntnaataaggac

SEQ ID NO: 1495 - DNA, 279 bp, Zea mays
  misc_feature: Incyte ID No: 700344434H1
  unsure 23, 76, 202: a, t, c, g, or other
gtccattagaaatgttgaaaggncaaggagaagattgatggagctgctactgaagtcttggatccatatgtgaggncaataagggatgagaaatatggatggaaatatggatgtggagccaagggctgcacgaaactttccatgccgctgagtttgtgccagaagcatgctaaactgaagcatgcagacttggtggttgatnctaactcaaaagtgagagaggatatttacttgagaactagtgaatgacccaaaggcgccggtggtacactatcatgc

SEQ ID NO: 1496 - DNA, 284 bp, Zea mays
  misc_feature: Incyte ID No: 700344436H1
  unsure 5-6, 8, 20, 27, 29, 49, 57, 68, 88, 99, 160, 170-172, 212-213, 253-254,: a, t, c, g, or other
gggannancaagatgtaccnagatctnanaaccagatactggtggagangattgtanttgagagatancacaatatgtggcacggtgngacacttgccnatgaactaaggccgagcatcagaagcctgcaggtctcactgcaaccccttctagtgcccanatggaagtgnnnaagaaataggcatggattttgtaactggactgcctcgganncaaaaagggaacgactactatctaggtgataatagatctnncncnnngnnnnnncattcatcccataaaaa

SEQ ID NO: 1497 - DNA, 286 bp, Zea mays
  misc_feature: Incyte ID No: 700344437H1
  unsure 53, 56, 76, 93, 100, 165, 190, 203, 209, 211-215, 218, 224, 229, 236,: a, t, c, g, or other
gtcctgttagtctatgctacgttgtctgcaataacggacgtgacccggggaanaanaactgtttcgtcacgggtanctagagaatgcacgtantggctcncgttttcgtttgtgtcctataatgtatggctattggcctgtttcgagaggttaaaatttggaggngctgcatacaaattcgtacaaaaanattcgagggacanccccangnnnnngancacacngaccngggcatngaanccggaacgggnatangacaggnntacnnngntttccccataangga

SEQ ID NO: 1498 - DNA, 210 bp, Zea mays
  misc_feature: Incyte ID No: 700344438H1
cgcaccgatcagaagagatggcggtgccgctgctgacgaagaagatcgtgaagaagcgggtcaagcagttcaagaggccccacctcgaccgctacaagtgccttaagccaagctggcgcaggccaaagggtattgattcccgtgtcaggaggtagtgcctggtcgacttgtcagaaccataaccaatgttgggcatcaaggtgcatccct

SEQ ID NO: 1499 - DNA, 284 bp, Zea mays
  misc_feature: Incyte ID No: 700344440H1
  unsure 17, 50, 57, 68, 76, 94-95, 139, 217, 239-241, 250, 262, 281: a, t, c, g, or other
ttccaaggcaccgccgncgcatcgatctcgggaatcgaaactcgaaaggngcacgcngtccacgcccncggatcgnccagctcgaagaagccanntgcactcctacccttctagaagcttccatttccttaggccatgnacgccgactacgacttcccggcggctggcgggtacgaccccatgggaatgatggggatggggatgggaggctacggcntcggtggccccaggggatgggnnngctacggcntcggaggtcccnggggatggggggctaaggncta

SEQ ID NO: 1500 - DNA, 287 bp, Zea mays
  misc_feature: Incyte ID No: 700344441H1
  unsure 174: a, t, c, g, or other
gtcaagttctgccagaagcacgggatctgcgtgaccgcgcacaccccgctgggtggctccaccgccaacgccgagtggttcgggacggtctcgtgcctggacgaccctgtcatcaagagcttggctgagaagtacggcaagacgccggcgcagttcgtccctccgctggggtcngcagcgggacacggtggtgatccccaagaccttccaaggcggagaggctgcaggagaactttgacgtcttcggttttgacatctccggcgaggacatggagaggatgaaggcc

SEQ ID NO: 1501 - DNA, 285 bp, Zea mays
  misc_feature: Incyte ID No: 700344443H1
  unsure 133, 194-195, 210, 273: a, t, c, g, or other
ttcatccaagctgacagacatggagatagatgaaggccttggtggaagtactgtctcgagagccttgcactgctctggtgccaacgagtccttcatccaagctgacagacatggagatagatgaatgcgaggngacgactatgcatgatgtgaacaacatcgaggaagagatgcgcaggaagcaagctacacgnntgcccaggaggcgtnacgaggaggacgacgagatgccgggcggagccagagagtgcatgcgcgcaacataagcagatnattcatcaaggc

SEQ ID NO: 1502 - DNA, 285 bp, Zea mays
  misc_feature: Incyte ID No: 700344445H1
  unsure 2, 284: a, t, c, g, or other
antttagatggcctaattcatttctgggatccatctgatggtttgttgatgtataccattgagggacgcagggatattgctgggggtcgcctcatgacagataggagatctgcagctaatacaagtataggaaagtacgatcacaacattgtgctattctgctgatggaagttctattttagctggaggaaacaccaaatatatttgcatgtatgatgttggagaacaggtgctgttgcgtaggttccagatcactcgcaatctctcatggatggagttcagtnt

SEQ ID NO: 1503 - DNA, 291 bp, Zea mays
  misc_feature: Incyte ID No: 700344447H1
  unsure 285: a, t, c, g, or other
gtggccaacgcctgcggcagctgcccgaccccaacgccgccggtccgtgccaccgccgccgcctcctgctgctaccccacccccttcatcatccagtgggaagtgcccgctgaacgcgctcaagttcggcgtgtgcgtcaatgtgctcggcctcgtcaaaggcgaggctggcaaggtaccagctgagccatgctgcaaccttcatcaaaggccttgcagacttcgaggccgccgtctgcctctgcacggccatcaagggcaacgtctcggcgtcgtcttcgatgntcctat

SEQ ID NO: 1504 - DNA, 148 bp, Zea mays
  misc_feature: Incyte ID No: 700344449H1
aaacaacaacaatgagattatcaagttgcactgatccattttcctttgattccaccccataatggttcttgtgattcgtttcctacatggggttcaaatctcggcccaagttctacttgtcgtgtttagggtcagggcatcagtttca

SEQ ID NO: 1505 - DNA, 140 bp, Zea mays
  misc_feature: Incyte ID No: 700344453H1
  unsure 12-14, 78, 136-138: a, t, c, g, or other
cccaaccccagnnngtggtatttctcctagacagaacgaggtctgtttaggagaaataccacccaaccccagtggggntacaaatggtgccaaaattgccttgtaaaaacgcaggtcgtgagaatgtttttttctnnntg

SEQ ID NO: 1506 - DNA, 158 bp, Zea mays
  misc_feature: Incyte ID No: 700344454H1
  unsure 74, 123: a, t, c, g, or other
aagcccccaggggccagggctagcagcggcggcgtatccctaatcccacctccagtctctgggcaccaaatttncggcggcgatggcggcggctgtggcgaggtcagggttccggcgcatgtnctccgtctctgccttcgcgccgccgaaagcccgcc

SEQ ID NO: 1507 - DNA, 180 bp, Zea mays
  misc_feature: Incyte ID No: 700344456H1
tcaccgctgttaggttctaccaggagaccttcggcgtccctccggccacgcgagctcgccgaaatggtcgcccacaggttccatcagtaccaggtggtgggtcgcgcgctgccgaccccaaccgatgagcaccccaagatctaccgcatgaagctctgggccaccaacgaggttcgcgcc

SEQ ID NO: 1508 - DNA, 283 bp, Zea mays
  misc_feature: Incyte ID No: 700344457H1
  unsure 2, 194: a, t, c, g, or other
gntcggtagtccatagcagcggcgggcgcaacttcgacccggttttcttcccatatatctgtcaaatccttctccggttaccctccatcggcagcaatttccgccatagataccggcgatcgagggcctcggacaacccaatcgacggagcagcgcggcggcaggagagggcaaacccttttcttctcagtacnctacttgtctgcgcctggatccctccgcaggaagataagacatgggtcaagcaatcggcttgattcaatggatcaattcgacagttgcc

SEQ ID NO: 1509 - DNA, 180 bp, Zea mays
  misc_feature: Incyte ID No: 700344460H1
  unsure 58, 63-64, 84: a, t, c, g, or other
tagcataccccaaaatccccaaaccctaggcgaactcggcacggcggcgatggcagcngcggnncctgcggatggggaacgcgngcctcccacccgaggtgaaccgggtgctgtacgtgcggaatctgccgttcaacatctcgagcgaggagatgtacgacatcttcggcaagttacggc

SEQ ID NO: 1510 - DNA, 231 bp, Zea mays
  misc_feature: Incyte ID No: 700344461H1
  unsure 20, 49, 122-123, 197: a, t, c, g, or other
gagtgggagacccgcgagangctgccgtgtagggaccgtagactcagcncactgcgaaggagggataaggggatggccgggatcggaccgatcaggcaggactgggagccggtcgttgtgcnnaagaaggcacccaccgccgccgccaagaaggatgagaaggccgtcaacgccgcgcgccgcccggtgcggagatncgataccatgaagaattacaacgtggtacgaaca

SEQ ID NO: 1511 - DNA, 279 bp, Zea mays
  misc_feature: Incyte ID No: 700344462H1
tgtgtggtgtatttcttcttctgcacaatgtcgtttcagatacttgcgttgcaatggaagagtgggttgctacatccgacagaacacacagccctggacgaggttatcccctgcgtggagcctgccacggcgaacgaatccctgtacagaagcaggcaggtgacgttcgagctggtgaacgtggtgaaccaggtgatcaccaacgtgtcgaacatgaattccccccgcagctgacgcctttgtactacaaccagtcggggccatgatgcctctgctctg

SEQ ID NO: 1512 - DNA, 288 bp, Zea mays
  misc_feature: Incyte ID No: 700344463H1
  unsure 38, 76, 104, 176-202: a, t, c, g, or other
gggaggtggtaggctggtagcctatataaacgcggggngtggctcggttgaagtggcaacaccaacgcaaccacgntacgcaccatagaacatacccgtgagangctaagacccggccgttgctcaccacagcatcatcgccgcgccgtgctagctcaaggatggagaacaacagnnnnnnnnnnnnnnnnnnnnnnnnnnnaggctacccgacggcggctgcttctgcaagagagatctgcttaaattattctatcgtccagagctgcagcaaacacctgatatgtt

SEQ ID NO: 1513 - DNA, 128 bp, Zea mays
  misc_feature: Incyte ID No: 700344464H1
  unsure 66, 71, 74, 81: a, t, c, g, or other
gcaattcagttcatgctatatgagactcttctgaagaaattgaagaagagacgagcctctaatttncaagngcngtcaatnccatcagctcccttaaaattagaggctcgtctcttcttcaagggagc

SEQ ID NO: 1514 - DNA, 155 bp, Zea mays
  misc_feature: Incyte ID No: 700344474H1
  unsure 17, 25: a, t, c, g, or other
gtaaactataggtctanctcttganccttcaggtggtcttgtacaggaaactgatccagaggttcccaaagagaggccactgcagcttcaagaggagggagttagcgacttctcatgcaaccaggacaaagtttcctgaacttgtggtacaagaa

SEQ ID NO: 1515 - DNA, 281 bp, Zea mays
  misc_feature: Incyte ID No: 700344475H1
  unsure 135, 182, 200: a, t, c, g, or other
gttaaacactggaacaaccttgttgagagtgccaaggagcgaaattgcttattcaaggtccccaagccattgaccgcattctttgcagaggataacctgaagactatgaaggtggaaaggcgtcctccgccagancatgaatgctcgagtactggaagagatcaaccaagaagttgtaaggncaggagctcatgaatgtncgatgatgccgccgatcatggcagacgcagggacgacgatgatgctggtatggatgctgacgatggaggcggcgatgatga

SEQ ID NO: 1516 - DNA, 178 bp, Zea mays
  misc_feature: Incyte ID No: 700344480H1
ggactgtggaacttccagattggtctgaagaattatgatccacagaaggacaagcgtttcagtggctctgttaagttgccccatatccctcgtcccaagatgaaggtgtgcatgcttggtgatgcccagcatgttgaggaggccgagaagatgggactgactacatggatgttgaggc

SEQ ID NO: 1517 - DNA, 150 bp, Zea mays
  misc_feature: Incyte ID No: 700344483H1
ggcttgtcaaagctaattccattcaaggtaataaagtcaataacattgatgtagtttatactccatggtacaatttgaagaagacgccttcaatggatgtgggccaagttggttttcacaaccctaaattggttcgcactattaaagtgg

SEQ ID NO: 1518 - DNA, 283 bp, Zea mays
  misc_feature: Incyte ID No: 700344484H1
  unsure 266: a, t, c, g, or other
tcacaaacagaaactaaatcatcacatcctggtccacaacaatcacatatatctaatacatctatagaagggtcggctgatacctctcaagcaagtgtagcttcagatagcacagatggcaggccagtgaagtacaagctggtagccgatttgctatggcggttgagcaaaaaaatttatacagatgaagaagcacttctcacagagatagaagaaccaacaagcttaccgtggaagcctcatactatcgggaaggaacaggaaanctggttttcctaacaaa

SEQ ID NO: 1519 - DNA, 269 bp, Zea mays
  misc_feature: Incyte ID No: 700344486H1
  unsure 96, 162: a, t, c, g, or other
gtcgagccgatgatggtctacttattgatgcaaactctggaaagacagttcattccataaaaggacatcgggactactcatttgcatcggcttggngccctgatgggcgaacatttgctaccggcaaccaagacaagacatgccgaatctgggacgtgaggnacctttcaaaatccgtccatgtgttgaggggtaaccttggagccatccggtccatccgcttcacctcggatggccagttcatgtccatggctgaacctgctgacttt

SEQ ID NO: 1520 - DNA, 264 bp, Zea mays
  misc_feature: Incyte ID No: 700344489H1
  unsure 12-13, 167, 198: a, t, c, g, or other
gtgctgctaganngtgatttgaagtattcaccttttgacatggataaacatcttctctctgttgcatttgcaggcgaaagaaggtctgttgaagcagcctaaactattttcgttgtgatttccaacgctacattttccaatatgccttgtttcatacatttttcctncttttcaaataaggctcatgtgctgcttcgnaaatcagttctaagaaggcaaccagggacaacaaacctgataagggaagaaacagttctggataaa

SEQ ID NO: 1521 - DNA, 268 bp, Zea mays
  misc_feature: Incyte ID No: 700344490H1
  unsure 21, 53-71, 160, 170: a, t, c, g, or other
cgaggaggacaagggaaaganagcctaccggctcggcggctccggctcacctnnnnnnnnnnnnnnnnnnntctcgcgtgccgccggcggccaccaccatcactgccatgatcagcatcctcgcgcaggagcgcctcctcgggttcgccctgggttccgntccatcggcngttcgtcctccaccagcgccgggccatctaccgttcaatcgctgaagccgacgggtcgccctacttttaccagcctggtgaaattgccagttcgaaga

SEQ ID NO: 1522 - DNA, 266 bp, Zea mays
  misc_feature: Incyte ID No: 700344492H1
  unsure 77, 81, 84-85, 88, 165, 250: a, t, c, g, or other
gtggtgcctaggccacgtggtcgaccccccaaaaggaaaagggatgatgaattcaaaaagagcagttccacacagcntgtnccnnccnaacaagtctgtgaaggttgctgctcctagtggtctattatctggggctaaatcctggaatcattaaccatgtgaganatagcaagcaagtttactccataataaaggctatggtacactctgagaggctgagatgagaaccactctagttcaaacaggtganagagggagagagttat

SEQ ID NO: 1523 - DNA, 272 bp, Zea mays
  misc_feature: Incyte ID No: 700344496H1
  unsure 70: a, t, c, g, or other
tcaagcatcctctatttcacaaaaggatgatacatatgaagatattccgaatagtcagatacgcaaggtncattgccaaaaggttgctcgaatcaaaacagacgactccacatttgtatctatccaaagatgttgtgctggatccctgctcgctttcaggaatgaactaaaagagctacatggcattaaagtttcagtaaatgacatcatcataaaggctgtggcaatgcgttgcggaacgtccctgaagcaaatgctactggaacaatgat

SEQ ID NO: 1524 - DNA, 127 bp, Zea mays
  misc_feature: Incyte ID No: 700344501H1
gcaggatgtaagccattgcgatgacttcaatatcagagtcaatgaccaaagcttgaaccaggcgttaagaaatcagcatggtgatgctgtcccattacctgacatggtatcactagatgctaaggtg

SEQ ID NO: 1525 - DNA, 288 bp, Zea mays
  misc_feature: Incyte ID No: 700344504H1
  unsure 28, 38, 40, 43, 45-46, 52, 57, 69, 76, 99, 124-125, 132, 232, 264: a, t, c, g, or other
agagagaagacgtctctctcctctcggngtccccgttncnccnanngctacntctgntgcctgcctgcntgcctgnctgcaaaaaggagtttgtacatngcgtctaagcgcatcctcaaggagnngaagganctgcagaaagacccccccacatcatgcagtgcaggtcctgctggtgaggacatgtttcattggcaagcaacaattatgggaccacctgacatccctatgntggtggtgttttctagtgaacatcattcccgncagattaccccttcaaacctccaa

SEQ ID NO: 1526 - DNA, 288 bp, Zea mays
  misc_feature: Incyte ID No: 700344505H1
  unsure 170: a, t, c, g, or other
gccgagtgcccgattacaatcagccatcgccaccacctccctccgcggctccgccttccgccgcgaacacgccgctgtctcgaccccttgtcctcctccttcagcaagatggcggagattgagataaaaacagcacctgctgacttccgcttccctacaacaaaccaaanaaggcattgttttactcgctatgtcgagtaccacaggtgtttgaatgccaaaggggatgatgctggtgtttgcgaaaaatttgccaagtaactacaggtccctttgccctggagaatg

SEQ ID NO: 1527 - DNA, 249 bp, Zea mays
  misc_feature: Incyte ID No: 700344506H1
  unsure 187: a, t, c, g, or other
tgatgcaaatagtcagctgcccgtatgtaaagacagtcgctaccaccaagaccggtgtattaccaggaatggcccctcctatagtacccatgatacatccccaggttgctattgcagcttcacctgctaccttagctggagccaccgcagtttctgagtggactgaatataaaacagcagatgggangacgtactattataataatagaacacttgaatcaacgtgggaaaagccccaagaactgaaga

SEQ ID NO: 1528 - DNA, 278 bp, Zea mays
  misc_feature: Incyte ID No: 700344507H1
  unsure 29: a, t, c, g, or other
gaacaaaaaggttcaatgaaggttcgtantccagaaagtcatttgcctcagactcgccaagatcgaatttcacagttggagaaacatttatttcctggaggtgcagcaaatgctaaatgcacagatgatgaatctgaagggtcaccagatattgtgatgggtgaaccatacattagtgcatgattctccgaggttctgatgaccaatgagaatctactggaatgaattgacagaggaccccaaatctgtgtgccagagcagcagaccagctcttgatc

SEQ ID NO: 1529 - DNA, 282 bp, Zea mays
  misc_feature: Incyte ID No: 700344508H1
atgcaccttcaggacagcgttgcagcaatggcccgtcaatatgttcgtagtgtacatttctgctgtgcaaagagtgtcgatggctatatctccctcccaatctggtctaaatgctgggcataggatgctttctggcttccctgaagctgccacacttgctagatgggtttgccagagttatcactaccatctaggtatggaattacttaatacaattcagatggagctggtgaagcatgttgaaaatgctctggcatcatccagatgctgttctgtgctgct

SEQ ID NO: 1530 - DNA, 281 bp, Zea mays
  misc_feature: Incyte ID No: 700344510H1
gcagcaacctgctccaaggggaaaaggcagacaaaggccaccaatagagagtcggctgagggatgagcgtggtaatcataggctcgacagtgatgggtccggtgaaaatcccgacgatcctgtttatgattcgtttggtgatccaactatgcatggcgccttccctaccagatattcctgctaccccctgttctaatgcctgtgcctggtgccggtccgcttggaccgtttattcccgcaccgccggaagttgccatgcatatgttgagggatcagggcgc

SEQ ID NO: 1531 - DNA, 275 bp, Zea mays
  misc_feature: Incyte ID No: 700344512H1
  unsure 15: a, t, c, g, or other
gggaaaactggaggnagttattcttataacaagcatccttattgttgcctttttcacaacattgacaaagctacatccgaagatgaagccgtatgagtatggattccgtgtgttcttgttgacattctgttacgttatggtctctgggtacaacactgggaaattcactgatacagctacaagcagatttatattgattgctatggtgctgctgtcatctggaatcaatgtaggcatctacccaatctgggcgggagaggattgcataactgata

SEQ ID NO: 1532 - DNA, 286 bp, Zea mays
  misc_feature: Incyte ID No: 700344516H1
  unsure 25, 28, 31, 40, 108: a, t, c, g, or other
acgagccataaaaccagagctagtnggnttnccgtggttngctaatgtaaagagcaaaaccacggcaatcctacgagccataaaccagagctagtactgaacaatccncactacacgccttggtcatcgtgttggaaggatgatccagtacctcttccctcaagatcccaatttccgcgggcgccgtgttgtgaccttccacaaccagcgagactacatatttttccgccatcacaggtacatcttcgagacaaaagaaaagaaggttgcttcgaaggaaaagaca

SEQ ID NO: 1533 - DNA, 138 bp, Zea mays
  misc_feature: Incyte ID No: 700344517H1
  unsure 129: a, t, c, g, or other
catggtcttcatcatgccatctagaggctcaatcatgcagtacctatcggaacgcagcagaacgatcattctggtcagtccggaggcgagcaagcagcagcagcggtggcgacgctgaagccactgctnccagacagg

SEQ ID NO: 1534 - DNA, 98 bp, Zea mays
  misc_feature: Incyte ID No: 700344518H1
  unsure 55, 60, 67-68: a, t, c, g, or other
ggaagacgtcaaaaaagcactgctgttactacttgttggtgcaccccattagganagctncgcagannggcatgaagattccagagggcgacctgcat

SEQ ID NO: 1535 - DNA, 282 bp, Zea mays
  misc_feature: Incyte ID No: 700344521H1
  unsure 78-79, 278-279: a, t, c, g, or other
cgatgattctgaaaggccaagcaagtcaagaacaccaaaaacaatgctaggtgccttgcatgctatctggagcaaggnngggcattccaggcttcttcaaaggcctgaatgctcagatccttaaagcagttctgagctccgccttgctgctgatgataaaggagaagatctggaagttcacttgggtctcgctgcttgccctgcggcggtatcttttcgtttctcagaagaggatcaagagtgtcaatgtataaatactagctccaaacatagcgacnncgt

SEQ ID NO: 1536 - DNA, 279 bp, Zea mays
  misc_feature: Incyte ID No: 700344522H1
  unsure 22: a, t, c, g, or other
cgcctccgacatcctactttcntcctcacgagtgaccgataatccgccggcgctaagatgttggtttatcaagatctcctatctggcgacgagctcctgtcggattcattcacctacaaggagctcgagaacggcgtcctgtgggaggtcgagggaaagtgggtcacccaaggtcctgttgatgtagacattggtgccaatccatccgccgagggtggtgaggacgaaagcgttgatgacacagccgtgaaggtggttgatattgttgacacattccgt

SEQ ID NO: 1537 - DNA, 155 bp, Zea mays
  misc_feature: Incyte ID No: 700344525H1
tctctccccacctcccctgagcttctcccgacctttggtcaggcaaaggaggcggccaacaaggacgagcgatggtgaccaaggtcatctgcttcctggtgctcgcatccgtgctcctcgccgtcgcttttcccgtgtctgctctgcggcagcag

SEQ ID NO: 1538 - DNA, 284 bp, Zea mays
  misc_feature: Incyte ID No: 700344526H1
  unsure 8, 170, 187, 201, 258: a, t, c, g, or other
ggtgccgngcaagtacaccggcgtcaacatcgcgttcaaggtggatcagggcgcgaacccgtactacttcgacgtgctcatcgagttcgaggacgacgacggcgacctcagcgccgtggacctcatggaggccggcagcggcgtctggactcctatggcgcacaactggngcgccacgtggcgcctncaacaacggcaggnagctcaaagcgccgttcgggctccggctacacctccgactcccgcaggtagctcgtncgccaacaagccatcccggccgcgtg

SEQ ID NO: 1539 - DNA, 275 bp, Zea mays
  misc_feature: Incyte ID No: 700344527H1
  unsure 31-32, 74, 91: a, t, c, g, or other
ggtgttaggaggtgcattgaacaaattaacnnaggctaacagaggtgaaataagttcaggacgaattgcaaganagacagaacaaagctgngcaagacccagagatccagaacattcttaccgaccctatcatgagacaggtgctaaatgatttccaggagaacccaagggcggcccaggagcacctgaagaaccctggagttatgcaaaagattcagaagcttgtaagtgctgggatagtccaatgagatgatcaggcacagatgcgattgtac

SEQ ID NO: 1540 - DNA, 276 bp, Zea mays
  misc_feature: Incyte ID No: 700344528H1
  unsure 259, 262: a, t, c, g, or other
gcacgcccgtgacttcgaccccgacgtcccttcccaactacgtccaccgccgccgcccgccgtcgcaaaactcgccagcggccagccatggggtacacgaaggaccagcttctcgcgcacctccagaagcttaagattgatttcacgtgctacgatcacccggttgtgttgacagtggaggaacaggccaaacatgttggccatttaggaggtgctttgagcaaaaatttactcttgaaggacaagaagcatcggttanatnttatttctgccctg

SEQ ID NO: 1541 - DNA, 280 bp, Zea mays
  misc_feature: Incyte ID No: 700344529H1
  unsure 53, 91, 94, 98, 107, 122, 206-207, 227, 229-230: a, t, c, g, or other
acacaatagactttagatttagatggccttttagtttagtttagatatatgangatgatatactacatccgttactacgaatatttgtcgntcncctnttaaactanaacgcgactaaaaangaacggaggggtacatgataacaataatataacagcttatgccgaaaggaaaatctgccagtgccaccaattcacctcggaaannagaaaaccaactactacccntnnttttactggaaaagcatgcggtagtgtggccaattgttggactatatagg

SEQ ID NO: 1542 - DNA, 158 bp, Zea mays
  misc_feature: Incyte ID No: 700344531H1
  unsure 50, 52, 58, 99-100, 124, 128, 146, 155: a, t, c, g, or other
ttcccgtcctgcatggggttgtaagctgtctctaaatttcacggcaagtntnccacanagaaattcaaccatgcgcacaaagcattgcacggggtacanncatgaaatgctttgtgcgcatggntganttctctgtggcaaacttncccgtcctnaca

SEQ ID NO: 1543 - DNA, 83 bp, Zea mays
  misc_feature: Incyte ID No: 700344535H1
  unsure 35, 48, 56, 70-71, 73: a, t, c, g, or other
gctgctgcataaccctaatctcttcctagttcctnacgccgcggcggngcggcctncccattccgatgtnntncgatttgagg

SEQ ID NO: 1544 - DNA, 276 bp, Zea mays
  misc_feature: Incyte ID No: 700344536H1
gaccttcacgtctgatttccctcatgtcgagaggtatttctggaccatggttaaccagcctaacttcaagaaggtcttggtgaggtcaagcaggcagagtctgcacctcctattccgaaaaaggctgctccttctaaggagccaaaggcaaaggatgtcaagaaggaggctccaaaggaggcccccaagccaaaggtggttgaggcaccagcagaagaggaagcaccaaagccaaagccaaagaatcctcttgacttgctgccaccaagcaagatg

SEQ ID NO: 1545 - DNA, 269 bp, Zea mays
  misc_feature: Incyte ID No: 700344541H1
atcttgaccagcgatggcaggaagccactggagagtctgtttctgaggtcatattcctcagcaaacacactgcagtctccaaacgtccagcactcacagtgcatccaattggtgtgccacatctgaaggaggatgaaaccccaccccaaggaggaactcctggatgggcagcaattccaagtctcgaattggaccttggctccggttgatgcaaaagatagctgtagaacaaggccttgttccagagtttgaggttacgcttgaggcta

SEQ ID NO: 1546 - DNA, 265 bp, Zea mays
  misc_feature: Incyte ID No: 700344542H1
tcttatacggttatggagcttatggataggatttggacaaaagctggtgttctgagaggttaagcctcctctctcgaggttgggttcttgcatttgcagatgttaggggtggaggggatttatcatggcatatggcaggaaccaaagctaataaaatgcattcaattcaagattttgctgcatgcggcaggcatctcataaagcaaggcttgttcaccaaaatcgccttgtgctataggctgtatgctggtggtctgttggtggg

SEQ ID NO: 1547 - DNA, 240 bp, Zea mays
  misc_feature: Incyte ID No: 700344543H1
  unsure 69, 142: a, t, c, g, or other
aagaaatctcgttttggaaatgcatttcatctgtgtcgtgagattttacgacttacgaagttggttatngatgctaacatccagttccgtctgggaaatgtggatgccttccagttggctgatggtctgcaatatatatttnctcatgttggacagttaactggtatgtataggtacaagtaccgattgacgaggcggtcgatggggagggcgacggtgacgaggacgacgatggggaag

SEQ ID NO: 1548 - DNA, 300 bp, Zea mays
  misc_feature: Incyte ID No: 700344601H1
  unsure 3, 11, 46, 62, 75, 85, 121, 187, 222, 283, 288: a, t, c, g, or other
cancgtgaggngacccatctggcccgccgcgatgctggcaacacgncggctgctcggctggncgcttcccgcgcngggatctgtngcgtttcagcggcgacacgacagcacccaagaaaanctcatttggctcgctgaaggatgaagaccggattttcaccaacctgtacggccgccatgactggangctgaaaggttccctgagtcgaggtgactggtacnagacaaaggagatcctgctgaaggggcccgactggatcctgggcgagatcaagacatcggntttgnggggccgtggag

SEQ ID NO: 1549 - DNA, 292 bp, Zea mays
  misc_feature: Incyte ID No: 700344602H1
  unsure 5, 48, 79, 111, 116, 144, 156, 158-159, 161, 187-188, 228, 238, 249,: a, t, c, g, or other
gtgtngatctcaagatttctaaattgtcaagatttacatggcattgtngtggaactagttaacacttagagcttttggnatgtaataactatttgctatggacctgattanctgtntcaaaagattgtgttcttcaattttggngggttttgattntnntntttttaactgcctctcagattatatnnacttagtttaaatttctttgcgtattcattaaagtataanaacttcaggnctctgatattnatnttcacttgtttactnattatttncaaaanacccttngtgg

SEQ ID NO: 1550 - DNA, 294 bp, Zea mays
  misc_feature: Incyte ID No: 700344604H1
gacttgattcctagaatgctggttgttgatccgatgaaaaggattacaatacgtgaaatccgtgaacatatgtggttcaaaattcaacttccgcgctatttggctgtaccgcctccagacactgcccaacaagttaagaagctggacgaggaaacccttaatgatgttattaagatgggttttgacaagaatcagctaattgaatctctgcacaacagattgcagaatgaggcaacagttgcctattatttactcatggacaataggcttcgtacaaccagtggttatcttgga

SEQ ID NO: 1551 - DNA, 236 bp, Zea mays
  misc_feature: Incyte ID No: 700344606H1
  unsure 46, 100: a, t, c, g, or other
gcgttccctggtgcttggtcagtataacaacatgtaagccttcctnaacagcacgtttacaggattgcaggaggtccggccatctggtcgtctcgttttnccccctgggtatggtaaactagcttcatggctcttgcttcgtatgatgagaaatgcttgtcgtaccatatgatgcaaccagtctgttcagttgaataagcgaatttatatggtcttcatttatggataaaggcaat

SEQ ID NO: 1552 - DNA, 295 bp, Zea mays
  misc_feature: Incyte ID No: 700344607H1
  unsure 46, 134, 152, 158, 160, 164, 212, 242, 273: a, t, c, g, or other
tcagtcactgggagaagaacctctcataccctcggtgctccagtcncccagctcactcagccacatacaccatgtgtgaagaggagaccaccgcgctcgtgtgtgacaatggctctggcctgtgcaaggcaggnttcgcaggagatgatgcnccccgngntacncttcccctccattgtgggccgccctcgccaccagggtgtgatggtggnaatgggccagaaagacagctatgtgggggnttgaggctcagagcaagcgagggatcctaantctcaaataccccattgaacac

SEQ ID NO: 1553 - DNA, 292 bp, Zea mays
  misc_feature: Incyte ID No: 700344609H1
  unsure 63-64: a, t, c, g, or other
ggagagcctcgtgactgagatgaacgcggcatatgcaaccatcgatgaactccgacgcctggnntctgacaaagaagctttgatcagatctaccaattctcagttgcatgatgcaaagattatgcttgcagacaagcaagcatctgtagagaaactggaatgggaggtaaagatgtcaaataaaaaggtcgaagatcttcaaggagatgtgtcaaatatgggattcgagataagctcgttgatggcatttttcgataaaatttcagagaatctttcaggtgactcttatgat

SEQ ID NO: 1554 - DNA, 291 bp, Zea mays
  misc_feature: Incyte ID No: 700344610H1
gcagcctaaaaaccctagcccccgaatcagatcccaccgcccgccggaacgcggaaccctgcccccggccgccatggagatgagcgatgcggagggctgttcttcttcgagatggcctgcaacaactccgaggtcgcgtacgagcagaaccccaacgacgccgacaacttgacgcgatggggcggaggctgctggagctatcacagatgcgtaacggccccgacagcctcaagctcctccaagatgcggaagccaagctggaggaggcactgcaaattgatcccaacaagt

SEQ ID NO: 1555 - DNA, 291 bp, Zea mays
  misc_feature: Incyte ID No: 700344611H1
  unsure 18, 32, 41, 58, 63-64, 90, 99, 109, 120, 123, 171-172, 180, 190, 199,: a, t, c, g, or other
cttctttgggtgccaagngggtggccggcgcnatcccagcnaccctatgtgcacatcnagcgnnagttcttcagtgaggtgtgcagcctnggacagcangagcgggtcnagcttcaggantantggcggaagggctggacgttccacgccaaaggtcagttcaccgggacnnggaggccnagattgcgancgtgacggngaaccaggccntgcagcagcagcttnaccaggaccaagagcagctctacctgaggtcaggtgtggtgtcctctgccaccttcgagcagccga

SEQ ID NO: 1556 - DNA, 209 bp, Zea mays
  misc_feature: Incyte ID No: 700344613H1
  unsure 3, 8, 11, 32, 42, 45, 47, 49-51, 54, 57, 83, 125, 165: a, t, c, g, or other
cgncggtngcntgaactttattgaggaaaatnatgaagatcnggntncnnnacnttngtcgcaaaggtcatgctgttggtganattcctggagtccgctttaaggttgtcaaagtagccaatgtntctcttttggccctatacaaaggcaagaaggaaagaccangatcataaatattaatggtgaaaacactgtagtaataaattttc

SEQ ID NO: 1557 - DNA, 291 bp, Zea mays
  misc_feature: Incyte ID No: 700344614H1
  unsure 48: a, t, c, g, or other
gctacaccaccacacccacaccccatcccagcacacaacaagcagccnggtttacggtagctgctagcaaaacaatggagaaccctgctccgagcatcgtagtggccatcgccgcacccgtggcggcggagttcgtgaaactcaccttccgtgccctgtatatgcgccgggctggtcctggcagcagggagatgactgtgccgggaaggccatccgaccagctgggcaggagagtcgtcactgacagccccgtgtacgacggccgtggcgccgacgcccgcctcgtggctc

SEQ ID NO: 1558 - DNA, 138 bp, Zea mays
  misc_feature: Incyte ID No: 700344615H1
  unsure 4, 7, 11, 16, 21, 38, 63, 128: a, t, c, g, or other
ggancgngcanaaagnacgangaggagaagcggcgcgncctggacaagcggaccccggctcangcggccttcgagaaaatgcaggagaagcggcaaatggaaaggatcctaaagaaggcatccaaaanccacaagcag

SEQ ID NO: 1559 - DNA, 293 bp, Zea mays
  misc_feature: Incyte ID No: 700344616H1
agtggaggtggggagttttttggaaccgtgatatcccgaacacttggcttctgaaaatcagtatctccaacagcgcaatccgaattatagtattgtaactgcgtcagatttagcccagtaatcctcgtttctacgacattccgtttcttacaacggatctacgggcgctcttcttccccgagcgctgctctccttaggcgatccagttctccccgacgagcgctcctcctcgacgaccgctcctcctcgacggcgctcctctccaaggtcgtcgtaggtccttccccgcggcc

SEQ ID NO: 1560 - DNA, 291 bp, Zea mays
  misc_feature: Incyte ID No: 700344618H1
  unsure 120, 192, 205, 246, 266: a, t, c, g, or other
caaggaaggcgaggggagccgagcgggcaaccggcggcgacagacatggcggagcagcacaaggaggagtcgggcgtgacagtgctggacaagatctccgacaagctccacgggcgcggnggcggctcgtcttcgtcgtcggactcggacgacgagcgctcgtcggcgacggccgccgtgaaggccaagatntaccgcatcttcnggcgcgagaagcccgtgcactccgtcctcggcggcggcaanccggccgatctgtttctatngaggaacaagaggatctctggtggg

SEQ ID NO: 1561 - DNA, 288 bp, Zea mays
  misc_feature: Incyte ID No: 700344619H1
acagtttcattagatattggagacaaacaaataatgatattattgtcgcaaaaaatcgactgatagtcaaacaacaacgattagtcggaaggagtcggagggctgctaccgctcacaatctctaacttatccaattatctcacgtcggtgctcatgtaccgctgcctcgtcaaagaagatgatcgtgatacagccatcttcaccttcgagtccgtcgaatagggctccgagggcactaatgttgtgattcagattaacctagcttttaattagctttcggccaagatc

SEQ ID NO: 1562 - DNA, 288 bp, Zea mays
  misc_feature: Incyte ID No: 700344620H1
  unsure 129: a, t, c, g, or other
agaaggcttcagggtagacttggtaaccgttaccacggcttaccagaagatgaaatcattatgcaacaatctacgaagtgaaatttttactgatattgaaatccataatcagcacatacttcccagttntgttgatctgccaaatttagctgcctccatctatagtgtagagctgtcaaatcgtctacgcgcttttcttgttgcttgccctcctgctggtccagcatcacctgttgctgatttggtggttgccacagctgattttcagaaggatctggctagctggaa

SEQ ID NO: 1563 - DNA, 288 bp, Zea mays
  misc_feature: Incyte ID No: 700344623H1
ctacaacttcacacaagaacccagttctaacacgttccaagcaataccacgaccagcacttcactagactagggccctggcctgaaccaatgttacccattcgcctcaaatccaccctagagctccccgtagctcgccattcagagtgagttcgcgctaacacccctgtcgaacacaaatcttattatctcccggttccataaaccacgacataacgttaactaaccaaacttaccttgttttttgatgcactgtaaacaatagcagtgagatccattcacgttacgt

SEQ ID NO: 1564 - DNA, 287 bp, Zea mays
  misc_feature: Incyte ID No: 700344624H1
  unsure 20, 72, 151: a, t, c, g, or other
aaaagtttccaatgtacgtnatttatcatgagctgataagtacaactcgtccatacatgagaaatgtctgcnccgtcgagcaagcctgggttcagcctatattaaagaagctcgacaaattagacataaacagattaagtggtggttcgantgcaccgggagattctgaacttctgggagacaataagcaagtgaactcgtcaaagaatgacgtgggtgtaaaacaatcagaggtggacagtaaaatccaggcagctcgagagcggtaccttgcacgaaaaggcaag

SEQ ID NO: 1565 - DNA, 287 bp, Zea mays
  misc_feature: Incyte ID No: 700344625H1
  unsure 96, 98: a, t, c, g, or other
ctcgccgcctccagtccagagccaccgtgagatctgcccgattccgccgcccggacccggggactccctcccctcctcgatccgttcgggcggacncnccggcctagcttcaagtgcggggatggtgttctacttcaaggcgcggcccgaggccggcgactacaccatcttcatgggtcttgacaagtacgagaacgaggacctcatcaaatacggcttccccgaggacatctggttccatgtagataagatgtcctctgcacatgtgtatgtgagattgaataaag

SEQ ID NO: 1566 - DNA, 97 bp, Zea mays
  misc_feature: Incyte ID No: 700344626H1
cctttggctccatcgatgtattacctgctcttcttttcaactaggagtttagcggacaaagaaatgaaaaagtaattagcagtcatttatcttggtc

SEQ ID NO: 1567 - DNA, 283 bp, Zea mays
  misc_feature: Incyte ID No: 700344628H1
gcatgcagaccagcacacatggtggctccattgcaatgtctgtggacaacagcagcgtagggtcctgtgactcccatactaggatgctcaatcaccctggcctcaagggacctgtcgttggcaattactcggtcggcgggcacagcattttccgtcatggacgggtgtctcacgccttgagcgacgatgcgctggcacaggcgttgatggacccaaggtaccccactgagacactcaaggattatgaggagtggacgattgatttagctaagctccacatggg

SEQ ID NO: 1568 - DNA, 285 bp, Zea mays
  misc_feature: Incyte ID No: 700344629H1
agcgccacgcctacatccccaaagatgccatccccacaaatgaagctatgaagaagcaaatagttgtagcatcgaaggctatgcctttttactgcgctcttccaactttatctgaatatatgattgagagcggatggactcggtgctacttcaatatcagcgaaattggtttttctatgtacctctgttatatggctatgtatctcatctttgtggagtttggaatttactggatgcacagggagttgcatgacataaaaccattatacaaatatctgcatgcaa

SEQ ID NO: 1569 - DNA, 283 bp, Zea mays
  misc_feature: Incyte ID No: 700344630H1
cccaacctaagtgttctcgaggtgaggaatgtgattggggatagaggactagaagttgttgctgctacatgcaagaagctacgaaggctcagaattgagcgtggcgacgatgatcctggccaagaagagcagggaggagtctctcagataggtttgacagccgtagccgttggctgccgcgaactagagtacatagctgcctatgtatctgatatcacaaatggggcgctggaatccattggcactttctgcaagaatctctatgatttccggcttgttctac

SEQ ID NO: 1570 - DNA, 284 bp, Zea mays
  misc_feature: Incyte ID No: 700344631H1
cctccagttggagttcctggggagctacctttctgagctgagcttgctggattatggcttgattcgctccttgccgtcacttgttgcagcctcagccgtctttgttgcaaggctgaccctggatccacacacccatccctggagcaagaagatgcaaacgctaacaggctataagccatctgagttgaaggactgtgttgctgccatacataatttgcagctcaaccggacatgtcaatccatggtggcgatccgggagaaatacaggcaacaccgattcaagg

SEQ ID NO: 1571 - DNA, 287 bp, Zea mays
  misc_feature: Incyte ID No: 700344632H1
aagtattttgcaaagctcttacgaaaggccatgaaaggtctaggcactgatgacaagacacttataagggttgtggtgacgaggactgaaattgatatgcaatatatcaaggcagagtacttcaagaagtataagaagccattagctgaggctatccactccgaaacatcaggaaactatcggacattccttctttcacttgttggtcctggacattaggttatgtttcgaccatgggacatgatattccatccatccaccctaaatgcagcgacctacctggaaaa

SEQ ID NO: 1572 - DNA, 282 bp, Zea mays
  misc_feature: Incyte ID No: 700344634H1
cagttcttgcagctgccaatccaattgcaggacgctatgatgatcttaagaccgcacaagataatattgatctgcagacgaccattctttctagatttgatctaatctttatcgtcaaggatatcagaatgtatgatcaagataagagaatagcaagccacattatcaaggtgcatgccagtggtgctgcagcttcatccacaaacacagaggggagtgaaggagagaattggctgaaaaggtacattgagtactgccgcgccacatgcaaaccacggcttt

SEQ ID NO: 1573 - DNA, 171 bp, Zea mays
  misc_feature: Incyte ID No: 700344635H1
  unsure 2, 25, 27, 30, 79: a, t, c, g, or other
gngaaagttaagaaggatccacacntncanctggcacgtgtgggcttgtaggagctttatgatttgaggcaattagggnacaactcttatgtcattgttgcttgcttctgtggagtcgaacaactgtttcgctaacataattcgacttgagtgatgaaagcctccagattg

SEQ ID NO: 1574 - DNA, 280 bp, Zea mays
  misc_feature: Incyte ID No: 700344637H1
gtgggatgagccgccgtacaagatcaacgcctccgggcagactgcccgtcctcggcttcaacaccatcgcaaccagcgctacacactacaacggcatcctggagtacaatgcgcacagtctgtatggcttctcgcaggccattgccacgcatacggcgctgcaagggctgcaggggaagaggccgttcatcctgacccgctccacgttcgtcgggtcgggggcgtatgccgcgcactggaccggagacaacaagggcacgtgggaaaatctccgttactc

SEQ ID NO: 1575 - DNA, 277 bp, Zea mays
  misc_feature: Incyte ID No: 700344639H1
  unsure 109, 111-133: a, t, c, g, or other
aaccctcttcttcccccttcccgtgctcgacccagatcgagggctcgatccgtcggccatggcgctggagtgggtggtgctgggctacgcggcgggcgcggaggcgatnannnnnnnnnnnnnnnnnnnnnnngggctcgacggcctgcgccggggcatgatctccgtggtgcggaggcgctgaagcccatgatgtcggtggtgcccttctgcctcttcctgctcatggacatctactggaagtacgagacgcgccccacctgcgacgacgagcacg

SEQ ID NO: 1576 - DNA, 279 bp, Zea mays
  misc_feature: Incyte ID No: 700344640H1
  unsure 108: a, t, c, g, or other
agaggatgagaaggagccatatgaggctgcacgggccttagattctgatgatgaccgtccagttcaagaaatgaccgagcaagaaattgaactcataagacgtttgtntccggagcgtgaccctgcagtacatgaatttagcagtctaagtcattccacccgtgcatatgctgaaggacgtgatgatgaactgctagaggctccggataacgccgacaacattgagattaaggtaggcttacttttcaaggacctgcctacactgagacgatggctaca

SEQ ID NO: 1577 - DNA, 279 bp, Zea mays
  misc_feature: Incyte ID No: 700344641H1
aaacactcccgcagacccacagccccgcccgtccccgtccgtccacagccagctccgcctcccatccagcgcccgtccacagccgccgcagttccagtgagatcgagcgaggtaagcttagatctgagcgatttctctcgcgcgtcgcaggtaaagttcactcgacttcgactctctcatcctcttctgttcttcctggttccgtcttcttcctcgagcagacagcgagagacccgtggccttttagatcccgggcttcagatctgctgtttcttcttc

SEQ ID NO: 1578 - DNA, 278 bp, Zea mays
  misc_feature: Incyte ID No: 700344642H1
  unsure 30, 107, 139, 146, 155, 253: a, t, c, g, or other
gagaagcagcagtgcccgccaccgcctctnctcccgccgaagaagcagcagtacccgccaccgcctctgctcccgccgaagaagcagctgtacccgccaccgcttcncctcccgccgaagaagcagcagcaccatcacncgccacngcctctgcncacacttccgccgaagaagcggctggcgtcaccgcctctgctgcccggaagcgagaagcagtgggtcatctcctccccgtcggagccgcggttcgtcncgctgccggtgtgggctctgatgtc

SEQ ID NO: 1579 - DNA, 275 bp, Zea mays
  misc_feature: Incyte ID No: 700344643H1
  unsure 157, 250: a, t, c, g, or other
ttcgagatagaatcgatccctatcttaccagatttgaagatatattcggacttcggagattagagctgcgcagatagccatggaagacttttgtgcggtgtgcgcagatacgctggagtgggtggcctatgggtcgtgcgggcaccgcgacgtgtgntccacatgcatcgtccgcctccgtttcgtgatgggcgacaacaagtgttgcatctgcaagaccgtctgccccttcgtctttgtcactaaggcnatgggtaaatacactagagtgatca

SEQ ID NO: 1580 - DNA, 276 bp, Zea mays
  misc_feature: Incyte ID No: 700344644H1
  unsure 93: a, t, c, g, or other
atcaagcctgagatgatcggccactaccttgctgagttttccatctcctacaagccggtcaagcacggcaggcccggtatcggtgccacccantcctctcgttttattcctctgaaatgagctgttacccggctttgtagtctcccaagagttcggtggcgatgttcattcagcttttctacttgttttgaacaagttaaatgcccaagacattttgttctgttccattccagctcaagaattcaaagctaagcattgcacacttatgctgttttg

SEQ ID NO: 1581 - DNA, 275 bp, Zea mays
  misc_feature: Incyte ID No: 700344645H1
caagatggaccggacgtcgatcctgggcgacacgatcgactacatgaaggagctgctggagaggatcaagctgctgcaggaagagatcgggcagcagcaggaggaggcgccaggcatgctcagcgtcttccgggagctcaaccccaacgagatggtggccaggaacacccccaagttcgacgtggagcggaaggagggcggcgacacccgggtggagatctactgcgccgccaagccggggctgctgctgtccacggtgagcacgctggacacgt

SEQ ID NO: 1582 - DNA, 273 bp, Zea mays
  misc_feature: Incyte ID No: 700344646H1
  unsure 16, 70, 90, 92, 161, 233, 243-244, 266: a, t, c, g, or other
gatcacagtctcaganacgagtttgccaaatatggacaagttattgaagctaagattatccttgatcgtnagtctgggaggtccagaggntntggctttataacttacacgtcttctgaggaggcttcggctgccatcactgccatggatggaaagactcnggatggacggaacatacgggttaatcatgctaacgagaggacaggtggcttccgcagcagcgtggttatggnggtggcggcnnggtggtggtggttgcggctatngtggcgg

SEQ ID NO: 1583 - DNA, 277 bp, Zea mays
  misc_feature: Incyte ID No: 700344647H1
agggaatcttgtttgtcgctattgatcagaaacgcccattgtctgatcaaggtccatttgacatcgttcttcataagttgactggaagggggtggcagcaattgctggaggaatatagggaggcgcacccagaagttactgttcttgatccacctggcgcaatagcaaacttgcttgatcgccagtctatgcttcaagaagtatctgaattggacctcacagactgtcatggtaaagtacgtgtgcctaagcagctatttgttaatactgatccctc

SEQ ID NO: 1584 - DNA, 279 bp, Zea mays
  misc_feature: Incyte ID No: 700344648H1
  unsure 164-165, 167: a, t, c, g, or other
actccatggtttaagttcctctgggagacatacaggactgttctagagatactaaggaacaattcaaagcttgaagcgttatatgctatgactgctcatagggcttttcaattctgtaaacagtataagagaacaactgaattccgtaggttgtgtgagatcannanaaatcatcttgctaatctcaacaaatatcgcgatcaaagagatcgtcctgatctgactgcacctgaaagtttacaactgtatcttgatacacgtgttgagcagcttaaagtt

SEQ ID NO: 1585 - DNA, 127 bp, Zea mays
  misc_feature: Incyte ID No: 700344649H1
cgcaccgccgacagtcctcagtccagaactccagatcaggcgcttagaaggcgcgctggccggtggatgacgatggcgggtggcgggggactgaaccggtcttcatcgagggggcagctgccgccgc

SEQ ID NO: 1586 - DNA, 112 bp, Zea mays
  misc_feature: Incyte ID No: 700344650H1
  unsure 37, 96: a, t, c, g, or other
ctcctgcctgcagcctcctgctcatcgaccctttcgnccccacaagcttcgattcctcgctcggccatggctgcacccgcggaggagacgcttgcngccgaggatacggcgt

SEQ ID NO: 1587 - DNA, 97 bp, Zea mays
  misc_feature: Incyte ID No: 700344651H1
  unsure 60: a, t, c, g, or other
caatcagttcagtcacagctcacagcaaacaccgcgaagccggcccccgcttcccaaacntcgacccgagcaaagcgcaaagccccccaactcgcgg

SEQ ID NO: 1588 - DNA, 93 bp, Zea mays
  misc_feature: Incyte ID No: 700344652H1
  unsure 30, 38, 44-45, 49: a, t, c, g, or other
cttggttccgcgttccctgcacaaaatgcncggcgaancagcannaaancgtccctggctacagagcaggagttgccgcagccccaggctgag

SEQ ID NO: 1589 - DNA, 137 bp, Zea mays
  misc_feature: Incyte ID No: 700344654H1
  unsure 24: a, t, c, g, or other
gcttttactagatcatcagtagcnagctcaggagccgagcctggtcagggtagccaagcccatcccggtcctctcccggcgtcttctccctccgcaccgcggctccggcgatggcgggcgtcggctccgcgctgcgt

SEQ ID NO: 1590 - DNA, 188 bp, Zea mays
  misc_feature: Incyte ID No: 700344655H1
  unsure 87: a, t, c, g, or other
tcccccgctcaccaactcaaaccccctccgctctcaaaccctaaccctagccctagcccgctcccggcggaccgacgatgccgaagnaggcggcggggcggcggacgaagaggagttccgcgccgaggtggaggagcgcctcatcaacgaggagtacaagatctggaagaagaacacacccttcctct

SEQ ID NO: 1591 - DNA, 85 bp, Zea mays
  misc_feature: Incyte ID No: 700344656H1
  unsure 67, 84: a, t, c, g, or other
accaaggtgatggtgaagcagaggatggagatgaagatgaggaagctgagtcagctacgggcaagcnggcagctgaagatgatna

SEQ ID NO: 1592 - DNA, 293 bp, Zea mays
  misc_feature: Incyte ID No: 700344657H1
  unsure 62: a, t, c, g, or other
tttcggatcccacgaggatgaagataagagttctggtaaccctcagtctgggaaagctttgnatgacttcacagcaggcggtgatgatgagctgagtttaaactctggagaagaagtggagattgaatacgaggtcgatggttggtattatgtgaagaaaaggaggcctggaagggatggaaagatggcaggtctggttcctgttctgtatgtgagttcatgataacagccgtgtgtatcgtttcccacacttgtggaagctgtttggagttcatgggcttaacaaaaaggca

SEQ ID NO: 1593 - DNA, 223 bp, Zea mays
  misc_feature: Incyte ID No: 700344659H1
  unsure 16, 41: a, t, c, g, or other
aaaagaactccatctncttctggcttaccagaagattatcntaaggatagtgacttgcaacaaccggttttagatagcttctcagtggtttcatcttttcaagacaatatatctgggaaaaaactgtttctggtgtagcaggcagtgagattctttctttaagtttagcaactcctgattataaacatgaagatggtttctctgaggaagcagtatgcagaac

SEQ ID NO: 1594 - DNA, 192 bp, Zea mays
  misc_feature: Incyte ID No: 700344663H1
  unsure 60: a, t, c, g, or other
aaagtgtgaaacctcaaagggtgggcagcactccttcgtatggatttagttttaagtgtnatgagagagctgaaaaaagaagagagttctactcaaagcttgaggagaagattcatgcacaggaactggagaaaagcaacttgcaggcaaaatcaaaggaaactgaagaagctgaactcagaatgctgagaa

SEQ ID NO: 1595 - DNA, 102 bp, Zea mays
  misc_feature: Incyte ID No: 700344666H1
  unsure 23, 40-41, 62: a, t, c, g, or other
gccgaaaacaaaaagcctgcttnccgggactcctatcctnncgaaaggatgtcgtcatctgncacgtttccaagtgatccgactcttgcgatggggagcctg

SEQ ID NO: 1596 - DNA, 132 bp, Zea mays
  misc_feature: Incyte ID No: 700344669H1
tctcggccatggaggccgcaagcaatcaggagccggggagatgcggcggcgacgacgacgaggcgaagaggagggaggcagagcttgcgtcaagcaggctcctcgacccggggttcaagccctccaaactat

SEQ ID NO: 1597 - DNA, 180 bp, Zea mays
  misc_feature: Incyte ID No: 700344670H1
  unsure 131: a, t, c, g, or other
gggcttatcactgtgtgttacctgctatatatgatatgataaatacttgccaactcacggattctgcgtctgcttattagcagcagcctagcctttgttgtgggaaacatttgtgggtaccaacgcgaggncagtttgagaaaggtccgagcacacatgttcaatctatcacattcaaga

SEQ ID NO: 1598 - DNA, 290 bp, Zea mays
  misc_feature: Incyte ID No: 700344675H1
gcttgcaacaattgctaaggagcatgggggtatcataagatttatccaggtttcttgcctaggggcgtcaccgtcttctgaatctagaatgttgaggacaaaagctgcaggagagcaatcagtcttcaaagaattccctgaggctacaatcatgaggcctgctaccatgattggcacagaagatcgaatcctgaacagatgggcacaatttgcaaagaattggggtttcctcccgcttgttggtggtggatctactaagattcagcctgtgtatgtaatcgatgttgctg

SEQ ID NO: 1599 - DNA, 205 bp, Zea mays
  misc_feature: Incyte ID No: 700344677H1
  unsure 54, 58, 176: a, t, c, g, or other
cagcagcaacaagctactagctatgtgtgtttagagcgagcgaggggaaaaaanaganaacatctaagatatactccatcatcttcgtttgattaacccgcccagtaaagccatgggtactaatgatagagcggtcatttctctagtactcctcgtgtgcatcgctagccgctcgnccttgggtgccgctgaaactgacgttgag

SEQ ID NO: 1600 - DNA, 173 bp, Zea mays
  misc_feature: Incyte ID No: 700344678H1
  unsure 53: a, t, c, g, or other
ggcgtcatcaagcacgggtgcaagccgtacgcgcacaaccagtgcagcaaagngaccccgctcgcgggatgccaggacctggagtgagtgagccggtggccatggttttctatactctgctctgctctccctcgccggcgttcttttcgtgtcccaatcttgaaggacgacgg

SEQ ID NO: 1601 - DNA, 133 bp, Zea mays
  misc_feature: Incyte ID No: 700344679H1
  unsure 51: a, t, c, g, or other
acgctctatctctttcgccgagctcctcgaaaccctaggagcgtgcttgancggcggcggcgaggtgatggcgatggaccctgacgcggtagcaaggccttcgtggagcattactaccgaacgttcgacacca

SEQ ID NO: 1602 - DNA, 110 bp, Zea mays
  misc_feature: Incyte ID No: 700344680H1
  unsure 8, 15, 19, 44, 61, 67, 78: a, t, c, g, or other
tgggtttngcctgcnagcngcgagatgtccttccttcttccggncccgcatcgaggcagcncctgtngccgcaggagnatacgcgcgctccctgcaaggactccctcgtt

SEQ ID NO: 1603 - DNA, 126 bp, Zea mays
  misc_feature: Incyte ID No: 700344683H1
  unsure 8, 26, 83, 93, 115: a, t, c, g, or other
cagaagangccgcagtggcgcgcggnccccgagggcgccaagacgctgtgcaacgcgtgcggggtccgttacaagtccgggcngctgctcccngagtaccgtccggcttgcagcnccaccttcgtg

SEQ ID NO: 1604 - DNA, 156 bp, Zea mays
  misc_feature: Incyte ID No: 700344684H1
  unsure 44: a, t, c, g, or other
tgcttaaacgagacaaacctataaaggtggcgatcaactttaanagttggtccacaactcgggacatatcatcagagtggggctgaagcagctcgatatacgcagcgaacaaatcagcggtccaacagccacaggcaaggttgggaacagtcgtaa

SEQ ID NO: 1605 - DNA, 282 bp, Zea mays
  misc_feature: Incyte ID No: 700344686H1
  unsure 2, 132, 281: a, t, c, g, or other
gnccgccgtctgtgtcgtcatccactctggttgaactaacaaccaggctagatttcttcaaagaacggcggtcacaattgatggaacagctccacagcctcgatttagggcatggatccacgtcccatggtntcccatacaaaccttcatctccctggaacagcccaaagtaaagtaggggatgatcagttgctgcagtacgacgtctctgtatattcttggtatagaatctcctttatgtttcactccatctttgtagagcctggtagtgagaatgtatnt

SEQ ID NO: 1606 - DNA, 285 bp, Zea mays
  misc_feature: Incyte ID No: 700344687H1
  unsure 257: a, t, c, g, or other
atctccgggaacttttacgctaggtcaatctataagagcgttgtgaatctacatggatcagccaaaaatttaccagcttcatgtacctcaaagccaaagcaatcacctgagctgtgtatgttcccacagtatgttgtcccgacaatgcgcacaccattgttcatacttaatgcagcctacgattcgtggcaggtcaagaacgtcctagcacctagtccagctgatccgaagaagacttgggcccaatgcaagcttgncttcaagagctgctccgccagccaactc

SEQ ID NO: 1607 - DNA, 166 bp, Zea mays
  misc_feature: Incyte ID No: 700344689H1
  unsure 50: a, t, c, g, or other
ccatcacacacaagacacaaccccactcacccggcagggaggccctcttngtcggcggaggccatggtttccctcaagccgcagaagaggctcgccgcgggagtcctaaaatgtggcaaggggaaggtgtggcttgaccccaacgaggtctacgagatctcgatgg

SEQ ID NO: 1608 - DNA, 284 bp, Zea mays
  misc_feature: Incyte ID No: 700344690H1
  unsure 21-22, 46: a, t, c, g, or other
tccaactatttcgccgcaaanncctctagaagcaatcaggcgagcngcggctgcggcgcgatgggagagcaggtcgtgacggagcgtatccagcggaagctggaggaggccaacactaccgtccaacagcacctcgccggcatccaggaccacgtcaacttcaccatgcagcaagcatacttcaagtgcgcatatgattgcttcgatcggcgccgtactcaggaagcgatcaacaattgtgtggagaattgtggtatgcctgtccttgctgtcaacaatgtttt

SEQ ID NO: 1609 - DNA, 286 bp, Zea mays
  misc_feature: Incyte ID No: 700344691H1
cgcacaccagcacctgccctcctcgccgtcgccgcctccctccgcgcgaccgatctaccctccgccgccaccatgtcgctgatcgccggggaggacttccagcatatcctgcgtttgctgaacaccaacgtggatgggaagcagaagatcatgttcgccatgacctcaatcaagggtgtcgggcgccgcttctccaacatcgtctgcaagaaggccgacatcgacatgaacaagagggccggcgagctgacgcctgatgagctggagcgcctgatgacggtcgtgg

SEQ ID NO: 1610 - DNA, 100 bp, Zea mays
  misc_feature: Incyte ID No: 700344692H1
  unsure 47: a, t, c, g, or other
cgacgccgtgacgacgcagctagcggggtaaatgtccttggccgganccaattgcataggttcctggtgcctgcatgtcgatggacactggtattctgtt

SEQ ID NO: 1611 - DNA, 284 bp, Zea mays
  misc_feature: Incyte ID No: 700344693H1
  unsure 169, 246: a, t, c, g, or other
catacccggttgtctgaaacatcagtttccccaaggaaagaatttcgccctcaaaatttggatcttgcaaatgatcgaactacatactgccgtggtcggagatcaaccgaaatcgtgttcagtacacaagtgcccacttctcctcctagttcaagaggacatcactatncacaattcgcctgtgccatcaagaacatttgggcaatgccctgcatctcctacttcatggcaggatgattcgcgaantcaagctcaccccaaccacttcctcttcctccaggttc

SEQ ID NO: 1612 - DNA, 174 bp, Zea mays
  misc_feature: Incyte ID No: 700344696H1
  unsure 19: a, t, c, g, or other
gccgcaggacctgcaggcngcccgcgccctcgtcatcatcagcatcatcgtggctgctctgggcgtgctgctgtccgtggtggggggcaagtgtaccaactgcctggaggatgaaagcgccaaggccaagaccatgatcgtggcgggcgtggtgttcctgttggccggccttat

SEQ ID NO: 1613 - DNA, 247 bp, Zea mays
  misc_feature: Incyte ID No: 700344701H1
  unsure 49, 221: a, t, c, g, or other
agatgaattacctagaacacatggcgagaataaccaatttgctgcatcncgagtgcccaatgactggggaattgagaggcatggagcagatgccagttcaagtcttaggtttgacatgccatcccaccaacagaccttggaagaacttgagatggagtttaaaaaagaagctacacaattagctagagctcgtgaccaagaggaggatgaagagaatatangcatcgagagtcgctgagagtgatta

SEQ ID NO: 1614 - DNA, 126 bp, Zea mays
  misc_feature: Incyte ID No: 700344703H1
  unsure 101, 111, 121: a, t, c, g, or other
gccaacgcccggctcttcggcatacgggcaaaaagagccaaggaagccgcagaacaggatgttgaaaagaaaaaataaagccctcctggggacttggaatnaaaaaaaaanaaaaaaaaanggggg

SEQ ID NO: 1615 - DNA, 317 bp, Zea mays
  misc_feature: Incyte ID No: 700344704H1
  unsure 2: a, t, c, g, or other
gngagatccggagcagccgcagtcccaccgaccccgccgccggtcgccctccatctcctcgccgctgcctctcgtttctcttttcaataatcaagatgagccgtggtggtagtgccggtggtggtcaaagttctctgggttatctctttggaagcggtgagccccccaaaccagcagtggcaccagctgcaagtgctccacctgttgagaaaccatctgctgcaaagactgatgcggccaagcaggttgctgctggggttaccagccaaaccaataactaccacaggctgatggtcagaacatggcaattcttagga

SEQ ID NO: 1616 - DNA, 312 bp, Zea mays
  misc_feature: Incyte ID No: 700344705H1
  unsure 4, 295: a, t, c, g, or other
gganacgccggagcaatcatttttgctctcaagaacaagctggacattaccctcggagtagcgttggggtcggcgacccagatctccatgtttgtggtgccgctgagtgtcatgtagcttggatcgcgggtattcaaatggatcttgacttcaagctcatagagaccggctctctcttcgtctcagtaatagtgacagcattcaccctccaggatggttcgtcacactacctcaaggggatccttctgctgctgtgctacattgtgatcggtgcatgctcttgttacgaggcaanctgcaagtaacaacaat

SEQ ID NO: 1617 - DNA, 325 bp, Zea mays
  misc_feature: Incyte ID No: 700344706H1
  unsure 66, 96, 211, 213, 228, 292: a, t, c, g, or other
gatagaatgattcttcagggcatattcctaccaggggaggccaccggttcgctgtatgagttcgtncacatctgctctgaagcaacaaggtttggnattcgaactcatctctccagccattcctaagccacgtgtggtgccacattttccaaacccgggagagcgggcacgcaccctacaagaggaggacctagttcccttgccgcgctcntncaagttacatacccnaggagactgattccgtggttttacaccggtttgcttgatgagcttctcgaggccagtgagccgntacctgctgcatcacaatgaaccttaaaccgtt

SEQ ID NO: 1618 - DNA, 317 bp, Zea mays
  misc_feature: Incyte ID No: 700344709H1
  unsure 17, 27: a, t, c, g, or other
cgggtttgccgccagancacaggtgtngtgaaaactacccctaaaagccaaaatgggaaaggaaaagactcatatcaacattgtcgtcattggacacgtagattcgggcaagtccaccactactggccatctgatctataaatgcggtggcatcgacaaaagaaccattgaaaaatttgagaaggaggctgctgagatgggaaagggctccttcaagtatgcctgggtctggataaactgaaagctgagcgtgaacgtggtatcaccattgatatctccttgtggaaatttgagaccagcaagtactatgtgactat

SEQ ID NO: 1619 - DNA, 314 bp, Zea mays
  misc_feature: Incyte ID No: 700344712H1
  unsure 2: a, t, c, g, or other
gncggcccatccgcccatcagagcatcagacgaccaccttcctgcccccattcgtttccgcatcggcgtatctcccggcggcaaaggcgctctcctcccgacctccctgcggtgccggtacgacagtcgacaggatggcaatggccacatcagcatcgtaccctccacctcctccattttaccgattgtacaaaaaatttgagcaagatccctcatctgcaccagaacctccaccaccaattgatgaaccattcaaagcttgggtgttgattacacaggagatgttgtgattccagcttggagagtcatatgtc

SEQ ID NO: 1620 - DNA, 310 bp, Zea mays
  misc_feature: Incyte ID No: 700344713H1
  unsure 2-3, 102: a, t, c, g, or other
gnntgctgcggacttgacgatgtacatagcgcgggagacttccaaggtgtggaggaaggtggccacggaggtatcggtggagctgcagctcctgcgcgagangtgggggctccttctcgccggtctgatctttcagtatattcatggattagctgctcgaggagtgcattatttgcatcgacctggaccactgctccaggacttgggatttatggcccttccagagctcgggcaagacaaaggttatcttagtgagagtatatttcttccatcttcatctccttgtgttgtggacatccatcctttatta

SEQ ID NO: 1621 - DNA, 316 bp, Zea mays
  misc_feature: Incyte ID No: 700344714H1
gcttgtggcacagcacggggaaatgcagaagctggttatagagaacggccggcttgctgcaagccaacgcctcgctgaggaaagcagctagccgcggcgcacaggagctgcagaggctgcaggcgcagggggaggccgcgaaagccgctgaggaggaggagatgaggggcctccttgacaaggttgggaagatggaggccgacctgaaggcccgtgagtccgtgaaggtggagctgcagcaggctcatgctgaggcgcagagccttgtggccatgaggcagaacatggtggcagacgtgcagaagctgagcaagga

SEQ ID NO: 1622 - DNA, 311 bp, Zea mays
  misc_feature: Incyte ID No: 700344715H1
  unsure 133, 208, 210, 216-218: a, t, c, g, or other
caaactcagatccaagcaaagcaaacatcacggctcgtcgcagtcgtcttcctaccccacgcgaggccagatccaacctgcctcggccgaccaccgccatggctcccacggtcccttcggcggcgaagtctgnctctccttcccaaccttccgggaagagcgaggtggcagatctgaagcagcagttgcggcagtggcggggagccgngntcccgnnntggacgaccagcgccgtgatgtcttcaagagggtgatctcctgcatgacggccggcatcgacgtgtcggccgcgttcggggagatggtgtctg

SEQ ID NO: 1623 - DNA, 318 bp, Zea mays
  misc_feature: Incyte ID No: 700344717H1
  unsure 263, 316: a, t, c, g, or other
cttgtgacctggaacatctgctggggaacaagaggtgtgattgattttatcggtcgctattctgatgtagaccttagaactgcaaaagatggagagtatgttaaggttactggggttgttacttgtggaaatttgccccttgagtcctcattccaacgggtgccacgatgtgtgtacacttcaacttgcttgtacgagtacaggggttgggactcgaaagccgcaaacgccacacaccgacggtttacttggggtctcagtcnatggaacggcacgcggtggacttctacatctccgatttccatccggctgcganca

SEQ ID NO: 1624 - DNA, 323 bp, Zea mays
  misc_feature: Incyte ID No: 700344718H1
  unsure 38, 40, 59, 68, 86, 103, 137, 197, 205, 229, 233-234, 281: a, t, c, g, or other
gggaagacgaggagggcattggctgtgcagcccgtggngnggccacccctctgtcctancccagcccnggccctcagcctccaggncccagctggacagccanctttgacccagtgcctacagatgccccgaccagnccccgagtctccggggaggaagagctgcacactgggcctccagccccacaggggcccctncagtgtgncccagggcctccccactcagagcntggnnagccctcctgcccgtgacgccctgcagctcaggtctcaggaccccanacccccctcagcacctcaggaagccacagaaggcagtaaatc

SEQ ID NO: 1625 - DNA, 309 bp, Zea mays
  misc_feature: Incyte ID No: 700344720H1
  unsure 173: a, t, c, g, or other
ggtgccttcaggagtccccaggaggctttcttctccacttccctgggagtcaagttcactgggacactggaccacagcaagggatttgttttctgtccctccagcatatatatttggagcgattctgcctgcttttatggttgcaggactttacttctttgatcacagcgtantttcacagttggcacagcaaaaagagtataatttgaagaagcctctgcctaccactatgacatttggtcctggattcgtggtccgctctgcggtttgctggtatccctccatctaatggagtgcttcctcagtctc

SEQ ID NO: 1626 - DNA, 315 bp, Zea mays
  misc_feature: Incyte ID No: 700344721H1
  unsure 112: a, t, c, g, or other
gtaccatttcgatccaatggcgccgacgtcgaagctgtcgacgggcatcaagcgcgcttcgcggtacgcacgcgtaccatcgccgtgggctgtgggccatcaaggccaagancggcggcgccttccccaaggccgacaaggcgccgccgccgtggaacccaagttctaccctgccgacgacgtcaagccccgcgttcccagcacccgcaagcctaagcctaccaagctcaggtcgagcatcacgcctgggacggtgctgatcctcctcgcagggcgcttcatggggaagagatggtgtttctcaagcagctcaag

SEQ ID NO: 1627 - DNA, 314 bp, Zea mays
  misc_feature: Incyte ID No: 700344722H1
  unsure 155, 202: a, t, c, g, or other
gggatgatggggaatcacttgcattcaagagtcatcccggaacaccagctactgccttgttggagtcacgggatgcagaaaagccaatagataaaaagctcagggatatgtatcaaaaggagcttgtcatggttacttctcaccaagctttgttnaagaacaagacccctccagagagatatgtttacactcgccgcagctnccatgtccaaaaggaagcaatgtagttcagcatgtagttcaaagacctggtggatgacagcaggcgaatcgcttcttgggatatctggatataatattctggaagctcgatg

SEQ ID NO: 1628 - DNA, 312 bp, Zea mays
  misc_feature: Incyte ID No: 700344723H1
  unsure 18: a, t, c, g, or other
gccgcgtctcggcaaaangtcctccgcgacagagagcgtgcagccagccaccgaccacccgcgcaggcaggacttggggagcaagcaaggcgaagggcctgccatggattccttctcgtcctcgccgtcgtcgtcaggtcccggcgctaacccggacgttgttatggaacagatcaagacgcagctcgcacaggcttacgcgcaggagtttctcgagaccgtcgggaacaagtgctttgaaaagtgcgtgaccaagccaggatcaagcttgagtggaagcgagagcagctgcatattcacgttgtgttgacc

SEQ ID NO: 1629 - DNA, 310 bp, Zea mays
  misc_feature: Incyte ID No: 700344724H1
  unsure 252: a, t, c, g, or other
ggcgacgaaagctgcgacggacgccccctcgtcgaatgcactggcgaccgttccgtacgaggagcagccggagcacgcaggagttgagggaaaagctttgaaaatgtcatccaccgtgccgaagtcatcaaatatcttctggcatgattgtccagttggcaagactgatcgccagaagctactcaagcagaaaggctgtgttgtctggattacaggcctagtggttcaggtaaaagtaccttggcatgtacntaggccgtgagctccacacaagagggaagcttgcatatgtcctgacggtgataattaa

SEQ ID NO: 1630 - DNA, 309 bp, Zea mays
  misc_feature: Incyte ID No: 700344725H1
  unsure 60: a, t, c, g, or other
tccgaggtcaaaacctgctccgaggtggacgagccgtagctccccgaatgggcttaagangaggtggtgttcgaggtcgtggaggtcctgggagagggggcctagggcgtggagctatgggtcgtggcggaatcggtggtagaggtcggggtatgataggtcggggaagagggggctttggaggccgaggccgaggccgtggacgagggagaggtgcccttgctcgccctgtattgaccaaggagcagctggacaaccaattggatgcatatatgttcgaaaacaaaaggacacctggatgctgattgg

SEQ ID NO: 1631 - DNA, 314 bp, Zea mays
  misc_feature: Incyte ID No: 700344727H1
  unsure 48, 86: a, t, c, g, or other
gggatatggtcagggcgcttatgggcagccttctccacagggccaganacctcctccattgtcaccttatggacaggctctgcctncctggttctgctcaggctggttacgggcagtatggttacagccaacctgcttacggtgcaccaccagcttaccctggtgcacccattgcaagccaccagggctatggccagcagcagtcttatggcgatgcttatggtagtgcaagctatgggcagcctccagcctactctactgaagcaacacctcctgctgcatcccaggatcactctgctgcccctgctgcggcc

SEQ ID NO: 1632 - DNA, 311 bp, Zea mays
  misc_feature: Incyte ID No: 700344728H1
  unsure 2, 228: a, t, c, g, or other
gnaaaagatagagaacataaccgcagaagggagatcctgaagcaggaagatgagagcgacgaagaggataataggaaaaggaagcgaaggagtagtagttcacttgaagataggaaaagaaggcggcaacgtgaaaaggaggaagatttggcagataaaataagggaggaagaggaaattgcagaagcaaggcggcgggctgtagagttgcaacggcaagcagatgangcagctgcagcagcggctgcagctgctgaagagtctgctacacttatggaggttgatgctgacgacgaaaaagaaacagatgc

SEQ ID NO: 1633 - DNA, 308 bp, Zea mays
  misc_feature: Incyte ID No: 700344729H1
  unsure 88, 128, 135, 157, 284, 306: a, t, c, g, or other
gtgtcaactcagagttaaatggattaagggcggtgcaggatgtgctttgttaaacagatgcttgaaggcagcacgctccttaagagtnatcaccactccctaatctcaagtacccagggacacaaaanctgcggnaggccgcaggacctctgcctangaaagccaggtattgtccaaggtttctccccatgtgatagtctgaaatatggcctcgtgggaagggaaagactgaccgtcccccagcccgacacccgtaaagggtctgtgctgaggaggattagtanaagaggaaggaatgcctcttgnat

SEQ ID NO: 1634 - DNA, 307 bp, Zea mays
  misc_feature: Incyte ID No: 700344731H1
  unsure 7, 301: a, t, c, g, or other
tcctggnagctccaaggagtagcctcagtagcaaatgccatgtcaagacaaaattcactcagttttactgggtcaattgatgagtccaggcatggggataatgttagacatggggcaacttctagcatgtctcagtatagctcaaagcaaaatcacaaatcaaatgatccaggtcgtgatctttcaattcaagtcttggagaaattctcattggttactaaatttgcacgagatactacatcaagcctttttcgagacaatagtggtgctcatgcttatggacgccaacaacatcaatacntttgga

SEQ ID NO: 1635 - DNA, 307 bp, Zea mays
  misc_feature: Incyte ID No: 700344732H1
  unsure 2, 9, 17, 25, 35, 43, 48, 64, 71, 190, 194, 199-200, 211-212, 225, 245,: a, t, c, g, or other
gngagtttntcttgcanggccggtncatatttggncctgatgngaganccttgtttctcaccanattcctnattcttgcaccagtggtggtacttctgcatatttgtggccagacatcttatcaatgactttcctgatcattggggagtttcagtcatggtcatagtgaatgtcttcacaatatacgatntganactgnnccttcttaccnntggtagagatccngggatagtgcctcgtaacanccatcntcctgaacctgaagctatngatatgaacaatgangctgganatggtcagacaccac

SEQ ID NO: 1636 - DNA, 227 bp, Zea mays
  misc_feature: Incyte ID No: 700344733H1
  unsure 4: a, t, c, g, or other
gggnacgctaaatgtagcacgtgtagacagcgtccggtattttaccgaaggctttaccgtctgttgctggaccagcaatagagctcggcgtcctgtaaatttggcggacaggaccacatacaggtcctgttggacacagtcttagtcctgtgagttccaggttttcgcttgtggtacctatgaacatgaaacctgtttactttgaggaatgtactttatttccatct

SEQ ID NO: 1637 - DNA, 313 bp, Zea mays
  misc_feature: Incyte ID No: 700344735H1
  unsure 5, 74, 83, 88, 108-109, 150: a, t, c, g, or other
aaccnggaccctgtcgcagtccatcaccgtagtattctgtgcgcaatgctgataatggtacaagcgtacgcganccgttcgtnccgangtttagcatttcagggtggnntaattttttgactcgagatttgggaggaaacaatgattggnaatttctcggtgtggtgaacgagcaatgctgcattcatgctccaaataaaactgcgagccctcaaaatttcgcgaaacgtaattgggtcatgtggaaggccagaggagaagccacgatcggatgaaggagacatcgagatgactaggatagtaagtagttatc

SEQ ID NO: 1638 - DNA, 306 bp, Zea mays
  misc_feature: Incyte ID No: 700344736H1
  unsure 20, 43, 51, 74, 83, 216, 221, 233: a, t, c, g, or other
ggcgcgtggtctacgccgantgacagagacgctcaggctgtgntctcaggntgaccgagtgggagacagcagcnccagcggtngcagagaccccagacatcaagctctttgggaagtggagcaccgatgatgtgcagatcaatgacatttccctgcaggattacattgcagtgaaggagaagtatgccaagtacctgcctcacagtgcagggcggnatgcngccaaacgcttncgcaaagctcagtgtcccattgtggagcgcctcactaactccatgatgatgcgggtccgcaacaacggcaaga

SEQ ID NO: 1639 - DNA, 232 bp, Zea mays
  misc_feature: Incyte ID No: 700344737H1
  unsure 2, 24: a, t, c, g, or other
gnctagtggaatcagttgatcganatttacttcaaataacatttgtttgtgttgcgaattgggaagagagtttttagttagacgagcttttgatggccctaaagatgttttcccggatgatgtttgtgctgctggaccgtttcctgttagcttcgatggcatcctccccatatcgataaactgttgctagcctgacaatcggaagagtttaaatgttaaagatttgatatct

SEQ ID NO: 1640 - DNA, 305 bp, Zea mays
  misc_feature: Incyte ID No: 700344738H1
gtccaggctctggatttgggtctggaggatcagggggttcaggttctggtgcaccatcagagaaacgtggcagggggcggccacctggctctggaaagatgcaacagctggcttcgcttggaaagtggtttcttggctctgttggaacaggttttactccgcatgtgattattattcaaccaggagaggacgttgctgcgagaataatggccttctcacagcaaggcccaagggcagtgtgcatcatttcagcaactggagctatttctacagcaacccttcaccaggattcagactctggtggt

SEQ ID NO: 1641 - DNA, 307 bp, Zea mays
  misc_feature: Incyte ID No: 700344740H1
  unsure 12-13, 30-31, 41, 43-44, 70, 79, 81, 105-106, 140, 153, 178, 192, 196,: a, t, c, g, or other
ggtggctccggnnccagctgtcgtgaaganncaggaggctnannaagtggtgaatcccctgtttgagaanaggcctaananttttggcattggacaggacatccnncccaaaagagacctcacccgctttgtgaaatggncccgctatatcangttgcagcggacagagagtccatcntctataagcggctnaaantgcctcctgcgattaaccagttcacccaggcctggaccgccaaacagctatncagctgcttaagctggcccacaagtacagaccagagacaaagcaagagaagaagcagag

SEQ ID NO: 1642 - DNA, 306 bp, Zea mays
  misc_feature: Incyte ID No: 700344741H1
  unsure 2, 45, 291: a, t, c, g, or other
gnttcactcgccctcatctccttcctggcccccgccttgagtccnccccatgcccgccgtgaatctacgccggtgcaatgaccacgcctgcccttaactccagatgcccgccttccaaacccgacgcctccttctatcccccgcaacgagctagcatcacgcgagtgggtattccttccattgccgtcaccgagcttccacagtaggcgactgacctccatagtatgcggtaagcttccaatcagtgcctccgcccccatccataataccccattccatccttggcgcaanttccaacgacgatgc

SEQ ID NO: 1643 - DNA, 308 bp, Zea mays
  misc_feature: Incyte ID No: 700344743H1
  unsure 2, 86, 101, 263: a, t, c, g, or other
gnccaggccaacgccctcagcaagatccagaaagacatcgccaagaaccaccaggtccgcaagcagtacaccataccaggtccggngagaacgagctcgtncctcaaggagctggagctgctcagcgatggggccaacgtgtacaagctcatcggaccggtgctggtcaagcaggacctcgcggaggccaaggccaacgtcaagaagcgcatcgagtacatcttccgcagagctgaagcggatggatcgggcgcttcaaagantggaggaaaagcaaaacagcaagaaggatcgatattccagttgcc

SEQ ID NO: 1644 - DNA, 300 bp, Zea mays
  misc_feature: Incyte ID No: 700344744H1
gtgaggcacagggtttttttgatatgatgcctgagaaggaggtcaaaccaaacattgctagctatgagttgctattgaaggcatatattgatgctgcaaggttggatgatgcgattaaggtcgccaaatgtatcctgttagatgagagtgtcgtctttagtgatgaaacgaaagcacttctggaggaggcactagacaaagagggtagaaatgggcaaatgacaaagttatatgaagatgttgagatggagaaagcagaggcggctgcacgtgcagctgaagagaaggctagagcagagg

SEQ ID NO: 1645 - DNA, 283 bp, Zea mays
  misc_feature: Incyte ID No: 700344745H1
  unsure 19, 154, 257: a, t, c, g, or other
cctcgccaagcgcagcagnccgccgcagcacatacgctctcttgatctcagccatggcggaggtggagcagcaacaggacacgccgaagctcttcaaccgctggaccttcgatgatgtccaggtgaacgacatctcgctgaacgactacctcgntgtgaacgcgacgaagcacgcgatgtacctgccgacacaccgcggggcgctactaccaagaagcggttccgcaaggcgcagtgcccgatcgttgagcgccttnacaaataccctcatgatgcagggcgc

SEQ ID NO: 1646 - DNA, 297 bp, Zea mays
  misc_feature: Incyte ID No: 700344746H1
  unsure 8, 35, 56, 71, 97, 112, 135, 186, 194, 210, 215, 225-226: a, t, c, g, or other
gggctggncctttgcatggtgttgcattgaatganccatacaagcctttggatgcnattgacctcaaagcntatgctgctaggaaaaatgaaaccanatactgctatgattntcccctggcatttgaaacagcgntgaagagatcatggaaatcaagtagctatggtgttagcgaagtaatgagcncaatcgantctatgctgaagtganagagnttatatttgnngattcggttggagcatggggcactccattggtttcagttgaagtcctccaggcatcaagatattggcatcg

SEQ ID NO: 1647 - DNA, 305 bp, Zea mays
  misc_feature: Incyte ID No: 700344747H1
  unsure 2, 5, 11, 16, 93, 106, 115, 117, 150, 152, 206, 261, 265: a, t, c, g, or other
gncgnaagganagaangccaagggaaagaaggtggctccggccccagctgtgcgtgaagaagcaggaggctaagaaagtggtgaatcccctgnttgagaaaaggcntaagaattntngcattggacaggacatccagcccaaaagagacntnacccgctttgtgaaatggccccgctatatcaggttgcagcggcagagagccatncctactataagcggctgaaatgacctcctgcgattaaccagttcacccagggccnggangccaaacagctactcagctgcttaagctggcccacaagta

SEQ ID NO: 1648 - DNA, 290 bp, Zea mays
  misc_feature: Incyte ID No: 700344749H1
  unsure 26, 65, 83, 134, 150, 152, 156, 204, 223, 227, 235, 265, 268-269, 271,: a, t, c, g, or other
taatgtgatggcccagagcaggaggnagttgtccagtttttggaaggggacaacaaagtggtggnagtggaggagggtgaggnagttgattcttctgatgcaaccacagggtctgcagctgttttgggtaaganctgcaatgatcctaancnggangaagtggtggttgtcatggaggaacattcacagagcccccatgaaggnttgtgaaagagcaagaacntatnatgtgganagaccgcttcaatggaatcaggaagattcncanncnaagngtgattagaaaaacc

SEQ ID NO: 1649 - DNA, 291 bp, Zea mays
  misc_feature: Incyte ID No: 700344750H1
  unsure 67-68, 113: a, t, c, g, or other
cactgccggcgctctatcttccgctctctctcctactcgcgctcggcaaggcggcggcgccgtccanngctcgggctacggcgtcagggcatcccctccgcctctcgccagtngcctcgcgccctcgcctccggtcacaccggccggtgactctgctaaaaatggtgttcctttcaaatgaagacgcctggatccatgatgaagacatcatggatgatgttgattcagatgttgaagaatcagatcagaaggtgattcagtgaagaagctcaggtaagctgcagacaaagc

SEQ ID NO: 1650 - DNA, 295 bp, Zea mays
  misc_feature: Incyte ID No: 700344751H1
  unsure 60, 277: a, t, c, g, or other
gggccgtctctccaaggaggagatcgagaagatggttcaggacgctgagaagtacaagtnctgaggatgaggagcacaagaagaaggtggaggccaagaactcgctggagaactacttcctacaacatgcgcaacacgatcaaggacgagaagattgcgtccaagctgccggccgatgacaagaagaagattcgaggacgccatcgacgcggccatcagctggctggacgccaaccagctcgccgaggcggacggttcgaggacaagatgaaggagnggagagctctgcaacccc

SEQ ID NO: 1651 - DNA, 290 bp, Zea mays
  misc_feature: Incyte ID No: 700344752H1
  unsure 13, 282: a, t, c, g, or other
ggtttcaggaganactagcgtgcacagaatcagcagttgctgaagccaaccacgctgtgcaggaggcaaaggccgagaaggagaggcttcaagagaagcttgcacacacggaatcagaggttgctgtggccaacatggctgcacatgaatctaagattgagttcgacaggcttcaagagaaacttacatacacagagttggtggttgctgaagccaacaaggctgtgcaggaggcaaaggctgagagttcgcatctgaaggagcggttacttgacaagagangcatgcag

SEQ ID NO: 1652 - DNA, 65 bp, Zea mays
  misc_feature: Incyte ID No: 700344753H1
gtgcctggtgttaatgtacttcaaacatgaatctacctttaatagtggactatgcgaatttattc

SEQ ID NO: 1653 - DNA, 285 bp, Zea mays
  misc_feature: Incyte ID No: 700344754H1
  unsure 67-68, 112: a, t, c, g, or other
cactgccggcgctctatcttccgctctctctcctactcgcgctcggcaaggcggcggcgccgttcannctcgggctacggcgtcagggcatcccctccgcctctcgccagtngcctcgcgccctcgcctccggtcacaccggccggtgactctgctaaaaatggtgttcctttcaaatgaagacgcctggatccatgatgaagacatcatggatgatgttgattcagatgttgaagaatcagactcagaagtgattcaggtgaagaagtcagctaagctgcagac

SEQ ID NO: 1654 - DNA, 291 bp, Zea mays
  misc_feature: Incyte ID No: 700344757H1
  unsure 2, 12, 20, 28, 39, 49, 53, 56, 77, 81, 157, 171, 201, 206, 212, 225,: a, t, c, g, or other
gnaccaaccagnaccatgcncatgatantggggtactgngacatccgcnggcnggnccacgccatccgcctgctccnggantacacagactcaagctatgaggaaaagaagtacacgatgggggacgctcctgattatgacagaagccagtggctgnatgaaaaattcaanctgggcctggactttcccaatctgccctanttgantgatgnggctcacaagatnanncagagcaacgncntcttgtgctanattgctcgcaagnacaacctntgnggggaganagaanag

SEQ ID NO: 1655 - DNA, 290 bp, Zea mays
  misc_feature: Incyte ID No: 700344758H1
  unsure 35, 280: a, t, c, g, or other
gatggggctgccctcagtcctctagatcaagatgntgactattagggggcagtgattgccatctggggacctgtcaggctttgtcatttcccagtttgttggtggtgcctttagtggttccctaatttgggaacactgatggggccttggacagggctttctctcaggtaggagaaatgggcccatgatctcctcacagtcgcccccagtccttggccctgcttccctgtgtctcatgcactggcacatatggtcaccttggagggcagacctaggagcncctctgacca

SEQ ID NO: 1656 - DNA, 288 bp, Zea mays
  misc_feature: Incyte ID No: 700344759H1
  unsure 55, 64: a, t, c, g, or other
tcttggacaatgctcgcaagtctactatagatgctaccactgatgcaggcaaganagttaaggngctgactgatgcagttgcacctcatgtccagcagctatttgatacatatccaaatctgaaaaggtagttgttccacttggtggaacaatatgtggtacaatgatggcatggttggtcatgcctatcattctaaggaggctcacaagtacgcatcacaaagtcctatatcagcacttctggggaactccaccaagaatgatgttttgtaccaaactagtctcggt

SEQ ID NO: 1657 - DNA, 287 bp, Zea mays
  misc_feature: Incyte ID No: 700344761H1
  unsure 98, 164: a, t, c, g, or other
acgatgatggggcaagtgaacagggagaggctggcggagtttctcggcgagctgtaacggaaagaggacacgaacgacaggtacgtggccgcgctgangggggagaccctgaccaggaagcgctacgagcgcatccagcccgtgcctgccgccaacgcgcaagnagaccaggaggctgccggagccagcgcggaggatgagaggcccaaggcaaatgagtctcagcgagactgcctcagtcaatttttattgctggacatacgcatgcttcggcatatgtaagcatc

SEQ ID NO: 1658 - DNA, 287 bp, Zea mays
  misc_feature: Incyte ID No: 700344762H1
gttaatcctttttggtttggatgatgactcatcattggtactacatgtaacatgaatcatcaggagggacctctggaagatccaggcatcaaccatttcagtcgatgctttcgagctcatatgtgtgtttctcaggaacggttagtatgcttataccgcaatccattatattctgcaaccgatgacaccattgttgtcaggattgtcatatcacatttacataacaactttgatcaaccttagccaaacatggtggacactgcctagtacagtttatataagcatat

SEQ ID NO: 1659 - DNA, 296 bp, Zea mays
  misc_feature: Incyte ID No: 700344763H1
  unsure 7, 9-10, 19-20, 23, 111, 135-139, 263: a, t, c, g, or other
ttcctcncnncgtccgcannttntcctctcgactttacagtacctgctctcagctcctccctatctcaatggcatccgcgaatgccatctccaccgcctcccccttccggncccctctctcagggcagggcgacnnnnncacagcggttcgtggtgcgtgcgaacgccaaagacattgcctttgaccagaaatccagggcagcgctgcaggccggcgtcgagaagctcgcaaacgccgtcggtgtcaccctcgggccacgagngaggatgtggtgctcgatgatacggcaacccca

SEQ ID NO: 1660 - DNA, 300 bp, Zea mays
  misc_feature: Incyte ID No: 700344764H1
  unsure 2: a, t, c, g, or other
gnacgactagcggaataatatccaccggcgacgggaacgggaggcggcgcggccggagattcgaagcgatggcgttcacgatgcgggcagtgaaggtgcctccgaactcggcctcgctggaggaggcccggcaccgcgtcttcgatttcttcaagcaggcatgccgctctatccccaccgtcatggagatctacaacctcgacgacgttgtcacgccctctcagctccgctcgaccatcgctaaggagatccgtaaaaaccagaacgtcaccaaccccaaggtgattgatatgcttctgt

SEQ ID NO: 1661 - DNA, 281 bp, Zea mays
  misc_feature: Incyte ID No: 700344768H1
tttgggttccggggggagatgaagatggttttgcccggtgacaatgtaactgcgaattttgagttgatatcacctgttcctcttgaacctgggcaaagatttgcgattagggaaggaggaagaacggtcggtgctggagtcgtctccaaagttcttagctgatcagtttccactttcttctccgtagcaattcagtgaacaaacgagtgttgatatgttcgaccgggttagaaacgagcgcaaagcaccgggttttctttgcattttctggaatgactgag

SEQ ID NO: 1662 - DNA, 103 bp, Zea mays
  misc_feature: Incyte ID No: 700344769H1
ttacagtgtgagagtgtggagaagttacaaatagtaaatcaacacatatatatatttataaactaatatatgtgtgtgtgtatataaatgaaatctattgctg

SEQ ID NO: 1663 - DNA, 286 bp, Zea mays
  misc_feature: Incyte ID No: 700344771H1
  unsure 2, 72, 83: a, t, c, g, or other
cnaggacacccgcgtcgtcggtggtggcagcagccggacggccaggtttctccagtaccagaggctggagtnctgggaggacnccggagtcgctcccagtcccaggtcccggtggcggtggccgtggctgccgacggagaatggtaagatggctcccccctgtttgttcaatgtcaagaggctgaagtggagcaagatcacctcggctctgatactaccaaggaaggttgctgagctctccgcaaagatccgtcacgccagcgccagaccgaggccgccgccacca

SEQ ID NO: 1664 - DNA, 288 bp, Zea mays
  misc_feature: Incyte ID No: 700344772H1
  unsure 20, 111, 264: a, t, c, g, or other
gtgatgtagaagtacaaganccagtgactgttggaactgaaaagctatctgatatgcaattcaaagaaagatcacaagcttggttcttccaccggatctgagatgactganccaacccaaggttgttaaagacaatgagagtctagtagcatctgagttatccccagagacaaatgatggtgataaaaatcagctaacagagtctggcaatataactgctgacaaatcatcaaaaccaatcgatactaaacctgcttctgttanaccaaagaggggccgacctccagc

SEQ ID NO: 1665 - DNA, 284 bp, Zea mays
  misc_feature: Incyte ID No: 700344773H1
agaagatatatctcaggatggtagcaggctttgggctattgacaaacccaatattgcacaaccccctcgcggatgggaaaggcagattaggataagaggtgaagggggtaccaaatttgctgatgtatactatacctctcctactggaaggaaacttaggtctctggttgaagtcgataggttcctccaagagaatccggagtatggtgctcagggtgtaactttagctcagttttcgttccagatacctagacctctacggcaggactatgtgaaaaagaaac

SEQ ID NO: 1666 - DNA, 288 bp, Zea mays
  misc_feature: Incyte ID No: 700344774H1
  unsure 46, 196: a, t, c, g, or other
gcttctgcaggaagttaagaacagtaacaaccgctcgaaagcgcanaaaccgcctctggatgcaccaccgccgaatgcgagcggcgggggtctcgcgccaggagttgctacccccaacgtcattgctgctactggggagcaggggcagcatgtcaataacagtagctctaaccataacggcacggtaaagggtgcngctggtactggccctagcaatgtcatcaacaatagcacagccagcatggcttcggccagaaacagcagcttcaagtcggtgagcagcatcca

SEQ ID NO: 1667 - DNA, 141 bp, Zea mays
  misc_feature: Incyte ID No: 700344775H1
  unsure 76: a, t, c, g, or other
cgtttcgttgtctgaactgattaaatcctaatatcgatagattagactctccccagcaaccgctttgtcccctgantaaagtgattcatcatctcttttttacgtctagcaatatcctgtaaaaggtccctacaagacagc

SEQ ID NO: 1668 - DNA, 287 bp, Zea mays
  misc_feature: Incyte ID No: 700344776H1
  unsure 2: a, t, c, g, or other
anaaggcagaattgcttcttcagtgcttgcctgggactcttactgttacgataaaacgtggcaacaatctaaagcaatcagttggaaaccctagtgccttctgcaagcttactcttggaaacaatccgccaaggctgacaaagattgtctcgactggtgcaacacctgaatgggatgaagcctttgcatgggcatttgacagtcctcccaagggccagaagctgcatatctctgcaaaaacaacagcaaatttggaaagaaatcgttcggtaaagtgacgatccaga

SEQ ID NO: 1669 - DNA, 288 bp, Zea mays
  misc_feature: Incyte ID No: 700344777H1
  unsure 3-4, 30, 47, 50, 115, 118, 148, 180, 184, 200, 226, 268: a, t, c, g, or other
aanntctgcacctgaattagagcacaatanatatgctgtttataaancanatcactgctattgccttctgctgaaatcatctctcctctttttaaacctttacttatagctagantanatcactatttaattgcctctaatactttanaactactggatggttaggcctggtttaactanttanggagagctatttgcanacttaagttgtgtaaatgtaatttcnacttgtgaatctgagctgtagcagcccagagggagctaggcnaactatccagaccaccaact

SEQ ID NO: 1670 - DNA, 286 bp, Zea mays
  misc_feature: Incyte ID No: 700344778H1
  unsure 2: a, t, c, g, or other
anaagtggacaacaggagggtattagttgatgttgagcgaggcagaactgttccaaattggcgtcctaggagattgggtggtgggttgggatcaagcaggatgggtggtactgatactgacaaaaaggattccactagggagcaacaacaaggtggacgccctagatcagaagagcctcggagggatgatcgtcgtgccgatagggatcgtgaaaaatctcgtgaaagggtacgggaaagagaccgtgaggagaggacccgtgaacttcgcatgaccggactctga

SEQ ID NO: 1671 - DNA, 290 bp, Zea mays
  misc_feature: Incyte ID No: 700344779H1
  unsure 47: a, t, c, g, or other
gagctctccctccccgtcctcctctcgccctcgagctctctgtcccntgtctcctctcgccctcgagctctcccaccccgtctcctatcgccctcgagctctcactcccccgtctcttgtcgccctcgagctctcgcaccctaccacttcccgtcgctggtgaggatctggatccttcggggtgcgtcaaaaggttgtcagtctgcaagttgaatcatggcggagcacttggcttcgatctttggtaccgagaaggacagggtcaactgcctttttattcaagatggggt

SEQ ID NO: 1672 - DNA, 237 bp, Zea mays
  misc_feature: Incyte ID No: 700344781H1
gagtgggagacccgcgagaggctgccgtgtagggaccgtagactcagcgactgcgaaggagggataaggggatggccgggatcggaccgatcaggcaggactgggagccggtcgttgtgcggaagaaggcacccaccgccgccgccaagaaggatgagaaggccgtcaacgccgcgcgccgcgccggtgcggagatcgataccatgaagaagtacaacgtggtacgaacaaggcggc

SEQ ID NO: 1673 - DNA, 273 bp, Zea mays
  misc_feature: Incyte ID No: 700344782H1
  unsure 2, 20, 56, 81: a, t, c, g, or other
gngccatctcaccggcggcnggcctgcggccggcaaccggaggcgatggcgagctngtctgtggtggcggacatggagcantaccgccccaacctggaggactacctcccgcccgactcgctcccgcaggaggcgcccaggaatctccatctgcgcgatctgcttgacatctcgccggtgctaaccgaggcagcgggtgccatagtcgatgattcattcacccgttgctttaagtcgaattctccagaaccatggaatggaacatatatttgt

SEQ ID NO: 1674 - DNA, 269 bp, Zea mays
  misc_feature: Incyte ID No: 700344783H1
  unsure 2, 94, 109, 116: a, t, c, g, or other
gngacgaggtgagggcggggaggatgagctgctgctgccgcgtcgcgaggatggcgacgccgcggagggcgagagtggagtggtgatgcgggtngccgtcgacgcgaancgccagngtgggtgtaggcgctcggatgcttttctacccgacgctggtgtacaacgtcgtgaggaatcggttcgagaagcacttccactggtgggatcagatcgatgagcatgtcctgctcggtgctgttccatccctagcgatgttctccggctaaaga

SEQ ID NO: 1675 - DNA, 272 bp, Zea mays
  misc_feature: Incyte ID No: 700344784H1
attctgctgaatttgctggtgaaagtttcgcaatgctctctggcacaagtatggctgcgccccatgtcgctggcctcgccgctctaatcaagcagaagtttccttcttttagcccagcagctatagcttctgcactgtccacaaccacaactcttagtgacaggcaagggaaaccaatcatggcacagcgaacatacagcaacccagacttgacgcagtcttccagcgacatcttttgatatggggaatggcttgtcaacgctaccgctgct

SEQ ID NO: 1676 - DNA, 209 bp, Zea mays
  misc_feature: Incyte ID No: 700344785H1
ggtgtcttctccggcgagtctcccccctagtaacaagaaaatatggatgtacctgttgatgaccctgtggagaacctcactggaagtcctagtacccttggcaatgaggaagaagccactacttatgctaatgtgcaagatcagtccaaggaagaaccagaaaagctttacgaggaacccaaagacccaatgcaagacgagttgggtaa

SEQ ID NO: 1677 - DNA, 265 bp, Zea mays
  misc_feature: Incyte ID No: 700344786H1
cttgcttatgccctagcttcacttccaccttatcaagtaccattttcagatgttgcaattgtgcatcttcattgtaaggtacctgctggtgagatatggcatagtctgaatgcaaccatagttggtttggcagtttccaatgcatctgagggaaccagatcaatccctactgtgttgggctggcatcataaggggcgtcgatatcaaaaaggccgttatatttaataactcctgttcctctccagcgccgcaatgcgttgatctt

SEQ ID NO: 1678 - DNA, 75 bp, Zea mays
  misc_feature: Incyte ID No: 700344787H1
  unsure 2, 21, 49-50, 62, 73: a, t, c, g, or other
cnacacttgccttggagtgtntggcctcagtttgtacacaacagagagnnttcttcgtgaantattttctcgnta

SEQ ID NO: 1679 - DNA, 272 bp, Zea mays
  misc_feature: Incyte ID No: 700344790H1
ctctgttgaatttgaagttgctgattgcaccacaaaggattacccagaaaatagttttgacgtcatctacagccgtgacaccatccttcacatacaagacaagcctgctctgttcagaagcttcttcaaatggctaaagcccggtggcaaagtcctaatcagcgactactgtaagaatcctggaaaaccatcagaagaatttgctgcgtacattaagcagagaggctatgaccttcacgacgtgaaggcttatggacagatgctgaaggatg

SEQ ID NO: 1680 - DNA, 272 bp, Zea mays
  misc_feature: Incyte ID No: 700344791H1
cagctaggatcggtcgccacctgtctactgcatcatcctgttccagcccgcggctgctcatcaagcagagggcgacggcggcatcggcaccggcacagaaagagaaagaggtcgtcttcgtggctggcgccaccggcagagttgggtcccgggccgtaagggagctcatgaagcttggcttccgtgtgcgcgctgccgtcaggaacgcacagagggccacgtcgctggtgcagaaagagaaagagcagcagctgcttgagcttgtggagtgt

SEQ ID NO: 1681 - DNA, 274 bp, Zea mays
  misc_feature: Incyte ID No: 700344792H1
gtttcactggccaaggctctttcaaacgcctacgtacccatcggggcaactcttgttagcccagagatatcagatgtgatccattcccagagcaataagcttggttcatttgctcatggattcacgtactccggccatccggttgcctgtgctgtggccattgaagctctgaaactttatcgcgaaagggacattcccggccatgtcaagcaaatcgccccaaagttccaggacgggattagggcgctggcagacagtccgattataggggaga

SEQ ID NO: 1682 - DNA, 229 bp, Zea mays
  misc_feature: Incyte ID No: 700344794H1
gccgctccattgttggatgaagcacggtccattgtctcgaggagcggctacacaaggccccgtggcgatcacaaaaaaggagcctatatccatgtactagactattcagtttcacatcacgatgtggagtgaaactgaataattctagtacatggattactgtttccattgtcgtcatcatcggctaacattgtcataatgtcagtttgggtaatgttagattaagtaa

SEQ ID NO: 1683 - DNA, 296 bp, Zea mays
  misc_feature: Incyte ID No: 700344802H1
  unsure 82: a, t, c, g, or other
gggaattaattgtatcctcacaacagagttctccaagcacaagaagttccaaaaagaagagtacacctcaaattgggaacanctcagcttttgctgaggctcataatgattcaacagaggaagcaaataaccgtcattcagcaacagatggttacgatagttcaaggaaagaagaattcgtcaatgagaatttatgcaagcaggaggtgtacttgagatcatggaaggcattgagcaggacttcttgtgaaaggattagagtttttggaaggaacagttgtttattgctcggaacc

SEQ ID NO: 1684 - DNA, 262 bp, Zea mays
  misc_feature: Incyte ID No: 700344803H1
  unsure 10: a, t, c, g, or other
ggaccttgcngttctctccctcgtcggcaatcagcccgcttcctgtgctctctatgctccccttccgttcgtagcctcggccttcgtctccctccatggacccgcgctaaatgcatcgcgagattccaaaccggtagcgtttcttcctgctccatccgccgcaagatgtaagcaagggcctcacttcacacccggagtgggagaccatccagaatacatcctcagatcttcttgtgtctgagaaaaagcgacgccttcaatg

SEQ ID NO: 1685 - DNA, 263 bp, Zea mays
  misc_feature: Incyte ID No: 700344806H1
gatcaacgaaggccaagggtcatttgatctttcgtgaatctcaacactaacataggtattggtccacctagaaatctgcgtcattgttacccagagttagtttctacctcattcatgtatgacataggttaaactcagctctccggagtcccaccgaaggtttggagcccgtacctttgggtgtggatgtctatactctcttttctcttggttgtatatctgcggatcttatagtgaataatagtaataaatgttttgcgctc

SEQ ID NO: 1686 - DNA, 278 bp, Zea mays
  misc_feature: Incyte ID No: 700344807H1
acaagtggtacagtgcactttatgtggccttggaggagtgcctagtgcagttgacagaaaaggttggggatgttggtcctattcttgatatggttggggtaatgcttgagaatctctctcatactgctaccatcgcaagaacaacaatttcatctgtttatcgcacatcacaaatagcagcatctgtctacaagtcatcataccatcagaaggcattcctgaagctttatttcaccagcttctcttagcatgttgcactcagacaataagacaaggat

SEQ ID NO: 1687 - DNA, 290 bp, Zea mays
  misc_feature: Incyte ID No: 700344809H1
tatcagtctcctcactcctgtctctcatgtctccttttcctcccaccgttcctgtcacccacgcagcacgccggagcagctgtagcagtcgagctcgacatcagctcccttgctgctcactttgcagcacctcgccagctccctggtaacactctgcacctgccgtcgaactctctcaggttcggtcatccctgctcccttccaaatcaacgcccctccactcgactctactactgtgtcgtgcgcgcgcttcctcctgcttccgtcgctgggtgcgtgctcatcttccg

SEQ ID NO: 1688 - DNA, 277 bp, Zea mays
  misc_feature: Incyte ID No: 700344811H1
  unsure 47: a, t, c, g, or other
acttcctaggaaggcatctgaaaggatataatccaggtgactaggtnttgagcaatattgcaattatcttaaaaaggatcaactgtagtattctaccagtgtacttgaattgcttcatgcatgtacggtggcagattttagttggatttttcaattctcatggccttgcatggtgctgacagcaagcaaatattgacaggaacaccttttattgtcactgaactactgcgagcaatctatacgagtttcagaaatataatcaagaatctggtggtga

SEQ ID NO: 1689 - DNA, 286 bp, Zea mays
  misc_feature: Incyte ID No: 700344812H1
  unsure 19: a, t, c, g, or other
gtttcccccgcctgcgcancagcgcaaaccctagccaacaagcgccgttctgcgaggctctcggcagcggataacttaacctgtcgcgcaaggatcgggggagagaaaccagcggcaacttacgtggatcggggttgtttggtgctgctgcggcggcgcagggatggaccggaagcgcatcaaggacgcgctcgagaagcacctggagaggtcgtcgccgtctacttccaggggcgtcgtgtccaaggagagggagcgctcgtgccgggaagctgccgtcatcgtt

SEQ ID NO: 1690 - DNA, 287 bp, Zea mays
  misc_feature: Incyte ID No: 700344813H1
  unsure 81, 99, 209-226, 250-251: a, t, c, g, or other
gcagcccccaccaccacttgttcaatctctctcctctcccgtctcgcctcccggagcgcaagaaaagctcggattcctggnggtttctaccatacctcngtcctcgatctgagcgttgcctgcttccctgccccccccgctcagatgtccgccttccgtgtcctgtaaaatctttcgccgcgcagaatcttcccccacttgtcggctgnnnnnnnnnnnnnnnnnncaatggcgaccaagggagggaacnnagggcgttccggtgggggcgctgctggtggccgcgc

SEQ ID NO: 1691 - DNA, 289 bp, Zea mays
  misc_feature: Incyte ID No: 700344814H1
  unsure 56: a, t, c, g, or other
ggcgacctcaaccagttcctcagtgcccaccagctggaggacaaggcagccgaggnggcccctggggacgggcaggctgcgcaggggccgcccatcagctacccaatgctgctgcatgtggcagcccagatcgcctccggcatgcgctatctggccacactcaactttgtacatcgggacctggccacgcggaactgcctagttggggaaaatttcaccatcaaaatcgcagactttggcatgagccggaacctctatgctggggactattaccgtgtgcagggccggg

SEQ ID NO: 1692 - DNA, 289 bp, Zea mays
  misc_feature: Incyte ID No: 700344815H1
gccggcgcccggtctacaaccccccgccgggccccaagccatggccgatcatcggcaaccttaacctcatgggcgagctgccccaccgctccatgaacgagctctccaagcggtacggtccgctcatgcagctctggttcgggtcgttgcctgttgtcgtcggcgcgtccgccgagatggcaaagctcttcctcaagaccaacgacgcggcgttctccgaccggccgaggttcgcagtcggcaagtacaccgcgtacgactgctccggccttctgtgggctccttttga

SEQ ID NO: 1693 - DNA, 111 bp, Zea mays
  misc_feature: Incyte ID No: 700344817H1
  unsure 4, 10, 12, 22, 69, 89, 100: a, t, c, g, or other
ggcncacgananactctctgtncctgtcacgtgcaaaatccgtgtcttcccggagattgacaagaccgngaggtacgcccagatgctgnagaaggccggntgccagttgct

SEQ ID NO: 1694 - DNA, 290 bp, Zea mays
  misc_feature: Incyte ID No: 700344818H1
  unsure 138, 269, 284: a, t, c, g, or other
agtttacaagacatcaaacaacatgatcttatttgagtttcgtcttgttggtgtgaacactacagggcggttcagaagcaggcttcgtgtgccctgatccagctcttttttaattatacagcaccatgcccagcaggntcagaacatgattctcaccaactgagcatgtactgagttgattaagtattttaaaaataaaatgtgaatgaaagttctatgtggttggttataccatgtcaaaccaaaaaagctgaacagtctgtcatcangtattggtccaactnttagca

SEQ ID NO: 1695 - DNA, 290 bp, Zea mays
  misc_feature: Incyte ID No: 700344819H1
  unsure 42, 55: a, t, c, g, or other
ctctcccgtctcccctcaccttctccacctcccccattccgncaccgcacaagcngacctccctgcaccaagaggagaaaagaaagggagagcgaaggaggcaaaccaggtgggacagcaacgcgacgtgcttgctattctctcgaggagctcatgcaaggtgtaagtcttactgcaagaagggcagctgtgcatgttaagacccatacatagcctctcttgattacacagcacggggggtgaaaacttgagatacagttgatctcctggttcagagtatgggttcaggt

SEQ ID NO: 1696 - DNA, 289 bp, Zea mays
  misc_feature: Incyte ID No: 700344820H1
ggatcgaagcggagagcaagggagcggtcgagcgggtgacatcatcgtcatccagggtttctcaatccggcagcgatggcgaccagggcggcggcgaggttcctgcagcgcagtttctgtcttctggcggtaaggtcctcagcgaggaggagaaggccgccgagaacgtgtacatcaagaaagtggaacaagagaagctggagaagctcgcacgcaaggccccagctcaggagagcaaccctcgtcaaccacaggctctgcagcaagtgatgtgaaggccgatgctggg

SEQ ID NO: 1697 - DNA, 283 bp, Zea mays
  misc_feature: Incyte ID No: 700344821H1
  unsure 50, 82, 94, 97, 110, 112, 114, 119, 136, 140, 151, 170-171, 178, 183,: a, t, c, g, or other
attcatatttcttgaagcttagatacagtctaattcatagcaaccatatnctgctttatcctaggtgagggtagcagtccanaatggaataganganaatcccattatancnanatganaaattatatatcatgantccntctgtctgacnaactcaataactttctatnnaagccantgganttcaaataggagctaggagacaacaagttatgacagtggaggttgtantcctttatattgctgaganaactagttaatgatcagatcttgctgttagaaa

SEQ ID NO: 1698 - DNA, 279 bp, Zea mays
  misc_feature: Incyte ID No: 700344822H1
aatctggtgagcatatcattgctggagctggtgagcttcatcttgagatttgcctgaaggatctgcaggaggacttcatgggtggtgctgaaattattgtttccccacccgtcgtctccttccgtgaaacgttcttgagaagtcctgccgtactgtcatgagcaagtctcccaacaagcacaaccgtctgtacatggaagcgcgcccctggaggagggtctcgctgaggccatcgatgacggccgtattggcccacgtgatgatccgaagtgcgctccc

SEQ ID NO: 1699 - DNA, 93 bp, Zea mays
  misc_feature: Incyte ID No: 700344823H1
  unsure 4, 20, 75-76: a, t, c, g, or other
tcanggttaactcaatatcngtgtgaaagagaactactaacaacgttacaatagaggctagatttgagaaaaaanntcctatagatctaattg

SEQ ID NO: 1700 - DNA, 283 bp, Zea mays
  misc_feature: Incyte ID No: 700344824H1
  unsure 33: a, t, c, g, or other
cagagaagaggtatgcaccaaaaaggtggaatnccaaatgttgaaggtgctgccaaactgctgtggtctgagtggacaggaacctcattagcttactattgccatccccctacatcttggactcctcctccatattttaatgagaggattgtggtagacatgaaaagcggcttcaatctggaagaactggaaaagaacaatgcacagagcataagagccatcaagggccctcatttggccaatagcatcctttccagtcttccggtctgacaaatggaatata

SEQ ID NO: 1701 - DNA, 283 bp, Zea mays
  misc_feature: Incyte ID No: 700344825H1
  unsure 265: a, t, c, g, or other
caccatccgtgctcctggtaaagggggacagagagcctcaccttgccacatatttgaacagtgatgagtttggggctggtttctgggaagggaacgtttatttagtaaagagcagaacacccttgcgttttgttgggacatgtggaccgtgagtcgcaaacactctggagaaggctgagatgccaccattcccacggggactgaagacacattacgtggacctggtcccaggctcagtgaggagatggcctcagctgtggggctngtccatgttgcccactca

SEQ ID NO: 1702 - DNA, 284 bp, Zea mays
  misc_feature: Incyte ID No: 700344826H1
  unsure 105, 150, 156: a, t, c, g, or other
cgccttccgcttccctaccccccgcatcacctaccaacgccgacaccatgggggccttcgcgaaggaggagcaccagttcctcgccgagctcggcctcgcgcagncaacccgggcgcgttcgcatgcggtgcgtggggcggctcaggtcncaccgncacctccacgagcccgaccaacaatcaggtcatcgcagaggtcgtggaggcgtccgtgcacgactacgaggagggcatgcgcgcctgcttcgacgccgctaagacatggatggcgttcctgtccaaag

SEQ ID NO: 1703 - DNA, 284 bp, Zea mays
  misc_feature: Incyte ID No: 700344827H1
  unsure 11, 99: a, t, c, g, or other
aaatatttggntgtgagcattacaaaagaaactgcaagcttgttgctgcatgctgcaataagctattcacttgcagattctgtcacgataaagtaactncaagaggtccacttattgactcttatgaccatgtaattggtgttaatacaactacattaacatgtaaaggttggtagatctggaaggtctgatggtctaatacctatctatgagtacggaagaaaaggcgggagaagtcggtctctgcagcatcgcgcgtgaaaaaaaatcagccattccacgag

SEQ ID NO: 1704 - DNA, 287 bp, Zea mays
  misc_feature: Incyte ID No: 700344828H1
  unsure 14, 158: a, t, c, g, or other
gcaatgcggcgcanatctacggtccagttcacgacgtgcgcattccctaccagcagaagcgcatgttcgggttcgtcaccttcgtgtacccagagacggtgaagctcatcctggccaagggcaacccgcacttcatctgcgacgcacgcgtgctcgtnaagccctacaaggagaagggcaaggtccccgacaagtgcaggaagccgcagcaaggggacttctccggctgcacgacgcccactggcgggctggacggcgggtacccctttgatctgcaccagctcggg

SEQ ID NO: 1705 - DNA, 271 bp, Zea mays
  misc_feature: Incyte ID No: 700344829H1
  unsure 13, 20, 22, 192-193: a, t, c, g, or other
cttgaaaatgagntcaagancngcctcacttacagatgatggcacgttgccgacatacacagatttgctctcttcgtcatcatctgtaagtgaggctgatcttgaaaatgagttcaagaaatttggccggcttattcctgacggtgttgctatcagaagccgaaaggagactggtggctattatgctttcgnngattcgaggaactcagcggtgtacacaatgcgttaaaggcttcaccattgaataaatgggcggcagatatatgttgag

SEQ ID NO: 1706 - DNA, 281 bp, Zea mays
  misc_feature: Incyte ID No: 700344830H1
  unsure 78: a, t, c, g, or other
aaggaaaaagagagcagagaaccctagctagagtttggcgagtggtgcggaggcgcggctgctcctgctcgtccgcgncctcgaatttcagcgccgcccgcgcgatccttggtctcttcgcccgtgaggagaggcgcgacaatggctgggaaaggcgggccgaccaacctggagaaggagcagatgtttgggatggcggagaaggagatggagtacaggttgatcttttcaacaggcttacaaagacctgttttgagaatgcgttgaaaaaagttaaagaa

SEQ ID NO: 1707 - DNA, 286 bp, Zea mays
  misc_feature: Incyte ID No: 700344831H1
ccatcgagtcgagacgagaccgtcctccgcccgagtctcgctcgctagctagggtttccaccaatggcggcgcccaccacctcccgccgcggccccggcggcgcgcgcaacatggacgacgagaacctaaccttcgagacctccccgggggtcgaggtcgtcagcagcttcgaccagatgggcatcaaggacgacctcctccgcggcatctacggctacggtttcgagaagccctccgccatccagcagcgcgccgtgctccccatcatcaacggccgcgacgtca

SEQ ID NO: 1708 - DNA, 286 bp, Zea mays
  misc_feature: Incyte ID No: 700344832H1
  unsure 26, 38, 209: a, t, c, g, or other
gccaccctcacacacacagctgggcnaagccacaaggncggccagcaaggcaggttggatgggagtgggcacctcagaaagtcaccaggacttggggtcaggaacagtggctgggtgggcccagaactgcccccactgtccccctacccaccgatggagcccccagatagagctgggtggcctgtttctgcagcccttgggcagttctnactccctaggagagccaacctcggcttgtgggtggtgccccacagctacctgagacgggcatcgcaggagtctctgc

SEQ ID NO: 1709 - DNA, 282 bp, Zea mays
  misc_feature: Incyte ID No: 700344833H1
  unsure 100: a, t, c, g, or other
gttgttttgatagcatgcaatacaacgaacctatgatgacacaggagaatcacaaggctagcaatgcagtccctgcagatcagaggagtgttggactgtncagagtctagtgtggagctgacatgcatagacttcatgaagccaaactcgataaattacatgagacaataaagcagttggagaatgaaaagagtttgtggcttcaaaaagtgatcaccatggagggtgaacttgaaaagttgctaacgagtgggttgtctgctcaaatgaggtcctttggag

SEQ ID NO: 1710 - DNA, 281 bp, Zea mays
  misc_feature: Incyte ID No: 700344834H1
atggatatgagcttgcattcaatggaagtagtaaatcggctcactactgcagtagttttaccaccaggatttgttcatgactatatctcaaactgtattcgatcatgtgaagacattaaggacaagtatatgcaaaatagactagtgagactagtatgtgtttttctacagagcctcattcggaacaggataatagatgtgcaagatctcttcgtggaggtgcaagcatttgcatcgcctctcgcgaataagggaggcatggggttgttcagagcctgaac

SEQ ID NO: 1711 - DNA, 280 bp, Zea mays
  misc_feature: Incyte ID No: 700344836H1
gacgcaaccccgcgggtcgcgggatcaaggagccagagagcgggacgcagcgagcgttccgccggagatcgagaccgtagctagggtttgaggcgccgggctgcggtggacgagatgtcgacgccggcgaggaagcggctgatgcgggacttcaggcgcctgcagcaggacccgcccgccgggatcagcggcgcgccgcacgacaacaacatcatgctctggaacgccgtcatattcgggccggatgatacgccgtgggacggtggcacttcaagcttac

SEQ ID NO: 1712 - DNA, 276 bp, Zea mays
  misc_feature: Incyte ID No: 700344838H1
gtaagtttagccttagctacttccttgtaaacgcgtgtgtcggctagaccactcggatacttcaaacagaaccccaactctatcagattcgtgagcgtctgctttttatcttgttcttgcttgttctcgattgcttgcaggttcaaggctgttcttggcatggcaagagcagcaacaataggagccggtgtaactatcgctaaggcgcagcacccttgtggttgttgtagtcggatagcacaacgttgacctccaccccaaatcgtagttatagga

SEQ ID NO: 1713 - DNA, 278 bp, Zea mays
  misc_feature: Incyte ID No: 700344841H1
  unsure 17, 47, 237-238: a, t, c, g, or other
ggaataaagtgcatttncctgtctacacaacgtgtagcccgtttggngttttataacaataaaacctcgggaggtcatcccacccagttgttagtgcaccacgtcggcttcttcagtttgctgttcgtgatgctgtcagaactgtgcagccagttacttctagttctgaatcagattccaagcgtattcgttctgtagtgtcaacattggcatcagattccacacttgatatccacnnatattaggttacagaaaacaaatcagatttgagagtaccg

SEQ ID NO: 1714 - DNA, 249 bp, Zea mays
  misc_feature: Incyte ID No: 700344842H1
ggagaggttcaagaccggcaagaacaggtggttctttaccaagctccgcttctagatggtcggcgtcccgaatggtgaccgtcggtttcttgtatgggacacactccaagccatgtactcttttcgtattgccatgaagacttcttcgtgtttagtcctggggctctcaggtatattgtgcgtgtgtacttcgaatgtttggtctggagtcctactgaatgatgaatgttcaatttatgtctcaggatt

SEQ ID NO: 1715 - DNA, 246 bp, Zea mays
  misc_feature: Incyte ID No: 700344843H1
  unsure 46: a, t, c, g, or other
tccgtccctcgccccatcgcgatggcccggatcaaggtgcacgagntgcgggggaagagcaaggcggatctgcaagcgcagttaaggagtttaagtcggagctctccctgctacgcgtagccaaggtcaccggcggggctcccaacaagctctccaagatcaaggttgtgcgcacctccatcgcgcgcgtgctgaccgtcatctcgcagaagcagaatcggcgctgcgtgaggcgtacaagaagaa

SEQ ID NO: 1716 - DNA, 277 bp, Zea mays
  misc_feature: Incyte ID No: 700344844H1
gtgcattcgttatgcgggggggagggggaattgggcgaaaagcgacgagctttactcgttaatgttagtgtagaaggtggactgcaagaactaaagtgacaagttacttaaaaaagtaaagcgtggctaaaattgcttttactgtcatacagctggcgatgaggaggtacctattgtgttgagtaacggtgataattttatacgctattctgagccagcagaagtgaaggccttaagccgattttaattgtttcgattatactgagaggtctttatt

SEQ ID NO: 1717 - DNA, 277 bp, Zea mays
  misc_feature: Incyte ID No: 700344845H1
  unsure 52: a, t, c, g, or other
gacccttctgagctcctggcgaatattgagtcacaaatattaaaagcgaaanaagagtctcttagtcggaaagatataatggacaggataaatagatggattgctgcttgcgatgaagaggcttggctgaagaatataaccaggacccaaagaggtacagtgctggaaggggtgctcatataaacctaaacgggcagaaaaggcacggattttggttagaaaaatcccaagtatggtggacgacttgataaaccgaacctttgcttgggaaaacgca

SEQ ID NO: 1718 - DNA, 280 bp, Zea mays
  misc_feature: Incyte ID No: 700344846H1
ctgctgcctgctggctgctgcctcgccccgcgtgaatcaataattcattgaatccattctaccgctgctcctcctccttgctctgccgagaagccggcgatgaggggccgcaagaggcagcaggtgagcgccagtcggccgccgcgctggtgaaggggagggagagcaccaagcagaaggagaaagaagctaggaaggagaaggaggcgagggaggccggcagggagccggcggcgaaggagaggcagatgaggcgcaaggccgggaaggagaaggagac

SEQ ID NO: 1719 - DNA, 308 bp, Zea mays
  misc_feature: Incyte ID No: 700344849H1
  unsure 42, 63, 291, 294: a, t, c, g, or other
attaaacatggtggattgcgtgagttcatatttttaagtgcngtgcactccagaatatctgtnaggtgttcccaacttcaaatactgtctttgaggcgaactggcatggctcatgtatcactcaattgtcctcagttgcttgagttggacttccaatcctgccataagctttctgataatgcaattcgccaagctgctacagcttgcccgttgttggcgaaactagatatgtcatcttgttctgtgttactgatgatacactgcgcgacataggtaactcatgtccaagtngtntgctctgatgcaca

SEQ ID NO: 1720 - DNA, 300 bp, Zea mays
  misc_feature: Incyte ID No: 700344850H1
  unsure 128, 199, 261, 264: a, t, c, g, or other
gagaaaagcagagggggccagatgaggagggacctcgcatcctccttcgctaccgccgcatcctcttcgtcggcaagccgacgcgctccggggctggtgggatgacgtcaacgagtcgccccagtggnaggacgcggccttcttctccctcgccgccgcctacgccctcgtctccgccgtcgcactgattcagctcgtnaggatccagcgccgggtgcccgagttcggatggaccacgcagaaggtcttccactcatgaantcntgtcaaggggtccgtgctctggtatcggttccagtc

SEQ ID NO: 1721 - DNA, 300 bp, Zea mays
  misc_feature: Incyte ID No: 700344851H1
  unsure 7, 48, 179, 183, 262, 272: a, t, c, g, or other
ccgagtntccagccaaccacatccagtccaccccatccccctcgaccncgacaaccccgagtcccgacccgatgggcgcccaaggccgagaagaagccagcggagaagaagccggcggccgaggagaaggcggagaagacgaccgcaggcaagaagcccaagtccgagaagcgcctgcncgcntcgaagtctccggcaaggagggcggcgagaagaaggggaagaagaaggccaagaagagctggagactacaaaatctacncttcaagtcntaaagcagtgcaccccgactcggcattt

SEQ ID NO: 1722 - DNA, 299 bp, Zea mays
  misc_feature: Incyte ID No: 700344853H1
  unsure 267: a, t, c, g, or other
ccttgatgagaagctccagaacgctacaacacttggagcaacccacactgtaaatgcagcaaaagctgatgcagttgaaaaggataaaggaaattactgatggtaggggtgtagatgtggctatagaggcacttggtaaggcgttaacattttcccagtgcgccaagagtgtgcgtgatggaggcaaagctgttatgatcgggctgctgcaacgaacgtaatgggagaggttgatataacccgtctgtccgacgacagtgaaaatcntggctcatatggcgcagggccaggcagacctc

SEQ ID NO: 1723 - DNA, 304 bp, Zea mays
  misc_feature: Incyte ID No: 700344856H1
aaatgccgtcatatggggatccatcttgagtgcctgcagagtccacaaaaacattgacctagcccgacatgccgcggagcatcttctcaagttagcccctgaggaggatgccgtctatgtccagttgtacaacatatacatagactctagacagtgggcagatgcaaaaagagtaaggatgttgatggaagaacggggagttaagaagacggcaggttacagctcgatcactgtggctgggcaggttcacaagttcgtcgccaatgaccaatcgcatccttggacgttagagatcatggcgatg

SEQ ID NO: 1724 - DNA, 185 bp, Zea mays
  misc_feature: Incyte ID No: 700344858H1
cacaggtacagcgcatcgttaagggtgaggtgagtgtggcgctcaaggaccagcaggccgccgtcacctccagcattcatgcaggccatgcgctcagctgctggcacacctgtcccctctgcccaccttgactgccaggcccagcaagcccatatcctgcagctgctgcagcagggccacctcgg

SEQ ID NO: 1725 - DNA, 300 bp, Zea mays
  misc_feature: Incyte ID No: 700344859H1
cccgttcccaaggagttgtcctcgccggcggatccggggcgccgctgcaagaggaggaaggaggaggagaggataccagaatggcgtcgcgctcggcgtccaaggatatcatcacgctgcgaggctctgccgccatcgtcagcgagttcttcgggtacgcggcgaatagcatcctctacaaccgcgctgtgtacccggaggagagcttcagcaaggtgaagaatacgggctcaccatgctgctcacccaggacgagggcgtgaagaattcatcgccagcctcacctcccagctctcagat

SEQ ID NO: 1726 - DNA, 297 bp, Zea mays
  misc_feature: Incyte ID No: 700344860H1
  unsure 44, 269, 282, 292: a, t, c, g, or other
cttgttgccaaagggatagtactttcattcattactgagttttncaaggagtaccttgaggaaaacagcttggatgatttgattgcacttttgaagaaaggcaaaatggaggacaatctgttggacttcttcccatcagctaagagatcttctgaggcttatctgagcatttcaccaaagaaggtctgactagcctgttgagtacaacgaaaagaagatgtttgaggttaaactaaggagataaagtcaacactgactgctatgataangatgaggctgcanatctgaatgntgaga

SEQ ID NO: 1727 - DNA, 256 bp, Zea mays
  misc_feature: Incyte ID No: 700344861H1
  unsure 2, 9, 11, 13-14, 55, 111-134, 227-230, 235-237, 239, 252: a, t, c, g, or other
cngagaccntncnncgaacgcaaaaagaaccccacccgacgtaccgcgagccggntatggcgacggtggcgatggacatctcgaagcccacgccggcagcgtccggtgacnnnnnnnnnnnnnnnnnnnnnnnnaggagcggcggcgggggcgaggggctgcggcagtactacctgcagcacatccatgacctgaagctccagatccggcagaagacccataacctnnnncggannngnggcccagcgcaangacc

SEQ ID NO: 1728 - DNA, 308 bp, Zea mays
  misc_feature: Incyte ID No: 700344862H1
  unsure 22, 30, 40-41, 55, 88, 97, 124, 141, 162, 191, 214, 218, 239, 261, 263,: a, t, c, g, or other
caaagcacgagccacgcacgcnccgctgtntccctcccgnngtcccgccgccacngctactgccggagtctctcgccaccgtcgttgntctcccgcnttcaccgtgccaactcccctccttgcntcccccgcgcttcagtngctccactccccatcgctttngcctggtcagaattccagatccaggtgtnctttgacccagaccgcgcctgcntttncctccgctcggattcttcgcngtcttcgttcctactgggcgcngncggggtggagcggagatcggatccgccaggagctgattcntctct

SEQ ID NO: 1729 - DNA, 307 bp, Zea mays
  misc_feature: Incyte ID No: 700344863H1
  unsure 14, 63, 67, 70, 76, 79-80, 161, 181, 187, 207, 223, 229, 232-233, 236,: a, t, c, g, or other
atggaatttgagtntgaacagaagtttaccaaagaggacgtcaaggaacttatattccagganatantgnagtacnatnntacagcttctgaaggattacaagaacggctctgaaaagacgagttttctatatcccagcgccgttgacaggttccgtaggnaatttgctagcttagaaganaatggngagaggaatgccgcgctganaggaaacatgtttctntcccanggnnaanaancgttcantccactccaattcctgcaagganggtccagcagnaacctcccangntgctcanagttccag

SEQ ID NO: 1730 - DNA, 311 bp, Zea mays
  misc_feature: Incyte ID No: 700344864H1
  unsure 49, 51, 59-61, 107-108, 217: a, t, c, g, or other
gcggttgccacagctttcttttaagaaaaggatttgtcgagttgagaangncagagagnnngcactcagagcagcacctgctaacgctagccaggacaaaatagaanngccttccggccggccggtcgatcgaacggttgcttgtctagcacagtgggagtactgtactacgaggacagacaggcgtgtgtcgagtggcgtgtcgccttcctgcgtngcgggcctcgtcgtgcgtgcgcatgcaaatgcaggcggggacggaaagacattgacattgcacgcgtcatgtcaccaccggtccaggccaccgg

SEQ ID NO: 1731 - DNA, 304 bp, Zea mays
  misc_feature: Incyte ID No: 700344866H1
  unsure 29, 36: a, t, c, g, or other
gagccagcggaaccgaacggaagcgaganccccggnggctagcgagatggacggcggcgccggcgaggaggggaagcaggagcggcacctggtgctggcccacaagctcttccttctatcccacccctccgttgatgacctctccaaggtcgccctccgcgccgaagtcctcgacaccgtgaaatccgatgatatggcgacgctgtttgagtcgctggtcgccgggggtgtgctggagggggacgccgcgctgctggccgagatgcgtgggaggatgacgaggagatccgcaagcttgatgaga

SEQ ID NO: 1732 - DNA, 300 bp, Zea mays
  misc_feature: Incyte ID No: 700344867H1
acaaagatcccaacaatggaacactggtggtatctcttattgactcttccatctccagccatgatcttctccaaaaatttagtgtttatggcgatgtcaaggagatttacaagtctcctacaagctgcaataagaaatttgtagaattctatgatatcagagcagcacaagaagcactgaatgacctcaacaagggtgaaatatcatgctcacaaatcaaagttgagcatagcttttctggaggagcaggatcttgcttcgcagagcaatattcaggagaacagaagcaaaatgccgtag

SEQ ID NO: 1733 - DNA, 300 bp, Zea mays
  misc_feature: Incyte ID No: 700344870H1
  unsure 40, 65: a, t, c, g, or other
caaagccaaaaccccaatcgcacaggagagaccgagagcnaggttttccatccatggctcccggngtcgcttccgtactggtcccgcaggagcccgtcctcctcaaggacatcatcgcctcaccgtccccctgcgggaacaccgctgtctccgcccgccacctcttcggcaacggagtcgcgccgccacgctcctcggacgacggcatcaaggacgtcgctgccgaccgccacggtgaccgcgacctctccatccccaagatcttcaccggagacgtgctggacctgctcgacgatgctg

SEQ ID NO: 1734 - DNA, 299 bp, Zea mays
  misc_feature: Incyte ID No: 700344871H1
  unsure 46, 51-52: a, t, c, g, or other
gcaaaatctgcacgagagacagacgacgagatggccgatgcggagnacgcnnccgccgcgcgccgacgggccgccataaccgactaccgcaagaagctgctcaactgcagggagctcgagtcgcgcgtacggcaccgtgagagaaagccttaaaaatgcaaagagggattttaccaagactgaagacgacttgaaatctctgcagagcgtggggcaaatattggagaggttctccgacctcttgataatgaagctttattgtgaaggccagcatggtccccgatatgtggtcggttgcc

SEQ ID NO: 1735 - DNA, 293 bp, Zea mays
  misc_feature: Incyte ID No: 700344874H1
  unsure 147: a, t, c, g, or other
atcgttgtttggagattcaagcggattggcggcaggccatatcgctgaagaaggcaatagaagataaaattgccaaagatggtctgattggaataggaattgcgacaactgcggtacggacttctggttggtggaattgcagctgcngttgccaggaagaagtgaggtcaatatattggatcggcagctcatgaactaggggagctcccgtctctgtaattccaacttttctgttgttacctggtgatatacattgaatgccatcttatatgtacgaataatcgtatgataat

SEQ ID NO: 1736 - DNA, 297 bp, Zea mays
  misc_feature: Incyte ID No: 700344875H1
  unsure 236, 287: a, t, c, g, or other
gcagcacgggcgctgatggcgatgggggaggcgctgcgggcggctgccgctgacgcggtggtgacattcctgtgggtgctgtgcgtctccacgctgggggcctcgacgacggcggtgacgtcctacctgaggctgcagggcgtccacttcgcgctcctggtcaccgtctccctcctctccgtcctcctcttcgtcttcaatatcctttgcgacgcactcggcggcgctagttcaancccaccggcgtcgccgccttctacgccgccggagtcaccagcccctctctnttctccatcg

SEQ ID NO: 1737 - DNA, 300 bp, Zea mays
  misc_feature: Incyte ID No: 700344876H1
cctaaattagtctttgttcttcctgttgtgctcctcgccttggcgctgcaggcgatcctccggccaccgccgccaaagctctgtggctccccaggtggccctcctctgacatctcccaggatcaagctcagggacggaaggtaccttgcgtacaaagaggatggagtacagagagacaaggccaggtacaagatcatcacagtgcacgcatttgatagcaccaaggacttcccctcgcctgtttctaaggagctcgtggaaggactgggatttacctccttgcttatgacagagctggat

SEQ ID NO: 1738 - DNA, 300 bp, Zea mays
  misc_feature: Incyte ID No: 700344878H1
  unsure 169, 192-214: a, t, c, g, or other
gcaccacagccggagaaatcctctcgtgtcgtctcttcagctatcagacggcaagacgatgctgccgctgaggtccgccgccgccgcgccgtgctcggttgcaggacttctgcttcaccgattctcatcctactcgtcctcttctgtctattctgtccgccaccacgcntcgtctgctctctcctcccagcnnnnnnnnnnnnnnnnnnnnnnntggtcctcttcccccaattccagcagccgcaggatcagggggtttgcggctgggttcggcgccggggccggcggggtctgcggatc

SEQ ID NO: 1739 - DNA, 300 bp, Zea mays
  misc_feature: Incyte ID No: 700344879H1
  unsure 274: a, t, c, g, or other
ggaccaaggtgtcataggcattgacctttctggcaatccagttgtgggggaatgggaaacatacctgcctgccctacaacatgctaaaaatctgggaatccccgttacaatccactgtggagaggtggcgaaccggaaggaaatccaagcagtgctggacttttgccctcagaggctgggtcatgtatgctgtctgaatgatgtagaatggaagaagctcaagtctctgatgattccggtaaacttatttgcatccatacatgtctgcggtcantaggaggtgctcctccctagagcttc

SEQ ID NO: 1740 - DNA, 304 bp, Zea mays
  misc_feature: Incyte ID No: 700344880H1
  unsure 41, 141-142, 197: a, t, c, g, or other
catgaagtgtgacgtggacatccgcaaagacctgtacgccncacacagtgctgtctggcggcaccaccatgtaccctgggcattgccgacaggatgcagaaggagatcactgccctggcacccagcacaatgaagatcaanntcattgctcctcctgagcgcaagtactccgtgtggatcggcggctccatcctggnctcgctgtccaccttccagcagatgtggatcagcaagcaggagtatgacgagtcggccctccatcgtccaccgcaatgttctaggcggactatgattagttgcgtta

SEQ ID NO: 1741 - DNA, 297 bp, Zea mays
  misc_feature: Incyte ID No: 700344881H1
cacagtgctcagtggacacagccagcttcagatgggacataccagtatttcataaaagtgcagtctttcttcgtacatgaatgtttcagttctatggtttaacgctgcataaagaacttaccgagttttctgtccaggttgtccctacaatatacactgatataagaggacacaatattcattcgaaccagttctcggtaacggaacattttagggatggaaatgttcgtccgaaaccccaacctggagtttttttctctatgatttctcacctataaaggtgatattcacagaaga

SEQ ID NO: 1742 - DNA, 296 bp, Zea mays
  misc_feature: Incyte ID No: 700344883H1
  unsure 68, 73, 75, 78-80, 82, 85-87, 89, 91, 97, 101, 106, 108-109, 115, 141,: a, t, c, g, or other
caaatcgtggagtggaaaccctactcgtccccttccgcagccggtactcaaccccaaccctatcctgnacacncntcnnncncgnnngntncttccnccanctagntnnccagangctctaatcctagttctttctgtgcngtngcngcccaattcccccacccaattcccactctccgctcgacagatccatacatgatgggagaggccaannantacgacgtttatgaggaggagctcctggactacgaggaggacgacgacaagacggtcgatggctccgctgctaagcccac

SEQ ID NO: 1743 - DNA, 292 bp, Zea mays
  misc_feature: Incyte ID No: 700344887H1
  unsure 94, 99, 290: a, t, c, g, or other
gagcgtcagagcccgatcccgatccagcgaggcggcgaccctccctcctccccttgcttcgctgcgtccagccctgaccacccgcatccccgtncagtnatggcagcggcagcaggcggaggcgcggtgcgtgcgctgtcccagaaggagcaggacatacagatgatgctcgccgccgacgtccaccttggcaccaagaactgcgatttccagatggagcgctatgcctttaagcgccgcaccgacggcatctacatcatcaaccttggcaagactgggagaaatgcagntg

SEQ ID NO: 1744 - DNA, 293 bp, Zea mays
  misc_feature: Incyte ID No: 700344889H1
gcatcgcagtttctaatcgtttggagagcacacaagaatgtcgttcgtgcagctctctggtgctggagtcgctgcagtggccttcacgaacaagagcctagtctctcggcacgcagcgctacgggtctgctcgtcgaggcgctcgatccgtagcctggtcgttaaggctgcaactgtcgtcaccccaaagtacacttcactgaagcctctgggagatagggtgcttgtgaagcttggtgccgcagaggagaagacagttggtggcattttgcttccatctactgcccagacta

SEQ ID NO: 1745 - DNA, 284 bp, Zea mays
  misc_feature: Incyte ID No: 700344891H1
  unsure 53: a, t, c, g, or other
gaaaggcttggctttccgagctgagagatgtttctttttggctaagtcatatngttcagcaggcaaaagagctgaagcatatgcattattctgccatgcccatactctcactggttctgcactgcaacagcattcaaacagtcatgacaaggctttaatacaagatctggagtttctatctaacaactgtagatcaaatagctgcatagaacatgcaacaggcattatggaggaggagattgttccttaaaactttctaaaggagtctcaactatgtcacttgc

SEQ ID NO: 1746 - DNA, 290 bp, Zea mays
  misc_feature: Incyte ID No: 700344892H1
  unsure 7, 46, 61: a, t, c, g, or other
ctttgtngcgcgctcgttcaagccgcctactacctactcaaagccnacgcctccgcgcgtnatgatcgggcccgtgtcgtcgctgtcggagccttcacctgggccaccatcgccttcctcgtcgccatctccggcagcttcctctaggaaggccatctggtatttcgaaggaatctatgcgtactcccctgcagataccaggtgttcgtttcccaggataacccatcctggtatagtgggaatgcaccgtcagccaaacttcttaatgtatggatgagaggagaaaagat

SEQ ID NO: 1747 - DNA, 297 bp, Zea mays
  misc_feature: Incyte ID No: 700344893H1
  unsure 7, 65, 96, 122: a, t, c, g, or other
caaagancttggatgacatgcatctgattgcttggtagacagacagatttgaacttgtggctttnttatcaaactgatgatcacagttctcagggnacgagtttgccaaatatgggcaagtnattgaagctaggattatcattgaccgtgaatctgggaggtctagaggttttggcttgtaacttacacgtctctgaggaggcttcagctgccatactgcctggatggaaagactctcgatggacggagcatacgtgttaatcatgctaacgagaagacaggtggcttcgtggcggc

SEQ ID NO: 1748 - DNA, 297 bp, Zea mays
  misc_feature: Incyte ID No: 700344894H1
  unsure 255, 275, 294: a, t, c, g, or other
gtaagcagcagcaggaaccctagcaccgccgcatccgcagccatgggtatcgaccttcgttgccggtgggaggaacaagaagaccaagcgcacagcgccgaagtccgacgatgtttatactccaagctccttgtacaagctctaccgtttcttggtcaggaggaccaagagcaacttcaatgctgtcattctcaagaggctcttcatgagcaaaaccaatcgcccaccaatctccatgcgccgcttgtcaattcnggaaggaaaggagaagaacntgctgtgattgttggcacntca

SEQ ID NO: 1749 - DNA, 297 bp, Zea mays
  misc_feature: Incyte ID No: 700344895H1
  unsure 62, 101, 189-190: a, t, c, g, or other
gtctacccagggccacccagcggccctggggcctacccatcttctggacagccaagtgcccncggagcctaccctgccactggcccctatggcgcaccctnctgggtcactgattgtgccttataacctgcctttgcctgggggagtggtgcctcgcatgctgataacaattctgggcacggtgaagcnncatgcaaacagaattgctttagatttccaaagagggaatgatgttgccttccactttaacccacgcttcaatgagaacaacaggagagtcatgtttgcatacaaagc

SEQ ID NO: 1750 - DNA, 296 bp, Zea mays
  misc_feature: Incyte ID No: 700344896H1
  unsure 27, 211: a, t, c, g, or other
gtgctggtggaggaagaagcagcgcanaggtggcagggatgggtcgcggcggcgggatggggaacccagttcaacgtgggcatcgcggtgcaggcggactgggagaaccgcgagttcatctccaacatctccctcaacgtccgacgcctcttcgacttcctcctcagattcgaagctacgacgaagagcaagctggcaagtttgaacgagnagctggacatcctagagcggaagtggaggtgcttgaagtccaatgggcagcgcgacgaccaacccttccgtcttcaataggatcg

SEQ ID NO: 1751 - DNA, 295 bp, Zea mays
  misc_feature: Incyte ID No: 700344902H1
gcgagcccaccccgaccactgccatgtcgaggcgcggcgactgggtctacgagaacaacggcgggacctgcgtggccatcgccggcgccgattactgtgtcgtcgcggcggacacccgcctctctgtcggatacagcatcctcacgcgcgaccactctaagatctgcgacctggctgacaaatgtgtactagcatcttctggctttcagggtgatattaaagctctgcacaagaacctagctgccagagaattgctataccaacaccagcataacaaaaggatgagctgccctgc

SEQ ID NO: 1752 - DNA, 293 bp, Zea mays
  misc_feature: Incyte ID No: 700344903H1
ggaaaagaaggaaaacggacagattacactccatattcatgccaaaatatcatatctgcaacacctggtgttggagatcaccatggatgcccgtttcgacattttggcgaagaaaatttgcgggcagcactcaacaaaatgggcgttggtgggcatgcattggaagagataatagataaagtgaagaacaggcattaccagctagcttgcacattaacatttgagaccacacacggtgtctcctgtgattctggaatcaaccatccaaaccaatatttcagtgaaagccagaa

SEQ ID NO: 1753 - DNA, 290 bp, Zea mays
  misc_feature: Incyte ID No: 700344904H1
ggcacataactagtaaattttgaaaattgtgttgtttgtttcatgaatctgctctatttagggtcattttgtgccttgtacaaagatgaacctgaacttttttggtcgttttgttgaacattttctattaatattttccatattagttgtgaacgattctcagtttctcactcaaccttgtacttgtagcaaggatgtttggactgaaattggaagccttttataaacttatttactttattcctaaatattttctttactttttagtttgaagtacattaatgttgcca

SEQ ID NO: 1754 - DNA, 290 bp, Zea mays
  misc_feature: Incyte ID No: 700344908H1
ctttacaaagaggttattagttgttacaagcaagcacatgatcatcaaggtttaattgcatgttgcaagaagttgggggactcatctcaaggaggggatccttctctctggggggatctattgaagtattttggggagcttggggaagattgctctaaagaagttaaagaggtcttgacctacattgagaaagaggatgttgtacctcccatcgtcgtgctacagacactatcaaaaaacccatgcttgacactctcagtcgtcaaagattacattgctcgcaagcttga

SEQ ID NO: 1755 - DNA, 290 bp, Zea mays
  misc_feature: Incyte ID No: 700344909H1
ccggccagtgctcccccgacccgagtcccgaggccgacgccattcctgattcctccatcttccgttccgccgcaccgccgccggagatatgtcgaggctcgctgctgccgccctccgccgcgtcgtcactgcatcgagagatacctcctcatctcgcttcgccgtgtctgcgccggtgtctgctcggctcttctccgcggatgcatccggtgaagccgccgccacggccgcagagtcgcaggatgactctttcttcaaggcatcccgcgaaggattagcctatggaaggt

SEQ ID NO: 1756 - DNA, 286 bp, Zea mays
  misc_feature: Incyte ID No: 700344911H1
  unsure 94: a, t, c, g, or other
gtcttgaaggaacatatttcttcaaccaagattcctgcccgtctcaagaggggcagcggactatgctcggcctgtgaaaacttcacgagcgaancgtcacttatctcggcaaggaacagacacaggacaggatcgtggagttccttcatgatgcttgctcccaatcattctcctttgaacagaagtgtgtcgagctgatggactcttatgcgactctcctgtttgccaagatcacggagatcagaccggaagcgttctgcaaacggtatggcctgtgcagggacac

SEQ ID NO: 1757 - DNA, 290 bp, Zea mays
  misc_feature: Incyte ID No: 700344915H1
tcttgcttgatggcagtttcgaggcccgtgtatcagactttggacttgcaaagcttttagaggatgaagaatcacatattactacaatagttgcaggaacatttggctatcttgcaccagagtatatgcaatttggcagagccaccgagaagactgatgtctacagttttggggttttggtactcgaaatactcagtggaaagcggcctactgatgcatccttcattgagaagggactaaacattgttggatggttaaattttcttgctagtgagaaccgggagagggaa

SEQ ID NO: 1758 - DNA, 290 bp, Zea mays
  misc_feature: Incyte ID No: 700344918H1
  unsure 61, 214: a, t, c, g, or other
ggaaaaatcgccccatcccctgactatcactggctcactgcccttccacctacaggttccngcggccatggtgaagaagcccaacggtgtcgccaaggccacggcgacctctgctgacgcggcagcccagccatccaaggagaatccgtccacccctgggttggtcaaggcctcgaagtttaagaagagaaaggtcaaggccaaccgtgcgaanaggcagtcgctgcagcagctattgacgaggtcgcccctgtaggtgcaggcactggtgatggcgatgcatctgcatc

SEQ ID NO: 1759 - DNA, 287 bp, Zea mays
  misc_feature: Incyte ID No: 700344919H1
aggtttgatgcaatactgccacctggaactggcgcaatcatggccgtcggtgcatcagaaccgacagttgttggtacaaaagacggtagaatcgggatcaagagccaaatgcaggtaaatgttaccgctgatcatcgggttatttatggagctgaccttgctgcttttctgcaaacacttgctaagataattgaggatcccaaggatcttacattttaaaagtccctgagtgattgtttttaaaagttcctgagtgattgtttttccttgagccaatcacaattggg

SEQ ID NO: 1760 - DNA, 288 bp, Zea mays
  misc_feature: Incyte ID No: 700344920H1
  unsure 16, 20, 110, 113: a, t, c, g, or other
cgctgatccgctcgcncccncctctcgccacgcaggcggcggcgctcaggcccgtgatttcagcgacggcgtcagcggcttcccctcccgtctcttcccagtcgcctcgngcnctcgcctccggtcctccgcacaccggccggtgaccctgcatccaccatgactggtgtcagcactggattgttgacgggcttgaggagggtcatggaacagcaaaggatttcaaccgctttctgcagacaatcacgagtttcgagctctactgtttctttctctgacctcgatgag

SEQ ID NO: 1761 - DNA, 287 bp, Zea mays
  misc_feature: Incyte ID No: 700344923H1
aagatggctacttttgtcctgccctggccaaagctgtcaaaaccatgaaaaaggcagagaaggtgctccttacagtaaagccacaatgtgagattccatttcaagatggatttggtgagaagggtagaccagcagctggagaggaaggtgctgtgccgccaaatgcttcgctgctcattgaccttgagttgatttcatggaagactgtcacagaaattggggatgataagaaaatccttaagaaggttctcaaggagggagaaggttatgagcgtcccaacgagggt

SEQ ID NO: 1762 - DNA, 282 bp, Zea mays
  misc_feature: Incyte ID No: 700344924H1
  unsure 17: a, t, c, g, or other
ccggttctatccctgcnctgccattgctcgtccgcatcctccttggatttccctcccaggaaggttagggttttctgatgcgctcatacatggggcagcaagaagatgggatgtctgatggcttgtacacttacaagcatcaccgcgagcgaggagctgatatccacaccatctttgtgaagaagagcaaattcaggattctgctgtcattatcggcacaacgttccttcttgtgtctgtttgctgcgccctgttatcgaaggatggtttatgtcttgttcc

SEQ ID NO: 1763 - DNA, 283 bp, Zea mays
  misc_feature: Incyte ID No: 700344926H1
cctcaaagatatctagttccagggttgattcctcgaaggtatgtaattctacagctgaggttccaaaggaatctaatcctgtggcagaaatctcaaagatacgtagtctcctgaatgggatctctgaccatcaggatattcaatgtgagaatacacgtgaatcttcatttcctcttggaactcaagaagactctgacaatgatcatctattgcgatattcaaatatggatagcttggacttggtacctggtttgaaaagtgatcaggaaattcagctggattc

SEQ ID NO: 1764 - DNA, 282 bp, Zea mays
  misc_feature: Incyte ID No: 700344927H1
atgctttattgtgcaatataaacaaacaatctgggtggaaatttgttctgtgctcaatggaaaacaaggtaaaggagcatgctaggaaactcttagagaagcacattcagaagccattctttaatgctaggtatggtgggtctgcacagcggatgactcctgatgaatttgaagcaggaaaacaatggttaaataaaactttccatcttatccggtgtgaagatgatagccttccatctattaattgggttcttgaccttgcgaaagctgcagttctaagac

SEQ ID NO: 1765 - DNA, 284 bp, Zea mays
  misc_feature: Incyte ID No: 700344928H1
caaaacaaaagagggagatgctgaagaaaaggaaaggacagatgaagctggaaatatcgataaaattagcaaggatgacactgggaagaaagatggagatgacactgagaagaaagatggaggtgatgatactggaggtgaatcagagcagaaagggcaaacaccatcagcaacaccccttttctcgtttaagaatctgtcaagtggtcaaaatgctttcacaggtctgaccggaactggattttcaagcacatcattctcgtttggctcagcctctaaagatg

SEQ ID NO: 1766 - DNA, 288 bp, Zea mays
  misc_feature: Incyte ID No: 700344929H1
  unsure 21, 24, 62, 199, 202-209, 225-228, 240, 245-248, 251-255: a, t, c, g, or other
taactatatagtgaatagtgngangctatactattggaaaaatagcagcttttttctatttnataagttgtatgcataaacataagatttgtaatgtttcatttataaactgccttcttcaacacatgttaatagtgttttctcaaagtattgatagtatgtcttccagaatttcacaatatgcttacagtaaatattnccnnnnnnnntgaaatgttcaattcnnnngttggctttctncttgnnnnctnnnnngggtgtataacaagcctgaaggacattgtaatc

SEQ ID NO: 1767 - DNA, 289 bp, Zea mays
  misc_feature: Incyte ID No: 700344932H1
tgatacacaggtttccagtgatggacctttaagtcctgctcctggtgtagagacagtagttgtcttcccaaaaaatgctggcaaaattgtactagcaggtgaagaaactgaattactagttggtctgcaaaatgacggtgaatcaattttgaatgttgttgctgttcattcaactctccatcttccttttgaccacaatatgtatggccagaaccttactgttcagaatttcttcaattcatcagttcctgtttctgtgcaagcaaccttcccctacaagttcgttgtg

SEQ ID NO: 1768 - DNA, 286 bp, Zea mays
  misc_feature: Incyte ID No: 700344933H1
agcgcgagtcttgcattgggcaacaagaaattctggaaagagagaacctaccaagagctgagacgtctattcatggaatcgtgacaaacatcgatggttgcagctttctctttccagaaagacctgatctgaagtctgtagtgcttaaagagcaaccattctctttgcagagggaaacatcgatgaacaaaccatttttcatgctgttgacattaaatttcagtgatggttgcagctgtttgagctcctcaattggatggcctgttgattttcagaagcgaaaaga

SEQ ID NO: 1769 - DNA, 283 bp, Zea mays
  misc_feature: Incyte ID No: 700344934H1
  unsure 40, 53-54: a, t, c, g, or other
gtttcatccgtacccatcctgcacacgaagcctagaatanccctcccctgctnngccacctcctcggatcccgaccaccccacccccaccccagacaacaggttgatggaggctaagatgggacgcttcttcgagtccgtgagcaatttcttcaccggaggcgaccacatcccctggtgcgaccgcgacctcatcgccggctgtgaaggagagcttgtcaatgctgcaaatgaggaacagaggaatgaaagccttatgaggttgtcatgggcccttgtgcact

SEQ ID NO: 1770 - DNA, 274 bp, Zea mays
  misc_feature: Incyte ID No: 700344935H1
  unsure 20, 36: a, t, c, g, or other
ctcgtccctctccctctccncctctcctctccctancccagttgcgcgagacggcgagccctagcaggcaaaagccatggcgtccatggttcttcgtgccgctgccgccgctcgtcttccctccctccgtcctcgccgcaacggcagcggggtgctcaccggcttgaggatcgggacagggcactacggcgtgcggctcgcgctttcttcgtccgcggcagttctcccaaagagttcgaggtcgcttgccttcctgtcgatgatagcagattgg

SEQ ID NO: 1771 - DNA, 281 bp, Zea mays
  misc_feature: Incyte ID No: 700344936H1
  unsure 108, 251: a, t, c, g, or other
gcggaacacgaaagcggggaggaacgacagcagccatcagaagaaagctccaatctttctcgccctctcgcggttcggaggagggacccgggcgcaaagactaaagcncaggtgagctccgggcggggaagatgttccccagcctgatccaccacgctagccacggccgacccgacgtcgccgtcgccgaggacgcaccacgcagtgctgcgggttagggctgcccgggcacggcggcgggcccagcgtgntgctcacggccgatcccaagcctaggtccg

SEQ ID NO: 1772 - DNA, 281 bp, Zea mays
  misc_feature: Incyte ID No: 700344938H1
gcccctcacgccagccgccaacgccccaatcccgtaaccgcagcctcgccccgctcacatcttcctctccctctgcagcgctggtgctcaatctataggtcgtcccactccctacacacccgccctccggtgtgaacctccatgacgtctgcaaccactcttcgatctgctgtcgtgacctcatccagccgtgctgtggcagtggatcggagttcgctccagctctgattggaattccactactatatgtgccacttgaagttgttatgtcaaaatattat

SEQ ID NO: 1773 - DNA, 279 bp, Zea mays
  misc_feature: Incyte ID No: 700344941H1
  unsure 24: a, t, c, g, or other
gaaaccaccgagagcccaaccgcnccaggcaggagagagagcagggagccagggacagtagcgtggggccggggagcaacgatggaggggaaggaggaggacgtgcgcctgggcgccaacaagttctcggagcgtcagcccatcggcacggcggcgcagggcgccgcgccggggacgacgacaaggactacaaggagcccccgccggcgccgctgttcgagcccggggagctcaagtcctggtccttctaccgcgcgggcatcgccgagttcgtcgcca

SEQ ID NO: 1774 - DNA, 278 bp, Zea mays
  misc_feature: Incyte ID No: 700344942H1
atgccagggctggggaaggagcacgtgaagatgcgggtggagaaggacgccctggtgatcaagggggaggccggcaaggacctcgagggcgacgacgacaagggcccggcgcggtacagctaccgcatcggcctctcctcccaggctttcaagatggaccagatcaaggctgacatgaagaacggcgtgctcagggtcaccgtcccgaagatcaaggacgaggagcgcaaggacgtcttcgagatcaagatcgagtagggtgtgtgcatcggatgggt

SEQ ID NO: 1775 - DNA, 172 bp, Zea mays
  misc_feature: Incyte ID No: 700344943H1
ttagtttaagttacacctcaattcagctcaatacatatggattgagctcaatactaaaatactcaaactaggccttagggcacgaggtagcagcttgcaatttgctgtttttgatattgttcacaggcaacattggtctcataaatgaatctgtgaaagcacataacgttac

SEQ ID NO: 1776 - DNA, 279 bp, Zea mays
  misc_feature: Incyte ID No: 700344944H1
cacacagctacacccacgccatcgccgactgtctacggccccggtggctggctgtcaggcgccggcgccacgtactacggcgcgaccaacggcgacgggagcgacggcggcgcgtgcggctaccagacggccgtcggaaagaagccattcgactcgatgatcgccgccgggagcacgccactgtacaggggaggcgagggctgcggcgcctgctacgaggtgaaatgcacgaccaacgccgcgtgctccggccagcccgtgaccatcgtaatcaccgac

SEQ ID NO: 1777 - DNA, 283 bp, Zea mays
  misc_feature: Incyte ID No: 700344946H1
  unsure 41, 66: a, t, c, g, or other
ccaaagccaaaaccccaatcgcacaggagagaccgagagcnaggttttccatccatggctcccggngtccgcttccgtactggtcccgcaggagcccgtcctcctcaaggacatcatcgcctcaccgtccccctgcgggaacaccgctgtctccgcccgccacctcttcggcaacggagtcgcgccgccacgctcctcggacgacggcatcaaggacgtcgctgccgaccgccacggtgaccgcgacctctccatccccaagatcttcaccggagacgtgctg

SEQ ID NO: 1778 - DNA, 284 bp, Zea mays
  misc_feature: Incyte ID No: 700344947H1
  unsure 270: a, t, c, g, or other
ccaacatggaatccattcaagctatccaagtgctccaaaccaatatcagatgccctcaagctacctgagtaactcaaaccaatatgaagtccgtgcaagctaccgaagtacaccacttccgggatatggacagagtacatatgcttcccgcaggaacccaagcccatacaattctgagatgcaccaaggtattcaggctcccatgagtagcaggaacctctaccgagcacctgggtcagccgaagcctatgtggcaccttgctatgcagntggaaatctgattg

SEQ ID NO: 1779 - DNA, 285 bp, Zea mays
  misc_feature: Incyte ID No: 700344948H1
  unsure 21-23, 25, 33, 35, 38, 40, 44, 50, 57, 62, 71, 82-83, 85, 138, 178, 184,: a, t, c, g, or other
cttccagactcagagataggnnngnctcatcangngtnanccanggcggnatctgtncacanactctccgngatggtactcnncnaacgacctcaagcttggccctttcgtcatggttcactcgtgatgcgccttccngactcagagatagggaagattcctacggtcatctttggcncaatanacggggtcnttggcattatcgcctccctcccgcatgancattacaccttccttgagaagttccagtccactcttgtcaagtacatanagggagttggaaac

SEQ ID NO: 1780 - DNA, 300 bp, Zea mays
  misc_feature: Incyte ID No: 700344949H1
  unsure 65, 77, 92, 99, 220, 223, 227, 231-232, 239, 241, 245, 253, 290-291,: a, t, c, g, or other
caaagccaaaaccccaatcgcacaggagagaccgagagagaggttttccatccatggctcccggngtcgcttccgtnctggttccgcagganccccgtncctcctcaaggacatcctcgcctcaccgtccccctgcgggaacaccgctgtctccgcccgccacctcttcggcaacggagtcgcaccgccacgctcctcggacgacggcatcaaggaagcnttncgancgcnncagggtnancganacttctcnatccccaagatcttcaccggagacgtgctggactgtnnanntgtgng

SEQ ID NO: 1781 - DNA, 296 bp, Zea mays
  misc_feature: Incyte ID No: 700344950H1
  unsure 78, 162, 164-166, 170, 173-174, 180, 185, 190, 192, 200, 204, 213, 220,: a, t, c, g, or other
gtacccttgttaattatcacccctgtggagctgatcaagaagggtgaaaaggtgggctcgtccgagtctgccctgctncgccaagctgggtatccgccccttctcgtacggcctccaggtcaccagtgtctacgaggatgggtccgtgttcagccctaaggngnnnaacnttnntaagangaacngattnanaagtttgncaantggtgtccnatggttncnnccnggnanggggatctngaaccgaaccttgctgttntnccccacatgttcatcaatgggtacaagaatgtgct

SEQ ID NO: 1782 - DNA, 297 bp, Zea mays
  misc_feature: Incyte ID No: 700344952H1
  unsure 3, 34, 50, 194, 243, 248: a, t, c, g, or other
gcncatcccgtcgcatcccatcccactaccacgncatctcgtcgtccgcngattcgatccggttcttccaacccaggggctgtgatggcgacgaagaggagcgtgggcaccctcggcgaggcggatctgaaggggaagaaggtgttcgtgcgcgccgacctcaacgtccctctcgacgacgcccagaagatcancgacgacacccgcatccgcgcctccgtccccaccatcaagttcctcctngagangggcgccaaggtcatcctcgccagccacctgggtcgtccaaaagtgtca

SEQ ID NO: 1783 - DNA, 294 bp, Zea mays
  misc_feature: Incyte ID No: 700344953H1
  unsure 49: a, t, c, g, or other
ctttcttgtaacccaagacgaactcggtgaactctttctcctcgcgcanaccggagcacaatcaaggattccagtccagtcctgccaatggagtgcgttttgggcttggttggccgcgacttcgcggtggtggcggccgacacctccgccgtgcagagtatcctcgtccacaagactgacgaggacaaagtaatggtcctcgactcgcacaagctgttgggcgcttcaggggagcctggtgaccgggtgcagtttacggattcatacagaagaacctccacctgtaccagttcc

SEQ ID NO: 1784 - DNA, 297 bp, Zea mays
  misc_feature: Incyte ID No: 700344954H1
gggaggctgcccattattaaccctccctccccacacgcagaagacgacgaccggaagcaaaacagccagccaaccaaccaaccagaccagggatggatggtgcgcaaccgagccaatgatctgcaagaagagaggtaggatttaggcacggcacctatagcccctgacgagagagagggagagagatttggtcttggataagagtggagagactggagacgggtgggtggagtgagagaagtcacttggggagcctccagattctgaatctcccgcaacccgtctcatcgccggagt

SEQ ID NO: 1785 - DNA, 291 bp, Zea mays
  misc_feature: Incyte ID No: 700344956H1
  unsure 40, 261, 263, 275: a, t, c, g, or other
ttgcatttatgtctctttaccttttccacttgtataaatnactggcttgagtattaggtggtggtatagtttttgtttcagtcgtcaaatgtgattttgagaactgtggattgtctcgcgtatgtatccacatttctcatctttcctttgtccctcctcccatagtcccatattcatcccttctgcataagaactttctatagccatttttttattttgatttttttgttttaattttttgtattgtggaaagacaggacnanatttcggtagcnatttgtagcattctaa

SEQ ID NO: 1786 - DNA, 293 bp, Zea mays
  misc_feature: Incyte ID No: 700344958H1
  unsure 2, 9, 24, 34, 66, 184, 244: a, t, c, g, or other
gngcctgangccgccgcgctcgcngcgttctacnaggcgcactgccgcagccttgcgctcgtacgnccgcgtccgagtcggccccgacggagtaaacgcgacgctcggagggcagatgaacgcgctggagaagcatatcgcggagatgagctccaacgacttgttcgtgggcacagatttcaanctggcgtcctgcgacgaccctgtcgacgagagggtcgcacgggagtgcggctcacctcantctccgttcgggtcgtcaagttcttaccatgattccagcagaatggttt

SEQ ID NO: 1787 - DNA, 263 bp, Zea mays
  misc_feature: Incyte ID No: 700344961H1
  unsure 27: a, t, c, g, or other
ctatttggacatgcttcaaatgataantttattcagcctcatacacacagaccatattcatcaggcttatgcgggggataaaaatctaatcaaatttgagggtgatcacaattcgccaagaccccagttttattacgactctgtttcaatattcttctacaacgttcttcacccacctcagtttccttcaacctgcacacataaacttgataagtattataaccttggtgctttaagggtgctgctggtactaatgagagctt

SEQ ID NO: 1788 - DNA, 290 bp, Zea mays
  misc_feature: Incyte ID No: 700344962H1
  unsure 129, 203, 218, 225, 230, 232, 236-239, 242, 245, 257, 259, 263, 265,: a, t, c, g, or other
taggtgatgtcattatgagcatgttcatgaacgagctgtatggtttccaattggataaccaccgatggtacccgctagagctcaggaaagacaagcctgctaaaatcaaggcaaggaatatcaaaaganaagaatcaacgaatgatgtagaagctaatattattgatgatgagggtgatgaggtcatggtggacgtagaaggngctgttgggggacgngctcgcnggcantncctnnnngancanactccgggtctngnttananagaggnngctcangcagaagnnttg

SEQ ID NO: 1789 - DNA, 289 bp, Zea mays
  misc_feature: Incyte ID No: 700344964H1
  unsure 41, 108, 201, 204, 206, 221, 224, 233, 252, 254, 261, 271, 275, 280, 286: a, t, c, g, or other
ctggaggccattattcttagcaaactcacacaggcacaganagccaaagaccacatgttctcacatataagtgggagctaaatgatgagaacccatgaacacagaganggaataatgcatactggggcctaattaagggtggagggtgagaggagggaggggacagaaaaaaataactattgggcactaggcttaatcctnggngnatgaaatttctgcanaanaccccatgncatgagttgacctgtgtgncnaacctgnacttgtatcnccanacctnaaaaanatt

SEQ ID NO: 1790 - DNA, 295 bp, Zea mays
  misc_feature: Incyte ID No: 700344965H1
  unsure 176, 184, 192, 210, 272, 274, 279: a, t, c, g, or other
ggcggattcgggacagtctataagggaaccatccgaagcgggcgagaggtcgcggtgaaggtcctctccgccgagtccaggcagggcatcagggagttcctgacggagatcgacgtcatcagcaacgtcaagcaccccaacctcgtcgaactcatcggctgctgcgtcgagggaancaaccggnttcggggnatgagtacctcaagaacnacagccttgaccgtgcgctgctggcttctaacagtgagcctgccgacttcacctggagcgtnangtctntatatgcctcggagtg

SEQ ID NO: 1791 - DNA, 295 bp, Zea mays
  misc_feature: Incyte ID No: 700344966H1
gcagcaccgtcgtcgaactcttcccttttcggcggcattggagatggcggcgaatctagaggacgtgccgtctctggatctgatgcacgaactgctccgtcggatgaagtgcagctccaagcccgacaagcacctcatcctcatcggcccacctggctctggaaagggtactcagtctccccttattaaggatgaataattgcctgtgccatttagccactggtgatatgttgagggctgctgtggcagccaagacaactctaggtatcaaagctaaagaagctatggataaggg

SEQ ID NO: 1792 - DNA, 71 bp, Zea mays
  misc_feature: Incyte ID No: 700344967H1
  unsure 36, 44-45, 48-49, 59, 62, 64: a, t, c, g, or other
caaaactatataattcgtacattattttgctttaanaaaaaaannaannaaccctaccnccncntatttac

SEQ ID NO: 1793 - DNA, 293 bp, Zea mays
  misc_feature: Incyte ID No: 700344968H1
gtggttttgctgcttccgcagcagctgccgtagctactggagcatctggatttgaatttggtgtggacccaaatgtagatccagagttggcactcgccctgcggttgtctatggaagaagaacgagcaaggcaagaggctattgcaaaaaaggctgcagaagatacatctaataccgaaaatatcaatgcctcaagctcaaacagcgattctgttatggctgaagcagaacttgcctcaaatgctgctgctggtgacaagcaagaacagccaaaggatgatgacgatctacta

SEQ ID NO: 1794 - DNA, 224 bp, Zea mays
  misc_feature: Incyte ID No: 700344969H1
  unsure 59-60, 73, 154, 165, 182: a, t, c, g, or other
ggctgtgcaggtgcggagatcgtcgatcgatcgctgcggttcgtcggcggcggtgtcgnnatgtcgatggacntcggtgccccggcggatgaccccaaggctttccgcaacatctgccgcgaccgtatactgaaggacctgcttaagcctgacnaggataagganaccaaaagctcatgganggttcttataatggacaaattcacggtgaagatcatggctta

SEQ ID NO: 1795 - DNA, 289 bp, Zea mays
  misc_feature: Incyte ID No: 700344970H1
  unsure 6, 220, 286: a, t, c, g, or other
cgagangttcgccacttcatttgacatgcctggcttcagggtgtctgacatgaagtacacagactagactgctgctgacttgggtgcaaaccgttgctcctgttacagtaacactggcaggctggtgcaatgcaaaccgttcttctgttacggtaatattaacgcctctgaaatgtcacgtgaatggtggtaaacctgaatttcacacgactagaggganggtttactttctattcagtgctctgccattctgttggcctgctattccgtcggtctattttgtaangaa

SEQ ID NO: 1796 - DNA, 288 bp, Zea mays
  misc_feature: Incyte ID No: 700344971H1
  unsure 245, 283, 286: a, t, c, g, or other
agagacttatgcttggtgagaacctgtatcctcttgttgaacagctggaacgtgagcaggctgccaaggtcactggcatgcttttggagatggatcagacggaggttcttcacctgctggagtcgccagatgctctgaaagccaaggttgctgaagccatggaggtcctccgctctgcccagcatctccagcagagcaatgtttctactgagcagcagctggctaatctatcattgaatgatggntcgtctccagctgaacgttaatgtttctgatgtttcgnagngt

SEQ ID NO: 1797 - DNA, 291 bp, Zea mays
  misc_feature: Incyte ID No: 700344972H1
  unsure 43, 223: a, t, c, g, or other
ctggcagcctccgagggcgaccgccccaagatcgaggagctgntccgcgccggcgccaggttcgacgtcaaggacgtcgacggccggacggcgctcgaccgggccaccgacgagaccagagagttcatcctcggcttcgccgccaagaaggcctgaacgaccatgtgcaggtcaatcgtgcccggttcttctggacatttggctgcatgtaactaaattcttngtttctggattcggtggagtgttcaaccgggggtgaacaagctgtttgcagaggtagctttccgtagt

SEQ ID NO: 1798 - DNA, 290 bp, Zea mays
  misc_feature: Incyte ID No: 700344975H1
gaaagagaagaagaaaaagaggaaggtggaggttgttgatgaagggaacaccaccgataagagtactgatgctcctgtagatgatcagcagatcggtgatggtgctgatggcattacatttgatgagacattaaagtccaatcttcagaagcagtttgagatggctgcagcagaagctggtatggtcaaagggggcagcagctcaagcgcttcaccagtgacaccagtcagtgggaaagtggcaacaaagaggaagcgctcaaagtctgccgataagctgtctgaagctt

SEQ ID NO: 1799 - DNA, 290 bp, Zea mays
  misc_feature: Incyte ID No: 700344976H1
gtcggagggaaccgaaaactcagggtctcgaatttcctaggagcggaggcgatggctgggaagggaggaaaaggattgctcgccgcgaagacgacggcggccaagtcggcggagaaggacaaggggaagaaggcccccatctcacggtcctcccgcgcgggcctccagtttcctgttggacgaatccaccgtcagctgaagcaaaggactcaggcaaatggccgcgttggtgccactgcagccgtctactctgccgccatcctggagtacttgactgccgaggttctgga

SEQ ID NO: 1800 - DNA, 286 bp, Zea mays
  misc_feature: Incyte ID No: 700344977H1
cctttcaattaccaccaaccaaacaggtggcggcagcggcggcggggtagcatttgtgctacgagggcttttgcaatggcggcttcggggttcggcggcggcgaggcgttccggctctcggccgcaccaggggccggcttactgaagctgcacaagggcgacatcaccctctggtccgtcgactgcgccaccgacgccatcgttaatgctgctaatgagcgaatgttaggtggcggaggtgttgatggagctatacatcaagctgctggaccagagctagtgcaag

SEQ ID NO: 1801 - DNA, 287 bp, Zea mays
  misc_feature: Incyte ID No: 700344978H1
  unsure 214-215, 217-218, 243, 247, 267: a, t, c, g, or other
ggtggttctgctgctcacaataagatattctctgcaaaaagagggcacttgaagttcgccattcaatctcaagagttctttaggactctgcaacggtactacagtaatgcctatatggatgcttacaaacaagcagcgataaacttatttctaggatacttccaaccgcagtgggaaaacctgcactttgggagccagaatctggtgacgagcnngnncttgatgacgagacaagtaaattgntgangagggcaagatcagatggcngcttcttaataaaagcaaac

SEQ ID NO: 1802 - DNA, 289 bp, Zea mays
  misc_feature: Incyte ID No: 700344979H1
  unsure 5, 75, 192-193, 227-230, 232-234, 241: a, t, c, g, or other
cgctncacagggctgccgcccgaggacacctgcttgccgtccagttgctggtcacccagggggccgaggtggatnacgcgggacaccctgggcctcacacccctgcatcacgcctctcgggaaggccacgtggaggttgccggctgcctgctggacaggggtgcccaggtggatgctaccggctggctccgnnagacccccctacacctggctgcagagcgagggcnnnngnnntaccgtngggcttctgctgagccgaggggccagccccaccctgcggacgcatggg

SEQ ID NO: 1803 - DNA, 287 bp, Zea mays
  misc_feature: Incyte ID No: 700344982H1
  unsure 264, 270: a, t, c, g, or other
cttttcattggtaatctcggtgatactgtagtcgaagaggaattgcgaagtctcttcagtgtgcaacctggattcaagcaaatgaaagtgttacgtcaagataggaacactgtttgctttattgaatttgaggatgtgaatgctgctacatctgtgcaccaaactctgcagggtgctgttattcctagttctggtcgtggtggaatgcgaattcaattttcaaagaatccctttgggcgaaggaaggattcagctgctggctgncaagcnttcaaagggggccccgg

SEQ ID NO: 1804 - DNA, 289 bp, Zea mays
  misc_feature: Incyte ID No: 700344984H1
ctcccagccaacagatataggttctaaggatgtgcgcaattcaaaagataagcttgtgcaagtgaatgcaccagccaagaagcggttatccctcccaaataatgttggcagagaatcagggaagggaccaacccgcaggaattcgcttaacaggtctgctccaaaagcacaggcggactctcctaaccagggtgatgagttagaggcctgataacacattcctccaatttgacgtcggcaagccatcctaaagtgtgcttctccaggtgtgcatgctacatgtgttgcc

SEQ ID NO: 1805 - DNA, 285 bp, Zea mays
  misc_feature: Incyte ID No: 700344987H1
gacaacccccagaatggtcaaatactgcttgattttgaggacgccatgggagataggatccaggtgtttattgcatgagctgatggtgtatttgctagaatgctcgtgcacagcaaactctggatgcatggacgtttcaagtagcatcagggtacatgcatcttgctattggcgcaaccctatctagtagttgaattagataatttggacatcgattatatcttggcgaactagtatttacaaatgacagacttgttcctattcatcgaggctgggtgtacatct

SEQ ID NO: 1806 - DNA, 287 bp, Zea mays
  misc_feature: Incyte ID No: 700344988H1
  unsure 23, 56, 208: a, t, c, g, or other
cgagctcttctggcgggcctccntcgtgcctagggccgaggagttcccgttccagngggtgcccaaggtcgccttcctcttcatggcgcgcggccccatccccttcgcgccgctctgggacaagttcttccgcggacaccaggggctctactccgtctacgtccacaccgtgccggactacaagctcaatgtgtccaagagctccgcnttctacggcagacagatccccagcgaggaggtgtcctggggatcaattaccttggtggatgctgagaagcgcctgctgg

SEQ ID NO: 1807 - DNA, 285 bp, Zea mays
  misc_feature: Incyte ID No: 700344989H1
  unsure 200: a, t, c, g, or other
aaccaactggaatcgtgaagagtcactctccgacagctcatcgccgcttggttctcccgtcggtacacaaggtttaagaagcgctacgcggacttccacggccgcgctgccgatctcgtccatggcctccggggcacggcgatgcccaggagacaggccctcgaggaagagcaatgtacagaagagaaaggtatctcgantattccaaagcacaagtatgcatccaaagcctgttccccaaaaggaacctttatctgcagctctctctacgcttactcttgttgt

SEQ ID NO: 1808 - DNA, 157 bp, Zea mays
  misc_feature: Incyte ID No: 700344991H1
  unsure 45, 49, 78, 93: a, t, c, g, or other
ggggtgttgtacgacccacaggagccgcatttgtgcttaattagncacngtattctttgtttctctttgtacatatcntctagagagaagganaaagagaagttgtgtagcatagttataccataatttcattcgtagccatttcagttttgtaaaa

SEQ ID NO: 1809 - DNA, 281 bp, Zea mays
  misc_feature: Incyte ID No: 700344993H1
  unsure 236, 250: a, t, c, g, or other
ggtgtgagtgttgaagagctcctcaacatgatggatccggccttgcttgacgacgtcatacgccggctgctggaggtgaagaatctcaagcctgggaagaacgcgcattgtcggagtcggagatcaagcagctctgcgctgccgccaaggagatcttcctgcaccagcccaacctgctggagctcgaggcgcccatcaaaatctgcggtgatgtccatggccagtactctgatctnctgaggctattcgntatggtggctatccgcctcaggcaactacct

SEQ ID NO: 1810 - DNA, 285 bp, Zea mays
  misc_feature: Incyte ID No: 700344994H1
  unsure 64-65: a, t, c, g, or other
gttgttcgaggcgttcccctcctccacgcaaccttctcccctccagatccaggattgccgggcnnccttgactcgttacctcgcgcgccctcggtgagctactttgtttcgatttagcgacaaatcagtttgcttcatgttgcgcaggcttagatctgaatgccggattcttcgtcttacggcttgaatcgagctgggaggctgtggatctgagcacgggaggtacaacaaatccgcgtgttctagagctagcgaaatcgcaaggctattagggttcctttcgga

SEQ ID NO: 1811 - DNA, 282 bp, Zea mays
  misc_feature: Incyte ID No: 700344995H1
  unsure 200: a, t, c, g, or other
gtaagcggcaacgtctcggaccctgtggctgctgctctcaaggctcagtatggtcccggttctaagattatgggcagcgacgtggatccttggacggacataggaagcaggtagcgccgtagcagctctactgcttctgttgctccttgtaccatatatttagttttggtgtaacttgaatgaaatcatcagaatatganatgtggggggtggggagtgaatggctttcctgcccatactatctgtaggcttttggccagtagcagtcgggtttcgctgttt

SEQ ID NO: 1812 - DNA, 295 bp, Zea mays
  misc_feature: Incyte ID No: 700345003H1
  unsure 173: a, t, c, g, or other
atttttctcctataactcaagatgtggaaggcttccttcacaatgttgttaacatgggttttcttgaccgtctgaaattagcgtggaagataatgttttctgcaccaaccacaaaggatacctccaatgcaaacatcgcaaaacagaggcttaagatgatcctgttctccganaggtgtgaagtcagtgatgaggcaaagaaaaagattgtggagaacatcattgaggcactgtctgagtttgttgagatagaatcaagggataacgtccaagtggatatctcaactgatgctgg

SEQ ID NO: 1813 - DNA, 289 bp, Zea mays
  misc_feature: Incyte ID No: 700345004H1
  unsure 132: a, t, c, g, or other
cttgcttcctcttttgtaaagcttttcctgctgagtttagtggtaccttagattgtcgtccatttctgccctgttctccgggcagctatttgtagtgtaaaaatatggtggcgtgctggatggtgttatttntgcgtgcgtggcctgtcatgacgaattccaccatgtttggggctatttgatggatgtttactgatcatggctcgaaattatttttttcttcgtgccatttgcaattgtagaccgtggacgcggtgtgagttgatgagatttgctggtgagctgtttc

SEQ ID NO: 1814 - DNA, 287 bp, Zea mays
  misc_feature: Incyte ID No: 700345006H1
  unsure 126, 151, 196: a, t, c, g, or other
agaggatgaaggagatcactcaggtgatgaaaactccagaagatgtcttgcagtctcagggcgtgacccctgagaacatcgaagatatgttggatgagctacaggagcatgttgaatccattgacntggcaaatgatctacattctattgnagggctggatcctctacttggttacttgaaaaattcaaatgctgncatccgagcaaaggcagcagaagttgttagtacaattgtgcagaataatcccaagagtcagcaacttgtcatggaatccaatgggctagag

SEQ ID NO: 1815 - DNA, 266 bp, Zea mays
  misc_feature: Incyte ID No: 700345007H1
  unsure 25, 36, 44, 62: a, t, c, g, or other
gttaagtagtggtgcgatgtgaacnaaaccctctcnccactccnaccaaggttttgagatangctatcatcaaatggtattgagttggagccagacttgtaaggtcgacgtcatgatagcaccctagttcatgggaatgggtgatggttcagtatcctaagcgaagaagccaagcatccaggtgtgtgcacaagttcagatgagatcctcgttacgttatgaattcctaaggctaataataaacactgcatattctaagagaacta

SEQ ID NO: 1816 - DNA, 284 bp, Zea mays
  misc_feature: Incyte ID No: 700345008H1
  unsure 84, 171: a, t, c, g, or other
gcgaggtgctggcggtgctgctggacaggttctttgacatggagtatgctgagtgcgtgaaggcttttgaggcttatgcaagtnctgcaaagcagatcgatgagctctgtgcattctatgcatggtgtaaagataccggagttgcaaggtcatctgagtacccagaggtgnagcgtgtcaccgataagttgctggagacgctggaagaatttatgagggaccgggcaaagaggcccaagagcccatcaccggagcctgaacctgagcctgtcaaggaagaacct

SEQ ID NO: 1817 - DNA, 280 bp, Zea mays
  misc_feature: Incyte ID No: 700345010H1
  unsure 112: a, t, c, g, or other
ccttatctccatccccttcatgatcaagaggattatcgatggggagaccctgctgcatgaccgccgggtctggatggctggggcgctcttcgtctatttcttcagcgtctcncggggcatgtatgggattatcaggcacacacccatgttcctcaccgaccgcgcggatcccaacaagctcgtgttcttctaccaggggtcagggatgcagctgggggctgaggggtttactgtcgggttcttgtacacactcgtgggtctcatgatcgctgtggtgaca

SEQ ID NO: 1818 - DNA, 170 bp, Zea mays
  misc_feature: Incyte ID No: 700345011H1
  unsure 12, 15, 50, 84, 96: a, t, c, g, or other
atgtaggctacntgntacatcatgctcgattcactatcctttaattcggntcatcgtcgtcgtcttgtctcgtgtcaaataaanctctcatgtgcntatatacggctctcatggttgtgccgtgtctctatatgttagtgtttatgtatatgtggagatcaaataatggc

SEQ ID NO: 1819 - DNA, 282 bp, Zea mays
  misc_feature: Incyte ID No: 700345012H1
  unsure 44: a, t, c, g, or other
tggattgctcaaagccatgtgagaaagtttgcccagctgatgcnatatcactaaagcatcccatggttgatggagagcgcacactatctgatcccttacgtggtaaatatgagggtggtgtaattactgagcggtgctatggatgtggtcggtgcttgccagtttgcccgtatgacagaataagagctgtgtcctatgttcgagaccctactatgactgctgaattattgaaaagcgatgatgttgatgcaatagagatacataccactggaaaaggaactg

SEQ ID NO: 1820 - DNA, 282 bp, Zea mays
  misc_feature: Incyte ID No: 700345013H1
caagttcggcatcgtctacgtggacttcaacacgctcgaacgccacccgaaggcgtcggcctactggttcagggacatgcttcagaagcattgagatctccagagccgagcctgagcacggaaggtaccattttgttcagcttcgcctagtgtttgggatggcccaatggttcaaatccggctcagtgcctggctaccaaaatgggaacaaaggacagctaccccgatcaattgtgatgttgtgtgtttgtgggtatgttctctctggagtttgagctgtgg

SEQ ID NO: 1821 - DNA, 284 bp, Zea mays
  misc_feature: Incyte ID No: 700345014H1
  unsure 44, 113, 119: a, t, c, g, or other
atgagactgaagaaccaaacccaagtaacccggcgaattctaangccatcctattcgcaggatcagagtagtaaggagcagcaacagcagcacactcctcagcatggtcaganggtttncttccaacttaatgctgtggcagctgcagctgcagctgcaaagcgtcctcggatggccattgaccagctgaacatgggctaaccgtttcgtcggttagactgtagtatctttccccccaccctctagtctggtgaatcatgttttgaagagatagtgctgtagtg

SEQ ID NO: 1822 - DNA, 283 bp, Zea mays
  misc_feature: Incyte ID No: 700345015H1
aataatctgcgttgctatgaactttcatcagagctaagtagcagtacattggaggcgcttccacaaaactatgctgaacaggttaattttgaagacacctgcaaaggatttcttgaggttgccaaggaggccgtcctccaaactgttagtgttatttttgaagacccaggtgtgcaggatctactcgtgaagctttaccagaaagactggctggagggaatggtcacagaatatcttgtcgcaacatttgctgattactttggtgatgttaaaatgatattga

SEQ ID NO: 1823 - DNA, 160 bp, Zea mays
  misc_feature: Incyte ID No: 700345016H1
  unsure 125, 128-129: a, t, c, g, or other
gtacaacaacttcaagcctcaccggccattaaagagacgagttaaagacttctttaaacattttgatcggcatgcactggatctgttagagaagatgttgactttagatccatcacagaggatancanntcaagatgcacttgatgcggaatatttctgg

SEQ ID NO: 1824 - DNA, 84 bp, Zea mays
  misc_feature: Incyte ID No: 700345017H1
  unsure 13, 28: a, t, c, g, or other
ttccgtgtccgcntccagtgtgtccgcnactccgctccccctcagtcctcagttcctcacctagcggtaggtgcgcgcgggaga

SEQ ID NO: 1825 - DNA, 106 bp, Zea mays
  misc_feature: Incyte ID No: 700345018H1
gcgagggatgatgtctctgatttgctgcctatggtactcgtgtgttcataaaaaaatattatgcgaagagcggagacaatcaataaaaaaccttgagatctttttg

SEQ ID NO: 1826 - DNA, 284 bp, Zea mays
  misc_feature: Incyte ID No: 700345020H1
gttattatgtatattataaaaagaaaacattatcgaatttggtggtgaagtcacaattacattttttgttttgtatcagtaccgaggttttggctttgtattttcaaaacaaacacatacctattatacctactaacattagttgctacctattagtgtttctctattaaataagttcgatcactaagtttggtcaatcggttgtataaatttctttattaatataacaccagacaatgaaaggagcctatctaggagtgattctcctgataggtcaccaaaac

SEQ ID NO: 1827 - DNA, 276 bp, Zea mays
  misc_feature: Incyte ID No: 700345021H1
  unsure 35, 37, 93, 128, 130, 166, 175, 184, 224, 259: a, t, c, g, or other
gtactgagtactgacccatcgagccgtcccgaagnancatgagcgccgctgagactgaacgatgagcaccgcgtggatctggaagttaggcanaaggacgccggcactagggactcgacagcaccganancggcagctgcgcctgcgtcccaatcccgagtggctngaaagcttngcccctcanatccaaagcacctcatctatgcgggatccaaattaaagcntattaaagctgcacctgctgcaccagacaagaatngccgaccacctttgtct

SEQ ID NO: 1828 - DNA, 278 bp, Zea mays
  misc_feature: Incyte ID No: 700345023H1
cagggacattgggtgggagattggggacgagggccagattctcttcaccgaacccctcttcacgccaaagactcttcgggagcaattggtgcagcttatgtttgaaaagttcaatgtttcaggcttttatgcctctgaacaggctgtattgtcactctatgctgacggacgcatttcaggatgtacagttgacattggtcacgggaaaatagatattgctccagtttgtgaaggagctgttcaacacatagcttctaagagattagagattgggggag

SEQ ID NO: 1829 - DNA, 277 bp, Zea mays
  misc_feature: Incyte ID No: 700345024H1
  unsure 81: a, t, c, g, or other
gaagtctctgatagacagttacgtgtaactggggggccagcagatgtgggtcagagtttgcctttgctaaaagatgtattncaagctatagtcgaattatcagtagcacaacataaccctctgatatgttcgtggtttatccgtggtttctgaattgtagacttctgcgttgaagctcgtgctactgtttgttttccattgtttgttcacaccaacagctatatgcagatacatggcttctcagtgttacgccggcagatgaataagcttggggaaa

SEQ ID NO: 1830 - DNA, 264 bp, Zea mays
  misc_feature: Incyte ID No: 700345025H1
gagattgggaagatggccaagtacagtagctgcgagtggctagcagttgtggcatttcttcttttcgtggcatcgtggatacttctccggcttgttatattccctttctggatcctaagaagcacaagctatgaagtactgctgaccctggacaaggagaaacatcagttttatggccccatatactattatgttttcaactgtcttctgttctcactcctagttcttcacatatattggtgggtactgatatggcggatgcta

SEQ ID NO: 1831 - DNA, 277 bp, Zea mays
  misc_feature: Incyte ID No: 700345027H1
attggatggtcaagttccggccgggcttcagctacttcgccttcttcgccctcaacctctacggcggcgtctccgtcatcgagagcctcatgatgatcatctccgccctcgtgccaaacttcctcatgggcctcatccttggcgccggtgtcatcgggatcatgatgttgacctctgggttcttccgactgcttccggagctcccaaagatcttctggcggtatccagtgtcctacattgtctatgggtcatgggggttgaagggcgggtacaagaa

SEQ ID NO: 1832 - DNA, 270 bp, Zea mays
  misc_feature: Incyte ID No: 700345028H1
  unsure 52, 219: a, t, c, g, or other
cgaagatccctccgcctcgagcgacgcttcgaagcctaaacctgacgaaganggctcaggcgagaatggagaagatggctcaggcaagaatggagacgcttcgagcaacgccgatttggattccttcgacaagtcaggaggtagcggctcgtccagcgacgatacgaccgacgagagccgcagcggcctgctcccagttcccgacgacgtgaggccggncgcgcctttcacaggcagcagcttccgcagggctctgacgagcaacggcca

SEQ ID NO: 1833 - DNA, 276 bp, Zea mays
  misc_feature: Incyte ID No: 700345029H1
  unsure 79: a, t, c, g, or other
agcagcacgtgtgtgctgatccttaccacattctgaactccacgtgtttgatggccggggagaacatagaagaatctcngtgggagaggtactgatgagagagagcgactattttgtgttcataatattcattaccttttttttagtttttttcggtcgttgccccgttcgtagtttttgccttacattggacttcgctccgattttttttctctgcttttccttcatagactggtgtaagctgtaaccgaacactgtcaaatgcaaatcatctta

SEQ ID NO: 1834 - DNA, 279 bp, Zea mays
  misc_feature: Incyte ID No: 700345031H1
ggcggacgcggaccggcggcggagcggagatggcggagaagaagcgaggcgccggcactcgcaaggatgaggtggtgacacgcgagtacactatcaacctccacaaacgcctccacggatgcacctttaagaagaaggcaccaaatgccatcaaggagatcaggaagttcgctcagaaggccatgggtactactgatgtccggattgacgtgaagctcaacaagcacatctggagcagtggtatccgcagtgtgccgaggcgtgtccgtgtcagaattg

SEQ ID NO: 1835 - DNA, 88 bp, Zea mays
  misc_feature: Incyte ID No: 700345033H1
  unsure 21, 35, 41-42, 44, 60, 81: a, t, c, g, or other
aggagaggaagcaggacctgngagacatcgcctcntccgtnntnctgtctacttccttgnttttggtaggtgctgcttgtnttatctt

SEQ ID NO: 1836 - DNA, 105 bp, Zea mays
  misc_feature: Incyte ID No: 700345036H1
  unsure 56: a, t, c, g, or other
gcggatccatgtttcgataaagacaaagcttgaacattgtgtttccatagacactncaaatttcacatattttagtaaattccctgatgagcaattatggctcct

SEQ ID NO: 1837 - DNA, 274 bp, Zea mays
  misc_feature: Incyte ID No: 700345037H1
  unsure 2, 181: a, t, c, g, or other
anccgaatccgagctgcggacctcctcccgatccggctgtatccaactccgaggctacgaggcatggccacgccacttgctcgtgcgccgctcccgggggccctacttcgccccgctcccgccgtccttcggttggccacgcgctgccgtttccgggccacggcggccagcggtgaaggcncggctgggccgatgctgcgcacttgcaagaactgcaagcagcagtacgacccgtccgtgaaccacccctacgcttgccgtcaccacaccgccc

SEQ ID NO: 1838 - DNA, 273 bp, Zea mays
  misc_feature: Incyte ID No: 700345038H1
  unsure 21, 140: a, t, c, g, or other
ccggagacgagaccgccgganatggagccgagatctgcaatctacagatccggcgccctccttctcctcgccgccatcattgcggaggtcgtcatccccgcatccgccatcggagacaagtgcgccgcctgcaaggccgntgctgcggagtggagattggaatttcgagtgagaagccgagaaatcacttggacttgcgcaaccgcttaaattctaaaggccagagggaggggaaggtcatcgattatagggtcagtgagcttcgggttgtgg

SEQ ID NO: 1839 - DNA, 269 bp, Zea mays
  misc_feature: Incyte ID No: 700345041H1
  unsure 152: a, t, c, g, or other
ctgagctttttggcaacccaaatgacatacttgaactacgtctatgggcttcttatcgtgggcagaccttagctcgaactgtccgtggcatgatgtactataggaaagcccttatgctgcagagttatttggagaggatacaatctgaaganttggaatctacattagggttggctggttcagctgataggcattttgagttgtcacctgaggcgcgtgctcaggctgatttgaagtttacatatgtggttacctgccaaatttatgga

SEQ ID NO: 1840 - DNA, 126 bp, Zea mays
  misc_feature: Incyte ID No: 700345042H1
  unsure 21, 69, 77, 80, 85, 107, 113, 124: a, t, c, g, or other
gtagagtagactacgacagcntccggcgaggaggcggaggcgaagatgaggaagaagctcggcacccgnttccccgnggntcgantcaaaaagataatgcaagcagntgaggntgttggaaagntt

SEQ ID NO: 1841 - DNA, 271 bp, Zea mays
  misc_feature: Incyte ID No: 700345043H1
  unsure 101: a, t, c, g, or other
atggagctcactgggagggacgccaatttctcggtcccaactgaggcaagtgattttgagtcctggaggaatctgccgagcacagactttgagctcgagangccagcaaccgcggctcctgcaaagagcagttcacatggacaccacaagaagttgctgaacggttctggccttaacctctcgacacaaccatccaatcacagttctggggatggcatggagatcacagccacctgtaacaagcgcaggaaggattcctcaccgaccgcaa

SEQ ID NO: 1842 - DNA, 270 bp, Zea mays
  misc_feature: Incyte ID No: 700345045H1
accttatctagtacttacagaactacaaaaagtttgtactatacatatatggacaaccttataagtggctatgtgtgtacctatcctaacgcttatcccagatggtgtatcagcgtttttctgtgagattgttttcaaacaaggggttgttcattcattgggtcttctcagaaaaaagagaattatgctgcagtcaaccagatggccgttgttgtgccgacaatacagggtaaaccaaatgcaaccagaatataatctgcagcggaagat

SEQ ID NO: 1843 - DNA, 271 bp, Zea mays
  misc_feature: Incyte ID No: 700345046H1
  unsure 29: a, t, c, g, or other
caccaactgaaattcgtggaacacttggncaccgttaatcaactttttatttgcattggaattcttgcagctttgttagctggattgcctctggcaggaaatcctgcctggtggaggacaatgtttggaattgctgtagttccatccattctgctggctgtaggaatggccttttcgcctgaaagccctcgttggctattccagcaaggaaaggttactcaagcagaattagctgtaaaaagactgtatggaaaagaaatggttaccgaaa

SEQ ID NO: 1844 - DNA, 270 bp, Zea mays
  misc_feature: Incyte ID No: 700345047H1
cgcttggtctgctctcgtccttccggaggccgcggcgcaacatggcgaagatcaagccgaaggccttgctcgcgcaaagcaaggtgaagaaggtccccggccaaatcagcgtggccacgatcgtcacctacatgatcctcggcgtctggttgtgtcctccgtttacgctgcctacaggtactgctgggcaggcacaggagcagcggaggcagtgggcgcccaggggaactgatcccccttccgactgcgtggtgatctcgctgttgttgt

SEQ ID NO: 1845 - DNA, 88 bp, Zea mays
  misc_feature: Incyte ID No: 700345048H1
tcttgacctgtcgcggtgcctttgcgttggtgcaggaaggatgacgggctcaatggatctcccggccaagggcgggttcagcttcgac

SEQ ID NO: 1846 - DNA, 309 bp, Zea mays
  misc_feature: Incyte ID No: 700345051H1
  unsure 161, 251: a, t, c, g, or other
agctgtcctcccatataaaaaaaacctgaagatagtattgtcctttgaaattgtgagggcaatgcatttccctttcaaatcacctggtacatgtcttgtcccccccccccacttcccccagagcctgtctatatgtacttgatccgctttttttgcatccnagcttctcccggagtgtattttgttgcttgtgtgatgttcagatctttgaagaatgtgacaggctatctagcctacttgagacgttcagnatttctacaggtaagaaaggaaaactcaagtagacaagatcttccaaatctagttgca

SEQ ID NO: 1847 - DNA, 300 bp, Zea mays
  misc_feature: Incyte ID No: 700345052H1
  unsure 53, 78-79, 82, 88-89, 96: a, t, c, g, or other
aatcgctagaatccaaagccaaaaccccaatcgcacaggagagaccgagaganaggttttccatccatggctcccggnntcncttccnntctggtnccgcaggatcccgtcctcctcaaggacatcctcgcctcaccgtccccctgcgggaacaccgctgtctccgcccgccacctcttcggcaacggagtcgcaccgccacgctcctcggacgacggcatcaaggaagccgctgccgaccgccacggtgaccgcgacctctccatccccaagatcttcaccggagacgtgctggacctg

SEQ ID NO: 1848 - DNA, 300 bp, Zea mays
  misc_feature: Incyte ID No: 700345053H1
  unsure 12: a, t, c, g, or other
aacggttcaatnaagctttacaaggaaatcgtatgccctcttgatggttttgagttgcttttgttctcgatggtgggacctgatgcaaaatctttcccactgtgccctttttgctataattgtcctccatttgaaggcatcgacaaactctttggtgctctcaagctcgatgacaccggcaaggttgggaaaggggccggcataaccatgcttcctttgtcctcacccgacatgcaagcaatctatgatcactcagggagttgtgcttgtcctgagtgtagtggtaccctgattcttgat

SEQ ID NO: 1849 - DNA, 307 bp, Zea mays
  misc_feature: Incyte ID No: 700345054H1
  unsure 26, 69: a, t, c, g, or other
atcgaacactcgaacagaaccaccgnccattctagaggcatccagtattccagcccaatcctatctttnacattcctctccctcgtactcggaagtctggttcgccgaacagtcccgaacccccgattcactgccgctgccccgtctcgtcctcttcgccagcgaaaaccctagtctaggggacgggagcgcaatccacgcacggcaacatggacgccatccgcaagcagctcgaccagctcatgggggccaaccgcaacggcgatgtacgggaggtcagccgcaagtactatgatcgcgacgtctg

SEQ ID NO: 1850 - DNA, 286 bp, Zea mays
  misc_feature: Incyte ID No: 700345061H1
  unsure 23-25, 41, 135: a, t, c, g, or other
caggggattgaccattgttgatnnnctcagcaaattcgttnccctcaaacattagattggcttcacagctatcttcttcagtgcatcgagcgaggtcttttggctgcgtgtttagaaagctgcaatcaaggtcantgacactcttggatgtaacctgtccaaccacacctcagtgggcattatatgctggcaatggacactaagaatatcattgtaaaggattacgcatgagtctggatatcatctccaaccaagaccgatatgaaaataccatcgtgatgttgtc

SEQ ID NO: 1851 - DNA, 308 bp, Zea mays
  misc_feature: Incyte ID No: 700345062H1
  unsure 2: a, t, c, g, or other
anaagtagaggaggtagcaggggaggcagaggtcgaagtcgaggtggaaggatcccaagaggtgttagcagctcatcaaggatcgagttcaagggtggtattgttgcttctgataaagcgccaaggaagaatgtacgccgagggcgtggtcgtggtcgtggtcgtagacgtggacgtcgaactgtgaggcctcggcagccatctgttggcagagccagatcaattccaaaggaaaatttgttgggaagctttagcatgcttagcagctcaaaggctgctaccattgaggagtctccacgaagctctgg

SEQ ID NO: 1852 - DNA, 140 bp, Zea mays
  misc_feature: Incyte ID No: 700345064H1
ttcttttgaattaaaaagaaatctctcttctaggctggtgcttttcgactataatttggagattgttccaatgtccgtgcaatcatctgaacatgttactacttattgtaccttgtcgtgcaaagttttgctaagatctc

SEQ ID NO: 1853 - DNA, 300 bp, Zea mays
  misc_feature: Incyte ID No: 700345067H1
aaagaagaagctggcctccttctaccgctctagaggcagcattagcgagcatgggcacctgccgcgccattgatcagtcagtgaactagtgttaggctgttagcttcggttgactctgggattgaggctggcgggggttgtcattacctctcgatgattcgtgcctcatgttagtgtacagttcgtggtgacccttcacccttgggtatgggtgtttttttctctctctttgccttctgcttcttccccggaagcaatgaggatggggttggcaggtgctctctgccttctgcttcttcc

SEQ ID NO: 1854 - DNA, 298 bp, Zea mays
  misc_feature: Incyte ID No: 700345071H1
  unsure 94: a, t, c, g, or other
aagacacacaggaaccgtagaagggcctctctatctactttccgtcttgcgtattctgcctctgtgtgatcgtgtcttgaaaaggaagtgagtnagattagtgcatacaagcctacaacagctgaagaggcgagtgatagacataggcatgagccgtatagacttgcaaggtgttgggaatatatggttcgccaaatatagaccggacagagcgccgatgtttcttcagcctggttataataacatgtaatgttctggaacaacatctgattgacacaacctgtttccctcttttgtt

SEQ ID NO: 1855 - DNA, 296 bp, Zea mays
  misc_feature: Incyte ID No: 700345072H1
  unsure 48-49, 266, 284: a, t, c, g, or other
ccggatgtttatgagtgcacatttgttcagtctgagataactgacctnnccattcttcgcatcaagagtcaagttgggcaagaatggtgttgagtccgtcatttctgccgacctccagggaatgactgagtatgaggccaaggcacttgaggcgctgaaggccgagttgaaggcaagcattgagaagggtattgctttcgtgaacaaacagcgggaagctgctgcatctgtttgaggcgaacaagtgaaacagaaggaacaatcgncttgaatggcttttaagntttgcagcctag

SEQ ID NO: 1856 - DNA, 297 bp, Zea mays
  misc_feature: Incyte ID No: 700345073H1
  unsure 45, 104, 172: a, t, c, g, or other
tcccatcttcatcttcttcgtagcgccggcgctccatcttccgcnccctcccttagtcgcgctcggcacgcgggtgacggcggcagtggcggcactcaggatcnggctctcagcgacggcatcagcggtttcccctcccgcttctctccagtcgcctcgcgccctcgcctcnggtcctccgcacaccagccggtgaccctccatatagggtgtgagactaccaaaactcgaaaatgaacaagggaaagatttttaagctagccaagggattcagaggaagggcgaaaaattgcataa

SEQ ID NO: 1857 - DNA, 295 bp, Zea mays
  misc_feature: Incyte ID No: 700345075H1
  unsure 27, 200: a, t, c, g, or other
cccgtcgacgcgtcgttcttgccggcngcgcctcacctccgccatctcctcctccagggggatcggatacgccacaggctgcgcgatggtgctgtgggtcttcggctacggctccctcatctggaaccccggcttcgacttcgacgacaaaatcctcggcttcatcaagggctacaagcgcacctttaatctcgcttgcnatgaccacagaggcacaccggagcatccggcgaggacctgcacgcttgaaaccgacgacgaggccatatgctggggaattgcatattgtgtcaag

SEQ ID NO: 1858 - DNA, 163 bp, Zea mays
  misc_feature: Incyte ID No: 700345076H1
tcctcacttcctcattaaaataaaaacggactggcaacaacttcatgccctgtgcaccccttgttaaccatcctcatcagaaatcgtagtcgagtgaacttggtagtggcattccaaattcgacattctatgcgggctagaaattcgcttgttttaaaaaaaa

SEQ ID NO: 1859 - DNA, 300 bp, Zea mays
  misc_feature: Incyte ID No: 700345077H1
  unsure 9, 102: a, t, c, g, or other
acaagaagntgctggaagaggtctcgatcctcccctagaagcgcctccgcaacaaggttgccggcttcaccacccacctgatgcgccgcatccagcggggcnccgtccgtggcatctcgctcaagctgcaggaggaggagcgggagcgccgcatggacttcgtcccggagaagtcagcgctcgaggtcgaagagatccgcgtcgacaaggagaccatggagatgctcgcggcacttggcatggccgatctcccgggcgtagagcgccaggctgaggtctccagcgtccccgcctacggcc

SEQ ID NO: 1860 - DNA, 304 bp, Zea mays
  misc_feature: Incyte ID No: 700345078H1
aggacaattacctgatggtactcctgaacggttctctattaaaaataatatcaagaaggccctggatgctcgtctgtcctctctacccaccgaattgccgcctcctttcaaaatgcagaagccaaaggtttttgaggcgcctgtcccaccaacagagtttcaacagattcctggagacgtacgcctcttgacatgcgggtactcgatttgttggaataaatccggtttgcatgaagttgtcttaggcacaactggtaggaaacaaggaacctcatcaaaggcagcacacttaccctccaccgag

SEQ ID NO: 1861 - DNA, 308 bp, Zea mays
  misc_feature: Incyte ID No: 700345079H1
  unsure 30, 58-84: a, t, c, g, or other
ctctctctctctattcgttccccgcctcancccgagccagccgtctcgctagggtttnnnnnnnnnnnnnnnnnnnnnnnnnnntatgcctcgccgcagctcaggaaggtctgccccacgcccagctacccgtgctgctccagtgaggaacccgccacagccagcacgccaggctcctcctccagctcctgttcgagatggtggtggctccatgtttggaggaattgggtccaccattgctcaaggtatggcgtttggcacgggtagtgccatggcacacagggctgttgatgctgtattaggtcccc

SEQ ID NO: 1862 - DNA, 313 bp, Zea mays
  misc_feature: Incyte ID No: 700345080H1
  unsure 72: a, t, c, g, or other
accagggtgaaaaggatgacaagataatagcagtctgtgctgatgatcctgaatatcgtcactacaacgacntacagtgagctgtctcctcatcgcctgcaagagatcaagcggttctttgaagattataagaagaatgagaataaagaggttgctgtcgatgcattcttgcctgcgaccacagctcgagaggccattcagtactccatggatctgtatgcgcagtatattttgcaaagcttgaggcagtagattggaagcaactatttatctgggcgtcttggaatgagtgtgattttaataagtcaaaaca

SEQ ID NO: 1863 - DNA, 283 bp, Zea mays
  misc_feature: Incyte ID No: 700345088H1
gaatctgaaccagtagcggatgacaatgaagaatcctctagatcaaggaatctatactttacaattggtgatgccaaatgtcgagctgctgtacaactcctgttgattcaggctgtgatggaggtatataacatgtacagaggacagttatcagcacagaacacagtaatcctcttcgaagccttgcacactgttgccgcacatgctcacaaaataaacagtgatagtgatttgcgttccaagttgcaagagttgggctcgatgacacagatgcaggacccgc

SEQ ID NO: 1864 - DNA, 284 bp, Zea mays
  misc_feature: Incyte ID No: 700345089H1
tgggagaaaagctactacataacagcaattgctggatcatccaacgggagctcattggttgtcatgtccaaaggaactccttacacccaacaatcatacaaggttagcgagtcgttcccttacaagtggatcaataagaagtggaaagaagggttccatgtgacatccatggccaccgctgggaatcgctggggcgtagtcatgtcaaggaattcagggttctctactcaggttgtagagttggatttcctgtaccccagcgagggcatccaccggcgctggga

SEQ ID NO: 1865 - DNA, 254 bp, Zea mays
  misc_feature: Incyte ID No: 700345092H1
  unsure 7, 11, 14-15, 127, 164-165, 218, 229, 242: a, t, c, g, or other
atcctcngcgncannatggacacccccacggcgaaggcggcatggacagccaactacggcgtcgtcggcagtggggaccgtcgtcttgccttctcccgccaactctcctccaacgccaccacgccgngcctcgctcggtccgactcctccatctccatgcccgnnccccttccccttcccccagtctacgaggggcccaagcccagcaggaagctacnccgccctcgcnacggccagccgcnccatgcgccgct

SEQ ID NO: 1866 - DNA, 251 bp, Zea mays
  misc_feature: Incyte ID No: 700345094H1
cgaagacaggactcttttggagtcttggtacatggcctgacgctgaacctgggtaaaacaggagtacgatgttgcaatgtacataccaaccatgcgctgagttggcgtgaaggatatattcattgttccactgttgtctttaaccaaacgtgctgttttcttccggttgtgatttttggtgacctgatcatctgacaatatctaattatacatttgggaggaaatgatgttacaatagttattgtgggtgt

SEQ ID NO: 1867 - DNA, 300 bp, Zea mays
  misc_feature: Incyte ID No: 700345102H1
  unsure 39, 61, 111, 141, 150, 156, 161, 188, 238, 260, 262, 271, 275-276, 278,: a, t, c, g, or other
gatacttcaactgaaagaactgtgcatattgatggcacncaagaacaaattgaacatggcnaagcagctggtggctgaggttaccagttgcgaatcgtgccaggaatccantgtgctggtggctattctcagcagggctancaccctccncgtccncagtnaaactggggcccgccttctgcgccacnccagcagtctggttatggttatatgcagctggggcttatccggggcacgncacagtatggtgcacctcaggnanccttatggnaagnngncccccaannnctggtgggcaan

SEQ ID NO: 1868 - DNA, 289 bp, Zea mays
  misc_feature: Incyte ID No: 700345109H1
  unsure 274: a, t, c, g, or other
gtgcaaaggagattaaagttggtgaggtcattgctataactgtggaagaagagggtgacattgagaagtttaaggattataagccgtcatcttcagctgaacctgtagctcctgctgaatcaaaggctcaaccagaaccttcacaaccaaaggtggaggaaaaaaagcttacccaggctcctgaggttaaggccccaaagattgaagaagcttctcaatctggagatcgcatatttgccagccctcttgctcgtaaactggctgaagataacangtcccactatcagtg

SEQ ID NO: 1869 - DNA, 294 bp, Zea mays
  misc_feature: Incyte ID No: 700345111H1
  unsure 149, 151-153, 163, 165, 174, 178-179, 182-184, 190, 197, 203, 223, 226,: a, t, c, g, or other
cccacccacccactcgcttcagccgcctccgccgcgcgtacaagcaggtggagacaggatgccggctggccacggcctgcgctcgcggacgcgcgacctcttcgcgcgccccttccgcaagaagggctacatcccgctcaccacctacntnnncacctacaanancggcgattnctcnnatnnnaaggtnatctgtnccgtcnacaaggggatgctgcacaanttnctaccacggccgcaccggtcgcgtctggaacgtcaccaagcgcgccatcggntcgaggtcaacaagca

SEQ ID NO: 1870 - DNA, 125 bp, Zea mays
  misc_feature: Incyte ID No: 700345112H1
  unsure 4, 15, 18, 29, 38, 103, 106, 118: a, t, c, g, or other
gaantccccaattgnggnctagcgaggangtgcctttncttggtaacttgttacgcgccatactccctggggctgtatcatcgccagaccatgcgacgcttanttntttcatttggtnctctgaa

SEQ ID NO: 1871 - DNA, 290 bp, Zea mays
  misc_feature: Incyte ID No: 700345113H1
  unsure 17, 47, 99, 275: a, t, c, g, or other
gagcagccaagcgaggnagcgaagacccatttccccgagcgcaagantaccatggcggcggcggcagtttatggcggcctcaaggggaagcttggcgtncgaggatgcccccgagctgcagctgaatcgcatccgcatcaccctctcatccaagaacgtcaagaacctggagaaagtttgtgcggatttggtaaagggagccaaggataagcatctgagggttaaggggctgtcaggatcctataaggttctccactcaccacccgcaaatcccntgcggtgaaggaaaa

SEQ ID NO: 1872 - DNA, 292 bp, Zea mays
  misc_feature: Incyte ID No: 700345114H1
  unsure 186: a, t, c, g, or other
ctggcttgtatccctctctcgtctctccagcgacggcagacgggcgagggttacgcgaaggcgaagggagtagtggaagcagaggcggcagccatggccgtgatggagaagctcaagatctttgtcgttaaggagcccgtagtcgcggcctcctgcctcatcgctggattcggtctctttcttccnccagttgtccggccaatcctggattcatggcagaccgcggaacaagttcctccacctcttctaaatgatgtggttgcagtgtcaccggcaagaaaaatagtgaatt

SEQ ID NO: 1873 - DNA, 124 bp, Zea mays
  misc_feature: Incyte ID No: 700345117H1
  unsure 2, 30, 45, 56, 58-59, 61, 86, 88, 112: a, t, c, g, or other
gnacggttcaatgtccagaatcctgaagcntaaaggaggttagangctacatgtangnngntaacccagcactccagggatggccntntctgtcttgatcccccggcatgtnactaaacacctc

SEQ ID NO: 1874 - DNA, 295 bp, Zea mays
  misc_feature: Incyte ID No: 700345118H1
  unsure 12: a, t, c, g, or other
ccagcacctgcnctcctcgccgtcgccgcctccctccgcgcgaccgatctaccctccgccgccaccatgtccgctgatcgccggggaggacttccagcatatcctgcgtttgctgaacaccaacgtggatgggaagcagaagatcatgttcgccatgacctcaatcaagggtgtcgggcgccgcttctccaacatcgtctgcaagaaggccgacatcgacatgaacaagagggccggcgagtgacgcctgatgagctggagcgcctgatgacggtcgtggccaaccctaggcatt

SEQ ID NO: 1875 - DNA, 291 bp, Zea mays
  misc_feature: Incyte ID No: 700345121H1
  unsure 74: a, t, c, g, or other
gttccgtgtccgcgtccagtgtgtccgctactccgctccccctcagtcctcagttcctcacctagcggtaggtngcgcgcggggagacgtagatggcggcttcggaggcggcagggcggcggcaacaccggtgacgccgacagaggggacggtgatcgcgatccacagcctggaggagtggagcatccagatcgaggaggccaacagcgccaagaagctggtggtgattgacttcatgcaacatggtgtctccgtgccgcgccatggctccatttttgctgatatggccag

SEQ ID NO: 1876 - DNA, 288 bp, Zea mays
  misc_feature: Incyte ID No: 700345122H1
  unsure 112: a, t, c, g, or other
gggaatgggaagaggctcttagagtcgcttacatgcttagcacgcatgatctggttgaagctgtcagagacgcagcttcagaatgcgccgcatcactgatagccgagtaccnggaaggactgttgaagatcggtaaatatgcagcacgctatttggccgtacggcagaggagattgtcgctcgctgccaaactccggtcggaagatcggtttatggatgttgaagatgacagcgtttcagaaacgagcactagcttcatgaaatgagcgcatataccacaagggatcg

SEQ ID NO: 1877 - DNA, 286 bp, Zea mays
  misc_feature: Incyte ID No: 700345124H1
  unsure 272: a, t, c, g, or other
gtcgaatctggaatgagacttgggctttcaggatttttctacaaaccttgcaactatgaactctttgtgaagcaatccctcaacatggagatggctattgtaatggctcgggatggtggcatggattggatcatacatttagacactgatgagttactctatcctggcggagtgctgagtattctgttagacgtttgttagctgaggtccctcgtgatgtcgacatggttatttttccaaactatgaaagcagtgttgagcgtgataatatnaaagatccatcagc

SEQ ID NO: 1878 - DNA, 284 bp, Zea mays
  misc_feature: Incyte ID No: 700345125H1
acgactccgccaccgccgccgctctacgcgagacgcccaggtcttcgccaacgacgagcatccgggttagagaggaagaaattgcaaccgaaacaatggcggcagattccggcgctcgcagacaaccaagcttcaccaaggtcgaccagctgcgccctggaacccacggccacaacctcatcctcaaggttgttgactccaagatggtcgtccagagaggccgcgagggagggccccagggaagacagatgaggattgcggatgcttggttggtgatgaaaccg

SEQ ID NO: 1879 - DNA, 288 bp, Zea mays
  misc_feature: Incyte ID No: 700345126H1
  unsure 13, 83, 178, 181: a, t, c, g, or other
gccggcccataancctacgagcgaggtctagacatgacacaccagacactcgtgccggggcaccccatgaacattcattaganaacagttttaagtttttatatttcagtttcttaaaactgttttctaaaaaaaatttggagcggctgtttagaagctagtttctaaaagctggttngtngctttttttttaattgaaaatgacatgcctgctcattcatttttttttcacccatgcacttgcaacgcctgcactggttgcccacagaaagtcagctacaatttccc

SEQ ID NO: 1880 - DNA, 92 bp, Zea mays
  misc_feature: Incyte ID No: 700345129H1
  unsure 25, 42, 46, 48, 72, 74, 82-84: a, t, c, g, or other
ctaataacgatgggtggtgggagcngagccctttccctgctncctncnctgctgcgaccaccaccctgcgcngnccgccaannnccccacag

SEQ ID NO: 1881 - DNA, 103 bp, Zea mays
  misc_feature: Incyte ID No: 700345131H1
attttactttaatatgtctctctcagactagagagccttcttttacttgaatattggttactgcattggtctttcactttaaaatcggtgactgcattgatcg

SEQ ID NO: 1882 - DNA, 291 bp, Zea mays
  misc_feature: Incyte ID No: 700345134H1
  unsure 19, 160, 211-212, 249, 251, 271: a, t, c, g, or other
agatagagtaatatttgtnttgtgtttgtcttagttagaataagggtgagagttataaaacattggagaaaatcaaaatactattgtgatccatgtgggtctgatgcctgactcggtccacattcagcctcggctcggcagttgactcccgaggaacctnatccatgtaaaagatggtccatgagtatgccttgtgccatctggccgtgtnnaagggcccggtgcggcggcgggcggtccggcggtttntngccgctacgctgcttggtgnagcctgagcctgagaagcgg

SEQ ID NO: 1883 - DNA, 143 bp, Zea mays
  misc_feature: Incyte ID No: 700345136H1
  unsure 42, 44, 109: a, t, c, g, or other
ctttgttggaaaatggtctcagttatatagtcttcgagatantntcatggttatgtatgcttatactctgattctgtagacacgcgtccaatctttggattttcagttntgacactatccagattccagaatccaattgaggg

SEQ ID NO: 1884 - DNA, 284 bp, Zea mays
  misc_feature: Incyte ID No: 700345138H1
  unsure 71, 100-101, 103-104, 106-107, 110, 126, 169-185, 187, 247, 257, 271,: a, t, c, g, or other
gtcacactggtgagctctgcagtctgcactctgcttagctccgagcttcagtgccttcgttgttagctgtnagctccacagtccacagttccacacacanntnnanntgncactgcaccaatggcngccgtcgaggtccaggtcccgactgccgctcccgtcgaggagnnnnnnnnnnnnnnnnnangggagtggaggctgcccagctggccgccgtcaagaccccgaacgaggagaccgctgctcnggcggcgganaccgaggtctcgcngtaaagnagccgg

SEQ ID NO: 1885 - DNA, 280 bp, Zea mays
  misc_feature: Incyte ID No: 700345139H1
  unsure 173, 176: a, t, c, g, or other
tgataatttataaactaaaatgaaataaaatgaaaggactaaacattagtccctataaaccaaacaccctcatagatatgcatatactacatggggatacgcccatagcctatagatttgcaatcatgacgcatagaatgtatgcggtgtagtggaaaaaaggagggatcaangcnatctacgtacaaatgattgcaatcatttgtacgtagatcctttgaacaactcatcgatggtttagtatattctgcagctagtctcgtcgtcgtgtgcttattag

SEQ ID NO: 1886 - DNA, 279 bp, Zea mays
  misc_feature: Incyte ID No: 700345142H1
  unsure 275: a, t, c, g, or other
gtcacttgaagctataaaggacttcgctgaaggtttcttggaagacaagcttacaccattctacaaatcggaaccagtgcctgaatctaatgatggggatgtgaaaattgttgttgggaagaatctggatctaatagttttggatgaaacaaaagatgtacttctgagatatatgcaccatggtgtggtcattgtcaatcgcggaacctacttacaacaatctagccaagcatctacgtatgttgactccctgtggtagccaaaatggatggtantacc

SEQ ID NO: 1887 - DNA, 288 bp, Zea mays
  misc_feature: Incyte ID No: 700345145H1
  unsure 50, 59, 101, 122, 134, 167, 203, 217, 227, 239, 249, 269, 278, 280: a, t, c, g, or other
ccgactatttcgggtaaaccaaaaagcgagtccaaggacaaagagaagangcataaaangcacaaagacagagagagggacaaagacaaggaacataagangcacaaacatcggcataaggntcggagtaaggncaaagataaagacaaagacaaggataagaaaanagataagagtggtcatcatgattctgattcaaaganacatcatgaaaagnagaggatgcncgagggaactgnagattcagcngatgtgcataagcacaagangagtaagcncnagagttcc

SEQ ID NO: 1888 - DNA, 128 bp, Zea mays
  misc_feature: Incyte ID No: 700345146H1
gggagaagcttacagatgtggcagagtgtttagctgggaggatcatgaacaagagaacatcgtcgtcgaagctattcttttatgatctttatggtggtggcatgaaggttcaagtgatggctgatgcc

SEQ ID NO: 1889 - DNA, 176 bp, Zea mays
  misc_feature: Incyte ID No: 700345147H1
  unsure 167: a, t, c, g, or other
ccagcttcaactcctgttacagctgaggaagttgttaacaaggattttgtgaagattcctgagtctgctccggctctcccttcatcagttgagaaggctgctccagcacctcccgcatcagttgagaaggctgctgcagcacctcccgcatcagttgagaaaggtgnccagccccc

SEQ ID NO: 1890 - DNA, 168 bp, Zea mays
  misc_feature: Incyte ID No: 700345148H1
gcatgtgtagccaccggagtagcactacaacacaatcgcaaggtttctgggaggcctgctgatgctcatggtggcactggttctataggaaggtccacaagccttgtatatccgtcacttttctcaccattgacatcttcacagacgaaaatggtgcacactaattct

SEQ ID NO: 1891 - DNA, 110 bp, Zea mays
  misc_feature: Incyte ID No: 700345150H1
  unsure 8, 16, 21, 33, 36, 66, 78, 86, 89, 92, 95, 105: a, t, c, g, or other
ggatgacntccatgtngcatntgtacaagtacntgnctcttcttcaagagtcaagactagctgtanttgagctgagcntacttggngtngcngtngttcagttantttgc

SEQ ID NO: 1892 - DNA, 125 bp, Zea mays
  misc_feature: Incyte ID No: 700345153H1
  unsure 2, 28, 47, 51, 78, 104, 110, 118: a, t, c, g, or other
cngacctccgtcctataaaccgccgggnagcgtggcggccattcgangcangcacccagacccagcagctattgtggncgtccctgcagccgcgtcgcaccgcnttcgcnttctacgnttcgaag

SEQ ID NO: 1893 - DNA, 270 bp, Zea mays
  misc_feature: Incyte ID No: 700345154H1
  unsure 24, 34, 67-68, 80-81, 87, 98, 118-119, 124, 224-225, 252, 257-258: a, t, c, g, or other
gccagccaccgaccacccgcgcanccagggactnggggagcaagcaaggcgaacggcctgccatggnntccttctcgtcnncgccgncgtcgtcaggncccggcgctaacccggacgnngttanggaacaggttcaagacgcagcttcgcacaggcttacgcgcaggagtttctcgagaccgtcgggaacaagtgctttgaaaagtggcgtgaccaagccaggnncaagcttgagtggaagcgagagcagcngcatnnccacgttgtgtt

SEQ ID NO: 1894 - DNA, 213 bp, Zea mays
  misc_feature: Incyte ID No: 700345155H1
  unsure 29, 37, 48, 54, 65, 67, 85, 91, 93, 110, 116, 123, 142, 153, 156, 180: a, t, c, g, or other
gaagccaagccaaactgagtaagcagctntggagggntccgccgccgntccgcnccgcacgcgcntntgcatcatcgggagcggncccgcngncgcacacggcagccatntacgcngcccgcncggagatcaagcctgtgcncttcgagggcnggntggccaacgacatcgccgcgggcnggcagttcaccaccaccaccgacgtcgagaatt

SEQ ID NO: 1895 - DNA, 262 bp, Zea mays
  misc_feature: Incyte ID No: 700345157H1
  unsure 19, 36, 104, 124-125, 160, 233-234: a, t, c, g, or other
ccgaaagtaagcctcagtnccgccggcgtgcgaggngttcgatctgggttagcctctcacgatgccgccagcccccaagtccggcgacgccctcttcgccagcntggatcgcgtcaatgcgganngttcacgctcacgtacggcgccatagtgcggcagngctcacggatctggaggaggtcgaggaggtcaacaagcagctcgatcaaatgggttacaacattggaacacgnntggtcgatgagttcttagcaaagtcaaa

SEQ ID NO: 1896 - DNA, 267 bp, Zea mays
  misc_feature: Incyte ID No: 700345158H1
  unsure 8, 24, 45, 69, 106, 174, 192, 197, 199-200, 206-207, 209, 227, 257, 260: a, t, c, g, or other
gggaacancctactattccctgcnacctgtcgaaggaggcacaanatttcattggccagtgtgtaaganttgatcctgagagccggccttctgcatcacaactttnggagcacccattcgttaacagaccactggcgggcttcatttgaatcttcatctcccccagccatctgnttgtactattgatatagnggggngnntctcgnngngaggccaatggcgcaggnccacgtgttgatcgtcagatttacgctacnggntccagag

SEQ ID NO: 1897 - DNA, 266 bp, Zea mays
  misc_feature: Incyte ID No: 700345159H1
  unsure 2, 11, 28, 82, 101, 116, 122, 126, 148, 159, 162, 166, 169, 183, 189,: a, t, c, g, or other
anaaggatccnttagctctagagttcanaggttggccaagtacaggtttctaaagaaacaatcagagcttctgctgaatgcngatgatcttgatgccatgngggtttgtctcaganaaaatngtgntattggtgatgctactggtgcngaaaagatganttntganganttctggccatatcnccacantntgcaacggagcagattgntcagaaangcaanggnttttcngcccttcnagttcangggttngaggnggnnggtnc

SEQ ID NO: 1898 - DNA, 271 bp, Zea mays
  misc_feature: Incyte ID No: 700345164H1
  unsure 2, 8, 11, 18, 20, 25, 29, 80, 89, 107, 115, 124, 131, 139, 166, 173,: a, t, c, g, or other
cngcaccngangcaggangngctgncgcngctcccgcatgcgaagaaggacagcaaggtcgagtcgaagcagagcaaggngaacgcgcngaacgagctccttgagcncaggagcngctccagcngcctttncttcgagngcagaaaacagaaggatctttaccttnggatggngaagtctccnggaggaccatcagtngaatttctagttagngcngntcacaccatggaggagnngaagcttaccggnaaccatcngaaagggncacgcc

SEQ ID NO: 1899 - DNA, 164 bp, Zea mays
  misc_feature: Incyte ID No: 700345166H1
  unsure 67, 70, 119, 121, 123, 129, 131-132, 135: a, t, c, g, or other
gcggccgacccctttgcatccgcagccgacgatgacgacttatacagctaaactgcacttctattgngangcatcctttcctccctccgtatatatgattatatcatatgttaatgcgngngngggggngnngcngtacctatacagtgaagttaatatttctg

SEQ ID NO: 1900 - DNA, 264 bp, Zea mays
  misc_feature: Incyte ID No: 700345168H1
  unsure 11, 31, 46, 54, 58, 64, 134, 159, 180, 219, 231-232, 234, 242, 247-248,: a, t, c, g, or other
cagagttacantcctgactgacaagtttggncaaccaaaaggtttngcttacgnggantttgtngaagttgaagctgttcaggaagctatcaagttgaacgagtcagagttgcacggtacgccaacttcaaggnggcaccgaagaggactaacgttccngggatgaagcaaccccgcggncgaggttttcaatccgtaccatggccacccctacatganggccgtgatggnngnagtcctgnggttnngggagatccccagntc

SEQ ID NO: 1901 - DNA, 256 bp, Zea mays
  misc_feature: Incyte ID No: 700345170H1
  unsure 5, 7-8, 35, 45, 57-58, 85-86, 93, 101, 104, 124, 144, 165, 186, 190: a, t, c, g, or other
tttantnntttcgaaggaacaagggcattcagtgntgtcgttgcngaagcaaaaganntgggatacactgaacctgacccaaganntgatctntctggaantgntgttgcccgaaaggtcattntccttgcaagggaatcaggnttgaggcttgaactttctggntattcctgtgaagagccttgngctngaaacacttgcagcagctcgtcagcagagagttcagcagaagctaccatcctttgacgaggactgg

SEQ ID NO: 1902 - DNA, 260 bp, Zea mays
  misc_feature: Incyte ID No: 700345174H1
  unsure 5, 15, 19, 74, 81, 107, 157, 164, 171, 184, 206, 211, 216, 245, 249, 258: a, t, c, g, or other
aaaanccagaatcantgantgcatttgctcttatttcgaggtcacagggcttcaaccttggaaatttgtttganaaggagntgatgggaatggtaaagagggaaacntctttcacgtctcaatgtacagcacaggagatcatgtcaaaaatagaggntgcatgngggccanttggtttcaacgngcggaaacaaattacaagtgangttgnaaggngacaaatccggaagaaaaggccacttgtnctgntgcaactgnag

SEQ ID NO: 1903 - DNA, 263 bp, Zea mays
  misc_feature: Incyte ID No: 700345178H1
  unsure 21, 57, 116, 121, 148, 158, 203: a, t, c, g, or other
gccagggcctgaaaactggantgtactatctacgcacacgagctgctgctgatgcgntcaagttcacagtggataccacgcttctgaaggagaatgggaacggggtattgcccctnttttnctttccttcagttctgcaatgtttttnttcctcaggntactagggacacggctcaccatgaacaccacttgcacacgcaggntagcgatggaaagcccgcggaggaagacgtagacgctaaaatggcacagatggtctgttc

SEQ ID NO: 1904 - DNA, 265 bp, Zea mays
  misc_feature: Incyte ID No: 700345179H1
  unsure 12, 61-84, 140, 192, 239: a, t, c, g, or other
cccacctcggcngccggcctcctcttctcttcacccacacgctggtcatagagatgtcggnnnnnnnnnnnnnnnnnnnnnnnntcccggagtctgtgctgcggaagcgcaagcgagaggagcaatgggcagcggacaanaaggagaaggcgctcgcggacaggaagaaggcgctcgagagccgcaagatcntcttcgcccgcgccaagcagtacgccgaggagtaccacgcccagganaaggagcttgtgcagctcaagcgtga

SEQ ID NO: 1905 - DNA, 253 bp, Zea mays
  misc_feature: Incyte ID No: 700345181H1
  unsure 9, 16, 21, 27, 35, 73, 86, 92, 97, 130, 145, 148, 161, 164, 192, 202,: a, t, c, g, or other
gatctctantcttganttctnttcttngttcctantctatacatccttggatacatccttttctttttctttngaaagaagtcgtngagtanttttntttacagaaaagtttttccagcttcgggtcatnacagtcattgtgatnggntacagggaaagangcnggaggacgaacacaagatactgactttnaggatggtantctcccccatctgaatagcagttgaaattnggctgntcatcctnctccttt

SEQ ID NO: 1906 - DNA, 251 bp, Zea mays
  misc_feature: Incyte ID No: 700345184H1
  unsure 8-9, 14, 16, 18, 39, 57, 62, 73, 91, 96, 109, 124, 130, 155, 190-191,: a, t, c, g, or other
agatcagnntttcntntntggcatgcttgccttcccttnggcttgagcttggacggntggangaagctgaganagctgctcgaagaggctnggctntaaacaagaatgncttctggtcacagcntaattngtgccatgtttttcagcaggaatgncgtttcagagaagctactgagttcaggaatcatgnnctccgtcagggaggnagcactgcatttcngttaactcacancnggtggnatgtangcngt

SEQ ID NO: 1907 - DNA, 250 bp, Zea mays
  misc_feature: Incyte ID No: 700345188H1
  unsure 15, 31, 53, 58, 60, 62-64, 68, 72, 80, 95, 103, 107, 119, 132-135, 137,: a, t, c, g, or other
ctcactgtacaagcngccggaaggaagggcnggatgacacaactcctttcggnggcgngngnnnctcnggcngccaaganggaggaaaccgccgncccgcaangtcnggaccttcaggncggagatgcacgnnnngngnncgaggcgaagacgatccagagaanggagctcctngntctaaccaccctcaacnggaggatgcaggccgngacacctttctcctatgnggattacttcctaaacaggctca

SEQ ID NO: 1908 - DNA, 254 bp, Zea mays
  misc_feature: Incyte ID No: 700345189H1
  unsure 21, 82, 89, 109, 127, 157, 168, 173, 180, 202, 210, 213: a, t, c, g, or other
gatgcacgcaggcaagtttantttggaggatcaatagtagctagctagagctactagagacatacatggcggatcctctggngcgagcncgacccaaaaggaagaaggncttagcggactacttggngcgactccgatggattcctgccctcttcgnggcccttccantatcngcgctgntctacctgagcgtcttcctggngaacacgnggnccgccatgaaatccgagaagcgtcgacagaaggaacaccag

SEQ ID NO: 1909 - DNA, 256 bp, Zea mays
  misc_feature: Incyte ID No: 700345191H1
  unsure 53, 62, 175: a, t, c, g, or other
gtatggagaatggaacacaacaagcttgtacagaaaagctttgctcgtttgtnctacaatgntttcttgagaaactgcagcacggttgatgaagagtcgagggaaaagttggcaccgtatgcaggcttgtcatctgaagaaagctaccagagtcgctaccttgaaaaggcatctncagcaagttgcaaagaacctgtacgagtccaaggttcagccaacaacgttgatcccaaagcaagttgggaatatgtataca

SEQ ID NO: 1910 - DNA, 257 bp, Zea mays
  misc_feature: Incyte ID No: 700345193H1
  unsure 74, 192, 215: a, t, c, g, or other
ggatcttacaaagaagaagttgagctttaagaggaacgtggtgtcattgtcatctgagctcaagggtgtgaggncgcaagcttgcttcctaggagcagttgtttgtaagggaatctcaaactagaaagcagcttgcggagacaaaaacaaggagcatggaagaggaagtaatcaagctggcagaaatgcttntaggacaaggatgaacaactgcntcattcacaagtagcacagaacaggaacccaatgaaccttca

SEQ ID NO: 1911 - DNA, 284 bp, Zea mays
  misc_feature: Incyte ID No: 700345202H1
  unsure 14, 21: a, t, c, g, or other
aagccacccaagtnagggcanccttgatcctctgcattctgctgcaactcgcatacagaataagttcagaggatggaaggggagaaaggagtttctcttattaggcagcgaattgtgaagatccaggctcatgtgcgaggtcaacaagtgaggaagcattatcggaaaatagtttggtctgttggcatcgtggagaaagttatattgcgttggaggcgtagaggggtggcttacgtgggtttcggtctacagaaggttcatggagagcagcatggcggaacgat

SEQ ID NO: 1912 - DNA, 177 bp, Zea mays
  misc_feature: Incyte ID No: 700345203H1
ctaaaagcacttgaagaagagatgcagtcttttgtcacctcaaagggcaaggttgccggaggacttcaagagcatgtaagaaagctcaaagagagctttaattctaggatagcagaattgcatggttttgcaaatgaactcaagcataaatctatgttgagcttgaaaacctaattc

SEQ ID NO: 1913 - DNA, 289 bp, Zea mays
  misc_feature: Incyte ID No: 700345204H1
  unsure 62, 220: a, t, c, g, or other
cgtcgcgattccaattccggcgccggagaagacgcgcgcaggccccacccagccgcctacangcgctccgctcccacagacggacagcttgggctcgacggatgaacatgtgtgagaaagatcagaatttgccatggggatacgacctgttccgcgacccttttgctcctcccaacggcatcacatccagatgagactccagttgcattcttctcaactncgcatatgatatgtacaacccatcagtaggcatctaccatcctggaagcacccatgagcacgagcacga

SEQ ID NO: 1914 - DNA, 85 bp, Zea mays
  misc_feature: Incyte ID No: 700345205H1
  unsure 23, 72, 75, 77, 79, 81-84: a, t, c, g, or other
ccgggctgtttattcgcatcagnaggcgcgggttgctcgcagatggcgagaagacccttcccgcttcccacncancntntnnnnc

SEQ ID NO: 1915 - DNA, 282 bp, Zea mays
  misc_feature: Incyte ID No: 700345206H1
  unsure 143-144: a, t, c, g, or other
gcacaattaagagcaaagctcaacttgatagaaaggcagggaaaagctactgagaatgagatcaattcaaaagttatggagaaaacccagacattgaggggtgaactcatgaagatggaagaagcgatgtataagcagcagcnngagctctgtgtgctaaggcagcgactgcaggaggttgagcgtgaaaaggctgatagttgtcagccagggcagcaggatgtaattggaggtagactgctggcacggctatcagagatgcctgcaggccttgatcatcca

SEQ ID NO: 1916 - DNA, 279 bp, Zea mays
  misc_feature: Incyte ID No: 700345208H1
  unsure 26, 161: a, t, c, g, or other
ccgcaccgcacccaaccgcagcgganccgggagccgaaggcgagggtattcttccttcgccgctaagcacgcctcctctccacaggcagccgacccaggggaagcgtcgccgtctgcccccaccccgaatctgatgcttcatcgattgatttggagcgganaggaggggagccattgcccgtgttctgattgctgctagaggtcgagggatggtaggggtgctgtcgaatcgcgtggatcgggacgactcaaggccggggatcacatctaccttggcgg

SEQ ID NO: 1917 - DNA, 281 bp, Zea mays
  misc_feature: Incyte ID No: 700345211H1
ctcttggaaggattgcaccgacttggatgaatgtttcattagcaatgaaaaaagatcctgacgcagataaatcttttggctgggttcttgaaatgtatgcctatgccgtggcatctgctctccatggagtgggcaacatcttacgcaaggactttatgattcagccaccttgggacttggaagttggtgattcttttattattcattatacttatgggtgtgattatgacatgacgggtaagctgacttatggcaaaattggtgaatggagtttgacaaga

SEQ ID NO: 1918 - DNA, 286 bp, Zea mays
  misc_feature: Incyte ID No: 700345214H1
  unsure 236, 249: a, t, c, g, or other
attggagggaagctttcatcagcttcttctgttcctgaggtcaagttatctcagtacatttcagcattggagaagctgacaacattgagagtgctacaacaggcctcttgtatttttaaatccataaagattgatatgctctcaagaatgattccattcttgacttctctgtcgtggagaagattcctgttgatgctgccaaacaaattttgttgctataaaagttgaccatttancgggagttgttcnagtttggtaacggtggacatagatctgatggcttaag

SEQ ID NO: 1919 - DNA, 99 bp, Zea mays
  misc_feature: Incyte ID No: 700345216H1
  unsure 67, 70, 74, 85, 92, 95, 98: a, t, c, g, or other
ctccttttccaatttcgactcgattcgaaaccaggataccaaatgcatgatacgatgcccacaagcncgnagcnggcggaggccngataagnggnggng

SEQ ID NO: 1920 - DNA, 286 bp, Zea mays
  misc_feature: Incyte ID No: 700345217H1
  unsure 7, 135, 175, 188, 204-205, 242: a, t, c, g, or other
gtttctnttgcttttgttgagcttccaaaccaattgttgttcctcgaggctgctcttctgccatttgtttctaaacttcaagcatcagatattccagatatcttggcagatgtagagaagaggattcaacatatncaatacgactggagatcaaagtgtttggcgcccatttttnatgttcgtagagnccctacgggaacaaanntgcaaagaatgaggttttgcatgaggaagaggaaaancctgtgaggaaacggggccgtccaagaaaagttagagagtacca

SEQ ID NO: 1921 - DNA, 276 bp, Zea mays
  misc_feature: Incyte ID No: 700345218H1
  unsure 41, 261, 268: a, t, c, g, or other
aatatgggttccttcagtagtaaaccagccaaacgacagtnagccttctgggtttagaacatccagacgaggttattcttcaatgtcaccagaagaaagaaatggtagcttaaggcaaggtgatgttgtggatgatctgagctcagtattatacaaactgacatgagtaactatggaacttataatgcagaaatgctctggaagatttgaagacagcaaaactgtgccctggttgtggaccctgaagattttctgaaggantattacntaggtgta

SEQ ID NO: 1922 - DNA, 279 bp, Zea mays
  misc_feature: Incyte ID No: 700345221H1
  unsure 79: a, t, c, g, or other
ccggactggttcctcaacaggaagaaggattacaaggacggcaggttctcgcaggtccgtctccaacgcccttgatatnaagctgcagggacgaccttgagaggctcaagaagatcaggaaccaccgtggtctgcgtcactactggggcctccgcgtccgtggccagcacaccaagactactggtaggcgtggaaagaccgttggtgtctccaagaagcgatgagctctatatcaccctgagaaatcttggccgcactaccgtgttggtttgtgtccaa

SEQ ID NO: 1923 - DNA, 273 bp, Zea mays
  misc_feature: Incyte ID No: 700345222H1
  unsure 111: a, t, c, g, or other
gccgctgcacacccacctcgctcgcaatccggagcccattgacgagggcctcatattcagcgacattgttggcggaatcaaagtggaggaagatggcgtacggagtttgtncccttaaggcgacatgaggacgacacccgtgccgcttctggtcttgaggtaggatccgttgaagtacatgatccggtactctgggtccttgattgtgggtggctcctgcgcttcgatccattctgcgatgaagtcggtaagagcctaggatttggtcaagtt

SEQ ID NO: 1924 - DNA, 278 bp, Zea mays
  misc_feature: Incyte ID No: 700345225H1
cttcaaaggacagggttccgaacatgaaattcaatgtcgctaaagtcctgcaatcacttgtaccaatccttgatcaatctgttgtggagaagacagtgaaaccatgcttagttgagctcagtgaggacccagatgtagatgtaagatactacgcacaccaagcccttcgggcgtgtgaccaaatggtgatatctagttgactagcctgtccaggaattagcaaatgagatacatattggtctattctttttgaacattttaaagtgttatgtagtctt

SEQ ID NO: 1925 - DNA, 280 bp, Zea mays
  misc_feature: Incyte ID No: 700345227H1
  unsure 41, 102-103, 109, 123, 231, 244, 250, 252, 255, 267-268, 277: a, t, c, g, or other
gtgttgagttggatggtgtccttcgcacaaagcctcttganattggaattgtaaatggcatggatgtttatgaatgggatccttcaacagataagtacaccnncgtganatatgtcgcaacancggtaactgaagcaaaggctctgcaataaagagaggttgcaagctgaagttggattgcctgtggactcgagcatccctgttatagtttttgtgcgggcgtctgaagancagaaagggtctnacatantnatngacagccattcnntagtcggangaa

SEQ ID NO: 1926 - DNA, 291 bp, Zea mays
  misc_feature: Incyte ID No: 700345232H1
  unsure 220, 223, 235, 240, 242, 256, 260, 264, 269, 284, 290: a, t, c, g, or other
ggaaaccctagccgccatatctcacgatccactcgagcaccaagccgagggaaggtgaggagcgatggcgcgcggcgtggtgtcggcgaagggcggcgcggtcgcgggcaagaagaaggggtcggtttccttcacgatcgactgcaccaagccagtggaggacaagatcatggaggtcgcctcgctcgagaagttctgcaggagcgcattcaaggtcgcnggnggaaaggctggnaaacntnggcgactccgtaanattntctnggganaagaccaaggtcacngtcacnt

SEQ ID NO: 1927 - DNA, 280 bp, Zea mays
  misc_feature: Incyte ID No: 700345233H1
  unsure 182: a, t, c, g, or other
cgtcgatccacgcaaccatgtcgaggaggaagaccagggagcccaaggaggagaacgttacccttggacccactgtccgtgaaggagagtttgtctttggtgttgctcacatctttgcatccttcaatgacaccttcattcatgtcactgatttgtctgggagggaaactttggttcggatncactggtggcatgaaggttaaggctgatcgtgatgagtcgtctccttatgctgctatgcttgctgcccaagatgttgcacagcgttgcaaggagctcg

SEQ ID NO: 1928 - DNA, 154 bp, Zea mays
  misc_feature: Incyte ID No: 700345235H1
  unsure 42: a, t, c, g, or other
ctttgttggaaaatggtctcagttatatagtcttcgagatantttcatggttatgtatgcttatctctgattctgtagacacgcgtccaatctttggattttcagttttgacactatccagattccagaatccaattgagggcctgttcgtttg

SEQ ID NO: 1929 - DNA, 273 bp, Zea mays
  misc_feature: Incyte ID No: 700345236H1
  unsure 73: a, t, c, g, or other
aagagagagagctcctcaagcaaggctgctaaatccgaccagggcgatcaagaacctcgtgtaagcaacagcnacagcaacccgttgcctagctacatgcagttcacagagtccgcaagagccaaggcgtcgtccccgaagatgagcccagacgtgcaggacagcaacgccgcgaggaagaggcactcgttgcccatgaccaacggcaagcacgactcgtcgcctcgcatgcagggtcgtcgtctcgcaagttccgcaaggcgtgaaaagcat

SEQ ID NO: 1930 - DNA, 272 bp, Zea mays
  misc_feature: Incyte ID No: 700345237H1
  unsure 270: a, t, c, g, or other
gccagatattgcatgttgagcaagaggtcgtgggtgacgatacgacagctttgcagtgtgttctgaacgccgatgtcgaacgagttcaacttttgcaggaagaagctcgtcttgttcaacaacagaaagatttagagattgaggctgagtttgggcagagctccgacaagggcaaggatggttttgacaaagattctatcagcaagaggcttgaggagatatataaacggcttgagctcattgatgcggatgcagcagaggctcgcgcantc

SEQ ID NO: 1931 - DNA, 112 bp, Zea mays
  misc_feature: Incyte ID No: 700345239H1
gtcatgaaaagaacgatgagctctatgattctcatcagctgataatgtaatgtctgaatttctgtcggtgacaaattaatgatcccattcaaacggtatcaagtgttcaaac

SEQ ID NO: 1932 - DNA, 272 bp, Zea mays
  misc_feature: Incyte ID No: 700345240H1
  unsure 77-79: a, t, c, g, or other
caagaacggaatgatgtctctttcgcggagtgttctgatcatgtactacacttctgtgtttatctatttctggattnnntcgactccagttgtttctctcatatttggtagttacctatacatctgcgtcaattggttccacatacactttgatgaagccttctcgtcgctgcgcatcgcaaactacaaatccttcacaaggttccatgttaagaaggatggtgatctagaaatatttactcttgcagttgacaaggtcccaaaggactgga

SEQ ID NO: 1933 - DNA, 269 bp, Zea mays
  misc_feature: Incyte ID No: 700345242H1
  unsure 256: a, t, c, g, or other
caaggatgccatctcccagattgttggggatgccaaggagaagaataggaagttcactgagactgtggaacttcagattggtcctgaagaattatgatccacagaaggacaagcgtttcagtggctctgttaagttgccccatatccctcgtcccaagatgaaggtgtgcatgcttggtgatgcccagcatgttgaggaggccgagaagatgggattgatacatggatgttgaggctctcaagaaaaggaacagancagaagttgttag

SEQ ID NO: 1934 - DNA, 280 bp, Zea mays
  misc_feature: Incyte ID No: 700345244H1
  unsure 185-186: a, t, c, g, or other
ggggaaaaccgggctatgagcacctgagtgatccgctgcatatcttgatagaggccgagttccctgccagtatcatcgatgcaaggctgagacaagcacaggagattatagaagaattgcttaaaccagtggacgagtcccaagatctctacaaaaggcagcagctcagggagctggcaatgctnncacttcaaccctgagagaggacagccctcatcccggggagtgtctctccattcagcaacggtggcatgaagcgtgcgaaaacaggacagtagag

SEQ ID NO: 1935 - DNA, 281 bp, Zea mays
  misc_feature: Incyte ID No: 700345245H1
  unsure 10, 12, 14, 178: a, t, c, g, or other
gaagcgcaangngnaggagcaatgggcagcggacaagaaggagaaggcgctcgcggacaggaagaaggcgctcgagagccgcaagatcatcttcgcccgcgccaagcagtacgccgaggagtaccacgcccaggagaaggagcttgtgcagctcaagcgtgaggcccggttgaagggncggttctatgtgagcccagaggccaagcttctgtttgtggttcgcatccgtggtatcaatgccatgcaccccaagacccgcaagatcttgcagctcctgcgat

SEQ ID NO: 1936 - DNA, 282 bp, Zea mays
  misc_feature: Incyte ID No: 700345247H1
  unsure 225, 240, 245-246, 253-254, 257-258, 276: a, t, c, g, or other
gttgctttctgggattcggagttatctgaagctatattcaacaataaccattagcaaacttgcccaatatatggaagtggatgaagcaacactaaggtcgatcctgatgacatacaagcacaaaatgcatgcagttgacagtgaaggaaagatagtatcaagtgcagactttgacttctacatcgtcgaggatgtgattcatgttgtggagtccaaacctaccangcgtcatggtgattnctttnngagacannttnngaagtttgaggaatgatnggtgcc

SEQ ID NO: 1937 - DNA, 287 bp, Zea mays
  misc_feature: Incyte ID No: 700345248H1
  unsure 283: a, t, c, g, or other
agcaagtatatcaagaattgtcatgttaactgaggcgctatttgaggtgttggatgaaattcaccgtcaacctgcatcactttcactttccatggtgtctgttcaggctcctgaatctgtagttgattcgttgccatgtgccatatctgcctaaccgaatatgaggacggagaccagataagaacccttccgtgcaagcacgagttccacctgcaatgcgttggacaagtggctgaaagaatacacagggtgtgccctctgtgccgtgggagacgtctgcgantccc

SEQ ID NO: 1938 - DNA, 298 bp, Zea mays
  misc_feature: Incyte ID No: 700345249H1
aatccccaacccccagccggcagccgccgagcaaaccagctcatccggttcggtcatcccactcatcctcatcccctgcccatctgatccgatcggtcatctcatcctcatcccctacccgatcggatcccctgctcatccgccgagcaccaccaggcagcaggctccagtcatcgagcaccagcaggagcacggcgcgctgcccagtaggagcacggccaagaggatgacgcccgcatcctgcctcttctctctgctatggagccctactgtaggagaaggctaggaggaaacaccc

SEQ ID NO: 1939 - DNA, 292 bp, Zea mays
  misc_feature: Incyte ID No: 700345251H1
  unsure 54: a, t, c, g, or other
gcaattcctctctgccctagcaccagccatggcgaacgccaggcttcttctcantttcctactcgccgcctccgcgccgctaatcgtcgccacggccaagaaatccggggacgtgtcggagctccagatcggcgtcaagtacaagccggaatcatgcagcattcaagctcacaaaggtgacaaggttaaagttcactaccgtggaaaacttactgatggaacggtttttgattcaagctatgaaagaggtgacccgattgaattgaatgggcatggacagtgatcaaaggat

SEQ ID NO: 1940 - DNA, 236 bp, Zea mays
  misc_feature: Incyte ID No: 700345252H1
gtgattcaatgtaatgccgatatcagcactgacatgatgagggacaagttttctgccctatctgcagtagtttatctaatgcccactcttttacattatacggggtgtttgtaagcaaagtatttttggagttttgaggtaaaaccatggtattggagaataccatggtattttttgccaagaggtgtttggccaccttgtaaaaaaaatctgttttgaataccatggttttgtag

SEQ ID NO: 1941 - DNA, 114 bp, Zea mays
  misc_feature: Incyte ID No: 700345253H1
  unsure 113: a, t, c, g, or other
gccagccatcgtcacactggtgagctctgcagtctgcactctgcttagctccgagcttcagtgccttcgttgttagctgttagctccacagtccacagttccacacaacatant

SEQ ID NO: 1942 - DNA, 291 bp, Zea mays
  misc_feature: Incyte ID No: 700345254H1
cgaggaggcaaatagctgtggcaacataccttatcgataaactagcccttagggctggcaatgaaaaggacgacgatgaagctgatactgttggttgctgtacgctgaaggttgataatgttacatgtatgcctccaaatcagattcagtttgactttctgggtaaagattcaataagatactttaacaccgtagaggttgaagagcttgtgtacaaggcaattgagggtttccgtgctggaaagaagccaggacaagatctattgacaagatgatacatctaggctaatg

SEQ ID NO: 1943 - DNA, 291 bp, Zea mays
  misc_feature: Incyte ID No: 700345255H1
  unsure 284: a, t, c, g, or other
gtatggcccagttccaccatctgaatctgctcaagcttggcaacaaccgaacacgtacgatgctgctgttcaagctcagatggcagctgctggatatcaaggtgactggtcaagctatgtgtatgcggaacagcagttgggttatccagaacagtatgtgcagcaaagcacccaggaatacgatgtgttagcggaccctagtatatcccaggatccgaggttcatgactcaggcggacaaggatcggggtttaggttctgttttcaaacgtgacgatcaaaggntaatcag

SEQ ID NO: 1944 - DNA, 294 bp, Zea mays
  misc_feature: Incyte ID No: 700345256H1
  unsure 68: a, t, c, g, or other
attaaagcgagcagggctgactgaagaacaattgcaagagcagattgagcagagaaatgtcgcaaggnagaataagcagtttgagatatctgatggaatcaggaaaaaccttgctaccaaaggcatcgccctgatggacgagccttctggtacagtatggagaccatgcgaaccagagcggtctgaagagtcatgattagctcactgactcaaccagtgatggtggtgtaaaatgagatttttgcctgagggcagttatcacattttgaagactaacaaaaatcgccatctctg

SEQ ID NO: 1945 - DNA, 288 bp, Zea mays
  misc_feature: Incyte ID No: 700345257H1
  unsure 36-39, 41, 62, 88, 112, 248-249, 266, 274: a, t, c, g, or other
gtctggatggttccaagattatcaagacggtatctnnnncncttccccacaatctcagctgngtagacaacatcctccaagatgaaanttgtggggaagcgtgtcagatacngtctggatggttccaagattatcaagattttcttggacccaaaggagaggaacaacactgaatacaagctggagacacgcactgcggtctaccgcagctgtgtgggaaagatgtggtcttgagtacccttgaccgnnatgcataaatatgatgncctctggntattccatctattt

SEQ ID NO: 1946 - DNA, 289 bp, Zea mays
  misc_feature: Incyte ID No: 700345258H1
  unsure 159, 176, 189, 273: a, t, c, g, or other
tgaaaccccaccccaaggaggaactcctggatgggcagcaattccaagtcctcgaattggaccttggctccggttgatgcaaaagatagctgtagaacaaggccttgttccagagtttgaggttacgcttgaggctactcaccatggaccagttaccancacacccaccatgtttnttgagataggaanctacagaagaccactggggtcgacaagatgctgcacaggcattgctctagttctatggaaaggtcttggtctggaggatggaangctgttggaattggca

SEQ ID NO: 1947 - DNA, 250 bp, Zea mays
  misc_feature: Incyte ID No: 700345259H1
  unsure 100, 161, 237: a, t, c, g, or other
gaagaaatgctggaggggagggcgcgggtggaggacacggacatgccggcgcggatgcaggacgcggcgacctccgcggcctcgcgcgcgctcgacctcntcgacgtcgccgactgccgcgccatcgccggccacatcaagacggagttcgacaagcggtnccggcgtcgggtggcagtgcgtggtgggcgccaacttcgggtgcttcttcacccacagcagcggcacttcatctanttctccaggagcg

SEQ ID NO: 1948 - DNA, 300 bp, Zea mays
  misc_feature: Incyte ID No: 700345263H1
ctatagaccacagccagtcagccacatcactagctatctgtgcagaggcaatggcgtccaaggttgagctggtggtggaggtcaagtccccggctgacaagctgtgggcggcgctgcgtgactcgacggagctgttccccaagatcttccccgagcagtacaagagcatcgagaccgtcgagggcgacggcaagtcggccggcaccgtccgcctctcaagtacaccgaggcggtgccgatgctgacgttcgccaaggagaagttgagacggcggacgacgagaacaaagtgtgtctacac

SEQ ID NO: 1949 - DNA, 308 bp, Zea mays
  misc_feature: Incyte ID No: 700345264H1
atgaactgtttgtgtcacccatgttcctctgctccttggcactttctgatgcatgctcaaatgcttaagaaagactcatagaagcgactcctattcctatgccaggtcattgagataccaaggggcagcaaggttaaatatgaacttgacaagaaaactggactgatcaaggtggaccgtgtgctgtattcatcagttgtttaccctcacaactatggattcattcctcgcacgctttgtgaagacagtgatcctttggatgtactggttataatgcaggagctgttatcccaggctgttcctacgtg

SEQ ID NO: 1950 - DNA, 285 bp, Zea mays
  misc_feature: Incyte ID No: 700345268H1
ggtttgtgcaagaggagaagacaaatggatgatacgattgaatgttgggatcagccacacgtaagtctaggtatcgacctagtcgccgccggccggaacaagaagaccgagcgcactgcatacctcaagctcctcctcaagctgtaccgcttcaacgccgtgatcctcaagcggtacttcattagcaagaccaaccgccctgcctctctcgctccaccgtctcatcagcttcatggaagggggaggaaagtgactgacgacaagagggtctacgaatatctgcat

SEQ ID NO: 1951 - DNA, 280 bp, Zea mays
  misc_feature: Incyte ID No: 700345270H1
ttttgattctttaatgcaatttattataattgaggtgtacatttgtccatcaatgtaaatatgtgaaagattctttggcactgtaatccaggcacagggaactgactgcctttgctgactgaagtttttgtacagttgttactagtgttttgcttgtcaagttcctaatcaagcttgaatcattacggtctgttctcatatagctcaactctatctgtttctaactctttttacaggttatgtttctaacgctaatgttttcctcagttctttttgtctg

SEQ ID NO: 1952 - DNA, 286 bp, Zea mays
  misc_feature: Incyte ID No: 700345271H1
  unsure 136: a, t, c, g, or other
gcaagtaatatggcttggtcttgtgctcgtccgatgagcatcgccctcgctgccgtcctcctgctgtgcggcggcgcgtggctgcagcaggcggcggaggcgcgcccccaccacatggacgacgacagcagcatcnacatggaccgcggcagcaacgacttcttctccatcgtggggtactcgccggaggacctgacgcagcacgaccggctcgtcaggctgttcgaggagtgggtggccaagtaccgcaaggcgtacggcagttcgaggagaagtgcgccggttc

SEQ ID NO: 1953 - DNA, 287 bp, Zea mays
  misc_feature: Incyte ID No: 700345272H1
acaaagattccatattcgaatccttcagcacctgcagcagaaaacactcagctgcctagggatactgatctatcacctggacagcctttgcaacctggaatgccatcatctggtgttggtgttatcggccgaagaagtgtatctgatcttggtacaatcggagataaccttactggaacttctggtagttctggtcatgatcagaattattatctgcaaatgcttgaagctgcattccacaagcttccacaacccaaggactctgaacgtgctaaaacttacatccg

SEQ ID NO: 1954 - DNA, 287 bp, Zea mays
  misc_feature: Incyte ID No: 700345273H1
  unsure 24: a, t, c, g, or other
cgtgatctcaacccaaggcgtgcntccgctccggtcacccgtcgctccacgcaaccatgtcgaggaggaagaccagggagcccaaggaggagaacgtcacccttggacccactgtccgtgaaggagagtatgtctttggtgtcgctcacatctttgcatccttcaatgacaccttcattcatatcactgatttgtctgggagggaaactctggttcggatcaccggtggcatgaaggtgaaggctgaccgtgacgagtcgtcaccttacgctgctatgcttgctgct

SEQ ID NO: 1955 - DNA, 286 bp, Zea mays
  misc_feature: Incyte ID No: 700345276H1
  unsure 256: a, t, c, g, or other
aaacaagactgcccttcagctgagtgctcggaagaagtgggagggatttcacggttcatatccgtatctgcctcgaggaacccgctgcgagaaaaagggtgttggacaggggctcggtcactcacgagctatggacagaaccgccaatgcggcggtgttggatatcgagggtctgcctcaaccacctgataaatgctgctccggaagtccaaaaatgaccaggccttgtcacgcaaggttcgaatcggatggaaangaaggtggtgatgagctgctggagcaagag

SEQ ID NO: 1956 - DNA, 289 bp, Zea mays
  misc_feature: Incyte ID No: 700345277H1
ctcaagaatccaaataggccaattgccagcttcatattctctggaccgactggagttggcaaatcagagcttgcaaaggccctggcggcctactactttggctcggaggaggctatgatcaggcttgacatgagtgagttcatggagcggcatactgtctccaaactcattggatcacctccaggttatgttgggtacactgagggaggccaataactgaagcagtccgtcgccgcccgtacacagttgttctctttgatgagatgagaaggcacatccagatgttttc

SEQ ID NO: 1957 - DNA, 292 bp, Zea mays
  misc_feature: Incyte ID No: 700345278H1
gccgatcgccgtccccgaccgcagtgcaggactgaggatgagtgaagaggataaggctgctgcttctgctgagcagcctaagagggcccctaagctcaatgaaaggatcctctcctctctgtccaggaggtccgtagctgctcatccatggcatgatctcgagatcggtcctggtgctcctgctgtattcaatgttgttgttgagatcacaaagggaagcaaagtcaattacgagcttgacaagaaaatggactgattaaggttgatcgagtccttatcatcattgtatacc

SEQ ID NO: 1958 - DNA, 115 bp, Zea mays
  misc_feature: Incyte ID No: 700345279H1
  unsure 19, 30, 42, 68, 74, 79, 93: a, t, c, g, or other
ggaagaggaaactcgaaancccggcgagcngtatggcaaccngccaggagcacgtggcggcgccggcnccggcngttcnaggagacgccgganaagaagcaggccagcacaaccg

SEQ ID NO: 1959 - DNA, 280 bp, Zea mays
  misc_feature: Incyte ID No: 700345283H1
  unsure 25, 63, 134-148, 274: a, t, c, g, or other
ggcaattcagagaatggcaattttntgctggagaattatatgccaggcgctcaagcctttganagctcttcgtcaacaagaaactctggggaccaccctttcagaggtttcagctaacccaggtttgccgtatnnnnnnnnnnnnnnnacgagctctgggctgtcagccatctgccctcctgaaatccagtgcccattgtgatggacaacatgtcgtctaaccaagtgcccagcatgagtgctgtgcctcctgtttcgaaggctacaattgacngggtat

SEQ ID NO: 1960 - DNA, 278 bp, Zea mays
  misc_feature: Incyte ID No: 700345285H1
  unsure 213-215: a, t, c, g, or other
ctcgctctattcccattccaagtccccgctcttggattcccgacgacgagctcggagcttcttcttccctgctcggtgctcgtcgcaacagctgccgccatgtctgccgggaaccagctcgccgctctggtcagcaacatgtacgccacgggtttgcttgacgatcagttccagcagctccagctgctccaggaccccagcgcccctgacttnnnctccgaggtcgtcagctcttctgtcagacggcgagcggatcatcgaagagctggccaactgct

SEQ ID NO: 1961 - DNA, 281 bp, Zea mays
  misc_feature: Incyte ID No: 700345287H1
  unsure 190, 196: a, t, c, g, or other
tgaatctttgatcaaatgggttgtcgaagtcaggagaaaagaggagggtggaccaagcttaaacaaagaggagaaagaaaggcttttcttgaaggaaaatgtactaaagcaagttcgtgataccaggctatttgccatagtccatgatttgcagtatgctaataaaccatgttataattgctcatcttcnctcggngatgagcaattataacatggtttattagcatactgcaaataaaccatgttataattgctcatcgccgagcgaagatgattccctt

SEQ ID NO: 1962 - DNA, 281 bp, Zea mays
  misc_feature: Incyte ID No: 700345288H1
ggagttgtgcgctaaacaattgatgcatttccttccttggaaaattgattaccatcccttgaaaccattttataaaaaggatttttatgatgcttagtcttgctttagaaaaacaaaatgttttgttttaaaaacaaaaggtgatgcttcatagtggatgggaatttttacaaagaaaagactgatgatggtggatccatcacggccgtgatgggttcaacatctgaaaagatgtacctctgccagttaccaaactttgggttttaaataataaagctgag

SEQ ID NO: 1963 - DNA, 110 bp, Zea mays
  misc_feature: Incyte ID No: 700345289H1
atctcatccaatgtacatggattaacatcaaaccgaataagccctgagttggactgtgaatttcagaaataagtgaattgagaaataagtgaattggattgtagaatttc

SEQ ID NO: 1964 - DNA, 278 bp, Zea mays
  misc_feature: Incyte ID No: 700345290H1
  unsure 68, 86, 89, 91-92, 107-112, 117, 120-126, 128, 130, 140, 142, 153, 244: a, t, c, g, or other
gaaaaccgaaatcccccactcttctcacccgtttccccactcgctcgctgacacatcgcacattcgcnccataccagataccaccncancnncacacaaacccagannnnnncggcnatnnnnnnntncngctcccagtntncgatccgaggnagccggaagaggggatttcgagccgcggcgatcggggctagagtggccctcgacgcgtccgcgggtggaatgccgagaagccgagagagtnggcttggagcggattgcgggaggtgggagagaag

SEQ ID NO: 1965 - DNA, 255 bp, Zea mays
  misc_feature: Incyte ID No: 700345291H1
gcgaagacaggactcttttggagtcttggtacatggcctgacgctgaacctgggtaaaacaggagtacgatgttgcaatgtacataccaaccatgcgctgagttggcgtgaaggatatattcatgttccactgttgtcttaaccaaacgtgctgttttcttccggttgtgattttggtgacctgatcatctgacaatatctaattatacattggggaggaatgagttacaatagtaatgtggtgttgtttgggat

SEQ ID NO: 1966 - DNA, 274 bp, Zea mays
  misc_feature: Incyte ID No: 700345293H1
  unsure 186, 188: a, t, c, g, or other
tcttgcttcctcttttgtaaagcttttcctgctgagtttagtggtaccttagattgtcgtccatttcctgccctgttctccgggcagctatttgtagtgtaaaaatatggtggcgtgctggatggtgttatttatgcgtgcgtggcctgtcatgacgaattccaccatgtttggggctatttgatngntgtttactgatcaggctcgaaatattttttcctcgtgccattgcaattgtagacgtggacgcggtgtgagtgaagagatgcggtga

SEQ ID NO: 1967 - DNA, 287 bp, Zea mays
  misc_feature: Incyte ID No: 700345295H1
  unsure 224, 266, 271, 277, 279, 283: a, t, c, g, or other
gggggaggagaggacaggaggccaagcagcagcggcagagacgcaggcgccgcaatgcagggctccaggaccaaatctggctccgctgaggcgaagggcaacggcaagacgaaatcaaagaagaagggtggtgggaagaagaagaaaggcaagaaaggagatgcagcagaagcagatcccatggaggaggcgacaaacggtgctacaagccaagaatattctgnttttggattactgccaccagctttttcttgtttcttcgtgcntctgnggtgtntntacntcat

SEQ ID NO: 1968 - DNA, 285 bp, Zea mays
  misc_feature: Incyte ID No: 700345296H1
  unsure 223, 277: a, t, c, g, or other
gcctatcttccgtcagctactgaaccgattcagttgtgaataattttggaatccgctagagtccgtgaggtagtgatgaaaccattgcaaaacgtttgtgcttgaatggtttattttcctcctgcatagcgcactgcagagcctgagaaccagattgctgtagtcgatttgcgaggggttctctttttttttggggtacctttcgcgaggaactcgccattgnttttgggtactgaagcagtactcgagcagctttgctaaggagaatgaactatcncaaagtgc

SEQ ID NO: 1969 - DNA, 284 bp, Zea mays
  misc_feature: Incyte ID No: 700345302H1
  unsure 155-157: a, t, c, g, or other
cgttccccaccccgaccgactgctccccctcccccgcaccagcctcaagccctcaaggcctcaaggcatcgccggcggccgcaacttcgctgaggaagcccgcacccctgcccggatccgatggccaacagcaacctcccgcggcggatcatcannnagactcagcggctgctcagcgagccagcaccggggatcagcgcgtcgccctcggaggagaacatgcgctacttcaacgttatgatccttgggccggcgcagtcgccctatgaaggtggagtttttaa

SEQ ID NO: 1970 - DNA, 281 bp, Zea mays
  misc_feature: Incyte ID No: 700345304H1
gtatctgagtccagtttttggacttctggctttccttcatggctgtcgtgggtacgttcatatatatggctacaattgatgaagtttcaaagagagcaatgcatactgctgtatttatcctcacggctcttttagccgcaactggtgcaacaagatctgcaaatattggaattgttattgccattggttctgttggcctgcttatggggtggctattggagttctctacagcacgaaggtttatatgctggccctcacgaattaaccttaatatgcctcaa

SEQ ID NO: 1971 - DNA, 268 bp, Zea mays
  misc_feature: Incyte ID No: 700345307H1
  unsure 41, 52, 191: a, t, c, g, or other
ggcggaagaggcagaggtggtggtggcggcagggggggcgngcggcaatagntttaacaggaggaattagaagctgctgcaatcttaacggacgtttcagtgacgtagttttgaggaagagggggagggaatattctcagttttggctgcaattgtatcgggttttgtttatttgttagcgttcgtcaacnagaatacgacacacatttttgccaacgcaagaattcgcgtttatctactcgaaattcaaccaacgtgttattactaa

SEQ ID NO: 1972 - DNA, 272 bp, Zea mays
  misc_feature: Incyte ID No: 700345308H1
ccaaatccacacgggaactccatccgtgacagtgctaatatgtatgcaatcttgctcgccaacgagcttatgagcatagagttgcggtggcaagatcagcgtgacactttggaactgatcctgggggtgtgggtggagatgttgttgtatgctgctgaccattgcagccaagagtcccatgccaggcagctcagtaatggctgcgaattcatcaccatcgtgtcgttgctggcacaccacttcaagtactactctggggccttcagggacgc

SEQ ID NO: 1973 - DNA, 95 bp, Zea mays
  misc_feature: Incyte ID No: 700345309H1
  unsure 2, 41, 75: a, t, c, g, or other
anagggaaccgtagtccagagaacgtttgtaaaggtcagtnacattttatctgatgcgttcacagtgctgatggnactaaactggggcgcaaaaa

SEQ ID NO: 1974 - DNA, 283 bp, Zea mays
  misc_feature: Incyte ID No: 700345311H1
gtggaggtcagcctcatcaactgaccctgtgagatctgtacgggttgttgatcatttcaccatcgaaagaacaagaaccccagatatggagccctcttcctgattgtgcagcccttactattataaggagttgctactgctgctagaaaaattaacaataactagcttcaacacacagtattgtttttgtttccacatccagccaataggtggaccgaggtgatctgcccttgtcggcgtccccgctttactgacctcacctgcagcattgtaatctgtatag

SEQ ID NO: 1975 - DNA, 284 bp, Zea mays
  misc_feature: Incyte ID No: 700345312H1
ggactcacatctctatggtcgtaatagagaaacattggagtggactgcacggcataagattgcagttggtgctgctcgtgggctgcggtacctccacgaggaatgtagggttggctgcataatccatcgtgacatgagaccaaacaacatccttgtcacacatgatttcgagccactggttggagatttcggcctggcacgatggcaacctgatggagacatgggtgttgaaacaagagttattggcacatttggttatctggcacctgaatatgcgcagagtg

SEQ ID NO: 1976 - DNA, 285 bp, Zea mays
  misc_feature: Incyte ID No: 700345313H1
  unsure 66, 106-107: a, t, c, g, or other
caagctactggcacttgttacttctgggaatgccatggcacataataccagtgctttgcagcccantaatggtcctatgggtggatcccaggaggttgaggctccnntagatcctatgaaagagctgggcagactgatatctgaacgcaagtttgacgaagcatttacaatggctcttcaaaggagtgatgttttccatagtatcgtggctatgctcccaggttgatttgcgggcattatgtgcaatggtcccagtacctcttaaccagggggtcctcctggcct

SEQ ID NO: 1977 - DNA, 207 bp, Zea mays
  misc_feature: Incyte ID No: 700345317H1
ggccctctaatggtttcagaatatgtgaattacgatggttgtaacatatatacgagtagaagaataagacgatgggagtgttttgttgtacatgtcaagagtagatgaattgtctttgcaagcatacaaccttaaaagttgtaacacatgtcagctggttttgacaggtctgtttgttttgtctgctcctgttggagtgttgggcat

SEQ ID NO: 1978 - DNA, 277 bp, Zea mays
  misc_feature: Incyte ID No: 700345318H1
gccattggcattgcgagaggggttcagtttctgcataatctgactgctcctgggttcgtacagaacaatctcaacatagaacatattctgctggacaagaccctcacgtctaagatcagcaacttcagtcttccaatgatatcaactagcaagaacggcaagattctctcagagaccccatttgctgtccatgaagacaatgatatcggcagtgctcagaacgcggcacaaggtgacaaggaagacatctaccagattggcctaattctcctggagg

SEQ ID NO: 1979 - DNA, 275 bp, Zea mays
  misc_feature: Incyte ID No: 700345320H1
ctctaactgcccctgagatccgggagtataccggggagatcatgttcgagacgttcaatgtgcccggcctctatattgctgtccaacctgtccttgctctagctgctgggtacactacaaccaaggtgttgtagttgatgtgggtgatggggctacccacatcgttccagttgctgatggttatgtcattgggagcagtatcagatctattccaattacaggcaaggatgttacccaatttattcatcaacttctaaaggaaagaggtgagaaca

SEQ ID NO: 1980 - DNA, 278 bp, Zea mays
  misc_feature: Incyte ID No: 700345322H1
  unsure 60: a, t, c, g, or other
gactgcagacgcccggaccacaggaacatccaagtaccgaacactaccggccacacgctncgagaataggcggcggtgcaggtccctcctccatctctgtcgtgggttcaacttcactgtgaatacgctgacgctacgagaagtcatcacggaaggggtctcgaagcaaggtgcaaagactcacctgccgtctctgatgggctttgctggctgggtatccatgctgctcttcctcctggtcgccggtgctgtagcaaatgaccagatcttcaccactt

SEQ ID NO: 1981 - DNA, 276 bp, Zea mays
  misc_feature: Incyte ID No: 700345324H1
ctagcgagatctgttcttgcctcctgcgctgttccgtcggcgttccgatgatgccgtagggaccctgagcctgtggttccctttccgactgggacatttgggggtaagctggccactatcctacctttgtcatgtgcgctttgagttatgagtgctccactcgctctttcggaacatccaatggtcgacctaatttatggatacaaggtttgaaatagggagctcacagctctacatggtgttgccatgtcgccattggattccataagcgcattt

SEQ ID NO: 1982 - DNA, 278 bp, Zea mays
  misc_feature: Incyte ID No: 700345325H1
  unsure 2, 4, 7, 10, 81, 163: a, t, c, g, or other
tncnacnggncagggttccgaacatgaaattcaatgtcgctaaagtcctgcaatcacttgtaccaatccttgatcacatcncgttgtggagaagacagtgaaaccatgcttagttgagctcagtgaggacccagatgtagatgtaagatactacgcacaccangcccttcgggcgtgtgaccaaatggtgatatctagttgactagcctgtccaggaattagcaaatgagatacatattggtctattctttttgaacattttaaagtgttatgtagtc

SEQ ID NO: 1983 - DNA, 273 bp, Zea mays
  misc_feature: Incyte ID No: 700345326H1
atcggatctccaggccggcagaagttgagcggactgactggtcactgtagttcgatcgaatccgagtagggctgatacagttcgattcggcgggaggcatggcgtccgaaaagcacttcaagtacgtcatcctcggcggcggcgtcgcggcggggtacgcggcgcggagttcgccaagcagggagttaagcctggggagcttgcaatcatctccaaggaggctgtggctccttacgagcgtcctgccctaagcaaaggttacctctttcctac

SEQ ID NO: 1984 - DNA, 279 bp, Zea mays
  misc_feature: Incyte ID No: 700345327H1
  unsure 23, 26, 29, 39, 41, 46-47, 62, 72, 79, 90, 93, 144, 166, 193, 240, 244,: a, t, c, g, or other
gcctgtcgctggcgtcgccggtngcngcngctcgaactncntccgnntgaatatcccttgcnccataagggntgacctngaaagcctcgncanttgatcccggcagcggcggaggggagggcgatgccgaagcggacgacacanacctactcgagcgaggacgcantgccggagggccccgagtccgaccttntgcgtatactactacaagcactgcgcctcacatgtcctcatcaccgntacntcttgcagaaaatgcccaagcggaaagactganag

SEQ ID NO: 1985 - DNA, 278 bp, Zea mays
  misc_feature: Incyte ID No: 700345329H1
  unsure 13, 128: a, t, c, g, or other
ggggcagcaaganaaccctaaccttcctgggagggaaatccaaggagggttagggttttctgatgcgctcatacatggggcagcaagaagatgggatgtctgatggcttgtacacttacaagcatcancgcgagcgaggagctgatatccacaccatctttgtgaagaagagcaaattcaggattctgctgtcatttatcggcacaacgttccttcttgtgtctgtttgctgcgccctgttatcgaaggatggtttatgtcttgttccctttggagca

SEQ ID NO: 1986 - DNA, 279 bp, Zea mays
  misc_feature: Incyte ID No: 700345330H1
actgggcaaccgccaccgccctccccctccgtcgggtcttcgccggcgccaccagcgacgactgggcggtctgtgtccctcttcgccggagacgatcacccaccaggtggatgtcgattttttggttgacaagttgaaggttacgaactactttgatcctgaggtgaagaagtaatgatccgcccaggctcaagggactcgcaaaattatgataacaataatcaaagagttcatccgcaaccagttgatgagaacatgaatcagaacggggactcagtg

SEQ ID NO: 1987 - DNA, 177 bp, Zea mays
  misc_feature: Incyte ID No: 700345331H1
  unsure 57, 64, 73-74, 81, 84, 116, 122, 145, 160-161, 166: a, t, c, g, or other
ttctgtccacctccgcgcctattccctcgctcccgcgcccgctttcccgcgctttgngcacgcntcgctcttnnttcaagngcnatgcctcagctgcaggcctgccgctccagganctaccnttcggcattggcgtccgcctggncggcggggtcaacgnngtctngctgctctcac

SEQ ID NO: 1988 - DNA, 281 bp, Zea mays
  misc_feature: Incyte ID No: 700345332H1
  unsure 70, 276: a, t, c, g, or other
cttggagaaagaaataactttggaagagagtcatgatcaagaagtggaagaagatagtatgtctagaganacaccacgatgggcttcagataggaacttacttgattctacttcatcaacctctaagagaaggaagcgagacaaaggaaatgaagttcgcaagtcaagtgacccatttttggatatgttaggtgaatttctgatgatctaagaacgcttcaaatcacttggaaaaatgactgaaatcatggagcgtgaagctaagctcccagaggnggctg

SEQ ID NO: 1989 - DNA, 271 bp, Zea mays
  misc_feature: Incyte ID No: 700345333H1
  unsure 72: a, t, c, g, or other
cgccctctcgctccagccgcttcacagcgccgccgctcgcctctccgaccgccgcgagaatgccgttcaagnggttcgtggagatcgggcgcgtggccctggtgaactacggcaaagactatggccgcctcgtcgtcatcgtcgatgtggtcgaccagaacagggcacttgtggacgcccctgatatggtcaggtgccagattaacttcaaacggctctcacttactgacatcaagattgacatcaaacgcgttcccaagaagtcaaccct

SEQ ID NO: 1990 - DNA, 262 bp, Zea mays
  misc_feature: Incyte ID No: 700345334H1
  unsure 51: a, t, c, g, or other
actgatggctacatccttgagggtaaagagctcgagttctacatgacgaanctccagaggaagaagggcaagggtgttgcatcttagagcattcttttagctagaactgcaaaatatcttctacttgggggattttgttgttagtctttatgcatatcatttgcggacctgatgaacacttcataagtgaatcaactctcgattctaagaattgataattttcacatgcggtggttgtaattgtgatatttaggtttgctat

SEQ ID NO: 1991 - DNA, 271 bp, Zea mays
  misc_feature: Incyte ID No: 700345336H1
  unsure 9-10, 13, 183, 212: a, t, c, g, or other
ccaccatcnnctntctctctctggtgtgttttgcaggcagcaccgttggtctcgtggagggacagaagacgtggtgcatcgccaagccgtcggcgtcgaacgagatcctggcgcagaacctggactacgcgtgctcccaggtgagctgcgccgtgatccagaagggcgggccgtgctactacncggacagccccgtgtcccgcgccgccgtncgccatgaacctctactacgcctacagcggcaggcacccctggaatgctacttcaacaa

SEQ ID NO: 1992 - DNA, 270 bp, Zea mays
  misc_feature: Incyte ID No: 700345337H1
  unsure 68: a, t, c, g, or other
cggaggacgtcttctccttctggctgaaccggagcccggacgcggacgcagcgtccggcggcgagctncgtcttcggcggcgtcgaccctgcgcacttcagcgggaaccacacctacgtccccgtctcccgcaagggatactggcagttcgacatgggggaccttctcatcgacggccactccaccggtttctgcgccaaggggtgcgctgccatcgtcgactccgggacttccttgctcgctggcccaacggccataattgcccaggtg

SEQ ID NO: 1993 - DNA, 272 bp, Zea mays
  misc_feature: Incyte ID No: 700345340H1
  unsure 169: a, t, c, g, or other
atcacaccaccatacaaagtggccttcaacaaatccagcttctgcagcaacagcaagttcagcagtcagtgcaggaacaacagcaaataaagatacagccttttcaggtacctaatgatgccaacatggtaacacagttatctgatcagatgaaaatacaactattganggctctacagccacagcagcctctggtcatggaacagcagaaaatgatatttgatttgcagcaacaagcagtaaattctcagtcaactgctcagcagtgctca

SEQ ID NO: 1994 - DNA, 278 bp, Zea mays
  misc_feature: Incyte ID No: 700345342H1
  unsure 14, 23, 44, 47, 56, 58, 84, 86, 96, 122, 135, 151, 165, 175, 194,: a, t, c, g, or other
cttacagcaatatntggttgtgntctccggagatccgataggantantgttgatgncncactcgagtttcttatccttggcaantngatctggttntgggatgttgtactctaacgaggaanctgtccgcgatgnactagatcccattaangacccagaagaggntgcaaagatnctgcttgcaagaggcgtanaagagggatnncngtganaanataacttgcgtcgtcgtgcattcttgcatgngcaaggtagcagcggataccttaaagngtaca

SEQ ID NO: 1995 - DNA, 274 bp, Zea mays
  misc_feature: Incyte ID No: 700345343H1
ctcgacgcccggcgcacacggcatactgcatcataccgcaccggcagtggcggagaaaagagatgaggcagccggggccgggagccatcgccgcctcatgcctcccgactccgtgacggcccgcagccacaggccaccggataacgcacacagcggaaccatccaaaaacgcgggagctttcccccgtcaaagcccccaccctaatcccccgtctcgcgcgccaatcaactcaccctcccctccggcttccgcggaactaggagcagcctgcag

SEQ ID NO: 1996 - DNA, 273 bp, Zea mays
  misc_feature: Incyte ID No: 700345344H1
  unsure 17, 62, 162, 166, 227: a, t, c, g, or other
gcgaaaaaggataggantcctcttgtgtcctggccgtcggccgtcgctggcgtcgttccagntttggggaacgaaatccggcaccgagattcgagtcgaaaaggacatcatttgctagatggcgcgtaccaagcagaccgctcgcaagtccactggaggaanggcnctaggaagcaactcgctacaaaggcagcccggaagtctgcacccacaactggaggagtgangaagcctacaccgttaccgcccaggactgttgctcttcgtgagatc

SEQ ID NO: 1997 - DNA, 274 bp, Zea mays
  misc_feature: Incyte ID No: 700345346H1
  unsure 113: a, t, c, g, or other
caaaaagaagacaagggttgtgacagacacgctaaatccaatatggaaccagacatttgatttcatggtagaagatgcactgcatgatttgctcatggtggaagtatgggacnatgatacatttggaaaggattacatagggaggtgcatcttgacactgacgagagttatactcgaaggtgaattccaagatacctttgtcttgcaaggtgccaaatcgggaaaactaaacttgcatttcaagtggacgccacagccaatctatcgtgatcgt

SEQ ID NO: 1998 - DNA, 276 bp, Zea mays
  misc_feature: Incyte ID No: 700345347H1
  unsure 2, 203: a, t, c, g, or other
gnagctcttcataaaaagagctccagcacaggttgtcgaggccatgcgccaaacagtgactaatatgatgggcactttaccaccacaatttttcgctgtaactgtctcaacggtcgctgaaaatctggctcagcttatgtacagtgtcctaatgactggatacatgtttaggaatgcacagtaccgtctggaactgcaacagngtttggagcagattgctcttcctgaaccaaaagaagaaaaggattacgctcctggaactcagaaaaaggtaac

SEQ ID NO: 1999 - DNA, 296 bp, Zea mays
  misc_feature: Incyte ID No: 700345350H1
gtctcatagttcatgggtcaaatggccatttgctgaaagtagttctactctacatctgattagcccatgacaacgacagctattttgcagaacgcaatcaccatatgcaatgccacatcaattttcacattgtcctggatcggtctcctttttctagtttggatttgttttgctagctaagtagctctcttattcttccagttcataggtgtgctattccctttttcctttttttgtcaagtgctcttcatgattcaaggtcacacaggtttgatctgaggctgatttttttgtgt

SEQ ID NO: 2000 - DNA, 274 bp, Zea mays
  misc_feature: Incyte ID No: 700345352H1
  unsure 37, 39-40, 98, 203, 256: a, t, c, g, or other
tctgtcggttacacctctgcatctcccctctcccctnanncggccggttttctccgtacgtgcccatggccatggccatggcagagtggtgggctgcngcgacggaggccgtcgcggtgtacactgggttgactcctacggcgttcttcacggccgtggctgtggccgcggcgctgtacgtcgcggtttcaggactgtttgcncggccggcgcagactcatcgaggaggcaggaggaggcggcggaggagaggacntcgaaccactgccgccgc

SEQ ID NO: 2001 - DNA, 294 bp, Zea mays
  misc_feature: Incyte ID No: 700345354H1
tggccgccctgttctccagcctcttagccctcgtcatgggcacggtgagtgccgcgaaggccgttgtcacggagataatcccaccggccgcggcattggtggccaacataatggcaatcgcaaccacaaccgcgtcggcgtcggtggcgtggttcatctattacgtctgtgcagtagccgctgccgcggtcgacgtggccaccgacaccctgccgtacgccgtggcggtggccaggacggcggcgtgttccgcggttcaatcctcgcggctggcgctgcaggtctgctgagtta

SEQ ID NO: 2002 - DNA, 293 bp, Zea mays
  misc_feature: Incyte ID No: 700345355H1
gccgcaagtccggcggcgtgcggttcaccatcaacggcttccggtacttcaacctggtgctgatcacgaacgtggccggcgcgggggacgtggtgcgcgcgaggtgaaggcgtcgggcaccggggagtggctgcccatgtcgcggaactggggccagaactggcagtccagcgccatcctcgtcggccaggcgctctccttccgcgtcaccggcagcgaccgccgcacctccacctcctggaacgccgccccgcgggactggcgcttcggccagacttcgagggcaagaattc

SEQ ID NO: 2003 - DNA, 293 bp, Zea mays
  misc_feature: Incyte ID No: 700345356H1
agctctacgacgtctcctgggacgtcatcctcgtcgacggcccgcgcgggtacacggcttcgtcgccgggcaggatgtcggcgatattcacggcgggggtgctggcgcggacgcgggccggggagggcgtgaagacggacgtcctggtgcacgactacgagcgggaggtggagcgggcgtgctccagggagttcctgtgcgaggagaaccgcgtcgtcgagaccagcacgcggtcgctcgcccactttgtcgtgcgcggcggtagttctgcccgccgggacgccttctgctcc

SEQ ID NO: 2004 - DNA, 111 bp, Zea mays
  misc_feature: Incyte ID No: 700345359H1
  unsure 45, 57, 82: a, t, c, g, or other
gtcacactggtgagctctgcagtctggcactgctgcttagctccncagcttcagtgnccttgcgttcgttagctgttagctncccacagtcccagcagttcccacaacaag

SEQ ID NO: 2005 - DNA, 290 bp, Zea mays
  misc_feature: Incyte ID No: 700345361H1
ttcagattcgcagtactgccttagtcaatgaaggacatgttgatgttgcaaaaaagattatcctcagagcaagattgtgtgcaactggttgtggttcaacacatgagctgggaaatataaagacagcaatattgtgtacaaaagctgatggtgtttggtggagtgtccttgttgagatcacttcagccttaaactcagccgaaaacatcatcaaaagacagtggcttctggatgcattagacattggctgtgttacagctcacccctcaacggtgctgtgttttgttggc

SEQ ID NO: 2006 - DNA, 292 bp, Zea mays
  misc_feature: Incyte ID No: 700345363H1
cccattagtgacaccaaccagtactaaacttttgaaccttttagtattggatggtggcaaaacccagtggaggagggtgaaagaaccttaaaattctaattcttaaaataaggcctctaattttttctagtcaaaacacatgcaagaaagtaatctatttagatgtgcaactatggttgttaggtgtgtttctatctctaccataaaagagttatgcaacttacattccaaatctatgctagcctagcaagctaaactaggaaataagaacacaacctagttaaacaataaa

SEQ ID NO: 2007 - DNA, 297 bp, Zea mays
  misc_feature: Incyte ID No: 700345366H1
  unsure 4, 9, 70, 76, 80, 87, 131, 134, 139, 169, 171, 174, 193, 195, 201, 207,: a, t, c, g, or other
tgangctgntgtcatctccagcggcagtgccagtgtcaggagcagcatgagtgttgactacagtggcacnaaggantcanacagcgngatgaaagctttctccgcttcataactcatacccccaaagcctngtnagccnggatgaatacgatacctccacaccaaccgnangcngtttaagcagtctggtcancntccacnagcttncatcccactctcagttcagtgctgcgcctcgccctgcacctncggaaagacctgtgccggcnatggtgcggccacctgttcccancacac

SEQ ID NO: 2008 - DNA, 293 bp, Zea mays
  misc_feature: Incyte ID No: 700345367H1
  unsure 3: a, t, c, g, or other
ggngccatcggggaggcgagggagctcacgcggcgccatggacgaggaggagcacgaggtttacggccaggaaatcccggaggacggcgacatggacggcgctgacgttgatatggctgcctccggggatgacgcggcgaactgcaggagctcgacgagatgaagcgcaggctgaaggagatggaggaggaagccgccgccctccgcgatatgcaggccaaggtcgccaaggagatgcaaggaggtgaccctagtgcatctacagctgaggcaaaggagcaggtggatgcccg

SEQ ID NO: 2009 - DNA, 249 bp, Zea mays
  misc_feature: Incyte ID No: 700345369H1
gagggatctgccgtctcccttgctccacgcgatgaacaccgacatcaccgcctcgactaagccggagtacccggtggtggatcggaacccggccttcaccaaggtggtcggcaacttctctgcgctcgactacatgcgcctctccaccatctccgccgtctccgtcaccgttggctacctctccgggatcaagccggggatccggggcccgtcgatggtcagggcggcctcatcggggtcatgggaggg

SEQ ID NO: 2010 - DNA, 286 bp, Zea mays
  misc_feature: Incyte ID No: 700345374H1
cgccacggctggaaaggctgctgagtacatcatcccatctttcaagaacattgacagttttgtcagtgagtggggaattgacaatttggagaagagggagctataccttgctatcaccaccatcctcaaagaccacaagggcatggctaaggagtactttaactttctcaataagtaccttgccacattcaaagggtcagatgatgaatcagctacaattggtgatgcgaaggaagaggctgttgcggcaatcatcgagtttgttaaatcgcctatctctttcagt

SEQ ID NO: 2011 - DNA, 287 bp, Zea mays
  misc_feature: Incyte ID No: 700345376H1
gagatttggacaatgtattttgatgaacttcttccaagattggtgaaagaaggaagtgatggtaatgctggatccaatgctctttgtgacacaacctgcttgcaggcactctccaaaaggatccactatgggaagtttgtggcagaggccaagtttcaagagtcccctgaagcttacacgccagccataatagcccaagaccgtgatcaactcatgcgccttctcacatatgaaacggtggagcgtgctgtcgaacacagggtggaagccaaagccaagatcttcgg

SEQ ID NO: 2012 - DNA, 285 bp, Zea mays
  misc_feature: Incyte ID No: 700345378H1
  unsure 284: a, t, c, g, or other
gtgaatatctcagattcttcttcagattcagatgatgaggaacatggaccaagtaaagaggactgcattcgtcagtttaaggtgatgctaaaggaacgaggagttgcaccattttcgaagtgggagaaggaacttccaaaaatagtttttgacccacgctttaaggctattcctagtcactcaacaaggcgggctatatttgaccactatgttcgcacacgtgctgaagaggagcggaaagagaaaagagctgccctgaaggctgcatagaggcgtataaagant

SEQ ID NO: 2013 - DNA, 279 bp, Zea mays
  misc_feature: Incyte ID No: 700345381H1
  unsure 265: a, t, c, g, or other
aaaagatatcatcatatcaacgaagctaggccacaagactagcctgatacaccgtgatgcctgcaccacttgaggaagaaaggttcatattgtgagacaagggatatatgtaccatatcactgctctatcaagcatcagttctcattatgattcccatggacatgtggttgtccattacacagatgttgatacaaatgttcagctcctttttaggtaccgttgctcatgttgcagcccgaggttgtagctacacaggaacacaantcagggatctgagc

SEQ ID NO: 2014 - DNA, 284 bp, Zea mays
  misc_feature: Incyte ID No: 700345384H1
  unsure 244: a, t, c, g, or other
gcttttttcaacaatgatcagctgtgcctaaagccgcaagcaccacagccggagaaatcctctcgtgtggtctcttcagctctcagacggcaagacgatgctgccgccgagctccgccgccgccgcgccgtgctcggttgcaggacttctgttccaccgattctcatcctactcgtcctcttctgtctattctgtccgccaccacgcctcgtctgctctctcctcccagccctccacccgcacnaccaccacctggtcctcttccccccattccagcagccgca

SEQ ID NO: 2015 - DNA, 281 bp, Zea mays
  misc_feature: Incyte ID No: 700345388H1
  unsure 139: a, t, c, g, or other
cccctgcttacgttacgatcaacatggcctcgagaaccaccgcgtcctcgactcctccctcgctctcctgctgctcctttcctgcgccgccgtgagcagcgcggcgcgaaggctggaggaggaggcgacgcccaagganggggagccccacctgaccgtgccggagctgccagtgccagagcacgacttgccgccgctgcccaatgtcgaaatgccgccgttcccggaggtcgagctgccaccgctgcccaaggtcgaaatgccgccgtacccggagtcga

SEQ ID NO: 2016 - DNA, 280 bp, Zea mays
  misc_feature: Incyte ID No: 700345391H1
  unsure 2: a, t, c, g, or other
gnatgacttctttataactggagaatcttatgctgggcactacattccagcatttgcaagcagagttcaccaaggaaacaaagcaaacgagggcattcatataaacttgaagggatttgctatcggcaacggtctcactgatccagaaatccaatacaaagcctacacagactatgcgctggaaatgaatcttatcacaaaatccgactacgaaaggatcaataggttcattccaccatgtgaatttgcgattaagatgtgtggtgctgacgggaaagca

SEQ ID NO: 2017 - DNA, 280 bp, Zea mays
  misc_feature: Incyte ID No: 700345392H1
  unsure 90, 93, 219: a, t, c, g, or other
ccaagtcccaccaagctgtcccccgaccactccgccgcccgctccaatggcggcgccggccagctcctcatgcttccacccacgcgcgancgncagcccgccgtcttctctcagcgtcggcaccaaggtcttcgtcgggctcagggcgcagaccaagctcggttcgtcggagtcgtcatgcccgaatgtcagcgctgggttccacactgcggtcaaccngagaatctctctcaggttgtccaaaaagaaggcgaccagagcccgcatctcgatgatgcct

SEQ ID NO: 2018 - DNA, 274 bp, Zea mays
  misc_feature: Incyte ID No: 700345393H1
gacgtggtctacaagtagctgttgctggtattcccaagactattgataatgatatagcggttatagacaagtcatttggttttgatactgctgtagaagaagcccagcgtgccattaatgcagctcatgtggaagcttcaagtgctgaaaatggaataggtttagtgaagctatgggtcgctatagtggatttattgccatgtatgctactcttgcaagcagagatgtggactgctgtttgattcctgagtcaccctttattggaaggggaggg

SEQ ID NO: 2019 - DNA, 280 bp, Zea mays
  misc_feature: Incyte ID No: 700345394H1
aggggatcgaagcggagagcaagggagcggtcgagcgggtgacatcatcgtcatccagggtttctcaatccggcagcgatggcgaccagggcggcggcgaggttcctgcagcgcagtttctgtcttccggcggcaaggtcctcagcgaggaggagaaggccgccgagaacgtgtacatcaagaaagtggaacaagagaagctggagaagctcgcacgcaagggccccagctcaggagagcaacccttcgtcaaccacaggctctgcagcaagtgatgtga

SEQ ID NO: 2020 - DNA, 268 bp, Zea mays
  misc_feature: Incyte ID No: 700345395H1
caagatccaagaactcgctcgcgcgcacggacagggccggaacccagggatcgagactgaacagcagtccgagacgccatgaacgtggaggaggaggtcgggaggctcaaggaggagatccataggctcggccagcagcagcccgatggctcttacaaggtcaagtttggcgttctcttcaacgacgatcggtgtgcaaatatctttgaagcactagttggcaccttgagggccgccaagaagaggaagatcttgacctacgaaggcg

SEQ ID NO: 2021 - DNA, 282 bp, Zea mays
  misc_feature: Incyte ID No: 700345396H1
aaactggagctgcccaagaagctataaatggtattagacgggctagcaaggccatgactgagcaagaagcccggcaaattcttggtatcagtgaaaattcgacgtgggaagagattgtccagaagtacgacacaatgtttgagaggaataacaaaaacggcagcttctatctccagtcaaaggttcatagagcgaaagaatgcctggaacctttatatcaaaagcctgatgtactgaactgagattttgcagacgccctagcttctgttgaagcggtatgcc

SEQ ID NO: 2022 - DNA, 138 bp, Zea mays
  misc_feature: Incyte ID No: 700345403H1
  unsure 130-137: a, t, c, g, or other
agcgtgccattgatgatatactgaaatgagttgatcagtgcaattctttgacatctaactatttattattatatgagatgggaggaactgatggagaataaatgctgctgtagatttgtagaagttcaannnnnnnng

SEQ ID NO: 2023 - DNA, 293 bp, Zea mays
  misc_feature: Incyte ID No: 700345404H1
  unsure 33, 88: a, t, c, g, or other
gttgtgcgaagaaaccacggatctgctgcagangttgtcgctggattcgcagcccaaggcggcgggtgcgacagagcctgctgctgcngccgctgccgccaaggagggtgctgtgacaaaccagccgctgagtgtggccatcccgccagagcggtctatcacgccggtgcttcaggactttatggatcccaacctgttctatctaccagcgtattactatggaggctacgacagttccatgagcgagtgggatgattatccaagatatctaaattcagatggagtggagttgc

SEQ ID NO: 2024 - DNA, 292 bp, Zea mays
  misc_feature: Incyte ID No: 700345405H1
accgagcggagtctagactcgagagcaacctcgacctcccggatctctctcccacccacgcctcgtcggcgccgtcgtctgctgcagcgatggcctcccccgacctgctcttcaatctgcggaacctcttctacctgggcgcctaccaggcagccatcaacaacagcgacgtcccgggcctcgacgccgacgccgccgctgagcgcgacgccatcgtcttccgctcctacatcgcctcggctctaccagctggtgatcagcgagatcgactcgtcggccgctactcgctgca

SEQ ID NO: 2025 - DNA, 293 bp, Zea mays
  misc_feature: Incyte ID No: 700345406H1
atcctaccccgcggggggggattctcagttctctcggcgacgactgggagactgccgccgccgccatcccaggtgccctgagaactcgatcgggctcttcgctggcgacgaacacccaccagctatcaggtgtacaaccatgtacttcaccgtgtccgcccctgcaatgtctctatgatcctccagctacggtagacgccccgttcgctagctgaggacctcctggttcctgtgagcaggcggcgtggttagctgctgccttcaagcatgcagagacccaatgcgccgtcggt

SEQ ID NO: 2026 - DNA, 294 bp, Zea mays
  misc_feature: Incyte ID No: 700345407H1
  unsure 2-3, 79: a, t, c, g, or other
gnnagaacatgattcagatgatgtgcagtaaagctcccacctgccagccccttcgataacttcctgaaggctgcctatncgcacccagcccgagctgtgatcgatttacctaagaacaaccctcttcacgagtgctaggctgcagtaccaaagcatagggtactagattatctaaaggaacttatctatgacgttgttttagttgtagtagcgtaactatgtgtatcatctactagatgtctgtaacgtttgcatatgtatcatcttacgactgtgcctctgtagttgtaagcc

SEQ ID NO: 2027 - DNA, 292 bp, Zea mays
  misc_feature: Incyte ID No: 700345408H1
agcacctgccccatcttaaagacgagcctgtagatgtggcactcgtgttgtgcctgcgcctgcttgtctcttctgctgtcgccgtcgaccgactgctgcttgtgtcgtgtgagtgccctggtgttgacgccaaactcaaggcttgtgcgttgcgaggatgttggctgattatacattgtcaggtcttgtgaaattaatcatgcttcatctggaccatcgattaagtaatactacaaaaaaatcagattcaggtttggtcatatctgatgtactaaaatccaggtgaataaga

SEQ ID NO: 2028 - DNA, 295 bp, Zea mays
  misc_feature: Incyte ID No: 700345409H1
gtgtccttcctccatcttcctcctccactccactcccaagtccccaccacccccaaccccgtctctccactgcggcgcaggcttcgcttcggctccgctcggctcgagcagaagaaaatgcaacgggcagtgcaggccgtcaggtcacacggcaatgttcttaaatatgctgttctacaacacatcagcgctcccaagccagcaatgcttcctgctgccttttctcgtttcatgtcagtttcatctgctcgcctagaggatcgtggatttgaaactgccactgtagcagatgtct

SEQ ID NO: 2029 - DNA, 295 bp, Zea mays
  misc_feature: Incyte ID No: 700345411H1
cgaaggaagaggcagccttctcaccgtcgcacccggcgatgcagcggcacgttgcctccggccggccgttcgggcacggaacggctccgacttttcttaccgcatggtcgtcgaatcccggtaccagagggtcgccgagggcagatcccgcctcgcgcgcctcatcctcgtgcaggcgctgcacctagtggccggaggttgcttctattgctgtcgttgtccaagggggcggcggtgaacaagttcgccgtgctgtccatggccgcgggattcctggctatatggtgggggaata

SEQ ID NO: 2030 - DNA, 296 bp, Zea mays
  misc_feature: Incyte ID No: 700345412H1
caataatatataacttatattatcatataaaggaacatattagcttttacttccatacaagcttaagagtttcttcaacagatccatttcatgggtgaacctgcatcctggtctcaaaggaatggacctttgatttggccagtttggggctgtattgctgtaatttacaaagagcaatcctaaagaaaacatataaacatgagggatcagacatcggtataatcggtttctactgtagtaaaaaaatacaggctgctagttgctacaccgcaagcatatattgtgcaaaaggttgc

SEQ ID NO: 2031 - DNA, 154 bp, Zea mays
  misc_feature: Incyte ID No: 700345419H1
  unsure 18-19, 141, 153: a, t, c, g, or other
tcggttcttgagattttnntttgtggattgccgatgggttggtttaccggtttattagagcgcatcatctggccgtcggattggactgcggacggccgggtgcagaaaggaatgctgcgatagagttcattaacctcagtngcatcgatcatnt

SEQ ID NO: 2032 - DNA, 282 bp, Zea mays
  misc_feature: Incyte ID No: 700345422H1
atggaattacttaatcaatcagatggagctggtgaagcattgttgaaaatgctctggcatcatccagatgctgttctgtgctgctcctttaaggagaaacctatgtttacgtttgcaaacaaggcagggctggacatgttagaaacatctcttgttgccctgcaagacctgacgctagacaagatcttcgacgagtcaggaaggaaagcactattctcagactctcgaaactatggaacagggctacgcgtacctgccgtcagcgtgtgcatgtcagatggg

SEQ ID NO: 2033 - DNA, 103 bp, Zea mays
  misc_feature: Incyte ID No: 700345423H1
  unsure 2, 5, 19, 25-26, 30, 52, 60, 91: a, t, c, g, or other
tntgnaagtacactcgtanggtttnncagngttcgatgagcttgtagggtanacgccctnaccccgttcctgttagcagatacatctaacnaccgctcacgga

SEQ ID NO: 2034 - DNA, 255 bp, Zea mays
  misc_feature: Incyte ID No: 700345424H1
  unsure 12-13, 48: a, t, c, g, or other
gtcgtcgttganntgtttgagaaaatatttacgaatacagaaattgtnttgttctaagacttttctgtagcgaccttgagaaatttcccttaagggcttgttcggttatttttaatccatatggattggaggggattgatacggattggagaggattttgacttactgaggattgaaacccgctcaatccccctcaatccatatggattggggtagaaccaaacaagccctaagtgtcaacttcatccatcgaga

SEQ ID NO: 2035 - DNA, 219 bp, Zea mays
  misc_feature: Incyte ID No: 700345429H1
  unsure 33, 80: a, t, c, g, or other
caaaaccctacctaccctcttcttccccttcantctcctttcatctccattctaatggcggcccaacccgtccggcgaantgctagtgcttgtatctactatcttcatcaggtacttcgcgatcctactgaagtattccccgccgccgctgccatggccaccctcaaccctttcgaactccttggcgccgacgacaacgacgacccgacgcagctgatt

SEQ ID NO: 2036 - DNA, 290 bp, Zea mays
  misc_feature: Incyte ID No: 700345430H1
  unsure 32, 44, 51, 63, 233: a, t, c, g, or other
cagattgtgaaagtgagatgtcggtgcaaacngatattcctatnccatgtnccacatactgancaaacaagatgtgctaaaatgtgagtctctatggtagttctgtttgtcagtatgtgtacatgcataggaatatcagattgtgaaagtgagatgtcggtgcaaactgaaatgataaagacattgtggacatgactgtggacatgactgtgatgcaactatttggatcctantgattctgtggttggtacttccatacatagaattttactgaaaattatcaaggtaaa

SEQ ID NO: 2037 - DNA, 297 bp, Zea mays
  misc_feature: Incyte ID No: 700345431H1
gtggtttccaaagccaagtgtgtgtactagcaaccagctagctcgggcggcagcaggcagccatcatgtcggaggagaagcaccaccacttcttcaaccaccacaagaaggacgaggagcagcccgccggcgagtacgggtactccgagaccgaggtggtcaccgccaccggcgagggcgagtacgagaggtacaagaaggaggagaaggagcacaagcacaagcagcaccttcggcgaggccggcgccatcgccgccggcgccttcgcactctacgagaagcacgaggcgaagaag

SEQ ID NO: 2038 - DNA, 172 bp, Zea mays
  misc_feature: Incyte ID No: 700345434H1
  unsure 12, 22, 136: a, t, c, g, or other
cgcgtgtcagcngatggaaganctgcgggccgccgtgacggcgcacttggaccaggtagcgggcctcgtgcaggcgctctcctccgagctccgccgcggcataggtcccgccgccgacaacctgcgcgccttcatnccgcgccgttgactggacggagccatggctcatgtg

SEQ ID NO: 2039 - DNA, 227 bp, Zea mays
  misc_feature: Incyte ID No: 700345435H1
  unsure 107, 199-200: a, t, c, g, or other
atctccgctgcctggtgccctggtatatcctcggcgtcgcggcttgcttcttcaccggcgccgtgacctgattcttcgaaagcacggcggcctggttcttcgacggnacggcggcctgccggttttgtccaggcaggcagacgtggcagcctaccagtcttctccaggcgagtggatctccagcgctcctcgagctganngcaggcaggcgtgccggtcttctccag

SEQ ID NO: 2040 - DNA, 278 bp, Zea mays
  misc_feature: Incyte ID No: 700345436H1
aacctacctgctccattttatgcttctccctcgctcgcctcgccctcgccgcaacgctttgcgatagagtttctgtctgctaccagcaccatcctagcaccccaccgcgtctagggtttcctgctccaatggccgccgcgggggcagacggggagcgcaggatcggggtggccatcgactactcggagagcgccaagaaggcgctggactgggccatcgacaacctgctccaccacggggacaccctcgtcgtcgtccacgtcctgcaccaggcgcgg

SEQ ID NO: 2041 - DNA, 276 bp, Zea mays
  misc_feature: Incyte ID No: 700345437H1
  unsure 232: a, t, c, g, or other
ggtacatcatgtgcaagagggcgacgatgggctggaatctcattgcttactcaatggaactccaaagttacaagggttgattgcaagaatagaagcacttcaagtggttgtattaaatgctaaagatcgtcaagatcgtgaaacagccgagtctgcagctaaactggcggcagcaagcgcagaaattcaagagcttaaaacaagaggcggctcacgcatggaggcaaaagantatgttctgacatgagaaacaagatgttgaggtctccaaaggga

SEQ ID NO: 2042 - DNA, 279 bp, Zea mays
  misc_feature: Incyte ID No: 700345440H1
  unsure 71, 73-75: a, t, c, g, or other
ccgagacgtcaggctgcagcaccacatcctccactaaatcccagataagcaagtattccacaagaacatgnannncataaggcccccctaatgtcagccatccaatttctgttgacaagtgcctggctcactgtatgccgttttgcgaccctttttggaatcatctgaacaaattaggtgctaattctgccactatcttcccggtagccaacaatcagtccaaaattttgcacgaattcccatccccaatagcagtgatcatgcagcatcaaccaaggc

SEQ ID NO: 2043 - DNA, 277 bp, Zea mays
  misc_feature: Incyte ID No: 700345441H1
gcattgtgaagctttactattctttccaagacaccgagtatctttacctaattatggagtacctccctggtggtgatatcatgacccttctcatgagagaggataccttgactgaacatgtagcgcgattctacattgctgagacaattcttgctatccaatccatccataaacataactacatccacagagatattaagcctgataatttgcttctagataaaaatggtcacatgaagctgtcagattttgggctgtgcaagccattgactgctca

SEQ ID NO: 2044 - DNA, 280 bp, Zea mays
  misc_feature: Incyte ID No: 700345443H1
  unsure 76, 191-194, 253: a, t, c, g, or other
ccaggctcctcgacagtcgatagcctcccaagtcccaactcgacctgagccgattcggaaggacggtttgcctacntctggttccggcggccatggcggtggcggcccctggccagctcaacctcgacgaggccccgtcatggggctcccgcagcgtagactgcttcgagaagctcgagcagatcggcgannnnacctacgggcaagtgtacatggcgaaggagacgggcaccaacgagatcgtcgcgctcangaagatccgcatggacaacgagcgcga

SEQ ID NO: 2045 - DNA, 282 bp, Zea mays
  misc_feature: Incyte ID No: 700345444H1
  unsure 44, 193: a, t, c, g, or other
gcgtcgcaagggcaggacggtgccgccgtggaggaagaggacanccggtggcggcgactacgacactgtgctgaaggcccacgctagatccggtggcggcgactacggcgccgtgccgaaggcccgcgctagatccggtgccagcgacgggttgctgcatgactgtcttctcatgtatgaggtggtggaggcnccatgtgtgaagaaatacaagaatgtttatgtggtgagcaccatctcagagttctcatcctcgctggagacagcgggtgggcatggcgg

SEQ ID NO: 2046 - DNA, 285 bp, Zea mays
  misc_feature: Incyte ID No: 700345447H1
gacattctaccagactcctcgcaagctcacggggaagtacgccagcgagggctacttcttccagaacatccgagagagccggttccgcaccgatgaccccgaccaggcgcacctctttttcgtccccatatcgccccacaagatgcgcggcaagggtacttcatatgagaatatgacggtgatagttaaggactacgtagaaggtttgataaacaagtatccttactggaacaggacactaggagcagatcacttcttcgtcacctgccatgatgtgggtgtgag

SEQ ID NO: 2047 - DNA, 158 bp, Zea mays
  misc_feature: Incyte ID No: 700345450H1
  unsure 149: a, t, c, g, or other
gcgatgtaggattcaagggttttgctgtccccaaagaatcacagggcaaagttgcagaattttgcgttccatgggactcctgcaaagataaagcatggtgatgttgtaattgcagcaattaccagttgcacaaacacatcaaatcctantgtaatgct

SEQ ID NO: 2048 - DNA, 274 bp, Zea mays
  misc_feature: Incyte ID No: 700345451H1
  unsure 79, 224: a, t, c, g, or other
gaaagatggcaaaagtacagatgtctctgacaagaggcaaacaagtcaaaatacctcgcaagtgcaagaagcgcaaganatcaaaggttggttctgttgacatgccttccgtggatgcttctggtgaaaaagatcatcggtatagtgaaaatgcgaccaaacaagatacagcttctactaaaagggagattgtccacgaacctctatgcaacagatgtcaaacntgtgcatcagggggttcaatgtaatagaaaatccaagtggtgatggaaag

SEQ ID NO: 2049 - DNA, 284 bp, Zea mays
  misc_feature: Incyte ID No: 700345452H1
ggctgtgatgttttccttgtgcaaccgtcgtgtcctccagcaaatgaaaatcttatggagcttctgatcatgattgatgcctgtaggagagcatctgctaagaatatcactgcagttatcccttattttggttatgcaagggctgacaggaagtcccagggcagggaatctatagctgcaaaacttgtagctaatatgattaccgaagctggtgccaaccgtgtccttgtttgtgatcttcatctagtcaagcaatgggatactttgacatcccagtagatcac

SEQ ID NO: 2050 - DNA, 283 bp, Zea mays
  misc_feature: Incyte ID No: 700345453H1
  unsure 65: a, t, c, g, or other
gctcgggaagccgttcctccgctccgcctcctacctcaaggaggccctcctcgcgctcgccgaangcatccacggcggctgccacctcaaatcaccgctcgacgttgccctcaagctcgcggcgtacaagactttctctgaccactcgcccgtgctccagttcaccaacttcaccgcaacgcaggcacttcttgacgaaattggtggcagcacgtcgtcctgtatccatgtcatcgattttgatcttggcgttggaggccatgggttctttcttgcaggaact

SEQ ID NO: 2051 - DNA, 276 bp, Zea mays
  misc_feature: Incyte ID No: 700345454H1
  unsure 14: a, t, c, g, or other
ggaggacgcaaggngggtagtggaagccttttggtccgcaacatcccattaagtgtcagagcggaggatcttcgagttccttttgaaaggtttggccctgttcgggatgtttacattccaaaggactattactctggggagcctcgaggatttgccttgtagagtttgttgatcctacgatgcctctgaagcccagtatcacatgaatcgccaagttttctttggtcgggaaatagctgttgttctgctgctgagtcagaaaaaggccagaagaaa

SEQ ID NO: 2052 - DNA, 277 bp, Zea mays
  misc_feature: Incyte ID No: 700345456H1
  unsure 222: a, t, c, g, or other
gacgatcccaaccttttgtggagattatggttcaacaaaactagcagctgaaacaaaccaagtgaggttgacacagcaaggaaacagccatgaccatggcgattatatggcgacggatgggatggcaggcgaagaaggcgaacgcaatgaggttcacataaactgtgaaaccaaagaagtttccattcatataaaatctgaagattgtgatgcagcaagccntggcaaacagaccatgaaacggtgaggctggggtcttcccacaatacatccgatg

SEQ ID NO: 2053 - DNA, 272 bp, Zea mays
  misc_feature: Incyte ID No: 700345459H1
  unsure 112, 243, 255: a, t, c, g, or other
tgaactaaaggaagaagttcaagaagcaccaagagtgaaaatgttgcattgcccaagcaaggcaatggacattgagaacgagatccaagttctgtgtgatcaactggctaanaaatctcagattctctcgccttttgaaagagttggagctgcatcgaagttacggggaaaatgacatgccctgtatgaactaaagggtctagaaacttaggctcaacgtcggcacatagttgttcacgatgngcctctgtagtntctggaacattcaatcc

SEQ ID NO: 2054 - DNA, 288 bp, Zea mays
  misc_feature: Incyte ID No: 700345463H1
  unsure 62: a, t, c, g, or other
taatcagctttgcttcagttcattccaagagcaatcatgttcatctaaccattatgagaacnacactaaccattcacacaaatgggttcgacatgaagcatgatgtaaagattgccaagtacaaagcacggaaaatggcacagttaaagagggctatccatccatctcttgactcgacaatgcaaatggagtaaataggatgaagcctcactgaacaagctgcaatcttccatattggaaagaaccacagtttccgtgtaccgaccggtgaccgaagcccgtgtaaag

SEQ ID NO: 2055 - DNA, 286 bp, Zea mays
  misc_feature: Incyte ID No: 700345465H1
  unsure 103: a, t, c, g, or other
catcggtatcgctgtcgcggacgctaccgacgcggccaggagcgcttccgacattgtccttactgagccaggtctcagtgtcatcatcagcgctgtcctcacnagcagatgcatcttccagaggatgaagaactacaccatctatgcagtctccatcacaatccgtatagtgcttggatttatgctcatgcattgatctggcaatacgattctccccctcatggtccttatcatcgccattctcaacgaggcactatcatgaccatctctaaggacagagttaagc

SEQ ID NO: 2056 - DNA, 286 bp, Zea mays
  misc_feature: Incyte ID No: 700345466H1
  unsure 2, 18: a, t, c, g, or other
gngcaacacgcgcctgcnttcccggtccagccccctgcccccaggtgttgcgtcccccgtcgatacgccactcgaccctgctggtggagtgagtgccggtgatccatccggagttggatttgtcctcggcaaggaggttttgcaccatacaagatcgtcaaaattgccgaaatgggaggtataattagtggggactcgcctaggcacagctcaccagcatcgaattagagaaaaagatggttgacgctatgcaacagagggcttaaaaggaacctctgtgaaatca

SEQ ID NO: 2057 - DNA, 281 bp, Zea mays
  misc_feature: Incyte ID No: 700345467H1
  unsure 275: a, t, c, g, or other
ctgcggggccgctgcgcatccgagctgctcggggaatgcacacaaggattgcaagtgtgtatctatggctggtttgggccatgtgcttcaccagtgggctgtacaatggattgacagcgcggatcactctgaagaagactctttctgttgccactgtgatgaatcttgcaatggagctttccttgcaggctcaccagtttggtactgtatgtggtgtcagcgactggtgcatgttgattgtcacagcaagcttggccaaggaactggtgataacnggtact

SEQ ID NO: 2058 - DNA, 282 bp, Zea mays
  misc_feature: Incyte ID No: 700345468H1
  unsure 2, 6, 50: a, t, c, g, or other
gngcangcgaccatcgacaaagttgatctagatctagaggttgtcagtgnatgaagtcggtggggaaggcggagttggcatggatgcttccaacatcggaggccatgaggaccacatagcgcgggcgctcggcgtcggcggtgaagaaggcctcaaagttagcctggcgggtgaggtcaagcttggcgtgggtgtgggccacgacgcaggtgaagacaagcatgaggaggcgacacacgatggtttaaccgacaagatcgttgcgcccgacgacgaagacct

SEQ ID NO: 2059 - DNA, 276 bp, Zea mays
  misc_feature: Incyte ID No: 700345469H1
  unsure 114: a, t, c, g, or other
atggaagttgatagggttctaaggcctggtggctactgggtgctgtctggccctccaattaactggaaggtgaactacaagggctggcaacgcacaaagaaggatcttgaggtngagcagaacagaatagaggaaattgctgaccttctatgctgggaaaaagtctcagagaagggcgagatggcgatatggaggaaaagggtgaataccgagtctgccctctaggcaagaagaatcagctgtgcagatgtgtgaatcaacaaacccagatgtgtc

SEQ ID NO: 2060 - DNA, 276 bp, Zea mays
  misc_feature: Incyte ID No: 700345470H1
  unsure 52, 66, 150: a, t, c, g, or other
cggagcagccgcagtcccaccgaccccgccgccggtcgccctccatctcctncgccgctgcctctncgtttctcttttcaataatcaagatgagccgtggtggtagtgccggtggtggtcaaagttctctgggttatctctttggaagcngtgagccccccaaaccagcagtggcaccagctgcaagtgctccacctgttgagaaaccatctgctgcaaagactgatgcggccaagcaggttgctgctggggttaccagccaaaccaataatacca

SEQ ID NO: 2061 - DNA, 276 bp, Zea mays
  misc_feature: Incyte ID No: 700345471H1
  unsure 33, 36-37: a, t, c, g, or other
gtttctgactgctcgtttattaacaatggaagnagnngcccaagatgcttaaagaggcattgacaaagcgaaacagtgagctgcaatcttcaagaagcatgtatgctaagacagcaggaaagctccgaagctttgaagttcatatgttgactggaaaccaacataagagtccaactatgaacatggatattccattttgatggtgcactgagccaaaatggaagcaacccacctagcatgactccatgtctgaagatggggttgatgatgaaggaa

SEQ ID NO: 2062 - DNA, 271 bp, Zea mays
  misc_feature: Incyte ID No: 700345472H1
  unsure 2, 127, 143, 206, 215, 268: a, t, c, g, or other
gngactgcctccttccctcgatctattctccatcttgtcctccctttgctaaaaataacgaggcagaggcatcttcgatttgacgtgcgcttcctcttcctcgctcgctctcggtcgcagtgatggntgatgtcgacgagtancgttgcttcattgggaacctgtcctggtcaacgactgatgaaagcctcaaggatgcgttcagnaaattcggnaacctcatgaggcaaaggtggttcttgacaaattttcaggacgttctcgtggnttc

SEQ ID NO: 2063 - DNA, 273 bp, Zea mays
  misc_feature: Incyte ID No: 700345475H1
taccgcttccttgtgcgcaggacaaagagcaacttcaacgccgtgatcctcaagcgcctcttcatgagcaagaccaaccgcccgccgctctcgatgcgccgccttcgtcaggttcatggaggggaagggtgatcagatcgccgtgattgtgggcaccgtgaccgacgacaagaggatcagcgaggtgccggcgatgaaggtctgcgcgctcaggttcatgagacagcgagggccaggatcatcaatgctggcggagagtgcctcaccttcgac

SEQ ID NO: 2064 - DNA, 274 bp, Zea mays
  misc_feature: Incyte ID No: 700345476H1
  unsure 79: a, t, c, g, or other
gaagccatgagcagcaaagtctctcgcgacaccctgtacgaggcggtgcgggaagtcctgcacgggaaccagcgcaagncccgcaagttcctggagacggtggagttgcagatcagcttgaagaactatgatccccagaaggacaagcgcttctcgggcaccgtcaggcttaagtccactccccgccctaagttctctgtgtgtgtcctgggggaccagcagcactgtgacgaggctaaggccgtggatatcccccacatggacatcgaggcgc

SEQ ID NO: 2065 - DNA, 279 bp, Zea mays
  misc_feature: Incyte ID No: 700345477H1
  unsure 65-87: a, t, c, g, or other
tcctgctctcactctcctcccacccactccagaaaacctcacaaaaaccctcgctccccacaacnnnnnnnnnnnnnnnnnnnnnnntgtaccagcggcgtcaagatgagtcggcaccctgaagtgaagtgggctcagaggatcgacaaggtttacatcactgtacagttacctgatgccaaggacgctaaggtcaatttggaaccagatggtgtcttcacattctctggcagtgctggtacaaacttatatgaatgaaactagatctgaatgacaaag

SEQ ID NO: 2066 - DNA, 147 bp, Zea mays
  misc_feature: Incyte ID No: 700345478H1
  unsure 10, 44, 100: a, t, c, g, or other
ctcgccagtncccaactcgaacctcagtgcaggcagcgtgaggngggagagttcaaggaccgaggcggcgtcgggcgagatgaagcttaacgtcaagacntcaagggcaccaacttcgagatcgaggcgagccccgatgcatcggtt

SEQ ID NO: 2067 - DNA, 289 bp, Zea mays
  misc_feature: Incyte ID No: 700345480H1
gggcgacctccagaaaaggatgagcgtcctgtcatcaaggatgcaatcccaaaccttttctttgccaaccagataattaacaaagcctgcgcaacccaagctatcgtttcggttctcttgaactctcctggcattacccttagtgatgagcttaaaaagctcaaggaatttgcaaaggatttgccacctgagctcaaaggactggctatagtcaactgcgcaagattcgtatgttaaacaattcgtttgcgaggtcagaggcctctgaggagcagaaaccacctagcgg

SEQ ID NO: 2068 - DNA, 52 bp, Zea mays
  misc_feature: Incyte ID No: 700345482H1
  unsure 2, 7, 16, 18, 48: a, t, c, g, or other
gnccggncatttagancnccaaacatgttaccagtttcaaaacaaaancgaa

SEQ ID NO: 2069 - DNA, 271 bp, Zea mays
  misc_feature: Incyte ID No: 700345483H1
  unsure 256: a, t, c, g, or other
gcgtggcaaggcaacgagagcaacgaagagtattcaaaccgaaaacaatggatccggtgcggaagagcgtgtgcgtgaccggcgctggcggcttcgtcgcgtcggagctggtgaagctcctcctctcccggggccaatacgcggtccgggcaccgtgcgcgaccctggtgctagcaagaatgcccatctcaaggtgctggaaggagctgaggaaaagttgcagcttctcaaggctgatctgatggatacgacagcntgcatcagcagttgc

SEQ ID NO: 2070 - DNA, 270 bp, Zea mays
  misc_feature: Incyte ID No: 700345484H1
gggcctgcaaggactaacaaaaggtgacagaaagtgaaaatacacgccggtgcaatgcttcatttggactggacggattttggacttaacgagactgatgcatgaatcatgatgacatgagaccttcgtttagcacactgccagctataattctctagcttttgtgtagtagaatttggaaacatgcgttgctgttggattaggcgtctgtttgtaaataggtgtccctcgcatcaaatgttgcagcttaggccctggggatccatagct

SEQ ID NO: 2071 - DNA, 271 bp, Zea mays
  misc_feature: Incyte ID No: 700345485H1
ggcacccctggtaggcttccactgccactgagaatttggttctgggaagagagaaaggctgcacgattcttcctcaccttggcctcactccttgcttccatgcttgacattgaacacggagcaagctcctgaacttgttgccgaggaggccacactcttgcgctgccttggcaatgggggaggttgttgctgcttcctccctggccctggtgctgctcttcttctgctcttgcgggcctgcaagcggccttctctcccccaagggtgtaaa

SEQ ID NO: 2072 - DNA, 267 bp, Zea mays
  misc_feature: Incyte ID No: 700345488H1
  unsure 234: a, t, c, g, or other
cgtcttgtgttgttcggagcgggcagcagcacacagccccatcccaatcctagtcgatcttcttcccctcctcaaggaagaaaagaagctgaaccatggggaagagaaagtcagctgctaagccacctcctaagaagcggatggacaagcttgacactgtcttttcctgcccattctgcaaccacgggagtagtgttgagtgccgaattgacatgaagaatctgattggcgaanattcttgtagaatctgtcaggaaaacttcagca

SEQ ID NO: 2073 - DNA, 269 bp, Zea mays
  misc_feature: Incyte ID No: 700345489H1
  unsure 36: a, t, c, g, or other
ccggactggttcctcaacaggaagaaggattacaangacggcaggttctcgcaggtccgtctccaacgcccttgatatgaagctcagggacgaccttgagaggctcaagaagatcaggaaccaccgtggtctgcgtcactactggggcctccgcgtccgtggccagcacaccaagactactggtaggcgtggaaagaccgttggtgtctccaagaagcgatgagctctatatcaccctgagaaatcttggccgcataccgtgttggttt

SEQ ID NO: 2074 - DNA, 265 bp, Zea mays
  misc_feature: Incyte ID No: 700345490H1
ggtgactcggagaaactagtgaaagtgttattcgaacttgcaaggcatcatgcaccatctactattttccttgatgagattgatgctatcattagtcaacgtggtgaagctcgtagtgaacatgaagctagccggcgattgaaaactgagctattaatacagatggatgggttgactaagacagatgagctgtttttgttctagcagcaacaaatttaccatgggaattggatgcagcaatgctgcgtcggctggagaagcgtat

SEQ ID NO: 2075 - DNA, 264 bp, Zea mays
  misc_feature: Incyte ID No: 700345492H1
ctcttcccctcctcgcccgccgagaggccgcccgtcctccgtccgctgtcccagcgagagctttaagattgtgcagacacataatttggatgctcctgcctatgcaagatgtcaaccaccagagatattgtttagtgctgggaaagttatgcagttttggatcataaattctacatagacaagataattatggaccgtgcagacacatcagggtttgtcagtggtggttgctttggtatacactcctgctgatattcttcattc

SEQ ID NO: 2076 - DNA, 268 bp, Zea mays
  misc_feature: Incyte ID No: 700345493H1
atgggcacacaagccgagagttgggaatcagttagactttgtgatatggcacctgaagatataagatggggatttgatggacacctttcaaatcgtgatgtctggagcccttctggccctatgttgatgaggcacatgaccaacaatggtgctatggcaggttcaatcaagggaagagggaggttatcaataaatgagactataaaggactatgctccacctgaaaatggcaccaataggattttgatcagtcgacataccaaatacc

SEQ ID NO: 2077 - DNA, 118 bp, Zea mays
  misc_feature: Incyte ID No: 700345494H1
  unsure 52: a, t, c, g, or other
cgatccgtccgtgggatctcgcgcacgccaggattggagagccgcggcctcnccccgccccaaccagccatgggttcccgcgcggatcgcggctcttagacgcggaggaggagagaga

SEQ ID NO: 2078 - DNA, 297 bp, Zea mays
  misc_feature: Incyte ID No: 700345503H1
  unsure 37, 175: a, t, c, g, or other
gcagtctacgtggcagagattgaagttttccactgangcagagcaggaccccatccatccttctctgatgatagatggggtccttctctgatgatagatggggtcctgctctgcatcagagaaggatggatggactggttgaacaaagaggtcgccgaaccacgagatatgcaanttctagcacaagttccgagtgaggtggtgccatgccaatgacagtttttagaactcagtcagacattgttgatttgaactattgtatttgtatcatccttcacaagcagcatatttgtcatg

SEQ ID NO: 2079 - DNA, 297 bp, Zea mays
  misc_feature: Incyte ID No: 700345504H1
gcgtgctaccacgaccccgtggccatggcccacatccgcgagtacaccctcaagccgctctcggagccggcggtggcgcccgtgtgcaccaggaacaactctgtccctggcttcctcttctccaacggtggcttctccggcaacctgtagcacggctacacagatgtgctggtgccatttgttcatcaggagtcaggacgcaccagttccggggcgggtgcagctcttgctcagcgggatgaaggacgaggatataactcgaaaatgacaacaatggacgccgaagctataacccaa

SEQ ID NO: 2080 - DNA, 297 bp, Zea mays
  misc_feature: Incyte ID No: 700345506H1
  unsure 64: a, t, c, g, or other
gtggcattgaggagatcctaccacttggaccattaaatgagttcgagagatctggtctggaganggcaaagaaagagctggcggagagtatccagaagggcgtctctttcatcaagtgaggccggcgacggccagcccaacatagaaatagatgtggcgtgtttctgcttcttgagaactcatcttgttatctctctgtaagactgagtgcatgacacgaataatccacgtacacggctgtactaaaaagatgatgaatctgtggtggctaaaaaaagggaaatagaaaagtctggt

SEQ ID NO: 2081 - DNA, 187 bp, Zea mays
  misc_feature: Incyte ID No: 700345508H1
gatatccgaaagtttttggacggtatctatgtgagcgacaagggcgtcatcgaagaggagcagtgagcgacagagtagccgaaatgccaggagatgaatatgaatgtcgtttgagttgcaattttgtgagattggatgtgaacctttttctcattccttaaatagttgactgccagtgttcgtggtt

SEQ ID NO: 2082 - DNA, 296 bp, Zea mays
  misc_feature: Incyte ID No: 700345509H1
gacatttgagagaattcttaaggagactgtcatagtaagagatgagcatgcaaatgacatgcctctttttcaagccatagggatcgtgcttgacaggaatccgcatatgaagctgcagggcctggaatatgaagtactgcagtggtgcatatgtaggctggaggcatggttcgctactgacatggacaatatatctctgaaaacttgggatcaggaacatgtgcttaccggcggacatggtcttatggtgaatggctacgaccctgtcatcagagctctcgctcaaggtctagata

SEQ ID NO: 2083 - DNA, 300 bp, Zea mays
  misc_feature: Incyte ID No: 700345510H1
  unsure 41, 66-67, 76-78, 92, 100: a, t, c, g, or other
ccaaagccaaaaccccaatcgcacaggagagaccgagaganaggttttccatccatggctcccggnnttgcttccnnnctggttccgcaggnttcccgtnctcctcaaggacatcctcgcctcaccgtccccctgcgggaacaccgctgtctccgcccgccacctcttcggcaacggagtcgcaccgccacgctcctcggacgacggcatcaaggaagccgctgccgaccgccacggtgaccgcgacctctccatccccaagatcttcaccggagacgtgctggacctgctcgacgatgc

SEQ ID NO: 2084 - DNA, 296 bp, Zea mays
  misc_feature: Incyte ID No: 700345511H1
  unsure 88, 127: a, t, c, g, or other
gtttctctctgtttcgtcctcatcgaatcggagtttcgcatggagtcatcgcggtctcggaagcggacgcgccaggcgcatgactgtnccgccgcgccgccaccagagcgagaagtggtagcgaggngtggcgcgtcgccaccatggagggaggatgaccgtgatggacacttcgtattcgaccttggcgagaacttgacccgccgatataaaatcttgagcaaaatgggagaaggtacatttgggcgtgttttggaatgctgggaccgtgaaacacatgaatatgttgccataaa

SEQ ID NO: 2085 - DNA, 120 bp, Zea mays
  misc_feature: Incyte ID No: 700345512H1
gaattccccaattgtggtctagcgaggaagtgcctttgcttggtaacttgttcgcgccatacttctggggctgtatcatcgccaaaccatgcgacgcttacttatttcatttggttctct

SEQ ID NO: 2086 - DNA, 300 bp, Zea mays
  misc_feature: Incyte ID No: 700345514H1
gggttgggtcaagctgtttacagatagcaaaagcctttggagcttcccaagtcattgcagtggatgtccttgatgagaagcttcagaacgctacaacacttggagcaacccacactgtaaatgcagcaaaagatgatgcagttgaaaggataaaggaaattactgatggtaggggtgtagatgtggctatagaggcacttggtaaggcgttaacattttcccagtgcgccaagagcgtgcgtgatggaggcaaagctgttatgatcgggcttgctgcaacgaacgtaatgggagaggttg

SEQ ID NO: 2087 - DNA, 298 bp, Zea mays
  misc_feature: Incyte ID No: 700345515H1
cttgctgcttgtttaggctgaagaacctgttgaggtttaccatgataacgaattcaaaaacaggagatggcacttccaatcctacaacttcacagtgtccatcgtctgggctcctttcctcatcaaatctggtatttttgagaatgaggatggcgtgtctacctctgaaatacagctccaccttgatatactcgatgctaactggacaagtcagtatgagagctttgactatattattattctggcggacaatggtttctgaggacagcggtctactgggagaaggtgcagtggttgg

SEQ ID NO: 2088 - DNA, 305 bp, Zea mays
  misc_feature: Incyte ID No: 700345516H1
  unsure 55, 57-58, 62, 125: a, t, c, g, or other
gcaggatttgcctcagtagcccagggtatggaaggctgcgttcctagcaacaaananntagngggcgtatggcatgccatcagccaccaacaatccagatgcctctggtcagtccttcagcgaangtttgaagagctcgaggaagcctccgttgcagtacgatgcctccgaatctgcagactgtggaccaggtggtaagggcgcgaagaagaaaacgaagaaaggaaagcagattgacccttctcttcttggtttcaaggtccacagtaaccggatcatgatgggcgagattgttcgagatgatt

SEQ ID NO: 2089 - DNA, 296 bp, Zea mays
  misc_feature: Incyte ID No: 700345517H1
atattttctattagagacgccatatcaaacaatcttcagattactatcttcaccgatccatctgataaaaatattgcaacaatggctaaaaatctactccgtggaagaattacaaagctttctatcaatgattctgtttcttcacgaaggcatttatagcccagcatgtacacttctgtccatcggaggagctgaaaacaacaaaggttaaggaaattcttgagcagatattgcaagatcatcctaaaaagacatcaaaggtgcttctagtagctgcaagcgataaaaaagcacgg

SEQ ID NO: 2090 - DNA, 295 bp, Zea mays
  misc_feature: Incyte ID No: 700345518H1
  unsure 2, 73: a, t, c, g, or other
anaagacaacccgtcagcccctctcgtttttcatccgccttcgcctccaaccgcgtgcgctccacgcctcctnccaggaaagcgagagttctgcataagaacaacaaatcaaaagcgtgatcagctcggtgccaacaaaacctcaacaaccaagtttcatgtctgatctcgacgtccagcttccatctgcctttgatccgtttgctgaggcaaatgctgaggactctggtgctggtcctggaacgaaggattatgtgcatgtgcgcatccagcagcgcaacggcagaaagagtct

SEQ ID NO: 2091 - DNA, 291 bp, Zea mays
  misc_feature: Incyte ID No: 700345520H1
  unsure 12: a, t, c, g, or other
ggcattcaaganggtgatgttgtgaccatgtatgcttgggtctcgctacaacggcgcaatggactgactgctgctcttcctcattgtcccaacttcctgttccacaaggaagaaaacttctggctgcttctagccaacgtggcatctaatgatgtctggttgtcacagaaagtcagcttcatggatgaggccacggccataactgcagcatcaaaagctatacaagagacccaggaagcactaggtgcaagtgcaaaggaaataggaaatgcagttagggaggcagttgac

SEQ ID NO: 2092 - DNA, 292 bp, Zea mays
  misc_feature: Incyte ID No: 700345521H1
tgcacagaaaattttcctcttactccaaacaatccatatggcaaaacaaagctcgttgttgaagatatttgccgggatatctaccgttcagatcctgaatggaagatcattttacttaggtacttcaatccagttggtgctcatcctagtggatatcttggcgaggacccacgaggaattcccaacaatcttatgccctatgttcagcaagttgcggttggtaggaggccagctctaacagttttaggaaatgactatgcaacaagagatgggactggggtccgagattaca

SEQ ID NO: 2093 - DNA, 102 bp, Zea mays
  misc_feature: Incyte ID No: 700345523H1
accgacaattcagaaagcagtgctcctcgatccataatttgtactgaagaacttaatgagtcgtgtaagtacacactctcaagtgctatagagtgctggtcc

SEQ ID NO: 2094 - DNA, 289 bp, Zea mays
  misc_feature: Incyte ID No: 700345525H1
aaaggccgcgacgagccgaccagctctactgcccccttccggccttcggcgaccgtgacgagcaacgacgaccacggtgacgatggccgcttcctccctctgccacgggcacttgctcctgtttctcctcgtgtccgtcaagatcgatggcgtgagtgcgaagggctatggtcttccagccaagacatcaaacacaaaagtgatacttaatggcggacagagggttacatttgccaggccggatggctactttgcattccacaacatgccagtggaatcatcttattga

SEQ ID NO: 2095 - DNA, 293 bp, Zea mays
  misc_feature: Incyte ID No: 700345526H1
  unsure 21, 106, 141, 143, 151, 153-154, 157, 162, 167, 191, 198, 203, 265, 279: a, t, c, g, or other
cttcccaaccatcagtcaatnactccaaggcgttggtgccattgggtaatggattgtcgtcaaactcaacttttggtgctgaccctttctctgcaactccacgacnagaacagggttcaccttttccccccaacgttccananaatctgcncnnggnctacncctcntgcctcagctgctggacatcatcnccctccnaagcnaatgcaggctggtcctgtgcagagtatatcctcgctttctcctcatactagccagttgccanacaatcagccaccnccgaggcaacaaca

SEQ ID NO: 2096 - DNA, 287 bp, Zea mays
  misc_feature: Incyte ID No: 700345528H1
  unsure 102, 161, 274: a, t, c, g, or other
aagcatctttcccttgctgaagtccttcaggttctgaatatcataattaacacaaaaaagtggtttgtgcctcattcttcaggttggcagccgttgtcgttnaacataatagtggctgatgctactactgccactggtggaaaggctagcatcggtacatnatctgcttgtaccaattgaacatgttgaggttctggtcgttggtgcaagctgcgtccgcaaaagctaagttctgttgaggtttcctagcacaatgctctgcatttgccaagtntggggttaagttg

SEQ ID NO: 2097 - DNA, 291 bp, Zea mays
  misc_feature: Incyte ID No: 700345529H1
  unsure 29, 53, 276: a, t, c, g, or other
aagaagacttaggaagttgggctccatcnctgtgacccatcaactgtacctgncactatactgcagtgttctgctggcgaagaggtttcttttgttttcaccaatcaggttgacggaaaacttgttccagttgaatctatggtgcgatcagcagctcatcaacaaaacggaatagcagccaccggagaaaaaggagtgcagatacccaaatctcctagcaaacctggaaagcaatccttaaatggcaagaattgaagatgggatttcattaaagantcgtctttgaaatgt

SEQ ID NO: 2098 - DNA, 293 bp, Zea mays
  misc_feature: Incyte ID No: 700345531H1
gctgcaataccagttattccaggtagaaaatcaagagtagaaacatttgcgggtgccaatcggacctacactatagaagctatgatgggtgacaagaaggccttacaagctggaactagtcacaaccttggccaaaacttttcacgagcttttggaacacagtttatggatgaaaatggtcaaatcgaacacgtctggcagacctcttgggctattagtactcggtttgttggtgggattatcatgacccatggcgatgatgccggtctaatgcttcctccaaggatgcaccc

SEQ ID NO: 2099 - DNA, 281 bp, Zea mays
  misc_feature: Incyte ID No: 700345535H1
gttggagtatatagttcgtggtgagcagaggaatctatttgagcttatgcatgctattgcaacaacacaagggttgaaaggcttttggaaagggaactttgtcaacatcctccgcactgctccattcaaggcagtcaacttctacgcatatgacagttacagaaagcaactgctcaaatggtctggtaacgaagaatctgcaaactttgagagatttattgctggtgctttgctggtgttacagcaacgattatgtgcatacctatggatacaatcaggac

SEQ ID NO: 2100 - DNA, 280 bp, Zea mays
  misc_feature: Incyte ID No: 700345536H1
  unsure 109: a, t, c, g, or other
actctatcaaatttatcagatgaatatgttgaaaatccacagaaggatttccccgttggaatgcttgtacacggaaggatcctgtctacagacccatcatcagggaganttgaggcatcacttaggaagaccactggttcaaaattggaaaagctggatgatattagttatagtgactgcatgttggggatatcgttgatggccaagttaagcgggtggaatcctttggattattcgttacaattcggagaagtgaattggttggtctgtgccatgtatc

SEQ ID NO: 2101 - DNA, 282 bp, Zea mays
  misc_feature: Incyte ID No: 700345537H1
acaaagcacatgcccacacctgaacagtggaccaatgtgttcaaccctgcattttcatattatgcgtactactgctatgctaacttattcaccctaaacaagctgcgtgagtcaaagggaatgaccactatcaaattccgtccacatgctggagaggctggagatgttgatcacttggcagcgacatttcttctctgtcacaacatatcacatggaattaatctaaggaagtctcctgtgcttcagtacttgtactatcttggtcagattggtctggcgatg

SEQ ID NO: 2102 - DNA, 221 bp, Zea mays
  misc_feature: Incyte ID No: 700345538H1
tgatagctccagcgccctcgccgtcggctgcccggctgccgtcctcccgctacgagctaggcatctccttcgccgatccagcatgggtaagacacgtggtatgggagctgggcgcaagtcaagacccacaggaggaaccagaggtgggctgacaaagcctacaagaagagccatcttggcaacgagtggaagaaaccctttgctggatcatctcacgcaaa

SEQ ID NO: 2103 - DNA, 282 bp, Zea mays
  misc_feature: Incyte ID No: 700345539H1
  unsure 89, 108: a, t, c, g, or other
ggaaactaaaataatgtttagttttcgtatttggcaatttagggactaaaataaaataaaatgaagggactaaaaattaatcccaaaanccaaacacattcgtaaggntatctgaatatgaaatgctaaaccagatgatgcatgtcatatctcactaacaccacacttaagctgtgctaatgctggtcgtcatcatgcagtaagctgctgaacaacgccactggatccggcaacacgaacacatcttcgacgcctacaagtgacgctgagggatctgcgata

SEQ ID NO: 2104 - DNA, 245 bp, Zea mays
  misc_feature: Incyte ID No: 700345541H1
  unsure 11, 29, 33, 37, 49: a, t, c, g, or other
agacggaaggngagcttgaaaataatgancganacanccaacaaaaggnagcagattgatcaagttgtccactacttagaggaaagactgagagaactcgatgaagagaaagaagaactaaagaagtaccagcagctggacaaacagagaagatcacttgagtatactatattggaccatgagcttaatgacgcaaggaatgaattagcttcggttatcatccatcgcggctcgagctcgagccg

SEQ ID NO: 2105 - DNA, 97 bp, Zea mays
  misc_feature: Incyte ID No: 700345542H1
  unsure 2-3, 9-10, 14, 17, 28, 54, 67, 95: a, t, c, g, or other
gnncgctgnnccgncancctcagggacnccggcggcgttctgcagagctgggancccacgcttcgtnaacccctgcacctggttccacgtcacgntg

SEQ ID NO: 2106 - DNA, 281 bp, Zea mays
  misc_feature: Incyte ID No: 700345543H1
cggctttgacaattcctaatggtgccactgtgatttccacaatcaaccgatcaatgcgagcatatgccactgcaatagttgctgctgaatatatcctcagatggcttcctagaggcacacatgagtggtccaaactggttaccccggaggagcttgtcctaatgctgcaaaaggcttccgtctccgtcgaagagatggcagggttcgtttacaatccgttgagcggagaatggtccctgtcagatgatatcagtgtgaactacattgcttttggcgttaag

SEQ ID NO: 2107 - DNA, 276 bp, Zea mays
  misc_feature: Incyte ID No: 700345546H1
ggaaagggttcgtactcatggcgccgccgcagccaaagtcgggccttttcgttggcatcaacaagggtcatgttcgtcaccaagcgcgagtgcctccccgcccgtgccaccgcaaggggaaatcaacgaagagggtgtctatggtcaggggcctgatcagagaggttgctgggtttgctccttatgagaagcgtatcactgagcttctgaaggttggcaaggacaagcgtgccctgaagcttgctaagagaaagcttggaactcacaagagggcaa

SEQ ID NO: 2108 - DNA, 282 bp, Zea mays
  misc_feature: Incyte ID No: 700345547H1
tatgcgcattccttcatttgtggggggttgttgtgtgatggatagcctggtaggaagaggcaaaggactgatatataatgactcgtttattgttcatctttttgcctgcttcgtcggtcgtcgcagtcgttgtggctgcatgaactgatgagtggtttgttcgtgctagttgtaggctgtttcactgatttgcgtgcgtatgtggactgtccttcaaatttgtaggcctgaaaccgtacttccattacgtggctacgcgagctgatttgccggtctgccaaa

SEQ ID NO: 2109 - DNA, 297 bp, Zea mays
  misc_feature: Incyte ID No: 700345550H1
cacagccgtcgccgcccgccagcccgccagcgagagaagtccgcttcatccgttcgccgcctcaaggacgagatggacacatcaagccctgcagcacttgtcaatgcacagatgctgaacatgtttgttgggcgaagagtgcgcacggttgttcaagtccaacacaatgaaggtggagtgcttgtcgggcagtccaccgatgggcaccagttgtgtgtcaaaagtgccatggacgtccccgtatcacattttatggaggtttatggaatgctgaaaacagccagaccatccgtgctg

SEQ ID NO: 2110 - DNA, 287 bp, Zea mays
  misc_feature: Incyte ID No: 700345552H1
cctaagttaccaagagttgtccgaatggcaaacctctgtgttgttggtgggcattcagtaaatggtgtagctgaaattcacagtgaaattgtgaaacaggatgtgttcaacagcttctatgagatgtggccaactaaatttcagaataaaacaaatggagtgactcccaggcgttggatccggttttgtaatcctgcattaagtgcattaatttcaaagtggattggttctgatgactgggtgctaatacagacaaactggcagaactgaagaagttgctgataatg

SEQ ID NO: 2111 - DNA, 289 bp, Zea mays
  misc_feature: Incyte ID No: 700345553H1
  unsure 53, 119, 151: a, t, c, g, or other
ctctctttccgagctctctcgctgtctctcacccagccgccaccatgtcaggnctctacaaccagggcttctcccctgcaagaaccctctccccccagattaggagcaaccccgacgcnatagccagtacttggccgagcttctcgccgancaccagaagttggggccattcatgcaggtgctgccgatatgcagccggctgctcaaccaagaaatcatgcgggtgtcaagcatggttcatgaccatggatttagtgatcttgacagacgccggtttagaagtcctagc

SEQ ID NO: 2112 - DNA, 290 bp, Zea mays
  misc_feature: Incyte ID No: 700345554H1
ggagattctctcaaatgaagttgttcgcttgaaaggcttgcttgattcgagtgctgccagcgaagagagtaagagccgtgaagctgagcttcttgttaagaatctggagtctgaagtttcatctctgaaaggcaaacttgaggaggcaaaagtccttgaagacaggttagccgaagcagaaaaaatgattgaggagcttaaatcagagatagctaatgcgcagaaggtcgaggaagacatccgtcagcagttagaagaatggaagcagaagtcagtatcacttgagatga

SEQ ID NO: 2113 - DNA, 289 bp, Zea mays
  misc_feature: Incyte ID No: 700345556H1
ctagcgccggcgcctccatttcgttttcctcactctctcatccagctcagggtccggcggcgaagggaaggcaagatgtacaccgcgaggaagaagatccagaaggagaagggtcttgagccctccgagttcgaggactccgttgcccaggctttctttgatctggagaacgggaaccaggagctcaagagcgacctcaaggacctgtacatcaacaatgctatccagatggatgttaccgggagtaggaaggctgttgtcatcacgtcccataccgcctgcgcaaggc

SEQ ID NO: 2114 - DNA, 281 bp, Zea mays
  misc_feature: Incyte ID No: 700345561H1
  unsure 32: a, t, c, g, or other
cggcgtcgcatcctacgatccaaagctctctntgctcgcagccatagcgaagaactacccgaccgtgagcgccgagtacagcgaggctgtggagaaggccaggcgcaagtccgagccctcatcgccgagaagagctgcgccccgctcatgctccgcctcgcgtggcactccgcggggacgttcgacgtgtctcgagtgaccggcggtacattcggcacgatgaagcatcagtcggaattggctcacggcgctaacgcggggctggacatcgcggtgcggct

SEQ ID NO: 2115 - DNA, 288 bp, Zea mays
  misc_feature: Incyte ID No: 700345563H1
  unsure 71, 242, 250: a, t, c, g, or other
aatgggtagaagaccattcttctttggcagaagtgcggaggagcattattcggatgatggatattttggcnttgtgaagcagaaggatggtgagcctgttgagaatgaggacgctgagccaaatgtggaggctgtataaacattctggagcatccttttgcaagcgctccgttcggtttcttctggtgcctcatgacacaagtcacacaatgctcgttttgcgtcttcagatcatagcgtantcagcttntataaaactgtaacgtcacgcctgttttgtgaaaactc

SEQ ID NO: 2116 - DNA, 297 bp, Zea mays
  misc_feature: Incyte ID No: 700345564H1
  unsure 273: a, t, c, g, or other
ggccatcgggcgcgcgggcgcggcgcacgacgactacgggttctcggcggagatacagacgctggggcgcatcaggcaccgccacattcgtgcggctgctcggcttcgcggccaaccgggagaccaacctgctggtgtacgagtacatgccgaacggcagcctcggcgaggtgctccacggcaagaagggcggccacctgcagtgggcgacgcggttcaagatcgccgtggaggcggccaagggcctctgtacttgcacaacgactgctcgcngccgatcctgcaccgcgacgtcaa

SEQ ID NO: 2117 - DNA, 290 bp, Zea mays
  misc_feature: Incyte ID No: 700345567H1
gacggagctcctaaagaaagcctcgacgctctacgcgagcagacgacaactcaacggacacgccgtgggcacaagcgagcacaccgacgcgcccgcgcctgcatccacctccaagtccaacccacacagagatgccgcgagctctgtcggtcgtagcaggctgattcaagcaccggccgatccagccggccagtttccttccataccgagctccatggagtgtcacgagagcagcagccaaggtccgccgcagccggagctgttgagcatgccgggcgtggagagtcggg

SEQ ID NO: 2118 - DNA, 285 bp, Zea mays
  misc_feature: Incyte ID No: 700345568H1
acatcctgaaagttggcgaggcagagaaaaatcttggtgcaggcgatgtcaatgtttacgcacagatgattgatgatgctgagggcctggacaagattgagaacctacagagccatgacaacactgagatatatgagaaggctgtcaagatgctcgaatctactggctagaggaggaagatgatgccatgccctctggcgacaatccccagaatggcttcaactttgggaaccagccctctgttccatcaggtggatcaacttcggctgaagatgcccatttgga

SEQ ID NO: 2119 - DNA, 104 bp, Zea mays
  misc_feature: Incyte ID No: 700345569H1
  unsure 2, 13, 50, 53, 96: a, t, c, g, or other
ancaaccctgaanaataacgtgggcttgatcacgctggatcaatgactgngangtgctgaccacacttcacccctgagcaactggccgaattcctncttccaag

SEQ ID NO: 2120 - DNA, 283 bp, Zea mays
  misc_feature: Incyte ID No: 700345571H1
ttcttccttcctccctctagatctcgccttcacaacaacgacgaacagcgggtacgtacttggagatccaagaagctaagaaatgtcagcccagtttgcatccgagcatgcttgctatgtcaactgcaactattgcaacactatcctggtggtgaatgtgccaagcagttgttcctacaacgtggtgactgttaaatgtgggcatgtacaatggtgctgtccatggatctcagtcccttccatcagcaggcacgcactgtcccagacaaccaggttgtccaga

SEQ ID NO: 2121 - DNA, 283 bp, Zea mays
  misc_feature: Incyte ID No: 700345573H1
cctttccctcgcgccgccgccaacgcaacccttgcagccccaatccctcacagcaaccatggctggcgcgcaggagtccctctctctggtgggcacgatgcgcggccacaacggcgaggtgacggcgatcgcgaccccgatcgacaactcgccgttcatcgtctcctcctcccgcgacaagtccctgctggtgtgggacctgaccaacccggtccactccaccccggaatccggcgccaccgccgactacgggtccccttccgccgcctcaccggccactccc

SEQ ID NO: 2122 - DNA, 281 bp, Zea mays
  misc_feature: Incyte ID No: 700345574H1
  unsure 44, 46-49, 238-239: a, t, c, g, or other
gcaaggctccgatttgcacatgcagaaactgttgttccttttancnnnntcttggtctttttcttgaaggtccagaaattgagaagatacagagagaggaagcattggacctaccccctttgccgccacagggaagaaactggaagggcagtgttgttgcgcctttgctggtaacaatatgctggttttatatcaatgtccaagcaaaatttcggatggcagcacaatctctggaggnngaaacaactcttacttagttcaagttctacacaacgaatccc

SEQ ID NO: 2123 - DNA, 282 bp, Zea mays
  misc_feature: Incyte ID No: 700345575H1
ccaacgtgtgatatcacagcttgtaacacttgctgccatcgatgaagaggctgatattctgatatatcttaactgccctggtggaagtctctattcgatcttagcgatttatgattgcatgtcctggataaagcccaaagttgggacagtgtgctttggtgttgttgctagtcaagcagcaattatccttgcaggtggcgagaagggaatgcgctatgcaatgccaaatgctagagtaatgattcatcaacctcaaggtggatctgagggtaatgtggagga

SEQ ID NO: 2124 - DNA, 285 bp, Zea mays
  misc_feature: Incyte ID No: 700345577H1
  unsure 183: a, t, c, g, or other
atcgtgaacccgccgccgacgcagcagcaggagacgcgccaaggagagcccgcaaggaggcgactatgagggccaagtggaagaagaagcgcatgaggaggctgaagaggaagcgccgaaagatgaggcagagatccaagtaggctgatggggattgtggatggtggtgtcggcatagttgtnttacgtttcttcgatgcgtgagttcatggagagatgtcacatcctagttcgtcgtcaccgtttgccatgggtccaatggctcgtcttggaaacctgcacttc

SEQ ID NO: 2125 - DNA, 180 bp, Zea mays
  misc_feature: Incyte ID No: 700345578H1
tgactagttgagattattcagtattgtcggcacaggtggacagtcacattttcagtgattacgcatgtcccaaaattttgactggaatactccatgttacactattattcgtgcagtaggaaagcacgtagcgtaccaaaatatttatacttcaggaaatagacaaagacattggtgatg

SEQ ID NO: 2126 - DNA, 287 bp, Zea mays
  misc_feature: Incyte ID No: 700345579H1
  unsure 85: a, t, c, g, or other
acgccgttgagctcgaggcgaccggcggctcgccgccccgccacagtgccgctgcggcttctttctaatccctgtggctcagacncggagggttaaatggcaaatagagcaagatggatgatgaagtacgaaaagggtcttgttgatatacttcatgagaacaatacttcacattatcgtacccaaaacggttggagaacagaggggtggaggaagatcgttagggatttcatgtaaggtaccccgaagcaaagttagtaaatgcaaatccaggacctgagatccat

SEQ ID NO: 2127 - DNA, 180 bp, Zea mays
  misc_feature: Incyte ID No: 700345580H1
gtcgtgggatccatgatcagaaacttaaacgtggggattctgagaacattaaggcttcaaatggtatgtttctgaaccatagtgacgttgacagctccaagccaccagtggttgaactacttggagagttcgtgcttgcaagtagctcaagagaaagatctaccaagaaattgtatcaga

SEQ ID NO: 2128 - DNA, 286 bp, Zea mays
  misc_feature: Incyte ID No: 700345581H1
  unsure 11, 59: a, t, c, g, or other
gctcgagaganatcgcatcttgcctgcccacccaagcttccctttcgttcctcctcgcnccagcgacgcggcctcccgtagaccgagcaaggcaacccaccactgagaggcacgcagaggagcaggaagccggagaccaagatgtcgtcggtgttcagcggcgatgagacggcccccttcttcggtttcctcggcgccgccgccgccctcgtcttctcatgcatgggcgcacgtacgggaccgcgaagagcggcgtcggcgtggcgtcgatgggtgtgatgcggcc

SEQ ID NO: 2129 - DNA, 101 bp, Zea mays
  misc_feature: Incyte ID No: 700345582H1
  unsure 51, 69, 90: a, t, c, g, or other
gaaagccgtgatcgaagccgccatcaaacgccctcacaccccctcccgctncaggtcccctttccgtcngcaggggatgccgggcatttnccaggcccctt

SEQ ID NO: 2130 - DNA, 278 bp, Zea mays
  misc_feature: Incyte ID No: 700345585H1
  unsure 106, 136: a, t, c, g, or other
attttagattgtctagaagtattggttacagtttcactgctctctttgctcagcagtggtaactttattttttgtttcattgtaaattaagtggaataaagcaaanccacaattgatccaagcagaaatggactancctcaccccaacccccgcgccccactccatccatggactactctttccattagaatgaactggcacagtagtgtgtccagccaaaacatattctttttttaccaaaatgttgcctaaaatatgtagctacatgttggaattc

SEQ ID NO: 2131 - DNA, 166 bp, Zea mays
  misc_feature: Incyte ID No: 700345586H1
aaggcttttgcgaatcacttgaagtgttagtacttttgtgaatgattttgtaaagtgtttgcaaatatgtgcaaaacataataacatgtgtaggttttgtgaatgattttgttgtggtgcttgttgatggtttatgtgatgtggatctatcattgtgcaatactaa

SEQ ID NO: 2132 - DNA, 270 bp, Zea mays
  misc_feature: Incyte ID No: 700345589H1
atggcatgacgggaccaagcagttttcgaccttgacgaaagagcggctccttccgttgcccccgtgcccattctttgtattgttgtgtccatgctccatgccataagatcttgtccccatttggatgcgatcgaatgaccgacgacggctcatcaactgaccagcgtacataccgtctgcctggaaactcttgtggtgttgtaggtttagttattttctttaaacgaaatatttaccttctttttagtgaggctgaaacgcaagctcatg

SEQ ID NO: 2133 - DNA, 274 bp, Zea mays
  misc_feature: Incyte ID No: 700345592H1
ccaggacgacggagggagccggaaccaagagctgtgggctcgtggtgcctgagggaagggttcacggtggagggctgatgtccatgcttggagttggaggcaacctgggaagcaatcctgatggttcgaaagcctgaaataccaaggatgagacgtagaagcacataatttaggttattttgcatgcctctgttatgattctgcaatggaacatatacatgaatctcaaatggccatgtgtaactatagtgctgccaattggccatgtagtatt

SEQ ID NO: 2134 - DNA, 173 bp, Zea mays
  misc_feature: Incyte ID No: 700345596H1
actggatctggtaaaacttatacaatgatgggtaaaccaggaaatgatcaaaaagggataatacctcgttctttggagcaaattttcaagaccagtcggtttctagaatctcaaggatggaattattccatgcaagcatcaatgttggaaatatacaatgagaccattcgtga

SEQ ID NO: 2135 - DNA, 300 bp, Zea mays
  misc_feature: Incyte ID No: 700345604H1
  unsure 11, 34: a, t, c, g, or other
cagtgcttgangcattgcatgcctccattggacngtgccaaaggaattcacagcgcttggacccagaggaatctcagtccctttggttccaactccttgactccttctcagagccattaaaaaaactgtatgggatcaaggatgtaaatggaaaaggtgtcaagtccaattggagtgaagcatcaatggaacatctgaaggaaaaaggactatctcaacaaatgaggatttcaactaaacaaaagtgcctaaatgttctgcgaaaagtattttcacaatgtgttggagaaataatagagg

SEQ ID NO: 2136 - DNA, 298 bp, Zea mays
  misc_feature: Incyte ID No: 700345605H1
  unsure 23, 73: a, t, c, g, or other
ggaaggagtcggagggaaccganaaactcagggtctcgaatttcctaggagcggaggcgatggctgggaaganaggaaaaggattgctcgccgcgaagacgacggcggccaagtcggcggagaaggacaaggggaagaaggcccccatctcacggtcctcccgcgcgggcctccagtttcctgttggacgaatccaccgtcagctgaagcaaaggacttcaggcaaatggccgcgttggtgccatgcagccgtctactctgccgccatcctggagtacttgactgccgaggttctgga

SEQ ID NO: 2137 - DNA, 297 bp, Zea mays
  misc_feature: Incyte ID No: 700345606H1
gaagaaaatcgagataacgagagctagggttttgattccagtactcacgccgcatcctgtactccttctgcccctaccctctcggcaccgcctccgccccctcattctctctcgcgtcatccggcggaggctcgaggaaactgaggccgggagcgccccgaagaatattctccacccagtcgccgacacccctgcgcgcgcgagagttaccattgtactgttgtagcttggcagttggttgactgtgtgacaactttgagctatgtcatattacgaaagaaggggtggagacagggg

SEQ ID NO: 2138 - DNA, 289 bp, Zea mays
  misc_feature: Incyte ID No: 700345608H1
cgagaagagatccatcgatgtagggtcattcagttctacaatctacaatccacttggctgctgggaggaggagaaaaaatgggaggggagtttgtagtgcagaaatttgcgattgcttagtgcactactttgctctgctatgtttttcttagcagcttactgctgcaggctgtagaagggacaacgaaagttgacagtctctgcaggtggtcatactactatataggaacctagatcttttaaatcagctcctgagggaaatgtatgcagtacttgatatggtctcaat

SEQ ID NO: 2139 - DNA, 287 bp, Zea mays
  misc_feature: Incyte ID No: 700345611H1
gttcatgtgaaagttcaatcttgttttctctaatcgtgtgacttggactgttggagaaatgttggctaatttcacttgttttcaggaaataggtggattgctctggttgttgagaagtttgttgaacccgatgtttccttggttccaacactgtcatgctccatcgattattttggagagttgatcagtgggcagaaaccgtggaagaaaagctgacatttgcactcacccgagccctatcagcagcgccggccctggcaggggtcgagcagtgccctcaaccaggc

SEQ ID NO: 2140 - DNA, 283 bp, Zea mays
  misc_feature: Incyte ID No: 700345612H1
  unsure 281: a, t, c, g, or other
gtcagtttggccctctgattcagttaggcggttttggcaggaaggagaaacaaattagtctgctgatgtggtggttgttagcttgatgtcgtttaccctgttggtgttaggtattgcagtactgtgtgctatgtgatgcgtttggtagtagttagttgtaggctttgcagtaccagcagctgttcttgtgcttcggcttaagttgtgcaatggctagctgagtagaagtaggtgatgttttcggcaaactggtgagatcatgagtttcagtttactagagnac

SEQ ID NO: 2141 - DNA, 289 bp, Zea mays
  misc_feature: Incyte ID No: 700345613H1
  unsure 274, 279-281, 287: a, t, c, g, or other
gtcagcaagacgtccatcttggatgacttcgccttctatgagagtcgccagaagctgatgcaggataagaggtcgaaacagcagcaggtccaaaagcaggtctgggacagtaggacccccatttctgtcactggaagcgagcaacagcaggaagctgctaatgggaagcccaatccgtctgtaccaaacggtgtccctgcagaggtgaaggcggcgaaggcttctgcagagaacggcaccgccatccagctatttcctagcggccaaaggtggncaacnnngcaaanaa

SEQ ID NO: 2142 - DNA, 200 bp, Zea mays
  misc_feature: Incyte ID No: 700345615H1
aaggtgccccggatctatctgctcgttagacttaacaggaatggagacaggagttgccttttgattgagcaaccgtcctgcggagtaaattgttgcccatttttccccgctgcccccaactgggcagctcgattgtggttgacagagttgtaaagatcatcaatttactgatatgatatgataagaaggagcactttcac

SEQ ID NO: 2143 - DNA, 294 bp, Zea mays
  misc_feature: Incyte ID No: 700345620H1
  unsure 208: a, t, c, g, or other
ggaactgcctgtactggaaaatcaacaatcgctacacaacttgctcagaggctcaatttgcctaatgttttgcagacggacatggtgtatgagctgctgcggacatcaacagatgcgccacttacttcagttcctgtgtgggctcgcgattttaattcacctgaagagcttatcactgaattctgcagagaatgcagagttgtacgcnagggtttggctggcgatttgaagaaggccatgaaagatgggaaaccaattattatagagggaatacatttggatccaagcatttat

SEQ ID NO: 2144 - DNA, 292 bp, Zea mays
  misc_feature: Incyte ID No: 700345621H1
ggaaagggccgcgacgagccgacgagcaacgacgaccatggcgacgatggccgcttcttcctagccacgggcaacttctcctgtttctcctcgtggccgtcgcgtcggcctgcctcggctccgcggcaggcattcaagccggatctggagagggctacacgatcgctggccgcgtcaagatcgatggcatgagcgtgaagggctttggtcttgcaacaaagacatcaaacacaaaagtgatacttaatggcggccagagggttacatttgccaggccagacggtactttgca

SEQ ID NO: 2145 - DNA, 280 bp, Zea mays
  misc_feature: Incyte ID No: 700345622H1
  unsure 2, 6, 22, 29, 41, 78, 86, 121, 147, 197: a, t, c, g, or other
cntccncccgttagactaggtnaggctanggtgtcgaccanctcgcggaaatggtggccttcaggttccatcagtacnaggtggtngggcgcgcgctgccgacgcccggcgaacgagcacnccaagatctaccgcatgaagctctgngccaccaacgaataccgcgccaagagcaagttctggtacttcctgaggangttgaagaaggttaagaagagcaacggtcaggtcctggccatcaacgagatcttcgagcgtaacccgacgacgatcaagaact

SEQ ID NO: 2146 - DNA, 267 bp, Zea mays
  misc_feature: Incyte ID No: 700345623H1
  unsure 17, 20, 32, 121, 145-146, 203, 226: a, t, c, g, or other
gccgaggaggcggccgnacncggtgctgagtnctgagttgttgaccaacgggaagtccagtacccaagcggagccaccaaggaaaggaggattggaggaatggaagcaaccggcgcactcngcagccctcggcgccgcagacaanncacccggcggtggcgccgctggccttcctgctggggaagtggcgcggggaaggcganggcagcttccccaccatatcctnccttccggtacggcgaggagtctcttctcgcatcatccctc

SEQ ID NO: 2147 - DNA, 109 bp, Zea mays
  misc_feature: Incyte ID No: 700345624H1
  unsure 14, 39-40, 51, 55, 59, 77, 105, 108: a, t, c, g, or other
tgacttccctaatnccccccatccttaccaccctacgtnnaccctaacaanaaanactncatacccccattatgtanaatccattgtacgcataccacctttatnatnc

SEQ ID NO: 2148 - DNA, 282 bp, Zea mays
  misc_feature: Incyte ID No: 700345626H1
gctgacaggaggaagatactgaagttggatgaggaggcagctgatgatggggaaagttcttcaatgcagccagtgagtgatgatcaaaacaatcagatgaatgggactataaggagctcctgggttcaaaggaggtccaaggagtgtgacgttgatgtccgcatagtcgatgatgaaataaatatcaaattcacagagaagaagagagccaactcttgctttgtgctgcaaaggttctagaggagttcatcttgagctcatccatgttgttgggggaatctt

SEQ ID NO: 2149 - DNA, 282 bp, Zea mays
  misc_feature: Incyte ID No: 700345627H1
  unsure 52, 160: a, t, c, g, or other
atgagtgtattgataaaataattggttttgctttgagccatcaacttaaganctgtacaaatccagacccccctttgagtaatgtgcagtttgttctatccagcgaaagccttaagcatggtattgacatgttggaaagtatccagtctggctcgaaganagacactaaaaggaaatcactgaaggatattgctacggaaaatgagtttgaaaagaggcttcttgcagatgttatccctccacatgaaatcggtgttacctttgaggacattggagctttag

SEQ ID NO: 2150 - DNA, 281 bp, Zea mays
  misc_feature: Incyte ID No: 700345629H1
  unsure 244, 246, 255, 261, 263, 267, 273: a, t, c, g, or other
gaacgatctagattacgaaaagatcaatccaatcaagtatgttccagcattggttgatggggattttgttgtttctgactccctggcaatcatattgtatcttgaagataaatatcctcaacaccctcttttgcctcaagatctcaaaaagaaagctataaatctgcagattgcaaatatagtttgttcaagcattcaacctcttcaatgttatgctgtaattggtctgctgatggcaccttangntctaaccanagcctncnaatnttcggnatacaccg

SEQ ID NO: 2151 - DNA, 284 bp, Zea mays
  misc_feature: Incyte ID No: 700345630H1
ctcctctctccgtcgccgcctcgggccaaaccctacgcagggagttgattgatcgattgcagccatgagtaagttgcattccgagcttctcaaggattgcatctcccagatagttcaggatgccaagaagaataggaagttcactgagactgttgagcttcagattagtctgaagaattatgatccacaaaaggacaagcgtttcagtggctctgttaagttgcctcacatccctcgtccaaagatgaaggtgtgcatgcttggtgatgcccagcacgttgagg

SEQ ID NO: 2152 - DNA, 288 bp, Zea mays
  misc_feature: Incyte ID No: 700345631H1
  unsure 71, 87, 96, 162: a, t, c, g, or other
tccgtcgcggcggagatcgagtcgagcgcccgccacggcgatggcggctagagtcctgccgccgccgccgnttccctactcgtactncctcttgcngctgctcccgctctcagcccgggacaccgtcgccgcgggcgaggatttcccacgcgacgggcgggncgatcgacctcgacgagagcaacttcgaggcggcgctgggcgtcatcgacttcctcttcgtcgatttctacgcgccatggtgcggccactgcaagcgccttgcgcccgagttagatgaagctgcac

SEQ ID NO: 2153 - DNA, 290 bp, Zea mays
  misc_feature: Incyte ID No: 700345634H1
  unsure 93: a, t, c, g, or other
gaagagagcatcgccggacccggggacggcgcgccgagaaggaacaaaagaagacggcggcggggcggagatggggagccctctgggcgggtngccgtcatacaacccgcacaacttcagccagttggtccctgccgacccctccgcgcagccttcgaatgtcacaccagccacttatgttgcgacccacaggacagatccgccacccaatcaagtgataaccacggaggccaggaacatcctgctgaggcattgtaccagaaatccgaggagaagtgaggccaaagaga

SEQ ID NO: 2154 - DNA, 287 bp, Zea mays
  misc_feature: Incyte ID No: 700345635H1
  unsure 183: a, t, c, g, or other
atgaacttggcgcttacattcagaatcagacctctcttcatctccaattgcagtagtgtctactccttgtgcgcttgtgctagcaagtgatgctacacaagtacacattccaagctgttgatccgctctccccgtcgtacgactacctcccgggccacccacggccagacaccaagcacgatncggtgatccttgccgtgccgcgcgcctcttcggggcgccacgtggccgccaaggagcgcaaggccgggcgggtcccgccatcatcttcaagcaggagaacggac

SEQ ID NO: 2155 - DNA, 287 bp, Zea mays
  misc_feature: Incyte ID No: 700345636H1
  unsure 35, 99, 140, 196: a, t, c, g, or other
tgcctgcgccgccctgtgctccggtcctccgcccnccgcatctgcctggtaccgtgctaatgccgccttcgcatccgtcctaccgcctgggtctccgcnctccgcggctccgccttgcgactttaccctgcacggcccgncgccggccggtcgcccgtccggagccactgacccgagtttccgtccagcactccanggaaccagcgcctgttcgtccagagtaccaacagatctcgtcaagaggtctgaaggatgaggaagggactgcatctcagatgcaatggatt

SEQ ID NO: 2156 - DNA, 283 bp, Zea mays
  misc_feature: Incyte ID No: 700345638H1
ctcgcggccccctccgccgaccgccgcctcctcacaaccgcggaagtgcttccctctccattggacgcggccagcttccatctctcggtcacctccctctacatcccacggccgctaccaccttccctctacctcacacggccgccggcctctccaaggcctgcacacgcattcagcgacgcatttgcctatatcagcactgtggtcataactctagtagagaaaggagaagatgcaggcatctagggcaaggcttttcaaggagtacaaggaggtacaacga

SEQ ID NO: 2157 - DNA, 276 bp, Zea mays
  misc_feature: Incyte ID No: 700345642H1
caacagctcgattgcccgggtcctccaaaaccctcgagatctcggttggtggtgtggtggggtgctcttccctctcgcctccgctccgaagcatcgatccgaactcctcggttactcgcggcagggcgtgtcgagatgcgccccaacattatcacagaggctgggattccaactaggttgaatcagtggtggagcagcattccgttcgttacttctggtgttatcttgatatgtggagtaatttatctgctctgcttgttgattggctatgattcc

SEQ ID NO: 2158 - DNA, 274 bp, Zea mays
  misc_feature: Incyte ID No: 700345643H1
  unsure 2, 12, 17, 22, 24, 64, 75, 93, 111, 165, 203: a, t, c, g, or other
gngttttgaganaatanacagnanattgtcccaactcgtagtgtcatcctctcgatgagagtangagtctcgttncttacacatatgagggtntttatctgtcttaagcgnagtacattctggatcttcttgatcgggcctctcttactgatagcggacagttgnggctcctatggaactcctattcatctatgtgccacggntggtgagcctcttgaagaccctaatcattattgtcacattgttgggcctcttgtttacgttggtgtgactc

SEQ ID NO: 2159 - DNA, 272 bp, Zea mays
  misc_feature: Incyte ID No: 700345645H1
  unsure 133, 148, 152, 156, 161, 163, 181, 230, 261-262, 269: a, t, c, g, or other
tcttctccatccatgcagatgcagaagatggatctcctcgtaaaggaggaggttccttggccccacctttcccatctaccatgtaccttgcggactgcgttctacgatatgctgatctactcaatccaccgangaaggctgctttgcntgcnttanttctnangcatctgatccagctgangctgagcgacttagattcttggcttctccttctggaaaggatgagtatntcatggataactgctagtccgaggagcttcnngaaagtnatg

SEQ ID NO: 2160 - DNA, 276 bp, Zea mays
  misc_feature: Incyte ID No: 700345646H1
ctggccttgcacagatatgggaagacatattgggatttgacaatgcagagttttatattaagcaatggccagaattggatggcatgcggtttggggatgtgttgatctcatttcctgatgccgtaccttgtggagtcaaggttgcttcaaaatctggaaagatcttgatgaatcctgatgatggttatgttttaagagaaggagatgaggtccttgttattgcagaagatgatgatacttatgctcctgcccctctaccagaggtgaataagggtt

SEQ ID NO: 2161 - DNA, 278 bp, Zea mays
  misc_feature: Incyte ID No: 700345647H1
gcagggggcacccaaaagggaggtcaagatcacaatctccagctcggtctcagtctaggtcacctgtccctgatcctagatctcaggcgaggtcaagatctagaagccaagagagggaggaggatgctgttaaccgtgggaatactctgtatgtgactgggctctcttcgagggttactgaaagggatgttaaggattatttttctaagcatggaagggtggttggttgccatgttgttcttgaaccccatacacgtgtttcccgtggatttgccttt

SEQ ID NO: 2162 - DNA, 279 bp, Zea mays
  misc_feature: Incyte ID No: 700345648H1
gtccgcctcaacggtccaaccctccggttcgacgtaggcgccggcgggaaatgaaggtctccgtgaagacgctcaagggatccagcttccatatcgaagtggatcctaccgacaaggttgccgacgtgaaaaaggttatagagagtatacaagagcaggttcctatcctgctgaccaacaagtgcttatacaccaggggaaggtgctcaaggacgacacaacattggaggaaaaccaagtagttgaaaataattttcttgttataatgctcagacagaa

SEQ ID NO: 2163 - DNA, 300 bp, Zea mays
  misc_feature: Incyte ID No: 700345650H1
  unsure 246: a, t, c, g, or other
atccgctgcagccatgagtaagttgcagtctgagtctgtcaaggatgccatctcccagattgttggggatgccaaggagaagaataggaagttcactgagactgtggaacttcagattggtctgaagaattatgatccacagaaggacaagcgtttcagtggctctgttaagttgccccatatccctcgtcccaagatgaaggtgtgcatgcttggtgatgcccagcatgttgaggaggccgagangatgggacttgactacatggatgttgaggctctcaagaaaatgaacaagaacaa

SEQ ID NO: 2164 - DNA, 212 bp, Zea mays
  misc_feature: Incyte ID No: 700345651H1
  unsure 129: a, t, c, g, or other
ccattgagctgaggccaacatcaattgagaaagaggtcttccctgcaaattgcagctgatcaacagctctatgcaatggtccttccaggtttttggatggatgttggtcagcctagggactacattacnggctgcgtctttatctagactcgattaggaagaaatcagctgccaagctagctactggagcacatgttgttggcaatgtgctg

SEQ ID NO: 2165 - DNA, 167 bp, Zea mays
  misc_feature: Incyte ID No: 700345652H1
  unsure 28: a, t, c, g, or other
gtccatagactcctccaagatgcttgtngtcctgctcacagcagccttgctggctctgagctcagctcagggcacggatgaagaggtcaacaatgctgagaccagtgatgtaccagcagattctgaacaacaacccgtggactcgggttcagatccaccttctgctg

SEQ ID NO: 2166 - DNA, 296 bp, Zea mays
  misc_feature: Incyte ID No: 700345653H1
  unsure 28-29, 31, 39, 51, 75, 97, 111, 155, 214, 231, 263, 268, 276, 278: a, t, c, g, or other
ggtggtggcacctcctgataaatttggnncnaactttantcaacgagaggngtaatggaagaacatttactgganctgagaatttccagctcccgancaagatgatgccanatggtggcatgcgtctttatggtggtgcacaataccatcgggcnatggctgaatttcgtctggtagttggtagtaccaggtgccctccaataactagggatgnaattgttaatgcatgtngtgttgatgataattcatgatggtacaaactnctccnggactgcntnaggaattgccgggcaaaa

SEQ ID NO: 2167 - DNA, 294 bp, Zea mays
  misc_feature: Incyte ID No: 700345654H1
  unsure 77: a, t, c, g, or other
gtgtatgtagatgggaaggcatggtgtggccaggtggtgtcgctgagcctgtcctcctacgggctcactggcacgcnctccacggccatcggggacctcacgttcctgcgtatgctgaacctgagctccaattggttccacggggaggtcccagcgaccatcgttcgccttgcgcatctgcaggcgctagacctgagctacaacgccttcactgaattccagagatgcaattcccgaggccatggagcagcagacaatatcaattgccaaagcagccattacaatagtactcat

SEQ ID NO: 2168 - DNA, 184 bp, Zea mays
  misc_feature: Incyte ID No: 700345656H1
gatagttacaaattttaagaacaatagaactttggaggtttatgtttagcgcaactaggtatcctgaccacatgaattttttacctgacagtttattggtgctataatgggtgcaagagatttaaatatacagacagaacatggacatcttggcatgcccagtaatatttgctgcgttgttgtt

SEQ ID NO: 2169 - DNA, 286 bp, Zea mays
  misc_feature: Incyte ID No: 700345658H1
  unsure 98: a, t, c, g, or other
ttgtcactgatccagatatgactctggtggatgggtctaagttggtatatcatcgttttccttggcaggagccatttgcgccgtatttgctggaagtnctctacgaggatgatgacatggttgcccttaataagccttctggcttgcaagttctgcctaaaggactgtttcagcagcgaactgttttagcacagcttcaattgaaagactggaagatggcctcatcttgccggttcaagagaaaagatgtgcagtcacatccagtacctgttcatcgtttagggag

SEQ ID NO: 2170 - DNA, 287 bp, Zea mays
  misc_feature: Incyte ID No: 700345659H1
  unsure 271: a, t, c, g, or other
taaaattggagtgtatcgatcagttaaggttaagcaggctacataacaatatatcatggacatcactgagtcgtctcgccattttatttcacgcctaccacaggacaggaacatttaggatacataatgcttagaactttgaataaatgaacaaagaactagagcagctctatttattagtgcctcaggaaagttatctgcttgggatccaaaagtgctgacttgtttaaattgaagataaaattagaaattgttaatagaaccaatggcncacattatatttattt

SEQ ID NO: 2171 - DNA, 288 bp, Zea mays
  misc_feature: Incyte ID No: 700345660H1
  unsure 132, 181: a, t, c, g, or other
ttctgaacatgaaaagttctcaggtactccgccgttgatgaactgcctccacacctgcagcgacaagaagacgctgaagaagtggtttttcatcgacaagacagtaggctaaatccagtcccagagaacaanctgaagcaccactccccagtaccgcacagcagcacagctcttctcttcnccgatcccgatggatatgggcagcggctcgtcacctgtcatcaccgatccgatatcgataagcccaccgctgctgggaggcttgacgtcgaacctgatgccgttctc

SEQ ID NO: 2172 - DNA, 288 bp, Zea mays
  misc_feature: Incyte ID No: 700345661H1
  unsure 42-43: a, t, c, g, or other
tcgattccgctgctctctccctcttcctctcccccgcggcgnngcataaaccctaggcctcgccgtcgtcggaggcgccgccgcgatgtcgcactttggaaggacgggtccgccggacatccgcgacaccttctcgctgctcgtcctcaacatcagcttccgaaccacggccgacgaccttttcccgctcttcgagcgctgcggcaaggtcgtcgacgtcttcatcccgagggaccgcaggaccggggactcgaggggttttgcgttcgtgcggtacaagtacgccga

SEQ ID NO: 2173 - DNA, 291 bp, Zea mays
  misc_feature: Incyte ID No: 700345663H1
aatatttatggtacacatgtacttcttgaggcctgcaggattagtggccagatcaagaggttcatccatgtcagcactgatgaggtctatggggagactgacgaggatgcagttgttggcaaccatgaagcatcacagctgcttcctacaaacccatatgcagccaccaaagcgggagcggagatgcttgtaatggcatatgggagatcctatggactgccagttatcactactcggggaaacaatgtctatggcccaaatcagttccctgagaagcttatcccaaagttc

SEQ ID NO: 2174 - DNA, 294 bp, Zea mays
  misc_feature: Incyte ID No: 700345664H1
  unsure 45, 91: a, t, c, g, or other
cttctgtcttctctgcctttcctccgcaatcacagaacgcaagangagagtgagggggctagggttttgtgcccccacccccaccacgccnccacgcatcgaatccgagccgggtcggggttgctgcgaatcgccggcggtgcttgggctgtgattccattgcaatggcatctgaaactgatgagaaagctaagatggagagtttgacatctgctgcagcctttgtggagggtggcattcaggatgcatgcaacatttgccttgaggccttctgtgagagtgacccttctgcag

SEQ ID NO: 2175 - DNA, 297 bp, Zea mays
  misc_feature: Incyte ID No: 700345666H1
gataaatggggatggcatatcccgcgtgggtaaatgtaaatgccaggtcatcaaaattcatgcgcgccatctagacgaacagagaaaaaatatattgatattgttatttttaggcatgatgcatgttattatattcctattatattcacaacatgtgtgaaaatggtactaatatgagctatgtattagtagtagtacacatattggtttcacaataaaaataccaaaattttgtgagccacggtaatgttcatcgacatttaagtaaggcggtgaaaattagctaaccaagtttat

SEQ ID NO: 2176 - DNA, 288 bp, Zea mays
  misc_feature: Incyte ID No: 700345668H1
  unsure 24, 27, 253-254: a, t, c, g, or other
gcagttttagcgggtacaagatcnacnccgggacacgggaggcgctacgccaggaccgacgggaaggttttccagtttcttaatgcgaaatgcgagtcggctttcctttccaagaggaatcctcggcagataaactggactgtcctctacagaaggaagcacaaaaagggacagtcggaagaaattcaaaagaaaagaacccgccgagcagtcaaattccagagggccatactggtgcattcttgctgatatnntggccaagaggatcagaaactgaattagaaaggc

SEQ ID NO: 2177 - DNA, 280 bp, Zea mays
  misc_feature: Incyte ID No: 700345669H1
  unsure 130: a, t, c, g, or other
tctgggaacgcccacttcgtcggctgaccgcaaggagaagccggcgttggagaccaccgacgcggaggtcgcctcgtcccgcaccgtccaggaggtcccggcggcgaactcacccggcgccgcgtcggangccgccgtggacaagccggtgatcagcgtcaacatcgagcaggaggtgaaggtggacgggaaccagatcatggacatgtacatgaagagcatgcagcaattcacggattccctggctaaaatgaagctccctgccttggacttggacata

SEQ ID NO: 2178 - DNA, 289 bp, Zea mays
  misc_feature: Incyte ID No: 700345670H1
caactagtttctgaaccagcgtgtccgctgtctggtctgtcaaaataatcttggtaaccagtgccaaaatgattgctgggggaggctattttgatggttctcatgaccatattctcatggaaggatcaatgatccatgattcttcacaatcttccatctatgacaatacagatgttgaacagcagaacttcagatttgcgccctttatcatagaagatcactccaatccagccaaccttacctctgaggctgcaagggtgatagaccaaattcaacaccagctggggat

SEQ ID NO: 2179 - DNA, 180 bp, Zea mays
  misc_feature: Incyte ID No: 700345671H1
  unsure 7, 14, 123, 129: a, t, c, g, or other
ttcttcnttcctcnctctagatctcgccttcacaacaacgacgaacagcgggtacgtacttggagatccaagaagctaagaaatgtcagcccagtttgcatccgagcatgcttgctatgtcanctgcanctattgcaacactatcctggtggtgaatgtgccaagcagttgttcctacaa

SEQ ID NO: 2180 - DNA, 140 bp, Zea mays
  misc_feature: Incyte ID No: 700345672H1
agaatagcagcggcgcccggaagaagcagcggggtaatgatggcaaaaagaggggtggtggctttacaaaattatgcagtctttcaccggcacttcaagagtttgtcggcgcctctgagttagccaggaccgaggttgta

SEQ ID NO: 2181 - DNA, 285 bp, Zea mays
  misc_feature: Incyte ID No: 700345674H1
  unsure 29, 43, 45, 48, 75, 92, 94: a, t, c, g, or other
ttcttcgtagcgccgacgctccatcttcngctccctcccttancncgngctcggcacgcgggtgacggcggcagnagcggcgctcaggatcngnctctcagcgacggcatcagcggtttcccctcccgcttctctccagtcgcctcgcgccctcgcctcccggtcctccgcacaccggccggtgaccctgcatatagggtgtgagactaccaatactcgaaaatgaacaagggaaagatttttaagctagccaagggattcagaggaagggcgaaaaattgcata

SEQ ID NO: 2182 - DNA, 282 bp, Zea mays
  misc_feature: Incyte ID No: 700345675H1
  unsure 226: a, t, c, g, or other
tccgcttttactagatcatcagtagccagctcaggagccgagcctggtcagggtagccaagcccatcccggtcctctcccggcgtcttctccctccgcaccgcggctccggcgatggcgggcgtcggctccgcgctgcgtcggctctacctctccgtctacaactgggtcgtcttcttcggatgggcgcaggtgctgtactacgcggtcctgacgctgcgtttgancgggcacaaggccgtctacgccgccgtcgagaggccgctgcagttcgcgcagacag

SEQ ID NO: 2183 - DNA, 286 bp, Zea mays
  misc_feature: Incyte ID No: 700345683H1
  unsure 58, 96: a, t, c, g, or other
gtccagagcgctcgacctaggcgagtgggtgactgcttcaaccacgagcgcacgcggncggcggcgccatctcccacggatgtagcttcgtctccntcccgttcgctgtcgtcgacgccatcatccacgagcacagcgcggcgccgctccataccgagtctgtgggcctaacaccaggggagtcgccctccagccctcgcccggctgcccctgcctctgcccctcggctccgaccaccgagttttggccaagtcgccaatcgctcagccagtcagccatagagatt

SEQ ID NO: 2184 - DNA, 284 bp, Zea mays
  misc_feature: Incyte ID No: 700345684H1
  unsure 20: a, t, c, g, or other
gcaaaacaaactgtggttgntagacccggaaataaggagcccctattgcctgaaccaaagtcggtgtttcaaaagcctgtaggagtttcctcatatgtccggtacaacagtagaggtcgcggaagaggaagaggccgtgggcaatcgcatcccataaccaagttcacagaggactttgatttcatggcaatgaatgagaagttcaacaaagatgaagtatggggccatcttggtaaaagaatagggcagttaaatgatgaaccaaatggttacgaagatgatgt

SEQ ID NO: 2185 - DNA, 282 bp, Zea mays
  misc_feature: Incyte ID No: 700345685H1
  unsure 223, 225: a, t, c, g, or other
ctcaagtccaaccacccctccatccgatgcgtcgtcctcgacatgggcgccgtcgcggcgatcgacacgagcggtctagacgcgctgtccgagctcaagaaagtcctggacaaaagaaacatcgagctggtgcttgccaacccggtggggtcggtggcggagaggatgttcaactcggcggtgggcgagagcttcgggtcgggccgcctcttcttcagcgtangnaggccgtcgcggcgggggcgtgcaaagcggcgcaccctgaacgacgacgacaggctg

SEQ ID NO: 2186 - DNA, 281 bp, Zea mays
  misc_feature: Incyte ID No: 700345686H1
  unsure 93, 142: a, t, c, g, or other
cttccagatctccccgacgaggaggaagtctctacagcggaggggagggagatgtcgtacatgcggggtgacctgctgacgaggatgcggaanctggtgaagggcctcgccaggcccgagccccggtggctcaaggccttgnaacgggctccgccagtgacatttcctcgcccagaggggaagatcaagactctggtgcttcctgaggatgtgtatgtcacgaagttcaacagaatacatccagattcgctttaccatgatgcaatcaagataagtggatt

SEQ ID NO: 2187 - DNA, 275 bp, Zea mays
  misc_feature: Incyte ID No: 700345687H1
gttgctgcaaagaagcatcttatcgacaatgtgaagaaaaccgtcaaaggacgagcacaacttggggtggaggcgtttgcggaagctcttcttgttatacccaagactttggctgagaactctggtttagatactcaagatgtgattgtttctctccagaatgagcatgaccgtggattagttgtggggttgaaccatcactctggggatccgattgatccccagatggaaggcatcttcgacaactatctgtgaagcgccagatcatcaattct

SEQ ID NO: 2188 - DNA, 209 bp, Zea mays
  misc_feature: Incyte ID No: 700345688H1
  unsure 49: a, t, c, g, or other
cgagagcaacggaaaattctctaatcaaacaatggctactaagtttgangtgcaaacagcaccactgagtgacggagttctccctgggattatgcgtcagatagtgatcgaggtgtgccatgatattggaatcccagtacgagaggtctctccatcgtggtccatgaatgaattctggaaggaagcctttgttacaagtaataataata

SEQ ID NO: 2189 - DNA, 276 bp, Zea mays
  misc_feature: Incyte ID No: 700345689H1
gcatcggcggcgactacccgctgagcgccaccatcatgtccgagtacgccaacaagaagacccgcggcgccttcatcgccgccgtgttcgccatgcaggggttcggcatcctcttcggcactatcgtggcaatcgtcgtctcggcggcgttccggaacgcgttcccggccccgccctacttcgtcgacgcccaggcgtcgcttcgtcccggaggccgactatgtctggcgcgtcatcctcatgttcggcaccgtcccggccgcgctcacctactat

SEQ ID NO: 2190 - DNA, 279 bp, Zea mays
  misc_feature: Incyte ID No: 700345690H1
  unsure 74, 176, 178-179, 181: a, t, c, g, or other
cccctcttccctttctagccttccacccttcatccacccgccgctcctcgagcacccccgtcccgcgccgcctnccggctccggcgagatgtcacgcttcggtcgatccggcccgccgccgccgatccgcgacacgtactcactcctcgtcctcaacatcaccttccgcacaactncnnangaccctcttccctctcttcgacaagtacggcgagattgtcgacatctacatcccaagggaccgccggactggtgactcgcgcggattcgcgttcgtga

SEQ ID NO: 2191 - DNA, 274 bp, Zea mays
  misc_feature: Incyte ID No: 700345691H1
  unsure 181: a, t, c, g, or other
agaaagtcttgatgatgaactgtccactgaaatcatagataaatgtgacgggataccattggctatcattgcaatagctagtttgttggttgaaagaccatgtgaggagtggtcaaaagtgtatgactcaatcagtcttgggaatggagacaatacaacaaagatattgtcctacagctantatgatcttccttcttatctcaagccatgtctactgcaactaagcatatttcctgaagactatcagtttgatacaaatgctgcaatatggatg

SEQ ID NO: 2192 - DNA, 279 bp, Zea mays
  misc_feature: Incyte ID No: 700345694H1
  unsure 54, 93-110: a, t, c, g, or other
acaattcgcaccacattattgtcttgtgttgcccgcaacccaaagcggatcaanccctagatctcgtccccgttcctccgatcctcatggatnnnnnnnnnnnnnnnnnnagcctgagccagcagcccgagttcgattacctcttcaagctgctgcttatcggcgactccggcgtcggcaagagcagcctcctcctccgtttcaccgccgactcctttgaggacctttcccccaccataggtgttgacttcaaggtgaagatggttaccattggtggca

SEQ ID NO: 2193 - DNA, 180 bp, Zea mays
  misc_feature: Incyte ID No: 700345696H1
  unsure 80, 170: a, t, c, g, or other
aaccaacgaggcaacgaccaaacgtccaaacccttccccctccctagctccgtgctccagcgggagtcccgcggcggctntgaagatgattatcccagtgcgctgcttcacctgcggcaaggttattgggaacaagtgggatctatacctcgacctcctccaggccgacnactcagaagg

SEQ ID NO: 2194 - DNA, 336 bp, Zea mays
  misc_feature: Incyte ID No: 700345701H1
  unsure 36, 72, 76, 132, 152, 178, 184, 246: a, t, c, g, or other
atccagccgccaccaggtgcagagtctttcgtcatntcttctccggcgaagaacccccagtcgcccaccagntcanttgttaaactttgttgaggggtgatggcggtttctttcgcaaacctcagctccgangcagggcttaaaaagcttgntgagtaccttctcactcgcagctacntcactngctaccaagcttccaaggatgacttggctgtctacacttcgttttcgtctgctccctcgtcnaagtatatcaacgtagcaaggtggtttaatcacattgatgcgctcgtgaggctgagcggaattactgcagagggccaagtgtgaagttga

SEQ ID NO: 2195 - DNA, 335 bp, Zea mays
  misc_feature: Incyte ID No: 700345702H1
  unsure 2, 4, 65, 241, 248, 288: a, t, c, g, or other
ananatgcaaatcaaagagaagattgtgcctctgaagattgacctccgagtgaacaacactgtanttagggaccagttcttatgggatatcggcaaccttgatagtgaccctgaagaatttgcgaggacgctgtgtgatgatttgaacattacagaccctgaagttgggcctgcaatagctgtttccatccgtgagcagctttatgagattgctagtcagagcgtctctgttatgagaganaagcaantgtcaaagaagggaaggcgagcaccagaattttcttcaantagtaaagccgtgaacaatgcagtggatttgttcaagtattttggca

SEQ ID NO: 2196 - DNA, 333 bp, Zea mays
  misc_feature: Incyte ID No: 700345705H1
  unsure 58, 78, 96, 141, 174, 203, 254, 319, 324: a, t, c, g, or other
attggttatttctttgtgctaatgactacacagttgaagttactgttttcgtgagganttatttgtgaaagtctccanttttctgtacaacgctgntatgattcatggcggcgttgtggagcatgctcatatgcgtgaaanataagatcatgtacccatgctttgacgcgaacncgaggcatggaaccgtcgtcgacacttcntcgtggccgccatgctccatgttcaacacagcttcaggcgccgcagtgacnttgtacccatgctccagatacagacggactgccactgagaccgtctttcaggggaaaagaacacntctcntcaatgtgg

SEQ ID NO: 2197 - DNA, 333 bp, Zea mays
  misc_feature: Incyte ID No: 700345706H1
  unsure 14, 62, 65, 86, 98, 114, 120, 146, 174, 189, 211, 253, 257, 281, 290,: a, t, c, g, or other
gtggcattgagganatcctaccacttggaccattaaatgagttcgagagatctggtctgganaangcaaagaaagagctggcgganagtatccacaanggcgtctctttcatcnagtgangccggcgacggcagcccaacataganatagatgtggcgtgtttctgcttcttgngaactcatcttgttntctctctgtaagactgagtgcntgacacgaataatccacgtacacggctgtactaaaaagatgntgantctgtggtggctaaaaaaaggtanatagaaaantctggtantanaagttgtttctgaacnaatgggtttctgaagt

SEQ ID NO: 2198 - DNA, 329 bp, Zea mays
  misc_feature: Incyte ID No: 700345710H1
  unsure 228, 255, 327: a, t, c, g, or other
caatatctcaattctcaactcctatcacaagccatatgaacaaggatcatgccaatgatacaaagctcattgtgcaacactccactactgtcaaggtggattttgcttatatgctggacgtggacagccttggttttaatgtgaaggctggttatgatggaagtgttctgaagttgagaatccccttcccaagacaggcgcaagacaggaaggatgttaagacactanttgtggaaatgctccaagctgcaagancctcatcttcagatcctgaatgatgtcgtcgttctggaatgtgaagaatcgtgcaaattgaagtaaacctantg

SEQ ID NO: 2199 - DNA, 294 bp, Zea mays
  misc_feature: Incyte ID No: 700345711H1
  unsure 25, 27, 31, 68, 175, 178, 181, 184, 187, 190, 261, 266: a, t, c, g, or other
ggagaggacgaggtgacggacgganangganacgactaacagacgctgctgacagagtggcgcacganatgagaggagagttccgaaccccccttctccgctgtactgtacatgagctgctgacgtgtgtcggataagtagtagtagctggcgtcccggcgggtgctggaaagantantantantantantgtaacgaaagatggccgccttgaggttgagggagcgaccgagcgtgaagcaacttggccgccatggacantacanttgggacacagacacaccggtcgtctcc

SEQ ID NO: 2200 - DNA, 330 bp, Zea mays
  misc_feature: Incyte ID No: 700345713H1
  unsure 43, 45, 89, 161, 210, 232, 253, 255, 272, 308, 314, 316: a, t, c, g, or other
gaggatgatgatcccgctggttctgaggatgcatcaacagganangaagctgatggggactctgaggcaaatgatcatgctttgagtgntgatgaacatgatgagcctgctgcaaagaaaaagtcttcagatgttaaacaaaagaaagaaacaggttctgntgcaaaggaaaaggatgcaccaggaaaaaaaggttctacgaaacgtgcntcaaagccttctcaaaacagtnaaaatgagcctgaggtagagntnaaaaaggttggcaaganagaaaagagttcaaaagaaactgacgtgtcaccagnttcaantnagtcaaacaagaag

SEQ ID NO: 2201 - DNA, 328 bp, Zea mays
  misc_feature: Incyte ID No: 700345714H1
  unsure 9, 24, 28, 34, 42, 48, 54, 56, 64, 75, 91, 119, 163, 168-169, 186, 198,: a, t, c, g, or other
atggcgcanatgtcattgattgcnccgntcaagngaccaaanacggantaccantntgcatganttccattgacntgatgaacgatactantgttgcaagatcacaatttatctctcanactgccacgataaaggatattcagattgcacaaggggtttttanttttnntctcacctgggatgacnttgtaaacaacntgcagcccaaantntccaccccntggtantccttcagnttggaccgaantccgagntntaggaatgcaggaaagttcatgaggctntcagnntttctggacttcacaaaagacaaagntttgtatggatc

SEQ ID NO: 2202 - DNA, 330 bp, Zea mays
  misc_feature: Incyte ID No: 700345715H1
  unsure 7, 41, 60, 187, 189-190, 205, 218, 281: a, t, c, g, or other
cactgtngagcagattcttttaagcattcaagctgctcaanacagggtattcagtctganatcaaatctcaagcaagcaatggctaggaagaataagggaataacccttaaaattaacacatccgtcattggtacacacagctcaaattgctcaccaggaaagggcaaagttgctggactgcatgananntctccccaggacacntcagaatgtgatntggatgattctggcatgcctgatagtgctctctcaagctatggagaagctagcaacatggatntttttgagagcaccatgagcctattgtctgaaggcccacatcagatggg

SEQ ID NO: 2203 - DNA, 332 bp, Zea mays
  misc_feature: Incyte ID No: 700345716H1
  unsure 32, 35, 37, 52, 60, 63, 100, 104, 172, 211, 214, 227, 235, 287, 291,: a, t, c, g, or other
gtccattctgaagtccggcggcggcggcaccngcnanggcgaggcctctgcnacttccanatntccccgacgaggaggaagtctctacagcggaggggangganatgtcgtacatgcggggtgacctgctgacgaggatgcggaactggtgaagggcctcgccaggcccganccccggtggctcaaggccttggaacgggctccgccagtnacntttcctcgcccanaggggaanatcaagaatctggtgcttcctgaggatgtgtatgtcaggaagttcaacagantacntccagattcgctttnccatgatgcaatcaagatnagtggat

SEQ ID NO: 2204 - DNA, 291 bp, Zea mays
  misc_feature: Incyte ID No: 700345719H1
  unsure 44, 50, 78, 111, 114, 251: a, t, c, g, or other
attcttttatctgatgctggttaaagtttgggcatgattcctanttagantagtggtatatttcgtattatttttggntcgtattgttagaaagaggttcagagataaganaanttaagaatgctgtaacagccatccttgcttttttcagtttttatttaaaagccttaccatgtgtctatttggtactgctcaacttcatgatttgcagcttagctttacaagaagtctgttggtcacttgttaccaantgctatggatcaaaaacaggacaacacaattgttaaggat

SEQ ID NO: 2205 - DNA, 225 bp, Zea mays
  misc_feature: Incyte ID No: 700345720H1
  unsure 5, 82, 84, 103, 105, 110, 137, 168, 175, 223: a, t, c, g, or other
atcantggcaaaactatctacctgtagcaacgaaagaaacgagggtgatgatagcgcataagtgaactcaacaagcaagagntntcgtcaccaccaaaatggntnaaacntagccacactagcaacggcataccagntcttacagaccccaaaaagaaaagctcctanatcgtcntcaacttcgtgaaggtgtttgctttttgcgcacctaacagtaggttcnta

SEQ ID NO: 2206 - DNA, 326 bp, Zea mays
  misc_feature: Incyte ID No: 700345722H1
  unsure 50, 72, 121, 180, 292: a, t, c, g, or other
gtttttcctcttaaagcagagctactgaaacctcaagcagaaatggaganatttataacggatttggtaaanaaaagtgtgcaagatgtaactggttcagaatttgaactattcatggggnttctgcgaacttgagcatatttggggattctgctcctagagagtcctttcaagaactanttgaaattattcaagcacaggctgatctcaactcacaattcaatgtttcggacattgaccacattgaaaggtggatttcatgcatgtatatggctcttcctatcttcatganaggagcatcagcaagcaagttcctcaattacttc

SEQ ID NO: 2207 - DNA, 324 bp, Zea mays
  misc_feature: Incyte ID No: 700345726H1
  unsure 32, 37, 87, 161, 166, 206, 248, 312: a, t, c, g, or other
atcaacatgctcagatatcttggtcagaacanaaganaggttggctagagttgaagtatcttcacaggcaccaagaagatcaattantttatctatggaacctgctatttcaagagagtgagcaagatttatgtagtctgatggggaaaatataactgtanttgcngcagtgactgcaaaaataagatctagtgaccctatagaanttatctctgctattcgagggccaagtattttgctgaacccanttctatttgtctcaagttcagacagggatctgcatgccatgagagcttgagttgtgtttaccantaaaatctcgat

SEQ ID NO: 2208 - DNA, 325 bp, Zea mays
  misc_feature: Incyte ID No: 700345728H1
  unsure 2, 10, 63, 66, 125, 131-132, 201, 207, 213, 232, 235, 238, 273, 278, 299: a, t, c, g, or other
ancccccganaagaggtttactggtacaatagttggctgtgaaaatcttgacccactatggcntgnttccagttggagatacttgaaggtgcgctgggatgagccttctactatcccgcggccanataagnnctctccctggaagatagagcctgcttcatcacctcctgttaatcctctccctctttctagaggaaaaanacctanacaaantgcacctccaccttccccngantcntctgttctcacaaaagaaggtgcaaccaagattgntatgnttctgctcaaacaccacatcnaaattcggtcttgcaaagtcaagagc

SEQ ID NO: 2209 - DNA, 324 bp, Zea mays
  misc_feature: Incyte ID No: 700345729H1
  unsure 3, 5, 56, 84, 119, 151, 184, 203, 256, 299: a, t, c, g, or other
aananatcaggtttgttcacaataaacttagcaagcttggcataaaggtaattgtnattcacaatctgatttgggcggaaaaanatatcccagctttggctgatatacttggtgatgangacaaggctaaagaaattgttgaagcagcaanggcttcaatggtccaggatctgtcaccagttgntttgatcaatgtccagcantttgcccaaagggttatgaatctctctgagtatcgcaaaaacctttatgaatntctcgtgactaagatgaatgatattgcgcccaacctgacatcnttgattggtgaagtagttggagctc

SEQ ID NO: 2210 - DNA, 326 bp, Zea mays
  misc_feature: Incyte ID No: 700345731H1
  unsure 23, 96, 105, 183, 185, 194, 302, 308-309: a, t, c, g, or other
gatattcgtcgttggtgcttgtnttgttcccatgcctggtagaatgcaggctgctggcatttatgcagctgtattattccatcaaggatgcaaggnacgtgagancaaatcacgagcagcaacgatggtggcggctgtctacacttgggcctaggcaacattcatattgaactggacaacatntntgcttagcntagcatttgaaacgcacaggagaaaagaaaaaaaatgctcgtgttgcagttatctgcgaacttgcagctgcattgagtggtacctatgtagagagccgattttttttntctttnnatacaagtcgatcggca

SEQ ID NO: 2211 - DNA, 326 bp, Zea mays
  misc_feature: Incyte ID No: 700345732H1
  unsure 50, 67, 145, 256: a, t, c, g, or other
gcatgtctgttgtagaagaaagctttgagtaccttgatgccccagttganaggatcgctggagctgntgtacctatgccctatgctgccaaccttgagagaatggctgttccacaggtcgatgacattgtgcgggcagcaaagcnggcctgctacagggcagtaccaatggccgcagctgcctgattggtgtacagacctttctgtttttcttcctcagttttcgctctctggcagcaagaaacatgtagtattcntaaagtgccggcaaattggccggaccccagactccaagcgagctagtttttgtagatctgctatggtgtg

SEQ ID NO: 2212 - DNA, 323 bp, Zea mays
  misc_feature: Incyte ID No: 700345733H1
  unsure 2, 13, 29, 34, 38, 40-42, 80, 106, 177, 179, 181, 225, 236, 260, 266,: a, t, c, g, or other
cnttgtactcggnctcgccttggcccgantcgcnggancnnnacgccgccgctccactcccaggctcccagctgcccttngcgaccgtcgccgccggccgccctantccgagctgttcaggacgctttgctggcgagcacccaccacaccagttgctaggactacatgaatggatcntntnctagctcgttaagcctccatgatgtcagtgtcgacgatggacantcagctcttgntaacagcagtagaacctctagtcnttttgntntcntgantcctcaagatgttntccctntcgaaacggcaaggtctagattcttgga

SEQ ID NO: 2213 - DNA, 322 bp, Zea mays
  misc_feature: Incyte ID No: 700345735H1
  unsure 14, 29, 39, 41, 106, 108, 110, 120, 128, 180, 194, 200, 232, 278, 285,: a, t, c, g, or other
ccgcggcgcacgangcgacgaacccgacntcctcctccncncccgtccctgccaccggtcgccgatgagctcggagggctggggcgctgacctgagttttatggananangatgccaganctgcgaanatgactcgccaagcatgcctaaggtcgaagaagcttgaagatctgcagccangagagccgcctgcnaaaccngtgtcacctgctccgccgagggcaccaaagcntgctcctacacgtgctgctaggggcacaaacggtgccatgggaaangagtgcnccccgcacctganactagaacaaagcngggtaatatt

SEQ ID NO: 2214 - DNA, 321 bp, Zea mays
  misc_feature: Incyte ID No: 700345737H1
  unsure 2, 8, 11, 21, 24, 28, 31, 35, 37, 44, 57, 59, 63, 90-93, 99, 108, 153,: a, t, c, g, or other
angcacancantttcaagcantcnctangcngtgncnacgtgcntgggaaggattcnantcangggcgaactaggtgacggacgtgttannnntctctngtagctgcncgacgcggctggcttgtccgatcggtttgcctcggccatgtcgantaananagttctttgcaagttcttcatgcatggagcttgcttgaaaggagagtactgtgnnttctcccacgactggagtgntcaagcaantaatgtttgcacnttctnccaaaaaggtgcatgctcgtatggtagccgttgcagntntgaccatgtcnaantttctcg

SEQ ID NO: 2215 - DNA, 322 bp, Zea mays
  misc_feature: Incyte ID No: 700345738H1
  unsure 41, 147, 188, 190: a, t, c, g, or other
aagccatcttgcagactgtgcatcacaatgcctactccgangatccttatgcccaggaatttggtataaagattgatgagcgtcttgcatccgttgaagctcgtgttctgcctcctccaaggctgaaataccatgatagtggcaganagagggatgtattgccaagagttgggcagtggaatatgatnantaagaaaatggtcaatggtggtagagttagcagctgggcatgcattaacttctcacgaaatgtgcaagatggtgctgctaggagtttctgtcatgatctcgctttgatgtgccaagtatcaggaatggattt

SEQ ID NO: 2216 - DNA, 322 bp, Zea mays
  misc_feature: Incyte ID No: 700345739H1
  unsure 21, 47, 59, 138, 146, 234, 244, 264, 269, 276: a, t, c, g, or other
cagtagtacccagtagccatntccatccaggctcaaaccctagggantctacccagaantcacatcccaagcagggtcatatcgtatcaagaagccgtcgcgggggccggatcgccgcggctcggagaggagcggagncacaatcntctgcggacaggtaaggattcggaggcgggatcaggagctgagggaacctgttcgaggtggcctagactcgtagggatcgcgttgacnttgggagaantcacggagaggcggaaagcnagcantagccantaggggaagggaagagcccaagaattcgttgcatagatccagcaga

SEQ ID NO: 2217 - DNA, 316 bp, Zea mays
  misc_feature: Incyte ID No: 700345742H1
  unsure 29, 38, 81, 149, 297: a, t, c, g, or other
acgatggcgagcggcacatgaagaggganatcagcganacccacgacaccctccgcttcggcctcaatgccggcgtcaagnccgacctcgcgccgccgcacccgctccagtccagcatccaatcggaggccaagttctgggcggacaanaagaagtttgggacagaggccatctacggatccgccttgaacatccgcaaggatctcgatgcccaaatcctctcaaggttccaaaggccccctggtgctttgccatcatctctgcttggatatgaggcatgacaggttccctagatgnttttggttttgaagattat

SEQ ID NO: 2218 - DNA, 314 bp, Zea mays
  misc_feature: Incyte ID No: 700345743H1
  unsure 13, 17, 23, 123, 210: a, t, c, g, or other
atccgaccccaantcanttccanattcaatccggtctcagtggttggcccgccgctgccagtgccagatcgaatcggactctcggctcgtgtgcagcccaccggcgagacgccaagctatatncttatgcccatctgatccgatgcgtggtgtggcgtcgtctccgcttttactagatcatcagtagccagctcaggagccgagcctggncagggtagccaagcccatcccggtcctctcccggcgtcttctccctccgcaccgcgctccggcgatggcgggcgtcggtccgcgctgcgtcggctctacctctc

SEQ ID NO: 2219 - DNA, 177 bp, Zea mays
  misc_feature: Incyte ID No: 700345747H1
  unsure 25: a, t, c, g, or other
accacagctccgatcgatccgcaangcaggcaagatgtacaacgcgccgtcggcccaggagatgtcctacttggagcacgtgcagaggcgccacgaggagaagggctgcctctacgcctgcatcttcactgcgctgtgctgcttctgctgctacgagacctgcgagtgctgcctcga

SEQ ID NO: 2220 - DNA, 116 bp, Zea mays
  misc_feature: Incyte ID No: 700345749H1
tgtaccagcggcgtcaagatgagtcggcaccctgaagtgaagtgggctcagaggatcgacaaggtttacatcactgtacagttacctgatgccaaggacgctaaggtcaatttgga

SEQ ID NO: 2221 - DNA, 297 bp, Zea mays
  misc_feature: Incyte ID No: 700345751H1
gagaatgatggtgactcacaggttgatttggaatcaaacaagggggatgcaggtcttgatagcaacgggttgcactcaactaaggagaacagtggcagggcatcaccaactaaacaacaccagcagtataagaagaagtctctgctgaagagattcggtggtctgctaaaaaagaaaagcgaaaattagcataaaactgtctgatgatattctttgttctatcatttgacatattttttgtaaaccctctcagagatgctgaaagccaacttactattgagagtactatgaaacctc

SEQ ID NO: 2222 - DNA, 295 bp, Zea mays
  misc_feature: Incyte ID No: 700345752H1
  unsure 100, 183: a, t, c, g, or other
cccgtgctggtgccattgccccatgtgaagtcactgtgccagcccagaacactggtctcgggcccgagaagacctcctttttccaggctttaggtatcancactaaaatctccaggggcaccattgaaatcctgagtgatgtgcagctgatcaagactggagacaaagtgggagccagcgaanccacgctgctgaacatgctcaacatctcccccttctcctttgggctggtcatccagcaggtgttcgacaatggcagcatctacaaccctgaagtgcttgatatcacagagga

SEQ ID NO: 2223 - DNA, 296 bp, Zea mays
  misc_feature: Incyte ID No: 700345754H1
aaagggtttctccctggcaaatagaacctgcagtcagccctccccctatcaacccacttccagtgcacagacccaagagacctcgctctaatgctgtagcttctctgcccgagtcttcagctccaacaaaagaagctgctccaaaggtcacattagagactcaacaacatgccctgcaaaggcccttgcagacccaggataatgtggccccgaaaagtgtttttggtgataacagtgaattggactctgctcataagtcctccctgcgaccgtcagttttgatctggacaagagca

SEQ ID NO: 2224 - DNA, 298 bp, Zea mays
  misc_feature: Incyte ID No: 700345756H1
cttctggtcaccttctgttctctccatgtagcattatgtatgaaactctttgagcacaaacctttcgatgcaaggaccgtcatgggattcggagtgctcaatggcatatcgattggacttcttaacttgagtttgggtttcaattctgttggtttctatcagatgacaaagctggctattattccctgtactgttatactggagacccttttcttccaggaagaaatttagtcggaacatcaagctttcccttagtgtgctccttcttggtgttggtgttgcaactataactgatctg

SEQ ID NO: 2225 - DNA, 165 bp, Zea mays
  misc_feature: Incyte ID No: 700345757H1
  unsure 44, 146: a, t, c, g, or other
cactggttcagtgaccctgaagctgtacaagggttccgtgaacntcgcgtcccggaagagcccctacagcctgtacagggaagatatctcctcgtttgagaacggggagatctacaaccaagctgacgccgaggggttcatcaggntgtacggcctaccgacacg

SEQ ID NO: 2226 - DNA, 299 bp, Zea mays
  misc_feature: Incyte ID No: 700345758H1
  unsure 2: a, t, c, g, or other
gnctctggctttggttgtggctaagcctgatccaaaaccagagcctaaacccgaaccaaaaccagagccccaaccaaaaccagaacctaagcccgaaccaaaaccacagccagaacctaagcccgagcccaaaccaaagcctgaccctccacttcctcagttgatagctgctggtgggatgtggctattaacaattattgtagtgtttaaataaaatgccatgttgcagcgtgcttttgtaggtgctgctacttgttgtatctatcctatcttttctttgtcattttttgtatgttatg

SEQ ID NO: 2227 - DNA, 164 bp, Zea mays
  misc_feature: Incyte ID No: 700345760H1
  unsure 35, 38, 44, 157: a, t, c, g, or other
tcgattccgctgctctctccctcttcctctccccngcngcggancataaaccctaggcctcgccgtcgtcggaggcgccgccgcgatgtcgcactttggaaggacgggtccgccggacatccgcgacaccttctcgctgctcgtcctcaacatcagnttccgaa

SEQ ID NO: 2228 - DNA, 304 bp, Zea mays
  misc_feature: Incyte ID No: 700345762H1
  unsure 28: a, t, c, g, or other
taatctgttgggaaccttaatttttgcnggcctgctgtttatacttaactccacaagaccagaccgaatcatggttcagccatcttttcaaaatacccctccttgtggtgtctctaatataccagctctattagggtcttgaactgaaggatgctgccacgagatattgttatttcaaccctgttgatacttaagctattcggttcaatggtgcaaggaatacactctaatacgattttgcatcgtccgatacatatatttatggtagagcgccctagcttccttgttctagtgttttttaagg

SEQ ID NO: 2229 - DNA, 154 bp, Zea mays
  misc_feature: Incyte ID No: 700345765H1
  unsure 21, 48, 51, 54, 73, 82, 86, 118, 144-145: a, t, c, g, or other
cacatgcagggatattgttanatgcagctcttgtcaaggtaattgtcntanacnagtgtacatcaagatctgntgttagcanaggnggcagtactacttccagtttgatatgcaagtnatgtctccagaagcgaaatcttatgnncactagtta

SEQ ID NO: 2230 - DNA, 180 bp, Zea mays
  misc_feature: Incyte ID No: 700345766H1
catcaaacaaaattaaggttttgatggcaacgaacagaatagacattttggatcaagcccttctgaggcctggccgcatagacaggaagattgaatttccaaatcctaacgaggattcacgtttcgatatcttgaagatccattcaagaaaaatgaacttgatgcgtggcattgatctga

SEQ ID NO: 2231 - DNA, 289 bp, Zea mays
  misc_feature: Incyte ID No: 700345767H1
agctccatagcacttgttccagctagctaggagagagagctttgtttaggcggcggcaagatgaacaggaagccaggagactgggactgcagggcgtgccagcacctcaacttcagccgtcgggatgcatgccagcgctgcagtgaaccacgtggagttggtgatcgtagcggcggtggtggcgacttgggtgggcgtggtggttcctccttcggcggtggctttggtgctggctctgatgtccgccctggtgactggtactgctcctgcggcgcacacaacttcgcca

SEQ ID NO: 2232 - DNA, 291 bp, Zea mays
  misc_feature: Incyte ID No: 700345769H1
agctaccgccgccgccctacgccaggtgctgaggtcttcgtcgatctcgagctcccacaagggaagctgtccaggatgggatacaaccgccacaggcgtggccggggatcatcctcatcgtcttcgcgccgcaccaagcaagaagcctcgtgtgatgatgaccttgggacatcacttccaaggcaagaaggcacagaagacgaactcaaaggttcaagaattcagcttgcaatgtgggactttggtcagtgtgatgttaaaagatgcactggtcgtaaactttcaagattt

SEQ ID NO: 2233 - DNA, 290 bp, Zea mays
  misc_feature: Incyte ID No: 700345771H1
  unsure 2, 201: a, t, c, g, or other
gncggcggcaccggcaggcggcggccctcgggcattgtcccagcgggagcaggacatccagatgatgctcgccgccgatgtccacctcggcaccaagaactgcgacttccaggtggagcgctacgtgtacaagcgccgcactgatggtatctacattattaaccttggaaagacctgggacaagcttcagttggccgccanggtcatcgttgccattgagaatccgcagacattatcgtgcagtctgctaggccctatggccagagggctgtcctcaagtttgcgcatac

SEQ ID NO: 2234 - DNA, 293 bp, Zea mays
  misc_feature: Incyte ID No: 700345772H1
cttctccaggaaagtgttcgtcctcatggcgccgccgcagccgaagtcgggcctcttcgtgggcatcaacaagggccatgtcgtcaccaagcgcgagtgcctctgcgcccgtcccaccgcaaggggaaagcaacgaagagggtgtccatggtcaggggcctgatcagagaggttgctggctttgctccttatgagaagcgtatcaccgagcttctgaaggttggcaaggacaagcgcgctctgaagcttgccaagagaaagcttggaatcacaagagggcaaagaagaagaga

SEQ ID NO: 2235 - DNA, 293 bp, Zea mays
  misc_feature: Incyte ID No: 700345773H1
  unsure 45, 182: a, t, c, g, or other
cttatcttcattgccactatcggtagccgccactgcaaaatcaancggaatactcctacatggattagagtaaggtacttagcttggccagggagggaactccgagctgaaacttgggcaatttctggttgagaaagaaaagacgagacttggtttccaccaatttctcatgttcggttgancagatgtgtaggtggcagtgcagcaagatgagacctgtctgaagaatttggaagctgaaggtgagcgttggtggaaaccaagtctccagctgcacgcaaagcacaagattt

SEQ ID NO: 2236 - DNA, 289 bp, Zea mays
  misc_feature: Incyte ID No: 700345774H1
ctgttctggagactcctgatggccctgtttttgagagtaatgctatcgcacgctatgttgctcgcttgaaggatgacaaccctctttttgggtcttcccgtattgaacaagcccacgttgagcaatggatggattttgccgcaacagaagttgatcctggtgttgcatggtacttgtatccaaggcttgggtacctcccttatgttagcacaactgaggaaacagctatttcttcattgaagaggtcgcttggtgctctgaacacacacttgcttcaaacacatacctt

SEQ ID NO: 2237 - DNA, 293 bp, Zea mays
  misc_feature: Incyte ID No: 700345776H1
atccgatgctttttcagggctgcatccgggtatgaagctccaaaggctttggagaacttttcattggaaacagggtttcaagtttctggggaatctagatctatttctttgtggagacttaactactatgagtgggcaatgcaaatttttgagcaacactccatgagcgagggggcgtaccaatttgctcttgctgcactagaactagttgatatcgtcgacgggatagataatggaattgaagctgagggtcttccagagaccgcagcaatgattaaaggacgactatgggc

SEQ ID NO: 2238 - DNA, 108 bp, Zea mays
  misc_feature: Incyte ID No: 700345777H1
  unsure 17, 62: a, t, c, g, or other
gaagttccacgcctgcntctcgtaatgccgccgaaatcgaaggcgtccgccgccgcggagcncggtggccgtccgaggacctcttcgcctcgctccaccgccacatcg

SEQ ID NO: 2239 - DNA, 278 bp, Zea mays
  misc_feature: Incyte ID No: 700345778H1
tttaacaaatgagctagcttcgatattggttcgtgtttgcaatttatttttagatagacaagataatttgtttgccgtcaatgtcaccaagtaataggtttatgaaattagttataaggagtcatatatgtcacattgaccgaccaagtcaattcttttacctccaagcacaatgatcaaacacattgttgggtccactcctcctcgtcatattcatgaatgtgattagattcaaattaaactatccatcgcgagtaaggcaagaattattgagtgtc

SEQ ID NO: 2240 - DNA, 299 bp, Zea mays
  misc_feature: Incyte ID No: 700345779H1
  unsure 134: a, t, c, g, or other
cgctctcgctgcagaggaaaggcgaagatggcgatgaccgtcgaagtgcttgctgcactcgcgttcatgttttccacgagtattctactgcagatactggcatgcgctttgtacaacaactggtggcccatgtnagcagctctcatgtacgtccttgtaccaatgccatgcctgttttttggtggtggatccacacacttcttgaccagcagagaaggtggagggtggattaatgctgcaaaattcttgactggtgcgtcggccatgggaagccttgctattccagcaattctgaggca

SEQ ID NO: 2241 - DNA, 284 bp, Zea mays
  misc_feature: Incyte ID No: 700345782H1
  unsure 13, 19, 28, 46, 50, 113-212: a, t, c, g, or other
gggtacgttagcntttgcntgcgcgtanaactccccacgcaaagcngccnccgttccctctcgtcttccccagttcccctacgccggtaatcccacgtcctatcagccgccgnnnnnnnnnnnnnnnnnnnnnnnnnnnnnnnnnnnnnnnnnnnnnnnnnnnnnnnnnnnnnnnnnnnnnnnnnnnnnnnnnnnnnnnnnnnnnnnnnnnnttcgttcaagttggagcaccccttcgaaaggaggcaagctgaggctaaccgcatcagggagaaataccctga

SEQ ID NO: 2242 - DNA, 281 bp, Zea mays
  misc_feature: Incyte ID No: 700345783H1
  unsure 84: a, t, c, g, or other
aaaaccatgaagatgaatggcgctactttgtccattatctcggttggaataagaactgggatgaatgggttgcaaatgaccgcntgttggaattgacggaggaaaacgtgcgcaaacaacaagagcttgataagaatcaggtagttgacaaaacaatgaagtctggacggtcaacacagcataaaccaaaagtctccaatgcggatgcaaaagctgataaagatgacactaagagtctcatttcagtgaaggggaagaaacgtaaaagtcagcttgggact

SEQ ID NO: 2243 - DNA, 279 bp, Zea mays
  misc_feature: Incyte ID No: 700345784H1
ctgcctcagcggcgatggactccatgttgcaactggttcttatagtaatttgtttcgtgtttttggttgttctcctgaaagcgtggaggcatcaacgttggaagccagcagaaatcccatgaggcgacaggttgctgatccagcaaggcctgcacggactctgaccggtgctgtgaggagaggtggagagaacacaagcgttgacgccagcggaaactcttgcgacctctcaacaaagctgctccatcttgcgtggcacccaactgagaatccatcgcg

SEQ ID NO: 2244 - DNA, 282 bp, Zea mays
  misc_feature: Incyte ID No: 700345785H1
cactagactctttttccccttcattggacatactaacaccccttaaaccaatggctgttggcaagtcatattcctcaactgttgcactagagggcaagatatttgttcttggtggtggtgacggtgcttgctggtttgatacagttgactgttatgaccgaagccgtgatgattggtccacatgcccatcgttgacttgtgacaaggggagccttgctggggttaatgtcaacgggagaatctatgcatttggtggtggagatggaaccaagtgtttctctg

SEQ ID NO: 2245 - DNA, 286 bp, Zea mays
  misc_feature: Incyte ID No: 700345788H1
caaacacacgacagggtagctgtgatctactgtctagccaaagtaacttcagacaaccaatggaggaggatgttggaaacatagaggctagagccaatcatacactgaggcaaaagaaaccaagctttgatctccaggatttattaacagcaagtgattctccttcatggccagatagcaatttgagggtaaattttcagatgggagatgaaagagaagcaattggtggggactggatagataaggttgtagtgaacaacaataattcagccagtggttgggaggg

SEQ ID NO: 2246 - DNA, 283 bp, Zea mays
  misc_feature: Incyte ID No: 700345789H1
ctctgggataccacagtttcgtttccttggataccagcattgtacactggggttctttctacggtgttatgcatgtgggcagagatggtggcgatgggcgatgtttcagcaaccgaaactgcagttgtttacgggttggagccagtttggggagctgcttttgcttggttcctccttggtgaaagatgggatgacgctgcatggactggagctgctctcgtattatgtggcagtttgacagttcagctatttgggtcagctcctgagaagtccaagaaagtca

SEQ ID NO: 2247 - DNA, 283 bp, Zea mays
  misc_feature: Incyte ID No: 700345790H1
gcaaagctgttaagaatgctctcttcatcagtttgcaacatatgtttgatattgctgtagttttgggtaagtccgaccttgaagaataatccgaccatgaggagtatggagtgtttgccatgttttgtatcttttcagttgttctatttatggatttattgggattttccatgagtttagttgtatctacccgattgtggtatccccacctctatcctgtaattggtcagagagatacaactctattaaaagaaaataacccgagattttgaccctaaagaaa

SEQ ID NO: 2248 - DNA, 201 bp, Zea mays
  misc_feature: Incyte ID No: 700345793H1
actaaatggaattcagctgccgacttatgctctgaatgatatattggtgtcacacccttgtccagcaagtgtgtcgcgcttctcatttaggaaaaggaacaatacaggagagaactcgcgtttaattaattgtagatcaagcggtctgagggtctcaacagctgctggatcaactgctgccatgctatcagctggaggatt

SEQ ID NO: 2249 - DNA, 296 bp, Zea mays
  misc_feature: Incyte ID No: 700345796H1
tggacgagagttccttttttgcacattttatgtgctttgaagtacctgcacttgttccagctggttctcctaatgctaataagagcaaatccggaggaaatgacccggatgatgatctgggtcttatggatccagatggcaacgatctgaaacctgacagtacctctgctgaactgggtacattgaatgaagctcttcaagaattactcgatggaatccaggaagacttctatgcggtcgtagattgggcttataaaattgaccccttgcgttgcatctcaatgcatgggattaca

SEQ ID NO: 2250 - DNA, 281 bp, Zea mays
  misc_feature: Incyte ID No: 700345802H1
  unsure 117: a, t, c, g, or other
tgaacatcttacaacacggagacctcgcgaccacactgctgattcgctaagtagagatttgagcacgttgttgagttgtaactccgatgtgttgtttcttgtgctcttttcttgacncgtgtgcgtgtgttgctgcgatttgagttcttgtgtgtgttactactcccccttactcttgtgctttgattgagatcatttgtataaggcgtgagagactttaatttgtggagattcctcataaagggaaaacttgatataaggaagaaaatcgtggtactcaa

SEQ ID NO: 2251 - DNA, 277 bp, Zea mays
  misc_feature: Incyte ID No: 700345804H1
  unsure 8, 20, 23, 27, 45, 47, 49, 63, 65, 70, 72, 83, 87, 112, 117, 123-124,: a, t, c, g, or other
gacactantctggattcacnccntctngttgatacacactcaaanangncacttctgattaananggttnanactagagatgnacangttatcaacgaaacttctcagcatnacgangacctnnaataaaaattgcananactcagtgcannaatatattaccnnnaagnatataananatgtcnatatcttaaagaaacanctttcaagtgcctttctgcagtttttcaggngcgcaagatanatttggaataggaataagctctagttcttaacg

SEQ ID NO: 2252 - DNA, 278 bp, Zea mays
  misc_feature: Incyte ID No: 700345805H1
gacagacacagatcgcgcgcggagatgtcgtcggactcgtcgtcgtgggcgcgcgccctggtgcagatctcgccctacaccttctccgcaatcggtatcgccgtctccatcggcgtctccgtcctcggcgcggcatggggtatcttcatcacggggagcagcctcatcggggccgccatcaaggcgcccaggatcacttctaagaacctcatcagtgtcatcttctgtgaggctgtcgcaatttatggcgtaattgtggcaatcatcctccagacaaa

SEQ ID NO: 2253 - DNA, 148 bp, Zea mays
  misc_feature: Incyte ID No: 700345806H1
gtatgtttgtttctatccgagccggaggattaacttaaccatggatacttgttgtgagttcgtttctgttcgcgtgtgactcttgaattgaatcaaccagctcaccactgcaccaggccgtggtgagtggtgacagtgatttcctgtt

SEQ ID NO: 2254 - DNA, 279 bp, Zea mays
  misc_feature: Incyte ID No: 700345807H1
  unsure 150, 156, 186, 253: a, t, c, g, or other
ggtcccgcgggtctgtctcttgcttcaacagtgtttggacggaacagatccggggactctcttccagcctccgaccgccctaccgatttcctctccgcttgcaacctccgggaccatcttctcggccatctcctgcttctgggacctgcnagcacnatttttgtggttagctccttcttgccaacnaaccatgagctcccagattcgtcagaattattccaccgacgtggaggcagccgtcaacagcctggtnaatttgtacctgcaggcctcctacac

SEQ ID NO: 2255 - DNA, 277 bp, Zea mays
  misc_feature: Incyte ID No: 700345809H1
gccatggacgtcgtctacgcgctcaagcgccaggacccgcaccctctacggcttcggcggctaggctgatgggctcctcgcgatgttctccccttctgcagatgcgacgttttctggccgtgcccacaagtcttgcggtcaagaaagtttcaggaactcttgttagttcatctctggctgtggtaggtttatctgaatcgtgagactagtaggtttatctgaatcgcgaggctagcaggtttacctgaatcatgaagcagtgatgaaattatgtgtg

SEQ ID NO: 2256 - DNA, 277 bp, Zea mays
  misc_feature: Incyte ID No: 700345812H1
  unsure 37: a, t, c, g, or other
ctatcgtcaagtctgagccggttgcagctgagaatgntgatgatggaaatgccaaggatgacaagaaggcagccgaagtggggaggagaagaaggatgatggcaaggaggaaaagaaagatgaagacaagaaagaagcggataaacagaaggatgatggcaatgctggtgatgaagggaaagacaaagaccctggcgccgttgctaacatgtatatgcactacccgaggtccaatcatctgagcgaatacggatatgcctaccagtacccgcctcag

SEQ ID NO: 2257 - DNA, 276 bp, Zea mays
  misc_feature: Incyte ID No: 700345813H1
  unsure 67, 79: a, t, c, g, or other
cccttcgcaagcaggcacggaggttggaagctcagttagatgaccaaatgatcgcataccgtaaatnggtttctatganatcagatggttcagagaatgatattgagtctgatatagaaagatcactgaagcagttgcagcaagtaaattcgcaaatgcaaacttgggtatcatcaggaggttctgaagttctttctcatactctgactcgtcatatggagattttgcaagaccttactcaggaattctatcggcttcgatcaagtctcagggtga

SEQ ID NO: 2258 - DNA, 225 bp, Zea mays
  misc_feature: Incyte ID No: 700345814H1
ttttctgcctgcgaagagagaaaccaaggagaggggcaactcggaagagggcgaggatgcctcggccggagttccaggcgccgccggatgtgttctacaacgagtcggaggcccgcaagtacaccacctcctcccgtatcatcgaaatccagtctaggatttccgagagggcgctggagttgcttgctctccccaacgatggcgtccccaagctacttctcgaca

SEQ ID NO: 2259 - DNA, 281 bp, Zea mays
  misc_feature: Incyte ID No: 700345815H1
  unsure 38, 93, 138: a, t, c, g, or other
cttcgaaatgagggctacaacttgacactcttctggancacaatgctcgatacattgtggcaaagccttgttccttttctatgtccctttttnccacatacaatatcagtacaatggacatatggagtctgggaagtntgtggacaattgctgtggttataattgtcaatatccatttagccatggacattcaacgttgggtgcttataacccatcttgctgtatggggttctatagctgctacgtttttgtgcatggtgttaattgactctataccaatt

SEQ ID NO: 2260 - DNA, 283 bp, Zea mays
  misc_feature: Incyte ID No: 700345816H1
ggtccatcctctcgagagtctaggcccttctcccgaagccgcagacgcagaaaacggctctacatatggaggcgaagaagaagccgtcggcccccgccgccgtcggagccgcgccgccgcctccgggtaacgggtacttcagcaccgtcttctccgcgccgactgcgggtagcgcaagtgacgcaaagcatgcggacttgtacacgatgctgaacaagcagagtccagagggcagaatggcagagatggcaaatcccacagccgccctacttacaaggatggc

SEQ ID NO: 2261 - DNA, 279 bp, Zea mays
  misc_feature: Incyte ID No: 700345817H1
gtagattcttgaacttcgttccattatctaaaaaatcacatgcttttggttgacattgctgaaacaagcagggtgtttgatttgtagtgttgagatattggagtgaaccaaacctatagggtttcattttcctggattagctgcattttcccaattcttgaagtaatggcggcacaatgcatataaatgaactagggatgacatatcggcacaaattgtcctcataacttaacagatcgatcacaaagtttcttcaaaaaatctttgaattctacacac

SEQ ID NO: 2262 - DNA, 277 bp, Zea mays
  misc_feature: Incyte ID No: 700345818H1
  unsure 8, 54, 113-114, 168, 234: a, t, c, g, or other
agattgtngtgatgattatggagataactcaattggaatctagggagagaatcngaaataacactagaagttacaacactgtattttaaagatgccaagtggtagggctatanntagcatgtaagttttattgatccttgctcctttctttgtctttgttttactacnattacaataggtattgacactgtaccattccatttattcgttgctgattgctgatgttatctgcgnatatcattttgtttgtttttcattaacagtttagcatgcttag

SEQ ID NO: 2263 - DNA, 275 bp, Zea mays
  misc_feature: Incyte ID No: 700345822H1
atcatgataatgtgagatgggatacgtgggcaagatttgtagaaaggagcgtcgcgtaaccagccttggatctggactgctggaaatcatgagatagatttcgctcctgaacttggtgaaacaaagccattcaagccattcagccataggtaccccacaccctacaaggcttctggtagcacggcaccttattggtattccatcaaaagggcctctgcctacattattgtcttggcatcgtactcagcatacggcaaatacactcctcagtacaa

SEQ ID NO: 2264 - DNA, 274 bp, Zea mays
  misc_feature: Incyte ID No: 700345825H1
  unsure 64, 157, 204: a, t, c, g, or other
gtcaccactcactagtcaccagtaactttaccaatccgcgccggtggtaaccctgcctttggcngcggctagccggtgacccagtgtgcgcactccctctatctccctcttggcgacgactgggcggccgtcgctgctgccctacgccgtcttcggnctcttcgttgtcgacgagcgccacaaggttcctaccatttttaaganaaaagatcaatggaggcagctttgtcattctccaaggacagcccaccaatttcgataatttgtgctgcaa

SEQ ID NO: 2265 - DNA, 274 bp, Zea mays
  misc_feature: Incyte ID No: 700345827H1
  unsure 152, 266: a, t, c, g, or other
aggattacagagataatcgactttagagttaggcctgatatctctttcaggggaaaacctcccatagggtgagtgtcttctctcaggcgtcgttcatttcgtgataagagacagagagcaagttctgaagataggggatctagtcattcaanatcacctattaggaagagtgagagaaaacatagcaaaagtcctgatggtggaaaaaccgattcatccgtaagttttagaagttcagataacgaagacaaaggaaaagatgaaangtacttaa

SEQ ID NO: 2266 - DNA, 272 bp, Zea mays
  misc_feature: Incyte ID No: 700345828H1
  unsure 12, 201: a, t, c, g, or other
cccgtggctggnagctccacagctcttgcccaatctgccggtttcagttgcctactgaggagacgaagaacaacccatgcgaatcagccagcaccgcagggccgtgaacggcgatggagacaacgctgctgcaagggcagcattacagaaagtactaaccacaatgaagatgaccattccgatagccctatcttctctgcnctgagcacactcttctctgatccgttctcatccgacgatgatgaaagtgttccacactcttacgagaactg

SEQ ID NO: 2267 - DNA, 280 bp, Zea mays
  misc_feature: Incyte ID No: 700345832H1
ctccagagtatgaggatgttcctctgcagaaagatccaccagaaggttcagaggagttcagtaaacaggttgatgaagcctttcttaagtacacaaagatattaaatgagagtccagctatgcagaagaaataccgggaggcgccaaaaggatctttaccatgctgtgtctgtggcagtgtagcgaggaaatttctggaccttgatgcattgctatcacatgcttatgatacatgcaaggccggtttgaagacaaaacacttggggtttcacaaagcact

SEQ ID NO: 2268 - DNA, 269 bp, Zea mays
  misc_feature: Incyte ID No: 700345834H1
gtcaaggggtatattagctcattggggttcgatgcaaagacctttgaagatgtattgaaatatttcaaggttacctgtcacacgctaccacggtctcaagaacagctgctcttgagatacgagctacaggaagatcgttcccttcttgaagaataccggttcacttatgatgctaggtggttcagggatcaaatccaggacgtcctcagcttctggacaggatcacacgagcctaaacttgtagctgaagaggagatgtggaagtgccg

SEQ ID NO: 2269 - DNA, 268 bp, Zea mays
  misc_feature: Incyte ID No: 700345835H1
  unsure 30, 39, 47, 153, 161, 166, 168, 172-174, 180, 228, 253-254, 256: a, t, c, g, or other
ccttgccgcgcgaccaccaaggctgccggncaggacgcnacccaggnaagcctagcagagaatcctgccaaggacgccgcagatccgggcagcatggagtccgagtgggttcttctcggaaaatcggacatcgtcccggccgatgtggccgcngccgccgncgcgngnaccnnnacctcnacttctcgccgctgccgatgatccctatctgggtgcagatggttctcnggggcgtggtttacacggctgtgcnngnctacaagagggt

SEQ ID NO: 2270 - DNA, 268 bp, Zea mays
  misc_feature: Incyte ID No: 700345837H1
  unsure 249: a, t, c, g, or other
aaaactttaattgcaataaccacattacatgagtttttcaggtaatatgttatcaatttgctgtagctaaagcttaccaagcaatcaaagttgcagtgtctgttatataaaattcacattattattaaaaaacagttcgcacacactcatggactcatggctcttttaaaaaatttacgattttcagcaagtttaactgatgaactgtatattagagttacatttattagttaactatcttcaattatnatgcataactagtcagatt

SEQ ID NO: 2271 - DNA, 266 bp, Zea mays
  misc_feature: Incyte ID No: 700345840H1
  unsure 257: a, t, c, g, or other
tccctctctgatttttggcgagcagaacatacctgagacgacaggtagaagacgactgactgcctcgagcagcagagatcagggaggccgagggcgggatgacgatccggttcgtgctgttcgtcaacaagcagggccagacgcggctggcgcagtactacgagcacctctccctcgacgagcgacgggccctcgagggcgagatcgtccgcaagtgcctcgcccgcactgaccagcagtgttcgtttgtggagcancggaactac

SEQ ID NO: 2272 - DNA, 265 bp, Zea mays
  misc_feature: Incyte ID No: 700345841H1
  unsure 194-195, 258-259, 262: a, t, c, g, or other
agcttccatgaaggggctgggaaccgacgaggactctctcattgagatcatctgctccagaaccaaccaggagctgcaggaaattaacagagtctacaaggaaatgtacaagactgatctggagaaggacattatttcggacacatctggtgacttccgcaagctgatggttgccctggcaaagggtagaagannagaggatggctctgtcattgattatgaactgattgaccaagatgctcgggatctctatgacgnnggngtg

SEQ ID NO: 2273 - DNA, 267 bp, Zea mays
  misc_feature: Incyte ID No: 700345842H1
ccagaacagcaagtcaccccaaatcaaaactaagcagttgtgggactatgaacttgattttctagttgccatattgggattgcttgtgaaccttgtggagaaggatagccttaatagggtacgacttgcgaatgctcgtgtttctgttaatctatctcaaaatccagatagcaaagaggtacagagggatgttatacccctgctctgttcaatattcttagcgagtcaaggtaccggggaaactgctgaagctatatcaccggatga

SEQ ID NO: 2274 - DNA, 266 bp, Zea mays
  misc_feature: Incyte ID No: 700345843H1
attcaatctttcatagacagggtggccgaccgtcttccgagttggaaagctgatcttatgactagagccggtaggaagattatggttcagcatgtgctctccagtatgatcatatatttggctatggccattgattttcctcaatgggctttggaggcaattgataaaattagaaagggttttctttggaaaggccgcaaggaagtcaggggaggacattgtctggttgcttggggaagggtgtgcagacccctccatttgggagg

SEQ ID NO: 2275 - DNA, 267 bp, Zea mays
  misc_feature: Incyte ID No: 700345844H1
gggtttttgattttagccgccgccgctgctcatctcacatccctcgagaagacgcctgctcctcgccgatcgatacgatggccgtcttctccgacctccacaccgccgacggcctcaagtccctcgaggctcacctcgccggcaaaacctatgtgtctggtgactccattactaaggatgacattaaggtcttcgccgcggtgccgtcgaagcctggcgctgagtttcctaatgccgcccgctggtacgagaccgtctctgcggctg

SEQ ID NO: 2276 - DNA, 272 bp, Zea mays
  misc_feature: Incyte ID No: 700345847H1
agaaactagtggatatgccagaagatgaagccgccaaatattgtgctgaaaaccagataacaagcatgatcccaaaaattatcaagactggttttgcagcaattcatctgatatactttttcactgctggtcctgatgaggtaaaatgttggcagatcagacgccagactaaagctcctcaagctgctggtgcaattcacactgattttgaaaggggtttcatatgcgctgaggtaatgaagtttgaagatctgaaagaactgggcagtgaa

SEQ ID NO: 2277 - DNA, 293 bp, Zea mays
  misc_feature: Incyte ID No: 700345849H1
  unsure 263: a, t, c, g, or other
acactatagaccacagccagtcagccacatcactagctatctgtgcagaggcaatggcgtccaaggttgagctggtggtggaggtcaagtccccggctgacaagctgtgggcggcgctgcgtgactcgacggagctgttccccaagatcttccccgagcagtacaagagcatcgagaccgtcgagggcgacggcaagttcggccggcaccgtccgcttcctcaagtacaccggaggcgtgccgatgctgacgttcgccaaganaagctttagaggggacgacgagaacaagtg

SEQ ID NO: 2278 - DNA, 290 bp, Zea mays
  misc_feature: Incyte ID No: 700345850H1
  unsure 215, 227, 282-283: a, t, c, g, or other
aaggatgcttctgccgtgctgctctccgaggaattccatgaggttttcccgttgtacctttatactggaacctcagatcaagcggacgatgagtactcattggattcaattgttaaatttggtatcaatgggaagaagacctccggtgggaaaccgggcttcttgtacagctctctacggaattcacagtcggcacaaggcactatgagggtgangaagaatctggnggtcatggattggggaagacccatcagtgtacaagtatgtgggaactgatggatnnacttcag

SEQ ID NO: 2279 - DNA, 293 bp, Zea mays
  misc_feature: Incyte ID No: 700345851H1
agaaggcatgaaaacctggaccatggtggctaatacagacagtcttcttgatgacgagtctaggaaggctattatgctgctaaaaggcttaaaaggaactcgcctgttcataccaaggattgtgatcagggagttggattccatgaagcagcgggagggcctgttcagacggtcaacgaaggcgacctccatcctgcaatggatcgaggagtgcatggcaagggagagctggtggatccacgtccagagctcggccgacatgttcccggtagcaccaaccccgcccgcgaccc

SEQ ID NO: 2280 - DNA, 87 bp, Zea mays
  misc_feature: Incyte ID No: 700345852H1
  unsure 63, 71-73, 75, 81-82, 84-86: a, t, c, g, or other
ctcaactccaaaattctgtgattctgtataggtgctttgcgcttgattttaagtttccacacnacatcacnnncncggagnntnnng

SEQ ID NO: 2281 - DNA, 286 bp, Zea mays
  misc_feature: Incyte ID No: 700345853H1
  unsure 262: a, t, c, g, or other
ggacctcacccgtcacgcggcgggcgacttctccttcgccgtcgtgcaggccaacgacgtgttggaggaccagagtcaggtggagacggccgccgctgccaccttcgtcggcgtctacgacggccacgggggcgccgaggcgtcccgcttcatctctaaccacctttctgcgcacatcgtccgtcttgcacaggaacatggaacaatgtctgaggatgttgttcgaaaggctttttctgctacagaggaaggcttctgtcgntgtgcgcaggacacatttgataaa

SEQ ID NO: 2282 - DNA, 277 bp, Zea mays
  misc_feature: Incyte ID No: 700345854H1
  unsure 157: a, t, c, g, or other
gcaacttgaaaacacaagaaaccatatgtcatcaattgatctctccaagtcaatgatgccatcacagatgatgtcagcaccatctgctgcatcagtacagccttcattgacaaccactgctcgcagtgataatcaaagcagtgggtgggctgtactngcacaaatggcgaacacacctggccagtctcagataactggaaatctaacctggggaaatacacctcagggtgacgcaagcttaggttggggaatggtgggacagagcattatgattatg

SEQ ID NO: 2283 - DNA, 283 bp, Zea mays
  misc_feature: Incyte ID No: 700345858H1
attcttcgtagatggaaatctgagagcgggcacaagaggcggtctcttggtggctccccaagattcaaaagggcggcagttcaccgtcgcgaagattcgcacgccacggatatgatctctgatgcttcagacagaccacccaaaccaacattgtcgatcgggcagatactgagcatgaagctaatgggacctgatgggtacgacaagagtgtttgggatgacaaaacaggcgagataccggagatctcgctcggtcagattataaacaggagtggtgttctgt

SEQ ID NO: 2284 - DNA, 282 bp, Zea mays
  misc_feature: Incyte ID No: 700345859H1
  unsure 81, 280: a, t, c, g, or other
cacctcacaggctcacacgatactttccccctccactagggttccccgtccgttccccctcggccgcatcagctgtttgangcggcaaccaagggccgcggaagcatctgcgtcgagccatggataaggggatcttcaccaacgatggctccttcatggagaggttcaagcagatgcagcaggaggcgcaggagaagaaggccgctgctgcctccgcctcatcggctcccaagcatgcgaaccccaagcaggggtttgctgttgcggcaaacaagaggcnat

SEQ ID NO: 2285 - DNA, 274 bp, Zea mays
  misc_feature: Incyte ID No: 700345861H1
  unsure 224: a, t, c, g, or other
atttatgataaggatgatatggtacaaggcactggactacttggaactgagagacaagaatctgaatcacaacccccactggtgaataatgattggcatgccgatatgcacagagctcatcctctggggtctgtgcctccatgtactacattcacgagtgatctggctgaaaaaccatctgtcagtgcagaaactaacggtgaagatgtaatgatatttacaanaaaaattcctggaacagctttaggcgattgtgataaaacttccaacctaa

SEQ ID NO: 2286 - DNA, 282 bp, Zea mays
  misc_feature: Incyte ID No: 700345862H1
  unsure 265, 267, 271-273, 276, 281: a, t, c, g, or other
gaagcggatcaaattgggatcaaaatgtatgcctgggacgatttcttgaaagtggggaaggataatcctcgtcaaccttgccctccgcaagcaagtgacatctgcactgtcatgtacacgagtgggacaagcggacagcccaaaggtgtgatgctgacccatgaaagccacgccatgtatgtgaaaggggtggacctcttcatggaccagtttgatgataagatgacaacagatgatgtcttcctgtcgtttctcccgcttgctnanatcnnnganggaang

SEQ ID NO: 2287 - DNA, 283 bp, Zea mays
  misc_feature: Incyte ID No: 700345864H1
  unsure 31, 37, 153, 179, 200, 247, 268, 275-277: a, t, c, g, or other
ctttcgacaagttcctcttccactacctgangcgccnttggttctccggcggcagggacgccaccgtcttaaggccccccgccaaatcgaggcggaacatggcgtccgccaagtggagcgagacggccatgctcgttatcgacatgcagaagnacttcgtggacccggcgatgcgcagnccgatgctggtggccggtggngaggccgtcgtccctgccgttgccggggccgtcgcgtcgcaagggancgcggtattttcgtatctggnttgtcannnacatcc

SEQ ID NO: 2288 - DNA, 285 bp, Zea mays
  misc_feature: Incyte ID No: 700345866H1
  unsure 158, 210, 263, 276, 278: a, t, c, g, or other
gacagaaggtatgcttttttatctgtctagaactacacccacatagtatggattatatttatagagttaggaataattctcttgcagcattggctgatgatgggaagtttctacttgctgcacgcaagtgtcgtaagcccacctgcacagactacctnatttctcttgataaggttgatatgtcaaagggaagcagcacctatattggcnagctaaggtcagctttgagatatgatgtcggaatactttaaagctactatttntgctagctttaanangaaacca

SEQ ID NO: 2289 - DNA, 287 bp, Zea mays
  misc_feature: Incyte ID No: 700345867H1
agccaacaggagttgcctggcattacattttccgaggacagattctgatgtgaagagggcgcttggcatgaatcaaggggcatctccacccactctgaaaggctgccatgagggtggaaaatagctcacagtcgcaggaagaggaatagcatcctgccaacatgggtgagctgcgggcgcatcataccaattccgcttctgctatgctccgtccaccaggtcaccagcttgagaccgaggcatcaaaccgccagattttgtgtttctcagagcaagtagaataaagc

SEQ ID NO: 2290 - DNA, 285 bp, Zea mays
  misc_feature: Incyte ID No: 700345868H1
  unsure 68, 247: a, t, c, g, or other
tcaaagtaaaaattcgcttgaatctacatggtttggtttcagtcgaatctgccgttttgataaatgancatcaaaggaatggaagttctactgatcatatggaggtggatagcagtggtgatgacatgggtcacaagtcaagaagtgaaaggtctatccagcggcaggagttgccaatcactgagtacatatatggtgcaatgagcaagcatgaattgctggaagctcaagagcaagaacagcaatnggcttatcaggataaacttgtggaatggacaaaggaca

SEQ ID NO: 2291 - DNA, 279 bp, Zea mays
  misc_feature: Incyte ID No: 700345871H1
  unsure 94, 143, 216, 272: a, t, c, g, or other
agcagagtcaccgtctcgcttcgcagtcctactcgcactgtcgcacacacccgtccccatcctcttccggtctcgccctcccctcacgccgctngccgcgtccggccgcggcaacccgacctgcgtcaatcgccatgactacntcaaggcgtcttgccgataggaagatagcacgatttgagaagaatatcacaaagaggggctctgttctgaganagtcaagaaggcaaatgattatcctgttggacctattcttctggggtctttgtctntgttgta

SEQ ID NO: 2292 - DNA, 279 bp, Zea mays
  misc_feature: Incyte ID No: 700345873H1
caataatatataacttatattatcatataaaggaacatattagcttttacttccatacaagcttaagagtttcttcaacagatccatttcatgggtgaacctgcatcctggtctcaaaggaatggacctttgatttggccagtttggggctgtattgctgtaatttacaaagagcaatcctaaagaaaacatataaacatgagggatcagacatcggtataatcggtttctactgtagtaaaaaaatacaggctgctagttgctacaccgcaagcatat

SEQ ID NO: 2293 - DNA, 277 bp, Zea mays
  misc_feature: Incyte ID No: 700345876H1
  unsure 178, 228, 243, 247, 249, 256-257, 262, 265, 268, 274-275: a, t, c, g, or other
gtcctgacctcgctgacttcatcactgccttcctagagagctacagacagaggatattcaagctgttgacttctgcatattccacaattagagttgctgatgtggctcatttcatggggatgagtgaggaggatgcgacaaactatgctgcgcaaaacggttggagtttggatgcagnggccaagatgcttactgtcaaaaagccaaagtctcagaccaaccagaagnttgatgctagcaaantgcngngtttgannggttnttntcnccactnnag

SEQ ID NO: 2294 - DNA, 106 bp, Zea mays
  misc_feature: Incyte ID No: 700345877H1
  unsure 2, 8, 28, 66, 69, 75, 84, 90, 96, 99, 101: a, t, c, g, or other
gncaccgncgaatgacattaatgaagangatggtacggaccgtgctccttcgcccccatggcccanganaagaantgctgtacnaaaccncgatgncgngngattc

SEQ ID NO: 2295 - DNA, 120 bp, Zea mays
  misc_feature: Incyte ID No: 700345880H1
cgagatcgtgcgcacctccgagatctccacgaagttgtggtaacatgggggctcacctttcacgaagctctttcagccggctcttctccaagaaagagatgaggatccttatggttggtc

SEQ ID NO: 2296 - DNA, 281 bp, Zea mays
  misc_feature: Incyte ID No: 700345881H1
ttatgattgataacattgataaggttcttgaaagaggtgatcgtttggaactgctggttgacaagactgcaaatatgcaaggaaatacagttcgattcaagagacaagctcggcggttcagaaacactgtttggtggagaaatgtcaaactcacggccgcattgatacttctcctcctggtaataatatatgtcgttctagtcttcgtgtgccatggttcaccctaccaacttgcataaggtaaggcatgatgtgcacatagtgcttttgctgtgcatgtt

SEQ ID NO: 2297 - DNA, 283 bp, Zea mays
  misc_feature: Incyte ID No: 700345882H1
  unsure 179, 185-187, 217, 230, 254, 257: a, t, c, g, or other
gaggcatataagcatacagaagcaagggcaataaatacatcaatgaccaaaggaacttacactatggatgagagttcatccggcatagatggtgcttgtaatgaacacggttcatgtaatgcttcagccatggaatgcagtgataattcggattcggagtgtgaaatcttccgagtcangcgcannntccacctcatttgacaaacctacttctgangctaagacatcanccttgtctgaacagcaggttctgnggnggctgaagaaggtacatcctgaagta

SEQ ID NO: 2298 - DNA, 88 bp, Zea mays
  misc_feature: Incyte ID No: 700345883H1
  unsure 2, 11, 33, 41, 63, 83: a, t, c, g, or other
angtaccatangtcgcgaaacatctcgaccganccgacgcnccgcctcttaaaacggcggctntcctccatggccaaatcgtngtcct

SEQ ID NO: 2299 - DNA, 271 bp, Zea mays
  misc_feature: Incyte ID No: 700345886H1
  unsure 103, 150, 163, 258, 263, 269: a, t, c, g, or other
gatacatggcgatgtggcatttgcaatacacatgctgggaaaggatatggttagttggtctctgccaagtgccaactctacctgatgaacgataacgattctntcatttgttcaagttcttagtttgctcagttcatagttcagatctantagtctaacggtnttttctaataagcttcttgtgtctctaagggtgtgtttggttgaggagtgaagaatggaacggctcgattcgagttttggatctttggttcccancaaanaggggngg

SEQ ID NO: 2300 - DNA, 271 bp, Zea mays
  misc_feature: Incyte ID No: 700345887H1
gcatttctagtgatggaaatgcatatttgcaagagagccagttttggaaactttacaaggaagatcctgcagcatgtgcaatcgtgatgaaaacttcagttggccttgtttacctgcttgcctgtctgctggagcctttcatgccctctttttctgatgaagtgttacgtcaactaaatttatctccagaagaaaatctgtcattaagtgaagaaaagggagaaattgcgaaggcaaaaactcttggaattttgtaccagcaggtcacaga

SEQ ID NO: 2301 - DNA, 272 bp, Zea mays
  misc_feature: Incyte ID No: 700345888H1
actgcaagctcctgagggagttagatttgcaggaaaatgatgtggaggaccgtgggcccagatggctttccttccctgattcctgcacttcgctggtctccttgaatttcgcttgcatcaaaggggaggtgaattctggtgcgttggagagacttgttgctaggtctccaaatctacgcagtttgaggttgaatcgttctgtttcagtagacacactctcaaagatactattgcgagccccaaatttggaagacttggggacaggtaatctg

SEQ ID NO: 2302 - DNA, 271 bp, Zea mays
  misc_feature: Incyte ID No: 700345890H1
  unsure 4, 6, 17, 71, 91, 97-98, 143, 152-153, 196, 212, 261: a, t, c, g, or other
attncnccacccctttncccccgtctctctctcctcacccctctctctctaaaagactgaaaacaataganaggaacaaggggggaagaancaaagnnaacgcaggacttggtttttgggaactccatgggctgtggaattgncaccaggannacggctgggtttgacgagattcatacagatacatatatttaantttttcccctttcgtntgctcaaaaaatcaattgtacaggcgaaactgcttgtttgtgctttgtntcttccgtgt

SEQ ID NO: 2303 - DNA, 270 bp, Zea mays
  misc_feature: Incyte ID No: 700345893H1
  unsure 222, 242, 263-264, 266-268: a, t, c, g, or other
ctcacatgttcctgctgtacttgcctgatgcagaagctggtggccagaacgtcagggatcacaccggttatttcttggacatgatgcacagtgaggacagagagagtaaaaggggtctaatggatgctgtcatagacttcttgcacaagtccggtctcaaggaggaagcaggccttatatgggaggttgctgcacagaagaacgtctacccagattctgtangggagaagactcgtcgtatnggctcatcaaccttcacctgnngnnngg

SEQ ID NO: 2304 - DNA, 272 bp, Zea mays
  misc_feature: Incyte ID No: 700345894H1
gtttgtccacgggtcagattaagactggagcaccctgcagatcagagcgtcttgccaaatacaaccagcttcttaggattgaagaagagcttggcgctattgctgtctacgcaggtgccaaattccgtgcacctgtggagccctactaaacgggcgggatgcaagtgcttttatgtctgcacaagtcctgtgaaactgtttactgcgacctgcagattttactcagggcactccaagagtaaaatctgcaggtcgcagtaaacagtttcacg

SEQ ID NO: 2305 - DNA, 272 bp, Zea mays
  misc_feature: Incyte ID No: 700345895H1
aatatgttcaaaaaatcacgtgatgaaaatgctcgaaacgctgaggctgagaaaaagaaactggaaaaggaaaaagaaaaggcaagtgtgtctgctaaataaggtttggaatgagactgctgctctgccaaagttgcatctttgtgaagctgtcgtgctggactgacaaagaggacctgcagtataatttgcggcagtgcagaacctgctttgaaacaccttctgtacgtacagagatgctgtgccaggagtctcgctatctggttgccatc

SEQ ID NO: 2306 - DNA, 240 bp, Zea mays
  misc_feature: Incyte ID No: 700345901H1
  unsure 80, 156, 192: a, t, c, g, or other
ggcaggccctgccgtctgccgcaaaagagagcactaggaaaagaagtgttgcggcgttgcgtggtgggggacgaggccanagcgccccaaaaccaaaaaccccagaaccccgacctagggttacgccatcgccatgggatctgttgcctccgccgntgtgccaccacctcctcctcaatcagcgctgctcangcgggcgcgccgccctacgggcccggctcgccgggatctcccgcagat

SEQ ID NO: 2307 - DNA, 308 bp, Zea mays
  misc_feature: Incyte ID No: 700345902H1
  unsure 290, 295: a, t, c, g, or other
ctgaaggaaaagattgatcgccgttctggtaaaaagctggaagatggccctaaattcttgaagtctggtgatgctgccattgttgatatggttcctggcaagcccatgtgtgttgagagcttctcagactatccacctttgggtcgctttgctgcttcgtgatatgagacagacagttgcggtgggtgtcatcaaagcagtggacaagaaggctgctggagctggcaaggtcaccaagtctgcccagaaagctcagaaggctaaatgaatattatccctatacctgccancccantcttatcagtggg

SEQ ID NO: 2308 - DNA, 202 bp, Zea mays
  misc_feature: Incyte ID No: 700345904H1
  unsure 4, 6, 45, 66, 72, 90, 109, 123, 126, 132, 144, 159, 164-165, 174, 190: a, t, c, g, or other
aaananaagatagttcagaacatctagagacagcggcccgtggancggacagcttgagcgagcaanccgcgncttcgaagtaagaactgntctgatccacagctctcantcggaaggaagtgncanaactgngatctgagtgantatattcaatccggnggctnngaattccgncccgataaatgtaggntgccaaattgag

SEQ ID NO: 2309 - DNA, 308 bp, Zea mays
  misc_feature: Incyte ID No: 700345906H1
  unsure 54, 82-83: a, t, c, g, or other
accattggctatcattgcagtagctagtttgttggttgaaagatcacgtgaggngtggccagaagtgtacgacaagattggnnctgggaatgaagacaatacagcacaagataatgtcatacagctactatgatctgcctccttatctcaagccatgtctgatgcaactaagcatatatccagaagactacctcattaatgcaaaagttgcaatatggatgtggataggtgaaggtctagtccatcttgagaaacaagatgttagcctatttgaggttggagaaagtacttcaaggagcttgtgaata

SEQ ID NO: 2310 - DNA, 308 bp, Zea mays
  misc_feature: Incyte ID No: 700345907H1
  unsure 2: a, t, c, g, or other
anaattggttactgccaccacacgtcgaaattctccaaatagtatagattccaagattcatcacaacaatcttatcaacaatattcctggcaaagatagaaggtaatcttgcccaggctgaggatgccattatgctagataaggatggctttgtatcagaaacaaacgcaacaaatatttttatggtcaaaaagggaattgtattgacacctcatgctgactattgcctccaggcattacgcgagcaactgtcatggatctgtggtgaaagaaaactttgtgttacatgaacgacgcattagtctgtc

SEQ ID NO: 2311 - DNA, 310 bp, Zea mays
  misc_feature: Incyte ID No: 700345908H1
  unsure 111: a, t, c, g, or other
gagggcaggaagaccgaagaccgagccgtgcgggcggctcgggacgggaacgggacaggaccccaaaatctcagatccttcctgcccgcccgcccgtgcccgtcgacgcgncgttcttgccggccgcgcctcacctccgccctctcctcctccagggggatcggatacgccacaggctgcgcgatggtgctgtgggtcttcggctacggctccctcatctggaaccccggcttcgacttcgacgacaaaatcctcggcttcatcaagggctacaagcgcacctttaatctcgcttgcattgaccacagag

SEQ ID NO: 2312 - DNA, 306 bp, Zea mays
  misc_feature: Incyte ID No: 700345909H1
  unsure 129, 135, 161, 277, 296: a, t, c, g, or other
ccgcagagccctagctgtttatcctgttttcctgttttactttgtcatcagttggatgattctcacctttactcctcagtaaatcaggaatgggaaattaaaaaccagtgaattgaaagcacatctganagatgncattcaccatggagctttgtctctgngccctatttgtctaattttggaggtatttgataactgagtaggtgaggagattaaaagggagccatatagcactgtcacccctatttgaggaactgatgtttgaaaggctgttctnttctctcttaattaacatntctttaaaaa

SEQ ID NO: 2313 - DNA, 310 bp, Zea mays
  misc_feature: Incyte ID No: 700345910H1
  unsure 302: a, t, c, g, or other
gtctgcttccattctgttcaagttagcgccgctaatccgctccctattcaccatccaatccaatcggcttcccccaggcacccatggcgacggcggtggaggttcccgtggaggcgccggtgaggacagtgaaggtcaccaatgtctctcttagtgcaactgtgcaagacattaaggagttcttttccttttcaggagatattgatcatgtggagatgcagagtggtgatgagtggtcccaagttgcatatgtcactttcaaagatgcacaaggcgcagaaacagcacttcttctttcgggngccacaat

SEQ ID NO: 2314 - DNA, 309 bp, Zea mays
  misc_feature: Incyte ID No: 700345912H1
  unsure 50, 181-182: a, t, c, g, or other
tctctttcgctcaggcccgtggcgccgacaggatgggcaagtgtcgtggncttcgtactgctaggaagctccgtagtcaccgacgagaccagaagtggcatgataaacagtataagaaagctcatttgggcacagccctaaaggccaacccttttggaggtgcttctcatgcaaaaggaanngtgctggaaaaagtaggagttgaagccaaacagccaaattctgccattaggaagtgtgtaagggtccagctgatcaagaatggcaagaaaatcacagcctttgtacccatgacggttgcttgaactt

SEQ ID NO: 2315 - DNA, 312 bp, Zea mays
  misc_feature: Incyte ID No: 700345914H1
gtttttttgttgtgctaaatactgaacataatttgggtgtgttaatattttatttattgtctgcacatggtttgcgttcttctgatgatggctcatggatcctgtaaaatatgtgttaggatttggatatccatgcgggcactaccacagtccacagggtgctcatctcttgtgttcttggctcttgcaagcattaggtcgtttctaaaaccacattggcaaaatgaactctatggtgtttgaggttgctgaattggatggagcaacaatgatttgtcgcactaacaataaaagaaaaggttacttgttggt

SEQ ID NO: 2316 - DNA, 312 bp, Zea mays
  misc_feature: Incyte ID No: 700345916H1
  unsure 40, 301: a, t, c, g, or other
ctatagaccacagccagtcagccacatcactagctatctntgcagaggcaatggcgtccaaggttgagctggtggtggaggtcaagtccccggctgacaagctgtgggcggcgctgcgtgactcgacggagctgttccccaagatcttccccgagcagtacaagagcatcgagaccgtcgagggcgacggcaagtcggccggcaccgtccgcctcctcaagtacaccgaggcggtgccgatgctgacgttcgccaaggagaagttgagacggcggacgacgagaacaagtggtgtctacangtggtggacgc

SEQ ID NO: 2317 - DNA, 304 bp, Zea mays
  misc_feature: Incyte ID No: 700345917H1
  unsure 7, 14, 17, 21, 32, 36, 39, 41, 43, 57-59, 69, 72-73, 79, 84-85, 91, 116,: a, t, c, g, or other
atagagnataagtncanaggntggaaaggganaaangantntnttcttattaggcannnaattgtgaanatnnaggctnatgtnngaggtnaacaagtgaggaagcattatcgganaatagtttggtctgtnggcatcgtggagnangtnnnnttgcgttggaggcgtagaggggctggcttacgtgggtttcggtctacagaaggttcagtggagagcagcaatggcggaacgagtagcagttcaatccaagataagccttctggggatgattatganattttgcaagaaggacgaaaacant

SEQ ID NO: 2318 - DNA, 129 bp, Zea mays
  misc_feature: Incyte ID No: 700345921H1
  unsure 52, 60-61, 67, 74, 80, 128: a, t, c, g, or other
gtcactgggttgtgactagcatcaatcaagtctgctctttgtattgcataancgatagannccagcncagagcngcagcnaaaagagcagacttgattgatgctagtcacaacccagtgactaaagcnc

SEQ ID NO: 2319 - DNA, 83 bp, Zea mays
  misc_feature: Incyte ID No: 700345922H1
  unsure 31, 69, 72, 74, 79, 82: a, t, c, g, or other
aaggacttgagccactagggggatagaagcncagtctacataagacttagtaaaatttccacacaacanacnanagacnctnc

SEQ ID NO: 2320 - DNA, 299 bp, Zea mays
  misc_feature: Incyte ID No: 700345923H1
cacaagggaggactgttggatcattatcaaggacaaggtctatgatgtcactccttatgtagaggaacatccaggcggagatgccattctaaataatgctgggggtgattccacggagggcttttttgggccacagcatggcactagggtcttcgatatcatcgaggatttctgcatcggtcagttgaaggcttcatgatgatgacaggatagtttgtattgaatttgttacgggacataaatttgtgagaagctacatttatctatgtttgagcatgcgaccatgagcatatgaatgc

SEQ ID NO: 2321 - DNA, 300 bp, Zea mays
  misc_feature: Incyte ID No: 700345924H1
  unsure 35: a, t, c, g, or other
ggcaagccctccagagagcgttatgtgacccacanccgagcacattggtgacagaccttcggggcctgtctgaagccatagcctccacggagagccctgtggccgactctgcactctccaccctggctgggatcagagcaggagcatcctctgctggttcctgactggcaaaggaccagcgtcctcgttcaaaacattccaagaaaggttaaggagttcccccaaccatcttcactggcttccatcagtggtaactgctttggtctcttctttcatctggggatgacaatggacctctca

SEQ ID NO: 2322 - DNA, 300 bp, Zea mays
  misc_feature: Incyte ID No: 700345926H1
gtacggtcagggttcagggtcttctacgggttcctctcgctgttcatcagtgtggccctgccatttctctccagccttgccgggctgctgggcgggctcaccctgcctgtgaccttcgcctacccgtgctttatgtggatctgcgtcaagaagcccgagaggttcagcttcagctggtacctcaactggggccttggtctgctcggcacagcgttcagtctggcgttctcgctgggtggcgtctggagcatagttaacaatgggatgaagctcaagttcttcaagcctaactaggtacat

SEQ ID NO: 2323 - DNA, 300 bp, Zea mays
  misc_feature: Incyte ID No: 700345927H1
  unsure 21, 71, 98, 105-106, 109, 112-113, 115, 123, 125, 127-128, 132, 149,: a, t, c, g, or other
ttggggatactctgctggggnctagtagcggagttgagtctcaaggatctcctcgggaaccagatgttganacagtgcagacagagtgtcttgatggnatttcannttncgnncncgacgacnangnnctanatgtcattgttgatgangcnaccaatcccatgagcagcnataatcnacnagatcaggggtcctcactggnngaaaattcatatagtcatttccctaaattctgcagacgagacaagcacaancaagccagatactgcatctatttttgatagtgtacagagatgcgtc

SEQ ID NO: 2324 - DNA, 240 bp, Zea mays
  misc_feature: Incyte ID No: 700345928H1
  unsure 2, 4, 46, 60, 64, 77, 144, 147, 155, 179, 192, 221-222, 235-236: a, t, c, g, or other
gnanactgtcaactagtggcttgctgttggactgtacttctctgantgaggtgctgtgangacncctggaaggacanaagggcagaatagtgaaggccgacgctgacttccagaagcaatgagtgggagacatcttcctgccanacnctgagcancacagttgtgaagagtaaatagcncactagtagcgtnctagacttttccgaattctcatcacatannatatctccttgtnnaatt

SEQ ID NO: 2325 - DNA, 300 bp, Zea mays
  misc_feature: Incyte ID No: 700345929H1
agcttttgttctatcatggattcttcatcactgtcgggagctcagtttatatctggtttggtcatgggcatcactgggctcccttcggacatacctgtggtggtgactgcgaacaacatcacgacgaggctgttgactccccctcagcgacatcgtcaacctcaggcggcggtcgtgtaagtcacttctgaattctgaccttttgggctctgcctggcttgcctgctgccatgcgaaatacagcgactaaccctaaccttaacatgagtttgtgggcctacgtgtgaaggtgtaaggtgc

SEQ ID NO: 2326 - DNA, 306 bp, Zea mays
  misc_feature: Incyte ID No: 700345930H1
gttgttaggaagagaatcaagctcagtgctgagaaggctatcttcatatttgtgaaaaacacccttccaccaacagctgctctgatgtcttcaatctatgaagagaacaaggacgaggatgggttcctctacatgacttacagtggtgagaacaccttcggactgctctagatggcccgcaatggggtcgccttgcccttgcccatgcctcctgtaaataagacctgccaagcaactgtgtatattctggtttcgtcgtcgcaagtggttgcgctctactgctaaagcctacctatcagttgtgga

SEQ ID NO: 2327 - DNA, 308 bp, Zea mays
  misc_feature: Incyte ID No: 700345931H1
  unsure 2, 19, 21, 74: a, t, c, g, or other
gngagcttgttcttgattntnttgttctcatttcaatgttagctcttactacctatcagggagaaaatgagttncagacactgacatgccagaagctacttgctacagtcgttcgccggaaacacacatgccacttatcttgttcaactggattcatggcgtgatcttacaagagcttttgcaagtggacggtctttgctttcattgagtggacgtttacaaaggtctctagcagaaacacttgcctctggagcttcctgcatcaaagatcctgaagcatctgcacagtacctgagggatctcatggg

SEQ ID NO: 2328 - DNA, 300 bp, Zea mays
  misc_feature: Incyte ID No: 700345932H1
  unsure 251, 256: a, t, c, g, or other
gtgatgggtcattggtatggttatgttgtccccgacgatgtgcctgttttgctgcataaacatattggacaaggagaagttgtggaccgtctatggaggggacagatgggtttatctgaggagcagcagaagcaagctctcgagcttcggagcatgacaaatggtggcaaagaatccctgaagaaaccgaaacagacgtgcttctgtaacccgcagcaatgctggatgctgccaaggcatggtggcttcantcgancttctgagcagcagaagcaagctctcgagttcggagctgacaaa

SEQ ID NO: 2329 - DNA, 297 bp, Zea mays
  misc_feature: Incyte ID No: 700345933H1
  unsure 146, 184: a, t, c, g, or other
gtcgtcaaggaccacgacatgaaggagcgcctctgcctcgaggctgagcgccttggcctctccgccatgatcatggggagccgcggtttcggggcctcccggaaaggcagcaaggggcggcttgggagtgttagtgattactgcgnacaccactgtgtatgtcctgttgtggttgttcgctacnctgatgatgctgcagatgccggtggagatgcatcaggggtgacagatgagttgcacactgtaccagaggacgaacctgtttatcacgatgcacctgaggtgcagaaagaaaac

SEQ ID NO: 2330 - DNA, 294 bp, Zea mays
  misc_feature: Incyte ID No: 700345935H1
caggaaactttgaagcgcctggataggctgcagaatacaagtgtaaacctcccaaaggaaaaggttctttcaaggattcgcaagtatctcctgataattggggacaaaattggagaagttgtccggcaacacagtaaatcttataggcaatcccgcatggtcatgaggttatggaattatgttgccaccttttcaaacatgtctggggagcaactgcatgatctctatatgaaacttagtcaagaccaactggaaggtggagttggcccatctcatggtggcatttcacatcct

SEQ ID NO: 2331 - DNA, 289 bp, Zea mays
  misc_feature: Incyte ID No: 700345936H1
gacgaggggggagtgcgactcctcgtgacttgtgagggagagaagccatggcggagatggagccgagcatcgggaaccatatggccgaagaccaaccgactccggccgcctccactgtcgaggaggccgctatggatgcagataccagcggcgagcggcgtacgctgccgcgttggtgggctgctccgcgggttctcgccgtgcaacagcgccgggccgaggctactccacgctacgaagggtttttctgagtatatggcttatggaggtgattggctatcaacaactg

SEQ ID NO: 2332 - DNA, 294 bp, Zea mays
  misc_feature: Incyte ID No: 700345937H1
  unsure 12, 27-28, 39, 114, 137, 206: a, t, c, g, or other
atctccccacanggcagcgcgtgcggnnaccctagtcgncgccgatgtcggaccctttctacccgtactaccgcggagccttcccgggcggcgacggtgcgcagccgccgccangttactcggattttgaggtcganctcatcgcggcccgttacgccggcaccctattgccttatccatcctctgccgacgtcggcgccttcgantcgtatgtcggcgcgagacgatccgcggaagttctctatcaccaatcttttatgggaagtcatagtactgttggccagaatgaggctt

SEQ ID NO: 2333 - DNA, 299 bp, Zea mays
  misc_feature: Incyte ID No: 700345939H1
  unsure 2-3, 12-13, 18, 20, 22, 42-43, 52, 54, 122, 179, 196, 232, 268, 279: a, t, c, g, or other
cnncggcattanntacanangngtcgactctaggccaggctnnagcaaagananctaaggcattgctgcgcccagggccagtcctcagaacaagctgctaagggaactacactggatctggncacctcaaaggacactgtgggaggtgccacaactgaccagtgtgcttcagtagcagntacagaaaactcagctngaccagaccacgtcaggggaggaggcttcaggaganactgagtcattcggaattcttccatcctcaaatgcnagcaagcagancacaggagcttcacctctgc

SEQ ID NO: 2334 - DNA, 297 bp, Zea mays
  misc_feature: Incyte ID No: 700345940H1
  unsure 31, 202: a, t, c, g, or other
atttggcagcaagctgaggaaggatgcgaanctggataggaggaatgaggattatagttcacccagctctttgagacccccatctaatacaaataacactgaggacgactttgatgacttcgatcctcgtggatcaaatggcaaaacaactgctaagtcaaatgaggtggatctgtttggcccaaacttgatggacgatttnattgatgcatctgcagcaactccagctacagacaatgctgcagaaccacaggttgatctgtttgctgatgcagattttcaatcggcaaccgcaag

SEQ ID NO: 2335 - DNA, 291 bp, Zea mays
  misc_feature: Incyte ID No: 700345942H1
gagacggagccacggtcgcacagagcagtcttagctccggccacggccaccgggagtagctctggccatgaggacctcaacggctacctgtgctatcctccctccgcctacctgctcctcccgtagtttaccgctccgcagcttcatcggtctccggtggtccgccccccgtttccaggttagggagcgagctggtgcgtccgtagcggttgtcaatggcaagccgggatgcagttcagatcggagtactatttaaatgtttgtcatctcgccaaaggtctgttgtcataa

SEQ ID NO: 2336 - DNA, 295 bp, Zea mays
  misc_feature: Incyte ID No: 700345943H1
  unsure 140: a, t, c, g, or other
tcgtgaaaatcctccgcagcttgatgagcatttctcgaaaccaatgaaagagtttgtctcactatgtttaaagaagaatccagcagagaggcctagtgccaaggagcttcttaagcatcgtttcataaaaaatgcccganagactccaaagcttttggagcgaataagagagcggccaaaatttgcagcaaaaagctggatgccacacaaatgggcaaacccatgatgaagaggaggatttggtacaggcactatcaggtcattaggacaaaagatacagctccatctttgagtc

SEQ ID NO: 2337 - DNA, 297 bp, Zea mays
  misc_feature: Incyte ID No: 700345945H1
  unsure 149, 255-256: a, t, c, g, or other
ggcacatatctctgtccgcagaatttgactactcggttgggccaacaattgccagaggaaggatctcaatattcgatggtgtacagaagagtttaccggttgtttcacccatcttgttattcactatcttgatattcaccatcctgatnagaatgtggccaccaatggccaccatcgagtttttgacatcacacctgtccttcctccccccagttcctagagcccagaggtttggcgctgcacatcatgttcctnnttcagtccactcagtagtcagtccaggttgaggttttttcc

SEQ ID NO: 2338 - DNA, 299 bp, Zea mays
  misc_feature: Incyte ID No: 700345948H1
  unsure 196: a, t, c, g, or other
atgaaggcaatgttgacatagacgcagtatcagatcctaccatgaaggcttcaatactagcacaaatcaaccattttggtcagacccccaaacagttattccagaaaccacatccacagaggcggactgacaggaaagtccctcctcatcctctacggtactgtgcctatctaacacagcaggagattcgcaagancagcatcttcggtgtcccagattgtctcctacatgataagatctaattgctgcagttaactgttgctcaagcggtaattataatgaatacattctggggattc

SEQ ID NO: 2339 - DNA, 142 bp, Zea mays
  misc_feature: Incyte ID No: 700345950H1
  unsure 98: a, t, c, g, or other
gcgttgcgtcttgggggagagagagaagtgggagacccgcgagaggctgccgtgtagggactagggaccgtagagtaagcgacagcaaggagggaganggggatggccgggatcgggccgatcaggcaggactgggagccgg

SEQ ID NO: 2340 - DNA, 213 bp, Zea mays
  misc_feature: Incyte ID No: 700345956H1
  unsure 2: a, t, c, g, or other
gngcgaatcgaaggaaaagtagtcaggagaggcgtttccctcgcaatcgaccatcacagatcaaatcgctgcaactagctagggtttcgtcgcctcatctctcgtcgatccatcgatggcgtccgagggcgaaaacaagaggatgatcacgctcaggagctccgacttagaggagttcgaggtggaggaagcggtggccatggagtcgcagac

SEQ ID NO: 2341 - DNA, 296 bp, Zea mays
  misc_feature: Incyte ID No: 700345957H1
  unsure 288: a, t, c, g, or other
ggaagaaggatcccctttctctacctggaggacatccaaatgaggttcatgaaaaactacggcagagtcgcccactctgcgctggcttacgccatgaacgatgagttctccagagtgctccatcagcaaatggagttcttctccagcaacccaagcgccgacacactcaaccgtctccgtggagaagtcagcgagatacacaccgtcatggtcgacaacatagagaaaattcttgacagaggcgatcgcatctcgctccttgtcgacaagacatccaccatgcaaganagcgcttt

SEQ ID NO: 2342 - DNA, 292 bp, Zea mays
  misc_feature: Incyte ID No: 700345960H1
  unsure 23, 89-90, 92-94, 109: a, t, c, g, or other
tctgctcttcccgaatccctgtntcgctttgccctccgtttctccagctataaagccggggggtcctgtggcgtgtgacctttttatanngnnncgtgcagcgcagggnccaacttcgtcaggtttcttggctccaacaaccttcctgggtcactctccagtcagtcaatctcaaactctccatgcggtttcaaaacatttgatggcaactccgctcctctgaattcgactgctacccagaaactgtaaagagatggggtgtggcccatcaatccccgacaagtacagatag

SEQ ID NO: 2343 - DNA, 291 bp, Zea mays
  misc_feature: Incyte ID No: 700345961H1
  unsure 44: a, t, c, g, or other
cttcttggaggtctgataatcaggtagacaatgaagctggagantctggtggatataggggacggggaagaggaggaagggggcaatatggaggacgaggaagaggcagagacaatggttggagaaatggtgatggaccaaaatgggatggtggagataattggaacgctacaaatccaccaagtaatcagccttggagtagcagtggaggcaccaagtcatatggtcaaaatcagcctccacttggaatattcagaggataacaaaccatctgtaggtgaacaaggtgat

SEQ ID NO: 2344 - DNA, 286 bp, Zea mays
  misc_feature: Incyte ID No: 700345962H1
  unsure 51, 110: a, t, c, g, or other
agtactagacattgaggggacaaccactccaatatcatttgtgactgatgncatgttcccttatgctcgtgataatgtacgaaaacatctgacttctacatttgattttncggaaactaaagaagacatcaaactattgcgcatccaaattgaagatgatctacgaaatggagttgctggggctgttccagttccacctgatgagggtggcaaagaagaggttatcaattcattggttgccaatgttgaatcaatgattaaagcagaccggaagatcacatcattg

SEQ ID NO: 2345 - DNA, 296 bp, Zea mays
  misc_feature: Incyte ID No: 700345963H1
  unsure 108: a, t, c, g, or other
ccgttgctcgcctcgggtcaaaccctaagcagggagttgatttatccgctgcagccatgagtaagttgcagtctgagtctgtcaaggatgccatctcccagattgttngggatgccaaggagaagaataggaagttcactgagactgtggaacttcagattggtctgaagaattatgatccacagaaggacaagcgtttcagtggctctgttaagttgccccatatccctcgtcccaagatgaaggtgtgcatgcttggtgatgcccagcatgttgaggaggccgagaagatggga

SEQ ID NO: 2346 - DNA, 299 bp, Zea mays
  misc_feature: Incyte ID No: 700345964H1
  unsure 49: a, t, c, g, or other
ggacagccattgtcttgccgtcaccatggccggagaagtgcagagttgnggccgtaaccaaaacggacagctaggccttggaaccactgaagactcgctgctcccacaaaagattcaggcttttgagagtgtttgcgtgaaaatgattgctgccggtgccgaacatactgctgcagtaactgaagacggtgacctctacggatggggttggggtcgatatggaaacttaggtcttggtgaccgtaatgaccgtttgcttcctgaaaaagtatcttctgtggagggtgagaagatggtgc

SEQ ID NO: 2347 - DNA, 300 bp, Zea mays
  misc_feature: Incyte ID No: 700345967H1
  unsure 3, 12, 38, 252: a, t, c, g, or other
ggnagcggaggnccagccaaatctcgaccacgtccggnaaccgcgccccctcggctttgcgcccacaccaagccaccctctgttctcctcttccgtggcggactagcggcgcactggtgtggtgctcctccaagctctggtctgctccgcgccccgcctccccgtcgaccggcgactttggccccggccctcgggctaggaagcgagttcaccggtggatccgcgcgtgtccctccctgttacctgcgggtngccccagccggccacccgcgcccgcgcaccctactgattgggttgctg

SEQ ID NO: 2348 - DNA, 67 bp, Zea mays
  misc_feature: Incyte ID No: 700345969H1
  unsure 62: a, t, c, g, or other
ggcatacatggttatgagttttgtactacccttgttgcagtgtgttcctgtttaccttttgncgctg

SEQ ID NO: 2349 - DNA, 290 bp, Zea mays
  misc_feature: Incyte ID No: 700345972H1
  unsure 12, 33, 35, 81, 83, 103, 107, 121, 127, 134, 145, 153, 155, 185-186,: a, t, c, g, or other
gttctttgaganaaattctgtacttggaaacantntgtttgaaaattaaaaaaagatattttagaatgtatctatgataantnagagaaaatttttttttacnaaanatagttgatggatncttgangcttatnatctaaaagcngaagtagngntttatcaacatcctctggggatgctttttnntncatatcattaccatatttaaatatgagtgtttgggnntccatagtnatgaaaggcctgtgatcatgntgaaaactatgaaaatgaaggcgacgcccagcctt

SEQ ID NO: 2350 - DNA, 288 bp, Zea mays
  misc_feature: Incyte ID No: 700345973H1
  unsure 15, 70: a, t, c, g, or other
atggtctcggtgtcnggcgagccgctcgagaggctgggagcctacatggtggaaggtctcgtcgccaggntcgccgccttctggcagctccatctacaaggctctgaggtgtaaggagcccaggagctccgacctcctctcctacatgcacttcctgtatgaggcctgcccctacttcaagttcggctacatgtcggccaacggcgcgatcgcggaggccgtcaagggagaagacaggatccatatcatcgacttccacatcgctcagggggcgcatgggtctctctc

SEQ ID NO: 2351 - DNA, 285 bp, Zea mays
  misc_feature: Incyte ID No: 700345976H1
  unsure 87: a, t, c, g, or other
ttgtttttgcgtgagtttgcattatcagcaaaagtttggagccgaaagtacgatcacatatgtctaggtatctcattgatgtaggancgctaaacataatttctgatgtgttacagagtcaggataaagaactcttttcagctggggcaaacatactcgggtattttgttgatctgcatcctgacttagttagaacatttattgccaatcatgaagagaacctggaaggcagttctcttcttgagtttctggttcaagggatggtagttgactccgccaatgaaa

SEQ ID NO: 2352 - DNA, 133 bp, Zea mays
  misc_feature: Incyte ID No: 700345977H1
tctctctcctctcgatcgattgcttcctccaccgaggcgggggaaagcgccgcccagatcgccgtaggaagcggcgatcactccagctttgagcataagggaggctcgtgaagtcagtagtcgtatctggcag

SEQ ID NO: 2353 - DNA, 90 bp, Zea mays
  misc_feature: Incyte ID No: 700345979H1
  unsure 4, 17, 22, 48, 58, 60, 77, 83: a, t, c, g, or other
gttngggaacacttatntccanaaccacggtttatattaccatcagtntaccgtatgntnatgatcatgaacatatngtattntacatgc

SEQ ID NO: 2354 - DNA, 119 bp, Zea mays
  misc_feature: Incyte ID No: 700345981H1
  unsure 4: a, t, c, g, or other
agangctccaaggggcaccgacagacagcgtgctgtcgcagaggccaggacatggggggagaattcaagggagcgaacaaatggccatggcagcttcgacagcacccatgagtgaagcc

SEQ ID NO: 2355 - DNA, 296 bp, Zea mays
  misc_feature: Incyte ID No: 700345982H1
agagaacctggtttgctactgaaagggagaagaaacttttggcagcagcggctaaagaatctttggatcacggtaagagtacctctggagttattagtgctaagaaggccgaagaccttcgtctaaaagagaaaaggagacgagaacatgagaagaatctaccaaggaagaagcgccgaagattggaggcccagcgtgagatgttggaagatgaggatgacgagaaaacaaaggaaaatgatagagggaagcaaccatgaaaggccaatctctagtggatgctgcttaccgaaagg

SEQ ID NO: 2356 - DNA, 292 bp, Zea mays
  misc_feature: Incyte ID No: 700345985H1
  unsure 274, 277: a, t, c, g, or other
acaacgcagacaaaccgaactcgcacctcgcacctcgcatcgtcttgtcgacacacctccagctccgaaaccctactccgccggcgatgtcgtcatccggcgccccggccccggcggcggcaatggccgttgacgacgcggaggacgaccagctcgcctccatgtccacggaggatatcatccgggcctcccgccttcttgacaacgagatccgtgtcctcaaggacgagttgcagcggacgaacctggagttggagtcgttcaaggagaagantancggaaaaccaagaga

SEQ ID NO: 2357 - DNA, 289 bp, Zea mays
  misc_feature: Incyte ID No: 700345986H1
  unsure 2: a, t, c, g, or other
gngactctgttaagatctgggaccttgagtcgaagcacgtcgtgcaggacctcaagcctgacatccagatctccaagaaccagatcctgtactgcacaagcttgagctggagcgccgatggaagcaccctctacactggctacaccgatgggtctatcagggtctggaagatctctggatatggctacgcaggctagatgtcgaaatccagtcgagggtctaggaggtcttgttctgcgaaacattgcaatgcggaacatagttttttttatgtgagttacatcgtctg

SEQ ID NO: 2358 - DNA, 284 bp, Zea mays
  misc_feature: Incyte ID No: 700345987H1
gccggtggcacctgtgaaacctgcagctgaggcgaagaagcccaaggccacagtgaccgacggtgctggaagcagtggcgacaaggatgagaaagaggacgaaaaggaggagacagcaggcccacgtcggaggacccgaaggaagacatagagacctatttttgatgtgtttggatgttctggcgcctgcttattttgaggactcttaatatttctgagtgtataataggaacttgtgtcacctctgcggcttccctgctgcttatttgtttttacatggttag

SEQ ID NO: 2359 - DNA, 231 bp, Zea mays
  misc_feature: Incyte ID No: 700345988H1
  unsure 44, 114, 200: a, t, c, g, or other
gagtgggagacccgcgagaggctgccgtgtagggaccgtagacncagcgactgcgaaggagggataaggggatggccgggatcggaccgatcaggcaggactgggagccggtcnttgtgcggaagaaggcacccaccgccgccgccaagaaggatgagaaggccgtcaacgccgcgcgccgcgccggtgcggagatcganaccatgaagaagtacaacgctggtacgaaca

SEQ ID NO: 2360 - DNA, 168 bp, Zea mays
  misc_feature: Incyte ID No: 700345989H1
ggagagctttgaggggaggggagctagctagctactgcctactggaggagggcttcctccgacgccggacatgggggaggtgaagcacctgtgcctggccaagttcaaggagggcgtcgtggtggacgacgtgctcaagggcatgaccgacctcgccgccgggatgga

SEQ ID NO: 2361 - DNA, 278 bp, Zea mays
  misc_feature: Incyte ID No: 700345990H1
  unsure 149-150: a, t, c, g, or other
gaatctctgaccttgcatgagatggctagtggcggtgatcctggtgcagttgttgaaaagatgtcaatgctcctcaaaaggattaaggattttgtgcagacagaagaccctgagatgggtgcccaagcaagtacagcaaccatttctannaacgacaattcagcatgtcctgttattcccgatgatttccgttgcccaatatcactggatttaatgaaagatccagttattgttgccactgggcagacttatgagcgggggtacatagagatgtggcg

SEQ ID NO: 2362 - DNA, 282 bp, Zea mays
  misc_feature: Incyte ID No: 700345994H1
  unsure 2, 6, 45-47, 95, 107, 174: a, t, c, g, or other
cntctngtcgtggattcacttttgctacctggggcacctttgaannntgcagagtcccagaaagatgttgggaagggtgataaatcaggggatancaggaactgctnagaagtttgcaatatatcagaagcatcgttcttcgttggcagacactgttcagttcaggaggccagntgctccaacttccagtgtgaatgctgatattgtgggaacatccactctgcagtctgcatctctaccgaaacaagaatcctcaacagctacatccaagagctatatttc

SEQ ID NO: 2363 - DNA, 288 bp, Zea mays
  misc_feature: Incyte ID No: 700345995H1
  unsure 223-224: a, t, c, g, or other
gggataacaataacatactaacaacaacagactgtgacggtggactgccagcaagccctcgtttgagattcaatagagaaggttcattacttgcagttaccacaagtgataatggaataaaaatacttgccaacactgatggacaacgcttgcttaggatgcttgagagtagagcatttgagggctctagaggacctcctcaacaaataaacaccaagcctcnnattgtcgcccttggtcctgtttcaaatgtcagcagtcctatagcagtaaatgccgagcgactga

SEQ ID NO: 2364 - DNA, 221 bp, Zea mays
  misc_feature: Incyte ID No: 700345996H1
actactttgcatgtgctaacagtatggctaatggtttttcaatcttaatttgcgaaaataggtccactcaacttttacaacagacatgtttgtttttgacaattttggaacactgcaacatgttgggttaaaagtatttttgctaaagtatacattggatatcatggtcgtctatgaaccaattgtagtgtctccatattttcatgctatcttaccatttg

SEQ ID NO: 2365 - DNA, 284 bp, Zea mays
  misc_feature: Incyte ID No: 700346001H1
  unsure 95, 157, 266, 276, 282: a, t, c, g, or other
gctcgcgggagttgtggccgtggaggtcaccggtgggcctgagattcccttccaccccggtagggaggacaagcctcaacccccacctgagggcngccttcctgacgccactaagggttctgaccacctgaggcaagtttttggcaagcagatgggnttgagcgatcaggacattgttgccctctctggtggccacacttgggaaggtgccacaaagagcggtctggtttcgagggggcctggattacaaacctttggtctttganaatcttattnaggaantc

SEQ ID NO: 2366 - DNA, 282 bp, Zea mays
  misc_feature: Incyte ID No: 700346004H1
  unsure 179, 270: a, t, c, g, or other
cagatctcagtcacctgcgccgccgcttcgttcgtgtggaggggagaagagaggaaatggcggcgaccgagggcgtgctcctggggatgggcaaccccctcctcgacatctccgccgtcgtcgatgacgccttcctgacaaagtatgacatcaagctgaacaatgctattctcgctgangagaagcacttgcctatgtatgacgagttggctagcaagagcaatgttgaatatattgccggaggagccacccagaactctatcagggttncccatggatgct

SEQ ID NO: 2367 - DNA, 273 bp, Zea mays
  misc_feature: Incyte ID No: 700346005H1
caaggtgctcggtccttccgaggaagctaaggctgcgttggggtgaggccctcacttcatccggcgactagcaccgcgttccggcagcgccagccctacactcgcccgcgccatggcctctgtctccgagctcgcctgcatctactcggccctcattctgcacgacgatgaggtgacagtcacggaggataagatcatgcctcattaaagcagcggtgtaatgttgagctttttggctggctgttgcaaaggcctggccacgtcaacatttgg

SEQ ID NO: 2368 - DNA, 148 bp, Zea mays
  misc_feature: Incyte ID No: 700346006H1
  unsure 18, 25, 27, 35-36, 40-41, 79, 86, 90, 98, 108, 115-116, 132, 144: a, t, c, g, or other
ccgaggtgagccaccggnaagcggngncgtgagcnntcgnncaaccccgtcgataccggctgcagtgcagcgtgctagntacgctnccgnccatggtngtggaggagntcgccgnnggggtgaagaactaancgtcaccggagntgcg

SEQ ID NO: 2369 - DNA, 277 bp, Zea mays
  misc_feature: Incyte ID No: 700346007H1
  unsure 16, 63, 128, 166, 187, 241, 267: a, t, c, g, or other
aacagatgtgtcttgngcctcattctctaccatgtatgtgtgaacctgcctgtcatgattttntcgtatcctgccttcaaattcatgggtctcaggagctctcttcctttgccacattggtcggttgntgtatctcaagttcttttctactttgtcctgaggattntatattctattgggggaacanggcattgcatacgaaatggtatacaaacacgttcacagcgtccaccatgagtangcaacaccctttggtttaacatcggnaatatgccca

SEQ ID NO: 2370 - DNA, 281 bp, Zea mays
  misc_feature: Incyte ID No: 700346008H1
  unsure 210-211, 267: a, t, c, g, or other
ggccctcgtggaccatctgcatcagcatcctcaagttcccaacaagggagcattcgaggaatgcctccacattcgcgtggttcacaagacatccgacatgacgaaaggcaccagtttgacaatagaactgttcttccccagcgggtagtcaaagatgaagccatcactcttgggccacaaggtggccttgctaggggtatgtctataagnnggcagccaccagtatcaaatactgaaattccttctgttattgaccaccggaggatngtatctagttctaa

SEQ ID NO: 2371 - DNA, 277 bp, Zea mays
  misc_feature: Incyte ID No: 700346010H1
  unsure 2, 9-10, 19, 45, 53, 166-167, 229, 233-235, 238, 258, 265: a, t, c, g, or other
gnctacggnngtggcagcnatctccttctcggcatcatggccgcnctcagacnccttgtgaagcccaagatcgtcaaaaagagaaccaagaagttcatccggcaccagtcagaccgatatgtcaaaattaagcgtaactggcggaaacccagaggcattgacaacnnggttcgtagaagattcaagggccagatcttgatgcccaacattggttatggaagcaacatgnaacnnngcncatgctgcccagtggcttcnggaagtncctggtccacaa

SEQ ID NO: 2372 - DNA, 279 bp, Zea mays
  misc_feature: Incyte ID No: 700346011H1
  unsure 51: a, t, c, g, or other
gggcatccgttaccgcccatcaccctcggagcctccatcaacgagcaccangaaagggaagggagctgcctcaggccctacgcagttcgtccacacgctcaacgctacagcagtggcggtgcctcgtctgatagtttgcattctagagaattttcagcagggcgatgggtcgattgtggttccagagccactaagaccctatatgggtggactagagttgctctccccaaaattcaagtgaccctctacggtcacccgctgttgtgcttgtgtggactt

SEQ ID NO: 2373 - DNA, 278 bp, Zea mays
  misc_feature: Incyte ID No: 700346012H1
tcataactgtaataaaagggaaagtggaagaaatagaacttccagtcccaaaagtagatgtcatcatctcagagtggatgggctatttcctcctgttcgagaatatgttgaacactgtcctatatgcacgtgataaatggcttgtaagcgatcctttataaaatcatcagtacaattttcagattctgttcttcactattgatgttacctgtttgattcattgtgtttattctctttttagcatttttttacaaaatacaatttgattgtctatgaat

SEQ ID NO: 2374 - DNA, 281 bp, Zea mays
  misc_feature: Incyte ID No: 700346013H1
ggggcacggccacttcgaagagccgttactcagctggttgaggatgttatcagtgaagcaattctctttggacagttcaagcctggtgacacgatattgatgggcactgatgccacagggaagccttgcttgagccgactcaatgatcagaccgtccaattgtccgacactgctccaacaatatgaacatcccagcaccatgtgtatatagttgcagattacacatttattctgtacatagaatccccatctcagcgtggacataatctcccagatgttgg

SEQ ID NO: 2375 - DNA, 272 bp, Zea mays
  misc_feature: Incyte ID No: 700346014H1
  unsure 62-84: a, t, c, g, or other
aatggattgtattcaagttgttcttctctgttgatgaatacattttaccaaatattcattannnnnnnnnnnnnnnnnnnnnnnaaagattcaaatatattatgctatttttgatattatcataacaaataatgccgtagagtctaacatatggaccccacatctttgaattgttgtccattttcaattttgaaatgatgacatctgaaatgagatatatgatttaatatctctactatatttaaatcaccagttccaacggtcgtccaacg

SEQ ID NO: 2376 - DNA, 280 bp, Zea mays
  misc_feature: Incyte ID No: 700346016H1
  unsure 230: a, t, c, g, or other
gttgtgttctgcttggtggatatgtacatcatgcttgggaaagcattcgctccatacttggaagggcttagcagcacgcagctccgcctagtaaccatatacgctaaccggatttcgcaggcgaggtctggcaagccaatcgattctaaccaatgagattttaacattgttattatttgtggtctatatgagcttttcttcggtaggctggttttcttgtcatttgtttntgtatgtgtatagtataaacaagtgtctctatctgtcaagagctccggtt

SEQ ID NO: 2377 - DNA, 120 bp, Zea mays
  misc_feature: Incyte ID No: 700346017H1
  unsure 41, 75: a, t, c, g, or other
cgctcatctactctaccatctttgcaggcacactcatcacngcgctaagctcgcactgattttttacctgagtangcctagaaataaacatgctagcttttattccagttctaaccaaaa

SEQ ID NO: 2378 - DNA, 282 bp, Zea mays
  misc_feature: Incyte ID No: 700346018H1
  unsure 105: a, t, c, g, or other
tcagagagttcatacgggagagagaccttacgtatgtaaagaatgtggcaaatcttttactaagtgttcaactcttcaaacacatcaaaaaattcatactggagngaaaccttacaaatgtagggaatgcaacaaatcctttacccaggactcacatcttagaacacatcagagagttcatactggagagagaccttacatatgtaaggaatgtggcaaatcttttactaggtgttcatatcttagagcacatcagaaaattcatactggagagaaccgtac

SEQ ID NO: 2379 - DNA, 271 bp, Zea mays
  misc_feature: Incyte ID No: 700346020H1
  unsure 129, 209, 238, 242, 253, 256-257: a, t, c, g, or other
cgatttactcgaaatgagtttaatctggaaagcaagagcaccattggagtagagtttgcaacaagaagcatccaggttgatggaaaaacaataaaggcacagatatgggacacagcagggcaagagcgntatcgagctataacgtcagcatattatcgtggagctgtaggtgcctattggtttatgacttgctaaacatctcactatgnaaatgtagagcgatggctgaaagaactgngagntctgctgatantanntggtatctgctgtg

SEQ ID NO: 2380 - DNA, 273 bp, Zea mays
  misc_feature: Incyte ID No: 700346021H1
gatgaacctgcggcatataatggggtttacatgattacacaccaatcaagtagtgatatgctgactttagccgtaccatctggaacagaagcacaaccaatgaatgatacacaaaaggctgataatccctacccttgtgaatccttgttggatgttcagtcaagtggaaattgcacccaaaattctgtgcatgaaccccatctgtactggaacggggcagtgaaagggctgcagtagcttatatccccaagcaacttctggtgctttgcaaag

SEQ ID NO: 2381 - DNA, 172 bp, Zea mays
  misc_feature: Incyte ID No: 700346022H1
  unsure 33, 43, 61-62, 77, 93, 107, 126, 155, 168: a, t, c, g, or other
cattggtggagatgtggtcagacgcaaagcacnaggtatgccnattaaataacaatatgtnnaaaatataaggtcancctacattctccgttnccacatagtgagtnagtgatgttggaatttgtnacatatttcctttgagcttctaatgttanttgtggacaccanaccc

SEQ ID NO: 2382 - DNA, 276 bp, Zea mays
  misc_feature: Incyte ID No: 700346023H1
attgatgccaggaattaggcccccgattttaccagctccaggttatcctggtcctccaccaaccatgcagcaaccaggcgccccacctgggtccatgccacaaccgggcgctccacctggttccatgccacaaccaggcgctccacctggttccatgccaatgcagatggccccactcccaaggcctccaacgctaccgcctccaacatctggagtcccaggtgctcccattcctaacagtggagcacttccagcccattaccaagcaaatccaca

SEQ ID NO: 2383 - DNA, 268 bp, Zea mays
  misc_feature: Incyte ID No: 700346025H1
ggggagaggggagcgcgctcagggtcagggaggcgaagatgatcgaggtggtgctgaacgaccgcctggggaagaaggtgcgggtgaagtgcaacaggacgacaccatcggcgacctcaagaagctggtggcggcgcagacggggacgcgccccgagaagatccgcatccagaagtggtacaacatctacaaggaccacatcacgctcaaggactacgagatccacgacgggatggggtcgactctactacaactaggcgcctgaccc

SEQ ID NO: 2384 - DNA, 272 bp, Zea mays
  misc_feature: Incyte ID No: 700346026H1
gaaagaaacaagaaagctcgatgtgccatttcaacatatttttgcaaaatatgaagtgaatgcatacataagcatgggtgggtcttgtggttacttccaccgagacaactcgatactgtacattggacaccccagtagccctggtggtgcccaaacaagtgtagatggttttttcttgcacagagttagacccctcgagatggagtcaatgttgataaatgtagaaggcaagctagttcagagatctgttgttcagcagcatggaacgggag

SEQ ID NO: 2385 - DNA, 278 bp, Zea mays
  misc_feature: Incyte ID No: 700346027H1
  unsure 90, 111, 130, 132, 134, 141-143, 157, 159, 163, 168, 197, 200, 203, 207,: a, t, c, g, or other
catcctattatttatcgcacctacgttcaatattacaggcgagcatatctactaaagcgtattaattaattaatgcttgtaggacataanaataacaattgaatgtctgcncagccgctttccacacagncntngtggacnnnaccgcctccaccanancccncctcnccccgcttctggccacagcacttaaacanatntcngcgnaaccccagaaacaaagaaccctaacaccagcctaacnagatttcaaattttatcttttggcggtatgnnct

SEQ ID NO: 2386 - DNA, 276 bp, Zea mays
  misc_feature: Incyte ID No: 700346029H1
tcatgatgaagtggcaagtgtccaacctagcagagaagcggaaatgagacccagatctgcacctccaagccaatcaacccaagcggacaattcaggttggtctgtggaaactctgatggaactcttagatttcactccacaggaaataaccaaggccatttcggcgaccgagagtaaccgtttcgtagcatctgtcgtcattgctttcctggtggttctgtcaaactggggccttgacattggtggtgccatcaccagagtattagttggtacaag

SEQ ID NO: 2387 - DNA, 274 bp, Zea mays
  misc_feature: Incyte ID No: 700346030H1
ggctaacatgccatcttccatgggtggaggaggcgcaggtgggttagggtcggtgggaggccaggtgcccactgggttggctggtgctggtggatttgggcctgggggattgggtggtggctcatttgggggatcatctcagtttggtgctgctgggatgggggcatatggtggccttggaatgggtggaggctccatgtaccgcatgcaacagggagcaggtgggctgcctgcaggcgcatttggtgaaggaggaaactaccctcttccaggt

SEQ ID NO: 2388 - DNA, 278 bp, Zea mays
  misc_feature: Incyte ID No: 700346031H1
ccaggaggaacaaaacaccgccagcgtggattttccaaatttccctggaaagtaagtctcgctcttgccaaagaaaagtctggcttggagagtctctggagcccaggatgccagcatgtgccaatgactgtcaccttcatctcttcaaaagaaaagccatagccgaggactgtcccgcgacccccgtggactgcgtctaggtcatgtgattctgttttcattctcatcccatccaatttgtccttttctcctgtcattttcttcctctgtggtccctt

SEQ ID NO: 2389 - DNA, 139 bp, Zea mays
  misc_feature: Incyte ID No: 700346032H1
  unsure 2: a, t, c, g, or other
ancaagagcattactactgcttccgaccgaaacctttcttggaacgcaagaaggatccccaccccgaccgacctaccctaatcggcgatggcgacggtggcgatggacatctcgaagcccactccagtggcgtccggcg

SEQ ID NO: 2390 - DNA, 278 bp, Zea mays
  misc_feature: Incyte ID No: 700346033H1
cttggatatctcccaaggatcagtgctttatgatgttgatgaagctactgtccgtagtcttaatgggtgcagagtagcagaccaaatcattagacttgttccaaattttgagaattttcgcacggcattaagatgtttgaagtactgggcaaaaaggagaggtgtttactctaatgttactcgctttcttggtggtgtcaactgggctttactggttgcgcgtgtctgccagctctatcccaatgctgtgccaagtatgctggtctcacggtttttta

SEQ ID NO: 2391 - DNA, 279 bp, Zea mays
  misc_feature: Incyte ID No: 700346034H1
gaaaagacgagaagctgctgctaagcgtgagagggcaatggcatatgctttgactcatcagcggcaagctggttccaagcaacaaaattctttgagcctgcaaggtcttgaacttggtgagaaccactgggagtcaaattggttagacaggtggatggctgtacgtccatgggagaacaggttacttgactgtaatgccaaagagagtctgccaacgcatgaagataaggatgaggaagcaaattctcagattcacaccaaagggtaaagtgtcacttt

SEQ ID NO: 2392 - DNA, 275 bp, Zea mays
  misc_feature: Incyte ID No: 700346035H1
  unsure 245: a, t, c, g, or other
gggatggtttaatttatgtaggaaacatggtaaatccggctaccctggaacaaatattcggtgtctcttctttggctgcattaccagcccagttggcgttggagcaatttgacaacgaactctcgaggaaggttaacgaagttgtaaatgaaataagacgccagaggtgctcatacttgaggttaagacaatgcagaaggggtgaaccatctggtgattttttccggtcattttagtggaggacnaagcgcctggcgtcttctcctacgtcgagt

SEQ ID NO: 2393 - DNA, 273 bp, Zea mays
  misc_feature: Incyte ID No: 700346036H1
  unsure 220, 242: a, t, c, g, or other
ggaaaacttgttccagttgaatctatggtgcgatcagcagctcatcaacaaaacggaatagcagccaccggagaaaaaggagtgcagatacccaaatctcctagcaaacctggaaagcaatccttaaatggcaagaatttgaagatgggatttcatttaaagaattcgtctttgaaatgttcaaccaaatccagaccatcaccaaattgcttgcaagggntgatgaaaaccagccccttttnggatcaacctcaaattaaaaagcttcatgtg

SEQ ID NO: 2394 - DNA, 269 bp, Zea mays
  misc_feature: Incyte ID No: 700346037H1
  unsure 43, 202, 235: a, t, c, g, or other
ctagtggtcttctctctggcaagcacaacatcgtcctgaagtntcctgcttctgacaaggcctccaagatgaggaatcttgatgcctcgttgcttccgcaaaccaacaagaatgttcagcagcaaagtgaagtcgatgtgaagcttgcatcaatgctctatgaagctttacttagccttagagaacagataatggaggagtntacgaaggattccatgcgtatcacatattccanaacagacacgttgaaggaatgagtatccgagtac

SEQ ID NO: 2395 - DNA, 166 bp, Zea mays
  misc_feature: Incyte ID No: 700346040H1
  unsure 59-60, 70: a, t, c, g, or other
gggcgatgtgcctacattggttggcaatgacgatgcggagagtgaggaacctgtgaagnncactacagtngctgagcaggtggatgagtatgctggcatttcatccccaatatcaacatactcatcccacctgctcagccactgtagtgctcttcacaggtggatg

SEQ ID NO: 2396 - DNA, 261 bp, Zea mays
  misc_feature: Incyte ID No: 700346041H1
gaccagttgtgagagagaggggaagggatcgagagcgcggcggaggcgatggcgagcggagggaagggactcaacgcgactggggagttcttccggcggagggacgagtggaggaggcaccctatggcggggaaccagctgcgccacgccacacccgggctcggcatcgccatcgtcgccttcgggatctacctcgtcggcgaggccgcctacaaccgcctctaccgcccctccggcgacaaccaccactagatcgccggc

SEQ ID NO: 2397 - DNA, 270 bp, Zea mays
  misc_feature: Incyte ID No: 700346043H1
aaagtttatcaggcatgatactgtcataagtttacttctgagatttcggtgcatgaacatatgctgatttgatagaaattggaatgatgtagctattaaatttgtggatttttcagatgggatatgttttgcttaatcatttgcttttgataattgtcatcacaaatcacatgccatcgcattttatacagtggtactgtatccattacaagtaatgtcttagaactttggattcctgatatctgaagcacctgtcgactcctgttttgt

SEQ ID NO: 2398 - DNA, 273 bp, Zea mays
  misc_feature: Incyte ID No: 700346044H1
  unsure 237: a, t, c, g, or other
aagcaaacgggctgtgcccacttcaaagggacaagctctcgcagacgaatatgggataaagttctttgaaacgagcgcaaagacaaacctgaacgtcgagcaggttttcttttctatagcaagggatatcaaacagagactttcagagactgattctaagcctgaggatcgaactatcaagatcaaggctgaaggggaagctgatgcagcagaggcgcagaaatcagcttgctgcgnctcttgaacggttgtggctgcaggatagtttcataa

SEQ ID NO: 2399 - DNA, 268 bp, Zea mays
  misc_feature: Incyte ID No: 700346045H1
  unsure 4, 24, 37, 39, 42, 48, 56, 62, 82, 85, 124, 166, 169, 183, 230, 248,: a, t, c, g, or other
gttnttttggagagcaagtatggntctcctaaaattntnaangatggngttacagntgccanagaggttgagctggaggacnctntggagaacattggtgctaaattggtcaggcaagcagcanctaagaccatgatctagctggagatgggacaaccacctctgnggntcttgctcaggggntgatcgctgagggtgttaaggttgtggcagctggtgctatcctgttnagattactcgtggtatcnagaaaacagcgananactag

SEQ ID NO: 2400 - DNA, 274 bp, Zea mays
  misc_feature: Incyte ID No: 700346046H1
  unsure 57: a, t, c, g, or other
ggctagctatcaggagagatccatcgctcaggaacaggaagaagtgaggcgacagtnctgcaggatggcatcggagaaggtggagacgatcgtggcagggaactacatggagatggagcacgagcccggcggcggcggagaccatgaccagcaacccagcggcggcgcggcgtcgtccacttcatccagctccaggggcggcggcaagaagaaggccctgtcgagcctgttctggcacggcgggtcggtgtacgacgcgtggttcagctgcgcg

SEQ ID NO: 2401 - DNA, 273 bp, Zea mays
  misc_feature: Incyte ID No: 700346047H1
aacaaagaaaggtaagtggggaaaatcaagatccatcaaatagaatatatcacaaagagaagcattgaacaagtgaatatcctggcttggttatggctagtgcggcctattctacacaaacaatggttcatgtattaaacccaaaggcaccaggcttgagcgaggtattcgtgacctccagaagattgctgcagaatacagaccaccaacaattgatattaatgaggtcgatccaaatggccaggcagcagttaaaagacggttgcctcctga

SEQ ID NO: 2402 - DNA, 275 bp, Zea mays
  misc_feature: Incyte ID No: 700346048H1
  unsure 221: a, t, c, g, or other
gggatcttataaatcttggagcaaagaagttagttgttccagggaacttcccaatagggtgcgtcccattatatcttgcaatctttcagagccaaaaagaggattactatgaggaacaaacaggctgcattaagtggctcaatgattttgctgagtaccataataagatgcttcaggaggagttggagaaactcaggaatcttcaccctgatgtgaccatnatttatgctgattactatggtgctgcattgaacatattccgtgccccactccag

SEQ ID NO: 2403 - DNA, 117 bp, Zea mays
  misc_feature: Incyte ID No: 700346049H1
accattggctatcattgcagtagctagtttgttggttgaaagatcacgtgaggcgtggccagtcatcgtacgacaagattggtcttgggaatgaagacaatacagcaaagataatgt

SEQ ID NO: 2404 - DNA, 291 bp, Zea mays
  misc_feature: Incyte ID No: 700346050H1
  unsure 7, 18, 25, 98, 122, 187, 226, 245, 247, 261, 268, 273-274, 279: a, t, c, g, or other
gcttggngtccgcctcanacccgcngccaggagagccggctcggtcggttcgtcgaagatcccggatctgactctgtcacgaggtctttcggcgggtnttgtctcgcgaggtgtagcgagcnaaggtctggtcgcctgttcaggagagtttcgagaagctgaaatggctcctaaagctgctcctgcnaagaagggtgatgccaagacccaggccttgaaggttgcnaaggctgtaaatctgggtnanaaagaggcccaganttcgaancccgnnaattncagcgccaaaag

SEQ ID NO: 2405 - DNA, 289 bp, Zea mays
  misc_feature: Incyte ID No: 700346052H1
  unsure 236, 244, 255, 259, 261: a, t, c, g, or other
cgcaaagaggcctgcaaattcacccaggatttggcgctgatcggagctctgctcttctttctgggcatgaagaactccatcccgaagcggcagggcggcaagaagaaggcccccaaggcgaagacgaactagggctgcttagatagctgcacgcctcaggggggtgtatcaggccacaggtctatttcgaagcaggcccagcgcgatgcagcgaatgccatcgagctgcgtttaanatgtttancatcagattcntttngnggggcacggccgaaaaagtttaccgggg

SEQ ID NO: 2406 - DNA, 294 bp, Zea mays
  misc_feature: Incyte ID No: 700346053H1
ccgtacccaatctaatcgacacccggccgagatgggccgcaagttcttcgttggtggcaactggaaatgcaatggaaccgcagatcaggttgagaagattgtcaaaaccctgaatgaaggaaatgttccctcttcagatgttgttgaggtcgttgtcagtcctccttatgtgttcctcccggtggtcaagagccagctgcgccaagagttccaagttgctgctcagaactgctgggtgaagaagggaggtgcattcactggtgaaattagtgctgaaatgctcgtcaaccttgg

SEQ ID NO: 2407 - DNA, 289 bp, Zea mays
  misc_feature: Incyte ID No: 700346054H1
  unsure 55-56, 238, 247, 250, 255-256, 258, 260, 266-267, 271, 277, 285: a, t, c, g, or other
gtagactgttagttcacacggctaatcaactgatggttggcgatggaataaggcnngaggtgtgctgcaagtgtccacagttaaagatgcttgggacatattgacataaacatgttccttgaagtaaatggggttttattttattttgaggagatctacacaacactcaagttttgtttgataacttgcacgtcgctttcttagttctggtcttgtaagtgatgtttcattaactatnagattcttnctncaganntngngggggnntttnaaggcnccctagtnaaaa

SEQ ID NO: 2408 - DNA, 293 bp, Zea mays
  misc_feature: Incyte ID No: 700346055H1
  unsure 244, 253, 267, 275, 292: a, t, c, g, or other
cacagctttggcggaaatggggctttcagcaaaggaattttctttattattttcacaagcaccaaatagaggaggcaagctatcgggtgacttcgtagacacacaacgttggtggagtcggtatgttgaggcgcagtgttgcattgcttcacatgattataaaggtggccttgacatatatctagaactaatgcaacgattccccaataatgtgcatatcttgttggaaattgctaaggttgangccatcatnggcaggattgatgncgcgatanaccttttgagaggccgnc

SEQ ID NO: 2409 - DNA, 290 bp, Zea mays
  misc_feature: Incyte ID No: 700346056H1
  unsure 3, 5, 7, 29, 75, 128, 146, 153, 159, 166, 188, 197-198, 202, 230, 241,: a, t, c, g, or other
cantnanggtctcagtggtagtatctcancgtccatcgggaagattagctcacttaaggtgctaaatcttgctancaataacatcactggtactgtgcctgaggaggttgccgcgttgccttcgctgncagaggttgatttgtcanacaacantctatntgggaancttcctacatttgcttccaatngtgcagtgnngaanactgctggtaaccctagcatgggcaggntgtcctggaanaacccncgttcagngtttgnacgaaattnnttcggggggggnaacagcg

SEQ ID NO: 2410 - DNA, 283 bp, Zea mays
  misc_feature: Incyte ID No: 700346059H1
  unsure 31, 144, 239, 248, 253, 255, 270-272, 281: a, t, c, g, or other
cagccagccaccgaccacccgcgcaggcagngacttggggagcaagcaaggcgaacggcctgccatggattccttcttcgtcctcgccgtcgtcgtcaggtcccggcgctaacccggacgttgttatggaacagatcaagacgnagctcgcacaggcttacgcgcaggagtttctcgagaccgtcgggaacaagtgtttgaaaatgcgtaaccaagccaggatcaagcttgatggaacnagatagtgnattangntggttttcacaatannngatttattnta

SEQ ID NO: 2411 - DNA, 286 bp, Zea mays
  misc_feature: Incyte ID No: 700346060H1
  unsure 156, 242, 244, 249, 254-256, 259, 262, 264, 268, 270, 273, 277-278, 282,: a, t, c, g, or other
ccgcgttctccgtctccgtctccgtctccgtccgcccggcgtaaagaaaagcctctctcaccacagccgccacgccatggccgaggagaccgacaccaggcctgcctccgcgggctcccgaggccgccccgcgcccgaggacgacgacagggaggncggcgagatcaccgacctcgcctgcgctccttccccgcccgccacgcacccgctcgagcactctggacttctggttcgacaaccgnanagcantccannnggnggntngggncntcnatcnnccantana

SEQ ID NO: 2412 - DNA, 284 bp, Zea mays
  misc_feature: Incyte ID No: 700346061H1
  unsure 215, 271, 279-282: a, t, c, g, or other
gcgatgaacaatgtagtttacatggaggggtttgtgataatggtaaatgtgaattccgttgttcagattatgcaggctacacatgtcagaagggttctgcaatactgcccagtctgtcaatgtgtcatgatgtacttgttagagattcagatgggcagcattgtgcgccaagtgagctcagtatactacagcagcttgaaactgtagttctcgtnccaattacaatagattgatgccaatgggcggaccttccttacttcttcaacatgcnactgtgcnnnntg

SEQ ID NO: 2413 - DNA, 288 bp, Zea mays
  misc_feature: Incyte ID No: 700346062H1
  unsure 249, 258, 275, 282, 284, 287: a, t, c, g, or other
ggacagccattgtcttgccgtcaccatggccggagaagtgcagagttggggccgtaaccaaaacggacagctaggccttggaaccactgaagactcgctgctcccacaaaagattcaggcttttgagagtgtttgcgtgaaaatgattgctgccggtgccgaacatactgctgcagtaactgaagacggtgacctctacggatggggttggggtcgatatggaaattaggtcttggtgaccgtatgacntttcttccnaaaaaaatttcttctgnggaggtnanaanc

SEQ ID NO: 2414 - DNA, 294 bp, Zea mays
  misc_feature: Incyte ID No: 700346064H1
  unsure 197, 200, 203, 206, 229-230, 232, 237, 253, 256, 261, 272, 275-276,: a, t, c, g, or other
cccgagaggaaccctaacaccaaaacgcccccggaggcagctaggagagctcgaatcaccagccatgtcggagcacgacctcacggcgctgatggcggcgcagtggaccgccacctggtgttccccctgctggagttcctccaggagcggcagctctactcggagtcggagatctggaggccaagatccgcctcctnagnggnacnaatatggtcgactacgcatgganncnaaaantcctttagggcacgangangtccnaaggattggtnaannccgnnnttttttntnnag

SEQ ID NO: 2415 - DNA, 288 bp, Zea mays
  misc_feature: Incyte ID No: 700346067H1
  unsure 279: a, t, c, g, or other
ggatgagacacaagaaactcttagaacatctgcttttccaagcaaccatgtgaaggagaaatgggccaagaacctttacattgcttcaatatgctatggccggacagtgtcatgaggcttgctcggctgcatccctagttgggaagagcatgttctgatgagtatatattgggaaaaaagcagcaatctttgttgctgctctctatactctctgtatgtgtaggtaacccgttcaagatgaagcaccttacatggccagagtaggagctcaagaaaganccgagaggg

SEQ ID NO: 2416 - DNA, 287 bp, Zea mays
  misc_feature: Incyte ID No: 700346072H1
  unsure 198, 218, 241, 244-245, 253, 257, 259, 266, 269, 274-275, 282-283: a, t, c, g, or other
ctgaagaacaaggagcggaggatggcttatttgcctcagtggaatatgttgagcaaacacatcccaattttactgaggagaaagtagatggttctattcctacaccagcaagttcggagcaacctgatcagttggaggtggttagaccatgggatgatgcgccgaatagtaccctaaggtcaaagcctccatcaaacncctcacagccaatgcaaggntcagatctagatgttaggaatanggnnccttgggncccntnaaggggntgngcccnnggttttnnaaaa

SEQ ID NO: 2417 - DNA, 288 bp, Zea mays
  misc_feature: Incyte ID No: 700346075H1
  unsure 267: a, t, c, g, or other
gctgtgaatagttattttctttgcactcatctttgttggctttcatgaggctctaaaagtgagagttggagaaatacaaatcggtggacacgcatgaccaaacattcatagccgtggctataattttttcttcagacatggcgcttaataatgtctacgtgtagtctacctatatgtgagcagatttggcctctaggagcgagcacgtgtgtttgcatatggcatgcatcgtgtgggttattagagtgaactcgaaccacgtccagnggagttgcacatccagtgagt

SEQ ID NO: 2418 - DNA, 287 bp, Zea mays
  misc_feature: Incyte ID No: 700346077H1
  unsure 38, 70, 282: a, t, c, g, or other
aagttccttttgtatagccagtccatcccctcgctcgntccccaactccagcaggcagatcagatacatnccatccattcgcggaccggaagcaggaaaggaagggttgaactatgagcgccgtggcggtttcgtcgtcgctgaacccggacgcgccgctcttcatcccggcggcgctgctgcaggtggaggacttctcgccgcagtggtgggacctcatcaccaccactgcctggttccgcgaccatggtcccgcgagcgcgcccactggacgagatggcngagca

SEQ ID NO: 2419 - DNA, 116 bp, Zea mays
  misc_feature: Incyte ID No: 700346078H1
  unsure 2, 28: a, t, c, g, or other
gnagacgctaatcagaaactctactgantggatgccttcgttctctctgagtacaaaggccccattgaaatatgtatgagaaataaagcaaatttagaggaccggtagcaaaaaaa

SEQ ID NO: 2420 - DNA, 296 bp, Zea mays
  misc_feature: Incyte ID No: 700346080H1
  unsure 219, 247, 266, 284: a, t, c, g, or other
gagccagcaaaaatttgcctcaaatgtcatcgagaagtgctagtctttggaaatcctgtagaacgtcaggttctgattggtgagatgcttggatccactagcgaaaggaaacctcttgaggtaatgatgaaagaccagtttggaaactatgtggtgcagaaggtgttagaaacttgtgacgatcagcagagagagatgatcctaacaaggataaagacncacctgaacacctcaagaagtacacatntgggaagcacatagtagcncgcgtagagaagcttgtngctgctggagaa

SEQ ID NO: 2421 - DNA, 131 bp, Zea mays
  misc_feature: Incyte ID No: 700346081H1
gtggcaccagcaaactatgttgcccttcccaaggactgctcagacatttctaccctttgaagtgtaatcacctactctgaccatcgattgacttctcacttgatcgacctacatactatatagtcttgact

SEQ ID NO: 2422 - DNA, 279 bp, Zea mays
  misc_feature: Incyte ID No: 700346083H1
  unsure 3, 245, 254, 257, 265, 272, 278: a, t, c, g, or other
ggngataaagcaggagttcagccaagcctgtgactggataaagaatcgcttgggtgacaaggttgcacgtgttgacatatctaatcgtctcaggtcatcgccatgtgttcttgttgcagcgaagtttggttggtcagccaatatggaaaggctgatgagagcacagtctatgggtgatacagcctctttggatttcatgcgttcgaggaaagtttttgaaataaacccagagcatgagatatcanggccttgantgnggcatgcnggaatanccctgnt

SEQ ID NO: 2423 - DNA, 280 bp, Zea mays
  misc_feature: Incyte ID No: 700346087H1
  unsure 2, 200-201, 220, 229, 270: a, t, c, g, or other
ancttcagcctggagaagcagaattatcagatgattctgtagtgacaccaacaacaaaggcaactggtgatcttgttgtgagacaagtcagttttcttcggagtttatctctcctcccagctgattacaagaattatctccgttcgaagcgtatgaaggccatgcaacctggtgatggtggagcaatattgaaatatttnnagacatggcaaatggttancccctcgtncttttacactatgcagatcgatgaggatgacaaactgacancttctttggg

SEQ ID NO: 2424 - DNA, 284 bp, Zea mays
  misc_feature: Incyte ID No: 700346088H1
  unsure 47, 98: a, t, c, g, or other
gcgcacgagcgagctcgtggacgggctgttcgtgcccccgagggacnctaggcagctgaataagctggctaggaagaacgtcaaggacaccgccggcnagggctggttcgacatgcccgcgccgaccatcactcccgagttgaagaaggatctcgagattttgcagctgaggcatgtaattgacccaaaaaggcacttcaagcgggcaggaaagtccaaggcccttcccaagtacttccaagttggtacggttgttgagcctgcatctgagttctactcaagta

SEQ ID NO: 2425 - DNA, 282 bp, Zea mays
  misc_feature: Incyte ID No: 700346089H1
  unsure 51, 109, 112, 114-115, 118, 140-141, 203, 241: a, t, c, g, or other
ctaaccctacctttcctctcccgccaccgcccgccccaatggcgaacgatngaagtacgacgatgaggaggagatctcgtcctccgccgaggaggaggaccagtccgangcngnnggntgcgtatctggcgaggaagggnnatgacgacgacgaggatgctgcggcgccgcccgcggaggaacctgagggcgaggggcagcanaaggaggaggtcgacgaggaagagatcgaagccgtcantaccggcgctggagctgaggacgagaagactccgttccgtt

SEQ ID NO: 2426 - DNA, 285 bp, Zea mays
  misc_feature: Incyte ID No: 700346091H1
  unsure 2, 111, 278-279, 281: a, t, c, g, or other
gngaaaagattgatcgccgttctggtaaaaagctggaagatggccctaaattcttgaagtctggtgatgctgccattgttgatatggttcctggcaagcccatgtgtgttnagagcttctcagactatccacctttgggtcgctttgctgttcgtgatatgagacagacagttgcggtgggtgtcatcaaagcagtggacaagaaggctgctggagctggcaaggtcaccaagtctgcccagaaagctcagaaggctaaatgaatattatccctaatnncngccc

SEQ ID NO: 2427 - DNA, 282 bp, Zea mays
  misc_feature: Incyte ID No: 700346092H1
  unsure 250, 273: a, t, c, g, or other
cgctcctctcacaacccagtcgctcaaaaccctagagctctcgcctgctcgcctccgccgccggagcgagctccccatcttcatccgtcaaccatggcgacccagatcagcaagaagaagaagttcgtcagcgacggtgttttctacgccgagctcaatgagatgctgacgcgggagtggcggaggatggctactctggcgtggaggtgcgcgtcacgccgatgcgcacggagatcatcatccgcgccanggcacgcagaacgtgtcggcganaagggccga

SEQ ID NO: 2428 - DNA, 277 bp, Zea mays
  misc_feature: Incyte ID No: 700346093H1
  unsure 2, 9, 14, 16, 18, 22-23, 26, 29, 33, 35, 42, 48, 50, 53-54, 57-58, 61,: a, t, c, g, or other
antatcgtnaaagncnangccnnatncanggtnantatcagnggcggncngannacnnagnagnaagacatcatcccagagcngagctcctccagcgggatgacgccgtngccaccacctccgtcttcttcnttttcatccttctgtctctttgtttctgagctttcctgtctttccttttttctgagagattcaaagcctccangactctgtttcccccgtccttcngaattnaattngcataagtcattngcatggttgaattgtggagaggcnt

SEQ ID NO: 2429 - DNA, 278 bp, Zea mays
  misc_feature: Incyte ID No: 700346094H1
  unsure 54, 109, 112, 118, 177, 219, 222-223, 233, 236, 238, 240, 248, 259, 266,: a, t, c, g, or other
ctcgcggttgcaggccacaaacaactgctcctcctgcattccccctttcccctncccgtccgctgcattcctgctctcttgctctcctcgctctcagaccacagttgcngcngccgcngccctaagccagggtgctgaggctttcgttggcctcttcgccggcagcgagcacccacnagttctgtagaaatggctgatggtgaggacatcaagcttctngtnnggaaaatggnacngnanggtaaggntggtttgccgngatgatncanaaggtttnt

SEQ ID NO: 2430 - DNA, 264 bp, Zea mays
  misc_feature: Incyte ID No: 700346101H1
  unsure 193, 218, 242, 245: a, t, c, g, or other
agtggtttccaaagccaagtgtgtgtactagcaaccagctagctcgggcggcagcaggcagccatcatgtcggaggagaagcaccaccacttcttcaaccaccacaagaaggacgaggagcagcccgccggcgagtacgggtacttccgagaccgaggtggtcaccgccaccggcgaggggcgagtacgagangtacaagaaggaggagaagggagcncaagcacaagcaagcacttggcgnagncggcgccatcgccgccgcg

SEQ ID NO: 2431 - DNA, 281 bp, Zea mays
  misc_feature: Incyte ID No: 700346102H1
  unsure 66, 228, 235, 237, 257, 272: a, t, c, g, or other
gatgctgttatctgtaatcgatgacgaagatgagagatatcgtggttgtgaaccactgcgtttgtnatgcccaagctgttctggtaccttcgactgcccccctgtatgctagtctgattactagtgctagtgctacaagtgtatcagatccaattgaaggaaaggatgctactgctaatttatggcgccatatgcggtggccaagatgcctagatataatgttgagtncaaaatntncccttctatgctcgccaatncagatgaaaagcacnggcgataat

SEQ ID NO: 2432 - DNA, 274 bp, Zea mays
  misc_feature: Incyte ID No: 700346103H1
  unsure 2: a, t, c, g, or other
gntgaggctcaacttttagcacgagatgatgaacaaggctcttctgatgatggcgacaattctgatagtatatcgtcattgactatgagctgggaagatgcaaaagttacagatgaagatgcaacgaaaatactttctgatctacttattgacaacgcgcactgaggctgcgtcttaatggctgtcatccgcaacgctgtaaatactgccgtgaagccagagaagaaagtaatggcgagttctcccaaaaagacgtcctaactggttattagac

SEQ ID NO: 2433 - DNA, 277 bp, Zea mays
  misc_feature: Incyte ID No: 700346104H1
  unsure 2, 31, 46, 48, 202, 208, 271: a, t, c, g, or other
gntctctgtctctctattggcgacgactggnctaccgccgccacangngccctacgccaggtgtccaggtctcgggcccttctccggcaccgagcacccaccagcggaatataccatggaggtcaggcccatggtagctctgcgtgccgccctagttggtggggtagcggcatttgcgaagatcggtggggcgatgaaagcngcaggntgtcaagattggtgcaagcgctgcagccgtcaacggctgaaacaatcagctgccatatcgggnaaagac

SEQ ID NO: 2434 - DNA, 274 bp, Zea mays
  misc_feature: Incyte ID No: 700346105H1
  unsure 23, 170, 196, 200, 224, 251, 258, 264: a, t, c, g, or other
gggcataacatgggaggcctgtnggtgcagaacgcactgaggaacaagaggctcttcatcctagaccaccatgaccatttacggcccgtacctcgacgagatcaacgagctggaggggaacttcattctacgccagcaggaccctactgttccttaaggacgatggcagntgaagccctggccatcgagctgagcntgcnccacctgacggccagcagcgcggngcggtcagcaaggtgtacacccggctnaaacggngtcganggccagttgg

SEQ ID NO: 2435 - DNA, 272 bp, Zea mays
  misc_feature: Incyte ID No: 700346107H1
  unsure 40, 235, 256, 267: a, t, c, g, or other
cttagctaattcacctggaatagctggattccggcttgantctttcagtgttataagacctacgtgtgacccattcaccttcttcatcagagttggacatgagggagttttcattgacacgaatggaagatagatttataaacccagcaattctgtatatacaggtcacagttgttaaggagtccggcagttggttgtagaggaataccgtttaccagaagtaaaagcaaacagnccactatatttgattcccagnctacaacggangcagc

SEQ ID NO: 2436 - DNA, 276 bp, Zea mays
  misc_feature: Incyte ID No: 700346108H1
  unsure 62, 185, 266, 270: a, t, c, g, or other
ccatagccaacatggctgacaggctaggtcttgtggctactattaaggaccgagcaaatganatcttcaagaaaattgaagatctcaagtctattaggggaagaaatcaagatgccatattagccgcatgtctatatattgcttgtagacaagaagatcgccctagaactgtgaaagaaatatgntcggttgctatggggccacgaagaaagaattgggcagagccaaagatttatagtgaaacaactggaagttgagatggggcnatcnatggag

SEQ ID NO: 2437 - DNA, 281 bp, Zea mays
  misc_feature: Incyte ID No: 700346109H1
  unsure 123, 278: a, t, c, g, or other
gggagggaagcacgcccccaaacgttccgaggtttcgcctctcggagcgcaccaacgccacccggagcgactcgccaccggcgcggagaaggagggcggaggctaggcgatggcggacgagantgaggctgggaagaaagaggaagaggaatttagcacaggccctctgttcagtactaatgatgagtgttaagaacaacacccaggttctccatccaattgccgcaacaacaagaagctgcttggccgggttcgtgcttttgatcgccattgtaacnggg

SEQ ID NO: 2438 - DNA, 276 bp, Zea mays
  misc_feature: Incyte ID No: 700346110H1
  unsure 8, 22, 24-26, 30, 32, 34-35, 37, 42, 44-45, 51, 67, 73, 80, 82, 85, 88,: a, t, c, g, or other
tgtctgcngtggagccgcgttnannntgcngntnncntgccnanncccttncggggtagaccatcancctcgnggttgancnctnggntncnntancaactgtaaaggccaagatccaggataaggaaggaattcctcctgatcagcagagactgatctttgctggcnagcagctggaagatggacgtactttgtcctgactacaatattcnaaaggagtctactcttcatctgtgttgagacttcgtggtggtgctaagaaaaggnagaaggagt

SEQ ID NO: 2439 - DNA, 278 bp, Zea mays
  misc_feature: Incyte ID No: 700346111H1
  unsure 2: a, t, c, g, or other
gnacaatggcccgcagttgtatcaggttgatccctcaggatcatacttctcctggaaggcatccagccatgggaaaaaatgtgtccaatgcaaagacgtttcttgaaaagagatacacagaagatatggagcttgatgatgccatccacactggcaattttgactttgaaagaaggatatgaggggcaaatttcctccaacaacattgaaatcggaattattcgagctgatctgagttccaaagttttaagcccagcagagatccaggattcttggag

SEQ ID NO: 2440 - DNA, 278 bp, Zea mays
  misc_feature: Incyte ID No: 700346113H1
ggcatcgccacctaggatgcagcaacctcctatcaaagcctttctttatgcctggcatgagcacctagccaagctgcctgatgatcttgccaagacagccattgtcacttttcgagcagtcttggataccatattgggtgttcaagatgaggagttgaaacagaaggagatctgtgagcagactcgtagggaatacatacgtaaggtcccgggcttttgaggattggtgccacaagcatccacagcccagagcgatcgacgtcgatccagatagcggt

SEQ ID NO: 2441 - DNA, 283 bp, Zea mays
  misc_feature: Incyte ID No: 700346114H1
  unsure 6, 8, 26, 46-47, 57, 84, 130-131, 133, 135, 137-138, 280: a, t, c, g, or other
gacgcncncagctctcggcgcacggnccagcttccttcaaaatgtnnactgttccangaaatcctgtgcaagctacagcttggngggtgatcagtctacacccccaagtgcatatgggtctgtcaaagcnnanantnnctttgatgctgagcgggatgctttgaacttgaaacagccatgcaagaccaaaggtgtggatgaggtcaccattgtgcaacattttggacgaaccgcagcaatgcaacagagacaggatatgccttcgcctaccagagaaggncca

SEQ ID NO: 2442 - DNA, 53 bp, Zea mays
  misc_feature: Incyte ID No: 700346115H1
  unsure 12, 42-43, 48-49: a, t, c, g, or other
tcactagcagcnccgcggcggcaggcaggcaggggggggttnnggggnntttc

SEQ ID NO: 2443 - DNA, 277 bp, Zea mays
  misc_feature: Incyte ID No: 700346116H1
  unsure 126, 235, 258, 260, 263, 275: a, t, c, g, or other
gtctcaatgaggtgccctggttgccaggggtcaggcatgaaagtcactattcgtcagctgggcccttccatgatacagcagatgcagcagccaggtaatgagtgcaaggggactggagagagcatncaatgagaaggaccgctgcccagggtgcaagggtgagaaggtcgttcaagagaagaaggttcttgaggtttcagttgagaaggggatgcaacacaaccagaagatcacntcccggtgaagcgatgaagcgcngntangtcatggagacntg

SEQ ID NO: 2444 - DNA, 278 bp, Zea mays
  misc_feature: Incyte ID No: 700346117H1
  unsure 251-252: a, t, c, g, or other
gtcgtctggcgctgttcctttcaccacaatgtttgctttggtcctcctctggtttggtatctcggttcctcttgtatttgtcgggagctatctgggcttcaagcaacctgccattgaggctccggtgaagacgaacaagatcccaagacaggtccctgagcaggcttggtacatgaaccctgccttcaccattctgattggtggcatacttccgttcggagcagtctcatcgagctcttcttcatcctganngcgatctggcttcaccagttctacta

SEQ ID NO: 2445 - DNA, 247 bp, Zea mays
  misc_feature: Incyte ID No: 700346118H1
  unsure 6, 14, 20, 35, 55, 70, 219: a, t, c, g, or other
taacantacaaccnttttanttggtggtcttgacnccaatgtcactgaagatatnttgaaacaagtactnaccccttatggggacgtagtccatgttaagattcctgttggcaaaagatgtggttttgttcatatgctaacagatcttcggcagaggaggcattggtaattctgcaggcacctggttggagggcagatgtaaagcttcaggggtcgcangccctcaaacaacagttccggctccaca

SEQ ID NO: 2446 - DNA, 272 bp, Zea mays
  misc_feature: Incyte ID No: 700346119H1
ggtgaagtcagtgctgagatgctcgtcaaccttggtgttccctgggtcattcttggacactctgaaaggagagctctgctgggagaatcaaatgaatttgttggagacaaggttgcgtatgccctgtctcagggactaaaggtcattgcatgtgttggtgagaccctgagcagagggaggctgggtctaccatggatgttgttgctgcacaaacaaaagcaattgctgagaagatccaggactggagcaacgtattgttgcctatgaaccat

SEQ ID NO: 2447 - DNA, 273 bp, Zea mays
  misc_feature: Incyte ID No: 700346120H1
  unsure 8, 22, 41, 45, 77, 91, 225, 231, 253: a, t, c, g, or other
gttccccnattattcctagaancaggcgacctgcgactccntgangttgacaatcgagtagtatacccgattgaagnccccattcgtatantaattacatcacaagaggtcttgcacttcatgagctgtccccacattaggctaaaaacagatgcaatttcccggacgtctaaaccaagccactttcaccgctacacgaccgggggttactcacggtcatgctcnggaatntgtggagccaaccacagtttcnggccatcgtcctagaattaa

SEQ ID NO: 2448 - DNA, 89 bp, Zea mays
  misc_feature: Incyte ID No: 700346121H1
  unsure 68, 72, 74, 76, 79-80, 82, 84-85, 88: a, t, c, g, or other
ggaaccttcccgagagaggatacaaaggcacccggatcgaggaaaccaattccattccattccacacnacanangnagnncncnngcnt

SEQ ID NO: 2449 - DNA, 275 bp, Zea mays
  misc_feature: Incyte ID No: 700346122H1
  unsure 11, 20, 23, 25, 50, 79, 83, 90, 92, 95, 114, 147, 153, 182, 184, 193,: a, t, c, g, or other
cagaccaccanacaagtgcnagngncctctccgcagtccgccgcaatggngagcaccttcatacatgatcaaacctganggcntccagangngcntcattggtgagatcatcanctgttttgagaagaagggcttctacctcaaggncttgangcttgtacaacgtggagaggtcgtttgcngngaagcactncgccgntctcgactcnaagcncttcttccaggcctcgttggactacannanctctggccctgtggtggccaggtctgggagg

SEQ ID NO: 2450 - DNA, 274 bp, Zea mays
  misc_feature: Incyte ID No: 700346123H1
  unsure 83, 85, 184: a, t, c, g, or other
gtacgaccgccgccgcatcggaccgtgcccgaaccccccttctcctcgctgactcggctcccctccttccgccgtcgccggangnaagcaagtggggaccacagaagcattagctgggtgaacccactcaaagggggcagggaattgtgtgctagtttgaatggctgctacaaagcttcagganctttggaaccacccggctggccccaaaaccattcatttctgggcgcccaaattcaaatggggcatcagcattgccaacatagccgatttg

SEQ ID NO: 2451 - DNA, 273 bp, Zea mays
  misc_feature: Incyte ID No: 700346125H1
  unsure 91: a, t, c, g, or other
catgaacaccgagtacctcagggtgaagaagctccagcaggaggccgcccggtgcctgagcttgcacaagacaatggagctgcagccgganctgtcgctcggccctgtgtggccgggcttcgccgccggtgacctggccgccaagagctcctcgtccgagtctgacggaacctcccggaagaagaggaagcactacaccgccagctgggaggagcttcagcagccgcccgcgagcctggagctccagctcaacgacccatgcctcttcgactg

SEQ ID NO: 2452 - DNA, 273 bp, Zea mays
  misc_feature: Incyte ID No: 700346126H1
  unsure 37, 66, 120, 202: a, t, c, g, or other
gggcggcaactcgagcatccctgaccccaggtccctntgcctggaggggacactccagccccacgnggtcgctgggaagattgtgatctgcgaccgcggcattagtcctcgggtgcagangggtcaggttgtcaagaacgctggtgccgcgggcatgatactcgccaacacaccggcaaacggcgaggagcttgtcgccganagccacctcctgcctgcatgggccgttgggcaatctgaaaggcatgccgcccaagaagtacacaaaaccgc

SEQ ID NO: 2453 - DNA, 268 bp, Zea mays
  misc_feature: Incyte ID No: 700346127H1
  unsure 22, 101, 166: a, t, c, g, or other
gccctccatccgaacaacagcnggagcccgagcccgaacccgatattccgcattcctacccagcaatggtggcccttgtctaggtggacgcggtgcaagangcgaacggggggcgatggatgaggaggggcagcgaacgccgcagccgatggtggtcgcgcggaancccgccaagccacgccggatcacccaccctactgctggatgatcggcgaggcaaccgacgcgctggccgaggacggcggctcggaggaggactccatctctg

SEQ ID NO: 2454 - DNA, 274 bp, Zea mays
  misc_feature: Incyte ID No: 700346129H1
  unsure 16, 137-138: a, t, c, g, or other
gtcgtgaatgccagtngagtagcatacagatttatggcaggcctgacttccaaaaatcaagcctcacctgagtctccgggtaacaatcaaaacagaggcagccctagtttccagggagcttggttcaagaacatcgnnttcagctggtgcaaagccttcatcgagtggatcgacacgcacacttttcaggacgctgatgatggaaccccttgcaacatcaaagttccaacagagccattcaacacgttgtattgcttccccagcatatcaacca

SEQ ID NO: 2455 - DNA, 266 bp, Zea mays
  misc_feature: Incyte ID No: 700346132H1
  unsure 109, 132, 206, 220, 222, 242, 244, 252, 260: a, t, c, g, or other
ggtaatttggaagagatttcagaagttgaaggtagatcggaaaggtatgcagttcagaaagatgagagcttgtcagaaataaggacgcagctccttcagattgaaaatncagccaaagcagtttactggatncttctccagaaatttatggggaagtccgagaacggtatggcatcttggagacaagagtgcagggcggagatggnttggatgagatctntntgattggcctctcttcggangngtcagccnagagccgngcaaga

SEQ ID NO: 2456 - DNA, 273 bp, Zea mays
  misc_feature: Incyte ID No: 700346134H1
  unsure 21, 24: a, t, c, g, or other
gtctctctctctcccctccgngtntccctccccctctcggagtctcggtcgtggcgacgacgactgggcaggccgacgagcacccaccaggaaaagtattgctcctagcctcctacagctagttctttttatgattaagctccaatgaaggattctcaggatattcagagcacaacagagttgcagttcatcagcacagggtactaatgaagtggcaaagttcagcaaccaaacccgatgaccatgatgctcctgcaggaaattcgggttcct

SEQ ID NO: 2457 - DNA, 240 bp, Zea mays
  misc_feature: Incyte ID No: 700346136H1
  unsure 2, 11, 21-23, 36-37, 57: a, t, c, g, or other
cngcgattttnactttgaaannngtggctactccannaatgcgatccatggctcagnattctccacaatccatgtgacgcccgaggacggtttcagctatgccagttatgaggttatgggcttggatgccactgctctgtcttatggtgaccttgtcaagagggtcctcggtgctttggcccctcggagttttccgttgccgtgaccatcttcggcgggcgtggccagccgggaacatgg

SEQ ID NO: 2458 - DNA, 268 bp, Zea mays
  misc_feature: Incyte ID No: 700346137H1
  unsure 3, 45, 76, 185, 263: a, t, c, g, or other
gcnagggatatactggcaagattgcgtccacacaactggaaaagntcagatgacctcactatacagcttatttcantctgccactggaagcgccagcactgtggcaagaaaagacatgcaatctttggtaaatggtcttctaagcaaaagttcagtctatcagaaggactcttcagggctaaacnaggagagcctgtaccagatatgttattcagtcttgagtcactggttgatctcttggaagaggccagagaaccaacagntatac

SEQ ID NO: 2459 - DNA, 264 bp, Zea mays
  misc_feature: Incyte ID No: 700346141H1
gtggggggcttgacatggtcacactgcacttcctaccattttcataccctgaaatgtcttcgacaccaccctctgtgcatcctgtcctcactacagggaacagcgaaacaagctcaccttttctttctggatttgttaccatagctgatgcatatggtcatgtacagttagctggcatcacatgcttgggtgagtgctttgtggtggagatgaagggttggaaggaaccggcacctcttcagctgacttagaaagcaaatcgtc

SEQ ID NO: 2460 - DNA, 266 bp, Zea mays
  misc_feature: Incyte ID No: 700346142H1
  unsure 103, 146, 224, 249, 259: a, t, c, g, or other
gtgtacccccaccagcaggcggccccctcttactccacgaccgccaccgtcttctggccgtacgcgactccgccgcagaaagagagccgaggacggcagcganttctcgctggcgtcggatatggatctcgacgccgacgcgcagncgccgcagataagctgaaagcagtgttcagaggaacttggacatgagatccgggttttttcaagtgagaatttgctcnacaaccgagcaagctgcccagtggnaatcagaggnaagtgac

SEQ ID NO: 2461 - DNA, 264 bp, Zea mays
  misc_feature: Incyte ID No: 700346143H1
  unsure 76, 133: a, t, c, g, or other
gggcaaggtggtccttgacgtgggcaccgggagcggcatccttgctatctggagcgcgcaggccggggccaggaangtgtacgccgtccgaggcgactaacatggcggagcacgcgcgcgagcttgctcggcnaacggcgtcacggatatcgttgaggtgatacagggcaccgtggaagacgttgaccttccggagaaagttgatgtcattatatcagagtggatgggctatttcttttgagagagtccatgtttgattccgtc

SEQ ID NO: 2462 - DNA, 269 bp, Zea mays
  misc_feature: Incyte ID No: 700346144H1
  unsure 73, 206, 224: a, t, c, g, or other
tcgcgtgtagtgtctagagcgagtggagctgatgatgttatgctgcttgatgcagtcaaagagagtttacgcnacaaacctagagaaaacaagttcaaggtggagcacgagcacacatgtgggcacactctttatcgtcaacctaagcggtgcatggcaacatggtgaccatagcccgagtaatgggggtaaaatattaccttctncaacttgtacgatgatcnggctcagcgttatagaaagtgtggatgcaccacactctattgggc

SEQ ID NO: 2463 - DNA, 244 bp, Zea mays
  misc_feature: Incyte ID No: 700346145H1
  unsure 22-23, 38-39: a, t, c, g, or other
taacaatacaaccatttttgannggtggtcttgaccannatgtcactgaagatatgttgaaacaagttttcaccccttatggggacgtagtccatgttaagattcctgttggcaaaagatgtggttttgttcaatatgctaacagatcttcggcagaggaggcatggtaattctgcaaggcaccttggttggagggcagaatgtgaggcttcaggggtcgcagcccttcaaacaaacaagttca

SEQ ID NO: 2464 - DNA, 268 bp, Zea mays
  misc_feature: Incyte ID No: 700346146H1
atcgaggatggagtacgagcttgctgggccagaaatgtctctctttgaaccattgggcagagcggaagggaagcgatgaaggatggatccattacgaaccctgctgatcgtcatgccattggatgacacaaccaaacatcgtttgccagaaggtcgggcaaaaacatgccagtccgtggcgaggtggggcggggcatcgaccatccactcggggagcataacctggcgcgcgaaccaccgacgcgcttcggagccgcggagcctggag

SEQ ID NO: 2465 - DNA, 271 bp, Zea mays
  misc_feature: Incyte ID No: 700346147H1
  unsure 34: a, t, c, g, or other
gcgccggcgtgctcgtgatctcaacccaaggcgnccctccgctccggtcacccgtcgctccacgcaaccatgtcgaggaggaagaccagggagcccaaggaggagaacgtcacccttggacccactgtccgtgaaggagagtatgtctttggtgtcgctcacatctttgcatccttcaatgacaccttcattcatatcactgatttgtctgggagggaaactctggttcggatcaccggtggcatgaaggtgaaggctgaccgtgacgagt

SEQ ID NO: 2466 - DNA, 156 bp, Zea mays
  misc_feature: Incyte ID No: 700346148H1
  unsure 28-29, 135-136: a, t, c, g, or other
gttaaagatgaactgcttcgtgtgtacnntatcccaaacgatcgtttgggataggataaagatgaactgcttcgtgtgtacccttttgtgtcacgagcggctagccacgaccctgcaatctgacttgttttttanngatcactgctacttgatctt

SEQ ID NO: 2467 - DNA, 136 bp, Zea mays
  misc_feature: Incyte ID No: 700346150H1
  unsure 3, 77, 106: a, t, c, g, or other
gtnacaatacaaaaccagttggacatcaggaccttgtacggcttagtcatctcaatactggcttcttggcagatttncaggcttagtcttggcttactttccctcncaactatattcatatttctatggtgcgatg

SEQ ID NO: 2468 - DNA, 124 bp, Zea mays
  misc_feature: Incyte ID No: 700346152H1
  unsure 13-14: a, t, c, g, or other
gttgatgccaggnnattaggcccccgattttaccagctccaggttatcctggtcctccaccaaccatgcagcaaccaggcgccccacctgggtccatgccacaaccgggcgctccacctggttc

SEQ ID NO: 2469 - DNA, 119 bp, Zea mays
  misc_feature: Incyte ID No: 700346154H1
tgatttcactatctttcacttaagtgaattactatacacattatgcaagaggagcattaaatcaggggcatgatgtttactcagatgagcatttgtcgtcatttactgttccaaattat

SEQ ID NO: 2470 - DNA, 119 bp, Zea mays
  misc_feature: Incyte ID No: 700346155H1
tggtggtgcatcatcttggttcatcactttaaatttgaaggaatgcactgaaggagctgatctaatggttctgatggctagtgcatcagtgctgcaatttgctctggcactgttcatcc

SEQ ID NO: 2471 - DNA, 118 bp, Zea mays
  misc_feature: Incyte ID No: 700346157H1
  unsure 49-50: a, t, c, g, or other
ctcacgctcctcttgctgctcgccgcggcctgtggacctgctgcacatnnccaacgatgctgtcttgaaggaacatatttcttcaaccaagattcctgcccgtctcaagaggggcagc

SEQ ID NO: 2472 - DNA, 120 bp, Zea mays
  misc_feature: Incyte ID No: 700346160H1
  unsure 88: a, t, c, g, or other
ttatagagaccaactcgcaggctacgcagccggcctctccggcctccggctctccccctcctcgagcgctttcggcaccgtagttacngtacgatgggcagcggcggccccgacgagggc

SEQ ID NO: 2473 - DNA, 277 bp, Zea mays
  misc_feature: Incyte ID No: 700346162H1
  unsure 173, 229: a, t, c, g, or other
gtgaagctgctcgctcagaaatacaagttctggaacatctgaatacaacagaccccaacagtactttccgctgtgtccagatgttggaatggtttgagcatcatggtcacatttgcattgtttttgaactattgggacttagtacttacgactcataaagaaaatggttttcnaccatttcgactggatcatatcagaaagatggcatatcagatatgcaagtctgtgnaatttttgcacgtaataagttgactcacacagacttaaagcctgaaaa

SEQ ID NO: 2474 - DNA, 286 bp, Zea mays
  misc_feature: Incyte ID No: 700346163H1
  unsure 270: a, t, c, g, or other
gggaagaggaaactcgaaactcggcgagcgggatggcaaccggcccggagcacgtggcggcggcggtcgaggagacgccggagaagaaggcggccagcacaaccgagctccccgcaccctcaggctggacgaagaaggttgctccaactcgaggtggacgatttgaggttatttttgtttccccaactggtgaggaagttaagagcaagagacagctaacccagtacctgaaagcttcatcctggaggccctgcatccttcagagttcgntggggaaccatgatta

SEQ ID NO: 2475 - DNA, 287 bp, Zea mays
  misc_feature: Incyte ID No: 700346164H1
ttgtccttcaaactgatataaagacactgagggcgactcaatatggatccatacttttggcaggcctcaccaacggctcctcaatgttgtcaatgagcagcttgtagaaaagcctctcgttcccttcctatgataagatggtaccagagaaaagtatagcccaaatgaactcctatatcagctatactaatatactatgcataacaatgaaacttaatgatcagttacctcgagatccacgaggggccagtagcgctgcaaagggaaacttgtaatatcgatatatc

SEQ ID NO: 2476 - DNA, 82 bp, Zea mays
  misc_feature: Incyte ID No: 700346166H1
  unsure 21: a, t, c, g, or other
ctctgaagaatctagctaggngcaggccgcctacgccatcggccgttccacagcaacatgtgctccggctcctggttctgga

SEQ ID NO: 2477 - DNA, 94 bp, Zea mays
  misc_feature: Incyte ID No: 700346167H1
  unsure 9, 13, 26, 35, 57: a, t, c, g, or other
tgcgttctncgtntccgtctccgtcnccgtccgcncggcgtaaagaaaagcctctgnttcaccacagccgccacgccatggccgaggagaccga

SEQ ID NO: 2478 - DNA, 113 bp, Zea mays
  misc_feature: Incyte ID No: 700346168H1
tgcctgtttgatgcaggtggatactttttggtcaagggaatggagaaggtataactctgtgttctctgttgttaatgtattagtatgtaggaacttcaagtgtcctttgttgc

SEQ ID NO: 2479 - DNA, 172 bp, Zea mays
  misc_feature: Incyte ID No: 700346169H1
gtagcagtcaagatcttccgccggcagaaggtcgatcaagctgtaaaggaggctgtgtcaagagtgctgtccatggtagactctacagaagcgaggatgcaataccggcgaatgcttgaggaatttcgccaggcaactaattggaaggatcaaatgaagtaacatcatattt

SEQ ID NO: 2480 - DNA, 101 bp, Zea mays
  misc_feature: Incyte ID No: 700346171H1
  unsure 81: a, t, c, g, or other
acgagacagagagagaaggccaagaggcttcctctccccattgcctcccttccgtgccctcagccgagccagccgcgaggnaggaggcatcccgccgtctc

SEQ ID NO: 2481 - DNA, 98 bp, Zea mays
  misc_feature: Incyte ID No: 700346172H1
  unsure 3, 43, 55: a, t, c, g, or other
ggntctcctccctgactccacgggcctcaccatcctcaatggncgagtgtaaaantttcgcaccaacaccactacgacaagcttgatggcgacccctt

SEQ ID NO: 2482 - DNA, 235 bp, Zea mays
  misc_feature: Incyte ID No: 700346173H1
  unsure 3-4, 6, 15, 17, 19, 22, 24, 30, 32, 35, 40-41, 49, 51, 80, 88, 92, 129,: a, t, c, g, or other
gtnntnggctggatnantnttntntgcatnanatngtacnnatccgctngntggtatgtatgtttagtatgatgccaatnccagagantatntgcctaagtggaatatctctggtgagcagcatggagncattgaaatggaaggtgatgaaggaaaaaagagtaagcctgtgtnaagagctctgcngcatgtgcagtattgccatgccagcnnnntnacttgcccattncagaaa

SEQ ID NO: 2483 - DNA, 262 bp, Zea mays
  misc_feature: Incyte ID No: 700346174H1
ggcggcggcggctgctgctcagaaagccgaggcgaagaagtccgccgtggcgcctgctgggaaggctgcccagcctgcggcgaccaccaagttcccgaccaagcccgctcctccctcgcagacggttcgggatgcacgcggcggtggctcatcagctcgtggaggctttggccgcggtgaacgtggccgtggcagaggtggacggggatatggccagaaccgtggcttcagtggtgacatggcatgagttccagggaggtta

SEQ ID NO: 2484 - DNA, 111 bp, Zea mays
  misc_feature: Incyte ID No: 700346175H1
gcttgggggcagcaacgttcagctgtttgactcgctcccacgggtcggtggtggggtacctttcatgttcatcggtgctgacgttaaccacccgtcccccggtaacgtgga

SEQ ID NO: 2485 - DNA, 167 bp, Zea mays
  misc_feature: Incyte ID No: 700346178H1
  unsure 61, 67: a, t, c, g, or other
gcttcccatcacaagcgatgtccccgaaggctgtgtgatcatcagagagcacatccccatncacgancctgttcacgtgcgtatggttcaatgaggttgatcgcttcacctccagggaccagatcagtttcagcacggttccgggacaaaattcagggctagagttg

SEQ ID NO: 2486 - DNA, 104 bp, Zea mays
  misc_feature: Incyte ID No: 700346179H1
  unsure 45, 72, 88: a, t, c, g, or other
tagagacaaccgctgcgtaaacgaatccatcgaccatggcgtctngttctcgttgcggcggcggccttcctnccttccttcccttctnccttcagcgtcccccc

SEQ ID NO: 2487 - DNA, 124 bp, Zea mays
  misc_feature: Incyte ID No: 700346184H1
  unsure 33, 40, 69, 73: a, t, c, g, or other
gagtattgcaacaagcacgccgagccgaccggnccgggcnacgcggccggcaccaccaacaggtttctntcangatgagctcaacatcttcgacgcagacttcgtcaatgtagagcactccacc

SEQ ID NO: 2488 - DNA, 103 bp, Zea mays
  misc_feature: Incyte ID No: 700346186H1
  unsure 6: a, t, c, g, or other
gttgtntcttcaagcaatatttttgcggataggttctagaaacgaagttcctggacactaacggccttctgtttttcccttcagtaacaaggggcgatgatga

SEQ ID NO: 2489 - DNA, 91 bp, Zea mays
  misc_feature: Incyte ID No: 700346188H1
  unsure 2, 18, 40, 54, 65, 83: a, t, c, g, or other
gngtcgcgtgatctcatntcgccctcgctcacctcacatnctccgttccgcaancgtacagccantgactgtccccgggaggnccgggagg

SEQ ID NO: 2490 - DNA, 90 bp, Zea mays
  misc_feature: Incyte ID No: 700346189H1
  unsure 19, 33, 59, 86-87: a, t, c, g, or other
ctcacagtggaggcttatncaagggttgcattngggaagaagcctgctccctctctgtncagcaccagctggtaaaggtgactgtnncag

SEQ ID NO: 2491 - DNA, 78 bp, Zea mays
  misc_feature: Incyte ID No: 700346191H1
tttaagctgctacggtcagactccttactgtgagcacctatcttggcgagacactgtgattgtatattcttggcggta

SEQ ID NO: 2492 - DNA, 110 bp, Zea mays
  misc_feature: Incyte ID No: 700346192H1
  unsure 10, 55, 75: a, t, c, g, or other
aatggcgtgngtgtcctcgtcctcgtgcccatctctgtcccaatcaaactgatanttccgtcgcccgcaggccancagcagccgcggcgaggtcgtccgtcggattcgga

SEQ ID NO: 2493 - DNA, 270 bp, Zea mays
  misc_feature: Incyte ID No: 700346194H1
gtgatggctggctctatgccacctccgcctccattgtccaacattctgccggcaggttttccgggactaagtggaccacctcctccacctccacttccaccagctcagagccagccccagcagcagcagacctctcaggcgccacagcaatcaccaacatcagctggattctttcaatcatcaggcatggggttctttcctcctgtgcaggtgcagcaatcttcagcctgcccaacgacagtgattcaatgtgtctgtttgcactcaggg

SEQ ID NO: 2494 - DNA, 275 bp, Zea mays
  misc_feature: Incyte ID No: 700346195H1
gggaggtggaattttttctattggggatgtggtgcagccaaaagtaaaaacaacgccattggtagccgacaagccacactacaatgtgaaccttaagacaatcgatgttggtggcactactctacaactcccagctcatatttttgaaccaggagaaaaaaagggtaccataatcgacagtggtaccaccttgacataccttccagaattggttttcaaagaagtaatgctcgcggtatttaacaagcatcaggatataaccttccatgatgttc

SEQ ID NO: 2495 - DNA, 296 bp, Zea mays
  misc_feature: Incyte ID No: 700346202H1
  unsure 206, 209: a, t, c, g, or other
ggctgaatgactcaaacagctggtttgatggctgtggcagagtacttttatactgtgtccagcacaactatcctgatgctgcaattgatctacttaagcagatcaaggagaaagatgaaatgagtacatatatggttgttgatcaggttttttgccaaatatgggacatggagaccacaaatttggattttggaatggtgttcctnganccgtccaaagagctggacttaatgtttctcggacaagcctgacttcttctcagcgcagtgtaaaagcaaaggattgcgacgtgccca

SEQ ID NO: 2496 - DNA, 300 bp, Zea mays
  misc_feature: Incyte ID No: 700346203H1
  unsure 183, 208: a, t, c, g, or other
ataacataccgccaataatgattgatcaaggaagcaacatgaatcctagtatggagagctcaaacaattcacataggctgatggcatctaacactaatgcaactcagttttactcttacaaggaccaaatgcatgtaacaccagagactagggcctcagtgatgacagaaaaagatagcagtncaagcttctgctggcatccaagtcnagccctttgcgggaactgttttaagagcacaaagtgtatctcaggaagcttcacctagcgtcttattcaaagcctctcatagattcttcatt

SEQ ID NO: 2497 - DNA, 293 bp, Zea mays
  misc_feature: Incyte ID No: 700346204H1
gtcgaggatgagtggcaggacgggaagaagttcgatgcagtggccaccttcaagatcctcggcgaggttgacattgctcaccttaattagactttagaaacccagtcagctgcttctgcgttggtggtgctgagttcgtgcattttagagtgtttgctgctactgttagtgatactgctcccctttttggttgttaccacgagctcagatttcataagctaatcgtcgttgttagtgaaactgctcatatgatcctcatgttcgtaaatttcaagtttaaacaaccagcgtat

SEQ ID NO: 2498 - DNA, 292 bp, Zea mays
  misc_feature: Incyte ID No: 700346207H1
cttgatgagaagctccagaacgctacaacacttggagcaacccacactgtaaatgcagcaaaagctgatgcagttgaaaggataaaggaaattactgatggtaggggtgtagatgtggctatagaggcacttggtaaggcgttaacattttcccagtgcgccaagagtgtgcgtgatggaggcaaagctgttatgatcgggcttgctgcaacgaacgtaatgggagaggttgatataacccgtcctgtccgacgacagtgaaaatcatggctcatatggcgcaaggccagca

SEQ ID NO: 2499 - DNA, 300 bp, Zea mays
  misc_feature: Incyte ID No: 700346208H1
aaagctccaactacgacgagaaccgccactcctcgaaatctccaaggattttctgcggcgaaccccttcgtgacgtgacccaatgggagaggcctcgccgtcgatcgccaaggacgtcaccgagttgatcgggaacacgccgctggtgtacctcaacaaggtgaccgatgggtgcgtcggccgcgtcgccgccaagctcgagtccatggagccctgctccagcgttcaaggataggattggctacagcatgatcacggacgcagaggagaaagggctgattactccaggcgtgagtgttc

SEQ ID NO: 2500 - DNA, 300 bp, Zea mays
  misc_feature: Incyte ID No: 700346209H1
  unsure 27, 29, 31: a, t, c, g, or other
gcatgggacactgttgaagaagcggangntngcataaagtatcttaatggttctgtaatggaaggtcgaaacatcacagttgaaaaggtaattgtgtttacctctaccagggttgttgatgctaaataaagtgcagccacatatgtgcagagtgttgacctggaagtttttttggttattattcagaagatattgtgcaagctatgtccagcagttcaagatgctgagttcaccaattccagctttagctcatacggctcgatcagtggacagcccaaagggttaccatgcaccacaaga

SEQ ID NO: 2501 - DNA, 296 bp, Zea mays
  misc_feature: Incyte ID No: 700346210H1
tgactcgtgagtttgtgacagtggttttctctgtgccgccttttgcagggaaagggggtctgggttgcgtacaggcgaaaggcacgcgccgccgctgccgcgcgagcctctccgtccccatcgccgcgcagatggatccgtcgtcggagcccctgtacgcgcaggtcgagccgtacgactccgggttcctcaaggtctccgatgtccacaccatctactacgagcagtccgggaacccgcaggccatgcggccgtgtttctccaggcggtcccggagccggcactcgcccggcaaa

SEQ ID NO: 2502 - DNA, 300 bp, Zea mays
  misc_feature: Incyte ID No: 700346211H1
ccaaaccccactcaccgcaacgagccgccggatccatggccggcaaagacggctccgtcccttccccgcctcctccccggctcccatcctaccctgagatgatcgtggaggcaatccgggcgctgggactcgagaacggctgcaacaagactgcgatctcggactacatcaagggcagctacggctccaacctccctgcccagcacaacgccgttccttcacgggccacctcgcccgcatgaaggctaccggtgagctcgcttcctcaggaacaactatctcctccccaacgaggacgaa

SEQ ID NO: 2503 - DNA, 289 bp, Zea mays
  misc_feature: Incyte ID No: 700346212H1
atggttaatgaaaacaacatcatggacattgctggtatcctgatcagtcatgttccaaagtcagacccagagttcgcaagtgacattcttggggctgttctagcagcatgtgggcataatgtgtatgagatggtggtggattttgattggtatgtttcactcctgtggatatggcaagaactctgcatgtgcccagggggatgagatggtcggcagtttgttgatttaggactgagagtgcaggatgcgcggccagagctgtccgtttagctcgaatctctgattgatc

SEQ ID NO: 2504 - DNA, 295 bp, Zea mays
  misc_feature: Incyte ID No: 700346213H1
  unsure 273: a, t, c, g, or other
tgctggtcttgtagctaagaaagcttgcgagttgggtcttgaggttaaaccatgggtgaagacaagccttgcccctggatcaggagttgtcacaaagtacttgcttcagagtggtcttcaagaatacctcaaccagcaaggattccatatcgttggctatggctgtaccacttgcattggaaactctggtgatctcgatgaatccgtatcaactgccatacagaaaatgatgttgttgctgctgctgttttgtcgggtaaccgtaacttcganggtctgtgcacctttaactcgg

SEQ ID NO: 2505 - DNA, 294 bp, Zea mays
  misc_feature: Incyte ID No: 700346214H1
  unsure 271-272: a, t, c, g, or other
aagtttccccttacttgggatataactcacttaaggattatttccctgctatggaaatgaggccaaatccacaatgctcgaatccagcatgtgttcacagacagaaagaatatatggaatccaaacctgctagagatgcagcagcgaagactaagatggaagctgaagcatccacagaaaatgaatgtcctgtccacctagacaatgagtggaatatagtgttgttgatgatgaagaaactgagacatcaagcattcgaaacatccagatnnctaccagaagtctgtcgtgagc

SEQ ID NO: 2506 - DNA, 298 bp, Zea mays
  misc_feature: Incyte ID No: 700346217H1
tctgacaatccgagtgctagaatgttctcgtaggactatgaagccaatgcaacaggacaacgctgaggactgcatccttccgcagcaattgctgaccttaaagacccgtatcgacatattcttgtcagcaagattggtgatatttgatatataattaaagtaagtctgacgtagctcattcgatggtaagtctagtcctctaccataacatgaaagatccactaaccaatccgatttgatggacttgatcctcctcttaacgtagagacatgcagtattcctacaatatattagtata

SEQ ID NO: 2507 - DNA, 291 bp, Zea mays
  misc_feature: Incyte ID No: 700346218H1
caaattcctccatgtgctggtcattctttgatttcttggggtaacaaatttttatctattgctgggcatacaaaagatccatctgaaggcattacagtgaaggaatttgatccgcatacttgtacctggtcaattgccaagacttatgggaaaccaccggtgtctcgtggaggtcaaacagtgactcttgttggaacgacactagttttgtttggtggtgaagatgcaaaacggtgtctcttgaatgacttgcacatcctgatcttgaaaccagacatgggatgatgtgga

SEQ ID NO: 2508 - DNA, 296 bp, Zea mays
  misc_feature: Incyte ID No: 700346219H1
ggcaatatacacaatatcacaattcacatatacagattcacaagcttaatacataattcacaaaacacattcacatatacataaatagtccatagtccattcaaataagtctagagtccaaaagtctattgtccattcaaatacacaattcacaaaactctagtccataagtctctgtccataagtccataagctactcactactcactactcactcctcactgatcactccggcgggctgtgggagttttggccatccctcctccgccaccaggaaggtggccactccctccagc

SEQ ID NO: 2509 - DNA, 290 bp, Zea mays
  misc_feature: Incyte ID No: 700346221H1
  unsure 269: a, t, c, g, or other
cccaccgatccatttcagccgccgccgcgcgtagaagcaggagcagcaaggatgccggctggccacgggctgcgctcgcggacgcgcgacctgttcgcgcgccccttccgcaagaagggctacatcccgctcaccacctacctccgcacctacaagatcggcgactacgtcgacgtcaaggtgaacggcgccgtccacaaggggatgccgcacaagttctaccacggccgcaccggtcgcgtctggaagtcaccaagcgcgccatcggntcgagataaacaagcaggtga

SEQ ID NO: 2510 - DNA, 293 bp, Zea mays
  misc_feature: Incyte ID No: 700346223H1
gggaaaaccatcagagtacaacacctacaatgacatagaggctgtttatgattgcttgagaacggagtatgggatagaagaagaggatctaatcctgtatgggcaatccgttggaagtggaccaacgttgcatctagcctcacgtctcgagaagttaagaggggttgtcctccacagcggcatactctctggcatacgggttctgtatccagtgaaagtgacgctttggttcgacatcttcaagaacatcgacaaaataaagcaggtggactgccctgtgttagtcatacatg

SEQ ID NO: 2511 - DNA, 291 bp, Zea mays
  misc_feature: Incyte ID No: 700346224H1
  unsure 54, 243: a, t, c, g, or other
aggagaggagggacgagggaggggaaaagagagatggtggaggcatcgccggantccggcgccgcggcgaccggaggtgcctctagtacggcggcggtgcggaaggggaagtcatgcaagggctgcctctactactcgtcagtgctcaagtcccgcggttacaacccaatctgcgttgggatcccccgctccatcccccaagttcctaactacgtggtggatgaacctaaggaggaggcgacngcgcagggcatgacctcaggcggttcaggtacgggtgcgcgggttatc

SEQ ID NO: 2512 - DNA, 292 bp, Zea mays
  misc_feature: Incyte ID No: 700346225H1
tcagcttttccatcacaggattatccggtgcggtggtcctgttgaggatgatatggccaacatcattgtagcacagctgctctacctggacgctattgatcccactaaggatatcattatgtatgtgaattcaccaggagggtcagtgacagctggaatggctatatttgatacaatgaagcacatcaggcctgatgtatccactgtttgtatcggactagctgctagtatgggagcttttctacttagtgctgggaccaaaggaaagcgatacagcttaccaaactcgagg

SEQ ID NO: 2513 - DNA, 295 bp, Zea mays
  misc_feature: Incyte ID No: 700346226H1
ctcagccgcgtcgcaccgcatcgcattctacgattcgaagctctctctggctcgcagccatggcgaagaattacccaaccgtgagcgccgagtacagcgaggccgtcgagaaggccaggcgcaagtccgcgccctcatcgccgagaagagctgcgcgcccctcatgctccgcctcgcgtggcacttccgcggggacgttcgacgtgtcgtcgaggaccggcggtcccttcggtactatgaagtgcccggcggaactggctcacggcgccaagcggggctggacatcgcggtgcgg

SEQ ID NO: 2514 - DNA, 290 bp, Zea mays
  misc_feature: Incyte ID No: 700346227H1
gaagacatccagttgatgccatttgtggattactatagcctgattctttggaagaccatagcgatctgcatctatgggacaaatgtcctgtcagccaactatgtgatgaaaactgatgacgatgcttttgttcgagtagatgaagtactttcttcccttgaccgaactaatgtcaaccatggactgctgtatggtcgtgtcaattctgattcccagccacatcgagatccatatagcaagtggtacataacccctgaggatggcctgaggagagttatcctcccgggcgc

SEQ ID NO: 2515 - DNA, 290 bp, Zea mays
  misc_feature: Incyte ID No: 700346228H1
  unsure 107-129: a, t, c, g, or other
cttgctgtaactcataggttcaaagagagagacagaggataagatagttccacgagaaatcgatgctgatgactccgatgtggagcctaaaagcgatgacgagagcnnnnnnnnnnnnnnnnnnnnnnncactgaagctctaatggcagagcttgagaggattaagaaagaaagagccgaggagaagcttagaaaggagcggcaacaagcagaagaggaggccaagatgaaggaggctgaactgatgcggggaaacccgttgattaatatcaacatgctggctcctcatg

SEQ ID NO: 2516 - DNA, 285 bp, Zea mays
  misc_feature: Incyte ID No: 700346230H1
  unsure 261, 267: a, t, c, g, or other
gaggaatttggtgcagcttgaaaatgcttactactccatgaggtcctctgtggacacctgtgaaactaatgtaatcaaacgtccagataacgaggctttgagggtccgtgaaaatttccatcagcgtcacagtgattctgatgcaaagggagagaaaacagaccgtcttggatgctttttgatggtttatgcaaatatgcccggcacaataggtttgaagtacgaggaatttgaagaatgcagatgtactagctctccaangtcatngttcatgagtttgatagg

SEQ ID NO: 2517 - DNA, 289 bp, Zea mays
  misc_feature: Incyte ID No: 700346231H1
  unsure 13, 71, 254: a, t, c, g, or other
tcaggcgtaaganaactggtaccggaaggatgaggtacatgcgacacgtgcctcgccgtttcaagagcaanttcagagaaggcactgaggctgccccaaagaaaggtgttgctgctgccaactaagtgtggtcttgctgccatcaagaagcgctagaacttgagacttttgattgaattgtacttctgaactatttagcccataatactatgcttgaataatttcagacggcctggagaggtatgatatgtatnttttggtgagaaggttcagcagctctagtcttgaa

SEQ ID NO: 2518 - DNA, 300 bp, Zea mays
  misc_feature: Incyte ID No: 700346232H1
  unsure 35-36, 38, 68, 90, 171, 191, 197: a, t, c, g, or other
cacagatctcgtcgcgatggagcctcgccgccgcnncngccgcccgcgcggccctcctcctcctcgcngtatccggggtcctcctcagtnctgcggcggcggagatcaagcaggagtccttcaaggacgactcccgcggctccatcctcttcgagaagttcggcttcggcntccacggcatggtgtctatntccgtnaccggcgccaagtactcctccaagctcgctaagcccgaccccgcgcagttcgggcttcttctcctctctgacgatcgctcttcgaggccatctacgatcagcg

SEQ ID NO: 2519 - DNA, 290 bp, Zea mays
  misc_feature: Incyte ID No: 700346233H1
gcagccgcagtcccggcgatcccgccgccggtccgccctcacacctcctcgtcactgccttcgtttctctttccaacaatcaagatgagccgtggcggtagcgcgggtggtggtcaaagttctctgggttacctctttggaagcggtgagccccccaaaccagcagtggcaccaccagctgtaagtgctccacctgctgctgcaggtgctccactgctgagaaaccacctgctgcaaagcctgatggcaccagtcagattgctgctggggttaccagccaaaccaataat

SEQ ID NO: 2520 - DNA, 290 bp, Zea mays
  misc_feature: Incyte ID No: 700346235H1
  unsure 27, 82, 95, 134: a, t, c, g, or other
atcgcaggtgtgggaaacatggttgcngtcggcgaacggcgttaacagccgcacctcccgttcctccgggcgtgcctccgtnccctccggctgcncccccgctcctccgaccgcccccggtacctctggttganctcgcccccattcctccggctccgcttcgtgttctccggcctcgcccctgttcatccaaccttcggttctagcccctcgtgaaggtcgaccgttgtatctaatggtcgttgatccggtgacctcccccacaacaactctacccaaagactacgatg

SEQ ID NO: 2521 - DNA, 289 bp, Zea mays
  misc_feature: Incyte ID No: 700346239H1
agtatcttcaaggcttcagcaccacagcagccagctggaccagcaggctccgctgcactgcacggccaatttccgatatcatggcgagagcttgcaaccacgcgctgagactgctgcccaattccatcgccacgcagttggcatgcagcggaggcagcaccagatgcagaaacctcagcgtccacgcgcagttttccacccaagacgatgcttacacgaccgagccgccactgaagaaagcgcaagttcacacagagcctccggaggacccgccggagggcacccggcg

SEQ ID NO: 2522 - DNA, 286 bp, Zea mays
  misc_feature: Incyte ID No: 700346240H1
ttacaaactaaagactacatttctctattactctcatctgcttcctctccttccctctcatgttaccggttcttctatctctaatacattctgatgtaccctgatttgccagaataatatacagagtgttcctctagctattggtttggaggtcgtgtattacgagtagctaacatttggtatcagattaggtcatcctggatctgttctctgctgtgcggtggcgcccccgatcgtgatcgtccgtgatggatcatacagatgttgtcgtccgcaagctgctcga

SEQ ID NO: 2523 - DNA, 282 bp, Zea mays
  misc_feature: Incyte ID No: 700346241H1
  unsure 29: a, t, c, g, or other
ggcatccacagctgttctatgaggcgaantgtacaataccctccaaggaggaagtggcattgctaacgtcaagtggtgcggtgtggatggagaagagaatgttctcgtcattgatttgctgggtccgagtttggaggacctgttttgttattgtggccggaaattcacgctgaagactgtcctgatgttggctgaccagatgattacaagaatagagttcatgcatccaaagggtacttacacagagacatcaaacctgacaacttctgatgggtctggtcg

SEQ ID NO: 2524 - DNA, 288 bp, Zea mays
  misc_feature: Incyte ID No: 700346242H1
  unsure 246: a, t, c, g, or other
gagacgagacgagtcccctccccccacctcgcctcacccaaccggaacgaacaagttacaatctcatcccaaccccgcctccgaccggatctcgtcggactcggatccgcccgaccaccccgcgccgccgcagatcaaagaagatggcagctgtcgacacattcctcttcacctcggagtctgtgaacgagggacaccctgacaagctctgtgaccaggtctcagatgccgttcttgacgcttgcnttgctgaggaccctgacagcaaggttgcttgtgagacctgca

SEQ ID NO: 2525 - DNA, 286 bp, Zea mays
  misc_feature: Incyte ID No: 700346243H1
  unsure 7, 17, 29, 59, 74, 98, 105, 108, 128, 132, 134-135, 147, 184, 187-188,: a, t, c, g, or other
tctgcanctgttccgtnggattccggctntctgtggatggcaggtcatgtgacgacatncaatgagtgcagcancagcccctgtagccaggagtgtgncaacgtntancggctccctaccagtgttantgcngnngaggctaccagntcagcgatgtggatggagtcacctgtgaagacatcgncgnntgcgccctgcccaacggnggnnactatgactctcaccgctgcatcaacagcctggaagcntncatgcagctgcacctcgtctggctnaaagctggncc

SEQ ID NO: 2526 - DNA, 285 bp, Zea mays
  misc_feature: Incyte ID No: 700346245H1
  unsure 15, 97, 128, 180: a, t, c, g, or other
gagcaatggcttgtnatactcaccaccaaagctcacaactcctccacctactgataaacctgctatcagctcagctgtttccacttccatatttgcngtatccagtagcagtccagctatttcatcgnctcctgcatttacgggatttagtttttcttccagtgctccggttggattgtncattggtaacatcagctaaatctgatggcacaactgctgaaaataagggcagctagcaccttatcattggtatagggggtacaaaagctgaagtgaaatcgttgc

SEQ ID NO: 2527 - DNA, 285 bp, Zea mays
  misc_feature: Incyte ID No: 700346246H1
  unsure 19, 22, 27, 44, 46, 85, 88, 182, 209: a, t, c, g, or other
tgcccactgaggatgagtnganatttnctaaggatgttgtgganangcttagattgtttaatgacattactacactattttttangtnctgattatgtcactgctaacgtctacttcactagaattgctaagattagaaatcagattaggttgtggtcatcatgtggcaatccgttggtagnagaaatgttagtgaatatggtagccanatttgacaagtactggactgacattcaagggctcatgggcatgcaactattcttgaccctcgatcaaaactgcatc

SEQ ID NO: 2528 - DNA, 305 bp, Zea mays
  misc_feature: Incyte ID No: 700346249H1
  unsure 26, 44, 54, 75, 83, 177, 256: a, t, c, g, or other
gtacaaggcacaatttagtgatgganaggttctagctgtgaagnaattaaacantacaacactgccaaggcaatncatcagangatttctatgagctggtgtcgaacatttcgaaattgcaccatcccaatctcagtgagcttgtgggctactgcatggagcacggacagcacttgnttgtttatgatttccacaggaatggttcactgcatgatatgctccatctctcagatgatataacaaaccattagttggnttctcgtgttaagattgcgttgggctctgcacgtgcactagagcatctt

SEQ ID NO: 2529 - DNA, 293 bp, Zea mays
  misc_feature: Incyte ID No: 700346250H1
  unsure 179, 192, 201, 211, 269: a, t, c, g, or other
agggcttcgtgtcggaggcggagtccggcaagaggctggcgcaggtggtcagcgaccccagcctcaccaagtcgggggtgtatggagctggaacaaggactcggcgtcgttcgagaaccagctgtacgcaggaggccagcgatccggagaaggccaagaagctctgggagatcagcganaagctcgtggggnttccctaanctcccggaangaaaaagcgacatgatgaatctgtcgagcaaagagtttccttcttgtattagtgtacntagcatccatttgtttgtttctaa

SEQ ID NO: 2530 - DNA, 289 bp, Zea mays
  misc_feature: Incyte ID No: 700346251H1
gtgaaagaatgccattttgaaactaatggatgcagttgatgagtacattcctgatcctgtaaggcagcttgataaggctttcttgatgccgatagaagatgtgttttctatccagggtcgtggaactgttgttactgggcgtgttgagcagggaacaattaaaactggcgaagatgttgagatctgggtttgacacagagtggtccctgaagactacattactggtgttgagatgttcaaaagatatggacctggagaggctggtgacacgttggtctctctcgggtcc

SEQ ID NO: 2531 - DNA, 291 bp, Zea mays
  misc_feature: Incyte ID No: 700346253H1
  unsure 2, 91, 241, 277: a, t, c, g, or other
tnagataggaaattcacaactgataggatgggacgccagctttcatccatgggtatggatcctagtgctgccatgaatagaattcgcagtncagtactaggggtcgcaagcgtgagaggtcagtgagcagagctgcagcggatggtgacggtatggagatagatggccagcaaagcaacaagaaattgcgtcggacattcaaggtctaggtctaggtctaggtcactgctctgaggaatcntcctggagaagattcaggatctgagcagaagaaaangctatcagaaagca

SEQ ID NO: 2532 - DNA, 136 bp, Zea mays
  misc_feature: Incyte ID No: 700346254H1
  unsure 12, 15, 19, 29, 36, 58, 60, 62, 71-72, 81, 84, 109, 117: a, t, c, g, or other
gtcaatcggganccngagngccaccaacntcgacgngtttcgcacacacaaagttatnanangagttatgnnggactgtantanatcaatatgtgtggacataactganaatgaatnggcatacttgggatgcatt

SEQ ID NO: 2533 - DNA, 295 bp, Zea mays
  misc_feature: Incyte ID No: 700346255H1
  unsure 157: a, t, c, g, or other
gggaagccaattctggcccggctgaagtttctgagttgactggcccggatgtcatggaagagaagtgcgcttctgctgcccatttgttttgtatcattccttccagacatccttgattcaaaggcagaaggaagaaacaagtaccttgagctcctgntctctgtagctgagaagtttaaaaagagtccatacagttttgtctggacagctgctggcaagcaagctaatctcgagaaccagttggtgtgggcggctacgctatcccgcctggtagctctcaagtgaagaaaggtgc

SEQ ID NO: 2534 - DNA, 299 bp, Zea mays
  misc_feature: Incyte ID No: 700346256H1
  unsure 98: a, t, c, g, or other
ggcagccgcccggtgctccctctctgcagatctcccttcgcagccgccgaggaaccccttgcacagcgcggaagatggctgaacaggaggccccagtngcggttgaggcaccaaccccagttcttggggagcctatggacttgatgactgctctgcagctcgtgatgaagaagtcaagtgctcatgacggtcttgtgaagggtctccgtgaggctgccaaggccatcgagaagcacgccgctcagctttgcgtgcttgctgaggactgtgaccagccagattacgtcaagttggtgaag

SEQ ID NO: 2535 - DNA, 295 bp, Zea mays
  misc_feature: Incyte ID No: 700346257H1
  unsure 136, 171, 201: a, t, c, g, or other
tttcatgtggaaagccttgagaagacagctacaagatgatttccaaaagcttgcatctgctgtttacctgcaagttagcaccatcagccaggccctacatcttacgtgacaaggtcccggagctggtacatttgtncgagcgcccagggtttctattggtctttgctttcntggttgcgcagtgattgccacactgattgntgtgtacgccgactgggcgttcacttcgatcaaaggcatgggtggggctgggctggcatgtgtggctgtacaacatcatcttctattccctctc

SEQ ID NO: 2536 - DNA, 298 bp, Zea mays
  misc_feature: Incyte ID No: 700346258H1
  unsure 13, 27, 109, 131, 176, 188, 205, 284: a, t, c, g, or other
gtaaaagtgaggngaaagaagagaggnaacaggaaagagtacaactcggcggcgacaccaccgctacgcagcctcccgccgcgatggcgatgcgttcgctacgccaggntccaccgccaactctccccttntactacctaccaccgccatagcacacggcgtgggtggcctcccgnttctgacgcggnctttctctggcgcgggntcgcctcgtgcatcacttccgcggcggtcgggagaagagctcgagacggatttggggtacttctcggcgttgcggtcgncatggtcggcgctc

SEQ ID NO: 2537 - DNA, 282 bp, Zea mays
  misc_feature: Incyte ID No: 700346259H1
gcttgatctttggttgcactttgatgatatcctgactgccattaatccatttgtttcatggcaagtgcagagaatggatgctgtgtatgggcagttactagttaaagacggttgctttagctggcatatgaataatgcatctatgtgtattgactatcgagaaaaaggttttgtatgattttgttgcagctggcaaggcttctggtagctagtctagaaatagtactggcgtttgctttggtttagccttttctgacagggaacggtcgggtatactcgcca

SEQ ID NO: 2538 - DNA, 288 bp, Zea mays
  misc_feature: Incyte ID No: 700346260H1
  unsure 20, 72, 78-79, 81, 99, 207, 227, 229, 265: a, t, c, g, or other
ctattgagtcctgtacaatnagttgtattgaatttgagatgttggagcacaacaatgtagtttgtttaccancttgtnntncattcagtccccaaattnttaagaggtcttaacttgataaagttgaagctagggctgcacgattttccatggatttttgacgtatgctgcggcatgttcttattatggtgctagttgtcacaatanactgagttgtagcattgttnantttaatttatgtacggaggaggatcatatggatacnaatcgatgacgctatgtctcctg

SEQ ID NO: 2539 - DNA, 294 bp, Zea mays
  misc_feature: Incyte ID No: 700346261H1
  unsure 62, 96, 154-155: a, t, c, g, or other
gtcggagggacgggctacatgggtggctgcttctggtagcttcggtcgcccgccgcgccgcngccaggctgagtggaaggtagagggaagcaaggnaccagagggtgtgatgtggatgtagaggattggatgctataatggcgcaactgctgtnncagcccgctttgaatggtggctctttgattgggaggcagccggtggttccaaggatgaagaggaagacaccgtctgaatgaggggtgagcaactgaagcggcgtacctctgaaaagcttggagatgatctgttaccttc

SEQ ID NO: 2540 - DNA, 111 bp, Zea mays
  misc_feature: Incyte ID No: 700346262H1
  unsure 4, 25, 34, 38, 48, 56, 58, 60, 69, 72, 88, 110: a, t, c, g, or other
gcgncgagacgatgggcatctactngggaccaantggncacaagcgcngacaaganangngggtaaganacnaccctcaccacaagangccggaagtatgaggctggganc

SEQ ID NO: 2541 - DNA, 294 bp, Zea mays
  misc_feature: Incyte ID No: 700346263H1
  unsure 279, 282: a, t, c, g, or other
gtcttcacatggtagtagtagatggagtacagatacacgtacagagcggttgacgctgcagaagaaaacgatgtcaggcttcttccagacaagtttctatttcggctacacgctgatgttctgccttggcctaggcatactttgtggagctattggctatctagggtcaaccctttttgtaaggagaatctacaggaatatcaaatgtgattaaatccctgctgctaagctagcaacagaaagatcatatgtatgttcatggaggctggcctaaaaaanggntttatggtagac

SEQ ID NO: 2542 - DNA, 300 bp, Zea mays
  misc_feature: Incyte ID No: 700346264H1
tctgaaccattttacttctacggcttcaactcactcaaaccattctgttagtattgagtctcttgaggattctgttgctgatgccagaagcaataaggaacgtgctgcccatgccgtcgtcctgatgctgttgctcggatttgaccgcagacgcctccaagtccaaggtgacactgtacagtacggctgtagtgtcgagggtgctgttctcggctcctttgataatgatctgttaccttctatagaattggttacaaaaatgatagaggatgttgagcttctagaagaaaaggctaaagt

SEQ ID NO: 2543 - DNA, 290 bp, Zea mays
  misc_feature: Incyte ID No: 700346266H1
cgccgctctccccgcgtatccctctcatacgcagctcgcccagatgtcgtccgtggcgtcgaaggtggcggtgcccggagtctgtgctccgcaagcggaagcgcgaggaacagtgggccaccgagaagaaggagaaggccctagtcgagaagaagaagtccatcgagagccgcaagctcatcttcacccgcgcaaagcagtacgccgaggaatacgatgcccaggagaaggaatggtgcagttaagcgtgaggccgtttgaaggtggtttctatgtcatctgaagcaagc

SEQ ID NO: 2544 - DNA, 292 bp, Zea mays
  misc_feature: Incyte ID No: 700346267H1
  unsure 224: a, t, c, g, or other
cgaccaacgaggcaacgaccaaacccttccccctccctagctccgtgctccagcgggagtccgcggcggcggtgaagatgattatcccagtgcgctgcttcacctgcggcaaggttattgggaacaagtgggatgtctacctcgacctcctccaggccgactactcagaaggggatgctctggatgctttggaattgttccgctactgctgcaggcgaatgctncatgacacatgttgacctcattgagaagttgctcaatacaacaccctagagaagaccgagacagttaa

SEQ ID NO: 2545 - DNA, 289 bp, Zea mays
  misc_feature: Incyte ID No: 700346268H1
ctcacgaaattctgagatccatccagaaacgtcgctccatggcgattatctccgacttcaaggaggacgagaccccgcagcagtcggcggcggtcggccccggcgtcgaggagaccctggtggcagcgctagagaggaccggcggtgcactcccctttctccaggcggccatcgatgtcgctcaccgcagtctggcctgttccgcgacccttcggcggtgagcaaggttaccgcgatggcggcggccgtcaggcgcagtggagaccgaggagagggcagccagagaggt

SEQ ID NO: 2546 - DNA, 294 bp, Zea mays
  misc_feature: Incyte ID No: 700346269H1
  unsure 2, 63: a, t, c, g, or other
gngaaaccctagccgccatatctcacgatccactacgagcaccaagccgagggaaggtgaggngcgatggcgcgcggcgtggtgtcggcgaagggcggcgcggtcgcgggcaagaagaaggggtcggtttccttcacgatcgactgcaccaagccagtggaggacaagatcatggaggtcgcctcgctacgagaagttcctgcaggagcgcatcaaggtcgccggcggcaaggctggcaacctacggcgatccgtcaccatctctcgcgagaagaccaaggtcaccgtcactct

SEQ ID NO: 2547 - DNA, 292 bp, Zea mays
  misc_feature: Incyte ID No: 700346272H1
  unsure 168-183: a, t, c, g, or other
acagccacagcatcacgtccactcattagcaaggtagcccgtgctgcacctgcctgccagccgcagctgtcctgcctttgccttcccatagcatagccatggacatttggaagtccaaggtgttgcccaagatcaagctcgtcttcgtcaagagcgccggcaagaagnnnnnnnnnnnnnnnnagctcgtcaagtccttcgacgagtccaaggaggggatcgatggcgagttccaggagaagaaggctgatctccagcccaaggtcgtcgagatctacgagtctgcccctgc

SEQ ID NO: 2548 - DNA, 294 bp, Zea mays
  misc_feature: Incyte ID No: 700346274H1
  unsure 77, 97, 114, 128, 136, 144, 146, 149, 151, 153, 155, 160, 163, 165, 171,: a, t, c, g, or other
accgcgttcacggttcacgccaacgaacccaacttcagaaaaagctcgttctgcccccttccttcgcatcgaaacanaccctccgtctccaaaaganagcccaatccctaaatncccaatccctacanaggaaggnggattctncnganantncnatgancantncccgantngcagtngnngcccggttccgaggaaacaagtngtcgtnttgctccaccgtccgnccgnngccatgagcttcatcttcggcaagaagcagatcctgntgagctgntgcgggagaatagcgga

SEQ ID NO: 2549 - DNA, 288 bp, Zea mays
  misc_feature: Incyte ID No: 700346275H1
  unsure 192, 215-216, 285-286: a, t, c, g, or other
cacaaccgtgcgaccgtccgtgctgccggcgaccccgatccgccgacccgtcccgtacccaccacaccctaccgccgctacgcagctatgtacgccgtcggagccgacgcgggaggagagcgtgtacatggccaagctggcagagcaggcggagggtacgaggagatggtcgagttcatggagcgcgtcgcngctccgccggcggcgccgggganngggaggagctatccgtggaggagcgcaactgctgtccgtcgcctacaagaagtcatcggcgcccgcagnntc

SEQ ID NO: 2550 - DNA, 289 bp, Zea mays
  misc_feature: Incyte ID No: 700346276H1
  unsure 2, 7, 59, 62, 80-81, 167, 189, 244, 263: a, t, c, g, or other
gnacggnacatcccggatcaacgagaaatcggatgtgtacagctacggcattgtcttgntgnagctgcttaccggcaaanngcctgttcgacgacgagtgcaaccttacaccacttgatcctatccaaagccgcagagaacacggtcatggagacggtcgaccaggncatcaccgacacgtgcaaggtncctcggcgaggtcaagaaggtgttccagctggcgctcctttgcagcaagaggcanccgtcggatcgaccgaccngcagaggtcagcgcgtctggacagcc

SEQ ID NO: 2551 - DNA, 283 bp, Zea mays
  misc_feature: Incyte ID No: 700346278H1
gtacaacccgaggagtgttgtggctgttatggaggagctggtttcaagaagaaagctcataagatgcatcgggaatttggataatgaggaacttggtcttcttttggagttccttcaccggaatgcaactttgccaaggtatgctaagttgttgttgtgtttggcaaacaaggttgtggagatgcgcgaggctgatatccgatcagatgagaagctgaaggtgcatatgaggaatctaagagatggttgcagaggagttcactacagcactgcgcaggcttca

SEQ ID NO: 2552 - DNA, 293 bp, Zea mays
  misc_feature: Incyte ID No: 700346279H1
  unsure 2: a, t, c, g, or other
gnctcataacagaatgctggaccgaatggggaacgatatggatacttcaaggggttttctgtctgggaccgtggacaaattcaagatggtatttgagaccaaatcaagccggaggatgggaaccctcgtcgcatcattcgtcgccctttttctgctggtttactacttgaccaggtagaagacatgacatgctggaaatggtcatctcatcatctgcgtaccgtgccgtatagatagatacccaccgtcctgagtgccaaagtatatgttgatgtgggtgtttcgtcaatctg

SEQ ID NO: 2553 - DNA, 295 bp, Zea mays
  misc_feature: Incyte ID No: 700346280H1
  unsure 2, 8, 44, 55: a, t, c, g, or other
gntctagntcgcgagcggccgctcggatctagaactaggacatnagatgcaagcnatgaaggcacactatgtattggctatttatcggggcaaggttgactgaggggcacaaggattgcaacgtatcattgatcgttgtagttcactgcccactttggccacaggagaggtcatatcatcgcggagggaaagcgaaaccagttatctagtggagttgcctccttcaagctatctaatgtcctttctattcaagtctagcaatggcggcaccatgaaaaaatcccatccccagaag

SEQ ID NO: 2554 - DNA, 282 bp, Zea mays
  misc_feature: Incyte ID No: 700346281H1
  unsure 48, 157, 210, 214, 219-220, 235, 238, 241, 244: a, t, c, g, or other
acgtcattaccagacacttcacaggactcgatcaagttcgtgcaagangtgctacttgaagaccgagctaagctgaaggggatcccctccgactgctcccagatcatggtgtggcagtacagcgtgcccagctcgcgatagagggcagccgagaggncgcacaagaggcgtcgcaacctcgcaggcaggggaagaatgcagggggttggntcgnagtcnntaaaattggtgggcnatngtnacngccaaggaaagcaagaggtgattactagggttcttttc

SEQ ID NO: 2555 - DNA, 280 bp, Zea mays
  misc_feature: Incyte ID No: 700346283H1
  unsure 9, 11-12, 18-19, 24-25, 42, 51, 125: a, t, c, g, or other
gtgtgatangnnccgtgnntcgannaatacacagcattacanacaactctncatcacacaattactgagagtagatatgtggaaggaacctacctgcaggcaagcttaatgagcgagcttgaagnagagtatgaaaaggatggccagagcgagagccgtgatgattcccccaatgatccacttgttcctatccatcctctttgacttgcagccagatcttcttgctctgccatgttatcatcaatccgtgcaatagtatgatagagttgtctgatgctgt

SEQ ID NO: 2556 - DNA, 279 bp, Zea mays
  misc_feature: Incyte ID No: 700346285H1
aatgctggaaatcaaattctattcattttggaaaataattacatatttattcgtcgtagctatattccattgttttattaggtgctcaaaaattgtgttgaccggacacatgctattttggcctatgtgctatccattgctatgttttatcggtagggttttccatgcttagataacttcctaatttctcattttttgtaaataaataaatacttggagattctggtcaaaggaatgttggacacctgctagccaatgtgcggtaacggaacctgaaca

SEQ ID NO: 2557 - DNA, 287 bp, Zea mays
  misc_feature: Incyte ID No: 700346286H1
  unsure 280: a, t, c, g, or other
cgatttccaaacgcacgcaaacgctgtcacagtttgtcacggcagcggcaacggcaagtcggcaacgttgccgcggcacgtactcctaccctctacttttcctgttcgggtagtcgggtgtaccgccattacgtgatcgaaccagactcgagagggagaggaggagggagtccgaggggagagacccaattaactgcagggattggtcgggttcggctccgccttcggagagtcccaagagatgggtggcgcggcggcgggtaccaatggatccaccacntccagcg

SEQ ID NO: 2558 - DNA, 282 bp, Zea mays
  misc_feature: Incyte ID No: 700346288H1
gcgtgacggtctaactggtctttatagaggttttgtgccaaatgcgttaaaaaatctaccaaatagcagcattaaactgaccgtgtttgacacggtgaagacactgatagctactgggcagaaggagatggacaaattaattcaagaaaatgaggagaaaagaagctaggaaaagagccttggtcaatcttgaaggctttggtagaaagcatgcctctttgcagactccatattgctatgtttcctcgtttgctggtgacatattttaggatctaggcagcg

SEQ ID NO: 2559 - DNA, 281 bp, Zea mays
  misc_feature: Incyte ID No: 700346289H1
gattaccagattgtgccaggattcagggttcgcattataccagtattgggaaccatccctgcaatatttggtcaagttatggcctcctatgtggtcactcagcttgctggattagattttcaaactgaaccggttgttaacctggatttggatcattaccgtatacttcatcagcgtcttattgagcatgaggaactgatgtatggcacagccgagcaagttctggtagatgctgaagaggtaatgtacattgtcaaagaattgtggcgtggtcgaagtgc

SEQ ID NO: 2560 - DNA, 281 bp, Zea mays
  misc_feature: Incyte ID No: 700346291H1
cctcagcagcactagcagtgacaaactcgaagcttgccttcttgtttacaccctaaaactaaaactagagtcgtcggcggcaacaagcggtacgtacgtagaggatgaagagcaggagcagcactctgttggtgatcctagttctccaggcccttctgctctctgcggctgtggccaaaggacctgcagggccgaagaagcagtgctggtgcggcgagtgcaccagctggtcgggcgtgtggacctgcgacgacctcctcaccaagtgcgccgccacctgc

SEQ ID NO: 2561 - DNA, 279 bp, Zea mays
  misc_feature: Incyte ID No: 700346293H1
  unsure 8, 19, 90, 204: a, t, c, g, or other
cggagganctctgtttttngtttggttgcagagtgaactggaacgtagcggctctgtttttgtttggttgcagagggagacgcgtgagcngctgcgcacggatgggactatgggagggcgagctatgggagcgggctgggaacggagcggctccgtcccattgattttttggagtgggatggttccagatgtgaggagaatatnctctaattgaagtcattcgttctagttactttgtaaccaaacaataacaaaactgggacagaacggctcctttta

SEQ ID NO: 2562 - DNA, 286 bp, Zea mays
  misc_feature: Incyte ID No: 700346294H1
  unsure 285: a, t, c, g, or other
gaagaaggctttcacaaagtatgctctcaaatatgaaaatgatgctggcaagaaggaaattcagctgcagcttgagaagatgaagaaatatgcttctgttatccgtgtacattgctacatacccagattaggaagatgaagggtttgaaacagaagaaggctcacctgatggagattcaggtacaatggtggtaccattgctgacaaggtggactacggctacaaattttttgagaaagaggtccctgttgatgctgtctccagaaggatgagatgattgactcnt

SEQ ID NO: 2563 - DNA, 285 bp, Zea mays
  misc_feature: Incyte ID No: 700346295H1
  unsure 46, 51, 190, 200, 206: a, t, c, g, or other
gtgttcaggcgcttcgtggaggttggccgggtggcctatgtctccnttggncctcatgccggaaattggtcgcgattgtagatgttattgctcagaacagggctttggtcgatggaccttgcactcaagtgaggagacaggccatgcctttcaagtgcatgcagctcactgatttcatcctcaagtttcngcacagtgcncaccancagtatgtccgacaagcctggcagaaggcagacatcatacaacatgggcagccacacgatgggccaagaagattgaagc

SEQ ID NO: 2564 - DNA, 288 bp, Zea mays
  misc_feature: Incyte ID No: 700346296H1
  unsure 43: a, t, c, g, or other
gacttgtaggagttgacaagtttggtaacaaatattatgaganactacatgacactcagtatggaaggcataggtgggtagaatatgcagagaaaggtcgttacaatgcatcccaagtgcctgctgaatggcatggatggctgcaccacatcacagatagcaccggggataagctgctgaaccagaagactgctaggtaccttgtagagcacaagcagaactactccggtgagggtgaagagcttatctaccatccaaggggctgctttgaatccgggacaaagggat

SEQ ID NO: 2565 - DNA, 197 bp, Zea mays
  misc_feature: Incyte ID No: 700346304H1
  unsure 2, 77, 99, 149, 177, 196: a, t, c, g, or other
gnaccttatcctctcgactttacagtacctgctctcagctcctccctatctcaatgggcatccgcgaatgccatctnccaccgcctccccctttccggnccctctctcagggcagggcgacgaggtcacagcggttcgtggtgcgtgcnaacgccaaagacattgcctttgaccagnaatccagggcaacgtgcang

SEQ ID NO: 2566 - DNA, 289 bp, Zea mays
  misc_feature: Incyte ID No: 700346306H1
  unsure 31, 252, 279: a, t, c, g, or other
ccaacctaacttttgtgcatcgccatttganagctgtttgaacaatcagctatggacctttttggagtctgacaaaaaccggataagcatgagccgacagccccaatatgttgtgcagggaaggtttcagaggatcaattcaacatccagatgcaagtgttcattcttttctattggagtgacagaagttattaatagcaattacggatagagctgagtgctgatgacatagaatacagtatcagaggtagnttgttggccaggccctactatttgaantagcagtaca

SEQ ID NO: 2567 - DNA, 297 bp, Zea mays
  misc_feature: Incyte ID No: 700346308H1
  unsure 2, 288: a, t, c, g, or other
gnagaaggtgctgatgatgagcaggaaggagcggcaggagccgtacaactacaacccccgccccgacgacgaacgcttcgagtacttctaggccgtacgtcgatattggcgtactagatctcggtcgtttgcgcgtacggcagcgtgtctttggggtgacggaagtgtacatagagtggtagcacgacgtacgtgcgtacgctccttgaagaccggagatcagtctcgctgcatgcatgctgtagagatcgtggctacgtatctcagctggccataaagaagctcgcnttgccgcaa

SEQ ID NO: 2568 - DNA, 300 bp, Zea mays
  misc_feature: Incyte ID No: 700346311H1
  unsure 155: a, t, c, g, or other
gagctcgtccccgtcttgtttcgtctcctctccgtctcgtcacgcgagatatttctacgggacgggacccgcgttgcttccccgcctcgccgtcccgcgcgcgccagccgggcccggggaagccatgaactgcctccagaacctgctcaaggagnctccaatcgtggggtccaggtcgatgaggcggccctctccgctgaatctggcgatggtccgcggcggcagttcgccgatcaaacaccgtcaaaatttgcaggcccctggggcgtccattccggtgccgagagcagcgccgtggag

SEQ ID NO: 2569 - DNA, 300 bp, Zea mays
  misc_feature: Incyte ID No: 700346313H1
ggctttcaagcattgatccagtatccagacattcaaactgcgtatgcagcaaaagaagcactagaagggcacagcattctatgaaggtggctactgcaaactgcaccttcacattttcacgccatactgagcttaatgttaaggttaacaatgagcgaggtagagattataccaaggggaatgccactccaagcagtgatcaaccttccatctggtcctcagccaataccaagcgttggtgctgctattccaccagcacaggtagtgttccttctgcagccaccattcagtatgccacca

SEQ ID NO: 2570 - DNA, 287 bp, Zea mays
  misc_feature: Incyte ID No: 700346315H1
  unsure 22, 38, 153, 164, 178, 188, 190-191, 194, 204, 209, 212, 214, 220, 222,: a, t, c, g, or other
gcgcctcaaagaagggtataantaggagggcagcacanttgagcgtgatgggtgttgttcaaaggaatgagaacgtgctgatgatcgttcctccggctgaaacccatctccactggctgccaatgggcaaatgcaatcttcccgaccaagccntccgacggtcntggtccctgaagantgccaaggananntcntgacttggangtggnacnantccaantngnttcngcncggagnaggagaaaaagntgcttgactcattnnatnggttccgtgggttgtaatgt

SEQ ID NO: 2571 - DNA, 167 bp, Zea mays
  misc_feature: Incyte ID No: 700346316H1
tatacgtacagttaatagcagctagctgttggtgtggattgctatgcgttagtagcctatagtaggtaaaaggaggcactcactcatctcactataggctactatacgtacagttaatagcagctagctgttggtgtggattgctatgcgttagtacttgttaaaag

SEQ ID NO: 2572 - DNA, 286 bp, Zea mays
  misc_feature: Incyte ID No: 700346317H1
ggcattgaatggttcggttatggtttctcaactccagctaggaaactcagtgcagagaaaggtggaaaagcaatcggcccatttctattctgtggatataactgaaaaacaagctaaaatggggctagtttgtcgtgttcactcaaacgataaaagcaaattcaagttgctatattttgagctgaagaaaatggcgggctagtctgcactacaggaagacatgtgaaggttgggaaagttactgctgcaggatgtattcctggttttccgtgtaccgttttgaaca

SEQ ID NO: 2573 - DNA, 291 bp, Zea mays
  misc_feature: Incyte ID No: 700346318H1
gcctccccttccttctcatcctccgctgccatccgccggcgggaccaccgtctgctgaccttgtccgtggttccgctttcgctctctcagcgatgtcgccacggcctccgcgtgtgctgcgcctcctccacctcttcctcatctccgccgccggcaactcccgaggagcccgacgactacgagttattggacacagctgggaattgtgaccctctatgctcggctgatgaagttagctcacaatactttgaagctaactacaaaccaaaaaatgaccttctaaaagcttta

SEQ ID NO: 2574 - DNA, 290 bp, Zea mays
  misc_feature: Incyte ID No: 700346320H1
gcagaataactaaagtttcaccttcagaagaaaaatcaggtgtaaaaacgaagcaaagcttgcaaaaggtttcaaataaaagcagtgttgtacctcttgagtccaaaaccttgaagaaaaccactggaattagtcagagcattaggtctggtatggtgaagaataaggtaccccaacctaatgactctcaaaagataccggaagtgttaaccaagctgaagataaggagcaatctcctgtgacaaccgagccaactactaaggtactggaggctgatctgctcaaccagc

SEQ ID NO: 2575 - DNA, 286 bp, Zea mays
  misc_feature: Incyte ID No: 700346321H1
  unsure 249: a, t, c, g, or other
gggggagggggctatgaaggaggcaggggtggcaatgctcagggtggaaggggttacggtggccgtggaaggggtagaatgggtggtcgcggacgagggaactagtgcagttctggcgtttcctcaaaatgcatgcctcacctataccaggggaaacgacaagttatctgagcatttatgtttgaagccatgtgactgaggtctgttatttttcccctgagcgcgaggtttggttgtgagcataatgcnttgcaaattttatctgtacgtcatccttcaacgtttc

SEQ ID NO: 2576 - DNA, 290 bp, Zea mays
  misc_feature: Incyte ID No: 700346322H1
  unsure 255: a, t, c, g, or other
gaaaacccacgtctaaaacaggtggcccaccaacgattcacttccccgatcccagggggcggcgatcggaattcgcaacttctcccacgcggcgaacacggcagagatgatgagctcccgggccggatccatcctcctccgccacgccggctcccgtctcttcaccgcagcggcgatctctccggcggcggcctcgaggccattgctcgccggcggcaatggtgttccggcagtcatgctacggctgatgtccantcctcccccgccgtcccaggagcgaaggacgaggc

SEQ ID NO: 2577 - DNA, 289 bp, Zea mays
  misc_feature: Incyte ID No: 700346323H1
ataaatgggcaatcatgaaatttccatatcctggagccctgacagctctgcagtacttcactagtgttgctggagttctcctatgtggacagctcaagctcattgagcacgatggacttaacttgaggacaatgtggaagttcttacctgctgctgtgatgttctacatctccatcttcacaaatagtgaactcctgcttcatgccaatgtggatactttcatgtgttccgctctgctgtgcctatatttgtcgcgatcggagagacgctgtatctcatcagccaggcc

SEQ ID NO: 2578 - DNA, 292 bp, Zea mays
  misc_feature: Incyte ID No: 700346326H1
  unsure 2-3, 285: a, t, c, g, or other
gnncagccccagtgcatgcgcaaacattctcttagctgctccagtctggctctttcttcaagctttcagcagtaacagctctagtattagttgcgtggcacctttggcttggtggagtttgatacgagttactaccagctgagcttggcatccccatagaactgctctatgttatctggtgtaactgggcaagagttgttcctgctatgtgtcgggaatagttttcccattcgacagttgtttcccttgcttcttggaggcggctgtctctgtggtatttgaacntttgacc

SEQ ID NO: 2579 - DNA, 216 bp, Zea mays
  misc_feature: Incyte ID No: 700346327H1
  unsure 53, 87-88, 94-95, 97, 99, 101-102, 193, 196, 206, 211: a, t, c, g, or other
ttcctcgagttcgagttccgccccgacggcaagctccgctacgccaacaactnccaactacaagaacgacaccatgatccgcaaggnngtcttnntntngnnctccgtcctccgcgaggccaggaggacggagggcgagacgaagacctccgtcctccgcgaggccaggaggattcattccaggattccgacntcngaaggaggangacanaatgg

SEQ ID NO: 2580 - DNA, 287 bp, Zea mays
  misc_feature: Incyte ID No: 700346328H1
  unsure 51, 69, 96, 154-172, 239, 241, 269: a, t, c, g, or other
tcacatccttcatattgaaggtgactcatttttctgcacacttttttgatntgatgcttgacgtgaggnccgacactaggattctcaatgcaagantccagtaccttggcacatagaagtagcaacccatcccttgcctattttcatctgctgnnnnnnnnnnnnnnnnnnntggatgtgactgttttgaatgttttgtatatacttgtttttgtgtgtgcataaattcatctgtaggntntaagaaaaagagtcccagaagttgctcnattatgtgcacaaccatg

SEQ ID NO: 2581 - DNA, 293 bp, Zea mays
  misc_feature: Incyte ID No: 700346329H1
  unsure 2, 39, 109, 111, 115, 132: a, t, c, g, or other
gncgaagaagaccgcgcaggaggaggcgctgctctccgnggagcgtcgcatcgacgagctcgacctcccacggcacgaggtggtgcggcgcctccgcgtgctgcgcgancncgtnacgctgttcggggaggncgacgacgcccgcctcgcgcgcttcaagctcgtgctcaagtccggcgtcatcgacgacattgacgacatcgacatgaccgagggacagaccaacgacttcctccgcgactgatctgatgcgcaacggcagaagtccgggaggacactacgccaaggcagag

SEQ ID NO: 2582 - DNA, 295 bp, Zea mays
  misc_feature: Incyte ID No: 700346330H1
  unsure 16, 41, 58, 140, 145: a, t, c, g, or other
gtagggtagggcaggnggcgatccgaatccaatcgccgganggaggaagccaccggtngccgcagtgagggcggcggaggtagagtcaaagggatgacgcgcgggaagcagaagattgacgcgcaggcgtaacgcggagnaaacntaaatccaaggggtctcagctcgaggcccgcgccgtgggcctcaagatcgtctgctccatctgcaaggtacaattggcaatgaaaaacagctgaccgatcactatggatcaaagcatccaaaggagaaactccgagcaatcgagcaccga

SEQ ID NO: 2583 - DNA, 300 bp, Zea mays
  misc_feature: Incyte ID No: 700346331H1
gtggaggtaaatcctgtgagatttagatgagaagaaagctttagtgaggcgcttgccaagtgcttggtgaatcgcctcaaccagatgtggttgtacgatctcgcggagtcgagtcgagtttagtcgtgttccagcagcaccacattctcctgctcctgttacctcagcaccagcttctcccctgcaccttctgcagcagctccagatactaaagatgaaccattgcaagataaaacagttgaagaaagtacagatgttgtgactggaaacatatctggttttccgccagccatttgatca

SEQ ID NO: 2584 - DNA, 300 bp, Zea mays
  misc_feature: Incyte ID No: 700346332H1
gccatcttcaatggatgcacaacgaaggcaattgagcatgctgctgacaaccctgctgttgtggaagcaattggagtgcctatagtccagaggaccgtggtatgatgcttctcttgaggtgggccatcgacggcggtctgtgtcatgcacattccctgtatctgggccacatgggtcaggatttctccagattaaggcaacccgagatggagaggatggtctgctttcgtttctgcggcatcacgactggaagatcctatgctggagctcatctgaagcaccatcagatgatgaggacca

SEQ ID NO: 2585 - DNA, 281 bp, Zea mays
  misc_feature: Incyte ID No: 700346333H1
  unsure 250: a, t, c, g, or other
aactccggattaaaaataaggacttggccttctggaatcccccgctaaaccataggcgtgttctattggaagttggaacaaaaccatggagagtgaaatcatggcctcctatgaaacaaagcagaattgcgaaattagggtatttgagagttcagacgagatggcaacagatctggcagagtttatttcacaagctcagaaatttcagttaaggaaagaggatgcttgctattgcccttcggaggtcccntgttagacatatgcggaagtctgtgaagcac

SEQ ID NO: 2586 - DNA, 282 bp, Zea mays
  misc_feature: Incyte ID No: 700346335H1
  unsure 19, 99, 152, 221, 265, 267: a, t, c, g, or other
cggttgctgagaagtatanaaagagtccatacaggcaagtgtcagcttagctaattacagaccttacgaaaatgtgtctgcttcgtcactttcaaaagnaaggaaaaaggtcaagagtttaaccgatacagtagtttccttagtgccatganaaaggaacagtaatattgggcattcaacagtaacaggtgtgtattttaaatgctaacatatagaggtanaacaagatgcagggtaacctgcgtgaacaaaatatttaggttgncnttaaaaccataaact

SEQ ID NO: 2587 - DNA, 284 bp, Zea mays
  misc_feature: Incyte ID No: 700346336H1
  unsure 103, 269: a, t, c, g, or other
gttgacatctccaagccccgcattgaggcatggaacagcgacaccctcccgatctacgagcccggcctcgatgatgttgtgaagcagtgcaggggcaggaacntcttcttcagcactgatgttgagaagcacgtcgctgaggctgacatcatcttcgtctcggtgaacacccccaccaagacccgtgggcttggagctggcaaggctgccgacctcacctactgggagagcgctgctcgtatgatcgccgatgtctccaatctgacaanatcgttgtcgagaat

SEQ ID NO: 2588 - DNA, 276 bp, Zea mays
  misc_feature: Incyte ID No: 700346340H1
  unsure 134, 224, 250: a, t, c, g, or other
agttttcggtatgcctatctaaagggttaggcgcacccatcggatcagttgttgttggttcagaggccttcatcgacaaggctagaattcttaggaagaccctaggcggtgggatgaggcaggttggagttctnctgccgctgcttatgttgctgttcgtgacaccgtgggaaagctgcggatgatcacaggaaggctaaagcctggcagagggccgaagaaantaaacagcttacggtggatctcttcntcgagaccataggtgttctcgatatc

SEQ ID NO: 2589 - DNA, 281 bp, Zea mays
  misc_feature: Incyte ID No: 700346341H1
  unsure 225, 231, 235, 241: a, t, c, g, or other
gtggacagttagatccattgaaggtccttcagggctgaaaatccttactttctgcctcttgtacagaagttcattgccctactatttgatgctgggctagcgtctacgccgcatcgtccttttgccatttccaccacccgctatatctctggtccttttgtatctagagtctgagtgataggttgattccgaataacagtctgggcttgagctagcctggggcanctccancggnggagcngatggtacaaaatactggcatagtgtcattttataaatca

SEQ ID NO: 2590 - DNA, 287 bp, Zea mays
  misc_feature: Incyte ID No: 700346342H1
  unsure 198-199, 201, 277: a, t, c, g, or other
ggtacggatgagaagacctttatccgcgttttcactgaacgcagctgggcacacttggcatctgtttcgtctgcttaccatcatatgtatgaccggaaattagagaaggttatcaagagcgaaacatctggaaactttgaattcgcacttttagctatcctcagatgcgcggaaaacccagcaaagtattttgcaaanntnttacgaaaggccagaaaggtctaggcactgatgacaagacattatagggttgtggtgacgaggactgaattgatangcatatatcc

SEQ ID NO: 2591 - DNA, 284 bp, Zea mays
  misc_feature: Incyte ID No: 700346343H1
  unsure 40, 270: a, t, c, g, or other
gatcgctccgtgtccgaggagagcggcggcggcgcaaggngtcttcctgtccgacgccggcaacgtcgacaccgctggcaaacttctctccgattgtccctgctccagtaagagtaggcgaggatgagcctcccccatcttgggtgttggtgcctgacccattttctcaagttttgctatggatatgagcaatagagatcaccttaggaggagggaggaggatgatgatgacctctcctttcatctccctccctacatctctgggctatntggacgtataaaaa

SEQ ID NO: 2592 - DNA, 292 bp, Zea mays
  misc_feature: Incyte ID No: 700346344H1
  unsure 257: a, t, c, g, or other
ctggacttgcttgccgttcacttctcttcagcggcaggtggcaaggcaacgagagcaacgaagagtattcaaaccgaaaacaatggatccggtgcggaagagcgtgtgcgtgaccggcgctggcggcttcgtcgcgtcggagctggtgaagctcctcctctcccggggccaatacgcggtccgcggcaccgtgcgcgaccctggtgctagcaagaatgcccatctcaaggtgctggaaggagctgaggaaaggttgnagcttctcaaggctgatctgatggactacgacagc

SEQ ID NO: 2593 - DNA, 290 bp, Zea mays
  misc_feature: Incyte ID No: 700346345H1
  unsure 30, 100, 145, 184: a, t, c, g, or other
ttctccctcacacccacctctaccgctgtngctcacgagctctcacgcccaacagaaacggtggtggttactggaagccagcttggccggttcggttgcnaccaacgcgccccgcaaaatctcgtcgccgaccgccatggcagcngccgacgcgtcgcgtacgctgcttgctgcagtatctctngccttagctgcctgctgcctcgcgcactggcggcgggtgacacgaacggcgtctacgagcctgcagcgacgcacggatccagcgcggggaggttcaccttcggggt

SEQ ID NO: 2594 - DNA, 292 bp, Zea mays
  misc_feature: Incyte ID No: 700346346H1
gaggggaagaaatattcttcccgtcgaaagacggagagaggaaaagggacaagggcaaggcaagagagaggcgtcgtcgtttgatctgctgccggagtgcgaagaggaagaggaagaggagcgccggagttgtaaagatgttcctggtggactggttctatggggtgctggcatcgcttgggctgtggcagaaggaggctaagatcctcttcctggcctcgacaacgccggcaagaccaccctcctccacatgctgaaggacgagcggctctacagcaccagccgacgcata

SEQ ID NO: 2595 - DNA, 292 bp, Zea mays
  misc_feature: Incyte ID No: 700346347H1
gtttctgcacagctgactaaaacaatgtctaggaggaagacatttgttggaactcccttttggatggcacctgaggttattcaaaattctgaagggtacaatgagaaggcagatatctggtctttaggtatcactgccattgaaatggctaaaggtgaaccccctctggcagatattcatcccatgagagttctttcatcatacctcgtgaaaatcctccgcagcttgatgagcattctcgaaaccatgaaagagtttgtctcactatgtttaaagaagaatccagcagaga

SEQ ID NO: 2596 - DNA, 226 bp, Zea mays
  misc_feature: Incyte ID No: 700346349H1
  unsure 4, 98: a, t, c, g, or other
attnagtttgcttttttacacgaaaagcaaactgaatctaaaagggaagtaaagaagcgtaccactattctgcacagggttttgatagcagagacagnctgtctccttttaagttttaacagcaaattacaaggattggaggtagagctaggaagtgttaactaactccattccccatctcatcggttttggagctcttgtgctgccgtaagttgaccatccagtt

SEQ ID NO: 2597 - DNA, 287 bp, Zea mays
  misc_feature: Incyte ID No: 700346350H1
  unsure 248, 261: a, t, c, g, or other
ggcatacgttcctttgagctctggcgcttactcaaggaaaaaaccaacttgccacaagtattgtgcatcggtggagcttacttggaaaccatgccgactagttggatatcgggattttcgactgaaagagctagcttgccaacaattggcccatggagtggatgaacaatatcctgtgaaaagtagcactgtggagcaaactcaggaccgccagcccgtctgccacaaggtgatgctactcgctggcngtcgaagaagaantcgagagaaggcggaagattggcgcg

SEQ ID NO: 2598 - DNA, 290 bp, Zea mays
  misc_feature: Incyte ID No: 700346351H1
  unsure 2: a, t, c, g, or other
gngagaggaagcggaaagggcggcggcggcgcttgtggtcagtcaaagatccaaccttccggactcgcgatggggcggcggatcctcaacgatgctctgcgcacgatggtcaacgcagaccggcgggggaacgcgtcggcgcttctccgacccatctccggcgtcatggtctccttcctcaacatcatgaagtaccgagggtatatcaaaaaatttgaggtcatgatgagaatagagttgggaaaatagatggagctgatggactcttaaagatgcaaagctctcaccta

SEQ ID NO: 2599 - DNA, 177 bp, Zea mays
  misc_feature: Incyte ID No: 700346352H1
  unsure 2: a, t, c, g, or other
gngcatttgcacagccctgtttccctctgtcctagagtaggtagcatccggatgtgatgtttcagtttgtgcttacctcaactgtttaagatatagttaactttaatactgttgctgcctcagttgacaaatataaaatattgttggtacctctattgttctggtttgctgcgcggt

SEQ ID NO: 2600 - DNA, 282 bp, Zea mays
  misc_feature: Incyte ID No: 700346353H1
  unsure 82, 267, 273: a, t, c, g, or other
gttcctgaagatgtcaaatcgaacaaaagatatgcaggggcatcaaactggacagtaaaggaagttgttgaatcagtgaggnatgattttggcagcattgacatactagtgcattctctgctaatggcccagaggtaacgaagccttgttggaaacctcaagaagaggctatctgcggcaatttctgcatccagttactcctatgtttcatgctcagcacttcctcctataatgaatcccgtggtgctagcatctctctaacatacntgcatngaagggcga

SEQ ID NO: 2601 - DNA, 282 bp, Zea mays
  misc_feature: Incyte ID No: 700346355H1
  unsure 2, 263: a, t, c, g, or other
gngaccggatgggacaggatgtgctgagtttcctggagaatcgcaaagaaaacaaagcctggtataaaggtgcacgagtcgcaatctcagtattggatgatacttttgcatcccagctgcaacagctgctaggtaatacaatcccaccgaaggacctagagccacccagatctatcgtggaagttcgctctattctctgcaaagatgcaccccgccagaagaatctagtttctatatgatgatcggctaacgtactatagccngcgctgcgcagcacttttc

SEQ ID NO: 2602 - DNA, 289 bp, Zea mays
  misc_feature: Incyte ID No: 700346356H1
gtaagaagggccaaccctccaggtggccatctcttgtgcagcaaatatctatttcatttatcagagggtcaaaagtggatggcgagcattcttttatgggtttggttctttctttgcttcctggttccttggcaccttcttgatggtatctgtaattccccctatactccccggtccaagaaacttggaagtgagcaccgcttgtgttacttatgtgctccttttcatatcgtcgaccttcttgaagtaagagatcttgtgtttccagttagcgcaaagtcttgcagga

SEQ ID NO: 2603 - DNA, 291 bp, Zea mays
  misc_feature: Incyte ID No: 700346357H1
  unsure 102, 104, 240: a, t, c, g, or other
aagaacactcggggttaggagatctgacccaatggccgcgaccaaggtgtgcaacgttaggttcgagggcaacgtgattcaccaccaccgtgacggcctccngngcggccgtggagagctggctcgacgagatcctctccgtccaccgccgccgcctgcacaagctcgtcgtcgggctggacgtcgagtggcgccccagctttcagccgcgcctacagcaaaacagccatcgtccagctnctgcgttcgggcgccgtgcctcatcttccagttctccacgccgattagtcc

SEQ ID NO: 2604 - DNA, 286 bp, Zea mays
  misc_feature: Incyte ID No: 700346362H1
  unsure 73, 243, 255: a, t, c, g, or other
ttggccatgagcaactgctagaatggggtcttcgacgcgacctctgacttctggtgttgttgcttggctaggngcagtggtgggtgccgggctctagtgaccactgctagagaggagtatcagagccggaaacagcgccagggggtgaggtcgcgctcaggggcggagcagtgctcagcatgcccgggctcgtgctcgggctctggtgggcatcgacttcggcgagaggaggaagagcggcanggcacacacgtnacagcgaagagcacgcgaaaccgaggatagc

SEQ ID NO: 2605 - DNA, 246 bp, Zea mays
  misc_feature: Incyte ID No: 700346364H1
tcgccgtccgaagctccgcacccaatctaatcgacacctcaccgagatgggccgcaagttcttcgtcggtggcaactggaaatgcaatggaaccacagatcaggtcgagaagattgtcaaaaccctgaatgaaggacaggttcccccttcagatgttgtcgaggtcgttgtcagccctccttatgtcttccttcctgtggtcaagagccagctgcgccaagagttccatgttgctgctcagaatgc

SEQ ID NO: 2606 - DNA, 289 bp, Zea mays
  misc_feature: Incyte ID No: 700346365H1
  unsure 15, 287: a, t, c, g, or other
attcacctccccgcncccacccaccagaagaccacgccctccctagctagtccctaccttgaaatcgaatgttcctagcagcaaggagggtagtatgcgacgcagcgcctgcgccggggaggtgtgcacagcatgagcagcagcaaggcgaggacgacggtgacgagcagccccagaaggttgaacgccggctcctcatcttcctggctgcagcacagcttgcccatggttctcgataggatggaggaaggagtcaaggaggcgagaaggttcttgttggtgtggantt

SEQ ID NO: 2607 - DNA, 287 bp, Zea mays
  misc_feature: Incyte ID No: 700346371H1
  unsure 2, 119: a, t, c, g, or other
gnaagaaagatgcagtcgttgaaacggtgaatgcaagaccgtctaatgcacggcactcagtggggacttattccactgttgaaagtggcatccaagaaactggacttcagtccaccgancgtcgagcagtggagctcgccggactacgatgaatatccaatttcaaccggggctttcaagggctgtatagagtacccacggacgtcccagaagcacatttgaagggcaaagctcatggaggcacggatggagagccagaagatccagctccgccagtcctcagcaga

SEQ ID NO: 2608 - DNA, 283 bp, Zea mays
  misc_feature: Incyte ID No: 700346372H1
  unsure 273: a, t, c, g, or other
tcatgggggacaaggtcgggataccatttaaagttcttgttaaaagagcgaacaatgtgacagtgacattaactgtgataccggaggaggcagatgccagcagatagacctaaactatctgctgggaagctgatctaaagccaaaggggaggattttccatggaaactccaatttttctcaagatataatacaagatgccgtggacacctgtagacaaaattttatgttgagttctgtatgtggccaaaggatggttgacaggaccacccgtnaaaggggacg

SEQ ID NO: 2609 - DNA, 289 bp, Zea mays
  misc_feature: Incyte ID No: 700346373H1
  unsure 54, 99, 284, 287: a, t, c, g, or other
ggacctgacgctggaccgcacgtccggctccgggttccagtccaagagcgagtnccctgttcggcaagattcgacatgcagatcaagctggtgccaggncaactaccgctggcacggttcaccaccttcgagcctgtcgtcccagggcgacgcgcacgacgagatcgacttcgagttcctgggcaacgtgagcggggagccctacacgctgcacaccaacgtgttcacgcgacggacagggccagcgggagcagcagttccgcctctggtttcgaccctaccangcntc

SEQ ID NO: 2610 - DNA, 277 bp, Zea mays
  misc_feature: Incyte ID No: 700346374H1
  unsure 3, 270: a, t, c, g, or other
ggncagaactgggggctcatttgtcaagtgccgagctgtaaattgtttggtattctttcatgcttggtgtgcacatcagaggggtttgctgcaaagtgagcctgaaggcgagcacaatgaaaatattggctttatgggcgatgcgtgtctcacgccattgttttttctagtcacgttaatcctaagaaagaatacttagaaacaacaatggacatgtgcacgtacagagggttttaaaggccgaaaggagaaggctttctgatatagccntaaaaaa

SEQ ID NO: 2611 - DNA, 149 bp, Zea mays
  misc_feature: Incyte ID No: 700346375H1
  unsure 33, 136, 145: a, t, c, g, or other
gtaccttacgtgacatgctgtagcacgtacgcnagcagagcagcacctcaatgtccttgggtttgctttgctggctctctgttttcgtcttgtgttgcttttaatctggcacaggtttctaaattataataatgantacttttangtcc

SEQ ID NO: 2612 - DNA, 257 bp, Zea mays
  misc_feature: Incyte ID No: 700346376H1
  unsure 29, 55, 63, 79, 102, 104, 112, 123, 133, 135, 200-202, 204, 213-214,: a, t, c, g, or other
aagcagttggcattggcaatccgccagangcaagcgtccccctccgctacctctncaaccggnacgcgccaggtccgtngcgaaatcggtggacggcatgcngnggcgcgangcggcgaggcntctccgccgncngggcccgatcgctgtccagtcgccgaagcgaggcttttcaggcatgcctcataatccaatatgannncnacaaaaccnngntgtgattcntatngnnnnnnncatggatcccntgtacagca

SEQ ID NO: 2613 - DNA, 272 bp, Zea mays
  misc_feature: Incyte ID No: 700346377H1
  unsure 180: a, t, c, g, or other
gaacaacgtacctcgagcagttgtatcacgttgccagaaatatgtgttctctaagatcaaagatattgacactgtgtgccggctgaggaaaatctgtgtaaaggaaaatctgatgttgagctagcagctttggatttgatagctctgaattcagatggctcgctacgagatgcagaaacnatgttagatcaattgagctgttagggaaaaagataactcctcactgtcaatgattggttggtgttgtctcggaagagaattgctgatctcgg

SEQ ID NO: 2614 - DNA, 276 bp, Zea mays
  misc_feature: Incyte ID No: 700346378H1
  unsure 239, 252, 275: a, t, c, g, or other
ggcaatgtacaatatctgatgcaatgcaaatgtgctgttaacacagccgaagattggcttaaccctgttgccatacaagaggcgtttgaagcccgggctctcaggatggcagtaaactgtgcccagaacataggccaagcagcaaaccaagaagaaggtttctatgagcggtcccctgatttgctagaggctgcagtagcttcacatccagttggttcatgtaaccaagttcatgcgangtacagcaggacntccggaccggatgaagaacagcnc

SEQ ID NO: 2615 - DNA, 278 bp, Zea mays
  misc_feature: Incyte ID No: 700346379H1
  unsure 189: a, t, c, g, or other
tgagaaggaaggccttctgcagctaccaagtgacaaagccctcctctctgatccatccttccgcccacttgttgacaaatacgcagcggacgaggacgctttctttgctgactacgccgaggcccacctgaagctttcagaattgggatttgctgaggcgtaacgaaccagaagagtgtggtggctgtngccggccggccttgtgtttttgttgtctgctttctctgaacgaagatgtgatgaactcagctgaagatgtagtgtgtagttgtcaggtt

SEQ ID NO: 2616 - DNA, 284 bp, Zea mays
  misc_feature: Incyte ID No: 700346380H1
  unsure 33, 88-89, 167, 176, 186, 193, 204, 206, 209, 222, 250: a, t, c, g, or other
ctggaggggaacttcatctacgccagctccgtngatctcgtcgaggtacggcatgaaatggtcatggtggtctaggatgaagagccanntgttcctcgacgagatcaacgagctggaggggaacttcatctacgccagcaggaccctactgttcctgaaggacgatngcacgctgnagcccctggncatcganctgagcctgcncncancctgacggccagnagcgcggcgcgtcagcaaggtgtacacnccggctcacaccggcgtctaggccagtctggcag

SEQ ID NO: 2617 - DNA, 273 bp, Zea mays
  misc_feature: Incyte ID No: 700346381H1
  unsure 265: a, t, c, g, or other
atccttggtcgaggagggtttggcactgtttacaagggtgaacttcatgatggcacgaaaattgctgtaaagcggatggaggctggtgtgatgggtaacaaggggctaaatgagtttaaatcagagattgctgttttgaccaaggttcgtcaccggaacctgtttcgctgctgggctactgcctgatggcaatgagaggattctgtgtatgagtacatgccacagggacactgagccaacacctgtttgagtggtcagagaacanttgcgacc

SEQ ID NO: 2618 - DNA, 273 bp, Zea mays
  misc_feature: Incyte ID No: 700346382H1
  unsure 266: a, t, c, g, or other
aagaaagcgccggcatgaactgcaaaaaagggttcttaatgcagcagcacaaaggcaagctagagaagctgaagggagcattggttcatcggacacagagcctaacagtaaaaaagaccaattagtgttggacatatgtgtcatatgcctgagcaagagtacaatgctgtttttgtgccgtgcggtcacatgtgttgctgtatggcatgctctcacatttgacaaactgcccgcttgccggagaagattgaccagctgtcagaacntccgcca

SEQ ID NO: 2619 - DNA, 276 bp, Zea mays
  misc_feature: Incyte ID No: 700346383H1
  unsure 28-29, 31, 33, 35, 38, 44, 46-47, 65, 83, 91, 99, 160, 162, 241, 265,: a, t, c, g, or other
ttttctctttgatgagtatagcgaaaannancnantcnatacangnntacaatcaaatgtatcantttacccagaaacatccnctagtcantacaacgnagtctcacgctaccagctggtgcaccaggcgccatggcttcgaaacaaagaatgggctacncngcacaaccctcgggcgcagagatgtttctgggtaaactgatacatttgattgcacacatgtattgatttgtttctttcncttgatgagtatagcgaaaatgcngnnnncggttt

SEQ ID NO: 2620 - DNA, 275 bp, Zea mays
  misc_feature: Incyte ID No: 700346384H1
  unsure 82, 85, 88, 94-95: a, t, c, g, or other
gtaatgcccatgcaaactctatagtctgttcttgtatgagctcgatcacgcttgctaacacagaacttctttattttcagcnctntantccctnntacccaacaaacagatctactcaatgttaccaatccatcaagagcactcgggtttgagtaacactttcaaacatcaaaacccatccggccaccatatgtaacccaaaagttccaagcttcatcggaactgctaaatgtcataccatttgtggattcaaaaaggattgcagcaatatgcgg

SEQ ID NO: 2621 - DNA, 277 bp, Zea mays
  misc_feature: Incyte ID No: 700346385H1
  unsure 53: a, t, c, g, or other
gatctcttctctctctctcgtctcccacatctccagcccttcgccctcttctnggcccgaccttgacggtgttccaccatctcctaccctcttcttttcccgcccgcgccatccctttctccgctgtagccactgcaagccccgcgcgacgcacacggcagtggtccacgtcgaccaaatcgtccacagcatcgcgttctcctcggcgagggtctgtagcctgccggcgaggagctcgcagcgaagatccgtgcaagccaccctccagatcgtcaca

SEQ ID NO: 2622 - DNA, 271 bp, Zea mays
  misc_feature: Incyte ID No: 700346386H1
  unsure 127, 205, 215, 236: a, t, c, g, or other
gcagaaacctctggaaaaagatgctggagaaaagaccatagcctggttggacaagctgaggaatgcgaatgggtcattgccaacttccaagatccgtctcaacatgcagcgtgttatgcaaaataangctgctgtattccgtacacaagaaacactgaagaaggttgtgagctgattagcaaaacatgggaaagtttccatgatntgaagctcantgaccagagtcactttggaantcgaccgatagagaccctgagcggaaaatctttgc

SEQ ID NO: 2623 - DNA, 272 bp, Zea mays
  misc_feature: Incyte ID No: 700346387H1
  unsure 4-5, 7, 94: a, t, c, g, or other
ctannantcgccgccgtcgcaactcccacccgatccccaaattctccggcggtgatggccagcctgtggtgcgccgtgatggatagcgtcaggnctcctccccctcggcgctggacgcggccccaggtagcggcgtcgagttctggcacggcgcagagcgcgctgggtggctaaataagcagggcgagtacatcaagacgtggaggcggcggtggttcgtgctgaagcagggaggcttttctggttcaggaccctgcggtgacacggcctcg

SEQ ID NO: 2624 - DNA, 273 bp, Zea mays
  misc_feature: Incyte ID No: 700346388H1
  unsure 4, 13, 44, 56-57, 103-105: a, t, c, g, or other
cgangggattggnggggattgagagcctccaatccctccgtganccccttgtcacnnaatgaaccctcatagcctctaacatccaccacctcgtggtccatannngggctttttcggttattcctgtccatgtggattagatgagattgtgaaaaaatatgaaggattttaacttgtttgagatttaaacccacccaatcccattcaatccacatggattgagagaaaagcgaacaaaccctaaatagaagaaaaacaaattactattggata

SEQ ID NO: 2625 - DNA, 273 bp, Zea mays
  misc_feature: Incyte ID No: 700346389H1
caacgtcaagagtgagctcaagaggatatctgcgcccaatgccaggcaggctacccgggaggagctcctggagtctggaatggctgatactctcgcggtgtctactgatcagaggggaagattgatgatgacaactgaaagactgaatcagtccactgacagaattaaagagagccgaagaactatgttggagacagaagaacttggtgtctcgattctcaggaccttcaccaacagaggcagtcactactacatgctcatactactttgcac

SEQ ID NO: 2626 - DNA, 269 bp, Zea mays
  misc_feature: Incyte ID No: 700346392H1
  unsure 86: a, t, c, g, or other
ctcttcttccgtcgctctcgctctcggtctcggactacggttgagcgaagtcgtcactgtaatctactgatctgcaaatggcggangcggaggcgacggtggggcgactgatgctgtactcgtactggcgcactcgtgctcccaccgtgcccgcatcgctctcaatctcaaaggtgtggattacgagtacaaggcggtgaacctctcaagggcgagcatctgatccagaattcgtcaagcttaatcctatgaagttcgtcccgcgttgg

SEQ ID NO: 2627 - DNA, 277 bp, Zea mays
  misc_feature: Incyte ID No: 700346393H1
ggtgatgcccagcatgttgaggaggccgagaagatgggacttgactacatggatgttgaggctctcaagaaaatgaacaagaacaagaagcttgttaagaggcttgccaagaagtaccatgctttcttggcatcagaggccatcatcaagcagattccccgtctccttggtcctggtctcaacaaggcaggcaagttcccgacccggttactcaccaggaatccctcgagtccaaggtgaacgagactaaggcaaccgttcaagttccagcttcaag

SEQ ID NO: 2628 - DNA, 275 bp, Zea mays
  misc_feature: Incyte ID No: 700346395H1
  unsure 2, 89-90, 124, 191: a, t, c, g, or other
cnactccgatcacttgttcagagttgcatgtcccgtgaactcagggccagaagtccatgcagtggcaaaagcagaacgcgtgttggaannccaagcgcaagcccatcccgggaagctgcctgtncggatgtcgatgaacgcgtgttggaagtccaagcgcagaacgcgtgttggaagtccaagcgcaagtnccatgcagtggcaaaagcagaacgagtcaatggtgatcgatgagacgccgcgttgtgttgttctgcagtctgctcatcgtgctc

SEQ ID NO: 2629 - DNA, 279 bp, Zea mays
  misc_feature: Incyte ID No: 700346396H1
gggagcagagagaagcgcaggagaggggaccgctgaccaccgagggagccgggcaagatgttcgacagtctgctcaactccaagttctacaacaaatgcaagcacgcgatcaagtgcacccggacccggctggatctgctgcggcggaagaagcaagcgatggtcaagttcctcaagaaggacgtcgctgacctcctcaccagcggccttgaatcgcacgccttcgcacggatggaaggctgatcattgagatgaaccaagcatcgtgctatgatacat

SEQ ID NO: 2630 - DNA, 315 bp, Zea mays
  misc_feature: Incyte ID No: 700346403H1
  unsure 2, 69, 298, 301, 311: a, t, c, g, or other
gngagagagaggcttccacccactccgaagaagccagagcctcctgttgtgacacttgatgatctcttncaggaagacacagtcctctccaaggatctactatctgcctttatcagaagaggaggtggcagccaagctcgccacacagggcaaaggaaaaaaggagtaggaggtgttggcttccatttcggctatctcggagtttgttgtggaacatggcgtgccggtggtcacagcatcagacaggtgctactgctggcagaccattgaaataacggcggccgtgatgccccggcgnaanatatctaggngttc

SEQ ID NO: 2631 - DNA, 308 bp, Zea mays
  misc_feature: Incyte ID No: 700346405H1
  unsure 236, 292, 303: a, t, c, g, or other
gttattttgcttctatgtataagagttttggtaacttatgctatgtatttggagctttaagagccttttggggacataataatcaagatatgagaataaaggtaaatgagggagaatggagaactgttcataacgtcacagccctgtgcatagggaatgccaaatacttcggtggtggtatgaagataactccaacagctgatccgtttagtgggcaacctgaggttgttattctncaagattcaaatggtacgacttatctgaagctacacaggctctatggaggtacacntctatcgtganggtgt

SEQ ID NO: 2632 - DNA, 317 bp, Zea mays
  misc_feature: Incyte ID No: 700346406H1
  unsure 27, 114, 233: a, t, c, g, or other
ctcgtaccatttcgatccaatggcgcngacgtcgaagctgtcgacgggcatcaagcgcgcttcgcggtcgcacgcgtaccatcgccgtgggctgtgggccatcaaggccaagancggcggcgccttccccaaggccgacaaggccgccgccgccgtggaacccaagttctaccctgccgacgacgtcaagccccgcgttcccagcacccgcaagcctaagccttaccaagctncaggttcgagcatcacgcctggggacggtgctgatcctccttcgcaggcgctttcatggggaagagatggtgtttcttcaagca

SEQ ID NO: 2633 - DNA, 306 bp, Zea mays
  misc_feature: Incyte ID No: 700346407H1
  unsure 2, 174, 244, 248, 261, 279, 282, 305: a, t, c, g, or other
gnttttctctaatggtgtatctgttgagcaactaccggatcttgagctcaggtttgagcagttctctcctgaccacatctccaataccgctattgcttccacatcaacaacggttggttcatctgcttcagtgccctattggaggatcacaggacctgattcagaattggagtncatctggcgcacatgttaattgaatctaggaggatctgcaggacaaaggcataatgctcccttttttcantttncaggaagttaganttttttttggagaagcanggnttagtgaccactgggcacagaant

SEQ ID NO: 2634 - DNA, 300 bp, Zea mays
  misc_feature: Incyte ID No: 700346412H1
  unsure 2, 16, 67, 88, 99: a, t, c, g, or other
gnatgatatgtctgangatgaactggtagtgcttggtggaaaaattgatgattcagcggacaatgtncaatattgatgaatctgaggncaatggaagtnaaaaaggagtcaagagaaggcgcaagagggtgcagatgaaggctacagctgaaaggagatctgaattctaatactcttgttagaatataggggaaacatgaattatttagtgctatttgtaaactaattagaatgcctcacagaatttggaagaatggatggagacaagtagacaactacagacaagctaagctaaggagt

SEQ ID NO: 2635 - DNA, 304 bp, Zea mays
  misc_feature: Incyte ID No: 700346413H1
  unsure 4-5, 100, 181, 264, 271, 277, 300: a, t, c, g, or other
ggcnnatcaaacagttgatggaggcggctgatgttgatggaaatggtaccattgattacgcggagttcatatcagccacaatgcatttgaatagattggngaaggaagaccgtatactcaaagctttgaatattttgataaggaccatagcgggtacataacagtagatgagttggaagangctctgaagaagtatgatatgggagatgataaaacaataaaagagctccatgctgaagtagatcacgatcatggatggaaganttaattnaccagngtttgttgccagatgaggaacanaccc

SEQ ID NO: 2636 - DNA, 304 bp, Zea mays
  misc_feature: Incyte ID No: 700346414H1
  unsure 3, 126, 277: a, t, c, g, or other
ganaaccctaacccctagccagcgctccgccgccatccgccggcgagatggcgttgtacctgctgttcgagtcggcctccggctacggcctattccatgcgtacggtatcgatgagatcgggcagngcgttgaggccgtgcgctcctccgtgctggacctcgaccgcttcggcaaggccgtcaagctcactgccttcaatcctttctcctctgccgtcgacgcgctcaaccagtgcaagctatctctgaaggaatcatgaccgatgagttgaggagntctggagctgaacctgccgaagcctaa

SEQ ID NO: 2637 - DNA, 304 bp, Zea mays
  misc_feature: Incyte ID No: 700346416H1
  unsure 279, 299, 302: a, t, c, g, or other
agctcactcgctggtcgttgcctgctgcggattgcccccaggcgggccccactcattccgctgctgatatttcgtttggttctcctttccgtcttgtccgtcgccgaggccttccgctcgctccccagctccagcaggcagatcagatccatccaaccacgaacaggaaggaaggtaggaggaggggctgaagttgaaccatgagtgcctcgcggtttctcgtcgctgaacccgaacgcgcgctcttacatcccggcggcgctgctgcaggtggaggantttcgccgcatggtgggacntcntc

SEQ ID NO: 2638 - DNA, 210 bp, Zea mays
  misc_feature: Incyte ID No: 700346418H1
  unsure 108, 146: a, t, c, g, or other
tagctagcatgtacgccgttccccaacctctggcgtagtcttgttcatcttcgatctcctccatctcccttcatcctctctctcgctgtttgaggagaactgcctgcncctgctccctcttccgctcctccccgcgccccgctcgncatccccagacttcatttcaggccgggatggacgactacgcccgggagatgaggagctcaagac

SEQ ID NO: 2639 - DNA, 301 bp, Zea mays
  misc_feature: Incyte ID No: 700346423H1
  unsure 2: a, t, c, g, or other
gnatagttagggctgctctactggggttgccagacgggcggacaaggcagccgttggattgaaggctgctgccctgctggcactaggcaggtgctaacgagaaccacaaatattgctcgcagtcagtgctgacatttttcagtgttgcgggggcgatggagtgactgacgcacactgtgtttgtgttaggagttcatcagatactgatgcgcgacagataggaagagctaatttctggcgatgtccaaacgctgattgcagctggacttgtagcgtcgatgtggtccatgtgtggtgtgtg

SEQ ID NO: 2640 - DNA, 65 bp, Zea mays
  misc_feature: Incyte ID No: 700346424H1
  unsure 6, 38, 45, 47, 60: a, t, c, g, or other
cagatnctccttctagttagtatagtggacttaataanggaggcnanaactcttagaagnaacaa

SEQ ID NO: 2641 - DNA, 297 bp, Zea mays
  misc_feature: Incyte ID No: 700346425H1
  unsure 2, 74: a, t, c, g, or other
gngaagcactaagaaatcgacacctgttctgtgcaatgcactgtccccgatcgaacagaagcaacaagcagctncaagaagggaaaaggcagcaacaggcaaagagggtaaaaaaagtgtctgatgaatctagccatgcactggaaatatcccaagcaaatttcgaaccggagaatgaacctcataatgttgacgtgaacatggagcaaccgacattatgagtagcgccaaggggcaaaagggagctcaaaggagaaacagaccaaaaattgaatcaaagaaaatcctggagtgttg

SEQ ID NO: 2642 - DNA, 298 bp, Zea mays
  misc_feature: Incyte ID No: 700346426H1
agttccgtttccatacttccggcgcggcggagatcgaatcgagcgcccgccacggcgatggcgactagagtccctgccaccggctctgctctctttcatactcctgctgctgctctcgctctcagcccgcgacaccgtcgccgcgggcgaggatttcccacgcgacgggcgggtgatcgacctcgacgacagcaatttcgaggcggcgctgggcgccatcgactttctcttcgtcgacttctacgccccttggtgcggccatgcaagagacttgcgcccgagttagatgaagctgcac

SEQ ID NO: 2643 - DNA, 292 bp, Zea mays
  misc_feature: Incyte ID No: 700346427H1
  unsure 2, 10, 13, 77, 93, 267, 280: a, t, c, g, or other
gncgcttgtngcngcgctcctcgcgttcgctctcgcgcagtcctccaagttcttcaccacctggtacaaagaaggtncggtgggatgccaganaacttatagcttctggcgggatgccatcatcccactcagctacagtgacagcactttcagtggctgtgggaatccaagaaggcttcgtagtgcaacatttgcaactgcactagtcttgcagtgtggttatggcagatgctttggagttcggttacatgccggaaagcaggcagngtgctgaatcaantgtctatgagct

SEQ ID NO: 2644 - DNA, 295 bp, Zea mays
  misc_feature: Incyte ID No: 700346428H1
  unsure 6, 14, 44, 46, 105, 240: a, t, c, g, or other
tgagancgcgagtnagcactcccatcctcaatccctcccctccncngctccgccgtaacaccccgctgttcttcgccggagcactccctccccgttacccccgcngcccccggccccccgacctcgatatcttcggagcccgccgttgggggcctactgcatgctcaaatcgtagacactgggtcggggcgtggtagagatccgtccgggctcggatcgatttcttcgttcgctgcgaanataaaataagccatcacaatgcattaaagcaggcttcccatgagccgaagtcctg

SEQ ID NO: 2645 - DNA, 294 bp, Zea mays
  misc_feature: Incyte ID No: 700346429H1
gtctcagtcacctgcgccgccgcttcgttcgtgtggaggggagaagagaggaaatggcggcgaccgagggcgtgctcctggggatgggcaaccccctcctcgacatctccgccgtcgtcgatgacgccttcctgacaaagtatgacatcaagctgaacaatgctattctcgctgaggagaagcacttggcctatgtatgacgagttggctagcaagagcaatgttgaatatattgccggaggagccacccagaactctatcaggttgcccatggatgctcaaatcctggtgcac

SEQ ID NO: 2646 - DNA, 297 bp, Zea mays
  misc_feature: Incyte ID No: 700346430H1
  unsure 203: a, t, c, g, or other
taaacaaacgattcctcgtatctctcgtcttcctctccaagcattcccttcttccttcttccccactcagggcttattcggttattcccaatacacatagattggattggatgagattagaaaaaattaagaagaagtttgacttgtttgggattcaaacccatctaatccctctcaatccacctctaaccgaacagggcctncagaggggtccgatcctcgtccctgttccactctggatcctgcaacctcctacccctacgacactcgtcttcgtcgccagcgcgccaccatgaa

SEQ ID NO: 2647 - DNA, 299 bp, Zea mays
  misc_feature: Incyte ID No: 700346432H1
  unsure 18, 20, 41, 174-175, 218-219, 227, 258, 262, 273: a, t, c, g, or other
gaagagagcatgcaagancntgaactgcaggctctgagccngttcacatatgggatttctctgggcgaacaacatacatagttatgactgaactgaaccggtcgccccatgactcaaaatctgcagatcaggaggtatcttctctccatcaagtcttccatctcatctcatacnnttacagttttgactgggattgtatgttctggtagctactttgnnttttttgntgcataaaatgccatgatggtttttatagcntcanttagttctgcntaccacggactgcagatgtctatttg

SEQ ID NO: 2648 - DNA, 221 bp, Zea mays
  misc_feature: Incyte ID No: 700346434H1
  unsure 212: a, t, c, g, or other
gtagcttgataggaaatggaagcagagcattgtggtcagaccaccaccatctctaagggggaacaaagaggagtagaaagccgcaaaaagagggcaatgtgcaaaagtcgtttcatgcgagtgttgcaggaaggtccctcatgatttcaacccttattgcgttgttatgtattccatgtttacatttgctaagcatgctatctgaatctganttcgttgtt

SEQ ID NO: 2649 - DNA, 304 bp, Zea mays
  misc_feature: Incyte ID No: 700346435H1
  unsure 2, 291, 293, 300: a, t, c, g, or other
gntcgacctagctcgctgcctccagttcctacaccacgagaagggcctgcctcacggcaacctgaagccgactaacatattcctgactggtcctgatctcactccaaagctggtggattacggcctgcacaggttcatgactccaagtggcgccgccgagcagatactgaacctaggagcgctagggtaccgagccccggagctggcgaacgcggggaaggcggcacccacgttcaaggcggacgtgtacgcgttcggggtggtggtcatggagatgctgacgcggaggancncgggaanattc

SEQ ID NO: 2650 - DNA, 160 bp, Zea mays
  misc_feature: Incyte ID No: 700346436H1
  unsure 90, 116-117, 127, 133-134, 159: a, t, c, g, or other
tcttggttttatcattggaaagcttggccaggatctgtttattgtagatcagcatgctgctgatgagaagtacaactttgagtgcctttngcagtctacaattttaaacgtacagnntctacaaganccactnncactgacctatcaccagaggcagang

SEQ ID NO: 2651 - DNA, 296 bp, Zea mays
  misc_feature: Incyte ID No: 700346437H1
  unsure 74, 198, 266, 270, 280: a, t, c, g, or other
tgaggactctggtgctggtcctggaacgaaggattatgtgcatgtgcgcatccagcagcgcaacggcagaaagngtctgactacagtccagggtctgaagaaggagttcagctataacaagatcctcaaggatctgaagaaggaattctgctgcaatggtactgtagttcaggacccagagctaggccaggttcattncagctccaaggtgaccagcgcaagaatgttgctactttcctagttcaggctgggatgcgaagaaaganaacntcagattcanggttctaaggacctgt

SEQ ID NO: 2652 - DNA, 285 bp, Zea mays
  misc_feature: Incyte ID No: 700346439H1
  unsure 255, 277: a, t, c, g, or other
gtttcgacctgtttgcaagaggttcatgcaagatcctatggaaatttatgttgatgatgaggctaaactgacccttcatggtctagttcagcactatatcaaattaagtgaggcagagaagaaccgaaagttgaacgatctttagatgcactcgacttcaaccaagttgtgatatttgttaaaagtgttagtagagctgcagaactcaacaattgctctgcgagtgcatttcccctcaatcgtatacatctggangacacggaagagaggttgacangtacagaa

SEQ ID NO: 2653 - DNA, 289 bp, Zea mays
  misc_feature: Incyte ID No: 700346441H1
gtctacctctcctctcctgtgcgctacagcgagggggaaggggagcgtcgaccgattcgtcccggcctcccgtcccgccgctggcctcgcctgccccgatggcggcggtggcgatccaccagttcgccgagtgcatcacctgccacgcctggagcccggaccagtcgatgattgcctttgtccaaacaaccatgaagtacatatctataaatcttcacagacaagtgggagaaacttcatgttctgtcaaagcatgatcagatggtttcggggatagactggagtaatc

SEQ ID NO: 2654 - DNA, 292 bp, Zea mays
  misc_feature: Incyte ID No: 700346442H1
  unsure 9, 29, 40, 73: a, t, c, g, or other
gtgggaggncagcctccgcactttcagtncgtcgcgaggnattcctgcccgggcgggcgtagagcagatctcncatgctatcgtctgactctttggcgaccggaatccggctcggcccacgcatgcactgaatgtgcagggcgtagcattcgttggggacgaacgtttagggccggggatcggggaacacgaggctgtgggttggcgcaagcaagcaaattttgggtcctagcttgaaggactgccatcttttcttggttggtgagctacacatcaaaggggatggctggaa

SEQ ID NO: 2655 - DNA, 290 bp, Zea mays
  misc_feature: Incyte ID No: 700346443H1
cgccgccgcttcgttctctaaccttggctcccgctccctccgcaggagcatctcaacaccgccttgaggaccccccaactcgccggctgcagccatggtgaaatattcgacggagccaaccaaccccaccaagtcaaccaaggccatgggccgtgacctacgtgttcacttcaagaacacccgtgagacagcttttgcccttaggaagttgtcactcaccaaggccaaaaggtaccttgaggatgtgattgcccacaagcaggccatcccgttccgcagtattgtggcgg

SEQ ID NO: 2656 - DNA, 289 bp, Zea mays
  misc_feature: Incyte ID No: 700346446H1
atgttgttaatgacagcggcacaccggcgaaaccaggggaagagattgatgtctacatattttcattgttcaatgagaacaggaaacctggcatcgagtcggagaggaactggggactgttttttcctgataagagctctatctacagccttgattggacgggccgaggcaatgtggatgtgatgactggagcaaacattacaagtgctaatggtacctggtgtattgcttcaactaatgcatcagaaactgatctgcagaatgccctcaactgggcagtggtccaggc

SEQ ID NO: 2657 - DNA, 299 bp, Zea mays
  misc_feature: Incyte ID No: 700346448H1
  unsure 49-50: a, t, c, g, or other
gtggtgtcgtacagcgtggtggacggcgagctggcggacttctacaagnncttcaagatcacgctgaaggtgactccggccaaggcggagggcgagggcggcgccgtcgtcagctgggccatggagttcgacaaggccaacgaccaggtgcctgacccggacgtcatcaaggagaccgccaccaagacgttccacgaccttcgacgactgacctccttcaagaactagatggagcgagaactggagatggttccatacagtacattccatccatcatcgtagcgtcacagtttactagt

SEQ ID NO: 2658 - DNA, 298 bp, Zea mays
  misc_feature: Incyte ID No: 700346449H1
  unsure 235, 296: a, t, c, g, or other
gtcactttggaaatcctttccttagctggtcatcttctctttgctatggtgatattcatccggatgcactacttaacaaggagaagcacataaaaaaggatgagaaggcatattcatgttaacttgcttaattaccattccaacatggttgaaacctgaagagttggaggaagagatggctaagttgcggtgatacagagaattgttcaggataaccctagtatcagatgcaggngttatgcagctgaaagctactaacgtggaatgcccagaaggttgcacaagaacgtgtttcnaa

SEQ ID NO: 2659 - DNA, 297 bp, Zea mays
  misc_feature: Incyte ID No: 700346450H1
  unsure 2, 22, 26, 34, 46, 61, 131, 148, 168, 182, 190, 216, 220, 226, 234,: a, t, c, g, or other
cngcgatgtcacggctactccngccngtgctctntcctttaccggngttctcgctgccgcngccgcttacttcctcgcataccacataccgcacgtaggcggtgagaggcggtgcggcggagaacgcgatngcttccgggacgaggcnagggagcggcgctggtcaangtgcgggaggaacncgccgccncgagttacgaccgggagcacacctancccngatggncccaggtntnnanaagcngcagggatgatgaagagntcgnnccntcatggtgatagnacggcaacccgaat

SEQ ID NO: 2660 - DNA, 290 bp, Zea mays
  misc_feature: Incyte ID No: 700346451H1
  unsure 18, 33, 242: a, t, c, g, or other
ctacaccaacacctctgncatccacgtcctgcngcgccacctcatctccgggcgctttccaccttggcccccgtcaagtcagaggctcctcccaccccctcgtcttctaccgccatcaccgccgcagccggagcggaggatccatcctacatcatcaccgtccctagttattcagcgtggttctcgttcgactccatccacgacacggagcgccgctcctgccggagttcttcgtgggggangcgccgcggcgtcaggtgcggggccgcagcgtacagtatacgcgatct

SEQ ID NO: 2661 - DNA, 292 bp, Zea mays
  misc_feature: Incyte ID No: 700346453H1
gtcgaggctaagcgcgttactcaggacgaacgacactgatggggcagaagcgacactgaaagagtgggaaacggtgcctcttcgctatcatgatttcagattaatcaacgtaatggtcgatgcctactgcagagaaggtctcgtggagaaggcagtagctctcgtggatggcgccatcaagaaagggaggacaccttacgctaataccggtataagttggcggtgggtttttcaaaactggtcaggtaccagaagcatggacatgacaaggaaggctctgattccgcgactc

SEQ ID NO: 2662 - DNA, 286 bp, Zea mays
  misc_feature: Incyte ID No: 700346456H1
  unsure 124, 285: a, t, c, g, or other
ggcagatagcgcgatcacgcgcgtacacccgaaagggaatcgggttaagatttcccgagccgggacgtggcggcagacggagacgtttcattagccacttagccgttcccacgacacaatcagnaccaccggtgtcctcgctgccaaggcgcccgcccgctcgtgtgacgagtggcgttcgtccaccgcccattccgcgctcagctctgagggcctcccgcccgccgcggcatcatctccggctctctcgtcgccagggtgtcacgaaatgatctgattgttgant

SEQ ID NO: 2663 - DNA, 220 bp, Zea mays
  misc_feature: Incyte ID No: 700346457H1
  unsure 44-45: a, t, c, g, or other
tagaactagtcgtccatcgccgagctgatgaacatgtacgacannaacttcatgacgagcaagaccatgagcagtagtgacagcgtcaccatcatggagaggccgaacgcgatgccccagaggatccagatggacgagggcttcttcggacagggcaacggagtcttcgacgacgtcaatagcatgatgcagcaacaacagcagcaggcaccaccctggt

SEQ ID NO: 2664 - DNA, 283 bp, Zea mays
  misc_feature: Incyte ID No: 700346458H1
ggggcaggtgaaaggaagaggaaagacatttgcagaagctttggtttttgtccaggactcaagcttatcagtttgcttccatagtacagggcatggtgatccatcgattctttctattgaagttctacaaatagatgacgatgcctataactttggtccaccacgggaaaaggggacagtgttagagcagtcaaaaggctgaaatgtggctcaggaaagccgcttttgatgaagatctaaatgggatcacggggtggggacagattcggttaggatgcaaact

SEQ ID NO: 2665 - DNA, 280 bp, Zea mays
  misc_feature: Incyte ID No: 700346460H1
ttctttgtcgaagagcagccaaagaattatggggatatgtacaagaattttacaagtactcattgagactgtgaactcaaatgtgttgtgcaaattggatggagacggttccggtgctgaggctgctaagagcactgccgccgctgctgctaagaactctgatgggagaagttcaccaatacagagctcggagatccaggtccctagaactgctgaccctccggcctaatttatcctccaatagcaccgattggttctgatgatctctacccgggccggg

SEQ ID NO: 2666 - DNA, 286 bp, Zea mays
  misc_feature: Incyte ID No: 700346462H1
  unsure 2, 83: a, t, c, g, or other
gncataaaccataacattcttctccaccttgtttctttccaagccaccatggcctccaagctgagtttcaagagggcagacancatcgcggaaagcatgcccgatgcgctgagggggggccggtaccagatgaagaaatgcttccataggtatgtttccaagggaaggaggctcttgaagaaccagcagctccatagaggagctggacaaatcactggatgacaaagtcgagagggaaaagctgttgaaggcttcctgggttacttattgttccacgcagaagcat

SEQ ID NO: 2667 - DNA, 286 bp, Zea mays
  misc_feature: Incyte ID No: 700346464H1
  unsure 14, 28, 45-46, 67, 103, 106, 118, 121, 123, 125, 145, 158, 240, 249,: a, t, c, g, or other
tgttttcgcaccancgccggcacaggcngcgcagcaccgcaccgnnctgagccacttagcgagcganggaacagcctccacggcgaggagagaatggggaganganggatcggaggcnccngngnccatggccatggccttgganaccgccgatcctncccgtgcattcgtgaaggacgtcaagcgaatcattatcaaggtgggcacggctgttgtcatggcatgaatggccgattggcnatggggagnctcggttctctctgtgaacaggtgaacantgnatttt

SEQ ID NO: 2668 - DNA, 290 bp, Zea mays
  misc_feature: Incyte ID No: 700346466H1
  unsure 135: a, t, c, g, or other
tccccgttctggttttcgtctaatctagattggatgggatgatgattcgaggcgttagttattttagctgtaatcccagactaaaccctggctcgttggttcggcggcctcccggtgagaatcgcatctccaatncaggatggagacgaagaaagtggagtctgtccctggtcataatcacgcggggagtggatgataagatcataaaaatcagacaatcatcggttcacaactcatactgttgtgtcttttaaccctgagccacgaggccaggatgattgattggttta

SEQ ID NO: 2669 - DNA, 288 bp, Zea mays
  misc_feature: Incyte ID No: 700346467H1
  unsure 81-82, 213, 281: a, t, c, g, or other
gtcctcgactgcaagtctggatgtacgatcttgagagctacaagtgtttgggtgatgatgaataagaacactagaaggctnncaaaaatgccggacgaagttagggctgagataggcccgtatttcaacgcccgcgcagccataacagatgagcagagcgagaaactggctaagccagggagcactgctggtggcgatgctatgaagcattcngagaaaggggctcatcctaggtggtggggcgacttgatgtcaaccagcacgtgaataactcaagtacntcgttgg

SEQ ID NO: 2670 - DNA, 284 bp, Zea mays
  misc_feature: Incyte ID No: 700346468H1
  unsure 54, 72, 96, 100, 111, 124, 137, 145, 148, 150, 159: a, t, c, g, or other
attcaatggccttccaacttcgtatctgcgtcttgctgcacatcgcctggcgcngcattacttcctgcagtnccattgccataccagacaacagtntgcntgaaggaactngttcacgtatcancccttcgtaagancaacattngantnctgactgcntgctgtccgccttgcagatattccagttaatctgccacaagaagacatctctgtggcgaaagtagctattaagcagagaccttcaaaagaattccaggctgaacagctcaagtgctcatcttcta

SEQ ID NO: 2671 - DNA, 286 bp, Zea mays
  misc_feature: Incyte ID No: 700346472H1
  unsure 2, 12, 29, 32, 36, 99, 109, 119: a, t, c, g, or other
gntgtgtctganagcagtaaaacacctangangccngcatttctattattgcacaagcaatcaaacatactgtgtaaaaatagaaatgctgtgtctganagcagtaaancacctaaganaccagcctggctcaaccacattccgatcactgcctttgttagtgttaggatgtcagcacttctgcgcattggtgatactcatgtgctgtgtttaggttatgttcttgtgttctttttctgaatgatgaggataattaagtgattaataagggcagaccagtgctgga

SEQ ID NO: 2672 - DNA, 290 bp, Zea mays
  misc_feature: Incyte ID No: 700346473H1
  unsure 10, 79, 81, 87, 111, 186, 197, 226, 261: a, t, c, g, or other
gtgccgaaanctcgtcgcgtcgcgcggaagagaggagagggacgggggccgcgggggcgagaagagaacaccactacgnantgtgtncggcatccaccaccgcttccaccnctaaaccctcgagtgctcttccgcgcggcggggcgccgagcgtgaaagccacctgctctcgtccagtacgcactncgcgccgcgangggaaaccctaggagcggcagatctagantgggcgctctcgatccggccgcgtagacgcccgtnttggccggggaaatggcggaggatcctgc

SEQ ID NO: 2673 - DNA, 275 bp, Zea mays
  misc_feature: Incyte ID No: 700346474H1
  unsure 2: a, t, c, g, or other
gngatcctgtccccctgcatgagcgagctgtgctacgagcagcacctggagctctgagccgaggaagcctgactacgatgcagtgcatgatggatgagactgtgtaggaagcaaaagttttgtagatatgacgatgatgaaccgcgtacgtagtgtaggtgtttgtgagcagctcaaaagtaggaaagtgcagaaccaacaacctgatcggcagttacatacatagatctctaatccttttggccttttgtctcattttcttggaggccgtatcg

SEQ ID NO: 2674 - DNA, 280 bp, Zea mays
  misc_feature: Incyte ID No: 700346475H1
tgtcctctgtgctatccgctagggtttatctgctcgaggaatggcgtcggtgcaggtctccggcgcgggggtcggtgccgcggccttctctgtgaaggggaaggcctccaccggtgcgctccggcttcgctctacgttgaccttcggcgaggtctgcccggcgcggcgggcgttccgcggcctcgtcgtcagggccgctaccgtcgtcgcccccaagtatacaacacttaagcccttggctgatagagtgcttgtaaagataactcttccgaggagaaga

SEQ ID NO: 2675 - DNA, 281 bp, Zea mays
  misc_feature: Incyte ID No: 700346476H1
  unsure 2: a, t, c, g, or other
gnaaagtcaaggtttcaatctatgctgtccacaaaataagataaaattagatatataattggtcatagttccctcacgaccaactgaagtgccttatctatacccctatataactcaccacttcaaaaattgcaaaagccaaccaatcaaatgtccaccatagtctacacctcttctaaatgcacccagatcaatcccaccgttaaaaccaatgaacaagatcaactcaaacctttcatttctctactcatcaaatccaacgatcatctttagatcatccc

SEQ ID NO: 2676 - DNA, 281 bp, Zea mays
  misc_feature: Incyte ID No: 700346477H1
  unsure 21, 63, 258-259, 261-262: a, t, c, g, or other
gcaatgttcctcacactaggnttgctgagtacaaggggcatcaaaattgggttaaggtctcangtgactatctcttgttccctgggggtgggactcagttcaagaatggtgccctccactatattgatactattcagcaggtatattataatccatcccagcatctcatattagtcactcctagacttgtacttgtcctgcctcacacttttgagcatcagtgattgatttattgttacactattccacaaacatatnncnncgatagcaccatatagaaa

SEQ ID NO: 2677 - DNA, 278 bp, Zea mays
  misc_feature: Incyte ID No: 700346478H1
  unsure 57, 83, 92, 269: a, t, c, g, or other
gtcgatttctaattctcctcgcgagcccaaaccctaaacctaaacctttcacccgcngccgccgccaccaccagcactgccanttccgccancaccgtcccgaagcccccttcccagcgccatcgacttcatctcggattgaagcaatgtcgtcggacgatgaggtcagggaggagaaggagtcgacctctctccaacgagttgtcaccaatacaaggctgccgcgaaatcctcaacaagctctgaagttgttgtgtctcagtgcagcnaaaagtcaa

SEQ ID NO: 2678 - DNA, 280 bp, Zea mays
  misc_feature: Incyte ID No: 700346481H1
ttgcttaaaaggtaaaggcagggccagtgatgcagcaagaatcgtggttctgacctggagatcgttgctaattatgtcaagagattggaagtacttctggatcaggcttgtcttgtatatgcttattgctgtgtcaattggcacgatatttaccgatattggccatcactatcatctgtaatggtgaggattctgcgatatttgcattgtacgtttgtcatcctctaagtgctctggagtacccgctcagatcgatgaggtcagatttattcccacgaag

SEQ ID NO: 2679 - DNA, 274 bp, Zea mays
  misc_feature: Incyte ID No: 700346483H1
  unsure 44, 75, 142, 240, 265: a, t, c, g, or other
tcctcaacaggtcgggaaggtttccctgctccgctccggcgaangccacctccccttctctctcgtgaagctgangcctcctcgtctccctcccgaatccgtcgccgcccattgcctcgcactcccttggactagatccgtngccacccagtgatttcgctgagcaagggcactccatcgcacttgcgcgctcgatgaagcaccagagcttctcatacaagtcgcgtctcttcttcagcnagcatggatcttctctcttcttcgnaaaggcaca

SEQ ID NO: 2680 - DNA, 283 bp, Zea mays
  misc_feature: Incyte ID No: 700346484H1
  unsure 107: a, t, c, g, or other
gtgcggctccaaaaaccagatctcctcagcaaaatctgtacaagatccgcccttgatttggataacacgagcgaacgtgtggtgggccgtcgagtgaaacaagattncgccatgcggcggaacaggaaggattccggctatccgacggcggctccaggggaggaggatgaggcggaggaactgactgaggagggcgacgaggaagaggaggaacagacggaggagggatgtggtgaggaggatgaagttgaacggagacgccggcgcaggaagctgtggagcc

SEQ ID NO: 2681 - DNA, 280 bp, Zea mays
  misc_feature: Incyte ID No: 700346485H1
  unsure 2, 239, 265: a, t, c, g, or other
gnaacaccaaacaagtcgagccgcccaccaagccggcagtccactttcaaccccgccatcgaagaccccgtcagcctcaggaaaggccaggccggcaagtccaaggaacagttggctgtacaaggaggatgacctgaggagcatcacgagcatccgctccgagcgcccaaggaggcagagcacgggtggaggctcggtccgggacgataccagctgaccagcacaccacctcttccccngctacatgcatcgaccgagtctgcanggccaatctcggtac

SEQ ID NO: 2682 - DNA, 180 bp, Zea mays
  misc_feature: Incyte ID No: 700346486H1
  unsure 21, 24, 33-34, 71, 108-109, 126, 128: a, t, c, g, or other
gaaggttacatcacgacatgnganttagttgtnnagaaacatgttgtgatgtaaccttcatcatgtatatnctttatagaagcaggcacagctgagtattaataagcnntggatgaaggttacatncncaacatgtttcttcacaactaagtctcatgtcgtgagatattcattgctctc

SEQ ID NO: 2683 - DNA, 273 bp, Zea mays
  misc_feature: Incyte ID No: 700346487H1
ttttttagggggaagcattgtttcagacacacgagaatctggaacacctagcaatgatggagagggttttgggacctctaccagaggatatgatacggaaagcaagctcttcagctcagaaatattttaggagagcaacacgattaaattggcctgaaggtgctgtttcaagagaaagcatcagagctgtgaggaaactggatcgactaaaggactggtatcgaggaacgctgaccatcaaaggtggcactggtggactgctatacggtctcc

SEQ ID NO: 2684 - DNA, 276 bp, Zea mays
  misc_feature: Incyte ID No: 700346488H1
  unsure 15: a, t, c, g, or other
tatgatgtgacaggnacttgatcatgtcgttgaagagcttaaaaaatttgcagttgttcatctgctgcaacgtagatcgatcatctcactgatagggaatgtacagcgatcgtcattgattcttgaaaaggcattcaacgttctgcgaagaaatggtgttaatgtccagatgatctcacaaggggcgtccaaggtgaacatatccttggtagtcaatgacagtgaggcaaaacagtgcgtacaagccctccattcagcgttctttgagaatggatc

SEQ ID NO: 2685 - DNA, 273 bp, Zea mays
  misc_feature: Incyte ID No: 700346491H1
gagaccaacaaactcttgaaaagctacgaactgaaaggcaagccaagattgacgaattgaaggagagaacaaattactacactactcagcaacttatacagagatatgatcttgacccagctgcaaaggcggcagcggcaacagttttggcatcaaagttgggtgcggattctggactgagagtctttttgggagatgaaacaagcagggatgcagcaataggtagaagtaatgataacaatctggaccaactactggacttaggcaaagaaa

SEQ ID NO: 2686 - DNA, 275 bp, Zea mays
  misc_feature: Incyte ID No: 700346492H1
  unsure 125: a, t, c, g, or other
gggacaaccaaaaggtgtgtgtgtttcaccaggtggacggttccctgccttttcatctgaaggcaagcctcctggaagagcacccaaggggcgcagagatctagcactgtgtaggatattccgtncagaaaacatgttgcgatgtgatgcagacatttcctgctctggtctcagtgagaaaccttgcattggctggtgaaggcagtcaagaatgtattcatttgtgggaattgcttgagtgctcaatatgcgatccacgagtgggtatcaggccg

SEQ ID NO: 2687 - DNA, 269 bp, Zea mays
  misc_feature: Incyte ID No: 700346493H1
  unsure 2: a, t, c, g, or other
gnctcctctccagttccacagaaggctccgtgcctagatcccgtggagaatgtgttggggatcaaggagtggttgattggatccatcccctcacgtgcttccctcatcaagtttcaaatccccatctgcgcgaggaactcctctctcaaggtatctttcctcgatctacctttctagcgagtttgggttgaatccctttggagtaaataaacgaaaggttcatactgcctattctctaatggatcatatttggtttgaattgatatttg

SEQ ID NO: 2688 - DNA, 274 bp, Zea mays
  misc_feature: Incyte ID No: 700346494H1
gttgcgtctctcgcgcgttaccaagctctcaagttttctcgcgccgacggcaatggatgaggtcaccgaggccgtgaacaaccttcaacatctcgggcgtaggggccgcgggcgttgccggggcggaagggcacaagaagaatcgcatccaggtctccaacactaagaagcccctcttcttctatgtcaacctcgccaagaggtacatgcagctgcacaacgagtagagctgtcggccctcggcatggccattgcgacggtggtgacatagcaa

SEQ ID NO: 2689 - DNA, 271 bp, Zea mays
  misc_feature: Incyte ID No: 700346496H1
  unsure 105, 236, 247, 263, 269: a, t, c, g, or other
gtgcagtggcgttattgactctaccggttcttgctagctacccattctttccttcgttgtccgggttcgggctcatggtggtagtaaattgtgcatcttttctgnagaatacattctcggtaactaccattaccgtgttcaacattttgatgaatgaagctgtgactcaggatgtaagagccgcagccaatgggatagctgtaacactaatgtccatctctaaagcggtgctccanctgttgcaggnatcatatttcgtgggnccaaangg

SEQ ID NO: 2690 - DNA, 296 bp, Zea mays
  misc_feature: Incyte ID No: 700346501H1
  unsure 182, 190, 262, 266: a, t, c, g, or other
ggagctcgccggcaacgctgccaaggacaacaagaagacgcgcatcgtcccgcgccacgtgctgctggcgatccgcaacgacgaggagctcgggaagctgctgaccggcgtgaccatcgcccacggcggcgtgttgcccaacattcaacccggtcctgctgcccaagaagacggcggagaangcgtccanggcgggagcaaggaggccaagttcgcccaagaaggccgccagtcccccaagaaggcataggttggaagcggnccgngtgtcagtgtagttgttaacgggcatgtga

SEQ ID NO: 2691 - DNA, 294 bp, Zea mays
  misc_feature: Incyte ID No: 700346502H1
  unsure 3, 23-24, 26, 29, 55, 58, 65-66, 82, 96-97, 100, 103, 108, 173, 181,: a, t, c, g, or other
gtnagaaacgagagggcaggagnngngtncgtcccgggcgatcccgccgccggtngcnctcacanntcctcgtcactgcctncgtttctctttccnntantcntgttntgccgtggcggtagcgcgggtggtggtcaaagttctctgggttacctctttggaagcggtgagcnccccaaancagcagtggcaccaccagctgtaagtgctccanntgntnnnnnnngtgntnnantgntgagaaaccactgctgcaaagctgatggcaccatnanttgtgctggggtaccacca

SEQ ID NO: 2692 - DNA, 287 bp, Zea mays
  misc_feature: Incyte ID No: 700346505H1
cagatcctctctggacgaacagaaaggttaccagcagcaccacggcgagatctccccttggcgggccaaaaccgacggcgagcttcaccggcgttggtcggctccaatctcttcgccgttttattttcctcccaggttaaggttgcaggcttttagcttgggattctgaaagatggggacctcttctggcgcgaatttccatcagcaacctcctccgacccagggatgttgctcccaaggcaggtccagcccctcaggttgcagactcgctctcgctggcctcttcg

SEQ ID NO: 2693 - DNA, 292 bp, Zea mays
  misc_feature: Incyte ID No: 700346506H1
  unsure 3, 33, 37, 50, 79, 183, 193, 213, 220, 273, 276, 281: a, t, c, g, or other
ggnaaaggaaaaccaaccaccactcccaccacnctcngcctccgcctgcnccacagctgccgattcgaaagccctcgtncctgacccctcgcaaaaccctagctccaaccaccatgaagggtaaggccaacgcctccaagaaggatgagggcaggctccgggccggcggcggcggcgcggaanagcgcaaganggccgccgcgagcggaagcncaagcgncctccctccgccttcttcgtcttcatgtctgaattcaggcaggagtaccaggngtngaccntggcaacagag

SEQ ID NO: 2694 - DNA, 288 bp, Zea mays
  misc_feature: Incyte ID No: 700346509H1
gaaaaggagccagctgtatcaagtaaatctggaaaaggtattgggaaacaggatcaacatatgcatacttcacgaaggaaaaaaaaatgcacacctgcaaaagcgctattccaatcctgttgcgccacctggaagacgcaaacaactctgttggacagaaaaagaagtagctattttgagggatgggatggcaaaattctctccacataataatggtaaaataccatggacccagatactgcaatatggccgtcgtgtgtttcacaagacgcgcctgccatgtgattt

SEQ ID NO: 2695 - DNA, 286 bp, Zea mays
  misc_feature: Incyte ID No: 700346510H1
  unsure 18, 228: a, t, c, g, or other
ctttccttcccctccggntccgcctcctcgaccactccgacaaccccaagcgcctccggcgaggctccacctctccaccggctgcggcgagaagcggcgggggctaactaagtctgtaggcggcggcggaggtgatccgggagccggagccgagtctagggcgatggggcagcagtcgctgatctacgcgttcgtggcgcgtggcaccgtggtgtggctgagtacacngagttcaccggcaacttcaccaccatcgccgcccagtgcctgcagaagctccccgcca

SEQ ID NO: 2696 - DNA, 282 bp, Zea mays
  misc_feature: Incyte ID No: 700346511H1
  unsure 232: a, t, c, g, or other
caaacaccgcaagctaagaagatcccttgctgaattcagagagcacaaacacaaaagcgagtgcaaaaccaaatggctgcctcgacctacttcattcttgttgcctttgcgttggtcacatctcaggccattgcctctgaccctagcccgctaccaagacttctgtgttgccgacaaatactctccggtgaaggtaaatggattgtttgcaaggaccccaggctgtgaagcngatgacttcttcaaggcagcaaaactgaccaaccagggacaccaggaaca

SEQ ID NO: 2697 - DNA, 281 bp, Zea mays
  misc_feature: Incyte ID No: 700346512H1
  unsure 2: a, t, c, g, or other
gncagacattcaactgatagagaagtttctatcatgatactcatggcatacctttcatacatgatatcaatgctgttggacctgagtggaattcttactgtcttcttctgtggaatagtaatgtcacattacacttggcataatgtgacagaaagttctagggttaccaccaagcatacttttgcaactttatcatcatgcagaaatttcctctcctctatgttgggatggatgcatggacatgagaagtggaaattagctagtagcagtcctaagaaacc

SEQ ID NO: 2698 - DNA, 292 bp, Zea mays
  misc_feature: Incyte ID No: 700346513H1
  unsure 2, 146, 215: a, t, c, g, or other
gnagctctctgctatggtatgttcacaaatacgaccatgtacattctcaagcatggtcggacctgctgagaaggtggagttctacggccatccaatcgtctacatcgctccctctgtctacgggcatccacatgctctgactatgnattaccaaagctatacgaactccatcaagcttgtcctcgcagtggatgatgctcagtttccagactctncatcagcttttggacgacttcgccgagtccctcagctcatccgttcaggcagctttcaacaagatgacagacacaaa

SEQ ID NO: 2699 - DNA, 288 bp, Zea mays
  misc_feature: Incyte ID No: 700346514H1
cgtggtcgagatggtgacgggggcgctccggaggtcggtcatgctgtgcagcagcagcgccggcgccggcgtgcgcgagccggagcaggaggaggacggggcgactcccccgggtggtatgcagatagggggaccaacggatgtgcggcacgtctcgcacgtcaccttcgaccgcttcgttggcttcctcggcctccccgctgacctcgagcccgacgtgcctcgccccgtgccgagcgccagtgtgagcgtatttggagtttcaccaattccatgcatgctcgtatg

SEQ ID NO: 2700 - DNA, 286 bp, Zea mays
  misc_feature: Incyte ID No: 700346515H1
  unsure 71, 73, 147, 214, 269: a, t, c, g, or other
gtatcgcagtgcgctccctcctggccgcctctcgagcgagtggcgacgacggcgccttcgctgcgcctcantnttcttaggcggcgcccctacccctcgaagccttccgccccacctagctcccgtgctcgccagcgtccactgacnagcaggctcccagcccccagctcccaagcagccgcagtgcccctgcaggccgcggctagcccttgcntgtttgcatcttgctgctgcacatgagccagacagcagtttgtttcttccatcantcgttgtatgtggagat

SEQ ID NO: 2701 - DNA, 285 bp, Zea mays
  misc_feature: Incyte ID No: 700346518H1
  unsure 4, 162: a, t, c, g, or other
gganaatctggcatcacactttctacaatgagctccgtgttgccccggaggagcaccctgtgttgcttactgaggctcctttgaacccaaaggccaacagggagaagatgacccagattatgttcgagactttcaatgttcctgccatgtacgttgcaattncaagcagtcctgtcactctatgctagtggccgtactactggtattgttctcgatctggtgatggtgtgagccatactgtgcccattatgaaggatatgccctcctcagctatctagtcggatc

SEQ ID NO: 2702 - DNA, 289 bp, Zea mays
  misc_feature: Incyte ID No: 700346519H1
  unsure 2, 16, 20, 132, 238, 251, 268: a, t, c, g, or other
gncgatgtcgcctgcnttcncttccttccccagttgagttccccccgcggccccgcccccggtccccttccaccgacccaccatgtcggcgatgaggtgaggttgaggccaggtctactctccgggagcgtngccgacgccatcgccaacgagcagtttgctccatcttcgccatctcgcacacgaatacaatacactagttttggtagagatggaggacgcgggcaaggcgccggcnggcctgggcaccntgcgcgcggtgctcgcnatcctccatggtggggttcaa

SEQ ID NO: 2703 - DNA, 286 bp, Zea mays
  misc_feature: Incyte ID No: 700346520H1
  unsure 2: a, t, c, g, or other
gngccttcaagatgccttgcaaaaggactcgactgcacggcaagtaggtgtgacaccgacagggaacaaccccaatcttttcaaggacttgctaggctaaaggggacagtaaggcacaccgtatgctccgcgtggcctctttgggtagatggagttcatctccgacatgtctcgatcactgaaacagcgatgatctcgctgtttgattcagcgtaggaaaagggttgcaattgcaagggctatatttgttctcgagtcacaagacacgacctgtcttcctccattg

SEQ ID NO: 2704 - DNA, 105 bp, Zea mays
  misc_feature: Incyte ID No: 700346521H1
  unsure 11, 17, 20, 33-34, 48, 50, 93-94: a, t, c, g, or other
ggaagtagagngacagnagngagagagactgcnnacgaggccgaactncncggccacaatcctaagtcatacaggcggcggcggggtcctgcnncagcagagcgg

SEQ ID NO: 2705 - DNA, 273 bp, Zea mays
  misc_feature: Incyte ID No: 700346523H1
  unsure 2, 39, 83, 106, 239, 267, 272: a, t, c, g, or other
gngaagcaagatttccaattcctgatataatcctaagancagttactggaagtatgtttcctgttattgatccagggcaagtnatctccattcaggaacatgagtntgtttattgccggcaatcgtcaagagcatgaagctcaacattattggacaaaatttcatgactggtctcgtgttgtgttcgatcggaaaggaaaattctggatggaagaaattaattgtttctcacctcaacntcgagaactactctccgcagaagcaggnacccng

SEQ ID NO: 2706 - DNA, 267 bp, Zea mays
  misc_feature: Incyte ID No: 700346524H1
  unsure 204: a, t, c, g, or other
agtaccatccggctcccaggggcaaactgcaaagccaaggccattccccgtgcctgatgggataccgaaaacacaggaagagctcaccgaagaagaggaagcgttgatgccagagtctccatacacaaggttgctgagaaggatgggtagataccctgaatggtacaccccacgccctgatcatgagactgactgaatcaagtnctctaccatccaggtgtccctttggaagttttgcagcatgataatctgaagctgaagctcttt

SEQ ID NO: 2707 - DNA, 174 bp, Zea mays
  misc_feature: Incyte ID No: 700346525H1
  unsure 2, 7, 13-14, 18, 25, 36, 58, 63, 71, 92, 95, 106, 110, 128, 131, 153,: a, t, c, g, or other
gncggcngtcgtnnctgnaggagcntcttccatggngcctagtcttctccccatggcnagctngtccagcnactcgcctccactacatgtgntgnttcccccctcntccncttttctcaagtttggtnctnggcacccaagcttttgtgtccntgcagcacgtnntgcctgtgc

SEQ ID NO: 2708 - DNA, 283 bp, Zea mays
  misc_feature: Incyte ID No: 700346526H1
  unsure 2, 138, 148, 252: a, t, c, g, or other
gntgaagctcagtgccgcattgctgaggccgaaagggaatgcaaaattcacattagagaatgagaaaacgaagtgccatcaagaatacttagactcaatcagaatactggaggagaagtggaaagtacatcaacaatncacccaaganacaaaatgaagaggccgagtctacatccaatgataccagagaagtgcataacttactgcagaatgagaaaatgctacgtcaatcggctgaagatgaggccatgnacctcagaatcaagtatcacactggaaaaaa

SEQ ID NO: 2709 - DNA, 279 bp, Zea mays
  misc_feature: Incyte ID No: 700346527H1
  unsure 2, 161: a, t, c, g, or other
gntcggttcacttctccaggtaaggaaagggttcgtactcatggcgccgccgcagccaaagtcgggccttttcgttggcatcaacaagggtcatgtcgtcaccaagcgcgagtgcctccccgcccgtgccaccgcaaggggaaatcaacgaagagggtgtntatggtcaggggcctgatcagagaggttgctgggtttgctccttatgagaagcgtatcactgagcttctgaagttggcaaggacaagcgtgccctgaagctgctaagagaaagcttgg

SEQ ID NO: 2710 - DNA, 275 bp, Zea mays
  misc_feature: Incyte ID No: 700346528H1
gtcgagaccaggagcaaccaccgctagatcgggcgagatggatggacagtgaagaggccatgtttgctggtccttgtggttatctaaaacgcacgcatgctctattatagctagtacatcactatatatatacttgtgtttgtgtattgttgttctgttctgctggtgtctccgccgtttaatttgacctatgttatggagtgagtgatatatgtgccgtcactcctagtatatagtagtgagtgactagttggtagtgtatacgtactatcttt

SEQ ID NO: 2711 - DNA, 293 bp, Zea mays
  misc_feature: Incyte ID No: 700346532H1
  unsure 30, 58, 204, 209, 212, 234, 239, 251, 253-255, 258, 262, 283, 288-289,: a, t, c, g, or other
gccacaccagcagcttcttcgagtcccgcngtcctagccagaagaacgaccgcgcgcngctgacggacgatgggggcacgctctgcagtgcacagccccgggttgcgcacgaacgagctctggttgaacaccaggaactaggcagtgcatcggcatgtacagtactcggcagagttcgggcaggtatggcgcaatacagatccnggcgncanttgaaggaagagcggacatctngtganggtgccacagtnannngtngganggaaagtccagcgatgtagcntttcnncanc

SEQ ID NO: 2712 - DNA, 277 bp, Zea mays
  misc_feature: Incyte ID No: 700346534H1
  unsure 45-46: a, t, c, g, or other
tcaagggaaaccattgctcttgaagcaaagtattaagctcttagnnagtttggattcatgttggagtgatgaggttctgtattctctcactgtgataaattccttcgtctgtccttgcagcttatttcaaggtatacgacatggctttcatctggtttaacggcacgtaaagcttctgacgggagcccaaattcacctgcagatgctgaatgggcatgtctatacctatagaagatttcatatatataatgcagatgtgcagctgtaatggcgagct

SEQ ID NO: 2713 - DNA, 276 bp, Zea mays
  misc_feature: Incyte ID No: 700346536H1
  unsure 2, 41, 78, 187, 243, 252, 265: a, t, c, g, or other
gncggcgcctcccacgtctccagtccgacactccgactcantccccctcccccgccccaacccgtcgcaatggccgcngtctccgcagccccgaggccctcgatgcctccccgactcgccctccgtgcccacctcttctcctccgcctctccgctcccaatgcgcgcgctccccttactccgcagcngcttccgctccttgaccaggcctacgctgtcaagcaggacaggccctctggacccngcacccgtnaggggaagggttncccctcgacag

SEQ ID NO: 2714 - DNA, 276 bp, Zea mays
  misc_feature: Incyte ID No: 700346539H1
  unsure 133: a, t, c, g, or other
ggtggcccaaccatggccgtcattgccctcaagtgcccagacattgaggtcgtcgtcgttgacatctccaagccccgcattgaggcctggaacagtgacaccctgccaatctacgagcctggtctcgatgatnttgtgaagcagtgcaggggcaggaacctcttcttcagcactgatgttgagaagcacgtcgctgaggctgacatatcttgtctcggtgaacacccccaccaagacccgtgggcttggagctggcaaggctgccgacctcaccta

SEQ ID NO: 2715 - DNA, 274 bp, Zea mays
  misc_feature: Incyte ID No: 700346541H1
  unsure 2, 134: a, t, c, g, or other
gnggtttggggggaaaaggcctcgcgggtcgcaaaccgctctctgttgatttgggatttgggaggcgctcgagttttcaggtaaaccatagtttagtgacccatggctcgtactaagcaaactgctcgcaagtnccactggagggaaggctcctaggaagcaacttgccaccaaggctgcccgtaagtctgcacccacaactgggggagtaaagaagcctcatcgttaccgccctggaactgttgctcttcgtgaaatccgcaatatcagaaga

SEQ ID NO: 2716 - DNA, 274 bp, Zea mays
  misc_feature: Incyte ID No: 700346542H1
  unsure 2, 227, 270: a, t, c, g, or other
gnaagatcggaggagattcagcactgaataactacctctcgacttcacccgttccagcaagaagagggcgcagtttctgtcgcaggccagtgtcatgaacgaggcgctgaaactgtatagggaggttagtgccggccaaggcaccgaagtttcctctagattctgggacctgctctctgcttgttttcaaacgcctcacaaagaggttggtggtctgttagctgcantagtgacggctgtgggcatcggcgttctgaatggttcaagaanctgg

SEQ ID NO: 2717 - DNA, 76 bp, Zea mays
  misc_feature: Incyte ID No: 700346543H1
  unsure 11, 27, 37, 46, 51, 57, 64, 69-70: a, t, c, g, or other
ggagcttcggnggcgttcagctgcttnacgctgaagntgcaacatntgccntccaangaccacnggctnnccagag

SEQ ID NO: 2718 - DNA, 272 bp, Zea mays
  misc_feature: Incyte ID No: 700346544H1
  unsure 45, 153-154, 237: a, t, c, g, or other
tcccggcggcggcgcaggagcagcagcacccgaggatggtgaaanttctcaagcccggcaaggccgtgatcctcctgcagggccggttcgccggcaggaaggcggtgatcgtgcgcgtgttcgaggagggcacccgcgaccgcccctacggcnnctgcctcgtcgccggcctcgccaagtaccccaagaaggtggtccgcaggactcggccaagaagacgtgaagaagtcgcgcgtnaatgcttcatcaagctcgtcaattcacccacctca

SEQ ID NO: 2719 - DNA, 279 bp, Zea mays
  misc_feature: Incyte ID No: 700346545H1
  unsure 11, 144, 158, 184, 278: a, t, c, g, or other
tatgacaagangcaggattctgctgctgagcctgcctccaccttcaccaaagaggagaaaggttttgaagacacgcatagatgagaggggaagggaagttaccgaggttgtctgggagaatgaagcttctgcagatgacaaggncagagcagaatgtncaacactattgatgcgactgcaagcngggcgactgtcccaagcaaaccgaagcccgcaacaaacgctgacaaaagcaaagctccaagcaaaacagcagcaggcaacaagaaagctgcgang

SEQ ID NO: 2720 - DNA, 282 bp, Zea mays
  misc_feature: Incyte ID No: 700346548H1
  unsure 265: a, t, c, g, or other
ggaaacttggaactgcatgcacccaaggcaaaacgtcggtcatatatcccaacgaaaaatggaacagccatgatgcttccgctccatattcattacgaagatgtactacgtcaggatctgttgctcaaacagaatcatgccaatattcatgcaagttccagggttgtttgaggtcaaattagcaccaaaagccggctctgatctcaagatcccattgggaaaatggccaggaggttttgagtggtcagagttcaaagaggcaaantgacccttcgccaagca

SEQ ID NO: 2721 - DNA, 298 bp, Zea mays
  misc_feature: Incyte ID No: 700346549H1
  unsure 2, 30, 149-150, 203, 209, 236, 290, 294: a, t, c, g, or other
angagccataaaccagagctagtaggattnccgtggttctgtaatgtaaagagcaaaaccacggcaatcctacgagccataaaccagagctagtactgaacaatttcactacacgccttggtcatcgtgttggaaggatgatccagtcnntcttccctcaagatcccaatttccgcgggcgccgtgttgtgacttccacaacnagcganactacatatttttccgccatcacaggnacatcttcgagacaaaagaaaaagaaggttgcttcgaagaaaagactctggaancaanagcg

SEQ ID NO: 2722 - DNA, 290 bp, Zea mays
  misc_feature: Incyte ID No: 700346552H1
  unsure 158, 182, 188, 204-205, 216, 219, 221, 224, 228, 231, 236, 245, 247-248,: a, t, c, g, or other
gaaatattgttcagaaaggggatacggtggtcgatgccacatgcggccatgcgggaatgacaatgacacgctcgctctgcttaagatggtggctgacaaaacaggccgtggatgtgtttatgggatggacattcaagaatctgcgatagagaatactncctcttttctgaaaatggccgtgnatgatnaccatcagtgtgggtnngaactatgaanctntnacnctanccnccccnacaagaatnanngngacnnnnnccnntaangannnccanttnaaannancagcc

SEQ ID NO: 2723 - DNA, 290 bp, Zea mays
  misc_feature: Incyte ID No: 700346554H1
  unsure 200, 212, 222, 226, 230-231, 235, 239, 245, 249, 251, 253, 258, 262,: a, t, c, g, or other
gggtcttctacggcatcctgagaatagagaatgcgcagactgcaagtcaaagggtcctcgatgggcaagtgtgaatctaggtatctttatatgcatgacatgttctggacattcatagaagcctgggggtgcacatatctaaggtaagatctgccacccggatacatggctgccagagcaagttgcatttattcaatcangggacccgaaanagccaatcgntatngggnnacanaccnccaccnacanangnagggnaaananacacntncccacnnanacaannnagc

SEQ ID NO: 2724 - DNA, 290 bp, Zea mays
  misc_feature: Incyte ID No: 700346555H1
  unsure 2, 102, 130, 159, 228, 249, 284: a, t, c, g, or other
gnaaaaccttcacaaaaaaagccacccaaaaaaatccgtttcataactgaaaaaatcaaatagaaaaatcaagtgaagccggtaaagaaaaaaatggcagtngttggcctatccagtgctttcgctcctnctacagaggttcttggatagccgtaaggntcaggcagggtggccaacgtgcagggatcagcttgtgtccatctccaaggagcaggaggagctgcgcgncatggttcgggcggagtgagntctggacgccgacgagcgaagaggctctgggcgangagggc

SEQ ID NO: 2725 - DNA, 282 bp, Zea mays
  misc_feature: Incyte ID No: 700346557H1
  unsure 27, 56, 160, 227, 240, 280: a, t, c, g, or other
tctaaaaagcctatgtgaatccaaggnaggccgtgaaaccgtccaagcgctgagtncacctcatcaaaaggctgcgcaatctggtgcatgacctggaaaagaaggtagagcttgataagaggaatgggcgcaccggagccgtgaaggcgaccaacctgcngcggcttcgggaggcgccacactctatcatatcctcaccatggtacttaacgcgtcggcagcatacnagaaaggctatcngacgttttgttgtacaatatttagtctaagaaggttttcngt

SEQ ID NO: 2726 - DNA, 288 bp, Zea mays
  misc_feature: Incyte ID No: 700346558H1
  unsure 2, 105: a, t, c, g, or other
gncatggccatccccatcgagctatccgaccgggaatccctcgtccaagtctgcgtccacggctctcaactccaaggtcgtctcccagtactccacccttctctngcccctcgccgtcgacgccgccctctctgtggtggaccccgctcaccctgaccttctcgacctccgggacatccgcatcgtgaagaagcttggtggcaccgtggacgatactgagctcatccctggcctcatctttgacaagaaggctagccatgctgctgggggcccaactcggatggagaa

SEQ ID NO: 2727 - DNA, 285 bp, Zea mays
  misc_feature: Incyte ID No: 700346559H1
  unsure 104, 264, 270, 280: a, t, c, g, or other
gagcacggcacggtccggtgggtgctgggctccgtctccatgctggccaacgtcgtcggcttcgcgctgtggctgctcctgcagcggaagttcacccgcaagtncccggccgtgtactcggccacggcgttcatgtcgctattcagcttcgtccaggccggggcgctggccctgtcgatccagaggaccagccttgccgtgtgggccctcagggggaccgtggagatcgccacggtggtgtactgtggtgtagtggcgtctggnattggntactcctgcntcact

SEQ ID NO: 2728 - DNA, 285 bp, Zea mays
  misc_feature: Incyte ID No: 700346560H1
  unsure 123, 150, 214, 218, 249: a, t, c, g, or other
ctactccatgtacccaggtctgcgtcgggcccttgccggcgatgagaacccgtcagttccaaagatggctcgtacgtggattgatggaacaggacttaagcaaactggatgtgacgaagcttncaccccctgtacacctgaagttatctncacgccaagcaacaatcaatatgggtaccattggccatgtggctcatggaaagtccatgttgtnaaanctatatcggtgttcagactgttcggttcaanaatgagctggaacgtaacttactataaagctgggtt

SEQ ID NO: 2729 - DNA, 278 bp, Zea mays
  misc_feature: Incyte ID No: 700346561H1
  unsure 111, 228, 261, 266: a, t, c, g, or other
tgtacgccacgggtttgcttgacgatcagttccagcagctccagctgctccaggaccccagcgcccctgacttcgtctccgaggtcgtcacgctcttctgtcaggacggcnagcggatcatcgaagagctggccaaactgctggagaagcccaacgtggattttgacagggttgacgcctttgtgcatcagctccaagggaagcatgcaaagtgattaccttgcccanacctttttctgaatgaagtgtatgctataggangtacngttttgtttcca

SEQ ID NO: 2730 - DNA, 290 bp, Zea mays
  misc_feature: Incyte ID No: 700346565H1
  unsure 31: a, t, c, g, or other
ggttgtccatgattcttgaagctcctaaggnagaagaggtttcccttcttctagaaattttcggaatatgtcttacagggggcaaagaagttaataatgctatagtgagcagtatacaggacctgtcaaagtcattctcaaattaccatgatgaggtccggtgaaacgtgaagagttacttcagttcacacaaagtgccatttcaggtctgaagaggaacgctgacattgtgaggatagattctgaagctctagatttgtggaagaaactacatgagaaggaggctcacc

SEQ ID NO: 2731 - DNA, 279 bp, Zea mays
  misc_feature: Incyte ID No: 700346566H1
  unsure 233, 236, 248-249, 254-255, 258, 260, 262, 264-265: a, t, c, g, or other
ctcccagccatgatggctcagaaagacaaagctgtggcaggactaacaaaaggaattgaagggctctttaaaaagaacaaggtgacttatgttaaaggctttggaaaattgtcatccccctcagaagtgtcagttgacttgattgatggtggtagcactgttgtcaaaggcaaaaacataataattgcaacgggtctgatgtaaatccttccgggaataccattgatgagaanaanttgttccaccanngggcnntgncntnannaaaaccccaaaaac

SEQ ID NO: 2732 - DNA, 278 bp, Zea mays
  misc_feature: Incyte ID No: 700346567H1
  unsure 2, 219, 243, 266, 276: a, t, c, g, or other
tnctcgtgctcctcctcaagatctacgccaccaagtcctgctcaggggtgtcgaggaagacgcaggagctgtacatgttggtgttcgtggcgaggtacctcgacctcttcacggactacgtctcgctctacaactgcagtgatgaagatggtgttcatcaccagctcggcggcgattgtgtggtgcatgcgccgccacccgcagtaacggaggacttangacaaggagcaggacacttccgcnagcgtgctctcgccgccggttcngtcgagtgangt

SEQ ID NO: 2733 - DNA, 282 bp, Zea mays
  misc_feature: Incyte ID No: 700346568H1
  unsure 100, 125, 129, 148, 161-164, 208-209, 211, 234, 241, 247, 265, 271-272: a, t, c, g, or other
caccccgaccgacctaccctaatcggcgatggcgacggtggcgatggacatctcgaagcccactccagtggcgtccggcgacgaggccgcggcggcggcnaaggggaggagcggcggagggggcnaggngctgcggcagtactacctncagcacatccatnnnntgctgctccatatccggcagaagacccacaacctcaaccgtctnnangccagcgcaatgacctcaactcncaattanaatgcncagggaaaagttgcaatncttcannagactggctc

SEQ ID NO: 2734 - DNA, 283 bp, Zea mays
  misc_feature: Incyte ID No: 700346571H1
  unsure 2, 202, 256, 265, 276-277, 282: a, t, c, g, or other
gnactctgctggtctccctcttccacctctggtcttggccatggcctccagcgcctcccggttcatcaagtgcgtcacagtgggggacggcgccgtgggaaagacctgcatgctcatctgctacaccagcaacaagttccccactgattacatacccactgtcttcgataacttcagtgcaaacgtggtagtcgacggtacnacggtgaatttgggctttgggatactgcagggcaggaagttacaacagactgangcccatganctaccgcggannagatnt

SEQ ID NO: 2735 - DNA, 285 bp, Zea mays
  misc_feature: Incyte ID No: 700346572H1
gatggatccaagacaaatggcctttcaaccaaaaggaagccagatgagaatgaaggtgagtcatcagaggaggagaaggcgtctactaaaactactaccagaaagaagcgcagaagaaagagccgcaactagttgcccagaagctatgcagcttcatcatctaagtggcgttccgcccttgcagtctcaagtctcaaagatgttggcatgaggcatgccatgtactgtacgctttatattcactggaccggttaccagcttagcgctttggtagttggccattat

SEQ ID NO: 2736 - DNA, 280 bp, Zea mays
  misc_feature: Incyte ID No: 700346573H1
  unsure 271, 278: a, t, c, g, or other
gtgaggatcaggcgctatggattctgtgggatgcgatcaaagaagtttgatgggttcattgaccttgatgcatatgatacaatagcaatgaagattcaaaggggatggaagatgctacatatctacagtgtgttttctcacacaagactcactcttgaatattaaatgtccagtccagtattgttctcagaatctgaaatctaataagtacagatatacacggagattgggtgaattcacccgggcaacaagaagacaactcgtggcaggntttgtgnac

SEQ ID NO: 2737 - DNA, 283 bp, Zea mays
  misc_feature: Incyte ID No: 700346575H1
  unsure 66, 230, 250-252, 282: a, t, c, g, or other
ggaacaatggacaacgcaatactctttccagtgactgagtggattctgatcattggacaagctatncagtatttgcggtcctttgcaatagcagattaggacttgctccaggaaaatggaacaatatctgaggatgttgttcggagtgcgttttctgctacggaggaaggcttcttgacactcgtgcggagaaccacgttttataaaacccttgattgctgcggttggancctgctgtctagttggtgtnnnatggagaggaacactatatgtggctaatcna

SEQ ID NO: 2738 - DNA, 275 bp, Zea mays
  misc_feature: Incyte ID No: 700346577H1
  unsure 142, 166, 180, 182, 202, 238: a, t, c, g, or other
tagaactagtccgcgatggcccctagatcggatcacgccggcggcagcgccgagctcccggtggccacgcaggcccacttcgactccatggatcccctcttccacgtctccgcgtgctaccattctccttccttcggccgcngcgatccgcctgaggctgccgtcnaactggcgcttccntnacccatgaccgtattctccntcatcctactcacctacttcgcggtcgtctccggcntcgtctacgagtcatcgttgagccccccggatcggca

SEQ ID NO: 2739 - DNA, 280 bp, Zea mays
  misc_feature: Incyte ID No: 700346579H1
  unsure 62, 151, 217, 231, 242, 247, 249-250, 252, 260, 270, 273, 276: a, t, c, g, or other
aattgtacaaggggatgttgatgatatgatggctcaaaggttaggggctgttttcatgcctncatggtcttggccacttacttggtattgacacccatgatccaggaggctaccctgagggattggagaggcccaaggatccaggactganctccttgcggaccacaagagaactgaaagaaggaatggttatcacagtggagccaggctgctattncatgatgctttgcnaaactaaaacngggancnncnattcccanaaaattctcnagnggnaaag

SEQ ID NO: 2740 - DNA, 120 bp, Zea mays
  misc_feature: Incyte ID No: 700346580H1
  unsure 119-120: a, t, c, g, or other
ggaatccctcgaagaactatatgtgatgaatgatggcatatccagaggaagctgcgaaagctcctatctgagcttattcctgcaactgagaagcttaaggttctccacttccacaacann

SEQ ID NO: 2741 - DNA, 280 bp, Zea mays
  misc_feature: Incyte ID No: 700346581H1
  unsure 148: a, t, c, g, or other
agttccgtttccatacttccggcgcggcggagatcgaatcgagcgcccgccacggcgatggcgactagagtcctgccaccggctctgctctctttcatactcctgctgctgctctcgctctcagcccgcgacaccgtcgccgcgggcnaggatttcccacgcgacgggcgggtgatcgacctcgacgacagcaatttcgaggcggcgctgggcgccatcgactttctcttcgtcgacttctacgccccttggtgcggccatgcaagagattgcgcccgag

SEQ ID NO: 2742 - DNA, 118 bp, Zea mays
  misc_feature: Incyte ID No: 700346582H1
  unsure 13, 83: a, t, c, g, or other
acggacgtgaggngcctcgatctggagtcaattgtggagtttaacgaccgggaggttattgtgtacaaggacgatagcaagancgccccctgtgggcgaggggctgaacaaggctgca

SEQ ID NO: 2743 - DNA, 199 bp, Zea mays
  misc_feature: Incyte ID No: 700346585H1
  unsure 44, 170: a, t, c, g, or other
ttttggtggcttcaagttatctcagttctagcttagtttagggnagtgtcactgaatggtgttcatgtacatattggtatgttggcttatgttaggattcagataatacttatgtccatatgcagctcttagcaaactcttatatatatcataccagatatgttttaganggttatatttatatatgatagttctgcac

SEQ ID NO: 2744 - DNA, 271 bp, Zea mays
  misc_feature: Incyte ID No: 700346586H1
  unsure 3, 84, 91, 163, 232, 253, 270: a, t, c, g, or other
ggnaacgttgggcccaacgaagaacatcctctaaaccagataagaaggcgccaaaggaagtagaagatgaagatactaaaaaangtgaggngcatgaggagacaaatactatgcctggcatgctccccactagtgtaattgaaattctagcagctcgtgagangcaaaccttcgcatcagattccgaggaagaaatgtaaagcagaggtccagaggagaaagaagagatganaatgatgggccgaaactatcngctgaaaatgtcgttcnc

SEQ ID NO: 2745 - DNA, 272 bp, Zea mays
  misc_feature: Incyte ID No: 700346587H1
  unsure 233, 242, 246, 259, 263, 266-267, 269: a, t, c, g, or other
gttgcactgtcgagcgagacgcctcgtggggaaatttgcatcagaggggacaccttgttctcgggatactacaagcgagaggacctaaccaaagaagtcttggtcgatggctggttccacacaggagacattggtgagtggcagtctgacggaagcatgaagatcattgaccgcaagaagaacatcttcaagctctcacagggagagtacgttgcggttgagatctggagacntctttggtnaacnccggtgtaatccnattnggnncncgc

SEQ ID NO: 2746 - DNA, 272 bp, Zea mays
  misc_feature: Incyte ID No: 700346589H1
  unsure 9, 223: a, t, c, g, or other
gagcatgtngtcgtcggcggagaacgaccccacggtgacggtgaccgagcgcggaggcaaggacaagcacgaggacggcggcgacaaggagcagggcggcggcggcttcatcgacaaggtgaaggacttcatccacgacatcggcgagaagatcgaggaggtcgtcgggttcggcaagcccacggccgacgtgtgcggcatccacatcccgcacatgcagctnccaccgcgccgactctctggactgctcatcaagaacccgaacccgtccc

SEQ ID NO: 2747 - DNA, 157 bp, Zea mays
  misc_feature: Incyte ID No: 700346590H1
tgtactctatgttctcccatattctcccctatggttttatttttcatgggtgtagaatagcgtttaacaagagggtggtgttctaggtacattagtgtacgcgttactatctctcggtgttgcggttgcctgtgctagaataaatatggttaccatc

SEQ ID NO: 2748 - DNA, 275 bp, Zea mays
  misc_feature: Incyte ID No: 700346591H1
  unsure 2, 55-56: a, t, c, g, or other
gncggtgcggaagagcgtgtgcgtgaccggcgctggcggcttcgtcgcgtcgganntggtgaagctcctcctcttcccggggccaatacgcggtccgcggcaccgtgcgcgaccctggtgctagcaagaatgcccatcttcaaggtgctggaaggagctgaggaaaggttgcagcttctcaaggctgatctgatggactacaacagcattgcatcagcagttgccggctgtgagggtgtcttccagtagccagtcctgtcctttcccatcgaccc

SEQ ID NO: 2749 - DNA, 268 bp, Zea mays
  misc_feature: Incyte ID No: 700346592H1
  unsure 29, 61, 180, 199, 203, 232, 243, 248, 250, 259: a, t, c, g, or other
ggaggatctgagtggggatctcgtgaganaagagcgtgaaagtaatgatgagctacaagangcccgaaaagaactgataaagggtttggaggaagagctaaatggacggacagctatcgggatcaaaagaatgggggaactcgatgaaaagcctttccaaaatgcatgtaagacaaaatncggaaaggatgcgtacganatcnaagcagcacgctagtcccagttggcagcngaactaaaganacctncnggcaccctntaaaaggtt

SEQ ID NO: 2750 - DNA, 270 bp, Zea mays
  misc_feature: Incyte ID No: 700346594H1
  unsure 2, 57, 68, 241, 266: a, t, c, g, or other
gntgaattcatctctgccctagcaccagccatggcgaacgccagcttcttctctgtntcctactcgcngcctccgcgccgctaatcgtcgccacggccaagaaatccggggacgtgtcggagctccagatcggcgtcaaggttcttatattgatgctatgcctgggtatttgaaatgcagtacaagccggaatcatgcagcattcaagctcacaaggtgacaaggttaaagttcactacgnggaaaacttactggtggacggtttnaaac

SEQ ID NO: 2751 - DNA, 116 bp, Zea mays
  misc_feature: Incyte ID No: 700346595H1
  unsure 85: a, t, c, g, or other
aagcttgtagggttaccggatcggaggagcatccccgcctaggtcaccacagccatggttcgcggatcgctaggacaagcttgcntacgcgcgccctctccgtcgccgggagatgg

SEQ ID NO: 2752 - DNA, 280 bp, Zea mays
  misc_feature: Incyte ID No: 700346603H1
gaaggacgggaagctctggatagggtccgtcctgatgccgttcatcgctgtctttgacctcgcgaaggcgtcttagccgcctcaagtttgattggaaacattgttgctttaagacatggagtccatggttaccgctgcacgcttctgagaggatcagtgatccaaataattcggttctggtgcaacctggagctgtatataatgctccagcttcttttagtagcaaatgtaagttgctgacatgttctttagattgtcactagaactatgaacgaacagc

SEQ ID NO: 2753 - DNA, 289 bp, Zea mays
  misc_feature: Incyte ID No: 700346604H1
  unsure 15, 21, 45-46, 49, 70, 72, 99, 110, 112, 138-139, 153, 168, 181, 191,: a, t, c, g, or other
ccctctctcgtctcnccagcnacggcagcgggcgatggttacgcnnagncgaacggattattggaagcanangcggcagccatggccgtgattgagaanctcaagatctntntcgttaaggagcccgtagtcgcggcnncctgcctcatcgcnggattcggtctcttncttccagcagttntccggccaancctggattnatggcagaccgcggaacantgtttccacntctnctaaatgatgtgttgcaggtgtcaccggcnagaaacgtagtgaacttggattgtnt

SEQ ID NO: 2754 - DNA, 286 bp, Zea mays
  misc_feature: Incyte ID No: 700346605H1
  unsure 40, 43: a, t, c, g, or other
tagagaaagatccccacccccaggcgacgcgaccggcganccncgaaaccctaggtcgcgcgacccgggcagcgcgcttctgcgtgactgcgtgtctttcggggaggggacagcgttaggacgcgacgaggttagcgaggccgtctggccgactataagcggaagaatctcctccgaagccttcctagagctgtgaagagcgcgtggatctcctggatttgcagacttcgaggggagtgagacaagacatgggttggggaatatccaggttgattggactgaaggc

SEQ ID NO: 2755 - DNA, 230 bp, Zea mays
  misc_feature: Incyte ID No: 700346606H1
ggcaatggtttttgatgccaccctcctacgttacaagacggccaaccagattggttatggaaccaaccaaatgtgcagcaagcacaccttattcaagtttgttggcaccaatagatatatgttatttctagttaaattctttgtagcgctgcgccgatgaagcctaacatggtgcgagttttgttgtttcgccttttgtacagtatatatctttgcccagtcatttcgtc

SEQ ID NO: 2756 - DNA, 292 bp, Zea mays
  misc_feature: Incyte ID No: 700346607H1
gcctgggccaagtcaagtcgtcgtcttgcttgccaatccgtcgctccacctgaacacaccggcgaagaggaggcgaagaagcgatgggcgtgaccaaggaggacgtcgaggcggccatcacctccgctctcagcccttccaatctcgtggtgacggacacgtccggagggtgtggcgcgagtacgagatcgaggtggtgtcggagaagttcgaggggaagcggctgctggagaggcaccggatggtgaacaccgcgctggcgtctcacatggcggagatccacgccgtctcc

SEQ ID NO: 2757 - DNA, 287 bp, Zea mays
  misc_feature: Incyte ID No: 700346608H1
  unsure 2, 22, 112, 118: a, t, c, g, or other
cnaacacacaatggcaccaganaggatgctcctcggcgtctgtgccgtgctgatggtggtcggcgtcacgaacgcggcggagggccaggtggcgtcggtcgtcgtgggcctncgcgangtgcgccgacagcacgaggaagaacatgaaggctgaggccggtttcaagggtcttcaggtggcgatcaagtgcaagaacagcaacggcgagtacgagacaaaggccgtgagtgagatccaaagtccggagccttcagcgtcccactcgccgccgacctccacggcgccg

SEQ ID NO: 2758 - DNA, 285 bp, Zea mays
  misc_feature: Incyte ID No: 700346611H1
gaacagcagttcgtccaaaaggtgcaagagatgcttgcagaggaagagaagaagcgtattcatattgcgcaaggattgccatggactaccgatgaacccgagtgcttgataaagcctgcagtcaaagaaagaactgagccgatagaccttgttttgcatagcgatgtgcgtgctcttgaacgtgcagaatttgatcagcacgttttggataggaacaagtttgctgagcaacaaagattagaatgggaaaggcaacaggaattagacgaagaagaaaggataagg

SEQ ID NO: 2759 - DNA, 279 bp, Zea mays
  misc_feature: Incyte ID No: 700346612H1
  unsure 28, 123, 150, 179, 191, 264: a, t, c, g, or other
aaactaccaaagagctaataagcggcanatggagcttcaaacgcaagctctcggctcgcagtacacacagcatgaccattacaatgcgtcaccgagcacgtcatatggaagccaaccgctganactggaagacttgtctcggcgtcattnccagcaagacttgcgcaggcctttacgcnctcaccctcgantcggtgtgctcggttcattgctgcagcaggagatcgcaaactggtctgggaatgcgggccgcagtctgggtanagactaggtgattgt

SEQ ID NO: 2760 - DNA, 118 bp, Zea mays
  misc_feature: Incyte ID No: 700346614H1
  unsure 26, 43, 45, 50, 59-60, 63, 66, 80, 96, 114: a, t, c, g, or other
acacaccatcgtcctctccttttgcnagcaccgcgaacccgcnancagcnttctcccanncangangtacggaaggctgncggaaggagctctcanctcacatccatctctgtnaccg

SEQ ID NO: 2761 - DNA, 279 bp, Zea mays
  misc_feature: Incyte ID No: 700346615H1
atgcattttctgctggtggggacctaaagatgttttatgaagggaaatcaaatgattcctgcctcgaggttgtgtatagaatgtattggctttgctaccacattcacacgtacaagaaaaccatggttgctcttgttaatgggcttgtcatgggtggtggcgctgcaatggttgcgccactaaagtttgcagttgtcacagagaaaacaatctttgctactcctgaggcaagtgttggattgcacacagattgtagcttttcctacatccattcccggg

SEQ ID NO: 2762 - DNA, 291 bp, Zea mays
  misc_feature: Incyte ID No: 700346616H1
  unsure 12, 18, 20, 30, 39, 50, 54, 61, 102, 135, 140, 166, 169, 191, 225-226,: a, t, c, g, or other
aaagctttcgtncggcancngccgagcccnagatccctncagccgctgcncgcncgcccgncggaatggagttcgccttattagagaccgaatccttctcgncttcctaccccacgctcatcatggtttgaagcnctaangctgcgacctaccactgattattgcngcntggaatcgagttttagtagttntaaccgatgccctacgattacatttggtatccgnntcacccggctgcagcnagcggtgtcgattnggcaacgtggggcagttcgnccgtagaccttntgt

SEQ ID NO: 2763 - DNA, 286 bp, Zea mays
  misc_feature: Incyte ID No: 700346617H1
  unsure 2, 32, 36: a, t, c, g, or other
cnaaaggggaaaccagtgccatcacgaagganaatncatgcaataatgaaaagaaagctgcagggtcaagcctttcaaacggtggaccagttctggctaatggatgccctcctgttaatgttcctgctaacaatggtttatttgagaatgtgaagacagaggctgttgtcccaccagttatacctgtcaaaatcatcagcaatccaacaccgcaaatgacgttggagacgcataaggatggcaccaaacccactgaaagcagaaagttaaataaggaaagggaaat

SEQ ID NO: 2764 - DNA, 290 bp, Zea mays
  misc_feature: Incyte ID No: 700346619H1
  unsure 187: a, t, c, g, or other
gtggcttcatggagctatgcatcagcgtggtgtttttagctgggaaaatcgcatgaaggttgtaacaggcactgcaaaagcgcttgcttaccttcatgaagctattgagccaaaagttgtacatcgagatataaaatcaagcaacatattgattgatgatgaatttaatggcaaagtatctgacttnggattggctaaacttttgggatcagacaaaagccacattactactagagtgatgggaacatttggatatgttgcacctgaatatgctaatactggaatgttaa

SEQ ID NO: 2765 - DNA, 278 bp, Zea mays
  misc_feature: Incyte ID No: 700346621H1
aaagctctggagacagccatgcaacatgttcactatgaggatgagaacactcggtacatttgcattggtcctgtaaacaaggtattaaatatgcttgcttgctggattgaagatccaaactcagaggcctttaaactccacatcccacgagtctatgattacttgtggcttgctagaagatggcatgaagatgcagggctataatggtagccaactttgggatacagctttcatagttcaagccattgtggctaccaaccttaccgaagagtttggtc

SEQ ID NO: 2766 - DNA, 283 bp, Zea mays
  misc_feature: Incyte ID No: 700346623H1
  unsure 2, 44: a, t, c, g, or other
cncaccattggatttaacgttgaaactaatgttcttgtactcgncagtttcaacgttaaatccaatggtggggatggtggtgacgatctcgccgagcttgagcttgtagaggatagtggtcttaccagatgcatcgagaccgaccatgagaatcctcatctccttcttggatttaacgttgaaactgtcgagtacaagaacattagtttcactgtttgggatgtcggtggtcaggacaagatccggcccctgtggaggcactacttccagaacacccagggcc

SEQ ID NO: 2767 - DNA, 199 bp, Zea mays
  misc_feature: Incyte ID No: 700346624H1
  unsure 2, 18-19, 21, 27, 29, 46, 48, 67, 76-77, 79, 85, 116, 126, 136, 155,: a, t, c, g, or other
anttcccaaatccggtgnncncacacngncatcctcacctcgtcancnaagccggccttccttccantctccatcnncnctcagncggataggcgccggttgccggaaacttctgntcggactgtncatcttgatngggcatatctcattatcanagcgccgaggtgaagngatggagnntgagtacgncatngtcgag

SEQ ID NO: 2768 - DNA, 285 bp, Zea mays
  misc_feature: Incyte ID No: 700346625H1
  unsure 4, 18, 51, 54, 60-61, 68, 88, 97, 114, 116, 132, 146, 150, 158, 163,: a, t, c, g, or other
agantctctccaacgctntgctgttgtcgaagctaccagatggtggtgagnagntaaggnngcagatnaatgagctggacgagaagcngacttctgntgagaaggggctgaagnangggggcactgaagtgntttccttggatgantganccaagacntgganagtctgtgctcggcaaaagtaaagtgtctggaatagctttagtcactgggttgtgactagcatcaatcaagtctgcncntttctgcatctctgggctgggtctatcgttatgcganaccaat

SEQ ID NO: 2769 - DNA, 282 bp, Zea mays
  misc_feature: Incyte ID No: 700346626H1
acttgatgcagagatgttgggaagctactccgactgatcgcccttcatttgaggagatcattcctgaactagaggatatccaggcacaagcacagagaacatcaggggaaacgagccagacagaggaggaccactcatgcagtaaagattgattgaccccctctgtacatacatgttgacaattctctcatctgatcactaaaatgctgagaaagtagcatatcatcagttttgatgccatagaaaaaaagtagcgaatcattttgtcaagttttgtcagaa

SEQ ID NO: 2770 - DNA, 275 bp, Zea mays
  misc_feature: Incyte ID No: 700346627H1
  unsure 51, 53, 69, 124, 143, 161, 177, 237, 251, 266, 273-274: a, t, c, g, or other
aagggagtagcttggaagaaatgggcatagtggatacagtacaaagcgaangnccaaccaccgcgaggnttcctcgagaatccgcagtctcttcttccccgcacccactctttatccacgagcnacggggacccgtgacagcngcgaaaggctcgagcttntcttgatttgccctgncgcctgcattgggacgagaggaggtccttttcttggacgttctggggaggagtacctganccgactcgcgggcnttcttgggctcgttncgtctgnnc

SEQ ID NO: 2771 - DNA, 280 bp, Zea mays
  misc_feature: Incyte ID No: 700346629H1
  unsure 88: a, t, c, g, or other
ggaacgttaacgccagcactgggaagtgcgggatcgcgatgatggcgtcctacccgacgaagaagggcgcgaaccctcccaggccgtnctccaaccccgccaacaccgccggctgcacctgacaatgtctgcgacgagaacttctcgtgctccgcgggcagcacctgctgctgcgcgtttggcttcaggaacgtctgcttggtctggggctgctgccctgtcgagggcgccacctgctgcaaggatcacgccagctgctgcccgccgggctaccctgtct

SEQ ID NO: 2772 - DNA, 273 bp, Zea mays
  misc_feature: Incyte ID No: 700346630H1
  unsure 64, 76, 100, 125, 250, 258: a, t, c, g, or other
gccccacccacaactgctccagatccaggcacggcacggcacggcagccgggccaacccaagcncgtcttctcttntctctcgtccgtcccgcactcgcngcgacgtgacaagacaacgcgacgngcgcgcatacgtcgtccaaggcacgcaggggccagccaagccaaccaatcgcgtccgtccgggtctggtggtggccggaatgggcctcctcgatcagctctgggacgagacggtggccggcccgngaccggantccggcctcggcaag

SEQ ID NO: 2773 - DNA, 277 bp, Zea mays
  misc_feature: Incyte ID No: 700346632H1
  unsure 4, 205, 275: a, t, c, g, or other
gacnatgatgaagatcatgggaaagataatcaggacacaatgaagccagtattgtccttggggaaggaaggctctgcctttttggccccaaaattacattacagcccatcttttgcttgtattccttatacttctgatgcttattatagtgcggttggggtcttgacaggatatcctccacatgccattgtccatccccagcaanatgatacaacgaacactccgggtatgttacctgtggaacctgcagaagaaccaatatatgttaatgcaanac

SEQ ID NO: 2774 - DNA, 283 bp, Zea mays
  misc_feature: Incyte ID No: 700346640H1
  unsure 82, 91, 270, 279: a, t, c, g, or other
gattactgaagatgttcagggtaaaaactgcctgactaacttccatggcatggatcttacccgtgacaaaatgtgttccatnggtcaaaancatggcagacaatgattgaagctcacgttgatgtcaagactaccgatggttacttgcttcgtctgttctgtgttggttttactaaaaaacgcaacaatcagatacggaagacctcttatgctcagcaccaacaggtccgccaaatccggaagaagatgatggaaatcatgacccgagangtgcagacnaatg

SEQ ID NO: 2775 - DNA, 276 bp, Zea mays
  misc_feature: Incyte ID No: 700346641H1
  unsure 141, 207, 234: a, t, c, g, or other
cctaagcagggagttgatttatccgctgcagccatgagtaagttgcagtctgagtctgtcaaggatgccatctcccagattgttggggatgccaaggagaagaataggaagttcactgagactgtggaacttcagattggnctgaagaattatgatccacagaaggacaagcgttcagtggctctgtaagttgccccatatccctcngtcccaagatgaaggttgcatgcttgngatgcccagcatgttgaaggaggccgagaagatgggacttgg

SEQ ID NO: 2776 - DNA, 180 bp, Zea mays
  misc_feature: Incyte ID No: 700346643H1
  unsure 6, 8, 10, 13, 16, 19, 33, 40, 56-57, 72, 142, 158, 163-164, 172, 177,: a, t, c, g, or other
ggtgcngnantanttngcnttcccacagtaganttgtacnagacattacaaactanncttcaggcatttgcnagataatgttttgtacaattctactgtgggaatgctaattattgcggcacagttgtattttcactaaganaccacagtttgaattntacannacattatntagcnant

SEQ ID NO: 2777 - DNA, 275 bp, Zea mays
  misc_feature: Incyte ID No: 700346644H1
  unsure 39, 168: a, t, c, g, or other
gagagaatctcgcaccacagcaggaggggaccgagaganaagcgaactcgagaaagggattcaaggaggctgttgccgatggccatggcggcgcggctgctgcgagcaaccgaggtggcatctcgatttctatctgcttcccatggtttcgtccagcgagctgcatanacagctggtgggatagtcgatgttggccaaccaacaccccagtctcatccagagttattagctgatggagagatcacaccaggcatcacaaacgaggaatacatctc

SEQ ID NO: 2778 - DNA, 270 bp, Zea mays
  misc_feature: Incyte ID No: 700346645H1
caaaccgcttgctagcatctaaacagaccattcctcattactacttgacagtagatgcacgtgttgacaaacttgtcaagttgcgaggtgaactgaatccactgcaggatgcttctggtggaaagaaaatatctatcaatgatcttgtcatcaaggctgcagctttggctcttagaaaggtccctcagtgtaacagctcatggatgaatgattttattcgccaatatcacaatgtgaacatcaacgtggctgtgcagactgaacacggat

SEQ ID NO: 2779 - DNA, 282 bp, Zea mays
  misc_feature: Incyte ID No: 700346646H1
  unsure 41: a, t, c, g, or other
ggcaacccggtcggcgtcatggagggggatgagttcacctnagcaacggcagttaatcttcttcatgcaaacaaggatgactatattgctgtacttttctatgcctcgtggtgcccattctcacaagaatgcaaaccaaatttcgagacactggcctccttattcccaaccattagacattttgcatttgaggaatctgcaattaggccaagcataatttcaagatacggcatccatggtttcccaacactctttctcttgaattcaaccatgagagtacgg

SEQ ID NO: 2780 - DNA, 270 bp, Zea mays
  misc_feature: Incyte ID No: 700346648H1
  unsure 187: a, t, c, g, or other
attgagcagtctcaactcaattgggcctgggcagacgagtgtgtcttcaacctgtgtctacttcgattacacagtgttgttcatagcagcctagccaatgcttataaatcctggttgataacagtgattcaccgaacacactcaattggccaagatcatttttggcataacgtggataggggtgtgntgtgtggaattaaggatagatgctgtgcaagattggcaaagctagttttatctgctacactgacacaagattctggcaagctt

SEQ ID NO: 2781 - DNA, 286 bp, Zea mays
  misc_feature: Incyte ID No: 700346649H1
  unsure 206, 247: a, t, c, g, or other
gctaggctcaaacccaaacttgatgaagtcctgcctaaagctgctgcggttgtctttgttgttgatgctcaagatttcttgtctagcatgcaagctgctgcagagtacctttatgacattctgacaaaggcaactgtagtgaagaaaaaggtccctgtgcttatattctgcaacaagacagataaagttaccgcccactcgaaggnattcatcaagaagcagttggagaaagaattgacaagcttangggtctaggaacgccgatcgtcagccgaattctgtggag

SEQ ID NO: 2782 - DNA, 285 bp, Zea mays
  misc_feature: Incyte ID No: 700346650H1
  unsure 2, 20: a, t, c, g, or other
anagtggtcccgtgcaacanaaaggaaatccaaatctaataagggcgattcacctcctgagaaacgccaaagaatcgacttgcttcaaactggtggcaatctatctgttcttggcgaagtggggggttcttcgaaggacaataatataaacaatgcaaaaaacccggaggaattaaagccattgtctttgtctcagggggaaattgttttcaacattgggaaaagtgtagttgagaataaatctgattctcttgcattcagacgtcctggactacaaaaagaagg

SEQ ID NO: 2783 - DNA, 282 bp, Zea mays
  misc_feature: Incyte ID No: 700346651H1
atctactccacaaatcctaaaaccacaacaactatccccctctcctctctattctccggcgattctccatattcttcatgcaggtcgtagccacacctcgatccatgtcgtgtcgtcgtcgctgttgcccaccctcctatttctccattcgttgctgcgctagttacagtggtcgccctcttagatgttacagtaaaaaaaatattggtggtgatatggttatttattgattcgttagggtaattaataagaaccctcaaaagcttggggtcttcacggagg

SEQ ID NO: 2784 - DNA, 280 bp, Zea mays
  misc_feature: Incyte ID No: 700346652H1
  unsure 6, 8, 16, 39, 42, 48, 53, 115, 127, 133, 136, 138-139, 155, 166, 175,: a, t, c, g, or other
taccanancggcaganccttcccctccgctccccagtcncanccgcancctanccctcagcaaaccctaaccgctcgtcgccatgaaggacacctcgttcaaggccaccggcgcnaagcgcaagaangtcggnggngnnaagcgcgggcctcacncccttcttcgngtttttggntgagtttatgcngcagtacctggagaancaccctgagctcaagggngtanaggaggtnancaanncgctnggganagtggcgctntatgtcggntnaggagaang

SEQ ID NO: 2785 - DNA, 279 bp, Zea mays
  misc_feature: Incyte ID No: 700346653H1
taagatgttcctgcggaggatcctgaccggcgggggcggcctggcggccctgagggcggcgcgcgccgtgaaggagacgacggggatcgtgggccttgaggtggtgcctaacgcgcgagaggttctggtagggctctacgagcgcacgctcaaagagatcaaggccgtccccgaagacgagggttaccgcaaggccgttgaatccttcaccggtcaccgcctccagatctgccaggaggaggaggactggaagcgcatcgaggaccgaatcggatgcgg

SEQ ID NO: 2786 - DNA, 278 bp, Zea mays
  misc_feature: Incyte ID No: 700346654H1
  unsure 24, 183: a, t, c, g, or other
ttcatccgctcaaggcggagcttngccagaagaaggcagctgaggcagagaaggaagacaagaagtgaagcagccaaactttgtagcctgttttgttctgttcagtcatagcgagatgctacttccatcaagtgcttgttccaagttttttttgggtgctggaaatagagaccagtcaaaagntttggtgtcctactgtttgataccttgtatttgtttgcgaactcagctatctaatgggttaatgaattcttggcgacgcacgattctgcttaaat

SEQ ID NO: 2787 - DNA, 278 bp, Zea mays
  misc_feature: Incyte ID No: 700346655H1
attctcctaaggaacggattgtaccacctgcagagaaacctgccacaacttctttgagaattgaccgatttgtacgcccatttaccctgaaagctgtgcaggagcttcttggtaaaactggatctgtacaagacttctggatggaccatatcaagactcattgctatgtgacattttcttcggtggatgaagcaatggctactagggatgctgtttacaacctacagtggcccccaaataacggcaataagttggtcgccgaatttgttgatcctcag

SEQ ID NO: 2788 - DNA, 280 bp, Zea mays
  misc_feature: Incyte ID No: 700346656H1
  unsure 43: a, t, c, g, or other
gcgctaccagcagggcctccccgccgagtgctccatgcagtancgcccggttattcctcgcccgtccaacaatgggcgcgcgcgcgcgtgtgtgtgcatgtggtccgctctactgctaccgctacgacgatcggtgtcgatcaccggatcaaggcaagacgaaaggcatcgaaacatggtagataaataaaggacttgacgatttgtaacgcatagctggtgcgtgcgtggtgtggtggtaagaaattcttctgctgcctgtgttcttgtagcctcctcg

SEQ ID NO: 2789 - DNA, 284 bp, Zea mays
  misc_feature: Incyte ID No: 700346657H1
  unsure 22, 81, 125-126, 130, 136, 208, 246, 249-250, 252, 260: a, t, c, g, or other
cgtgtagtcagctcgccttgcncgctctaatcggtcaccactgacctccgcccatggcgaccatgtctgcagcccttcgcnatctccttaccgtcgctaactcgcgttgccgtcgcaagtacgcnntcanacttcntcgcgcatcaagagagccacacaattcaggtgctgcgcggattcttcttcccaggagcaggagatctccggngcccctcccgccccgccgctggacaaatctgcaagatngcnngnttcctctntgctgggcatttccacgagcacct

SEQ ID NO: 2790 - DNA, 282 bp, Zea mays
  misc_feature: Incyte ID No: 700346658H1
  unsure 21, 50, 59, 74, 81-82, 94, 102, 105, 120, 147, 152, 168, 209-210, 213,: a, t, c, g, or other
ctttccccctccactagggtnccccgtccgttccccctcggccgcatcanctgtttgangcggcaaccaagggncgcgganncatctgcgtcgngccatggntanggggatcttcaccancgatggctccttcatggagaggttcangcagntgcagcaggaggcccnggagaagaaggccgctgctgcctccgcctcatcggctcccnngcntgcgaaccccangcaggggtttgntgttgcggcaaacaataggccattcgagctgaagaacgctgctcc

SEQ ID NO: 2791 - DNA, 281 bp, Zea mays
  misc_feature: Incyte ID No: 700346659H1
gcccttgcatacacatcttgaagattgagaaacacactccactcacttggaacatgtacttcatcacttaggtgagactagaacactcctagtgcatggtgtagtgttcatgcttcttgtggcactagttgagtgagttggaccgattctacacctattactcttgatgattgtcattacctagatggcccaatgattgtgggattgttgaaggttttggtgattcttgtcaactcagatcattcttgtgtggggttcttatgtctattctcgtgggagat

SEQ ID NO: 2792 - DNA, 279 bp, Zea mays
  misc_feature: Incyte ID No: 700346660H1
  unsure 64, 66, 88, 98, 111, 143, 187, 195, 199, 202, 208, 211, 214, 242: a, t, c, g, or other
cgccaaaactgcgaggtcgatgagttttacttccatttgcatccgaacagaattcacgtaatanangctgtatcccgccattgcaccntgaatggcantatgtgcgagcanggtgcaatggcgggatacagctttacagtcgnaatggttaatggcaggcatgcatatataccatttcatagggtancatctacnaggnacnaggtgnggntanctgacaggatgtcggcgagctgctgtgncaacaaaccaaccgagttcctgagccagaaggacatc

SEQ ID NO: 2793 - DNA, 276 bp, Zea mays
  misc_feature: Incyte ID No: 700346667H1
atcggagcgagctcattctcaactcgactcaagagctctgcctcctccatcttcccttgctctttctggacgttgagggcctccggggccacgctgagagatggaggcgaatccgaagaacaccttcacgatcaaagtggaggacgggaagcccgggaaggacggccggctggcggtcggaccggtgttccggagcgttctggccaaggatgggttcccgcagcttgagcctgacatgaagacatcatgggacgtgttcagggtagcagcagtcaa

SEQ ID NO: 2794 - DNA, 274 bp, Zea mays
  misc_feature: Incyte ID No: 700346668H1
  unsure 167, 249, 269: a, t, c, g, or other
aatagtcatgtgcaccgatttatattaaagagtacatttacaaaagtatataatgtgataagagtttatttgtattttaacaaaacaattatttatagttaatttttttcaagtttgacttaaaccttgtacaaaatgacttataatttagacaagaggagattacnaaaatacttcttctattccatgttaagagagatttcattactatgatttaattaaggaaaaacaagtaccctttcgtatatnagaagaatcgagtgactaanaaatg

SEQ ID NO: 2795 - DNA, 271 bp, Zea mays
  misc_feature: Incyte ID No: 700346669H1
  unsure 115, 136, 152, 177, 207: a, t, c, g, or other
cagaatctgagtcaccgtcactcaggcaatcaggatttggagaaatcagcagaccagaattgtctaaataaagatgtggagatcgaggaaggagaattgattgaagaggaccatnataatatcatttataaaagcnagcttaagcaggaaantgttgtactgaaatcagttattganacaagttcagcagagcagttacaggtgatnatgcaacgtcgaaggatgctacctgcaacaacagagctacaagagatctgatgagaacaccttc

SEQ ID NO: 2796 - DNA, 269 bp, Zea mays
  misc_feature: Incyte ID No: 700346671H1
agacggaggtggcggcggttgttgaggattggagattcatcctgaagggtcttgtagttcttagtttatctagggttggtaggtttcgtcctagcgggtctagggttaggtttctggctggcttgtgctggttcggccggatctagggtttgccgggggatgccagtcctcagcggcttgcttttcctggcgtcatcggcgaggctgaggcggcgatggtgcagaggaataacatcttccgacctcttcctcgcccctgtgacgttctg

SEQ ID NO: 2797 - DNA, 271 bp, Zea mays
  misc_feature: Incyte ID No: 700346672H1
  unsure 235: a, t, c, g, or other
gtggagcgcggcggcgacgtggcgctcatcgacgacctgttcgacgaggtggtggagggcaggaagaagctgctggacctctgcagcggcggcaaatgatcgaaggagagactgactaacgcgcacgcgatgagctgcttcgccgttcgcgatgtgcaatggcgatagatagggccagccatgtgtggctctttacgtactgcttgtgttcttccttcctcctcgaatgtgtggntctcgatcgatatttgccgtggcaggcagtgctcga

SEQ ID NO: 2798 - DNA, 146 bp, Zea mays
  misc_feature: Incyte ID No: 700346673H1
  unsure 2-3, 41, 114: a, t, c, g, or other
gnntaccttgcaagggcggtaacccaagctttttcccctantaagttgaagtccgttatttaagaagctttgggccgtaaattcattggttcataaagctcgttttccctggtngttgaaaattcgttaatcccggctgcaccaat

SEQ ID NO: 2799 - DNA, 275 bp, Zea mays
  misc_feature: Incyte ID No: 700346674H1
  unsure 37, 55: a, t, c, g, or other
cctaatctgtcacctcccccaccgcacctccgtagcntcttcaatctcgccggcnacctcacgtcctcacctcgcgtggcctcccgttctgacttcggagtccctcggtctcaacgactagttgagagctcgcggctccgttcgggcgaggggaggaggttcatgaggctgctgtaggctccgttgcagccgccgcgggcgggagtccgtgattttggacgccccaccgcggcaagatccggaagcgcgttggctgttgtgccgtgagtttcagt

SEQ ID NO: 2800 - DNA, 273 bp, Zea mays
  misc_feature: Incyte ID No: 700346676H1
ggcagccgactgctcgacgctccggtgcatccagggcggctacatcacctgcgacaactacccggggaagcagctggacgggtgcgactgcgtctgcgcgcccgacaacggccggaactgcgttctccacctccagtccggctccacctacaactgcagccgcagcaacaagggatagctagctagtcgatctcgaccagtcttcgacaataataatgcttcaagctgtacgctgtcgaatagtaacagttgtgctgaaacgaccgggtgatg

SEQ ID NO: 2801 - DNA, 275 bp, Zea mays
  misc_feature: Incyte ID No: 700346677H1
gaagacacagcaatataatgcttcagttgcaaataaatttccaccccatgttcctcaaggtgctgctgcaaggcctggtaaagcagttggttcggtgctgcagtacaacctctctcaagcatctgctgctgagcaatatgagcagcgaagggctgctaggcacccagcagttgccccaaacaacatcccttctggaagctcataccccagaagaaatcagacctgcaagagcgagacaggcgacactgagaggatggacgtgaaccaagctgggc

SEQ ID NO: 2802 - DNA, 274 bp, Zea mays
  misc_feature: Incyte ID No: 700346678H1
  unsure 157, 180, 188, 235, 255-256: a, t, c, g, or other
ctatctttagagatcgtggagcagctgtatcaaacaatgtcatctcactgtcacaaccatggcgatgaatgttagctttctcagttttggtcgaccctgatctgaacttcatttcctggttcttctatttgcttgacaaatactagtatggtagggnccattaagtatgacttgaaattntgaatacntaaaaagattgcctggtgtttatgtgtaattttcatgcttaatgtcnatagtggtgatcctttcttnncatctgacagttgcgcat

SEQ ID NO: 2803 - DNA, 276 bp, Zea mays
  misc_feature: Incyte ID No: 700346679H1
  unsure 252, 267-268, 274: a, t, c, g, or other
tgctcagtcagatccccgtcccgcatttcctaaggccaggttagttggcattgaagacgatgactgcttctgcagctgctggtgtgcagatggtggctgcacgcccttgcatttcggcctcgccaggaattcttaccgcacgggtttctaggactgattgcatgctcagtaccactgctacattccccaaaatcagctgctcctggcctctaaggtttaagcgcaatgatgttgttgtaagagcaatatcgnaagagtgtggcccgnngggctncc

SEQ ID NO: 2804 - DNA, 279 bp, Zea mays
  misc_feature: Incyte ID No: 700346680H1
  unsure 3, 13-15, 47, 62, 65, 143, 158, 183: a, t, c, g, or other
ggncgcaatagannnaacaccgaacgcgccgccgctcctggccctgncccccgtatctatancancgaaggcgatgaaggggggccaaggacgagcgtttttcgtgcccgctggccattgccgctgctcacgagcctcccgcnccgcgctgccctgcnctctgcggctctgccccaacgagcnccaggagagccaggtaaaggagccgtcaaaagcccccgccgaggagagcacgcaaggacatggcgtcaaccgttaccttcagccagtagcaccaag

SEQ ID NO: 2805 - DNA, 269 bp, Zea mays
  misc_feature: Incyte ID No: 700346681H1
  unsure 178, 199, 216, 221, 225: a, t, c, g, or other
ccgctgcttcaagaaaccaccgagagcccaaccgcacaggcaggagagagagcagggagccagggacagtagcgtggggccggggagcaaagatggaggggaaggaggaggacgtgcgcctgggcgccaacaagttctcggagcggcagcccatcggcacggcggcgcagggcgccgnggccggggacgacgacaaggnctacaaggagcccccgnggcgncgtnttcgagcccggggagtcaagttctggtcctttaccgtcgggcat

SEQ ID NO: 2806 - DNA, 268 bp, Zea mays
  misc_feature: Incyte ID No: 700346683H1
gatcaggaagctgctgcagctgttatggccaggcttgctgtttacagggcagagacgtaccatgttagagatgttatacgatggcttgacaagatgcttatccgcttcactgctaagtttggaaactatgtttctgaagatccatctacatttcggctgtcaacaaacttctccttgtatccacagttcatgtactacttgcggagatcacagttcattgatgttttcaacagctctcctgatgaaactgctttcttcaggttgatgc

SEQ ID NO: 2807 - DNA, 268 bp, Zea mays
  misc_feature: Incyte ID No: 700346684H1
  unsure 45, 133, 235: a, t, c, g, or other
cttggaggtgaccgcagctctccggcggaaggcggcgcagatggnttccgcggcgacacagtgcttcagctactcctcgttgccggccacgtgggctctgcggcagcggggcggcggtgccagcgtgctccgnctctcttcccggcggaccttctcggtctccgcggcggccgggttcgacaaccagaaccgcgagtatgtgatcgtcgggggagggaacgctgcgggttacgcngccaggacgttcgtggagcatggcatggctgac

SEQ ID NO: 2808 - DNA, 264 bp, Zea mays
  misc_feature: Incyte ID No: 700346687H1
ccatcggcggcgcaccgaccgccggcgaagggtacagagatgaagacggttagcctcggcgcctctaggccttccactgtcaacttccgcatgccgacgagggacaacctcgtgcctatacgcgtcgacgtcgaggtggacggccagcgctacagggacgccttcacctggaacccgcgagatcccgactcggagataatcagcttcgctaagcggacggccaaggacctcaagctgccggccaatttcgtcccccagatgctc

SEQ ID NO: 2809 - DNA, 270 bp, Zea mays
  misc_feature: Incyte ID No: 700346690H1
  unsure 6, 40, 47, 73, 93, 156, 165, 189, 212, 226, 235: a, t, c, g, or other
tccgcngcggcgtcgcttttaccacggccaccaccgccanatcctgncgccaccgtccattcactcttcgccnacctatccgacccggccgcnctccaccacctacccgccccgctccttgccttctcccaactccgccacctgctgccgcccgcngccgccacncaactcctccttcgccccatcgcntcgctcctccaactccaccgctncgacctccgcatangcctccagnttcacgggctctccctgtccctcggcctctcctgc

SEQ ID NO: 2810 - DNA, 267 bp, Zea mays
  misc_feature: Incyte ID No: 700346692H1
  unsure 80-103: a, t, c, g, or other
ttgcaagttggtgagatggatctgttggagcggaatattaagacggagacgggggagacgcgcaaggaacaggagcgtannnnnnnnnnnnnnnnnnnnnnnngggagaggaagacccaggagccgccgcagcaaggccagggcctcagcctctcactcgccaacggcagtggcaggtctggaatgttgccgatgtcaaacatgtcagctaatccttcacagcttacaattttctatggcggatcagtatgtgtgtatgactcagtg

SEQ ID NO: 2811 - DNA, 272 bp, Zea mays
  misc_feature: Incyte ID No: 700346695H1
  unsure 264: a, t, c, g, or other
atccggagcagccgcagtcccaccgaccccgccgccggtcgccctccatctcctcgccgctgcctctcgtttctcttttcaataatcaagatgagccgtggtggtagtgccggtggtggtcaaagttctctgggttatctctttggaagcggtgagccccccaaaccagcagtggcaccagctgcaagtgctccacctgttgagaaaccatctgctgcaaagactgatgcggccaagcaggttgctgctggggttaccagccanaccaataa

SEQ ID NO: 2812 - DNA, 250 bp, Zea mays
  misc_feature: Incyte ID No: 700346701H1
  unsure 38, 89, 124, 151, 170, 173, 178, 201, 206, 208, 214-215, 217, 225, 229,: a, t, c, g, or other
ccacagccggaaaagagaaagcaggagcaccaattcgncgcatagccaagccaaggaaatggcgcactaccaccccgtgtccgcggacncttaccaagacctcgaggctggcttctccggccantcctcctcccctctgaaacccgcggcntcgccgaggcggcccggcngcntgttntgcgaaccctgcgacgagggcgnggaantncacggnngnagcataantcgncatctgttgcggtgcngtana

SEQ ID NO: 2813 - DNA, 320 bp, Zea mays
  misc_feature: Incyte ID No: 700346702H1
gcagaaacgagagggcaggagcagccgcagtcccggcgatcccgccgccggtcgccctcacacctcctcgtcactgccttcgtttctctttccaacaatcaagatgagccgtggcggtagcgcgggtggtggtcaaagttctctgggttacctctttggaagcggtgagccccccaaaccagcagtggcaccaccagctgtaagtgctccacctgctgctgcaggtgctccacctgctgagaaaccacctgctgcaaagcctgatggcaccagtcagattgctgctggggttaccagccaaaccaataactatcacaggg

SEQ ID NO: 2814 - DNA, 318 bp, Zea mays
  misc_feature: Incyte ID No: 700346703H1
gaggtcacatccaacgacctgagatccatggaccccaaggtctgcccagtcgaccaagcacgcgcctaccagcacgcgctcggaggcaccgacccctttggagccaatgcctcgaacgaaaacaggggcatacttattgtaaagctgcgtcgggggcaagaactaaggcttcgtgccatagctaggaaaggaattggcaaggaccatgccaaatggtcaccagctgctaccgtgactttcatgtatgagcctgacatacgtatcaatgaagaactaatggaaacattgacggtggaagagagaataagcttgattgag

SEQ ID NO: 2815 - DNA, 312 bp, Zea mays
  misc_feature: Incyte ID No: 700346704H1
gaagatatggggtcagcagtatcagtagttgaggctgctgctcacaaaggactgctacaatgtattgatactgttatgtctgaggttgaaagattgttgtcttcggaacagaaggctacagattatcgaacaccagatgatggagctgcaccagatcatcggccaactaatgcttgtataagaattgtagcctatctctctcgtgttcttgaggttgcattcagtgcccttgaaggcctcaacaaacagtcctttttgactgagctgggaaatcgcttgcataaggggctgcttaatcattggcagaagttc

SEQ ID NO: 2816 - DNA, 310 bp, Zea mays
  misc_feature: Incyte ID No: 700346707H1
  unsure 152: a, t, c, g, or other
aaaaactcctgcatgtgaccaaagatgctgtggccaagatttcaaatgaggcaaaccaatgcttaaatgttctattggcaaaatacaaccctttcacatgtcttgctattactgtacctttattggtcagtgatgatgagaagatgcttgtngtgtgtatcaactgcttgacaaagcttgttggacgcctttctcaagaggaattgattgttcaattgcctacatttctgccagcattatttgatgcttttaacaaccaaagtccagatgtccgaaagactgttgtgttctgtctggtggatatctacat

SEQ ID NO: 2817 - DNA, 307 bp, Zea mays
  misc_feature: Incyte ID No: 700346710H1
gaacaaccctgccttccttgccctgaggcagattgaagctgcaagggagatctcccacaccatttcggcctcagccaacaaggtgttcctggactccaacgacctgctgctcaacctccagcagctgaatgtatcgagcaagcagaagaaatgatgtcacaacgttatcccatttcttctgagtttgcagtcagtagtggatgcctttgtaccagacattgtgaggaacgctcggttttggatgtagtttcgccaatcttcctgttatgtggaacttgcgagtatttgctcaaaggcaagcaagctg

SEQ ID NO: 2818 - DNA, 298 bp, Zea mays
  misc_feature: Incyte ID No: 700346712H1
  unsure 49: a, t, c, g, or other
aatagttgatcttgattctcgtcttggcaagactcaggtggtgaccccnattgcaccattgaatcagcaggctggatactactgttctgtatgtgaatgtgttgtcaaaggttcagccaactatttggatcatataaatggcaagaagcatcagagagcactgggcatgtctatgcgtgttgaaagggcatcacttgaacaggtccagaaaaggtttgaggcacttaagaaaaggaaggatccaagtgcctttactgaagaagatttggatgagagaataatgaaacaacagcaagag

SEQ ID NO: 2819 - DNA, 310 bp, Zea mays
  misc_feature: Incyte ID No: 700346713H1
  unsure 2, 8, 10, 12, 30, 133, 189, 191: a, t, c, g, or other
tntttggnancnctggtttgttcgataganagttgatcttgaactaagtggagttccttttcatctttaagttcctcaatttcaaatatgactttctatcgaacaaaccagggcttccaaatttgagaatganatttcagatattcaacaacgactacagaagatggataccctagaaaaggagattgncntcacttcgctatgaactggacagcactgtatccgaagaagaatcttcaagtggcaacgagttgcaccgcagtcggggcttttggaggtggaatgggtgaactcctcgagactcaaggag

SEQ ID NO: 2820 - DNA, 312 bp, Zea mays
  misc_feature: Incyte ID No: 700346714H1
  unsure 138: a, t, c, g, or other
ccataaacaagaaaaagaaaagaaaacccctgttgccagcgacagaagaagaaggggccccttctccttggttgcgttgcgcctccctcctgtctgcgtgcgtgcaatcgacgcagaggcgcgggcgctcgcaccacnacaaccacgacccgatggctttcatgcgctcccgctcaaatgcatcttctggcatgggagttgctcctaacattagggagacattcgttgagcttcaaatgaagaaggcattccgatatgttatcttcaaaatcgaagagaagcaaaagcaggtggttgtggagaagacagggg

SEQ ID NO: 2821 - DNA, 315 bp, Zea mays
  misc_feature: Incyte ID No: 700346717H1
ctgctgaaaaaggttaactttatctctggggctaagcttcaattcggcatctgcccattcttcagtcttaatgtcattgccgccgagtacaacagtgactcaccggtgcatgcacaccaaggatgtcatcactaccagcaccatcaacgactacaatagtgaagagttagtcttctactctacacgggagtaccacaccaaccaaaatggctcattgttgccaccaaacagaatgtatagcctattatgtctggcacttagggactcgatagctttaagggcaagttatgcactcaagtgactatcatagggaag

SEQ ID NO: 2822 - DNA, 306 bp, Zea mays
  misc_feature: Incyte ID No: 700346720H1
  unsure 190: a, t, c, g, or other
ccaaaaatttggactgagaattggccaggatggttccagacttttggtgaaagtaatccccacagaccacctcgaagatgttgcattcgctgttgcacgttttttcgagaaaggtggcagtgttcaaaattactatgtgtatcatggtggcacaaattttggtcgcactactggggggccattcattacnactagctacgactatgatgcaccaattgatgaatatggacttcggagatttccgaagtgggcacatctgagggaacttcacaaatctataagattgtgtgagcacaccctgcttta

SEQ ID NO: 2823 - DNA, 304 bp, Zea mays
  misc_feature: Incyte ID No: 700346721H1
ccagtctcccatccctgaaaacctcacaaaaccctcgtttgctccccaccaccccgccgcgccgccgcctgtaccagctgcgtcaagatgagtcggcaccctgaggtgaagtgggctcagaggatcgacaaggtttacatcactgtacagttacctgacgcaaaggatgctaaggtcaatttggatccagatggtgtcttcacattctctggcagcgctggtacaaacttgtatgaattgaaactagatctgaatgacaaagtaaacgttgaggctagcaaaataagtgtgggggtcaggtcca

SEQ ID NO: 2824 - DNA, 304 bp, Zea mays
  misc_feature: Incyte ID No: 700346722H1
atgcttctgaacaaaaggatactattgtgctacctaaactacaaggagagcctctggtacccaaaagtagtgctggtaaaaaaagtgggcgcatcttgcgagctgtcatttttgtgcatggttttcagggccaccatttggatttacgtcttgttagaaaccaatggcttctattggaccctggagctgattgcctaatgtctgaggctaatgaagataaaacatctggagacttcaaagaaatgggtagtaggttggccggggaggtaattaccttcctgaagaagaaaatggataagctttc

SEQ ID NO: 2825 - DNA, 236 bp, Zea mays
  misc_feature: Incyte ID No: 700346723H1
  unsure 181: a, t, c, g, or other
cggagggacttttgctcgctggacaagtacgtgtgggcgttcgtgaacaacaagccgctgtcgccgagctacaagtacagccggaagatcccggtgaagacgtccaagtcggagtccatcagcaaggacatggtccggcgcggcttccgcttcgtcggacccactgtcatccactccttcncggaggcggtcgggctcaccaacgaccacctcgtctcgtgcccgcgccaccgcgt

SEQ ID NO: 2826 - DNA, 300 bp, Zea mays
  misc_feature: Incyte ID No: 700346724H1
gcctggaactggtagttcttccccaggttctgtcaagagaaaaacaactattcttggtcaaaagaataaaagattacggatggataatgaggaatcaatggagttgaagataacatgggaggaagctcaagaattgcttcgccctcctcctaaggccccatccattgttattgttgatggccatgagtttgaggaatatgaggagccaccggtacttggaaggaagacttattttgtagcagataaatcaggttcgaaccatcaatgggcccaatgtgaagattgttccaaatggaggaa

SEQ ID NO: 2827 - DNA, 300 bp, Zea mays
  misc_feature: Incyte ID No: 700346725H1
cttcgctcccgctccagatcaatttctccaagaaggggacgaaggcctccattgaggcgtggtaggtcagactcatcatattctcgatcacctactccaccaccaagaaaggggccaaggagggtatcaaggagccgcagccctagaaagcctcctagagcaggaagaagcgtctccagtgacagccgcagcagcagttcaccttcccctagacgcggcaggtagaaagaacccgtggcattgtgtatgcggcaggtaaagccttttatcccttgactctatctgtatcgtttgcctgtg

SEQ ID NO: 2828 - DNA, 300 bp, Zea mays
  misc_feature: Incyte ID No: 700346726H1
  unsure 6, 12, 43, 71, 76, 120, 144, 182, 186, 189, 198-199, 217, 237, 256, 267,: a, t, c, g, or other
gcagtnttcgcnatcatagctggcttcgtccactgattcccantattctcaggctataccctaaatgacanatgancaaaagcccactttgccattatatttgtaggtgtaaacataacntttgtccctcaacacttcctaggnttagcggggatacctcgtcgttactctgattatccagntgcntanaccacatgnnatacagtctcctctatangctcattcatctcacttacngccgtccttgtaatgatcntcatgatttgngaagccttcgcatcanaacgagaagtactctcc

SEQ ID NO: 2829 - DNA, 305 bp, Zea mays
  misc_feature: Incyte ID No: 700346729H1
  unsure 117, 267: a, t, c, g, or other
aagcagtacagaagacaatgctgctgaaccagtagtcgcaaagcgtggagctcaacagaagaaagcacccaaaaaggctcccgtggacgaagaggaagttgatatgccttcactganagaccgtcttgctgcctttaatataaatgactcatctcctcctgatcactctgctatggaaactgaaacaacagaacagccggctcagaagaaagggagaggaaagaagcctgccgccgccgctgtgaagccgaaggtccctgccgccangaaaagggcgccgactcaagggggcaaggcaacgcaga

SEQ ID NO: 2830 - DNA, 305 bp, Zea mays
  misc_feature: Incyte ID No: 700346730H1
  unsure 32, 69, 116, 130, 219, 221, 249, 287: a, t, c, g, or other
ttcttgtcgtggattcacttttgctacctggngcacctttgaaggatgcagagtcccagaaagatgttnggaagggtgataaatcaggggataagggaactgctgagaagtttgcnatatatcagaagcntcgttcttcgttggcagacactgttcagttcaggaggccagctgctccaacttccagtgtgaatgctgatattgtgggaacatccactncngcagtctgcatctctaccgaaacaagantcctcaacagctacatccaagagctatactttcagatnaagtgatagggtgcgtac

SEQ ID NO: 2831 - DNA, 126 bp, Zea mays
  misc_feature: Incyte ID No: 700346733H1
gattgaataagctgagtcagagcatacgagaattctcatgttgtacacttgtgttttatgaaccgcataaacactcacgacgataaaagaagcctgtttttcggagcgacagaagctcctgcgatc

SEQ ID NO: 2832 - DNA, 299 bp, Zea mays
  misc_feature: Incyte ID No: 700346736H1
gctatgatcaccaagataggctcactgcacgtgaagctatggcacatccctacttcctccaagtcagagctgtggagaacagtagaacgagaccacaataatcgttgtctacaccctcgaaatgaagttgttgctaatttctggaacatcataggctaaaaccgttcaataagcatctcgctccaggaatctgggccatgactccgtggcagtgaatcagatagtatgggtcgcatcatgtgggcaaccttggcagatgtttttattgttgtctttaatcttgggactactgtagcttt

SEQ ID NO: 2833 - DNA, 297 bp, Zea mays
  misc_feature: Incyte ID No: 700346737H1
  unsure 285: a, t, c, g, or other
gatcaacatgtcgcgttaggatatcttttatctttgaaagtataatgtgttacctaactacaaggtgatcttcgtctctattagctttatgataaaaaactaatgttataattagagtcaaatgttatcattaaatgcatatagataggactgtacttgtgttggactctaggcttaacctatgtatatatatgctagcattaggatctcatattataataagtattattttaggatgaccatctgattggtgtggctacgtcgagcgcccgctacatgactgcnacattctagtgg

SEQ ID NO: 2834 - DNA, 298 bp, Zea mays
  misc_feature: Incyte ID No: 700346739H1
  unsure 14, 76, 116, 263: a, t, c, g, or other
cggcggcatccgcngcctgctgcagcaggccaacaacacccccgaccgccgcaccatctgcggctgcctcaagaangtcgccaacggcgccaacgggagcggcacctacatcagcngcgccgccgcgctgcccagcaagtgcggcgtcgccctgccgtacaagatcagcaccaacgttaactgcaacacgattaattaagtgaggcgtcctgtgcgcgtcccgggcgaggaatgcatgcatggcgctggcggagagtaataanataatgctactggtattttaagctatatcgaggtg

SEQ ID NO: 2835 - DNA, 297 bp, Zea mays
  misc_feature: Incyte ID No: 700346740H1
  unsure 8, 143: a, t, c, g, or other
ccactgancagttctctcttctccctgctcacttacccacactctcacgttcctcagcatggccacctgcagccgtcagttccacctgcctccagctccatgaagagctcctgtggcatcggtggtggctctagccgcatgtnctccgtcctggctggaggatcctgccgggctcccagcacttatgggggcatgtcggtcacctcctctcgcttctcctctggggcagcctgtgggattggaggtggctatagtgggggcttcagcagcagcagttttggtggtggatttggtgga

SEQ ID NO: 2836 - DNA, 298 bp, Zea mays
  misc_feature: Incyte ID No: 700346742H1
  unsure 38, 84, 96-97, 101, 132, 146, 149, 176, 179, 209, 212, 214, 242, 256,: a, t, c, g, or other
aatgaagctcagtgccgcattgctgaggccgaaagggnatgcaaaatcacattagagaatgagaaaacgaagtgccatcaagantacttagactcnntcanaatactggaggagaagtggaaagtacatcancaatcacccaaganacnaaatgaagaggccgagtctacatccantgntaccagagaagtgcataacttactgcagantgngnaaatgctacgtcaatcggctgaagatgnggccagtgacctcnagnntcaagtatcncnctggaaaaaactggaggctncagctg

SEQ ID NO: 2837 - DNA, 293 bp, Zea mays
  misc_feature: Incyte ID No: 700346743H1
  unsure 51, 90, 153, 174, 256, 282, 287, 290: a, t, c, g, or other
ggaacaagaggatctcttgtggggtgctcgcaggcgcaactgccttctggntgctgtttgaggtcatggattaccacctcctcaccctgntatgccactgcctcatcctcaccctggccatcctgttcctctggtccaatgccacgactttcntcaacaagtctcctcctaacntccccgaggtgaagatcccagatgacctggctgtgaatgttgcacgttccctgagatatgagatcaacaggggttttgctanttgagggagattggccaaggcatganctcanggnatt

SEQ ID NO: 2838 - DNA, 296 bp, Zea mays
  misc_feature: Incyte ID No: 700346745H1
  unsure 25, 33, 45, 47, 49, 60, 64, 66, 89, 91-92, 94, 99, 118, 127, 133, 165,: a, t, c, g, or other
ggagtagtggtaggaaaagctcgtngccgagtngccgtacggggncncngctcgggtgancgancngcggccggcgggtactgaaggcntnngngcgangcgatgggccgcctccgtnactggcganccttcntccaccgcgcgcttgtcctctcgtcgctgctncntctcgcctccggcgaaatcttcttcnaggaacggntcgatgatgggtgggatagccgctgggtgaaatctgattggnagaagatccaaggacaagctggaancttccgnnncacagctggaactactct

SEQ ID NO: 2839 - DNA, 278 bp, Zea mays
  misc_feature: Incyte ID No: 700346748H1
  unsure 41, 193, 219, 265, 270, 272, 274, 277: a, t, c, g, or other
agtggtttccaaagccaagtgtgtgtactagcaaccagctncgctgcgggcggcagcaggcagccatcatgtcggaggagaagcaccaccacttcttcaaccaccacaagaaggacgaggagcagcccgccggcgagtacgggtactccgagaccgaggtggtcaccgccaccggcgagggcgagtacgagangtacaagaaggaggagaaggagcacnagcacaaagcagcacttcggcgaggcggcgcctcggcgccggggcnttcgnantnaang

SEQ ID NO: 2840 - DNA, 360 bp, Zea mays
  misc_feature: Incyte ID No: 700346754H1
  unsure 3, 11, 40, 46, 50, 63, 92, 120, 166, 185-187, 192, 197, 204, 208-209,: a, t, c, g, or other
cangggtggcnacgcacaaagaaggatcttgatgcagatnatatanagantataggaaattgntgagccttgctatggctgggaaaaattcncagagaaggtcgagatgtcgatatgtangaaaaggggtgaataccgaggtctgtgccctttctaggtcaagatnggatgcaggctttggcagnnngtacnggagntcaagcnagannccatgaatggattgttctgggtancgantanaggattgnaaagggcctggttagtnacagcngccctntcccagnaattgtgnanaaangagttgagganaccngancgtangcttgggaangttgncanantcagagagnccntgtccnc

SEQ ID NO: 2841 - DNA, 141 bp, Zea mays
  misc_feature: Incyte ID No: 700346759H1
  unsure 12, 25, 39, 46, 68-69, 72, 98, 124, 135-136: a, t, c, g, or other
ctcgcttcttanttttcggaagtangtagtattcctcgnagtggtntttttactttgtaatatagaannaantaaagtggggttgttgaaacttgagngtcagattccgagacgttatgcacgntttgatttctnnattaa

SEQ ID NO: 2842 - DNA, 290 bp, Zea mays
  misc_feature: Incyte ID No: 700346760H1
  unsure 14, 65, 85, 89, 111, 119, 124, 152, 173, 176, 194, 202, 211, 275: a, t, c, g, or other
cagggcttctccgnctcgcacgacggcgccgtcaccgtcagcctgggcccctccggcgcgctggnctactcggcggccaaccagngccncctcgtgccaaggttgtttggngctgtgantgacntcttctgcttgttccaatggcacattgngaacattgccaacctgaagcngcnttatggcctgagcaagantgcaaatnaggtgactntcctcatagaggcctacatgaccctgagggacaggggccctgtcccagccagccaggttgtganagaccttagtgggaa

SEQ ID NO: 2843 - DNA, 293 bp, Zea mays
  misc_feature: Incyte ID No: 700346761H1
  unsure 5, 40, 56, 63, 74-75, 78-79, 88, 92, 99, 105, 120, 134, 142, 149,: a, t, c, g, or other
gctcnctccctcctcctcctcgtcgcctcttctctggttnttcctggtgtttgccngagcgangctaggcgcannggnngggatgctncgcncagccanagctcntcggcgctacgcaancgcgctggcctggngtgctgcnttgccgnactatcaggggaaaacactganntaatggaaatcagcttattgcatnatgnatctgatgcnggaagcaccagtttgctaccgntgncnttgttgncatntggtccaagatcaattgttccnntacaagtaccaccatcatcnga

SEQ ID NO: 2844 - DNA, 226 bp, Zea mays
  misc_feature: Incyte ID No: 700346764H1
aaaaaaaacagttgaaaggaaacaatgccttgttggcaaggaatgtgtttttataagatttttgttttgcaccgagagacacgtacagattctcctcttgagatgtccgaatctggttattgtggctattgtgaatactctgcatagcctcatcgtcaatcgtcatccaggttgagaacttgtaaaccgtatttgattttgtttatgaatgtatgtgctcttcttt

SEQ ID NO: 2845 - DNA, 283 bp, Zea mays
  misc_feature: Incyte ID No: 700346771H1
  unsure 43, 51, 67, 76, 149, 164, 166, 176, 189-190, 193, 195, 203-204, 221,: a, t, c, g, or other
agaacagttgttatgacgcctgagtttagtcaacgtggcagangttcaagnagtagacctctaagcnacaggtttnataaccgtgatggtttccaatctggtcgaggccgtggccagttccagagctgggggagaggccgtggtcagtnccagagccggggganangccgtgcccngttccagggacgnnggngntgcaggannccttagaagactgcagntgnnctggatnaagncctggaaagctatcacgcggaggcaatgaaaaccgnttnattgcaag

SEQ ID NO: 2846 - DNA, 282 bp, Zea mays
  misc_feature: Incyte ID No: 700346773H1
  unsure 56, 84, 88-89, 96, 106, 151, 182, 198, 221, 239, 245, 253, 275: a, t, c, g, or other
tgtaatcatttgttaagtaataaaaaagaggagaaggcagtatctcataaggttanattatgtgtcttggcctttacatttatncacnntttatcntagatgttgnttacatttccttgactcatttcttacatcttcatacttttaaccnaccttatcttcgaagaggaggaactaaaggntgaagattaagcttgntctaattgtgttgcctgtttttnatatcctgaatgaatcanaaatgngtgaccancattggcgcccacatccagtgnactcaaa

SEQ ID NO: 2847 - DNA, 286 bp, Zea mays
  misc_feature: Incyte ID No: 700346776H1
  unsure 26, 29, 61-62, 92, 98, 128, 142, 182, 202, 226, 233, 237, 259, 282: a, t, c, g, or other
ggtggaaggattgagaagcgcaaagnggntctcagcagtggcgtccaaatggcgcataagnncaagttagttttcttggagggatgcagttncaactntgacttggaggacttgctgagagcttctgntgaagttctcgggnaagggagctatggaactgcctacaaggctatactcgaggntggctctactgtggtagtcnagaggctaaaggatgtcgtggcanggaaganagantttgagcagcagatggagctcntagggagggtaggtaaacatgcnaaca

SEQ ID NO: 2848 - DNA, 284 bp, Zea mays
  misc_feature: Incyte ID No: 700346777H1
  unsure 71, 269: a, t, c, g, or other
cactcttagatctacattgcacactagaggaatttgctatggctgtctacttgttcatatatcaagtttgnacttccaatgctgctgtattctttaaccatggttggcttgatcttttaaagtctgtggctacttgttataaactaaggtgtttttttaacaacggtctttcatttcataatgtgattgatttactgtttttggcaggaaagagaatatgctctgaggtccttcaagagtgggcaaactcctattttagttgcaactgntgtggcagctcgggg

SEQ ID NO: 2849 - DNA, 284 bp, Zea mays
  misc_feature: Incyte ID No: 700346778H1
  unsure 3, 6, 17, 92, 149, 185, 211, 266: a, t, c, g, or other
gantcntgcaattatcnttcccgatgctgatagagatgctacattgaatgcccttattgctgctggatttggtgcagcagggcaaaggtgcntggcattgagcactgctgtttttgttggcggttcagaatcatgggaggatgaattantcaaacgtgcaagtggccttgttgttagttcaggantggttaatgatgcagaccttggtccngtgatcagccgacagcaaaggatcgtatctgtaaattagttcaaagtggtgttgncagtggtgctcgtatatt

SEQ ID NO: 2850 - DNA, 286 bp, Zea mays
  misc_feature: Incyte ID No: 700346779H1
agcgtcttcaacatataataaaatctgaggggctcagtgtagatgacggtggcttgacagccctagtgcggttaagcaatggtgatatgaggaaggctttgaatatattgcagtcaacgcacatggcatcccaacaaatcacagaagaagctgtctatctttgcacaggaaaccccatgccaaaagatatcgagcagatagcttttggctattaaatgaaccattttcaaccagcttcaaatatatatctgacatgaagatgagaaaagggtggcctggttgatat

SEQ ID NO: 2851 - DNA, 275 bp, Zea mays
  misc_feature: Incyte ID No: 700346785H1
  unsure 4, 8-9, 36, 52, 90-91, 104, 158, 224: a, t, c, g, or other
tggncttnnagtccttgcaaggatcaaaggttatgntgatgcagctcaagcnccggagctttttacaaccactccagcacttgcaatacnnaaggctatcgcanatgctggattagagtcatcccgtgttgatttctatgagattaatgaagcctttncggctgttgcgcttgcaaatcaaaagcttcttggaattccttcagaaaagattagtgttcatggangagctgtatctttaggacatcctctcgggtgcagtggtgctcgcatttttg

SEQ ID NO: 2852 - DNA, 277 bp, Zea mays
  misc_feature: Incyte ID No: 700346790H1
  unsure 10, 21, 24, 113, 128, 171, 207, 229, 236, 244, 269, 275: a, t, c, g, or other
ccgagaaganaccaggccganggnaaacaatcctgaaaccaagccatgggtctgcaggaggaatttgaggagcatggctgataaggcaaagaccttgcctgagaacacgagcnatgagaacaagctgntcctatacgggctctacaagcaagccacggttggagatgtgantaccgatcgtccgggcatattctaccaaaaggacanggccaagtgggatgcctggaangctgttnaaggcaantcgaaggatgaggcgatgaatgacnacatcncc

SEQ ID NO: 2853 - DNA, 276 bp, Zea mays
  misc_feature: Incyte ID No: 700346792H1
  unsure 6, 12, 14, 18, 28, 30, 34, 38, 50, 74, 108, 115, 118, 120, 131, 133,: a, t, c, g, or other
tctccncctctncncccncacccgtccntntccnctcnctccggtctgcnctcccacagcctcacccctgcgcncccgccgattcgcgtcgccctttgttggaaggancgatggngcngnccttcatcatnancaagcccgacngcgtccancggggcctgatcggggncatcntcagtcgcttcgagaagaaagggttctacctcnatgggntgnagttcatgnacgtggannggtccttcgcncannagcnctacgctgacctttccnanaagc

SEQ ID NO: 2854 - DNA, 88 bp, Zea mays
  misc_feature: Incyte ID No: 700346793H1
  unsure 6, 14, 44, 50, 52, 54, 58, 76: a, t, c, g, or other
caagcngtccttcnagtatgcttggggtgctcgacaatctcaangcttancntnatangggtatcaccattggatnttgctgctgttg

SEQ ID NO: 2855 - DNA, 283 bp, Zea mays
  misc_feature: Incyte ID No: 700346794H1
  unsure 48: a, t, c, g, or other
gctacaccaccacacccacaccccatcccagcacacaacaagcagccnggtttacggtagctgctagcaaaacaatggagaaccctgctccgagcatcgtagtggccatcgccgcacccgtggcggcggagttcgtgaaactcaccttccgtgccctgtatatgcgccgggctggtcctggcagcagggagatgactgtgccgggaaggccatccgaccagctgggcaggagagtcgtcactgacagccccgtgtacgacggccgtggcgccgacgcccgcct

SEQ ID NO: 2856 - DNA, 285 bp, Zea mays
  misc_feature: Incyte ID No: 700346795H1
  unsure 40, 154, 195, 197, 238, 243, 258, 268, 272, 284: a, t, c, g, or other
ctttcgttcctcctcgccccagcgacgcggcctcccgtanaccgagcaaggcaacccaccactgagaggcacgcagaggagcaggaagccggagaccaagatgtcgtcggtgttcagcggcgatgagacggcccccttcttcggtttcctcggngccgccgccgccctcgtcttctcatgcatgggcgcacgtancnggaccgcgaagagcggcgtcggcgtggcgtcgataggtgtnatgcngccggagtcgtcatnaagtccatcntgcncgtggtcatggnt

SEQ ID NO: 2857 - DNA, 64 bp, Zea mays
  misc_feature: Incyte ID No: 700346796H1
  unsure 30, 34-35, 60-61, 63: a, t, c, g, or other
gaaagttctgaagacaaagggtccaatcanaganntatcttggtggtgagcgatttcgannana

SEQ ID NO: 2858 - DNA, 299 bp, Zea mays
  misc_feature: Incyte ID No: 700346801H1
  unsure 63, 65, 68: a, t, c, g, or other
caaggaggctgcttacaagcagctgcggtcgcacatcatcatcatggcctcctgcgccgccgncntcngcgccaccccttacatcctccatttcctcgcccgcgacggcgacatccaggaactcaagctagatctgtaggcccgtccgttgcttccccacctccagaggtgctacaaaggcaaccgttagttcgagcccactgcaaggtactatggagttagtggctatagtgcctgcttaagtttttttgttgttccaagtttagtgacaaactgacaatggtgtagcaactggcctg

SEQ ID NO: 2859 - DNA, 292 bp, Zea mays
  misc_feature: Incyte ID No: 700346802H1
  unsure 38, 57, 67, 134, 178, 185, 244, 246, 253, 255-258, 263, 267, 272, 287,: a, t, c, g, or other
cagggactgtacttctggatccttcacctatgggtgcnttcgccagctgggtgcctnccagtctgancctgttccccccagcaggctcttcagctgctccaatccagctatggttcccaaatgacattgccccncctctcactcggacccatctttgctgctgtcgttcttgtccttntcaccantcctgaggaccaagtgtaagcactcccctccatacaggcccctgtgacctctttccacncnacatacnannnngaacncggngaggngggcggtggcggtgnggnag

SEQ ID NO: 2860 - DNA, 290 bp, Zea mays
  misc_feature: Incyte ID No: 700346803H1
tacagatatgctggttatgggaaaaggtaaaatcaacagaagacagagattttcaaagattcctggacaacgtgcaatacaaaacaagtgggatattacgttacgagcgtgtctttggtgaaggttttgtgagcactggtggaatcgagacaacaaaggaatttgtgggcatgctcgatcttaaaccgggccagaaagtacttgatgtcggatgtggaattggaggcggcgacttttacatggctgcaaactatgatgtccatgttcttggtattgatcttcggtgaaca

SEQ ID NO: 2861 - DNA, 180 bp, Zea mays
  misc_feature: Incyte ID No: 700346804H1
  unsure 32, 37, 65, 84, 100, 125, 144, 146, 150, 152, 156, 164, 171-173, 179-180: a, t, c, g, or other
gcgattgaagcagaaaaaatcagtcgccgtancagtnccgcctccgccgccgtggggaggtagcntctaggcccattccgccgnctccatctccggccancaatggcttcggcggtggagcggcngagggaggagcacgcgcgnanatcncnttcnccagcacngggcagnnngcggann

SEQ ID NO: 2862 - DNA, 290 bp, Zea mays
  misc_feature: Incyte ID No: 700346805H1
attacaatgcaattgggtgatgagcattaccttatcaatgctctacttgctatccaacaagaagtcgaggcgatggagcaggataggtctactagtgacgctgagatggaggggaccgaggaagaactgaaagctattggagcccgtcgacataaaatcttttagcaccccttcctcccatgaattgtaagagcctagtgacgctgactcatacgactcggttaggcctactaggtataacatttggaacctgtaactagtataacatttggaacctgtaaggaagcctg

SEQ ID NO: 2863 - DNA, 290 bp, Zea mays
  misc_feature: Incyte ID No: 700346806H1
gtgtgtgtgtgtgtttagtttgtcctcatttctgtagagtcctggattccgttgtctgttattgtcccctcaactgtgttgttgtaaacaacggcatgtactgaaagagctgcgcctgaccggataagccctctgcaggtatcattggaatctaagaatttttccctgtgcttctggaaaccaaagttgtttatcacttttatagctatgaaagagaaatagctgaaccacaacatgtgtctgtgcctcctttgtcatagctataaaagtgataaacaactgtgcttctg

SEQ ID NO: 2864 - DNA, 289 bp, Zea mays
  misc_feature: Incyte ID No: 700346807H1
cagtgacaaactcgaagcttgccttcttgtttacaccctaaaactaaaactagagtcgtcggcggcaacaagcggtacgtacgtagaggatgaagagcaggagcagcactctgttggtgatcctagttctccaggcccttctgctctctgcggctgtggccaaaggacctgcagggccgaagaagcagtgctggtgcggcgagtgcaccagctggtcgggcgtgtggacctgcgacgacctcctcaccaagtgcgccgccacctgcaagaactgcgtccccgtgtccac

SEQ ID NO: 2865 - DNA, 270 bp, Zea mays
  misc_feature: Incyte ID No: 700346808H1
  unsure 21, 39: a, t, c, g, or other
gtaccgataatcacgaggaanctgagcagaacaaagacnattgttgcagacaccacttcacacaagataagtgctgtacaaagcatgggtagtactgaagaaaaggaacatattgaagatttcattgcgaaactggcttctgaagagatcattgttacaagtaacagagatattgtcgagcagcaggatgagactgatatgaaaacaaactatgaaatagacagggcacgcaacttagaagctactgaagaaattgctgctggtggtgag

SEQ ID NO: 2866 - DNA, 289 bp, Zea mays
  misc_feature: Incyte ID No: 700346809H1
ggtggagatacttggccatactgattcctccatacaagttcagcttctaaggaaggtcgatggttataagatggtatttatgtcatacagagcagagggttctgtgatgacaataaggaacgatgagtaccccaagttctctcaccagattccttgctttcgtctcacacatgaaaaaggtggcaagcttcgaggctatttggagcttgaccccttatcagtaccagaggaatttctcgactgattccatctgagataaactttatcaaccacaaatctggaaccttct

SEQ ID NO: 2867 - DNA, 287 bp, Zea mays
  misc_feature: Incyte ID No: 700346810H1
atttaataggctcacccaaaggtatcaaagtttcgcaacaggtaattccctcttttttatagtttagaagggctatatgaaggtgcgtgtgtataattctgcattttgtttatttttgtgatgagctagctatttatattttgtcctgctgttcaacaacatatcaaaccaatagcactgtgatgagctagttgtttgtttttgtcctgctaatcaacaacataccaaaccaatagcatttgttcttaatttcttgattagtagttctcacaatagagtatacttct

SEQ ID NO: 2868 - DNA, 282 bp, Zea mays
  misc_feature: Incyte ID No: 700346813H1
  unsure 88, 210-232: a, t, c, g, or other
aggatcctgacgggcaggaggaaggaggccatggccaaacagcaggtggtgctgagttcttagctgaccgaaagaatggaggttttgnacatggcaagtcatcgtttcatgtgtagatggagtttgttcgtttgtgtgtggagccatgttcatgtgaggttagtaataaagtcgcaggctgctgcgtagatgatgtatgtattagtgtgnnnnnnnnnnnnnnnnnnnnnnngtagcgctctgtcatgaactcatgaccctgttttctgaagactacctcct

SEQ ID NO: 2869 - DNA, 283 bp, Zea mays
  misc_feature: Incyte ID No: 700346814H1
gctgaggataaagtttcggtggagggatagactttggattggggacccggctgatgtcgttcttgatgatgcccatttattgacggaggcttctaatggcttttgacctttttgttcataggcttgtggtattcttttgaccccatatctcatttcttgcacccatccattttgcagcatttcaaatttagcaaaatctcaacctgcagtggagttgcaagttgcacatagttatcatcgcataggcatgcatggcagggtgtatttcttgttgataaccggg

SEQ ID NO: 2870 - DNA, 285 bp, Zea mays
  misc_feature: Incyte ID No: 700346815H1
  unsure 84: a, t, c, g, or other
gcgaggtgctggcggtgctgctggacaggttctttgacatggagtatgctgagtgcgtgaaggcttttgaggcttatgcaagtnctgcaaagcagatcgatgagctctgtgcattctatgcatggtgtaaagataccggagttgcaaggtcatctgagtacccagaggtgcagcgtgtcaccgataagttgctggagacgctggaagaatttatgagggaccgggcaaagaggcccaagagcccatcaccggagcctgaacctgagcctgtcaaggaagaacctg

SEQ ID NO: 2871 - DNA, 288 bp, Zea mays
  misc_feature: Incyte ID No: 700346816H1
gggacataaatcctccagcagggattaggcaggctatggagatgcaggctgaggcagaaaggaaaaaacgcgctcaaatccttgagtcagaagggatgaaacaggcccaaatccttgaatcagaagggaaaaagactgcccagatccttgaatctgaaggagctatgttggatctagcaaaccgtgccaagggtgcggctgaagcaattcttgccaagtcagaagctactgctcgtggaatgagattggtttcagatgcgatgacaactgaaggcagtgccaaggctg

SEQ ID NO: 2872 - DNA, 280 bp, Zea mays
  misc_feature: Incyte ID No: 700346817H1
ctccgccacctcgccactcgcctcttctcgctctcgccaccgggccagggaagggaccatccgatcggctccgtcatggctggagctgctgctctcaatgagggtatcctttcttccgtgtccgagaaaaatgttgctgctcacccatggcatgatttggagataggaccagaggctcctgaagtgttcaattgtgtggttgagattcctagaggcagcaaggttaagtatgagttggacaagatatctggtctgatcaaggtggatcgtgtcctttact

SEQ ID NO: 2873 - DNA, 285 bp, Zea mays
  misc_feature: Incyte ID No: 700346819H1
  unsure 28, 63-64, 97, 177: a, t, c, g, or other
acgagatcgccccctaccaccatggcgngcgccgtgtcgggctcttcctgctggacattaagnnccgcgtcctgcgtctggcgcgactatcgtggtnatgtctccgcgctccaggccgagcgcttcttcaccaagctcctcgacaaggagggcgactcggaagtccactcgcctgtngtctacgacgacgccggcgtcacgtacatgttcatccagcacaacaatgtcttcctcctcaccgctgctcgccagaactgcaacgcggccagcatcctcctcttcctc

SEQ ID NO: 2874 - DNA, 285 bp, Zea mays
  misc_feature: Incyte ID No: 700346820H1
gacccactaaccgtcttgaaggcacgcatcaacaactcgggcaaagccagcgtcctgatccagcatgagtggaggccaaagtcgctggtcaccatctcggctgaggtcgatacaaagaccattgagaagagctcgaaggttggaattgctgtggccctcaagccctgattgattatcaagactattttttcttctaaggtcctagcatgactgtttgggtcatatcaggtcagctggggaaaacaaaactgttggggttaccggcatcttttggtcgttgcagtc

SEQ ID NO: 2875 - DNA, 286 bp, Zea mays
  misc_feature: Incyte ID No: 700346821H1
gctggcatggtgacaggaacaagtcccttttatccatatttccagtttgggcaatcaggaaacactactaccaactatacaagtggacaaggctacaacttgcaatacccacaaatgttccacttctcaactgtatcatctacagctgcagctgtgaacggctttgctcagcagtatggaggaccattgtcactagcagcaagtcctcaagcccaagcagtgtgtatccccattaaacaggcatgactatggcactcgcagctccaaccatgccaactccaacaca

SEQ ID NO: 2876 - DNA, 283 bp, Zea mays
  misc_feature: Incyte ID No: 700346822H1
gagctgttcagatgactggagttcacattcatcttctgctggcaacccagacataccgtatgtggttgtctccaagtcatcaattgtgactgctgtatgcaaggagattcttggctgctacaggaagttacttggcattcctgatctgttgaatcaaccaaacatgtcaattctgaagcaacttttgcagactttacagccaactgaaaattttgatgatgttctttccgagttccaaccatctcttgctccttgcaatgttgattacctgtattgtggagca

SEQ ID NO: 2877 - DNA, 287 bp, Zea mays
  misc_feature: Incyte ID No: 700346823H1
  unsure 71, 73, 87, 91, 93, 97, 101, 116, 119, 130, 133, 185: a, t, c, g, or other
tactaagacaccagacatcacatccattgctcccattcccactattgctgaaggcgatgagtctgtatttntnaactgccaattcanacancncganggtncctcctgttcctggngancaatgctgttnatnctcactgatgggctgacagatttggaatcctatatgaggtttcttatggatngcggtgcaagtgattcaattgatagccttctgaaccttgatggatcacaggatcttggtagcaatatggacctctggaccttcgatgacatgcccatcgctg

SEQ ID NO: 2878 - DNA, 283 bp, Zea mays
  misc_feature: Incyte ID No: 700346824H1
  unsure 127-128, 131: a, t, c, g, or other
gaggataagaagtgtaaaggtgaatctagattcccagcgcaggtgaggatctgcattaggaagctgtgcaagccgttggaagaggattccttcaggccagttttgcaccattatgatgggccaccgnnggnccttgagctctccatcgcggagacattgtcactgctagacctatgcgggaaggaaggcatctgagctgtcgaggaggtggtggtggttgccttgtgagcttctagtaaataccaatcatctttgtatgttttgtggatggtggttggcaacg

SEQ ID NO: 2879 - DNA, 285 bp, Zea mays
  misc_feature: Incyte ID No: 700346825H1
  unsure 157-181, 190: a, t, c, g, or other
agccaacgcacacccagcgatcctcgtcgtgcgtcctcctcccccacggagggaaggatggcttggtccgaggacatggcggaagccgacgagatggagagcaggggtgtgcagagctcggctagcccgtgtcgccgccacaagcgggagattggannnnnnnnnnnnnnnnnnnnnnnnnagggctagnaccgtcccaccgccacaagcgagagatcggagatggcgaggacgcggaggcctcggcgtcgttgtcggcgtccgccgcagtcctccccgcggccg

SEQ ID NO: 2880 - DNA, 283 bp, Zea mays
  misc_feature: Incyte ID No: 700346826H1
  unsure 61: a, t, c, g, or other
tctctcttctcctcgcctcgccttggtgttcacgccgtcgctagcgcctgccgcggcgaantttctgccctccccggcgccaggctcgggtcgtcgtcggccaggcagctgctacgcgtgaacacggtcacaccagtacggcagtaccacgcgacgtgaacggtgaactcgtgaagaacagagccgccactgaggaaaccctagcgacggcggcgtgctaccggtgacattgtccccctcggcccctccatccctgacgcagcggcgccagctgcaggaagcc

SEQ ID NO: 2881 - DNA, 281 bp, Zea mays
  misc_feature: Incyte ID No: 700346827H1
ctcatcaagctcatggccgtggagtccctcgtgtttgcccccttctttgccacccagggtggcctgctcttcaagtacctgtaaaagggacaacaccaagcacacagcagaagtatacgatctcccgaccgaccgtggacaatatcgaataactcctgccaaatcgccagttccttttgtgtactgtgcgctagccgccgcctagctgcactgctgtatttttgtttcaggattgctgctgctgttcgcattcaatctttgggcctcccggagccgccgga

SEQ ID NO: 2882 - DNA, 280 bp, Zea mays
  misc_feature: Incyte ID No: 700346830H1
  unsure 35, 81, 83-84, 118, 157, 255: a, t, c, g, or other
aagtattccactttaagcttgtaagcctttataanaagacatgagtataaataactgactacttggaaccatttgaatttntnnaatctactgctcaagataactcttaccccaagtnttccttggctactatcagactcgcgacagattgcatgtnctttcgtgttatcttcagaacttcgacttgaggcatacagtgatcagaccagttgatttcactgattgaggacgtcttgaactttgatctggctcatntcacagatgaagagattgaacaaag

SEQ ID NO: 2883 - DNA, 281 bp, Zea mays
  misc_feature: Incyte ID No: 700346831H1
  unsure 55: a, t, c, g, or other
ggcgctcctagcccggcaggcagcgcaggcgctccgcgcgagacagtcggcgcantcgggccgacaacgtcgcgcatgcaggggcacctccgtacctacatgaacgcggggattcccaagcggttcaaagaggaagaggagaaagaacagcttgcaaaagatatcgcaaaagattggaatgctgtgtttgaaaggagcatcaatacattgtttttgactgaaatggtccgtggcttgatgctaactctcaagtacttcttcgagagaaacgttacaattaa

SEQ ID NO: 2884 - DNA, 281 bp, Zea mays
  misc_feature: Incyte ID No: 700346832H1
  unsure 27, 37, 62, 79, 90, 118, 120, 127, 129, 132: a, t, c, g, or other
aacctctcctcactcactccgtccgangcccttcgtnaccagcctccttcctcgcgccgacngccgggatccggcgccnccgtctacgcncgcctcggtctagatctctgagaaaatngngagaacngnaangtaggaggcatgtggctcatcggatcaagtccacccatcccattccttcataccgatggaaggcaaaggcaatgaaaaaatccaaccgaaagcaagtgttgccagccttgcaaaagatggatgggaagatgccaattgctctgtgtgca

SEQ ID NO: 2885 - DNA, 280 bp, Zea mays
  misc_feature: Incyte ID No: 700346834H1
cggttcttcacttatgaggaattgtatcagatcacaaattgcttctcatcacagaacctgctaggggaaggtgggttcggatcagtgtataagggttgcttggctgatggaagagaggttgcggttaagaaactgaaagatggcggcgggcagggggaacgtgagttccatgctgaggtggatattatcagtcgtgtgcatcatcgccatctagtttctcttgtggggtattgcattcagatgaccagagattgcttgtctacgattttgtgcccaacga

SEQ ID NO: 2886 - DNA, 280 bp, Zea mays
  misc_feature: Incyte ID No: 700346835H1
agaagacaaagattggcatcaacgggtttgggcggattggcaggttggtcctgcgaattgcaaccagcagagatgatattgaagttgtggctgtgaatgaccctttcattgatgctaagtacatggcctatatgttcaagtatgattccactcatggcccgtttaaaggttctattcgtgtcgtggatgattcaaccctcgagatcaatgggaagaaggtcacaattacaagcaaaagagatcctgcagagattccatggggtaactttggggctgaata

SEQ ID NO: 2887 - DNA, 279 bp, Zea mays
  misc_feature: Incyte ID No: 700346836H1
agtggggtctccaaaggttgaaagacttccctagaccattttggctagctctttttgttgagggtactcgctttactccagcaaagcttctcgcagctcaggagtatgcggcttcccagggcttaccagctcctagaaatgtacttattccacgtaccaagggatttgtatctgccgtaagtattatgcgagattttgttccagccatttacgatacaactgtaatagttcctaaagattcccctcaaccaacaatgctgcggattttgaaagggcaat

SEQ ID NO: 2888 - DNA, 278 bp, Zea mays
  misc_feature: Incyte ID No: 700346838H1
ggattccagagagcccctctcgggtagggaagggaaggagaggcgaacggaggcgagatgggggcggccgaatccgtgccggagacctccatacacgaattcaccgtcaaggattgcaacggcaaggaagtgagcctggaaacctacaaggggaaggtcctccttgttgttaacgtcgcctccaaatgtgggttcacggagaccaattacacgcagctgacggagctttatcagaagtacagggacaaagacttcgagatattggcattcccttgcaa

SEQ ID NO: 2889 - DNA, 280 bp, Zea mays
  misc_feature: Incyte ID No: 700346839H1
  unsure 94: a, t, c, g, or other
gtttagcgtccgactgctcgctccctgcccctccctctacctctctccctagggtttctaccacgcgcccgcttccgactagcagcgctaggtncgcctaactccgaccgaggggacaacgagggttttgggacggacggagggagatttgaaggaggcagcggagggccggagaccagaccatgaggccggtgttctgcggcaacttcgaccacgacacccgccagtacgacctcgagcgcctcttctccaagtacgggcccatcagccggatcgacat

SEQ ID NO: 2890 - DNA, 280 bp, Zea mays
  misc_feature: Incyte ID No: 700346840H1
  unsure 14: a, t, c, g, or other
aaagactggttgtntctagttgcagttcatagtgatgcatggctcctgtctgttgcattctattttggagctcgttttggatttgacaaagatgccaggagaaggctcttcaccatgattaacaacctgcccactgtttatgaagttgtgacgggggttgctaagaagcaatcgaaagcccccaacggcagcagcaaaagcagcaaacctaactctaaaccatcaaaactgaccaattctaacagtaagcccgcgaagccagcccacccaaaagaagagg

SEQ ID NO: 2891 - DNA, 278 bp, Zea mays
  misc_feature: Incyte ID No: 700346841H1
ggcttgtaaaattagcaagctgatgtagaggctaaaaacacttatggagtatgataaaagcttagagtcctcagagcacaggtcagagacagcgttttgggtgacagtcgacattggctcttaaagactcgctagcgcggttatttttcttgttctctcatcactgggtaagatctgtactcagctgtcgaagtcaattagccattgagcacgcccattaacaggtgaactcagagtggaaatccatctggatgtgattatcatgcatatttcaagat

SEQ ID NO: 2892 - DNA, 276 bp, Zea mays
  misc_feature: Incyte ID No: 700346842H1
  unsure 73: a, t, c, g, or other
gtgccggacaccgtcgtgttcgatgatttcgagaggttcgcacccacggcggccacagtgagctcgtcgctgntgcttgggatcactgggctcccagacactaagttcaagagtgcgatagatactgcactggcagatggtgagtgcaacgcactggagaaggctgaggacaggatgtcctgttacctcaccaaggctcttgcaaatgttggcgctgaactggctcatcaagtccctgggagagtttcgacggaaatagatgcccggttagcttat

SEQ ID NO: 2893 - DNA, 277 bp, Zea mays
  misc_feature: Incyte ID No: 700346843H1
  unsure 214: a, t, c, g, or other
gattgtagttggattaattcccaccccacaaccccccaccacaagaacttgttcgatcgaattcttcttcaactacccgccgcgggaacccaaggaaggaggcaaagcaaaggcttctcgcaggttcgcatcctccggaaccatccactcctctcatcccgctcggagtttgacctctcccgacctgagatccgattgaatcgggtttcccgtncagcggcttctgcggcgggcgccatgaacagcagcaagcaggcgctgatttacagcttcgtgg

SEQ ID NO: 2894 - DNA, 277 bp, Zea mays
  misc_feature: Incyte ID No: 700346845H1
  unsure 67, 103, 106, 178: a, t, c, g, or other
cccaccccgaccgacctaccctaatcggcgatggcgacggtggcgatggacatctcgaagcccactnccagtggcgtccggcgacgaggccgcggcggcggcnaangggaggagcggcggagggggcgaggggctgcggcagtactacctgcagcacatccacgacctgcagctccanatccggcagaagacccacaacctcaaccgtctcgaggcccagcgcaatgacctcaactcccgagttagaatgctcagggaagagttgcagttgcttcaa

SEQ ID NO: 2895 - DNA, 275 bp, Zea mays
  misc_feature: Incyte ID No: 700346847H1
  unsure 185-186: a, t, c, g, or other
gaacaccaacacaggctcctgttgccacagctgaaacggcacctccaagtgtccaacctcaggctgctccagctgctacggttgctgctactgatgatgctgatgtgtacagtcaggcagcttcaaaccttgtatctggcaacaatctagaacagactatccaacaaattcttgacatgggtggnngtacatgggaacgtgatactgttgtttgtgctctacgtgctgcatacaataaccccgagagagctatagactacctgtattctggaatt

SEQ ID NO: 2896 - DNA, 278 bp, Zea mays
  misc_feature: Incyte ID No: 700346848H1
agaggacacgtcgaatgctcggcatcacaaactagatgacgcacaagaagacactggaaccaacttggatgatgaggaagcagcagcgttgcaagagcaagtcaggcagataaaggcgcaggaggaagagtttgaaacattcaatcttaagattgtgcatagaaaaaacagaactggctttgaagaagacaaaaacttccatgttgttctcaattctgtcattgctgggcgttatcatgtatcagagtatttgggttcagctgcattcagcaaagcca

SEQ ID NO: 2897 - DNA, 278 bp, Zea mays
  misc_feature: Incyte ID No: 700346849H1
atggaaactacaggggtggtggatttggtccttataggagcgatacaggatttggtgctaggctcagcagctatggtggggtaggtgattttggtggtgcatatggtcgttactatgcaggattaggagggggatatggagccgcgtcttcgtttggttatcctggtcgctttgggttatatggaggaggttttggtggatcttatgctggtgctgacttaagtggctatagacgtggtggaggtgatgagacttcggcgcccctggtggtaatcctg

SEQ ID NO: 2898 - DNA, 280 bp, Zea mays
  misc_feature: Incyte ID No: 700346850H1
  unsure 17, 19, 27-28, 30, 63, 124-150, 192, 258, 261: a, t, c, g, or other
gggctggacccagccgncnccccgtcnncntcctgcttctgctctccgcttccgcttcctgcnccttccaggctccacttctccgcttcggcagtcggcactggaaggacagcatgtcggtctnnnnnnnnnnnnnnnnnnnnnnnnnnngcgatgagaagcaggaggcggcgcccgtcaggcgtgcaaggncgtcaacgacctcgacaaggtcgttctccgcgaggtccggggcagtccgcagaggtgtattgtatngtnggcatgtgacatcatggaa

SEQ ID NO: 2899 - DNA, 276 bp, Zea mays
  misc_feature: Incyte ID No: 700346851H1
  unsure 35, 46, 55, 57, 68, 73, 80, 84, 92, 96, 102-103, 135, 152, 155, 168,: a, t, c, g, or other
gcctccgctccgcctcagcgcatcgccctccgccncagcgtaccgngacctcatngntcaccttcaantttcnatcatgncggncgtcgatntcgnaccggnntttcacgccggcggctcccaagaagaggacgntccgcaagtacagctancgnggcgtcgacctanatgcgcttctcgacatgtccacggacgacctcgtccagctcttncccgcgcggnaangagaaagttncagaggggtctgnanatgtagcncataggatnanaaagaag

SEQ ID NO: 2900 - DNA, 276 bp, Zea mays
  misc_feature: Incyte ID No: 700346852H1
gcgacgacgacctcctcgcccacgcccaggcccaggccctgaagccgcaggcagtaacgccccgcccaagcttcggccgcccccgccccggccccgccgacgaccactccccaacgggagggaagaagttcctgagctacttccggtgttgtatcaaggcctgaagaggtgctgctctagtgcctgcagtccctgtgtttttttttcgcagcagaacacttgtgagcaatcaggcatcggttttgttaagtatccctccgtttctttttatttgtt

SEQ ID NO: 2901 - DNA, 273 bp, Zea mays
  misc_feature: Incyte ID No: 700346853H1
ccctgaaggcatgaacccccgttccaagcgccctataccgccgccatctcccgttcccctttcctttgttctctttcgtctgctgggcaaaccaacgccgccagccactggtcgatcacttccagccaaggagtggcggacgcgcagggcttggagtgtggcggacaggcggatcctgtagcggcagagacaggtacggacgagagaggtgagttctccgcacgatcggctgggacaggggaacgacgcgcgcaatgtgtggcctgggggggc

SEQ ID NO: 2902 - DNA, 273 bp, Zea mays
  misc_feature: Incyte ID No: 700346854H1
gttggatcgtaactaacgctagagaagcactccgaagacctgctctccttcgttctgtttgttgtttttcttctcccgtccgcagtccgcttggcgtgcgcgacggctagggcgaccgccgccgccctacgccctacgtccagctgcccatgtcttcttcgggccccttgccggcgggaactcaccagaccaggaatcgtgctggcaaccggcgcaagtctggagatagggctgataaagctaattactcctacaataatgatggagagaaga

SEQ ID NO: 2903 - DNA, 275 bp, Zea mays
  misc_feature: Incyte ID No: 700346855H1
  unsure 49: a, t, c, g, or other
gtgcgagccccttcggttactggtcgtccgcaggcggcaggcgaacccntctccctccctgcgatctcttagctacttcatggcaatggcagtcttaacttcctcgccgagccgcgcccgccctctccacacgagctccgctggcctacctcgtccctgcactcctgcactcgtcgtcgtcttgccgaaggagcttttgtcgccatccaccatgctgcgacacgccgagcgtcgtcattgttctcctcgccgtccgagctctgcccgagatatcg

SEQ ID NO: 2904 - DNA, 271 bp, Zea mays
  misc_feature: Incyte ID No: 700346858H1
  unsure 34, 71, 93, 155, 162, 164, 166, 168, 170-174: a, t, c, g, or other
gcccacggcccaagttgaacgcacaaaaccctantaccctatcccttgcccggttgcccctgcccagctgntgcctgctaagccgcagccgcntcgccctctcggacggtcggaactcggtcgacgacgagacgacggtccctctcgcggttgtntcctagncncncncnnnnncaagcaacttgccagctgcccagctgtgtctccagttccacttccacgcggctcctggctgcaagcactggcagtagcaggtgcagccgtgcagtgc

SEQ ID NO: 2905 - DNA, 240 bp, Zea mays
  misc_feature: Incyte ID No: 700346859H1
  unsure 10: a, t, c, g, or other
ccaagcgcanaggccgccgcagcacatcgctctcttgatctcagccatggcggaggtggagcagcaacaggacacgccgaagctcttcaaccgctggaccttcgatgatgtccaggtgaacgacatctcgctgaacgactacctcgctgtgaacgcgacgaagcacgcgatgtacctgccgcacaccgcggggcgctactccaagaagcggttccgcaaggcgcagtgcccgatcgttga

SEQ ID NO: 2906 - DNA, 272 bp, Zea mays
  misc_feature: Incyte ID No: 700346860H1
cagaaagagtccgtaaacaactcccggccatggcgaccgcagaccgggtcgccgccaccttcctctcctgctttccccactcaccatccccgccccttttcctccgtttccctcgtgacaaaccctgtcctacccgtctcccttcgggccgctgtcacaggtggcccacggctcgcctcccgtctccgggtccaccgcgtcggcgccgcgtcgcccagcttcccaccacgaatccggagtagcttctggggagaagaagatcagatggtcat

SEQ ID NO: 2907 - DNA, 274 bp, Zea mays
  misc_feature: Incyte ID No: 700346861H1
gatgactgcaaggttatggttgttgatgaggaggaagtacatgctgcaaggcgcttatatgcttttatatagcaggagaacagctcgtcctaggtcacttcttacagttgatgagtccgtgaaacagcaacaacagtgcaaatcgctcctttccaatgggcaaagccacatgatactagcagatacaacattgaactgtgaatcatctttgaagattccagaagatatgttacaacaggattgtgaatccaataatgaatccttgcatgaaatg

SEQ ID NO: 2908 - DNA, 153 bp, Zea mays
  misc_feature: Incyte ID No: 700346862H1
  unsure 15, 36, 56, 58, 72, 78, 90-91, 94, 98, 104-105, 113, 116-117, 121, 129,: a, t, c, g, or other
agaataagaagaaangaatccctcctacgcggaagnaactagattcgtcgcctcancngcctctctgctcanatctgnggcggagctcgnnggnagcntgcgcnncgcggcgnagnngatncaagatgncttcgtgcgtncatggatgctgtg

SEQ ID NO: 2909 - DNA, 277 bp, Zea mays
  misc_feature: Incyte ID No: 700346863H1
  unsure 108: a, t, c, g, or other
cacggggtcgaccgcctcaccaccatcgagcccctcttcgacaccaacaagaacgcatgggagttcgccatcaccaggaagttcgccggaggggacgccgtcaagggnacctaccaggcctccaccaagctgctcggcctcgagtggagcagggactctctcgccggcggctccttcaaggttgcgacgacattcgatttgtcggaccaaagcaaagcaccaaagctaatagcagagagcacgtggaactacgaaatatgaaaaatggaagtgtcct

SEQ ID NO: 2910 - DNA, 277 bp, Zea mays
  misc_feature: Incyte ID No: 700346864H1
gatgtattagagctatccaggaatacctatgcaaccgagctgacaagcatcttgtgccgaagatcaacaataccaatgttgaccagagtgtggctgctatacatgcaacagtcttcagctgtcttcgcaggcgagcagccggggagcaactgtatgacctcaacacaaacactgttgctgtagtggatgaggaatacaggaaccagcgtgcagctaacaccttgggttctaagggcatgtttcagttgatccaaaggaaggggtcttcaaggaatct

SEQ ID NO: 2911 - DNA, 68 bp, Zea mays
  misc_feature: Incyte ID No: 700346866H1
  unsure 12, 16, 29, 31-32, 35, 40, 60: a, t, c, g, or other
acttctcatccntcgnccgccagctcaananntantgatnccggaaggtggtgccggacnggttggac

SEQ ID NO: 2912 - DNA, 259 bp, Zea mays
  misc_feature: Incyte ID No: 700346868H1
  unsure 43: a, t, c, g, or other
cgagcttttagctgacattaaaggagaactatctccagttgangaaactgaagcatcaagtgcagctgcagaatctgaaggagaggatggtgaacatgaatgggaatcattggatacactgaggaagactagacctgataaagagctcaaagaaaagctgagaaagtcaagccagaaagagataactctcaaggatgacattccattgagggatagggctgagctgtatgaaacgtacctgatgttctgcatcactggg

SEQ ID NO: 2913 - DNA, 193 bp, Zea mays
  misc_feature: Incyte ID No: 700346870H1
gctagggccaagaagcccgtggcagatcgtctccgccggcgccggttcgcccaagaaggacaaggagaagaaagctgacggcggcgagaaaaatgcggccaaagagaagggcggcggcgatgcagagaagaagaaggccgacaagaagaagggaggcggtgatggaggagagaaaaatgccgacaagaagaag

SEQ ID NO: 2914 - DNA, 240 bp, Zea mays
  misc_feature: Incyte ID No: 700346871H1
  unsure 17, 58, 61, 74, 83, 126, 146-172, 200, 204, 231, 239: a, t, c, g, or other
ctcaccttctggcggangcggcccccaaaagccaaattccccagcccacaccacctcnacnctccaggttaggntttgctgtnggcgatgtcggatcggcagccgtcggaggaaccggaggatcangtggacctggagggggacgnnnnnnnnnnnnnnnnnnnnnnnnnnnggtacctcgccgcggaagccgggacgantcgnaggagcccgatgatgatgacgacaatnacgagcgnc

SEQ ID NO: 2915 - DNA, 265 bp, Zea mays
  misc_feature: Incyte ID No: 700346872H1
gaagcattagcccggatgcggttctctgaagtggtcgaggtgcgagatgttgtggaggccttcaggcttcttgaagttgccatgcagcagtctgcaacggatcatgcaactgggacgattgatatggatctaatcatgacggggatatctgcaagtgaaaggcagagacggaacgaccttgttgctgcaacccgtaaccttatcgtggagaaaatgcagctcggagggccttcaatgcatatgattgagttgctggaagaactca

SEQ ID NO: 2916 - DNA, 265 bp, Zea mays
  misc_feature: Incyte ID No: 700346873H1
  unsure 4, 6, 8, 24, 27, 33, 46, 84, 86-87, 114, 181, 221, 243, 258, 263: a, t, c, g, or other
caangntncagcagatgcttcctntangtgtantctttcctccggnctactcaatttatgccatggttctttggagacgatatntnnttaaccgcgaagatccacagctttatnagtctctgtcaaacgcaataagcgatattaccagacatcaaccttttcgggagatttgcttccgcantacacatcggctgtataatcttctggcttcagatgttggngattcagagtttgcagcaatgnttgaaactcatagtnctganag

SEQ ID NO: 2917 - DNA, 264 bp, Zea mays
  misc_feature: Incyte ID No: 700346874H1
gaggagagtctatggctagaataacctcttgtgctataatttattacctaaggatatgagtctttagctaatgcactaatgtgtattgggtcgatcccagatttctcaaatacgaaataatacgggtttaacccggaaaaaaatgagatcccataaaaatagacagaatggatcttctcccctttccatgctatttccaaatttttccacaaattcgaaaatagacgggtcaattgtggaaaacgttatgggtcatacaaagaa

SEQ ID NO: 2918 - DNA, 263 bp, Zea mays
  misc_feature: Incyte ID No: 700346875H1
aagaatgctttagaagtattatgactgagccaattcctggtgtttattcgtttgctatgttgcagcctactttctgtgagatgttattggaggaggtagagaactttgaaaaatgggtccatgctatgaaatttaagataatgaggcctaatacaatgaacaagtatggtgctgtccttgatgattttggcctggaagctatgctgaaccagttcatggaacagttcatagctccaatttctaaagttctttatcctgaggtt

SEQ ID NO: 2919 - DNA, 266 bp, Zea mays
  misc_feature: Incyte ID No: 700346876H1
  unsure 70: a, t, c, g, or other
ccctagccctcgcgccgccgcctcctccgccacccagcgctcgagctcctcgcgtcctgcgagcgcgctnccgcaacgtcaccatgaagttcaacatcgcgaacccttccaccgggtgccaaaagaagctggaaatcgatgacgaccagaagctgcgtgccttttatgaccgaagatatcccaggaggtcagtggtgatgctctgggtgaggagttcaagggttatgtcttcaagatcatgggtggatgtgataagcaaggcttcc

SEQ ID NO: 2920 - DNA, 267 bp, Zea mays
  misc_feature: Incyte ID No: 700346877H1
gaacacagggcacacgcacggcacgcagatacatatagagagaggttagctatagcttgcacatctatttaactaactaactaactggctagctagctcgatcggcagagcaaagcgcaagcagcaagaagcaaagcaatggagaaccctgcgagtgtgctagttctaccagcgcagttcaccaaactcaccttccgaaacctgtacatccgccgggccgggccgggcagcagggagataaccgaggagggcaggtgcgacctggac

SEQ ID NO: 2921 - DNA, 268 bp, Zea mays
  misc_feature: Incyte ID No: 700346878H1
ggccaaggagggatgtctccgatgctgcagagccaggtgcagcgaatgatgatatcgacgacgatggcgctggcacccctccatcaaacaatgtgaaaaaacagaagacaacattgtcaggagaagctgccaacgatgagggaaatcatccgactcagaatccggcttctggtggcctggaaggtgattctgatctcaatgctgttccgtcttcaaaattttttgaagaaccatgtggagatgcctacattgatgcaagaccagatga

SEQ ID NO: 2922 - DNA, 271 bp, Zea mays
  misc_feature: Incyte ID No: 700346879H1
  unsure 25, 31, 34, 63, 66-67, 88, 90, 114, 239, 243-244, 267: a, t, c, g, or other
cccaggctcctcttcctcgctttcnctccanccngggcgcaaaccctaaccctaccgtcgctncgnnccgcggcgttctgccaatggngngccccgtgtgagtgtgcgcgaganaggggtagaccttgaggccgctacccggggaggagagcgagagatgtataaacaggggggagcggggggaggggctgggctggaccggaagcggatcaacgacgcgctggataagcatctcgagnaggnngtcgcgtcgccgtccacgtcgangggg

SEQ ID NO: 2923 - DNA, 268 bp, Zea mays
  misc_feature: Incyte ID No: 700346880H1
gcaggatgatggatcttggggtgtcagccaatctgactcatcggtcagcaaggatgttctcctatccacgttggcatgtgttcttgcgttgaagagatggaatgttggcagagagaacatttggagaggactgcatttcatcgggaggaatttctctgttgctatggaccagcagttcacttctcctataggtttcaacatcacctttcctggtttgcttaacctcggcattgatatgggttagaattcctgtaagacaaactgatgt

SEQ ID NO: 2924 - DNA, 262 bp, Zea mays
  misc_feature: Incyte ID No: 700346882H1
  unsure 28: a, t, c, g, or other
ctataacaccacaactcatgcatttgcnctgccattaatctttcatttctttggcaggcaattttcttttactgggtcacatcaaactttttctcacttgtttacggtgctggtatgtcactttccagactttatcttcggttcatggtctctgtctatcttatgatctatgttccttaattgattaaaaaaatcatctttctcagttctccggaatccggctgtaagactcttcttaaatcttcctcgcttggaatctcag

SEQ ID NO: 2925 - DNA, 263 bp, Zea mays
  misc_feature: Incyte ID No: 700346883H1
  unsure 227: a, t, c, g, or other
gttccttttctaaaagaaaaaaatacagtcgcatctcgcctccagcagggtgagttcgcctcggcagggtgtggcataccatggagagctcgtcgccgtcagtgccgttcccgctgctgcaggcgccggtcgagagcacctaccgcgcctgcaccatcccctaccgtttcccctccgacaacccgcgcaaggccacccctgtcgagatccaatggattgacctcttnatcaactctgtcccgtccttcaaacagcgggcggag

SEQ ID NO: 2926 - DNA, 260 bp, Zea mays
  misc_feature: Incyte ID No: 700346885H1
agcgcacgtcagatcaggtgcgccgcgcccccctcgcctaagctgcgacgaccatccatcgaacaggaaggatgacgggctccatggatctcccggccaagggcgggttcagcttcgacctgtgccgccggaacaacatgctggagaagaacgggctcaaggtcccgggattcaggaagaccgggacaaccatcgtcggcctcgtctttcaggatggggttgttcttggggcagacacaagggcaactgagggccccata

SEQ ID NO: 2927 - DNA, 234 bp, Zea mays
  misc_feature: Incyte ID No: 700346887H1
  unsure 84: a, t, c, g, or other
ggacttcaacacgctcgaacgccacccgaaggcgtcggcctactggttcagggacatgcttcagaagcattgagatctccaganccgagcctgagcacggaaggtaccattttgttcagcttcgcctagtgtttgggatggcccaatggttcaaatccggctcagtgcctggctaccaaaatgggaacaaaggacagctaccccgatcaattgtgatgttgtgtgtttgtgggt

SEQ ID NO: 2928 - DNA, 260 bp, Zea mays
  misc_feature: Incyte ID No: 700346889H1
  unsure 85: a, t, c, g, or other
ggagtcggagggaaccgagaaactcagggtctcgaatttcctaggagcggaggcgatggctgggaagggaggaaaaggattgctncgccgcgaagacgacggcggccaagtcggcggagaaggacaaggggaagaaggcccccatctcacggtcctcccgcgcgggcctccagtttcctgttggacgaatccaccgtcagctgaagcaaaggactcaggcaaatggccgcgttggtgccactgcagccgtctactctgcc

SEQ ID NO: 2929 - DNA, 256 bp, Zea mays
  misc_feature: Incyte ID No: 700346890H1
  unsure 24: a, t, c, g, or other
atagttgggaggctctcgaaagtnggctagacgccatacgccttgtctacactatttttgcaagagggaagagcgacgtacttgccggtattattactggttaaatgtcttgctgcaaatgcaaaactgccaccgaagagccgcaaagttttggagattcagcggcagccttatcggttgaatgccctctttggtttgtgttattatttttcccgtctgtgatgtcagtcttcctagatttagccatttagggtat

SEQ ID NO: 2930 - DNA, 260 bp, Zea mays
  misc_feature: Incyte ID No: 700346891H1
  unsure 21, 38: a, t, c, g, or other
gttctcggcttctcgcgagtngcgagtcgcgacagcanagagaggcggagttgcggagaagatgcagagcagcagcatgaagagggagatcagcgaggcccacgacaccattcgcttcggcatcaacgccggcgtcaaagccgacctcgccccgccgcacccgctccagtctaccatccaatcggagaccaagttctgggcggacaagaagaagttcgggacagatgccatatacggatccgccctcaacatccgcaagg

SEQ ID NO: 2931 - DNA, 204 bp, Zea mays
  misc_feature: Incyte ID No: 700346893H1
  unsure 121, 152, 167, 175-176, 185, 202: a, t, c, g, or other
gagtgggagacccgcgagaggctgccgtgtagggaccgtagactcagcgactgcgaaggagggataaggggatggccgggatctgaccgatcaggcaggactgggagccggtcgttgtgcngaagaaggcacccaccgccgccgccaagaangatgagaaggccgtnaacgccgnncgccgcccngtgcggagatcgatacnat

SEQ ID NO: 2932 - DNA, 261 bp, Zea mays
  misc_feature: Incyte ID No: 700346894H1
  unsure 54, 60, 124, 126: a, t, c, g, or other
gcaggatttgcctcagtagcccagggtatggaaggctgcgttcctagcaacaangagacnggggcgtatggcatgccatcagccaccaacaatccagatgcctctggtcagtccttcagcgaantntgaagagctcgaggaagcctccgttgcagtacgatgcctccgaatctgcagactgtggcccaggtggtaagggcgcgaagaagaaaacgaagaaaggaaagcagattgacccttctcttcttggtttcaaagtcc

SEQ ID NO: 2933 - DNA, 262 bp, Zea mays
  misc_feature: Incyte ID No: 700346895H1
ggagaatcttctggcatgcatgtgaattcaaagccacggagacctcatgttgatgatgatcttgatgagcattcaaagcgttctagggtagaagatattgaccaatatagtggagaagaatattctgagtgatgaactgtaaatcataattatcttgcaccaacgaattttatcagtacatgtgaagccttaaaaggtttcaagcaataggcacaagtggtttcatggtgcatggtcatgcagtgaaagaaaatgtctgaca

SEQ ID NO: 2934 - DNA, 261 bp, Zea mays
  misc_feature: Incyte ID No: 700346896H1
  unsure 233, 249-251, 253, 255, 257, 259: a, t, c, g, or other
caatttagaagcgcccctcctcctctcccccatccgtacccaatctaatcgacacccggccgagatgggccgcaagttcttcgttggtggcaactggaaatgcaatggaaccgcagatcaggttgagaagattgtcaaaaccctgaatgaaggaaatgttccctcttcagatgttgttgaggtcgtgtcagtcctccttatgtgttcctcccggtggtcaagagcagtgcgcnaagagttccaagttgnnntnanantngt

SEQ ID NO: 2935 - DNA, 287 bp, Zea mays
  misc_feature: Incyte ID No: 700346905H1
caccagatatgagtttggctacagtgcgaacatatatatggaagaagccggaagatttgattcttcattatagagtggtccaatcgagatgatcacggcttcagatgtacatgctcacatggttctccagatatgtcccagcatgtccgcacctttagatggtgtggttgaagatgcctttggcttagagaggaagcatcatcttcacagaggaaatattttgctcttgctccgccctccccccggtagctgttcccagaatcgacttgcttcctcctggtaaggtt

SEQ ID NO: 2936 - DNA, 283 bp, Zea mays
  misc_feature: Incyte ID No: 700346906H1
  unsure 59, 61, 108, 157, 179, 189, 205, 218, 225, 232, 251, 267, 273, 280: a, t, c, g, or other
atatatttctactcgaccaaagttttgtaagaaacaatacatagatttggggatgggangnaggatattttgagaagtacttacaaaagatttatctgtaagcttganctcaggggtacggttttagctccctagactctttaacagcttttgctcnaaaactatgtaaagtgtttctnagtgatgaanaagtaaagatcttgcnaacattaatacanggagcantcacctnttagatatgaaattcttangtggacttatgtccanctaacnttttcgntct

SEQ ID NO: 2937 - DNA, 285 bp, Zea mays
  misc_feature: Incyte ID No: 700346909H1
  unsure 48: a, t, c, g, or other
gatcaccttcagctttcaatcatggccgacgtcgatgtcgaaccggangttgccgccggcgctcccaagaagaggacgttccgcaagtacagctaccgcggcgtcgacctagatgcgcttctcgacatgtccacggacgacctcgtccagctcttccccgcgcgcgccaggagaaggttccagaggggtctgaagaggaagcccatggcgctcatcaagaaactgcgcaaggcgaaaaaggatgctcctgctggtgagaagcccgagccagtcaagacacatctc

SEQ ID NO: 2938 - DNA, 285 bp, Zea mays
  misc_feature: Incyte ID No: 700346910H1
  unsure 71, 91: a, t, c, g, or other
acgcgaccagtgaggtgcggttggccagccagcggcgaggcaaaccgagcgtacgccatggatcgcgagtngggctccaagcccggcagcngcggtgccgcctgccgcccagaatgaggctattgaccggcgggagcgtctccgccgcctggccctcgagaccatcgacctcgccaaggatccctatttcatgcgcaaccacctcggcagctatgagtgcaagctgtgcctgacgctgcacaacaacgaggggaatacctagcccacacgcaaggaagaggcacc

SEQ ID NO: 2939 - DNA, 287 bp, Zea mays
  misc_feature: Incyte ID No: 700346911H1
  unsure 115-116, 122: a, t, c, g, or other
tcccgttccagaacactcgcgctctcgcacgacggcacgagcgcgctactgccatagtgccatggcgagcggcggcggtgctgcggcgcggatggacccggaggtagcaacagannctggangcggaagggtgccaccctcctcctcctcgatgtcccccagcgcaccctcttcggaatcgatacccagatgttctctgttggacccaagttcaaagggatgaagatggtgccaccgggagcccatttcgtctactactgctccccaaacaggcatgggaatgagtt

SEQ ID NO: 2940 - DNA, 289 bp, Zea mays
  misc_feature: Incyte ID No: 700346912H1
  unsure 15: a, t, c, g, or other
gcacagcgcaggcanagctcgatcaccacaccaaccagactcagaacatccagaactcagagcttctacttctagaacagaagaacatcgagatcagtcctcccctgcatcctccaccggcctcacctagatgagcacctcgtacaccgaggcgcagttcggctccttgttagacctgcccgccggccccaggttcgccttcaattgaactctgacggcgggagcaaggaaaagcagctcgctttctcggcggaatcagagaagacgacgccacgaggctcagcaatct

SEQ ID NO: 2941 - DNA, 287 bp, Zea mays
  misc_feature: Incyte ID No: 700346913H1
  unsure 90: a, t, c, g, or other
aaggttgcaagggatcacaaagtcgatatcaaggtaccccacatccaagcgccgcttcgacgcccttgtgaaggctctttcagaagagcntgcgaggacaatgggtggtaatcaatctgctaatgggtctcaggtccggaagatgagaagtggtatcgtccgaatgcttagtcagagatcacttgggaaagcaacaggcatcccgggcgatgatcatgaggctcagctaacaagcgatggtttcacttcatgatgttctggaggtgttcaactgtaacctcagtttg

SEQ ID NO: 2942 - DNA, 289 bp, Zea mays
  misc_feature: Incyte ID No: 700346914H1
gcggcatctgagttccttacaaaggatgggaactatgatctaaactttaagaatcagcctaatgatggagcccatattctctcagcccagcatctgggtgatctgtacagagattttgtcaaggatttccctattgtatcaattgaggacccttttgatcaggatgactggagttcatgggcatcattgcagtcctcagttgatatccaaattgtgggtgatgatttactcgtcacaaacccaaaacgtatagcagatgctattgataagaaggcttgcaatgctctgt

SEQ ID NO: 2943 - DNA, 293 bp, Zea mays
  misc_feature: Incyte ID No: 700346915H1
  unsure 66, 191, 279: a, t, c, g, or other
gaagccctcagtcctccctcacacaccgaaccgagcgcaccatgtcgtcggcggctggaggagtgncaggagacggtgcgggcgtcgcacatcctcatcaagcacgagggttcccgccgcaaggcctcctggaaggaccctgacggccgcatcatctccgccaccacgcgcggcgacgcccagcgcgcctncctggacctccgcaaccagattctctccggccaggccaacttcgccgacctcgccgctcggcactccgactgctcgtccgcgcgacgngtggggattaagta

SEQ ID NO: 2944 - DNA, 296 bp, Zea mays
  misc_feature: Incyte ID No: 700346916H1
  unsure 24, 38, 44, 48, 53, 111, 157, 161, 229, 238: a, t, c, g, or other
atgagattaagaacagcagttgancttttccaactgtnattcantgtnccttngtggcttttaaaagttcaactgctgttcttaatctcatttggtcagaatatgaacttncaaaagccacgaaggacattgaatcacagttggaaaagatctcctntccnttgctgattcttcacggagccgcagacatggtaaccgatcctcaggtcagcaaattcctttatgaganagccagcanccaggacaagaccctcaagctctatgaaggcagctaccattcaatcttagagggagaa

SEQ ID NO: 2945 - DNA, 287 bp, Zea mays
  misc_feature: Incyte ID No: 700346917H1
  unsure 245-246: a, t, c, g, or other
ggaatatgcctatagcatcagacataattatggaaaagaaggaaaacggacagattacactccatattcatgccaaaatatcatatctgcaacacctggtgttggagatcaccatggatgcccgtttcgacattttgggtacaatttcacccttagttttctatagatgggtactatgcgcttattatttagataggtgctctgaactttctgttagcaatatcagtttgcatttctgatccttnnttcactagattactcctgaactttgagggggaagtaagatc

SEQ ID NO: 2946 - DNA, 256 bp, Zea mays
  misc_feature: Incyte ID No: 700346918H1
atcattaggaccagtagctgcttgatttgtgtctcggtgatctagctttgggtagtttgtgcagttggaaggagacagtttgttggttgtattgtattgcagcgcacagctagcaagtgttgttgtagccatcaggtacgtgttgtgtagtgaatccaggtccagggacagagctgttcctctgtatggtggaccctgaccctttgttttgtgccatggggcctttctgtgttgtgcttacatgagctggagctgc

SEQ ID NO: 2947 - DNA, 278 bp, Zea mays
  misc_feature: Incyte ID No: 700346920H1
gtccaaggaggatgcgctctgcaccaagaacatggtcccgggagagtccgtgtacggagagaagcgtgtctccgttcagaatgaggatggaacaaaagtcgaatacagggtgtggaaccccttccgttccaagctggctgctgctgtgcttggtggtgttgacaacatctggattgctcctggtacccgtgtgctgtatcttggtgctgcttctggcacaactgtatctcatgtgtctgatattgtagggccggatggtctggtctacgctgttgagt

SEQ ID NO: 2948 - DNA, 211 bp, Zea mays
  misc_feature: Incyte ID No: 700346922H1
cacctccatcttatccccaactgaagatcccaggtctaaatgccccaatcccccctggtgccagttttggttatagaccaggggagtggggaaagccaccagttgatgagcatggacgtccactctatggagacgtttttggtgttctgcagcaggacgaacctaactacgatgatgaacctgttgatcgcagcaaacactggggagattt

SEQ ID NO: 2949 - DNA, 276 bp, Zea mays
  misc_feature: Incyte ID No: 700346924H1
  unsure 30: a, t, c, g, or other
ccgtccttttcctttcataaaccccaagcngcgccgcaatagctcgccccctcgttcgccgcctctcctgctcctaccgcagctctccctcaggtttagtgttcgcaatggcggccttcaacaagcttggtggccttctaaggcacagtgctctggtgagcggtatcactggtggctcttctcctgcagtgttcaatgctgcacggctcatgtctaccaagctatttattggtggtcttgactggggtgttgatgacgtgaaactaagagaagcat

SEQ ID NO: 2950 - DNA, 277 bp, Zea mays
  misc_feature: Incyte ID No: 700346925H1
gagagagagagtgaccctaccgggcgggagagagccaggaagaggagggcgacgatggcgtccggctggggcatcaacgggaacaagggccgctgctacgacttctggctggagttcagcgagtgcatgagccgctgccgccagccctccgactgcggcctcctccgcgaggactacctcgagtgcctccaccactccaaggagttccagcgcaggaacaggatctacaaggaggagcaacgttcagatcagagtgtgttcgtaaggccaaggaggg

SEQ ID NO: 2951 - DNA, 279 bp, Zea mays
  misc_feature: Incyte ID No: 700346926H1
ctttcatctctgaggggtttcccgtcttcctcgcctgctctaatggctaaagaacaggatggatcccccaaggtgcgccacccagaattccaaaggatgcgcgtaactctcaccataggtgtcattggcctctgtgtcacagcatacattcttggtgcttggcaaggtacctcgaacggcattagttcccccttaataagtaccagaacccagtgcaaagatcccgtgcgatcatctggtgctcgcctggatttccaagcccaccaccaggtgggcttc

SEQ ID NO: 2952 - DNA, 280 bp, Zea mays
  misc_feature: Incyte ID No: 700346927H1
ctctcactcctctcggacccccggtggccggtgcagagctgcgcgaccgagaaccgaatctgtgagccatgtcgaccaacaagggcagcgcggccaagggcggcggagggaagaagaaggaggtgaagaaggagacgaagctcgggatggcctataagaaggacgacaacttcggggagtggtactccgaggttgttgttaacagtgaaatgattgagtactatgacatttctggttgttatatattgaggccatgggcgatggaaatctgggagctact

SEQ ID NO: 2953 - DNA, 282 bp, Zea mays
  misc_feature: Incyte ID No: 700346928H1
  unsure 221: a, t, c, g, or other
acccgagccacgcccatgagcgacgacgcgaccgccgccgcgccctcttcgccgtcgacctccccttccccatcctctgcttcctcatcaggcgcctccccgtcgccttcctccccgcgcaccaagcgccgccgcaccgaccggtacgctctcggtttcgagttcgccccgcgactcgcgccctacgaactccctgaggaaccgctccccgacaagcacangcgctcctggcccaactggacggagcgctccaccttggctctcctcgacgcctggggcgag

SEQ ID NO: 2954 - DNA, 240 bp, Zea mays
  misc_feature: Incyte ID No: 700346929H1
  unsure 5, 8-9, 28, 36, 39, 57, 63, 88, 91, 93, 101, 107-108, 110, 118, 133,: a, t, c, g, or other
ccgtngcnncctcctatctgtgtctacncgagtcgngcnggggggcccgctgaaganccgttngcgggttccggggccgatacccgcncgngngaagcatngtctgnngncggccgcncccgtccccgctcgntgccggccnccgccatgcttgcgctnatctcccgactgntggactggttccgctcgctcttctggaaggannatntngaacttacgctagtggggnttcantactct

SEQ ID NO: 2955 - DNA, 284 bp, Zea mays
  misc_feature: Incyte ID No: 700346930H1
  unsure 275: a, t, c, g, or other
agctcctcctcgcgattccaatccacgcacgcctcctccgcttccgcctcgctcaggcttatagtcagtgatggaacacaaggaggcgggctgccagcagccggagggcccaatcctatgcatcaataactgcggcttcttcggcagtgctgcgacgatgaacatgtgctccaagtgccacaaggagatgataacgaagcaggagcaggcccagctggctgcctcctccatcgatagcattgtcaatggcggtgacggcgggaaaggacctgtanttgctgcat

SEQ ID NO: 2956 - DNA, 285 bp, Zea mays
  misc_feature: Incyte ID No: 700346931H1
  unsure 18, 22, 105-106, 146, 160: a, t, c, g, or other
tgcagaagagctactggnaggngcactccaagtgcctcactgtcgagtccatgatgctcgactcccgtgccgccgacctcgacaaggaagagcgacccgagatcnngtctttgcttccctcttacaaagggaaatcagttctagancttggtgctggaanaggacgctttactggagatctggcaaaagaagctgggcacgttctggctctagacttcattgaaagtgtgattaagaagaaccaaagcataaatgggcatcacaagaacataaccttcaggtgtg

SEQ ID NO: 2957 - DNA, 279 bp, Zea mays
  misc_feature: Incyte ID No: 700346933H1
  unsure 107: a, t, c, g, or other
ggatgagagaccttttgattggtgtaaattatctacatagccatgggctggcacacaccgagcttaggatagagaatgttcacgtgagcccaatagacaagcatgtnaaagtcggtattcttggaaatgctgctgattttcaagacaatgatcttagcagcagtacaattgcaagtaacaatgacaggcggaaaatgatgatagcctttgacatgagatgtgttggcttcatcatggcaaagatggttttgagagagctaatggatccttcgactttct

SEQ ID NO: 2958 - DNA, 275 bp, Zea mays
  misc_feature: Incyte ID No: 700346935H1
  unsure 59-80: a, t, c, g, or other
gctctctctctttattcgttccccgcctcaccccgagccagccgtctcgctagggtttnnnnnnnnnnnnnnnnnnnnnnatgcctcgccgcagctcaggaaggtctgccccacgcccagctccccgtgctgctccagtgaggaacccgccacagccagcacgccaggctcctcctccagctcctgttcgagatggtggtggctccatgtttggaggaattgggtccaccattgctcaaggtatggcgtttggcacgggtagtgcatggcacaca

SEQ ID NO: 2959 - DNA, 273 bp, Zea mays
  misc_feature: Incyte ID No: 700346936H1
  unsure 67, 164, 262: a, t, c, g, or other
ggaaaagtgagcacattcttgcacgaagcttgccgccgccgagctggggaactgggaagaggaaganatcttgcctaggtctagcgaggaggaggtcgatcgatcgattggctaggactctaggaggaggagctggctcataagcagacctactgacccacccntcgactgtacttgttcggaggaagggatggccgatctgctgagcttcctgaagacgatcttggaggccgggttcagtataatgagcgcgctggagaangctggccacaa

SEQ ID NO: 2960 - DNA, 212 bp, Zea mays
  misc_feature: Incyte ID No: 700346938H1
  unsure 29: a, t, c, g, or other
tgtggtaactcaagaactgttcttatgcntgcagcagccataagcattgctactagggtttcatgcggggcgaacagctggtctctgccgcctgaacgccgccggaatctgcgaggcctccccgagctgcgtgcgtcgtcggataaggcagccggcacgcaatgccggttccgcttgctccgtacccagctcctccggcgccattcacgccg

SEQ ID NO: 2961 - DNA, 271 bp, Zea mays
  misc_feature: Incyte ID No: 700346939H1
  unsure 17, 30, 36, 58, 73, 78, 98, 135, 158, 167, 169, 183, 205, 229, 232, 242,: a, t, c, g, or other
ctacatcatctctggcnctgtggtggccangcgtcngggagggcaagagcgtcgtcanaactggccgcaagancattnggcgccaccaaccccctggnttctgagcccggcaccatccgtggcgactttgctgtnggcattggcaggaatgtcattcntggaagtgncngcattgagagtgcnaataaggagattgccctgtggntgcccgagggccttgctgattggnagngcagccagcncccctggatctacgggaagtanacagtga

SEQ ID NO: 2962 - DNA, 270 bp, Zea mays
  misc_feature: Incyte ID No: 700346940H1
aacgtgggcagtgccaagatacaacttccagtacggcctgagctgggagagagaatcgatcaacggcctaatcgaaagggcgatactagatgctgatgcgagaggtgtcaaggtgctgagcctaggactgctaaaccaggcgaaacagctgaacggcggcggcgagctgttcaggcacaggtatcccaagctcagagttcgcctcgtcgacggaagtggcctagcgactgctgtggtgctcaggagcatccctcgtgacgcgaacaggtt

SEQ ID NO: 2963 - DNA, 271 bp, Zea mays
  misc_feature: Incyte ID No: 700346941H1
  unsure 199: a, t, c, g, or other
aatggcacctggtttcatctacttgagaacatgtcgaactttccatgacacttactttgttagtgaagtgatccttaagcaagtgattgagtgggctcacaaacttgcaaacggatggtgtttcaatggtcctccgcagttgaaatcagggcggacaccactatcttgtgcagcatccatggtgcagcaggtcgcgttncttggtggaggtctcctatgcatagcaggtggaccacttgtggtccaggtgttgtatgaggaaacactgcca

SEQ ID NO: 2964 - DNA, 272 bp, Zea mays
  misc_feature: Incyte ID No: 700346942H1
  unsure 27, 38: a, t, c, g, or other
actcaagaacagcaaggttaacctggntgatgccaaanccatctgcctgatggagtgcccaaatccagctgtagatggattgaactatatttgtgattatccagaagggaacatagacctctctgttgatgattggatcaatagggactatgactattatgagtttctcacaccagacatgaagaatagctcacttcaactccagggtccatgctaccctataatatttccaactgtaaatgtctattggagctgccaatttattgcacgtg

SEQ ID NO: 2965 - DNA, 273 bp, Zea mays
  misc_feature: Incyte ID No: 700346943H1
  unsure 14, 51, 53, 71, 89, 219, 221, 223, 231: a, t, c, g, or other
cccggctgcttctnctggtcgccgcccagctccagttattagagaaataangnccagcctggttgcccgangctgacccagcacctgcnatggaggagaaggctgtcacaaatggagcggcagtgctgatgttgctgctcctgataataaggataacaccaaggaagaggttagcaagagcaaggagccagtagcgaataaggatgctgaagagcagancnancgctcggnaaatggtgctgagggccattcaggtggagatgtcaatatggc

SEQ ID NO: 2966 - DNA, 268 bp, Zea mays
  misc_feature: Incyte ID No: 700346944H1
  unsure 179, 254, 263: a, t, c, g, or other
ataacttggatgctagacgccatgttaatcgcctttgccttgctgctgatgttcctttggttgaaagtggtactactggttttttgggacaggttactgttcatgtcaagggtaaaacagagtgctatgagtgtcaaccaaagcctgtccctaaatcatatcctgtctgcacaattacnagcacaccatcaaagtttgttcattgcattgtttgggcgaaagatctgctttttgcaaaattattggtgataaanaacaggatnatgat

SEQ ID NO: 2967 - DNA, 304 bp, Zea mays
  misc_feature: Incyte ID No: 700346949H1
  unsure 274: a, t, c, g, or other
gctctatagaagatatgaaatgtttccactttatcattttccatgcatgcctttatttgatgttctttaggtaaaacctcttatctgggtcgaagcacagattgagaaacattctagaagccgtatagaactcatggtgaaggcaaggagtcagttcaaggaaagaagcacagcaacaaatgttgaaattgaagtgcctgttccttcagatgccacaaacccaaatataagaacttcaatgggttctgctgcatatgctcctgagagagatgcnatggtctggaaagtaaaatcattcctggtg

SEQ ID NO: 2968 - DNA, 300 bp, Zea mays
  misc_feature: Incyte ID No: 700346951H1
  unsure 229, 234, 267, 294, 298, 300: a, t, c, g, or other
ggcaccaaacacgttcttgggaccgccgccgccgccctacttccagtcccagctgctcaggtctccatcggcctcgagccctttgccggcgacgagcactcacaacaccagggtgtaacaatgtcttcttcaatggaatcgtcataccttcctgctacaactgagtcattagcccaagctcaagaggctaaggatgcttcagagtccatttcaatcctttaccgtgtcnttcangacccatcttcttctgctgattgactgagaacnaaaggagttggaattaccaatttttanaaantn

SEQ ID NO: 2969 - DNA, 299 bp, Zea mays
  misc_feature: Incyte ID No: 700346952H1
  unsure 164, 192, 271: a, t, c, g, or other
ggcatggccaagtccattcaccatgctcgtgtcttgatcaagcagcgtcacatcagggttggcaggcaaattgtcaacgtcccatcattcatggtgagggtggagtctgagaagcacattgacttttcactgtcaagcccattcggtggaggcccccgcagaanggtgaagagagaagaatcagaagaaggnaagccggtggcggggatgctggtgatgaggatgaggagtgaggatggacaagtagtgttacaccaatataatatattanctattttcttgaacttgttcgaatgatg

SEQ ID NO: 2970 - DNA, 298 bp, Zea mays
  misc_feature: Incyte ID No: 700346954H1
  unsure 110: a, t, c, g, or other
gtgatcatcaccgaccatgaactactacccggtgtccaagtaccacttcgacctcagcggcactgcgttcggcaggctggccaagcccggcctcaacgacaagctccgcnactccggcatcatcgacatcgagttcaccagggtgccgtgcgagttcccgggcctgaagatcgggttccacgtggaggagtactcgaaccccgtctacttcgcggtgctggtggagtacgaggacggcgacggcgacgtggtgcaggtggacctgatggagtccaagacggcgcgcggcccgccgacg

SEQ ID NO: 2971 - DNA, 290 bp, Zea mays
  misc_feature: Incyte ID No: 700346955H1
  unsure 237, 259, 279: a, t, c, g, or other
cccacttctccattccattgcggttctgcgagcccctacctccctgtggtgcttggccatggcggactaccacttcgtgtataaggacgtggagggggcgagcacagagtgggacgacatccagcgccgcctcgggaacttgcccccgaagccggagcccttcaagccgccgcccttcgccccgaagttgacgccgacgagcagcccaagtccaaggaatggcttgacgtgcgcganccgaagagctcgaggaatagangacgatctggatgacgaccnttctcgagaat

SEQ ID NO: 2972 - DNA, 295 bp, Zea mays
  misc_feature: Incyte ID No: 700346956H1
  unsure 35, 62, 98: a, t, c, g, or other
gtacttgaacaagcagagaagttggactgtaaganatacttgaccccaaaggatatcactgngggatctgccaatctaaatcttgcatttgttgcacnaatattccagcacaggaatggtctgaccagtgacaccaaacaagttaccctcacacagacagcaacacatgatgatgttctattatctagagaagaaagagcctttcgaatgtggatcaacagccttggggttgaatcatatgtgaacaatgtcttcgaagatgttcgcaacggatgggtacttcttgaagtgcttg

SEQ ID NO: 2973 - DNA, 294 bp, Zea mays
  misc_feature: Incyte ID No: 700346957H1
agaacttggaagatttgtgatgcttgctaatgagtcagctgaagagatgtatacaagattgaaaaaaatcatcaagaaaattagaagctatggaagtaagaaatggacagatcatgaagtggtgaaaataatgctaagggcttattttctaagaaactcggtattatgttttatgataagagatagtcctaattatgagaagatgacgccagaagtagtacttggtagatttatccgtcatgaaatgatggaaaatgaagggcttcttgaagctgaacttggaagatttgtgat

SEQ ID NO: 2974 - DNA, 292 bp, Zea mays
  misc_feature: Incyte ID No: 700346958H1
cttctccaaaacgatcggcggtggtggccctaacgttccggcgggatcccaccccgcgggcgggagccaggtcggcggcagggggaggcgcgacgcagcggacgcatatccgtatgtgactggtacttcagtcattgccttgaaatacaaggatggtgtgatcatggcatgtgacactggagcctcctacggatcaactttgagatacaagagtgtggaacgcattaaggctgttggcaagcatagcatcattggagcaagcggagagttcagcgatttccaggagatcctg

SEQ ID NO: 2975 - DNA, 289 bp, Zea mays
  misc_feature: Incyte ID No: 700346960H1
  unsure 27, 32-33, 47, 69, 73, 75, 86: a, t, c, g, or other
tttcttccggctgctcctctagaaatncctgnntttcacgtgatggnggctcaattacaggaaagtagntgcnanaaacaggattnactagatgtccttgttcctgaatggaacgccaaattgcttccataaccatcatgttctccagattcatgtcaacattatcatcacggttgtgtctagaatggaaaggccgcctgttagcctggctagagcatgaaggttcagatgaacagcattcatttccttgctcagtacattgatatgatggcactgaaaaggatgtgct

SEQ ID NO: 2976 - DNA, 288 bp, Zea mays
  misc_feature: Incyte ID No: 700346962H1
ctgatcacctgccttaaagcagtctattttgtctactcgccgagctctctcgctcttcttctagctaccgcatgcgtaccacctgcaagctctgctactcgatcagctaggcagctaggtagctagctccgatccacatatataaaaatcagatcgcacagctactagcggcaaccgacatgtccagcggccggaggtcgtcacgcacgcggcgtgcggggagcagctcgctgtcgtcgtcgacgtcgaggtccatctcggaggaccagatctccgagctcctgtcca

SEQ ID NO: 2977 - DNA, 289 bp, Zea mays
  misc_feature: Incyte ID No: 700346963H1
  unsure 46, 58, 89, 105: a, t, c, g, or other
tttacaaaaccccaaaggttgatcctgaattgctcaaagagattgngcagtggaacgnagcacttaagaatgatgtgatcaaattttgncgagagaacaattttnattctggtttctttgatggaactgaaaacaacatggtagctgatgcctatgaattgaaggtgcgtcttgaacacatcattgaaaggatagccttgatttctgatgctgcaaatacagaacgaccttctcttgttgtcaacaacttgttcataggtggggctctggctgcaaggtctaagtacac

SEQ ID NO: 2978 - DNA, 298 bp, Zea mays
  misc_feature: Incyte ID No: 700346965H1
  unsure 186, 223: a, t, c, g, or other
agaagatgaagtgtatagagagatgtcagccgactattgtgacatacaacattctgctaagggcttttgcacaggctggtgacacaaagcaggtagacatgttgttcaaggatctggatgaaagtgtagtatcgcctgacgtatatacttacaatggggtgcttgacgcatacgggaagaatggcntgatcaaagagatggaatctgtgttggtgcggatganaagcacgcaatgccgtccagatgtgatcacattcaacatactcatagattcatacgggagaaagtaggctcttga

SEQ ID NO: 2979 - DNA, 213 bp, Zea mays
  misc_feature: Incyte ID No: 700346966H1
  unsure 20, 31-32, 51, 132, 207: a, t, c, g, or other
cttttttgttggcattacgntgtgttcttanntcggtcagggacagttagnagcgtatctagactctagagactgtttgtcttgctagaatcgcaaccaaaagtattggtccaagattagtgcaatggtganattatttcacccaagcgcacgagttgcagtttttttttttcctggaaccatttgaattctggacagtggaatggnactccc

SEQ ID NO: 2980 - DNA, 161 bp, Zea mays
  misc_feature: Incyte ID No: 700346967H1
  unsure 4, 8, 11-12, 15-16, 24-25, 28, 41-42, 68, 78, 81, 95, 109, 120, 128, 138: a, t, c, g, or other
gttntacncgnntgnntttgctgnngtnttctaaggcatgnntttattctaatcctgaagatatcgcnttgatctccnccntgtgtttggcagangttggaaaacatgncagacatcaantggaggtnttggatatanggagaaagagctctggctagctc

SEQ ID NO: 2981 - DNA, 296 bp, Zea mays
  misc_feature: Incyte ID No: 700346968H1
  unsure 210, 219: a, t, c, g, or other
ctgacaaatttgcaagcacattcagcgcagacaggactcgcaacttgattgtgaggctgcgccacaatgtcattcgaactggactgcgcaacatcagcatttcttactcaaggatctcccttgctgacattgctaagaagctaagactggactctgagaaccctgttggctgatgcagagagcattgtagccaaggccataagagatggngcaattgangccaccatagatcatgcaaatggctggatggtatcgaaggaaaccggtgatgtctactctacaaatgagccacaaat

SEQ ID NO: 2982 - DNA, 295 bp, Zea mays
  misc_feature: Incyte ID No: 700346969H1
  unsure 17, 32: a, t, c, g, or other
ccagctctccggctgcntcccccacgagctcngcatgctcaccaaggcggccgtgattgacgccggcatgaaccagctgcaccggcccaatcccgtcatctttctcgtgcctaatcagcgtcgagcagctcaacctgggccggaaaccgcctctacggtcaggtacccgacgcgctctgcaagcttgctgggcccgctggccgcctcgccaacctcacgctgtccggcaactacttcacatccgccgggccggcatgcgcggcgctgatcaaagacggagtgctggacgtgaaga

SEQ ID NO: 2983 - DNA, 292 bp, Zea mays
  misc_feature: Incyte ID No: 700346970H1
  unsure 2, 15, 24, 29, 54, 74, 91, 93, 115, 118-119, 125, 133, 156, 177, 182,: a, t, c, g, or other
anacggccattcagngtttcactnagaanattgtgggaatgatgaagatcgaanacctctttgcatcccaaggnggcccaattatcctgcncncagattgagcatgagtatgggncannaggcanggagtttngtgccgcagtcaggcatatatcnactgggcagcaaagatggcantcggnttggntactngtgtgccgtgngtgatgtgcnaggaggatgatgcncctgatccagtgatcantgcatgcaatggtttctactgtgatgcattttctcctaacaaacctta

SEQ ID NO: 2984 - DNA, 293 bp, Zea mays
  misc_feature: Incyte ID No: 700346971H1
  unsure 52, 63, 75, 84, 153, 225-226, 258, 272, 292: a, t, c, g, or other
ccgccttttttcagagaaaacagagggaggaaagaaaaagctcacccccctntctcttcccancacctctctcangtgtgtgangtggcgagcccaaggaggagcgggaggccacaagtccgatccgcccgtatctaatccgctcgagcgcanggcgtcgttcctcgcgggggcgcacggttggcatttcgagtgctgagacatcggcttcattgaatcctaaannacggttgagccatggctggctcccttgctgcntcagccttcttccntggcccaggggcgtctccanc

SEQ ID NO: 2985 - DNA, 290 bp, Zea mays
  misc_feature: Incyte ID No: 700346973H1
ctccagcaaacttttcatcatggatgaactggatgaacgggagttggtttttgcatgggaagataaagacaccatcattgatcagcttaacaggattgatctctctgacagggaggaccatgaatcgagccaggaacttggaggctcgttaacgagatctccagatgcagcgatcggtattcttatgcgcgtcctaaagaacgccccaggcctcagggaaaggctactgacagtccccagtgctggcacagttcctcaagaaccttcttcactccagagggtagtgactg

SEQ ID NO: 2986 - DNA, 285 bp, Zea mays
  misc_feature: Incyte ID No: 700346975H1
  unsure 9, 140, 279: a, t, c, g, or other
tttcttganggccttcctccctcatgggatgaagaccgtgttaagaaatatctcaaaaagtatggagctattgagaaagtcgaacttgcacgaaacatgccagctgccaagagaaaggattttgggtttgttacatttgntacacatgataatgctgttgcatgtactgaagggatgagtaactctgagatcggtgaaggtgaacacaaggcaaaagtaagggctagactgtcgagaccattgcagagaccacctagaatgaaacatggattgagaggnaatttt

SEQ ID NO: 2987 - DNA, 287 bp, Zea mays
  misc_feature: Incyte ID No: 700346976H1
ctacaagaccctctacttcgtccacctgcagaacatatccatcggcggaactcggtttccagctgtctccacgaaaagcggcgggaacatgttcgtcgacacaggcgcctccttcactcgattggaaggcactgttttcgctaaactggtgacggaactagacagaatcatgaaggaaagaaagtacgtcaaggagcaaccgggcagaaacaacggccaaatttgctactcgccgccgtcgaccgctgccgatgagagcagcaaactgccagacatggtactgcact

SEQ ID NO: 2988 - DNA, 287 bp, Zea mays
  misc_feature: Incyte ID No: 700346979H1
ggaaaccctagccgccatatctcacgatccacttcgagcaccaagccgagggaaggtgaggagcgatggcgcgcggcgtggtgtcggcgaagggcggcgcggtcgcgggcaagaagaaggggtcggtttccttcacgatcgactgcaccaagccagtggaggacaagatcatggaggtcgcctcgctcgagaagttcctgcaggagcgcatcaaggtcgccggcggcaaggctggcaacctcggcgactccgtcaccatctctcgcgagaagaccaaggtcaccgtc

SEQ ID NO: 2989 - DNA, 292 bp, Zea mays
  misc_feature: Incyte ID No: 700346984H1
  unsure 25, 28, 62, 75, 97, 127, 131, 141, 149, 154, 159, 161, 167, 172, 184,: a, t, c, g, or other
agcgggcttggagacaccgaagaanggntagaggaagctgaaatgactccggcctccataancatggtcttcatncatgtccatctagaggctcaanccatgcagtacctatcggaacgcagcagancgancattctggtnatcggatncgagnaagcngnagcagngtggncgacgcttaagncactgcnccagacagngaggnaaggtgntgancctatgccattnggcagaggcatctnctgggttcacagngttcttccgagcnagaggatgctgacgtgacctgccc

SEQ ID NO: 2990 - DNA, 286 bp, Zea mays
  misc_feature: Incyte ID No: 700346986H1
  unsure 270: a, t, c, g, or other
gccttcgaccgcctccacctcgtctccgacgatgtcctccgtcgccggtgagggggaaggagagggaggaggacggcgccgacgggaggagccaaggagccaacaacatgaggacggggtcgaggtggccgacggaaaactggatttgggtgacctttacggcgcggcggcggggtgggtagaggcgcggaccagctgcccgcacctcggcaccatgccgcccgctggtgctgaattgctgatgaccttgctcgcgtgcctccgcccgantctccgtgctccagat

SEQ ID NO: 2991 - DNA, 284 bp, Zea mays
  misc_feature: Incyte ID No: 700346988H1
gcattgcaggatggtagtgtttcgatcctcaagtttgaccctcacaaagagaagccagcatctgtgcaacgagcattgtctgttcttgagatggaagttgagcaaataaagaaaggaagttatgatcacttcatgcaaaaagaaatccatgaacagccacattcgttgaaaacaacaatgaggggtagattgaaggatggtggggttgttctaggtggactgaaggaatatctcaagacaattaggcgctgtagaagggtggtatttattggttgtggaacaag

SEQ ID NO: 2992 - DNA, 280 bp, Zea mays
  misc_feature: Incyte ID No: 700346989H1
  unsure 32: a, t, c, g, or other
gccctgcctctcctggccggcttctcgcaganggcgatcctggccttcgccgcaggaacgatcatcttcaccttgtcttgtgtcctcatcgccttcacagctactagcgacggctgatttgggttctgttgcatgcccctgggtctgaatgttagccactgtctcctgggctgcactgttttcttgtagtatgttgactgttgagtgtcgttggttgtgggaaaccatgtttaggactagtttgagaatctcatttttagtttcatttttctttagaaaa

SEQ ID NO: 2993 - DNA, 71 bp, Zea mays
  misc_feature: Incyte ID No: 700346990H1
  unsure 44, 60, 65-66, 68: a, t, c, g, or other
attgatatcctgccaagtattcttcgagaggtccattagaattncaacgtagagcacggntctcnntncct

SEQ ID NO: 2994 - DNA, 280 bp, Zea mays
  misc_feature: Incyte ID No: 700346994H1
  unsure 93: a, t, c, g, or other
atcaaatcgaagattggattttggaagaagttcaacctcatattccttttctttctccttcgcaagcttattttgcccttctattccttcacncttttctgtatcattcttcccatgacaatgttcattcctgaagccgagctccctgcatgggtcgtgtgctacattccggcaaccatgtccttgctgaacatcctcccagcccccaaatcgttcccgttcattgtcccctatctcctgtttgagaataccatgtcagtaaccaaattcaacgccatgg

SEQ ID NO: 2995 - DNA, 282 bp, Zea mays
  misc_feature: Incyte ID No: 700346996H1
  unsure 227-228: a, t, c, g, or other
atgagcttatgttcctatatgactactagctagaagttagagcctagatgatggctgcttctgttggcgtgaaagctcgagtgctcctaaatggtcgtcgtattagctgatacgacatcgacccgatgcaatagataatattgtttacacgtgcgagtccaaaattgttggctttgggtcggagcagttaacgcgagaagtgtattttatcacttctgagtgcaacnnttttattattatttttccgagcttctgcctcttgcatatgttgtagattctcgc

SEQ ID NO: 2996 - DNA, 295 bp, Zea mays
  misc_feature: Incyte ID No: 700347003H1
  unsure 64, 84, 141, 269, 287, 289: a, t, c, g, or other
agcagctattgtggtcgtccctcagccgcgtcgcaccgcatcgcattctacgattcgaagctcnctctgctcgcagccatggcncagaattacccaaccgtgagcgccgagtacagcgaggccgtcgagaaggccaggcgnaagtccgcgccctcatcgccgagaagagctgcgcgcccctcatgctccgcctcgcgtggcactccgcggggacgttcgacgtgtcgtcgaggaccggcggtcccttcggtactatgaagtgcccggcngaactggctcacggagcnangggggg

SEQ ID NO: 2997 - DNA, 204 bp, Zea mays
  misc_feature: Incyte ID No: 700347004H1
  unsure 53: a, t, c, g, or other
gtgtcggcgcactcgcccgatcacaagcgcccctctcagcagccgggtgtagnaccccaatcgccgggttggcgacaatggttccagcgccgtggacagcctcttcgaggaagcgggcgcggcgaggccaccgcgtcaccccagcgacgcgctgaacaaagggaaggagaaggtcgtcgatgtggagagcgtggagtctccaaa

SEQ ID NO: 2998 - DNA, 196 bp, Zea mays
  misc_feature: Incyte ID No: 700347005H1
ggcaggtcgtttgggcatgcaaaccatcaacaaagttttgtttctaatcctatagagttggctgccaatggttggggtggcacatggagttctggaggtacatcatcttcccgtcctgtggtgtcatcatttggggcgtttagagggtggagttcatccgagtcgtcccctgcattgcctcattctgattggagag

SEQ ID NO: 2999 - DNA, 296 bp, Zea mays
  misc_feature: Incyte ID No: 700347006H1
  unsure 190, 193-194, 206, 217, 232, 295: a, t, c, g, or other
catgcagccagactgggacatgttccatagtgttcatcccatggctgagtaccatgctgcggctcgagcggttggtggctgtgccatatatgtcagcgacaagcctgggagccatgacttcaatctgctcaagaagctcgtgcttcccgacggatcgatcctgcgcgcaaaagctccccgggaggccaancanngactgcttcttntctgaccccgnaaggacgggcaaaangttagattcgcagctctctacgatggctggtctgttcttgttcactaaaagccgtttgctaant

SEQ ID NO: 3000 - DNA, 60 bp, Zea mays
  misc_feature: Incyte ID No: 700347007H1
gttcttgttaggaccgttgaatgttctctctatataattttccggacacatgttcttaaa

SEQ ID NO: 3001 - DNA, 285 bp, Zea mays
  misc_feature: Incyte ID No: 700347009H1
cttttacagagaaatgtgatatattcagccttggtgttatcatgtgggagctgtgcacattgagtcgcccatgggaaggcatctccccagttcaagtggtgtacgcagttgctaatgaaggttcacggcttgagattcctgaaggacctctcggcaggttaattgcagattgctgggcagagcctgagaatcggccgagctgccaggagatcctaacccgtttgctggactgcgaatacactgtcagctgaaatggaagctgtcgctcgtccactcaatcctgaa

SEQ ID NO: 3002 - DNA, 171 bp, Zea mays
  misc_feature: Incyte ID No: 700347010H1
  unsure 13, 150, 160-161, 165, 167: a, t, c, g, or other
gaaaatgaatctnctgaggttcatattggtcgaatgctgcaaatccttagggaattttcagacgacccagtcctcagttcatacgtcattgatgatatttgggatgacatgaaggcgatgagagattggaggtgtatgatttctgtgctncttgatgaanntccngnaatg

SEQ ID NO: 3003 - DNA, 204 bp, Zea mays
  misc_feature: Incyte ID No: 700347011H1
  unsure 55: a, t, c, g, or other
gagacggggattccagagagccccgttcgggtagggaagggaaggagaggcgaanggaggcgagatgggggcggccgaatccgtgccggagacctccatacacgaattcaccgtcaaggattgcaacggcaaggaagtgagcctggaaacctacaaggggaaggtcctccttgttgttaacgtcgctccaaatgtgggttcacg

SEQ ID NO: 3004 - DNA, 94 bp, Zea mays
  misc_feature: Incyte ID No: 700347012H1
  unsure 65, 67, 74-75, 80, 85: a, t, c, g, or other
atcttttcacccttgtagaaaacagcaggaggtagcagacagaggaatggaaagatgagcaaaangngaaaganncaggnacaangagagcacg

SEQ ID NO: 3005 - DNA, 76 bp, Zea mays
  misc_feature: Incyte ID No: 700347013H1
  unsure 62: a, t, c, g, or other
atggtttagtggcagtttatattgttgccacgggcccaggaattgagtaattctttcagttnctgaccatttgctg

SEQ ID NO: 3006 - DNA, 194 bp, Zea mays
  misc_feature: Incyte ID No: 700347015H1
agagcattggttatttccagcgtggacccagagattgatacatgttactcatgcaagatatgtggaggcaccgaagaggatgagaagaggttcttgatatgcggcaacgtcctctgccgatacatgtactaccacattgggtgcctcaagtccatgcagatctctaccagtgtagagaggggcagcccgtgctg

SEQ ID NO: 3007 - DNA, 292 bp, Zea mays
  misc_feature: Incyte ID No: 700347017H1
  unsure 273, 275, 280-281, 288: a, t, c, g, or other
gaaggagtcggagggaaccgaaaactcagggtctcgaatttcctaggagcggaggcgatggctgggaagggaggaaaaggattgctcgccgcgaagacgacggcggccaagtcggcggagaaggacaaggggaagaaggcccccatctcacggtcctcccgcgcgggcctccagtttcctgttggacgaatccaccgtcagctgaagcaaaggactcaggcaaatggccgcgttggtgccactgcagccgtctactctgccgccatcctggantntttanngccgagnttgg

SEQ ID NO: 3008 - DNA, 291 bp, Zea mays
  misc_feature: Incyte ID No: 700347018H1
  unsure 46, 64, 194, 215, 225, 233, 244, 247-248, 252, 258, 260, 264, 289: a, t, c, g, or other
cgctgctcgaccagtccccgcaccagctcgacaaggcccggcaganggaggccctcaagggggncaccatcatggagggcgacgccgaggacctcccgttccccaccgactccttcgaccgatacatctccgccggcagcatcgagtactggccagacccacagcgggggatcaaggaagcctacagggtcctnagatttggtgggctagcttgngtgatccggncgatcganctttttgtggntcnnattnttcggngnaaanttggggcttcccccacgggaggagnat

SEQ ID NO: 3009 - DNA, 185 bp, Zea mays
  misc_feature: Incyte ID No: 700347020H1
catcttcaactaatttgtcacaccttattttcctggatctgtcctacaataatttgagtggtccaatcccagggtccctgacaaggactttcaacattgtagggaatccactgatctgtgcagcaaccatggaacaagattgttatgggtctttacctatgccaatgtcttacggactgaataac

SEQ ID NO: 3010 - DNA, 195 bp, Zea mays
  misc_feature: Incyte ID No: 700347021H1
ctcaagtgccaaggattttattgaagcaataaagaggccagatgctattgctgcgggctatatcggacagtttgtcatcaagcctttgtttggattcctttttggcactcttgcggttgcagttcttaacctcccagctgctctaggcgctggcataatgttggtttcatgcgtgagggagcacaactttcaaac

SEQ ID NO: 3011 - DNA, 289 bp, Zea mays
  misc_feature: Incyte ID No: 700347022H1
  unsure 4, 85, 180, 215, 218, 226, 235, 263, 265, 276: a, t, c, g, or other
aganaaatgaattccagcattgctcagtcatctattccatatttatttgtaaaacttaacagctatgcaatgcaaagattatttnttgtgtcttgctataggacacttgttccagaccatttagagaacttcaaattttctacacaggaaagttccgattgtctaattggctactattanatcctaccatctcaaaaggatataacagacaagcnggnaattttancaccatatngtaatctttgagacaatctaaccgattngntcaagtgtgtnagaaaagatagat

SEQ ID NO: 3012 - DNA, 283 bp, Zea mays
  misc_feature: Incyte ID No: 700347025H1
gtgaaaaatacagaaagcatggtgaacgtccgccacaaccaccattggagatagttaaatacccagctcttttggaaagagcttggggatgggattcgatactgccgtactgtcctgtgaattcttggcccctatacaagacttacctccaagaatattatgagcgcaattctcgtgaagtattggctcatcaagtggaagctaatgctgcctctggtcccaatctcaacggggctgatgagaatgatctggcaactctgttcaacttgtgtatcagtaggga

SEQ ID NO: 3013 - DNA, 284 bp, Zea mays
  misc_feature: Incyte ID No: 700347028H1
  unsure 56, 185, 224, 228, 230, 233, 241, 244, 250-251, 261-262, 267-268,: a, t, c, g, or other
gtcgaagagggcgcagagcatgacgtctcgcccaatgaaggggatgctgactggcncagtcacaatcctcaactggtccttcgtccggaatgaccagccgaggtttgagacttgctaccagatcgctcttgcgatcaagaaggaagtcgaggatctcgaggctggtggtattcaggttatccaanttcgacgaggctgcactgagagaagggctgccgctccgnaggntnagnatgattcnaantgggannggggcggccnntcttnnagaatgnnaggnggng

SEQ ID NO: 3014 - DNA, 175 bp, Zea mays
  misc_feature: Incyte ID No: 700347030H1
gacaaggttgttgctttgtgctttactgttgcaacaccgaagttgtatgatatatatactgtgttactggcctgggagaatcaaagcttttggctgtttattgatgttgtccaggaacctgtgtactgtactgctgtggaaaattgcttatagcagtaggtgcgatggttttctc

SEQ ID NO: 3015 - DNA, 215 bp, Zea mays
  misc_feature: Incyte ID No: 700347032H1
  unsure 98: a, t, c, g, or other
aatggattggtctcacagactgccttccggatgatggtggcttaatgagaagttcatctggaatccttagcctctctgaggaactccagcgtgctctngacaggctaccagagaaggtagcagctgaagcgataaagacctttatgtcagtcatacactctatagttgtacagcaaagtgaagagcggcaactaaagaagaagtcagataacatg

SEQ ID NO: 3016 - DNA, 285 bp, Zea mays
  misc_feature: Incyte ID No: 700347033H1
  unsure 21, 83, 219, 222, 234, 238, 245, 248, 252, 255, 258, 260, 266, 270, 274,: a, t, c, g, or other
gatccgtgttccgtgtccgcntccagtgtgtccgctactccgctcccccttcagtcctcagttcctcacctagcggtagcgtngcgcgcgggagacgtagatggcggcttcggaggcggcagggcggcggcaacaccggtgacgccgacagaggggacggtgatcgcgatccacagcctggaggagtggagcatccagatcgaggaggccaacagcgcnaanaagctggtggtnattnacttcantgnaacnggngtncnccgaangggnaaanttttaattnng

SEQ ID NO: 3017 - DNA, 286 bp, Zea mays
  misc_feature: Incyte ID No: 700347034H1
  unsure 285: a, t, c, g, or other
gttgttgttgcaggcccagagcgggacgagcaagggaggccaattgacggcaacaagtacaaggggagcatttacatggttttcgagtatatggatcatgacctcactgggcttgctgatagaccaggaatgcggttcactgtgccacagattaagtgttacatgaagcagctgcttacaggcctacactattgtcacgtcaatcaagtcctgcatcgagacatcaaaggatctaacctcttgatagataacgagggtaacttaaagcttgctgattttggcctng

SEQ ID NO: 3018 - DNA, 280 bp, Zea mays
  misc_feature: Incyte ID No: 700347036H1
  unsure 216, 226, 229, 237-238, 252, 259, 261, 278-279: a, t, c, g, or other
ccggcgtcgcttccgtgctggtcccgcaggagcccgtcctcctcaaggacatcctcgcctcaccgtccccctgcgggaacaccgctgtctccgcccgccacctcttcggcaacggagtcgcaccgccacgctcctcggacgacggcatcaaggaagccgctgccgaccgccacggtgaccgcgacctctccatccccaagatcttcaccggagagntcttgaactnctncaaattcnngaaggttggaactnatttggncntggggggggaggggttnnt

SEQ ID NO: 3019 - DNA, 283 bp, Zea mays
  misc_feature: Incyte ID No: 700347038H1
  unsure 188, 191, 257, 259, 276: a, t, c, g, or other
cgaaaaccgaaacagaaaaagacgaacatacgacatcagacaaagaaatgtacgtcggcatgatgcaacacccatgacacttaggttttggtttatacatgacatggacacctgtcaccatactggtttgaaattgggaaggagcgaaacaggaagagaaaagagagtaacgcccgaatttggtgagnganagaagaaaaaattccacctcaaattcagggcgttacagggctggtcccaggtgaagcttcaccctntntgacaattagcgctaanctagacc

SEQ ID NO: 3020 - DNA, 279 bp, Zea mays
  misc_feature: Incyte ID No: 700347039H1
  unsure 87, 183, 185, 187, 205, 226, 235, 237, 259: a, t, c, g, or other
gagagtgggttggccacataatttttaattgttatgcatctgtgcaaatttttcctccaagaattattcatctctttgctatctgtntttttttcaattacagatgaagatgtcgacaagcctacaataaacacacctcaaaaagaaaaattaagttgaagaatctcatgattgaccactaancnangcaggtctggtccaggtngcagcaggtacctccaggtcnaggatgaancnaggggaaggggtcaccgtatcnagtgggaacttaaattcagg

SEQ ID NO: 3021 - DNA, 278 bp, Zea mays
  misc_feature: Incyte ID No: 700347040H1
  unsure 2, 71: a, t, c, g, or other
cnccgggaagctcggccgccggatccggcgtcgtcgttcctcggaacttcaggctcctagaagagcttgancgtggagagaagggcattggagatgggacagtgagctatggaatggatgacgcagatgacatctacatgcgatcatggactggcactattattggccctcataataccgtccatgagggtcgcatctaccagctgaagttgttctgtgacaaggactaccctgagaagccaccatcagttcgatttcattcaagaataaacttaaca

SEQ ID NO: 3022 - DNA, 261 bp, Zea mays
  misc_feature: Incyte ID No: 700347041H1
  unsure 40, 151, 167, 178, 207, 212, 217, 226-230, 236, 239, 249-250, 259-260: a, t, c, g, or other
atccaaccaagtggataccgatacttaggaagatctgtanggtacttggtgctagcaccacatgatcctatgcaatcgagccttctcaatgctacactagaggataaaaacctttcagaaatcccaaatttcaggttttgctgaagcagcnggttaccatggaggtnatccagtgganagcaatggtgggaattctctaagcccgantttgnaaacngggaaaaannnnntagganggncctttggggnncaaaatcgnna

SEQ ID NO: 3023 - DNA, 275 bp, Zea mays
  misc_feature: Incyte ID No: 700347043H1
  unsure 192, 214, 219, 222, 225, 232, 240, 256, 259, 268: a, t, c, g, or other
gagagagtctgcaggatccagcaggccgagggccggagaatatgagcggcaacggcgcgaagaaggtggtcgatgcggcggtgaaggccggcaggacgatcatcgactgggacggcatggccaagttgctcgtcaccgacgaggcgcgcaaggagttcgccgccctccgccgcgctttcgatgacgtaaacnaccagctccagacaattttccnagganccnaanccgttgnttgggaantatacagaaaaggatnggntcaaagtgntggataa

SEQ ID NO: 3024 - DNA, 287 bp, Zea mays
  misc_feature: Incyte ID No: 700347047H1
  unsure 14, 46, 132, 182, 283: a, t, c, g, or other
ctcagtcgcctgcnccgccgcttcgttcgtgtggaggggagaaganaggaaatggcggcgactgagggcgtgctcttggggatgggcaaccccctcctcgacatctccgccgtcgtcgatgacgccttcctnacaaagtatgacatcaagctgaacaatgctattctcgctgaggagaagcncttgcctatgtatgacgagttggctagcaagagcaatgttgaatatattgccggaggagccacccagaactctatcagggttgccaatggatgcttcaaantccg

SEQ ID NO: 3025 - DNA, 190 bp, Zea mays
  misc_feature: Incyte ID No: 700347049H1
attaaacatggtggattgcgtgagttcatatttttaagtgccgtgcactcagaatatctgtcaggtgttcccaacttcaaatactgtctttgaggcgaactggcatggctcatgtatcactcaattgtcctcagttgcttgagttggacttccaatcctgccataagctttctgataatgcaattcgcca

SEQ ID NO: 3026 - DNA, 295 bp, Zea mays
  misc_feature: Incyte ID No: 700347050H1
gtgcaagcattttgagattggtggagacaagaagggcaagggaacatctctcttctaagtttctcatcgcccatctgcgatgttggatcgaacctgtgggtctactactgttctaaaaactcgtcaaatttcaatgttactagtagttctgaaagcaggtcatgctgtgtatcaaattccaatgcctgacatttgcgctgagtgtgggttgtctttggctaaatgaagttttgcaccctgaatctcatgaatgtgttgtgtgtttgtttgatttgttctgcgatgcttagtctaa

SEQ ID NO: 3027 - DNA, 294 bp, Zea mays
  misc_feature: Incyte ID No: 700347051H1
  unsure 2, 161-162: a, t, c, g, or other
gnaaagaatgccattttgaaactaatggatgcagttgatgagtacattcctgatcctgtaaggcagcttgataaggcttcttgatgccgatagaagatgtgttttctatccagggtcgtggaactgttgttactgggcgtgttgagcagggaacaattaannctggcgaagatgttgagatcttgggtttgacacagagtggtcccttgaagactacagttactggtgttgagatgttcaaaaagatactggaccatggagaggctggtgacaacgttggtctctctcgtggtc

SEQ ID NO: 3028 - DNA, 298 bp, Zea mays
  misc_feature: Incyte ID No: 700347052H1
ggaaggtttgaggtggcccggaaggaaagcaatggcggtaacaagacatttacaagcatggatgaactaatttctgattatgagactggtgctttgcatcctgctgatgtcaaacctgcactggcaaaagcaataaatgaaattttgcagcctgttcgtgatcacttcaacaacaacaacgaagccaaagttctactaaacactgtcaagaagtacagagtaaccagttgaggagcggaaggtgttcatctttagggtgaatgtcgctgattgaaattcttatatgcttattctgtta

SEQ ID NO: 3029 - DNA, 208 bp, Zea mays
  misc_feature: Incyte ID No: 700347053H1
  unsure 39: a, t, c, g, or other
gttgtgcctgtcaaggcgtagtgaaatgaatcgtgagancgccgagtgacggtctgctctgctcgtcgtctgtagctgtgctcgtcgtgatttggcgtggtgggttgtgaaagtgtggtcgaattctggacccttcggaatctgatcgtggtgtgctgtgcggtgcgatgtgctgtagcgaaatttggttgctatctcttgttcactc

SEQ ID NO: 3030 - DNA, 299 bp, Zea mays
  misc_feature: Incyte ID No: 700347054H1
  unsure 31, 104, 141, 171, 205: a, t, c, g, or other
gagaaacagaagaggaaaaggaatccatggnggcgacgctggcgaggagggcggggcgctccgcggcgacgacgctatggggcgcggcgaggggcttcgcatcnctggggtccgacatcgtctctgcggctcccggcgtgnccgctgcagaaggcgcggtcctgggacgancggcgtcgccaccaagttctctaccacgcctctncaaggacatcttctaggggaagaaggtggtcatcttcggcttgcccggtgcatatacaggggtttgttcacaagcgcagttcctagttacaaga

SEQ ID NO: 3031 - DNA, 300 bp, Zea mays
  misc_feature: Incyte ID No: 700347059H1
gagacacccaagaaacacacagaagcgaggagcactacttgttggttggattctcttcagtctagcagctagtgccagttaagtttcagacacacatggggagcattggcagaggcacggccaactgcgccaccgtgccgcagccgccgccgtcgacagggaagctcatcacgatcctgagcatcgatggcggcggcatccgcggccttatcccggcgaccatcattgcgtacctcgaggccaagctccaggagctggacggcccggacgctcggatcgccgactacttcgacgtgattg

SEQ ID NO: 3032 - DNA, 300 bp, Zea mays
  misc_feature: Incyte ID No: 700347063H1
  unsure 31, 147, 211, 294: a, t, c, g, or other
gcaaggggtcataatggtggaagagtcatcnttgatgattatcgtgaggcatactattggcttcgtcagaacacgcctcctgatgctaagattatgtcttggtgggactatggataccaaattacagctatgggtaacagaactgtnattgttgataacaatacatggaataacacacacatagctacagttggacgagctatgtcatctnatgaagatgaagcatatgagatcatgcagtcacttgatgtgaactatgtgcttgttgtgtttggaggtgttactggatattcntcagat

SEQ ID NO: 3033 - DNA, 306 bp, Zea mays
  misc_feature: Incyte ID No: 700347064H1
cttattcaagtcgcatctcttctcagatatggagtgagatgcagacagatttcttgccgaatttcatcttatgtaataccacacagcggtttgtccggtccgcaaaaggaactcaccactcttctcatagatcaagtgcttctactgggaaaccttacttctattgtggatcacatgatttgaccatggcataccagggtcttgctgggctgtaccgtgacttttttggagtccctcacatgtttgcagttgttaaacttcttggttccagatcattacctgcaatcatccgtgctttactggata

SEQ ID NO: 3034 - DNA, 297 bp, Zea mays
  misc_feature: Incyte ID No: 700347065H1
cgtggagtccactggggccttaattgctgtctctaggtatgctagtgctacaccaatcccaccctctgttcttagccgtggtattggctggcagggcatcggtattcttctggatgggctatttgggactggaaatggatcttctgtatcagttgaaaatgctggtttgctagctttgacacgcgttggtagccgaagggtagtgcagatatcagctggtttcatgatattcttttctattctcgggaaattcggagctgtgttcgcctcaattcctgcacccatctttgcagctat

SEQ ID NO: 3035 - DNA, 293 bp, Zea mays
  misc_feature: Incyte ID No: 700347066H1
  unsure 43, 99, 175, 185, 239, 241, 258: a, t, c, g, or other
acttccagccggcacggggattcgagcttctgctctatcagcnactccactgggcgctgagggtctgtagcagagcggtgcgatcggggcagaaggganccatgatgagggggcaggcgtggctggcgctgctggtcgtggtagcgctggccttggcggacgcggcggcggggangttcgtggtngagaagaacagcctcgaggtgacctcccccgacgagctcaagggcaagtacgantncgccatcggcaacttcngggtgccgcagtacgggggcaccctgcacggatgg

SEQ ID NO: 3036 - DNA, 294 bp, Zea mays
  misc_feature: Incyte ID No: 700347067H1
  unsure 120, 210: a, t, c, g, or other
acatccactatgttttcgttgaggctaaacaatggccagcatcccttcagtctatcaaacataggttcagttcatggtgtcaccgagaagcttcagtcaagacatgagaccttgcctganaaattcgttgagacgctgaagctgatggaacaccgatacggcgcaaaagacttcgagacgagcagcgacacgagtctcctgcagccgggnacattctaccttcaccaaggtggactccatgtaccggaggttctattcccagaagccggccgaggaaataggcggcggtaaaac

SEQ ID NO: 3037 - DNA, 292 bp, Zea mays
  misc_feature: Incyte ID No: 700347068H1
gataaatggccacttgaaaagactgggtaatggtctgaccccgaggaagaatgggaatggagatctggaggctgcactccagttgaaggctcagatggagcaggcaggcttcaagtcagatgaacccacctaccatttgctgatggcagaactctgctcggctgaacggctgggagatgttacagctttattcgacgagatgatgacacaagagacgacattacataagatcgtccatagcagcatgttgcagttcctctgtagaatcaatgaaggtcagctactgcgcatc

SEQ ID NO: 3038 - DNA, 295 bp, Zea mays
  misc_feature: Incyte ID No: 700347069H1
  unsure 51: a, t, c, g, or other
ccgacatagggttacgccatcgccatgggatctgttgcctccgcagcagcncccaccttctcctcactcagcgctaccccaggagggcgcgccgccctatggccccgggctcgccgggatcctcccgcagacgtcagtgggagaggagaagaatgaggagaaggtggactacctcaacctcctctgccccgtgcccttcgaggagatccagcgcgaggctctcatgtctttgaagcctgaactttttgaaggattgaggtttgacttcacaaaagggttgaatcaaaagttttct

SEQ ID NO: 3039 - DNA, 294 bp, Zea mays
  misc_feature: Incyte ID No: 700347070H1
  unsure 2, 241: a, t, c, g, or other
cncgcccgcgcgcaccaaccgcaaggccggcctcgactccccgcgctgcgaggtcgtctgcggcaacttcctctccatgccgttcccggacgcctccttcgacggcgcctactccatcgaggccacctgccacgcgcccaggctgcaggacgtgtacggcgaggtctaccgcgtgctcaagccggggggactctacgtctcctacgagtgggtcaccaccccgctgtaccgcgccgagganccggaccacgtcgagtgcatccacggcatcgagcgcggcgacggctaccgggg

SEQ ID NO: 3040 - DNA, 292 bp, Zea mays
  misc_feature: Incyte ID No: 700347072H1
  unsure 61, 66, 77, 87, 93, 291: a, t, c, g, or other
catccatgtccctcatttcagctcaagttccctgttaagccagctgatatcaagaaaagantaganagcttgatcgnccgggagtanctggancgcgacaggagtaacccccagatctacaactatctggcttgacaacgttttggtggatcgttcccatttcattactatcagaaaaaggcactgtaaattaatttattttccggtttcttgttctttcatgcttttcttctctgggaggaagttgtagttgtagctgctgcaacgtgtttatatagaacaattttttcng

SEQ ID NO: 3041 - DNA, 294 bp, Zea mays
  misc_feature: Incyte ID No: 700347075H1
aacagcttgatagtgggaaaggaactcttcttcacttatgcgatgacgtgatacagcaagaagttaaagaggtcataatttgttactacattttaatggagcagggaaaagccactatacaagatcttgatttacggtgtgaagagctaatcaaagaagagtttggcgcagattgcaattttgatgttcatgatgctataaagaagttagagaagcttagcattgttcatcgggattcgattggaaggatcttatgcgttccgttgaagcgtgcgaatgagatcattggtacga

SEQ ID NO: 3042 - DNA, 293 bp, Zea mays
  misc_feature: Incyte ID No: 700347076H1
ctatgtcatcttatgaagatgaagcgtatgagatcatgcagtcacttgatgtgaactatgtgcttgttgtatttggaggtgtcactggatattcttcagatgatatcaacaagttcttatggatggtacgtattggtggaggggttttccctgtaatcaaagagccagattaccttgttaacggggagtatcgtattgacaagggggcagcaccaaaaatgctaaactgcctaatgtacaagctttgttactaccgatttggagaacttaccacagaatatggaaaacctcca

SEQ ID NO: 3043 - DNA, 164 bp, Zea mays
  misc_feature: Incyte ID No: 700347077H1
  unsure 106, 145: a, t, c, g, or other
gttgttggacagagtttcatgctccatcagatccggaagatgattggtcttgctgtagctgtgatgaggaactgtgcacctgaatcaatttatgatgtcgcctttncgcaaggatgtcaattctaatgtgcctactgcacctgancgccggacgtaccctagat

SEQ ID NO: 3044 - DNA, 299 bp, Zea mays
  misc_feature: Incyte ID No: 700347079H1
cctaccagtcgatacatgacttctcaaagcctttgatcaacatgatgaaggctgcaggttgggatcttgatggggctgctagtgcgatcgagcctggtgtggtttacacaagaagggctcacaagaagtttgcttttgaatcctatatttgccaaagaatgttcagtgggttccaagaagagagcttttctatcaaggattctaacatcagtgtttccaatgaggctttctccaccaattcctcgcggtgcgagccatggatcctctggatgtcctgagcccagaaccccgattcagta

SEQ ID NO: 3045 - DNA, 135 bp, Zea mays
  misc_feature: Incyte ID No: 700347082H1
gctgtgaaattgttgatgttctcgtcgggtgaacaaaggccagtagctagcttgcctgcttcataaatcgtgccggattgtaatgggcctcttagatttgacgcccctgttttggaatatagttgtatccgtgcc

SEQ ID NO: 3046 - DNA, 267 bp, Zea mays
  misc_feature: Incyte ID No: 700347085H1
  unsure 180-182, 184, 186, 194, 242: a, t, c, g, or other
aaccaatgtaagagcacaaaatttgaatggtgtgtctccatttggtgataagacgcacggcacaatcattggctactctacaatttccagcaagactaaaacaatccactgttcaaagaatgaggtcaaagctgaagatgctccagcctctcaaaacaatgctctaccttccacacaagnnngncntgctcganatgatgttggtatcttgccaactaaaccaatgcagtttgctgtaaaanatgaggagaaaacctcatcccacca

SEQ ID NO: 3047 - DNA, 281 bp, Zea mays
  misc_feature: Incyte ID No: 700347086H1
ggtatggcatgtttggtcggtgttgacttcagtgccaagatccttgcatctattgctaagtcatttgaggatgagtattcaaaagaagatggtctatctttgagaaaccttaccttactcttctgctatttgtgcatatttggtgttacctcaagcgatcttgtgtatgatcttctgtcgattctgagcaagcgcttgacagagctagatgtctctacagtgttgaccatcctacagtgctgtggaatgaagctgcggggagatgatccatgtgctatgaa

SEQ ID NO: 3048 - DNA, 283 bp, Zea mays
  misc_feature: Incyte ID No: 700347087H1
ggcgggggcggcctggcggccctgagggcggcgcgcgccgtgaaggagacgacggggatcgtgggccttgaggtggtgcctaacgcgcgagaggttctggtagggctctacgagcgcacgctcaaagagatcaaggccgtccccgaagacgagggttaccgcaaggccgttgaatccttcaccggtcaccgcctccagatctgccaggaggaggaggactggaagcgcatcgaggaccgaatcggatgcgggcaggtcgaggagctcatcgaggaggccgagg

SEQ ID NO: 3049 - DNA, 283 bp, Zea mays
  misc_feature: Incyte ID No: 700347088H1
cacattataccacatgctatagtgccctgtcatattttgatgtagcatttgtaatttctggtctcgctgtcacttacaagttcctcaacatcttatcgctccatcactgtgttaacgttgttcattatgcagaaaatggttatgtctttgtcatgcgataaggctgtttgggatgctgtcatgaataatgaggcagttcaagatttcaggagacctttacatgatggaaaagaaagcgatagaaagggaaacactggtggtcctgctgaagtgcttaagtggg

SEQ ID NO: 3050 - DNA, 284 bp, Zea mays
  misc_feature: Incyte ID No: 700347089H1
gcattctgcaggaactagcactgattataagtttggtttccagtttgatgatctggaacatgtccgccaagaagatgacagaaggaccttggaggacctttacgcatttccaacccttcttccttgcgcaaaagaaaatgcgctgctgtcagaaattttacctatgcagaaagatagtacactagcatcgagagttttgaagtttattcagaatatgagcatgaaagatccccttcagccagtgggtatcatccaagaatgcctttccaaatgtataaagagac

SEQ ID NO: 3051 - DNA, 285 bp, Zea mays
  misc_feature: Incyte ID No: 700347090H1
ctgcttttcagctgggcaatgcaacaagttagtaatcacctcgctactcttcaagttatgttaccaagcataacagaaggtgggtctctgtccaacattcttgaacaatgcatgtattgtgcaatgggccttggcttagttggattggatttccgtggcctccttccgccaatctttgaggacgcggttctaaatttattctcaaagaatatgagtatggcggttgaaaattttcaggttgttttggattcgcaccgctgggttccgatgccatctgttggcttt

SEQ ID NO: 3052 - DNA, 285 bp, Zea mays
  misc_feature: Incyte ID No: 700347092H1
atctgaaccattttacttctacggcttcaactcactcaaaccattctgttagtattgagtctcttgaggattctgttgctgatgccagaagcaataaggaacgtgctgcccatgccgtcgtcctgatgctgttgctcggatttgaccgcagacgcctccaagtccaaggtgacactgtacagtacggctgtagtgtcgagggtgctgttctcggctcctttgataatgatctgttaccttctatagaattggttacaaaaatgatagaggatgttgagcttctag

SEQ ID NO: 3053 - DNA, 285 bp, Zea mays
  misc_feature: Incyte ID No: 700347093H1
  unsure 41, 51: a, t, c, g, or other
ctttgatttcttggggtaacaaatttttatctattgctggncatacaaaanatccatactgaaggcattacagtgaaggaatttgatccgcatacttgtacctggtcaattgtcaagacttatgggaaaccaccggtgtctcgtggaggtcaaacagtgactcttgttggaacgacactagttttgtttggtggtgaagatgcaaaacggtgtctcttgaatgacttgcacatcctgatcttgaaaccatgacatgggatgatgtggatgcaataggcaaccctc

SEQ ID NO: 3054 - DNA, 289 bp, Zea mays
  misc_feature: Incyte ID No: 700347094H1
ggaagggaggaggtgagccaccggaagcggagacgtgagcactcgaccaaccccgtcgatccggctgcggcgcggcgtgctagatcgctaccgaccatggtggtggaggagatcgccgagggggtgaagaacctaaccgtcaccggagatgcggcggcttcaggcggagaggggcagaggaggggcggcggcggcagcagcaaccgcatccaggtgtccaacaccaaaaaacccctcttcttctacgtcaacctcgccaagaggtatatgcaacagcacggcgatgtag

SEQ ID NO: 3055 - DNA, 291 bp, Zea mays
  misc_feature: Incyte ID No: 700347095H1
catatgcaaagcttgtggttatggttctcaagtactcagtggagataacaccaaataaagccagtatactttccaagatcctatctgttacagtgaggtccattcagaaagatgctgaggaaaagaaagcttcatttaatcctcgaccatacttccgattgtttataaattggctctatgatcttactactaccgatggtcaccatgatagttctaattttcaggttttgactgcatttgcaaatgcattccacatgctacaacccttgagagttcctgcctggagctttg

SEQ ID NO: 3056 - DNA, 70 bp, Zea mays
  misc_feature: Incyte ID No: 700347102H1
  unsure 20, 22, 30, 35, 48, 64, 68: a, t, c, g, or other
gcgtaacgggggttgaaatngngtcggctnttcancccatcaagaggnttccaatctctttacnccgntt

SEQ ID NO: 3057 - DNA, 298 bp, Zea mays
  misc_feature: Incyte ID No: 700347105H1
ggacatcaggccccagaaaaaagtccgaacgcatctcttctttctactttcttgtaacccaagacgaactcggtgaactctttctcctcgcgcagaccggagcacaatcaaggattccagtccagtcctgccaatggagtgcgttttgggcttggttggccgcgacttcgcggtggtggcggccgacacctccgccgtgcagagtatcctcgtccacaagactgacgaggacaaagtaatggtcctcgactcgcacaagctgttgggcgcttcaggggagcctggtgaccgggtgcag

SEQ ID NO: 3058 - DNA, 299 bp, Zea mays
  misc_feature: Incyte ID No: 700347106H1
  unsure 27, 91: a, t, c, g, or other
aatgaattctttgattgggtgcaagtnaagcataaatgcctgatcctgtggggagaggatgatggaataataagcagcaaactagcatatnggttgcatcaggaactcccagacgcgattctgaggcaggtccggcagtgtggccatatccctcacgtggagaagccgagggaggccgcaaaacatgttcttgaattcctcgcaagaaacacgtcaaacaagtcagaccagtctccttccgagccgtcagtagtcgtgaaccgctgagcagatcacagatccttgaagggtaggctgta

SEQ ID NO: 3059 - DNA, 299 bp, Zea mays
  misc_feature: Incyte ID No: 700347107H1
aagacccatttccccgagcgcaagagtaccatggcggcggcggcagtttatggcggcctcaaggggaagcttggcgtcgaggatgcccccgagctgcagctgaatcgcatccgcatcaccctctcatccaagaacgtcaagaacctggagaaagtttgtgcggatttggtaaagggagccaaggataagcatctgagggttaaggggcctgtcaggatccctactaaggttctccacatcaccacccgcaaatccccttgcggtgaaggaacaaacacatgggaccggtttgagttccg

SEQ ID NO: 3060 - DNA, 193 bp, Zea mays
  misc_feature: Incyte ID No: 700347108H1
  unsure 92, 99, 104, 107, 112-113, 116, 118: a, t, c, g, or other
ctatggcttcgtcgtaagctcctctccatcagaggtgctgctacccaattccaaatgcgaatccatgtgtgtttttgtcagactatttcctntttcttntcgancangggcnnagncnaatttcatccgaaatagctgttgcccttgttggaactgatccatggatatagctgcatattcccattctgaaaaa

SEQ ID NO: 3061 - DNA, 180 bp, Zea mays
  misc_feature: Incyte ID No: 700347111H1
  unsure 180: a, t, c, g, or other
agggtgtctatggtcaggggcctgatcagagaggttgctgggtttgctccttatgagaagcgtatcactgagcttctgaaggttggcaaggacaagcgtgccctgaagcttgctaagagaaagcttggaactcacaagagggcaaagaagaagagagaggagatggcgggcgtcctcagn

SEQ ID NO: 3062 - DNA, 296 bp, Zea mays
  misc_feature: Incyte ID No: 700347112H1
  unsure 85, 183, 195, 203, 281, 286, 292: a, t, c, g, or other
agagaggagagagtctgcaggatccagcaggccgagggaggagtcagcggcgggccggagaatatgagcggcaacggcgcgaagnaggtggtcgatgcggcggtgaaggccggcaggacgatcatcgactgggacggcatggccaagttgctcgtcaccgacgaggcgcgcaaggagttcgcngccctccgccgnttttcgangacgtcaaccaccagctccagaccaagttctcccaggaaccccagccgattgattgggagtactacagaaaaggattngatcnaaaatngggg

SEQ ID NO: 3063 - DNA, 180 bp, Zea mays
  misc_feature: Incyte ID No: 700347116H1
  unsure 44, 151, 154, 160, 162-163, 177: a, t, c, g, or other
atacgtacagttaatagcagctagctgttggtgtggattgctangcgttagtagcctatagtaggtaaaaggaggcactcactcatctcactataggctactatacgtacagttaatagcagctagctgttggtgtggattgctatgcgtnagncttgtnannggaaaaaaaaaaanggg

SEQ ID NO: 3064 - DNA, 294 bp, Zea mays
  misc_feature: Incyte ID No: 700347119H1
  unsure 108, 243, 269, 283, 289, 293: a, t, c, g, or other
gactagttctagcctctttgtacagtatggaggtgagggtgtcaggtgtgatgtagatccctcatgctgttcattatgtgttcagaaggatgcagggtgtgtgatctngtgtgacctgaaaatcaggttcctgatactgtgtatttgtaatcttgctgagtttctttggtcatgctagcaccctatgtcacacattgaacataatatcacctgctacagagaatggtaaactttttcaaagtnttctcgcacaaaaaatctgcaaggtnggacacatgtctangacgangggna

SEQ ID NO: 3065 - DNA, 290 bp, Zea mays
  misc_feature: Incyte ID No: 700347122H1
  unsure 16, 37, 41-42, 84, 107, 172, 230, 234, 282: a, t, c, g, or other
catgccgctaatcgangccgccgcctcggcgtccgcnccgnnccccaccccggcgagtggctcaactccgcttcttcagcactncgcagacccggaatcctatcccnaactgccaccagctgctccccctcccctccggccccggtcgctgcggaggtgcctgcggcgccanaggaagcgaagtcgaagccgaggccacggcggtacccgaagcagtaccccggcgaatnggtnggcttgtgaagagatggcttgtcgccatgcggctgcgtaacccaaggncacaacat

SEQ ID NO: 3066 - DNA, 293 bp, Zea mays
  misc_feature: Incyte ID No: 700347124H1
  unsure 9, 35, 37-38, 41, 49, 72, 104, 153, 227, 261, 265, 271, 273, 281, 285,: a, t, c, g, or other
gttcaagcngaggaacggcggacgcaacaagcacngnnganggccacgnccaagtacatacgctgctccaantgcgccaagtgctgtccaaaggataaggctancaagcggttcttggtgaggaacattgttgagcaggctgctgtgaggganggcgcaggaggcttgtgtgcatgatggatatgttcttcccaaattgtacgcaaaggttcatcactgtgtctcangcgcaatccatgcgcacattgtccgtgtcggatnttgngagaanangagaaggngacncccgnntg

SEQ ID NO: 3067 - DNA, 293 bp, Zea mays
  misc_feature: Incyte ID No: 700347126H1
  unsure 38, 274: a, t, c, g, or other
aaagagggacgaatggcgagctctcagtgctgcgatancccgccggccctgaacccggcctgcggggagggcaaggtcgtcgacagcttcggcgggctcaaggcctacgtcgccggccccgaggactccaaggccgccgtcgtcctcgtcgccgacgtcttcggattcgaagcgccgattatgaggaagatagccgacaaggttgcttcgtcaggtatttgttgtggtaccagatttgtttcatggggatccttatgcacctgagaatgttganaagccctttcctgtgtgga

SEQ ID NO: 3068 - DNA, 193 bp, Zea mays
  misc_feature: Incyte ID No: 700347129H1
acacttcaaaaggtattggtagggcattgagagaaagtgactacaaggactcacctgccttgtacaaaggtgttgatggtgagactactgtggtagatcgtgtaatgctgtgctcagatacaaatgataagttatccattaagtgtattattcgtcacactagaaggccagaggttggtgacaaatacagtag

SEQ ID NO: 3069 - DNA, 167 bp, Zea mays
  misc_feature: Incyte ID No: 700347130H1
  unsure 149, 156, 165-166: a, t, c, g, or other
cctgtccactttccccgtgcttctccgccgtcgaggccgcgtcccagtgcgaagagactccgactcagatggccagccgctgggtccggcccgaggtgtacccgctgttcgcggcgacgggcgtggccgtcggaatctgcgggtttcanctcttcngaaacatcnng

SEQ ID NO: 3070 - DNA, 290 bp, Zea mays
  misc_feature: Incyte ID No: 700347135H1
  unsure 145, 148, 160, 173, 182, 196, 199: a, t, c, g, or other
gcctcctccatccaccacaccagtccgtcgttaaagctgcggcatcggcagcacacgccgacgggtacaaggagcactcattgcctccccatctcgtgtaggctctccccctcctccgcgctccgtccgtctctcatcaccgttncgncgccgccccacntctccctcctctngccgcggcntccgaacccgcaanggngcggcggagatccaaccggacggatctggatcgacctactccgaaaccgggccccccgatcacgagcatggacagaactgccaataatgcg

SEQ ID NO: 3071 - DNA, 288 bp, Zea mays
  misc_feature: Incyte ID No: 700347136H1
  unsure 9-10, 25, 144, 173, 241, 246, 259, 273, 279: a, t, c, g, or other
agacgaggnngacgcggcgccgttngggcttggcagcaaccagcgtctagcgcagtgcccttctgtctcctatctccccggagtccccgctgcccagcccggtctcactttccagtctccgagactccgagtctcgctcgcacnccgtcccctgcagcctgtgctctgggttngagggaggtgagctgcgagggagcgcggagggggcgatgagatggaggcagattcggcgaggaagagncttgnattgctggccctntttctcctggcggngccgtncgcccggtt

SEQ ID NO: 3072 - DNA, 287 bp, Zea mays
  misc_feature: Incyte ID No: 700347139H1
  unsure 96, 103: a, t, c, g, or other
aaccatctaccagcgactcagcgagcgagagcagcacacacgcagctagctaggagcagcagcagagcagcggcgatggcggcctccatgatctcntcgtcanctctggcggtggcgcctcagggcctgccgcccctcggccgccgcgcctcctccttcgccgtcgtctgctccaagaagaagatcaagaccgacaagccctacgggattgggggtggctgaacgtcgacgtcgacgccaacgggagaaaaggcaaaggcaaaggcgttgtaacattcgtccgacaa

SEQ ID NO: 3073 - DNA, 108 bp, Zea mays
  misc_feature: Incyte ID No: 700347142H1
gtaaattattgaagggggttccagcgttgcccttgtattgactcattcaagctagcatggggaacataattatggaataaaacaggtcgttgagcatgctaaaaaaaa

SEQ ID NO: 3074 - DNA, 168 bp, Zea mays
  misc_feature: Incyte ID No: 700347146H1
  unsure 155, 159, 161: a, t, c, g, or other
ccatcttcaacaccggcaccgggatggtcttggacgccaggccatctgcgggggctaatgctactgctagccaagtcatcgtgtcgcccgccactgggagtcccacccagcagtgggcgctcatgctgtgatctcatctatggctcatgagtcangagngngggggca

SEQ ID NO: 3075 - DNA, 83 bp, Zea mays
  misc_feature: Incyte ID No: 700347147H1
  unsure 61, 75: a, t, c, g, or other
caacttcccgggaggttgccatcaaaggtttctgggacatgtatgacccagagggctactnctcctgtggttccngtgactaa

SEQ ID NO: 3076 - DNA, 287 bp, Zea mays
  misc_feature: Incyte ID No: 700347149H1
  unsure 4, 7, 24, 28, 37, 43, 56, 72-73, 76, 89, 93, 95, 103, 171, 184-185,: a, t, c, g, or other
gcanctnatgctgctgctccagcnttgnggcgcatcnagcganctgggatagctgntgctactcctatctcnnacnactcaagggaacngatncngttgatanatgaacatcttcttgggtctggtttcactgccactgctgccatgctgcagaaggaggctggccttgcncctttaccattgnnagcagcggnngcttcctgcncancaagttgctgncctggaagcatcatcngttcagcaacagtggacctctggacgtgttcagngatttctctcaganaaaa

SEQ ID NO: 3077 - DNA, 288 bp, Zea mays
  misc_feature: Incyte ID No: 700347150H1
  unsure 7, 30, 66, 83, 87, 97, 208, 281: a, t, c, g, or other
gtctgtntcccgacgccgccgctaggtttngcgcctttgcctgcatcactcgctcattgcggagcncctctcttccgccggcntcgnaagaacgagntggcagagcgtttgacccgtatcgccatagttagcgaggacaagtgcaagcccaagaagtgccgccaggagtgcaagaagagctgccccgtcgtcaagactgggaagcttngcattgaagtgattcggcgtcgaaactcgctttcattctgaggaactgtgcatcggttgtggtatctgtgtanagaaatg

SEQ ID NO: 3078 - DNA, 281 bp, Zea mays
  misc_feature: Incyte ID No: 700347151H1
  unsure 67: a, t, c, g, or other
attctccttagtgagtgggaggacaggatgactcgaggcttattccgctacgatgtcactgcctgtnagaccaaggtcattcctggcaaccttgggtttgttgcacaactcaatgaagggcgccatcttaagaagcgccctactgagtttcgtgtggaccgtgtgctccagccgtttgaccctgccaaattcaatttcacaaaagttggccaggaagaggttctcttccaatttgagaatagtggtggtgatgacagctattcctgaacaacgctccaatc

SEQ ID NO: 3079 - DNA, 279 bp, Zea mays
  misc_feature: Incyte ID No: 700347153H1
  unsure 17, 22, 35, 62, 68, 87, 101, 122-123, 135, 138-139, 142, 144, 166, 176,: a, t, c, g, or other
gttcctgaagatgtcanatcgnacaaaagatatgnaggggcatcaaactggacagtaaaggnagttgntgaatcagtgaggaatgantttggcagcattgncatactagtgcattctcttgnnaatggcccagangtnncgnancctttgttggaaacctcaagangaggctatcntgcggcaatttctgcatcnagttactcctatgcntcattgcttcagcacttccttcctataatgaatcccggtggtgctagcatctctctaacatacattgca

SEQ ID NO: 3080 - DNA, 278 bp, Zea mays
  misc_feature: Incyte ID No: 700347154H1
  unsure 94: a, t, c, g, or other
ggctctggtcgtcacaaagttgtttgtgcatcgcggcggcgacaagggggcgacgaggcaggcggagggggcggcgactacagcggcagcaganctcacggaatggcggcgaaggcaatctcgagccccgtgccggtggagtggtacccgacgctggccgtcgtcatggtatccgtaggcctcatgttcaccgcctccttcttcatttatgaagcaacttcatcccggaggagccgtagcctgtcaaaggagatcgcaacagcagttgttgcttctgt

SEQ ID NO: 3081 - DNA, 274 bp, Zea mays
  misc_feature: Incyte ID No: 700347158H1
gcgctcttcagatcagatcggcaagtccaatcccgagcagaggtgcgactcgagcgctcgcgccggtgtccatttcaaagaggaagccgcggtagcactggtagcggcagcagtaaggggaagatgtcgtcggcgttcagcggcgatgagaccgcccctttcttcggcttccttggcgcctccgctgcgctcgtcttctcatgcatgggggcggcgtacgggacagccaagagtggcgttggcgtggcgtccatgggtgtcatgcgcccagagc

SEQ ID NO: 3082 - DNA, 275 bp, Zea mays
  misc_feature: Incyte ID No: 700347160H1
agctaatccatgagagagatgaggaacagagaaggttgccgccgcgtgacagtatcacccaggtcgtcgccagggcccagattaatggtcagtgtgcatcgctggggccgtttgcacatgttagtggccttcccatgcggagacatcaacaggaccgcgacaaattgcttgccggacttggggaaatcaccgacgatcacaccatgccgtggccagccttgtgggtgcctttctcgcagaagagcctgtgactgaggatccttgtgaccagcaga

SEQ ID NO: 3083 - DNA, 283 bp, Zea mays
  misc_feature: Incyte ID No: 700347163H1
  unsure 3, 8, 14, 17, 22, 24, 30, 38-39, 45, 54, 65, 69, 95, 97, 166, 198, 200,: a, t, c, g, or other
aanaactntttgtnagngtgancntgcgtnaagagtcnngagtcngacggaatngaaaaggcganaaanccagttctctcgagttttcctcggancngaggcgatggctgggaagggagggaaaggcttgctcgccgcgaagactacggcggccaagtccgccganaaggacaaggggaagaaggccacaatctcacncncctcccgcgccggcctccagttccctgttgggcgtatccaccgtcagctgaagcaaaggactcaggcaaatggtcgcnttggt

SEQ ID NO: 3084 - DNA, 282 bp, Zea mays
  misc_feature: Incyte ID No: 700347165H1
ccgaaagcatctcttgtgaacgacgtggatgatgttgagaagcattttccggggacactgactgccatcagagactggttcagagactacaagatacctgatggaaagcctgccaacaaatttggtctcggcaacaagcccgcaagcaaggaatacgccctgaaggtcattcaagagaccaacgaatcatgggagaaattggtaaagagaaatattcccgctggagagctctcgttggcctgattttggcccatggaagccaccacattcttttgaactgct

SEQ ID NO: 3085 - DNA, 282 bp, Zea mays
  misc_feature: Incyte ID No: 700347166H1
  unsure 65: a, t, c, g, or other
ccgccgccgctccgcctccgctccgcctcagcgcatcgccctccgccacagcgtaccgcgacctncatcgatcaccttcaactttcaatcatggcggacgtcgatgtcgaaccggaggttgccgccggcgctcccaagaagaggacgttccgcaagtacagctaccgcggcgtcgacctagatgcgcttctcgacatgtccacggacgacctcgtccagctcttccccgcgcgcgccaggagaaggttccagaggggtctgaagaggaagcccatggcactc

SEQ ID NO: 3086 - DNA, 273 bp, Zea mays
  misc_feature: Incyte ID No: 700347168H1
  unsure 2: a, t, c, g, or other
cnccgatccatttcagccgccgccgcgcgtagaagcaggagcagcaaggatgccggctggccacgggctgcgctcgcggacgcgcgacctgttcgcgcgccccttccgcaagaagggctacatcccgctcaccacctacctccgcacctacaagatcggcgactacgtcgacgtcaaggtgaacggcgccgtccacaaggggatgccgcacaagttttaccacggccgcaccggtcgcgtctggaacgtcaccaagcgcgccatcgggtcgag

SEQ ID NO: 3087 - DNA, 272 bp, Zea mays
  misc_feature: Incyte ID No: 700347169H1
  unsure 59, 270: a, t, c, g, or other
aaggaactggggatgccagacggtgttttgatgaatggcaaggggccatataggtatantgactcgctagtgccagatggcattgagcacgagactatcaaagttgagccaggaaaaacataccgtttccgtgtccacaatgttggtgtctccacaagcttgaacttacggattcagaatcacaacatggcccttgttgaaacagaaggttcatacacgatgaagcagaattttactaatctcgacatccacgtgggccagtcttactcntt

SEQ ID NO: 3088 - DNA, 268 bp, Zea mays
  misc_feature: Incyte ID No: 700347170H1
  unsure 43, 152: a, t, c, g, or other
ctgggatggtgggcggcatgctgctccacctgcgctcactccncccgcttcgagcagagcggcggctggatccgcgctttgctggaggaggccgagaacgagcgcatgcacctcatgaccttcatggaggtggcgaacgaggtggtacgagngcgcgctcttatcaccgtccagggcgtcttcttcaacgcatacttcctcggctacctcttgtccccgaagttcgcgcaccgcgtcgtcggctacctggaggaggaggccatccatc

SEQ ID NO: 3089 - DNA, 270 bp, Zea mays
  misc_feature: Incyte ID No: 700347171H1
  unsure 19, 268: a, t, c, g, or other
gagttcctgacgccgaagnattccgcaaaccggatcaaggcgaaggggctgcagaagctgcggtggtactgtcagatgtgtcagaagcagtgccgcgacgagaacgggttcaagtgccactgcatgtcggagtcgcaccagaggcagatgcaggtgttcggcatggcccccgaccgcgtctcgagggcttctccgaggagttcctcgagtccttcctctccctcatccgccgcgcgcaccgccatcccgcgtcgccgccaccgtcgtnta

SEQ ID NO: 3090 - DNA, 272 bp, Zea mays
  misc_feature: Incyte ID No: 700347172H1
aacagaaaaccacgcgccctgcaggggttcttgccctcgcctggcttatataaacccagcccctcctgcccccctactacgcagtgcatacatcctcaccacactgcaccatcattgcattagcaagcagtgaagcacaaagcacaaacaaagcaagccgatcgaattaataggtgcagcatagtgctcgatagcttgctcagcagcaagcaagcaagctaggtagccgtgtgaggttggtcgatcgacgagatgaagaagggagcaatggc

SEQ ID NO: 3091 - DNA, 120 bp, Zea mays
  misc_feature: Incyte ID No: 700347175H1
  unsure 69, 79-80: a, t, c, g, or other
atgatgtagtattatatatatgtccatgcatgcaatgcatgctcgtcgtccatcgcatgttgttgtcgntgttgtgtgnnttttcgatgatcctgtctctgttataaatatcattattat

SEQ ID NO: 3092 - DNA, 271 bp, Zea mays
  misc_feature: Incyte ID No: 700347176H1
caacacgatccaaagaacgacgtgggggagcgagcgatagagccagaacaagaggagcgatccagaggagaagacgaaagagtcaggggagctgctaaggaccgatggccgaccccagctattggatagggatggacatcgaaacctccgtcacgatgctcgtcatctgtctcgccgccgccgtcgtgagcgtgtgcctcttcttcattttcatgtgcatcgtgcaatggttggactcgccacggatgcgcgtcttcaggctcggcggcgt

SEQ ID NO: 3093 - DNA, 271 bp, Zea mays
  misc_feature: Incyte ID No: 700347177H1
ccgcaggtcaaggacactcccacgaagcgtcctggtcatatgcacccaggtagtgatgataatcacgtacctgctcttcgcgttgggccggctcgccacgctctacgtctccgtcgccttactcggcttatgctacggggtcctgctctccgtggtgatctcgacctcgtcggagctcttcgggctgaagcacttcgggaagatatacaacttcatcacgctggcgaacccggtcggcgcgtacctgttcaacaccctcgcggggtacgtc

SEQ ID NO: 3094 - DNA, 270 bp, Zea mays
  misc_feature: Incyte ID No: 700347182H1
agattctctttttgtggcctagcctagaaccgtacccacaatatattttttttataaaaaacgggcagatttcgggtatagtcgtgtttctttttttccatgcttggtcttcggtctccgggtttaattttttcggctcgccagtcgcctctctctatatcatctccttgctgtgtatcatcactagttactccatccgtttatatactgctagctggttccgagtgatacccacagcaacagaagcagttctccaggcaatagactagt

SEQ ID NO: 3095 - DNA, 268 bp, Zea mays
  misc_feature: Incyte ID No: 700347183H1
  unsure 260: a, t, c, g, or other
gaaagattggggagtgtaaagtagactgactggtccaagaaggatttggagtcttggcaacgtggactgagcagaataagagagttttgcagttgggaggaaatcagcattaagctactgtttattagggttggcgctagttgaagcaaaatagtccagcaatagtttgttcagttggctagagactatgtggtgatgtgtttggtttgtctctgtgcctcttgcttggtatggaaggctgattgaatttggccattgangcagaaag

SEQ ID NO: 3096 - DNA, 267 bp, Zea mays
  misc_feature: Incyte ID No: 700347187H1
  unsure 43-44: a, t, c, g, or other
ctgactagccacatccagtcaagcagtaaaggcgcaccatggnngcggcggcggagaataaggaggccgagcaggaggagcagcagctaccgcacgcgcagaaggataacgcgcccgccgccgccgaggaagacgaagcggattcggaggagaccgagcgccgcaaccgcgacctcaagtccggccttcacccccttaggcacaaactcgtgctctggtacactcgccggacgcctggagcgaggtcgcagtcgtacgaggacaaca

SEQ ID NO: 3097 - DNA, 262 bp, Zea mays
  misc_feature: Incyte ID No: 700347189H1
gtcgcgactcctatcctggtccagacagacgatgggcataaacacaggagaggaagccatggtgatatcatctttttgacaagccggggagaggtgacatcgtactctcctgggctgctcggccatgatgcggtgtggagatggcaagtatcatcaggggcgacatggtccaaccttccatctccatcgggaatgatggagaacatagtggtgcctaccttgaaggccttctccctacgtgcctatgacccgaaagaggtga

SEQ ID NO: 3098 - DNA, 263 bp, Zea mays
  misc_feature: Incyte ID No: 700347190H1
gggatatgaactcattgaatgcgataaaatatttgtccctgtgcataaagatgtacattggtgtttagcaattataaacgtgaaggaaaatttctttcagtatcttgattcccttggtggcatggatcataatgtaccaaaagtactggctcgatatatttcagaggaagtgaaggacaaaagtaacagagtaatcaacaccagtttgtggcatgaagagctagttgatattcctttacagcggaatgggtgggactgcggta

SEQ ID NO: 3099 - DNA, 263 bp, Zea mays
  misc_feature: Incyte ID No: 700347191H1
gagcacccgaggagactccgtgcgaccgaagccagagccagcggaaccgaacgggggtgtgctggagggggacgccgcgctgctggccgagatgcgtgggaggattgacgaggagatccgcaagcttgatgagaaaattgctgatgcggaggagaacttgggtgagagcgaagtccgtgaagcacatcttgccaaatctttgtactttataagggtcggtgagaaggaaaaggccctggaacagcttaaagtcatgaaggaaa

SEQ ID NO: 3100 - DNA, 267 bp, Zea mays
  misc_feature: Incyte ID No: 700347193H1
  unsure 168-169, 263: a, t, c, g, or other
cgaccccaaatcaattccaaattcaatccggtctcagtggttggcccgccgctgccagtgccagatcgaatcggactctcggctcgtgtgcagcccaccggcgagacgccgaagctatatttttatgcccatctgatccgatgcgtggtgtggcgtcgtctccgcttnnaaaagatcatcagtagccagctcaggagccgagcctggtcagggtagccaagcccatcccggtcctctcccggcgtcttctccctccgcaacgnggct

SEQ ID NO: 3101 - DNA, 273 bp, Zea mays
  misc_feature: Incyte ID No: 700347196H1
ggttgcacgtgaattggcagagaacacatcaaatcaacaacctgatcgagaatcaggaatagctactagtgctcttgtcagatctgctgcctttgaaccttctactgcacctgctaatcagtcgtcatctgctgttggtataattgcttccagcgcacatgatggatcatcaaactctgttctttctggtcctcccctgccgcacaatgtggagaatacttccagttctattgttggcatgcaaaatggtggttcgagtactgctgttgttcc

SEQ ID NO: 3102 - DNA, 306 bp, Zea mays
  misc_feature: Incyte ID No: 700347201H1
caatgatgtgggaagaagtcaaatcagagaaaggtggtccagctcctaggtatgatcattcggctgctgtttacgctgaccagtatcttctgatctttggtggctcttctcactctacatgcttcaatgatctttacctacttgacttgcaaactctggagtggtctcaacctgatgcccaaggagcacacataactcctagaagtggtcatgctggtgctatgattgatgaaaattggtacattgttggcggtggagataatgcaatggttccactgatacagttgtaattaatgcttccagttg

SEQ ID NO: 3103 - DNA, 321 bp, Zea mays
  misc_feature: Incyte ID No: 700347202H1
  unsure 102, 147, 276, 291, 311, 318-319: a, t, c, g, or other
gaagggatggccacagcgcgcctgctccgttgcgcctcctccaccttccttttcagcacctgcaccaatccgttgcgctcgtgctcccctcttcgtccggcngccaagcaacccccggggcggccaatgaaccaagggacttcctcnggccggcctcgtttccagaaggatccagatccagcggcgagggacaccacttttgatgcttatgttgttggcaaagaaaatgctccctggaattgtggttttgcaagaatggtggggagttgactatgngataaagaaccatgngatccaatttccaacttggngggggannaa

SEQ ID NO: 3104 - DNA, 300 bp, Zea mays
  misc_feature: Incyte ID No: 700347203H1
  unsure 219-220, 244, 270, 274, 281, 292: a, t, c, g, or other
atatcatcagcacaggtgttttgtaccgcatcattttgaagaaaaagctaagtgaaattcagtgggcagcatttgttcttctatgtgctggttgcacaacagctcaacttaatccttcgtctgaccatgtgcttcaaactcctattcaaggttggatgatggcaattgtgatggctctttgagtggttttgctggggtgtatacagaagctatcattannaaaacggccatcaagaaaacatcnaagggcaaaaactttggccataccanattnggggggncctcaatcaantgcaattg

SEQ ID NO: 3105 - DNA, 297 bp, Zea mays
  misc_feature: Incyte ID No: 700347204H1
gtagaagcttctgctgatgacaccgaaggaacatcaaaggttgttgaggaacctgcccctgagagcaagagggtatctgaatctgcagactacgatgcatcccagttgcatgagttttcccaggttgaagttggtgatgcccatgctgtagacggtgagggtgctggtgaggaagatggtgatattttggatggccaagatgcactgcctgatgtgccaatgacaccttctggaagcgagtttggagcggaacaggaagatgaggacgatgatgattcagagaggcgaaaccatcat

SEQ ID NO: 3106 - DNA, 295 bp, Zea mays
  misc_feature: Incyte ID No: 700347205H1
atttcctgatgaaaagtgagtgatatagccactttatttggaggtttttacacaagatagcatgtaactgaaatactaagatagtatgaatcaataaatgcacatgctgaattggcttcgttgtttagttttggctacaaacagataaggcaacaaatctcctgagacagtacttcagcaacttgcatgatcgactgagtatacactcttccacaatcaggttgaaaagaaattgattgatttttaggcaagaaggtgagcaaggcacctaagatccagtgctgtgaacccttga

SEQ ID NO: 3107 - DNA, 291 bp, Zea mays
  misc_feature: Incyte ID No: 700347208H1
gccaatcatggtgaaggaatcaaacaattcctccgtgaaagtcttcgcaacaccagtgcagaggtcatccagcatggtgcatgtttggggcttgggcttgcagctttgggcacatcagatgaggaaatatatgaggacataaagaatgtcctttacacagacagtgctgttgctggtgaggcagctggtattggcatgggcttgctcatggttgggaccgctagtgaaaaggctagtgagatgctgcttatgcacatgatacacagcatgaaaagatataaggggtttgtc

SEQ ID NO: 3108 - DNA, 295 bp, Zea mays
  misc_feature: Incyte ID No: 700347209H1
attagtgaaaaattattcacatagaaatttgaggtgttgaaggaaactgagaagaaattaggaattccaaagaaaactaaaaaggaagtagagaattcctcatgaagatttgcattaaagaacacatataatttctgtgtaagctttccacagaataaaaaaagtttttgctgctgaaataaaaagaggacttaaacaaccaatgatgaacaagttcataattttatcacaattaatatatacctattacctcttgtctcctagtttcagtcccatccctatgtaaagtaagtgg

SEQ ID NO: 3109 - DNA, 249 bp, Zea mays
  misc_feature: Incyte ID No: 700347211H1
  unsure 43, 48, 51, 54, 60, 70, 77, 83, 91-92, 99, 117, 122, 126, 150, 191, 210,: a, t, c, g, or other
ctctgctcctgctctctctctctctgggcgtcgattgggcgancggcngcngcntccccngggtcttcgnggggccngtcgcnggaacgannacccacnaggagactctacatcaanaactntagnaagtgtttgaggctgtaagctgcnatctgcaacgagctttctacaatgaaaggaatcctgttatnaacgcacagattgtactgnttttaaatcngtcagnntgtagtgtngacagaggnnctc

SEQ ID NO: 3110 - DNA, 298 bp, Zea mays
  misc_feature: Incyte ID No: 700347212H1
cttggtcctcctctggtttggtatctcggttcctcttgtatttgtcgggagctatctgggcttcaagcaacctgccattgaggctccggtgaagacgaacaagatcccgagacaggtccccgagcaagcttggtacatgaaccctgccttcaccattctgattggtggcatacttccgttcggagcagtcttcatcgagctcttcttcatcctgacgtcgatctggcttcatcagttctactacatctttggcttcctgttcctggtgttcatatcctcatcgtcacctgtgcggaga

SEQ ID NO: 3111 - DNA, 299 bp, Zea mays
  misc_feature: Incyte ID No: 700347213H1
cccggcgccgtctcaggacggttcacgaatggctacaaccttgccgatttagtcgcgcgacgtctggggttcaagatgagtccacctgcttacctctcgttgacaccggtatcaaagtttgacctgttcacgtgccgaattggtgccaattacgcgtctggtggatctggcattctcaacaccacgggaaacgggacactcacgctgcaaaaacaaatcacgctgttctcgaaaactaaagcaagaatgtcgtggggccgctgcaagctcagctctatggtatcgaggtcttgttccta

SEQ ID NO: 3112 - DNA, 306 bp, Zea mays
  misc_feature: Incyte ID No: 700347214H1
  unsure 2, 16, 99, 150: a, t, c, g, or other
tntaaattcaaaatanattttaaaatttattttgaatttagaacgagttcaagataaattttaaaatttcgttttaaaatatttgtatgcgaattgaanttcaacaaagaaaatatagtgctctatattctctctaaaattcttatcaanatgtcatacaaatattttccaagtaattctctttaaatcctttccaaaaatactaactaaatattccagcgatagttctccaaatactacctcatgtttggtgtcctccaatcatcggatctgattttgcttgctctattgccttgaactcttccc

SEQ ID NO: 3113 - DNA, 300 bp, Zea mays
  misc_feature: Incyte ID No: 700347215H1
  unsure 229-230, 237, 240, 247-248, 250, 269-272, 275, 277, 282, 284, 287, 291,: a, t, c, g, or other
gcgcatcgtaaatcctagtccatatatggcctatctacaggcacgaggttgtattctcgtggcatcgagtcctgaaattctacccgggtacaaaagaggacaataatcaatcgtccgcttgctggaaccataagaagaggcaaaacaaaagcagaagacaaaactttagaacaattgcttttgagtgatgaaaagcagtgtgctgaacatattatgctagtagatctcnnccgtacngtncctgctnngnacacttccggcaccgtttnnnnccngnctatngntanctgngcgnnccng

SEQ ID NO: 3114 - DNA, 313 bp, Zea mays
  misc_feature: Incyte ID No: 700347216H1
  unsure 2, 186, 283: a, t, c, g, or other
tnatcgtatttctgcctgtctctgatggacaagctgtaccgcccggacatgaccgttgaggaagcggtagacctcgttgataagtgcattaaggagatccggctgcggctggttgtggcgccccagaacttcgtgatcaagatcgtcgacaaggacggggccagggagtacgcgaggcgtgaactncgtcggcgacagtgcacctgctgaaagctgcagctacggttgccgcctgaggcatgaaattgtttgtgttagttgtttgtttctcagcgaggctatnagtatcaatggatatggtgggggtcccaaa

SEQ ID NO: 3115 - DNA, 195 bp, Zea mays
  misc_feature: Incyte ID No: 700347217H1
ctaagctgtgcttcgcagtcacctttctcgtttcctcttcatagggagcaaggtctttgggatatgataataagactcggtatagatatgtgccttgcgaatgtatcataattggattaggcgcacccctcacctgatcaactgtaactgccttataaattcaatcaaattgctatataatgtagatttttcttc

SEQ ID NO: 3116 - DNA, 190 bp, Zea mays
  misc_feature: Incyte ID No: 700347218H1
taacaatagcttggttttccttataaatattcttccccttgtatgattaaagaatagatagttttttttacttgcatacaggttatcagacatagcgaatagagaaacatgcaagaagatacatgtgtccataggacctactgtttagaacattggtcacattggcaaaaagataagctgccttttcatg

SEQ ID NO: 3117 - DNA, 296 bp, Zea mays
  misc_feature: Incyte ID No: 700347220H1
  unsure 13, 17, 37, 45, 58, 95, 280, 294: a, t, c, g, or other
gttctagatcgcnagcngccgctcgcgatctagaacntagtggtncactgggcaaganactgtaaagctggtgactggaaaaacaaatgctaacnttgtggagaaaggggccatatagaaagaaattgccagaacagtcctaggagtctcaggcgagagagaagttactcacggtccccatctccccgccgtggacggggccgcagtcgaagctatggcaggagcaggagccggagtcggagctatagttcgatcaagattccctgtctagatcttctangggagtcgtctgancc

SEQ ID NO: 3118 - DNA, 288 bp, Zea mays
  misc_feature: Incyte ID No: 700347221H1
actttgttgatggtcaagctgtattcctggatgctaaagagacatcagctttggtgagcttttgcttgcaactactccagatatactcctctcataacattgggaaggtaatgctctctctttcttcaagtctgcgtaatgagtcacaagcagaaaaatataaggatctgcgagctttgcttcgtcttctgacaaatatatgttcgaaggatttggttggcttctgtctgattgtggcggtgaaggttcacctgatatcgcagaggttatctacatggtctgatatgt

SEQ ID NO: 3119 - DNA, 284 bp, Zea mays
  misc_feature: Incyte ID No: 700347222H1
tgctgtcctctgtgctatccgctagggtttatctgctcgaggaatggcgtcggtgcaggtctccggcgcgggggtcggtgccgcggccttctctgtgaaggggaaggcctccaccggtgcgctccggcttcgctctacgttgaccttcggcgaggtctgcccggcgcggcgggcgttccgcggcctcgtcgtcagggccgctaccgtcgtcgcccccaagtatacaacacttaagcccttggctgatagagtgcttgtaaagattaactcttccgaggagaaga

SEQ ID NO: 3120 - DNA, 288 bp, Zea mays
  misc_feature: Incyte ID No: 700347223H1
  unsure 91, 110, 241, 255, 261, 263, 280: a, t, c, g, or other
catatgtctactcctgtttgtgcacttctttatggggcattcactggatttcatcctccaatatattttgagacgagcgcaatgataattncatttgtgctatttggganctatctgaagtgctcgcgaaaggaaagacatcagatgctatcaagaagctgtagagcttgctcctgctacagctattctacttctgaaggacaaagagggaaaatattcaggagagaaggagattgatgcntcgttagtaacaanctggcnantgcgttaaaaggtgttncctggttc

SEQ ID NO: 3121 - DNA, 286 bp, Zea mays
  misc_feature: Incyte ID No: 700347224H1
  unsure 2, 4, 7, 22, 26, 32, 37, 50, 53-56, 59, 68-69, 72, 80, 101, 139, 225,: a, t, c, g, or other
gncngcntccagtgtgtccgcnactncgctcnccctncagtcctcagttnctnnnnganccggtaggnngcncgcggganacgtagatggcggcttcggangcggcagggcggcggcaacaccggtgacgccgacagangggacggtgatcgcgatccacagctggaggagtggagcatccagatcgaggaggccaacagcgccaagaagctggtggtgattgantcactgcaacatggtgtcctccgtgccgngnaaggctcaatttttgctgatatggccaana

SEQ ID NO: 3122 - DNA, 295 bp, Zea mays
  misc_feature: Incyte ID No: 700347225H1
  unsure 15, 20-22, 24-25, 27, 30-33, 35, 37, 39, 48, 58, 65, 68, 70, 75-76, 79,: a, t, c, g, or other
cagacgttcaggttngtctnnncnntncannnncnanangcgcagggncgggccatgncgcgtcnaananggcgnnagnannnaagcnaggcaaagcagcagtaacttagtacaagtagtttagcncncaaaaccantggcgcccttctgaaatgagtnntccttggaagggacaggaggaaaacttgtagattccattagcagtttagcacccaaaaccaatggtggtctctgctcacagttccattaattgctagttgaagggttcgttggagcccacattaggttggttccc

SEQ ID NO: 3123 - DNA, 292 bp, Zea mays
  misc_feature: Incyte ID No: 700347227H1
  unsure 267, 269, 290: a, t, c, g, or other
ggcctgagcaagactgcaaatgaggtgactatcctcatagaggcctacaggaccctgagggacaggggccctgtcccagccagccaggttgtgagagaccttagtgggaagttcgcattcatcctgtatgacaccctgtcgaagtccacctttgttgctgctgacgctggatggtagcatccctttcttctggggcgttgactacgaaaaccaccttgtgttctctgacgatgttgggatctcaagacaggctgcggcaattcgtangnccctttcctaaagggtgcttnta

SEQ ID NO: 3124 - DNA, 294 bp, Zea mays
  misc_feature: Incyte ID No: 700347228H1
  unsure 176-191: a, t, c, g, or other
ccttcccggccgatctgcatttccgtcgttccacaccgtcgttggccggcccatagctctccccctcctggttagtgtagtgagtgcagcgaacgagtgcaacggtgagagataccgagatggctgagggaagaggcagtgcaagggccatcggcgccatggcgttcgccgttgcnnnnnnnnnnnnnnnngtcgccatcgccgacgcagccaccacctactacgtcggggacagcaacggctggtccttcagcagccccagctggcccaacggcaagcattccgcgccggaga

SEQ ID NO: 3125 - DNA, 269 bp, Zea mays
  misc_feature: Incyte ID No: 700347229H1
  unsure 19, 22, 38, 56, 130, 161, 208, 211, 223, 225, 268: a, t, c, g, or other
gctttatagctgatgaggnaangcaacaatttgaggangctgtccaacatgacttngttactgggtttgggaagaagctcagcagccttctggatagatgtttatcagagtatgacatggaggctatttnttttgatgaaggtgtcagaagctcgaaaagncaacttttgagtctaaactgttacagttgtcaatcctgcctatcaancgntctaagtcattngncactagaactttagaagcattaaggagtacttggcaaggcctng

SEQ ID NO: 3126 - DNA, 289 bp, Zea mays
  misc_feature: Incyte ID No: 700347230H1
  unsure 190, 196, 213, 217, 284: a, t, c, g, or other
cacacagaaaaccctagccgccgccaccgaagcggcctcccaggtaagcaggagcgtccaccccgccgccgtcatgaagcgcaatccccgcgtcacgagctcccgccggaagtgccgcaagggcactttacggccccgtcctccgtccggcgcgttctcatgtccgcggggtgtgacggagctccgcacnaagtanacgtgcgtccatccgantcgnaaggagacgagtgcagttctgcgcggcactaaaaggccgcgagggaagttgtgcagtttacgcgccntggtt

SEQ ID NO: 3127 - DNA, 134 bp, Zea mays
  misc_feature: Incyte ID No: 700347231H1
tttcttcttaatataggataaatttgttgactattactcgacagttttgacggtatgtttaacttgtaatcattctagagtgttgtaaccatcaagagttataagttagatgcttcttaatcttgcagtattct

SEQ ID NO: 3128 - DNA, 201 bp, Zea mays
  misc_feature: Incyte ID No: 700347232H1
  unsure 8, 10, 12-13, 27, 33, 35, 38, 61, 68, 183: a, t, c, g, or other
ggcaaggntngnncgatcactcctctnccggancnggngaccatccacaccccgaaggacnaggacgngccgcgccctccggtcttggcacctcctgaggtgtaaggtcccaactgtgtccttgaaatggcagtttgatcgggtcctagataggtttctatcttacgataaggacaatgctangacagttggttaccttaa

SEQ ID NO: 3129 - DNA, 291 bp, Zea mays
  misc_feature: Incyte ID No: 700347234H1
  unsure 219, 225: a, t, c, g, or other
ttcaaaacgatcatcaagaaaccctactccagttctttctatccttgcgaaggacattagtgacctagctacgaaggagaaaaaattgtacagtccaatactgaagacatggcatcctcttgcttctggtgttgctgttgcaacccttcattcttgttatggaaatgagctgaagcagtttgtagctgggcttacagagctgacccctgatacagttgnagtacntaaatcagcagacaattagggagggaccttgttaatatagctgtagaagatctgtggatagtggtg

SEQ ID NO: 3130 - DNA, 292 bp, Zea mays
  misc_feature: Incyte ID No: 700347235H1
  unsure 71, 259-260: a, t, c, g, or other
gggaattatcagtcagatggactgcttgatgatattattgagattgctttttacacagaggactgcatggnccaaccatttttgggagagaaattgccatcacctatttaataacagtgaaatggatgatggatttgagctgaatgcagccacttcttcacacgaatttcttagatctattccggaaggcaatgttactcagatatcactagaacggaatgcctgtcctgatcaaatcgactcatattatatgcccgannttcatcaatcatatccactctatgtgatgaag

SEQ ID NO: 3131 - DNA, 289 bp, Zea mays
  misc_feature: Incyte ID No: 700347236H1
agaattcttgtggctacagatttagttggcaggggcattgacattgagcgtgtcaacattgtgataaactatgacatgccagactcagctgatacttatttgcacagggttggaagggctggacgttttggcacgaagggacttgcaattacctttgtttcctctgcttcggattctgatgttcttaaccaggtgcaagaaaggtttgaggtagacataaaggaactgcctgagcaaattgacacctcgacctacagccatcataaatgggaaggacaactgagaggag

SEQ ID NO: 3132 - DNA, 279 bp, Zea mays
  misc_feature: Incyte ID No: 700347238H1
  unsure 135, 251: a, t, c, g, or other
tcctcttcttccgtcgctctcgctctcggtctcggactacggttgagcgaagtcgtcactgtaatctactgatctgcaaatggcggaggcggaggcgacggtggggcgactgatgctgtactcgtactggcgcanttcgtgctcccaccgtgcccgcatcgctctcaatctcaaaggtgtggattacgagtacaaggcggtgaaccttctcaagggcgagcagtctgatccagaattcgtcaagcttaatncctatgaagttcgtccctgcgttggttg

SEQ ID NO: 3133 - DNA, 222 bp, Zea mays
  misc_feature: Incyte ID No: 700347239H1
  unsure 20, 202: a, t, c, g, or other
gagtgggagacccgcgagangctgccgtgtagggaccgtagactcagcgactgcgaaggagggataaggggatggccgggatcggaccgatcaggcaggactgggagccggtcgttgtgcggaagaaggcacccaccgccgccgccaagaaggatgagaaggcctcaacgccgcgcgccgcccggtgcggagatcgataccngaagatgtacaacgctggta

SEQ ID NO: 3134 - DNA, 291 bp, Zea mays
  misc_feature: Incyte ID No: 700347243H1
  unsure 14: a, t, c, g, or other
ctttctcctaaganctcgccgagaaagacatcttgcacagccgaggagaaaccagaatgcaatgggagcttaaatggtggtggcggctctgcggatgagaagtcaactgtaggtatggagcagcagaatggtgttcagaagaatgttgggagtagcaaggtccagccacatggacatgcaactgaatagagtgggacttatagtacatagacaacagaaaactgaagagacgaggagttgaattttgggccgtgaatttgcggtagtgcgcagagctcagcagaggtcttg

SEQ ID NO: 3135 - DNA, 291 bp, Zea mays
  misc_feature: Incyte ID No: 700347245H1
  unsure 19, 27, 46, 62, 64, 70, 89, 194, 239, 286-287, 290: a, t, c, g, or other
gcctgaggattcgattatnctgttcgntctcgcccaagtcatcgtntggtcgtcgcccgcanangcgcanacgcccaaagccggaaggngcgccatggccgcgtcggatctggagagcaaggccaaggaggccttcgtcgacgacgacttcgagctggccaccgagctctacagccaggcctatgacgccgggnccgccaccgccgacctctatgccgaccgcgcccaggcgaacatcnagctcgggaatacatgaggctgtggcggatctaacaaagcaatgagnntgnt

SEQ ID NO: 3136 - DNA, 300 bp, Zea mays
  misc_feature: Incyte ID No: 700347246H1
  unsure 44, 87, 89, 217, 226, 232, 262: a, t, c, g, or other
gctcgaaggagaagcccactcttggaggcacgcggattaagacncgcaagcggaacattgcagctcctttggaccctgcatcattcncngatgcaattgtccagatttatctggataatggtggagatctggaactcgtcgccaaaagtattgagtctccgacctcaacttctcacgttacggtgacaccttttttgaggtggtttttgttggaagncgcactcancctggnactgtaaaacctgaagaaggagaccgccanccttattctatgttagattgtgtggcacagcgtgaaac

SEQ ID NO: 3137 - DNA, 168 bp, Zea mays
  misc_feature: Incyte ID No: 700347247H1
  unsure 149: a, t, c, g, or other
atttaaggagttctttggatcccctggcatgggtggcatgagagcggaaccaggattccagaggtcaatgtttggcaacgatatcttctcttcacgctttggcgctgagggttccaccagtatgcagcagccaccacgcaaggcagctntcattgagaacccacttcc

SEQ ID NO: 3138 - DNA, 315 bp, Zea mays
  misc_feature: Incyte ID No: 700347248H1
  unsure 118, 153, 190, 199, 206, 211, 222, 227, 256, 268, 272, 280, 291, 306,: a, t, c, g, or other
cctttcactccgccgttctctgtcacgaccgggaaaaacctcgccgccgccggcctcctctctcttgccttccatcccccgttgcgtcgaaccgtccctctcggtaaacccgcatcgncttgaacccttaacctccaaggcggaggatccggnaaaaaggttggaccaattaccccaatcttgcaagggngaaggggantagaaanaaggntgaatggattnggagntggtaaggatggaagatggtgctggcgcngacgctgccgtnaaanaaaggtgnagacggcgganattatccaaagggcnantccgggg

SEQ ID NO: 3139 - DNA, 299 bp, Zea mays
  misc_feature: Incyte ID No: 700347250H1
  unsure 69: a, t, c, g, or other
gcaggctcgccctcagccagtggaactggcagagtcgtctccagatgctggaagcttagtagcaggctncgccgtcagccagcttgcctcgcgctttggaccgccgccgccatccccgtcgttccagtgccctagggcacacaaggggcacctctctctgtgtaccatatagcaagcaatgtgtctcagtgttcttgaaaggtgctctcgcgttacagtcgtcgtgtgttgccaggcatgcgtgtgtttttcgttgatttgtttattttcttcagtatagctaggggttgtgggttgaa

SEQ ID NO: 3140 - DNA, 292 bp, Zea mays
  misc_feature: Incyte ID No: 700347253H1
  unsure 130: a, t, c, g, or other
ggcaaagaagacaaaccaatgttgcacaatactttaaactttggtgcttcaatcatgtttgcaagaaacaaaaacgatcgatattgtgctaatttactgtaagttaagtcgcccatgaagcgtggacacncggttgcaaggctcgagctcagtgctgatggtctcagtttgcaaggctatagttttctccaagacctgccgattggactgttttcttgtgagaattcctgctctccaaacagcacatggagtatcatctttagtggttatgaaactgcgtagtgcctgctaa

SEQ ID NO: 3141 - DNA, 287 bp, Zea mays
  misc_feature: Incyte ID No: 700347255H1
gtcagaactatgttttcgctcttcttactggataccgtgatccacctgctggtgttcagattcgtgagggtctgcactacaacccctacttccctggtggtgccatagccatgcccaagatgctcaatgatggagctgttgagtatgaggatggtactcctgcaactgaagcccagatgggtaaggatgttgtatcattccttcatgggcagctgagcctgagatggaagagagaaagctgatgggagtgaaatggatcttctactatcactagcgcttcttcaagc

SEQ ID NO: 3142 - DNA, 292 bp, Zea mays
  misc_feature: Incyte ID No: 700347256H1
  unsure 78: a, t, c, g, or other
tgatagtcaattggtcgtcaacgtgtgacaagtgttgacatcccgttactaatatgaccgtccctccacgaaggggtnctaatttcgacgcactttgtatgtgcttcatgcatttcattctcatatctctataatctcttataaagcaccaattttatttctcccaccgtcaccctttttgcaaaaaaggttcttatacttttttctaaacaatccgcgatttataagtcagatctgatcctgcggactccacccgaccccacacatctcgcaaacggtagttttgattgac

SEQ ID NO: 3143 - DNA, 229 bp, Zea mays
  misc_feature: Incyte ID No: 700347258H1
  unsure 11, 14, 58, 96-97: a, t, c, g, or other
agatcttgctngtnagcaaacacaagcaagatcttccaaatgctatgaatgccgctgnagatcactgataagcttggactgcattcacttcgccanngtcattggtacattcaaagcacttgtgctacaacgggtgagggattgtatgaaggccggactggctgttccagcaacattgcaaccaagttcctaaattgtcaagcgaggtttggatcatctaggagctttg

SEQ ID NO: 3144 - DNA, 290 bp, Zea mays
  misc_feature: Incyte ID No: 700347262H1
  unsure 184: a, t, c, g, or other
agcggaggaagcagagggtactcccccgccgctgcccgccaccggcgaggcccgcaaccacggcaagggcgcagcaatatctgcagcacaattcctctcctggaagcagcgcaagtaggatgcagaggtagccgcaaggaaagctgaagcagctgagaagcgagctgatgatatcgcttcgggngcggcgcagatgaacggccgcgagctgttccaacatgagccctgggtgttcgacaacaacatttactgagatcgtgtcgggctatgttctgcattagtccagcttc

SEQ ID NO: 3145 - DNA, 298 bp, Zea mays
  misc_feature: Incyte ID No: 700347263H1
  unsure 13, 33, 36, 56, 67, 69-70, 83, 93, 102, 117, 127, 151-152, 158, 163,: a, t, c, g, or other
ggaccaggtaagnagcagcaggaaccctagcancgncgcattccgcagccatgggnatcgacctcgntnngggtgggaggaanaaggagaccnagcgcacancgcctgaagtccgangatctttatnctcaagctccttgtcaagctctanngtttcntggtnangangncnaagancaacttcaangctgtnattcncannaggntcntcatgagcaaaaccaatcgcccaccaatcnccatggcgccggnttgtcaattcatggtaaggaaaggngaagaacatngctgtgattgt

SEQ ID NO: 3146 - DNA, 295 bp, Zea mays
  misc_feature: Incyte ID No: 700347264H1
  unsure 70: a, t, c, g, or other
ctggaaccattgacaacataattcagtgcaagctttacaggcctggatctgttggttttgtgtctaaatngggtggcatgtcaaatgagatgtacagcaccattgccagagtgacagatggtatttatgaaggaattgcaattggaggggatgttttccctggatcaactctgtcagaccacattctgcgttttaataacataccacaggttaaaatgatggttgttcttggggagcttggtggaaaagacgagtattcacttgtggaagcattgaaaccaaggaaggtccagaa

SEQ ID NO: 3147 - DNA, 294 bp, Zea mays
  misc_feature: Incyte ID No: 700347266H1
  unsure 44: a, t, c, g, or other
ctttgaaaatggcatgacacatccttgtaaaaagcagtagggantgatcacattcttcccgagtagtatcctcttcagtgctgtggcagttggagcagaagggaaaggcagctatcttcaaaggcacctctgctgatgacgaaggcgtaaagttttcggtgtaattcttttgcgatccttaaactggcagactaataatctcgttcagccggtgcccttgaacatggcatgacacacccatagcctcgatcatcagtgccctttgaaaatggcatgacacatccttgtaaaaag

SEQ ID NO: 3148 - DNA, 287 bp, Zea mays
  misc_feature: Incyte ID No: 700347267H1
  unsure 6, 8, 13, 26, 29, 58, 91, 106, 116, 125, 127, 129, 136, 141, 173, 181,: a, t, c, g, or other
cgccgnangtgcncaccgctgaggtngtncccgaggacgaggacggcatcaggaggtntgggatagtatacaccaggaagaacggcaagcnatccaaggtcagccntctcctgctnccgcaagancnanaggcccnctgtnacctcgccgctgcgattccatgctcctcctcncgggagtntgcttcacgaactggcttcttggatgcccatttctcggcnctggtagatggtgtntccactcatctggggttcaanngctngttgtcttgtagatagntttannct

SEQ ID NO: 3149 - DNA, 286 bp, Zea mays
  misc_feature: Incyte ID No: 700347270H1
  unsure 265: a, t, c, g, or other
atgctgtcgcagcagaaaacaataatcaattcaatggctgtaaatgaggatggtgtcttggcaactggaggggataatggaagcctgtggttttgggactggaagagtggtcataactttcaacaagatcagactatagtccagcctggatcactggagagtgaggcatgcatatatgccctctcatatgacgtgagcggatcaaggcttgtgagctgtgaggcggataagactataaagatgtggaaagaggacttgacaggangcaaagactccatcccatcat

SEQ ID NO: 3150 - DNA, 284 bp, Zea mays
  misc_feature: Incyte ID No: 700347271H1
  unsure 267: a, t, c, g, or other
gaggcagcagagaagcttaagtttgtcatttatcaaaggcccaaagcattccaaaatggaagcactgatttgggaaacaagaatggtgcaccaaaaactgttgaagagagaatagaggaatataataaagcacgagcacgcatcttcaatggttctgtttctgcagattctgatgctgcaagtgttttgggaactctttgcactggcagagatgagtccagtaatgttgaaccttctgttgatgaaatcaaagtcagcacgtgaacnaccgttccagagttgcg

SEQ ID NO: 3151 - DNA, 284 bp, Zea mays
  misc_feature: Incyte ID No: 700347272H1
  unsure 20, 81, 230: a, t, c, g, or other
gctcttcatctcccacaccnacgagcagctcccctccaccgactactaaaagccgaagccgaccgacctaggggtgcgcangcagctagcgcatccagctctctctccccgctcgccgccgtttagtttctctcgtgcacgtgcatgcatcgtcgactgtctcaggccgccgctgcgccggcgccgctcgcatcgtttgcttccttggaccagcagtcgtcgccgtcagntggaactgcttgtaaccgtgaattccggacccgtttgcttctgtaagatttgtg

SEQ ID NO: 3152 - DNA, 282 bp, Zea mays
  misc_feature: Incyte ID No: 700347273H1
gagaaaaggaaatatcagggaacaaaccagacgtttgtgttcacaacaatacatggtgaacctagacttttcagaccaactggtgcaaacagattctactatttgtgcttgaataatgctttagcatttggaggtggtggaagcttcgcattgtgtgttgatgaagatctgttacatggaagcagtggatcatgtgagacatttggaaactcatgtttggcatatagtccagagtttgaactaaagaatgtggagttatggggattcacacattcatggagc

SEQ ID NO: 3153 - DNA, 284 bp, Zea mays
  misc_feature: Incyte ID No: 700347274H1
  unsure 19, 188: a, t, c, g, or other
ggcatcgctttaaaaagtnttttgcgtaagggtgcttaagcacataatagatgatcagtatgtatttatttggtcagtggtttcctatgcctggcatgagctgagtgaacaagcatgttccgagtaagtcctcattctgtgattatcatgtggatcagaatctagggattttgaattgccatgtcctncaagccttagatgaggtgcctctgccttcttccctgatgtcatctcttaccacccttcctgccatcactctgtgtatccacagagtaaacagtatc

SEQ ID NO: 3154 - DNA, 280 bp, Zea mays
  misc_feature: Incyte ID No: 700347275H1
  unsure 242: a, t, c, g, or other
ggagggaggaaagagaagaagacgatccgctagcgtgtgcgtggcgacgagatgtggcggaggcgagtgggcgcccttccttctccgatctccacgaacttcttcctcggcctcctcggcctgccagagccgccgccaccatcttctccccagcgaggaacctcttgctctcaaccgtcttgccaggcttttcacgtcccaggctggaagtgatggtggcgatacccagaagccctttatgntttgtctaggtggtctgggagtggcaaaggaacacatg

SEQ ID NO: 3155 - DNA, 285 bp, Zea mays
  misc_feature: Incyte ID No: 700347276H1
gccggacatcggcttaagcccacggctgcttaccgctgggaccaggtcgaggagccattcgcacgacaccagcgtgcttacgtggagtactcaaacgagctcgacgcacttactccttcgatggtgacttggcaaccgtatcttgatccatatttcgccagcatacagttgagcagcatgtgctcaatagacgagaacctctacctcatgaggtgtcccctcatctgtttttatgctgttgagtaccacttgccccacagagttgctcgacagttcggattgcgc

SEQ ID NO: 3156 - DNA, 287 bp, Zea mays
  misc_feature: Incyte ID No: 700347277H1
gtcctctcctctgtccctctacggtgcttctgctcgccggcccaaaatcgcctcatccgaccacgcccccttccaggctcccgtctccatgggtctcctctcaaacaggattgggagggagagcctcaaggcgggggatcatatctactcctggagggcggcgtgggtctacgcgcatcacggaatatatgtgggcgatgataaggtgatccatttcacaagaggaagaggacaggaggtcggaacaggaactgtcgtcgatattattcttgtgagttccaccccaa

SEQ ID NO: 3157 - DNA, 289 bp, Zea mays
  misc_feature: Incyte ID No: 700347278H1
  unsure 137-188, 267, 285: a, t, c, g, or other
cgtcgctctgcccgcattcccttccacaacaccgagacgccaggatgacggcgcagactgcggaggagctcgccacccagattcgagcagcagaagctcgaggagcagaagaccgaggcagaggaggttgtggtggnnnnnnnnnnnnnnnnnnnnnnnnnnnnnnnnnnnnnnnnnnnnnnnnnnnncggacaagaaggggatgccagcggcaagttcaaagccaaagcaggagtgagaagaagagccgcaaagccatgctgaagntggcatgaagcccatcanggtg

SEQ ID NO: 3158 - DNA, 288 bp, Zea mays
  misc_feature: Incyte ID No: 700347281H1
  unsure 40, 65, 159: a, t, c, g, or other
caaagccaaaaccccaatcgcacaggagagaccgagagcnaggttttccatccatggctcccggngtcgcttccgtactggtcccgcaggagcccgtcctcctcaaggacatcatcgcctcaccgtccccctgcgggaacaccgctgtctccgcccgcnacctcttcggcaacggagtcgcgccgccacgcttccttcggacgacggcatcaaggacgtcgctgccgaccgccaggtgacgcgactctccatccccaagatttcaccggagacgtgctggactgctca

SEQ ID NO: 3159 - DNA, 287 bp, Zea mays
  misc_feature: Incyte ID No: 700347283H1
  unsure 164: a, t, c, g, or other
gccaaagaagaggttgcatcagcaatggaccagctaaaggaggcagagtctgaaacgaaggctctccgatctatgacttcagagaacggtcttaactcaagaagaaatggaggaggttgtcctaaaaagatgctggcttgcacgctattggggcttagcagttncaatatggtgtgtatcccgaaattgcggtatcaaagcatgaacattggtcatccatgggctcctcttcctcctgaggtgtcctttccgccggtcaaaaagcttagggagggacctcgaaaaca

SEQ ID NO: 3160 - DNA, 287 bp, Zea mays
  misc_feature: Incyte ID No: 700347284H1
acctttttttacagcagtgcatgttcgtctcatggtgctgcattcagtttacaatgtgtctgaaggatttgaagaccccacccccagatagtggatgggcttttttttacatattgtatgtgtcaacaggtaatcagaaggctggctcagaatcgtgaggctgcacgcaaaagccggctgcggaagaaggcgtacattcagcagctcgagagctgtaagctgaagctttctcagatggaacaggacatgcagcgagcccgtacccagggcctctttctggaggagat

SEQ ID NO: 3161 - DNA, 281 bp, Zea mays
  misc_feature: Incyte ID No: 700347285H1
  unsure 118: a, t, c, g, or other
ggatgcagactggatgcttgtcggtgatcttccctgggattattttacctctatctgccggaagctcaaaatcatgaggggctctgatgctgttggaatagctccacgaaccgtcganccagacaggtcagaacaaataagctttggcctttgcctgcatccaaggaagacatctgagctagctgggagactatgttgaaggctgaagcctgaaatagttgccgggaatcgtcaaaacccgtcaaatgtttagtgtagttttcacgtgtccttgagacatg

SEQ ID NO: 3162 - DNA, 282 bp, Zea mays
  misc_feature: Incyte ID No: 700347289H1
  unsure 2, 35-37, 47, 49, 106, 209: a, t, c, g, or other
anatcaacccgttcgttcctcccttctcccccctnnncccacatcgngnagcctcccccctgcttctctccaccgctcaggtcaggccaggcccggcgggagagangatccggcgagagacgcggcctcttgctcccctcaacccccttaaagaagcgcatagaagcttcggaaggtgcccctccgcggctcgaaggaggggaggggangccgcggacaatgacggcgatggaagccgccgtcgacgctatgctcgccgccgcgagccgtgccttcacgagc

SEQ ID NO: 3163 - DNA, 270 bp, Zea mays
  misc_feature: Incyte ID No: 700347291H1
  unsure 52: a, t, c, g, or other
caaggcatgtggtgtgatcaagtcccatgaccgtgttgtcgtttgccagaangtgggagattcatcggttgtgaagatcattgagctggacgactagggcatactttgccgattttttttttgacgaggccggaatttgttggctatatgtataatcctatagctttctttacaaatgagcagtttttccctatggtgccatcataggacttgcttagcgatttaaaactcgattatgtgccacctaaaatgggcagatggaacaatgaa

SEQ ID NO: 3164 - DNA, 201 bp, Zea mays
  misc_feature: Incyte ID No: 700347293H1
acctgcagtggatgacttaggctatctctagcagatttttttatctcattccgtattttatttcctttttcaaactccactctgcaaacagtgtcaaacagtgttgtcatctacagtttcgcattccctgttttaccctatctactcgagacagtcttatcaccgaacaaactattgtgttgaaacctgccggattggttt

SEQ ID NO: 3165 - DNA, 165 bp, Zea mays
  misc_feature: Incyte ID No: 700347295H1
  unsure 51, 62, 83, 85, 98: a, t, c, g, or other
gaagtgcgttgttcgagtgaagggggagaaagaaaccgctgtgccgccggngcgaggaaggnacgcaggatgcgctgcgtgancnagcagcacaagtngaagcccaagggagctgtggacgaggacctgtacaagatctccccgcagttctctgcaaagtgaaaa

SEQ ID NO: 3166 - DNA, 286 bp, Zea mays
  misc_feature: Incyte ID No: 700347296H1
  unsure 3-4, 6-7: a, t, c, g, or other
cgnncnntggcgttattgactctaccggttcttgctagctacccattctttccttcgttgtccgggttcgggctcatggtggtagtaaattgtgcatcttttctgaagaatacattctcggtaactaccattaccgtgttcaacattttgatgaatgaagctgtgactcaggatgtaagagccgcagccaatgggatagctgtaacactaatgtccatctctaaagcggttgctccagctgttgcaggaatcatattttcgtgggcccagaggcgtcaaacagctg

SEQ ID NO: 3167 - DNA, 300 bp, Zea mays
  misc_feature: Incyte ID No: 700347301H1
  unsure 12, 38, 41, 56, 59, 120, 123, 141, 149, 153, 170, 178, 183, 189, 197,: a, t, c, g, or other
gtcgccctcaanttcgttccgtccaggcaaggaagaantcnagcagccaaggaganganaagatggctcgtacgaagcagaccgcccgcaagttcaaccggatgcaaggccccgcgcaanagnttcgccaccaaggcggcnaggaagtntgcncccgacgacccggcggntgaaaganccccnaaaggnaaaggccnggnacgttggttctgngcganatcccncanttacnananganaacggngntgntgatcgggannttgccttcangggcttgntcnttggnntcgntgaggant

SEQ ID NO: 3168 - DNA, 284 bp, Zea mays
  misc_feature: Incyte ID No: 700347303H1
  unsure 5, 18-19, 52, 59, 109, 163, 187, 212-213, 234, 242, 245, 250, 262, 271: a, t, c, g, or other
gacangataactgcaaannccgccataccaacaagtcaacagctctgttgtnggcgtcnaggcgtccaagcaggcggctggagtggggtggaaaaacttggctggggcngggccaagaagcgacaacagcgaactggagatgtggtgaatgttgcccgacaanaaggttgtgcacccccagtcaggngcacgtcgtagcttcaggttaaggnnaagggtaatttccgtcggttnctctctantcnctttnctgctctactantactgtggngacgaattaggaa

SEQ ID NO: 3169 - DNA, 288 bp, Zea mays
  misc_feature: Incyte ID No: 700347304H1
  unsure 41, 76, 108, 118, 128, 140, 171, 222, 227, 241, 269, 280: a, t, c, g, or other
attttcttggctaaacaatcagtagagcctaagcacgcaanatacaaagaaaatgttgggcaatcagatacaaggnggcttgggcacatctggggcactgtctcatgnttatgttcancatcctccgntgcgatgtgacntaccagacactcagggtctgttctatgatgntgcaaataagttccttatagctccaactgctgatcggatattgtactgganaacanttctacctactccntctggacctccaaactctgatccagttnatgaaggaccngtcttgtc

SEQ ID NO: 3170 - DNA, 285 bp, Zea mays
  misc_feature: Incyte ID No: 700347305H1
  unsure 2, 41, 211, 249, 268: a, t, c, g, or other
gngatggactgggttgttccgtggtaactttgttaatgtcntccgggtagccccaagcaaggcaatcgagctttttgctttcgatacagctaacaagttcttgacccccaaatctggggaggaacggaagatcccagtccctccttcactagtggctggggcatttgcaggtgttagctcaacactgtgtacataccctctggaattgatnaagacacggttaactatacagagaggggtgtatgacanttccttgacgcgtttgtcnagatcgtccgcgacgaa

SEQ ID NO: 3171 - DNA, 177 bp, Zea mays
  misc_feature: Incyte ID No: 700347306H1
  unsure 3, 5, 9, 11, 20, 25, 63-64, 92, 105, 108, 114, 116, 132, 137, 148, 157,: a, t, c, g, or other
acntntttncntttctagancctgntcatctgcaaaacacccaggcacatcctttttgcaagnngagactctgagtgaagctctgctaagtnctcttagaaactnaantcctcngncaaaaatgaagatgtnttatngccttggggcngggaagccntcncccaggctttcacttcc

SEQ ID NO: 3172 - DNA, 279 bp, Zea mays
  misc_feature: Incyte ID No: 700347307H1
  unsure 27, 35, 43, 48, 51, 78, 93-94, 106, 117, 123, 135-136, 138, 143, 166,: a, t, c, g, or other
atggaccacgaagcctacgccgccgtnaccatccntgacgccntcgcntcntcgcagcccccgccgccacccttcttntgccatgggcgtcanngaccacgaagcntacgccgccgngccatncatggtatcagnntntgacntcggaggagaaggggactgttcnaagntccacaagttcatcatccaagaagaagcgtgtgcagcnttggtcngtcgcagtgcnnggtcaatggngagncaaangntnaggagcaggcaccagaagacgctctnctg

SEQ ID NO: 3173 - DNA, 284 bp, Zea mays
  misc_feature: Incyte ID No: 700347308H1
  unsure 74, 104, 233, 235, 255, 263: a, t, c, g, or other
aagtagtcagtcgtcatcgtctcttccgatcgcctcgagttcattacagttagcgccgctaatcccctccctantcaccatgccatgccatccatccggtaggnttccccagccatgtcggcgactgcggtgaagtttcccgtggaggcgcctccgaggacagtgaaggtcaccaacgtctctcttagtgcaaccgtgcaagacattaaggagttcttttccttttcaggagntnttgaacatgtggagatgcanagtggtgntgagtggtctcaaattgcata

SEQ ID NO: 3174 - DNA, 278 bp, Zea mays
  misc_feature: Incyte ID No: 700347309H1
  unsure 6, 8, 11, 59, 92, 99-102, 107, 163-164, 178, 183, 207, 210, 212-213,: a, t, c, g, or other
catccngncgngggatcccagccaccgccgctagaagaagagctcggcgattcccaggncccgcgagaatatgccgaagcagatccatgagnttaaggnnnncctcntgcaccgcgaggaggaaggatgcccgctcagtgaagatcaagaggagtaaggatgnngtcaagttcaaggngcgcngctccaagtacttgtacacgctcngcncnncgntgcngagaaggcaaacaagttgaagcanctnttcccccaggntngaccgtcgaggaggncng

SEQ ID NO: 3175 - DNA, 275 bp, Zea mays
  misc_feature: Incyte ID No: 700347312H1
  unsure 4, 56, 59, 68, 81, 95, 177, 196, 221, 234, 251-252, 255: a, t, c, g, or other
gtantaactaacttggaagaaggaaaagtactagaccttgatggcaaaatgtggcntgntgcttctgntactgatgcttcntcccactataaggntccgttctcaagaactgtctacattgagaaaactgattttcgcctaaaggactcaaaagactactatgggctagcccctggnaaatctgtcatgctaaggnatgcgttccccataaaatgcacagntgttatctctggngatagtcctggtgatanngtngaaattcgagctgaatatga

SEQ ID NO: 3176 - DNA, 280 bp, Zea mays
  misc_feature: Incyte ID No: 700347316H1
  unsure 52, 194, 201, 232, 238, 255, 274, 276: a, t, c, g, or other
cgcatccagcgatatcagcggcaccgtcgaccgccaccaaccaggcatctgntcagccaacaaggtgactctggcctgcagcactggaggagattcgttagcgcagagactggtaggacctgtaggagatagggagaaaaggtaaacgattagatgacgagaggatgatgctatgtttatcaagtgccgcagcncctggcnttcttcttgtgacggcccgcgacacaagtgnggtggntgacatgacatcgctcnttctaagttaggttttggntntccc

SEQ ID NO: 3177 - DNA, 292 bp, Zea mays
  misc_feature: Incyte ID No: 700347317H1
  unsure 8, 41, 73, 79, 102, 122, 129, 142, 153, 156-157, 184, 216, 220, 238,: a, t, c, g, or other
cgcttgancgcctccaacgccactccaacgccacgagcgcntccgccgctccaccgaacaactccaacgccantccagntcttgcagcagtagaactctacngcagccagctacgacacccnggcgccngccgcactaggtncatttggttcnggnntctgccgcacaagatccgctacctctnggacccggacatctacaccgacggcaggatcnccgngcagggcatcgacgccgngctcnncgcgccggacgacnccaaggccacgcagaccgncgacccgaacaggaa

SEQ ID NO: 3178 - DNA, 188 bp, Zea mays
  misc_feature: Incyte ID No: 700347322H1
  unsure 18, 45-47, 71, 94, 145, 161: a, t, c, g, or other
gggatggggggagcgcanttccccggcgacaacgacgtcgcggannnagacgcggcccgcgacggagaggnggaccgccgtgacgtgggcaagntgaagcacgggtgcgagcattaccggcggaggtgcaagatcgtggcaccgngctgcaaccaggtgtncccctgccgccactgccacaacgaggc

SEQ ID NO: 3179 - DNA, 248 bp, Zea mays
  misc_feature: Incyte ID No: 700347323H1
  unsure 2, 5-6, 35, 49, 84, 100, 124, 133, 159, 169, 174, 192, 201, 212, 224,: a, t, c, g, or other
cntgnngccgcagccgccatgggggcgtacaagtntgtgtgcggaactntggaggaggaagcagtcggacgtgatgcgcttcgngcagcgcgtgcgctgngggagtacaggcagcagccgtccntcgtccgcntcaccaggcccacccgccccgacaangcccgtcgtntcggntacaaggccaagcagggntatgttgtntaccgtgtccngtgaagcgtggnggcagnaagaggcctgtgcccaag

SEQ ID NO: 3180 - DNA, 267 bp, Zea mays
  misc_feature: Incyte ID No: 700347327H1
  unsure 4, 11, 15, 29, 40, 42, 60, 66, 92, 126, 161, 167, 210, 258, 262: a, t, c, g, or other
caanaaggaanaaangggtgaccgtaagntgcagggtttntnttcatgtgcaatgcaaanactaanaaggagtgctaccagagtcgcttgtntgggatgcctagtgggaacattgaaatggtcaanaagattaggccaggggtcaagctgttcctgtatgnttttgncttgaagcttctgtatggcgtgtacaaggcagcatcacatggngggctgaaccttgtccatgaagcatttaatgggaagttccctgcacangttnagttt

SEQ ID NO: 3181 - DNA, 192 bp, Zea mays
  misc_feature: Incyte ID No: 700347329H1
  unsure 5, 11, 23, 32, 34, 38, 45, 56, 68, 76, 79, 81, 83, 85, 87, 91, 138, 162,: a, t, c, g, or other
taacntcaacnttggcagtggcngtggcaatngntggnggccttnttacacctgtncttcaggacgcngacaagcnggntntntntntgcnctgcgcaaaattggaaggatctagtgaagaaagcacgagcaaaacanctccaaccaagtgagtacagctcngggacttttacactgtccaancngggnatg

SEQ ID NO: 3182 - DNA, 169 bp, Zea mays
  misc_feature: Incyte ID No: 700347332H1
  unsure 10, 30, 32, 44, 54, 61, 63, 83, 104-105, 120, 122, 159: a, t, c, g, or other
gccacaccancagcttcttcgagtcccgcngncctagccagaanaacgaccgcncgccgcngnacggacgatgggggcacgcnctgcagtgcacagccccgggnnggcgcacgaacgagntntggttgaacaccaggaatagcagtgcattcggcatgngcagtactcg

SEQ ID NO: 3183 - DNA, 280 bp, Zea mays
  misc_feature: Incyte ID No: 700347334H1
  unsure 7, 65, 73, 81, 120, 124, 137, 160, 165, 189, 201, 214, 217, 220: a, t, c, g, or other
cataagntctacaaggacacaacacatggttgatcaactgacagaacttcagaaaaaagaacaantgttttgngaagcaantaagtgtcttcgaagaagactggaggagagcaaccaggntatntggcagcatgcgngggagcaaagcgagcggcattcngaagngcagccgcagcagctcaatggcantaacttcttccntcccctcgatggngcnggngaacccacccttcagatagggtatccttcagaggcactgactagctcatgcatgaccacc

SEQ ID NO: 3184 - DNA, 199 bp, Zea mays
  misc_feature: Incyte ID No: 700347335H1
  unsure 2, 22, 25-26, 28, 30, 64-65, 83, 105, 111, 128, 139, 141, 149, 154-155,: a, t, c, g, or other
tnacccagagggtgcacttgcnggnntngntcaagtggtcagtatggagcctgaaaaggctganngggggtttaaagctcttnaacaaactgtcaagctttactntaagcnggggaaatacaaagaantgatggatgcntntagagagntgttnncntacntnnantctgcggncacccggaactacagcgagaaatgt

SEQ ID NO: 3185 - DNA, 271 bp, Zea mays
  misc_feature: Incyte ID No: 700347339H1
  unsure 40, 42, 67, 74, 82, 99, 111, 127, 157, 175, 178-179, 182, 199, 213, 247,: a, t, c, g, or other
gagagagtctgcaggatccagcaggccgagggccggagantntgagcggcaacggcgcgaagaaggnggtcgangcggcggngaaggccggcaggacgntcatcgactggnacggcatggccaagtngctcgtcaccgacgaggcgcgcaaggagtncgccgccctccgccgcgnttnncgntgacgtcaaccaccagntccagaccaagttntcccaggaaccccagccggttggttgggagtatncagaaaaggagntggntcaaaagt

SEQ ID NO: 3186 - DNA, 238 bp, Zea mays
  misc_feature: Incyte ID No: 700347341H1
  unsure 22, 35, 41, 47, 66, 68, 83, 88, 120, 122-123, 132, 140, 147, 152, 156,: a, t, c, g, or other
aaacaacaagctagcgcgggangacggcaccgagnggaagnggactngctttaggccatgggagangnacacggcggacacgnccatngacctcaccagacaccatgagcccaagacgcngnnggataaggncgcatacnggaccgncaagncgcngcgcnnccccacggacatcttcttccagaggcggnnnggcngccgggcgangntgcnggaaaccgnggcngcggngcctggg

SEQ ID NO: 3187 - DNA, 264 bp, Zea mays
  misc_feature: Incyte ID No: 700347344H1
  unsure 6, 23, 81, 84, 89-90, 92-93, 95, 125, 155, 199, 208, 252, 261-263: a, t, c, g, or other
ctaggnagaaccccacccctcanttcatccgccgccatgccagctccaagccagatctgcgggctccgggcaggggatgcntcntcgtnntnntntcgttcgttctaatcggttcttcgcaagtnaagtgagatggcagtgacgactcggtaatnttcaagctcaacagaccaaatcacaggtctctctgtatacgagntcgatctgngtgccgattttcccgctgaaccgagccatccaaattccttcttngggcctcgnnna

SEQ ID NO: 3188 - DNA, 264 bp, Zea mays
  misc_feature: Incyte ID No: 700347345H1
  unsure 2, 5, 47, 53, 56, 60, 63, 78, 82, 109, 115, 157, 161, 182, 200, 223,: a, t, c, g, or other
gnggntacaggaactggaacgataacaacgaaagaaggcccttcggncaaggnggnggcnggnctcagtcttccgacnggantgccaacaaaggaagtggcgaaggaantcaagntttctcgaagagcaagcccagctgggacgcgcagaacgcctntggnggagatgaccaggcaggaaanaagagtgacacagacaantcctggagccagaaccggtgcgnctccatntgtctgggncagccaagcggngnngctaataaca

SEQ ID NO: 3189 - DNA, 146 bp, Zea mays
  misc_feature: Incyte ID No: 700347347H1
  unsure 4, 13, 28, 37, 54, 73, 93, 125, 128-129, 132: a, t, c, g, or other
gtanaagcagtanccactagtttttgtnttgtttgtntttgctatgtcctaggnggcgcttgtgtcctaatantcctgatccaaagatgctanttgatcatgactaatgagtgcatcctgattgnttnntantgttcaaactagtg

SEQ ID NO: 3190 - DNA, 300 bp, Zea mays
  misc_feature: Incyte ID No: 700347352H1
tctgcccaagactgtaggtgtgcaaaattcatggcttcagacaccggcaagaagctcattcagatcgatgtgagctcggatacagtgtgcccttggtgcttcgtcggtaaaaagaaccttgagaaagcaatggagcaaagcatgggcaagtttgatttcgaggtccgttggcatccattctttctgaaccccgacgcgcctaaggagggcgtcaagaaatctgacttcttcaagatgaagttcggtcctgtccaatatgagggtgcgatgtctcgcatgactgagatatttcgaggactc

SEQ ID NO: 3191 - DNA, 304 bp, Zea mays
  misc_feature: Incyte ID No: 700347354H1
  unsure 55, 57, 84: a, t, c, g, or other
ccagaagctaaccggcacgtcgtgaagctaaccgggattccgggaagcagagacntnccgcccgtcgcccgtcgtccgtcgtcncggccgccgtggaggtgtgcgtgaaggccgccacggggaagcccgacacgctcggcgactgcccgttctcgcagagggtgctgctcacgctggaggagaagaaggtcccctacgaggtgaagctcgtcgacctcgacaacaagcccgaatggtttctgaagattcagcccagagggtaaggtgcctgtgttcaaggtggtgatggcgatgcattgctgat

SEQ ID NO: 3192 - DNA, 298 bp, Zea mays
  misc_feature: Incyte ID No: 700347356H1
ggcccatcctgaaccagacagcccacttaactgtgattcaggcaatctcctgcggtcgggtgacatcagaggctatcaatcaatggcccgcatgtatacaaggctggctgccatgccaaagaaaggttagatgtagaacatgtgccaagccaagagcctatgtcagtccatatgttgtcaggtttgctgtgtgctgtctgtctgtgaacttggtggttcttgtttcctaataagtcctaaccatcatgtgtgtgtatctgtatctgtatcccggatcccgatgctggtctgtgatgta

SEQ ID NO: 3193 - DNA, 282 bp, Zea mays
  misc_feature: Incyte ID No: 700347357H1
  unsure 3, 24-25, 41-42, 68-84, 148-176, 182, 222: a, t, c, g, or other
canagctccgccccggcaaggcanngacgcggaagaagaannagagggacaagtggggccagcctatnnnnnnnnnnnnnnnnnatgaggagccgtcggtggagccggagcaagagcacccggcgggggtagttgaggcggcagtacnnnnnnnnnnnnnnnnnnnnnnnnnnnnnactgcngcggcggaaggctatgagcccgggaaggtggtggcgagcngcttgccctacacgaccaccgaggcggacatccggaagctgttcgagttctacgggccca

SEQ ID NO: 3194 - DNA, 304 bp, Zea mays
  misc_feature: Incyte ID No: 700347358H1
  unsure 34: a, t, c, g, or other
ggtttcggaaggatcggcaggctcgtggccaggntcgccctgcagagcgaggatgtcgagctcgtcgccgtcaacgacccctttcatcaccacggattacatgacgtacatgttcaagtacgacaccgtgcacggccaatggaagcacagcgacatcgccctcaaggactccaagacgcttctcttcggcgagaagccggtcaccgtctttggcatcaggaaccccgaggagatcccgtggggtgaggctggtgctgagtatgtcgtggagtccaccggtgtcttcatgacaaggacaaggctg

SEQ ID NO: 3195 - DNA, 304 bp, Zea mays
  misc_feature: Incyte ID No: 700347359H1
  unsure 107, 170, 172, 178-180, 187, 199, 224, 270, 296: a, t, c, g, or other
caccttcatatccaccggtttcagcatatcctggtgcaaccgcataccctgcttacccaacttctagccatgcaccatataccactgctgaatatccaccacctccncagcaaccataccaacccccacctgctggataccctccatcctatccaccacaaccatatgancnatcttnnncactgcnaccatatgatcnatcttacccaccacaaccatatgancgatcttacccaccgcaaccatatgggcaacaaccatacccgcccncgccagcagcagagtcgccgtacccnccagcgcc

SEQ ID NO: 3196 - DNA, 300 bp, Zea mays
  misc_feature: Incyte ID No: 700347360H1
  unsure 108: a, t, c, g, or other
gttatcgatggaaagggtgctcaatatgagtgtgcaggctaatgtgaacctgataccgaagcatacaaatgacacagaatccctggagcagttttgcaaggaccactncgatcaccatctggcattatcatggtgggtgccatgtagggaaggtggttgaccagcattaccgggtgcttggagtttcaggtctccgggtggttgacggctcaatattttctaaatcgccagggaccaaccctcaagctacagttatgatgatgggcagatatatgggagtgaagatcctaagggaaaggc

SEQ ID NO: 3197 - DNA, 300 bp, Zea mays
  misc_feature: Incyte ID No: 700347361H1
  unsure 65: a, t, c, g, or other
catcacaccaacgtaccccaacaagggtgagagacgacgaatcggctgctggtatatacatacanctgagaagtcggattacctttgctgattattaacttgtttccattgctgtgaaatgaaactttcaatgcaagggggctggcctaccagctggtactagcaggaatgaagagcatatatatatgaacatgatgatgcatatatgcagagcagcaacagcagcatcgtcgtaccatctcatatatatcattgcaaacatgagcagtagtggtagttcatgatcatgatgaaagcaag

SEQ ID NO: 3198 - DNA, 300 bp, Zea mays
  misc_feature: Incyte ID No: 700347362H1
gcccgctaaatagagtggttgcaaaaatctctactccgaccctcacctaaggcaccgactcgccggggacagagagagagaccgacgcgccggcagatcccaagctcaccctagagggggaagagggcgaccgaaggcggtgatgggtttcatcatggacttcgcggagaatctgatcctccgtctgatggaggacccggacaagcgcgaccaggttcggcgggagcatgtctacaagatgaaggagcggtgcgagcgccattaaggcggctggagcctccctctgcgcccctacggttc

SEQ ID NO: 3199 - DNA, 300 bp, Zea mays
  misc_feature: Incyte ID No: 700347364H1
  unsure 45, 51, 184, 213: a, t, c, g, or other
cgtggagaagttgcccttcccccaaaccaaacccatttccccgantttcanagtgaaaactatcaggcttccagctctagatcatacgctgactgaacacagatctcagttctgaacgccgcgtaaagcaatccgaaattgacgttcaaaccagtactaaagaaatgaataaggaaattaaganaaccgaagtgagcacacagtgtgataatnagcaatctgtggctgaaaaatattttcaattacctaaaacagagaaacgggtgacggtacaaatgcccaaagactatgcagcgaaaa

SEQ ID NO: 3200 - DNA, 300 bp, Zea mays
  misc_feature: Incyte ID No: 700347365H1
  unsure 45: a, t, c, g, or other
cagggtccacttcgctcgcaaccttccccagccatggcgaccgcnacgcggagggctgctccccgcgctcctcaagaccctagctccagccggcgcgcgcggcctctccaccgagaaggctgttggtgcagccgccgtcgtcggcagccacaccgctaagtggatgcaggacacgagcaagaagtcgccaatggaactgatcaacgaggtacctccgatcaaggttgatggtcgcattgccgtctgtgaaggggcttctgaaggtgttggacttggccacccaattgagtacatctgcct

SEQ ID NO: 3201 - DNA, 298 bp, Zea mays
  misc_feature: Incyte ID No: 700347367H1
  unsure 80, 289: a, t, c, g, or other
tctcggcagggcgccgcagggaagaggaggccgagcgctctacgtctgccatggcgagctcttccgaccccgacaagctncatgagcaaagccgacaaactgtaattaggcttgcacggaagctaccaacaggtgatctgcaggccatcaagaaatctgacgatggcgaggaatccttggacgaggatgacctgacttaaaacgatctcccgagccaaaaggtgcagagaacaaacgtcatagtttgccatcggtgggggaacaactgtaaaaagaattatgcgagttnacatactaa

SEQ ID NO: 3202 - DNA, 299 bp, Zea mays
  misc_feature: Incyte ID No: 700347368H1
ccggaacagagcgaggcgacgccgaggcacctcatctccggcgaagggaaatggcgaccgttccaggggatctgatctggcagattgtgaggaagaacaactccttcctggtgaagcagtttggcaacggcaatgccaaggtgcagttcaccaaggagcccaacaacctctacaatgtacactcctacaagtactctggcttagcaaacaagaaaactgtaacgatccagccagctgctggaaaggactcggctgtggtcctctctactaccaagaccaagaagcagaacacacccgcg

SEQ ID NO: 3203 - DNA, 299 bp, Zea mays
  misc_feature: Incyte ID No: 700347370H1
  unsure 32, 160, 286: a, t, c, g, or other
gtgggagtatttttcagagtttattagaaganactgtttcgaggacccaggtcagagaaaggcgagaagctttagcagcggcaatggtctggtccaggtcgtgcccagggccaccttcaagctcctgagcaagctcgtcttcgcgctcttcctcccctgnctcatcttcgtccacctcggcaagtcggtcaccatagacaacgtcctgcactggtggttcatccccgtcaacgtgctcatcagcactgccatcgggtgcgcccttgggtacatcgtggccctgatntgccgcccgccgc

SEQ ID NO: 3204 - DNA, 298 bp, Zea mays
  misc_feature: Incyte ID No: 700347371H1
  unsure 272, 281: a, t, c, g, or other
cagcaatcgcaggaaccctagcgccgccgcacccgcaggaatgggtatcgacctacgtcgccggtgggaggaataagaagaccaagcgcactgcgcccaagtctgacgatgtctacctcaagctcctcgtcaagctctaccgtttcttggtcaggaggaccaagagcaatttcaacgctgtcattctcaagaggcttttcatgagtaaaaccaaccgaccaccaatctccatgcgccgccttgtcaatttatggaaggaaaggagaagaacntgctgtccntgttggcacatcacaga

SEQ ID NO: 3205 - DNA, 297 bp, Zea mays
  misc_feature: Incyte ID No: 700347372H1
  unsure 29, 71-72, 118-135: a, t, c, g, or other
ccggacaccccgagccgcggcgttaaggncgacatctcggagctgaccgagtccctcacccgccggttcannggcgttgcctccttcctcgcgccaccgccaactgaaggagagactnnnnnnnnnnnnnnnnnnacagccgccgccgcggaggtgcctcagtccccacggatcgacgggatccggagtgacctggcggagatcgggggcagggtgaagaccggcatctcgatgctgtcgaacgccggcgcggtggcggagatctccaggttcgcgtcatcgttcctgccattcggt

SEQ ID NO: 3206 - DNA, 295 bp, Zea mays
  misc_feature: Incyte ID No: 700347373H1
  unsure 44, 98: a, t, c, g, or other
ggaggatcaggcgctatggattctgtgggatgcgatcaaagacntttgatgggttcattgaccttgatgcatatgatacaatagcaatgaagatcaancgggatggaagatgctacatatctacagtgtgttttctcacacaagactcactcttgaatattaaatgtccagtcagtattgttctcagaatctgaaatcttaataagtacagatatacacggagaattgggtgaattcacccgggcaacaagaagacaactcgtggcaggctttgtgtacatacctcctcaagaca

SEQ ID NO: 3207 - DNA, 298 bp, Zea mays
  misc_feature: Incyte ID No: 700347375H1
  unsure 10, 103: a, t, c, g, or other
gtggttttgnctgcttccgcagcagctgccgtagctactggagcatctggatttgaatttggtgtggacccaaatgtagatccagagttggcactcgccctgnggttgtctatggaagaagaacgagcaaggcaagaggctattgcaaaaaaggctgcagaagatacatctaataccgaaaatatcaatgcctcaagctcaaacagcgattctgttatggctgaagcagaacttgcctcaaatgctgctgctggtgacaagcaagaacagccaaaggatgatgacgatctactacagc

SEQ ID NO: 3208 - DNA, 295 bp, Zea mays
  misc_feature: Incyte ID No: 700347376H1
atgaaggcaaaggcacagatctctcatgcccagccagatgatcttattgatttttaccacctgaagagcaggaagggcatgagccagcttgagttggaagatgaggtgcatgatgatttgaaggctgcaactggtgggtttaccaaggatgcagatgacgcaaacaagctcaaccgcattcttcaattgactgggttcagtgatcctgtgtatgctgaagcatttgtaacagttcaccattatgacattgtacttgatgttactgtaattaatcgcacaaaggagacactcagaa

SEQ ID NO: 3209 - DNA, 293 bp, Zea mays
  misc_feature: Incyte ID No: 700347377H1
  unsure 81, 218: a, t, c, g, or other
gggaaatcaaggaaagggcagaaagtaaaagtagaaatgtgcatgaaaggtgggtttaaggacagcttgatgacggcgtantgacgaacagcacttgaatcaccagaattcatgatctggactgttttttcttagaccaataacagcaggaaaatgttagcttatcttacttagggctagtttgttaactccatttttccaagacattcttatttttnctaagggaaaattaactaattttcctgggaaaatggaattccctagaaaaacgaggttgccaaactagccctaaa

SEQ ID NO: 3210 - DNA, 293 bp, Zea mays
  misc_feature: Incyte ID No: 700347378H1
ggccagaggtgacctgtgaagatggttcgctactcccttgacccagaaaaccccacgaaatcatgcaagtcaagaggctcaaaccttcgtgttcactttaagaacacccgggaaactgcccaggccatcaagggtatgcatatccgcaaagccaccaagtatctgaaggatgtcactttaaagaagcagtgtgtgccattccggcggtataatggtggagttggtaggtgcgcccaggccaaacagtggggtggacacagggacggtggccaaaaaagagtgctgaatttttg

SEQ ID NO: 3211 - DNA, 292 bp, Zea mays
  misc_feature: Incyte ID No: 700347381H1
gaatacaaggattccttctggagaggtctgggtcggtaatcctgccaagttcctaaggaagcttacagaagaggagattgcgttcatcgctcaatcagcaaccaactatatcaacctagcccaggtccatgcagccgagaacgccaagagcttcgacgagattgagctcgagaagatgctgaggaagaagtacgcgcacaaagacgaggagtacgacttcgatgcttggggtggtccgcgagatcccgccccagcttctccttcccgacaacatcctcccacacatgctcag

SEQ ID NO: 3212 - DNA, 288 bp, Zea mays
  misc_feature: Incyte ID No: 700347383H1
  unsure 81, 109-138, 282: a, t, c, g, or other
gatccgtgttccgtgtccgcgtccagtgtgtccgctactccgctccccctcagtcctcagttcctcacctagcggtaggtngcgcgcgggagacgtagatggcggcttnnnnnnnnnnnnnnnnnnnnnnnnnnnnnntgacgccgacagaggggacggtgatcgcgatccacagcctggaggagtggagcatccagatcgaggaggccaacagcgccaagaagctggtggtgattgacttcactgcaacatggtgtcctccgtgccgcgccatggctccanttttgc

SEQ ID NO: 3213 - DNA, 289 bp, Zea mays
  misc_feature: Incyte ID No: 700347386H1
  unsure 31, 79, 96: a, t, c, g, or other
tgccttcctcctcactagtcgctcccccgcngctcgcgcaggcgggcgacacaacgaggctaaatccctatcgcgaggnggcgtgtgaggccagcngtttgcgatgacagcaccagcggacaaggggaagaaggccaagactgatgccgacggcggcgaggagaacgaacagatcgacggcgtcctcgtcctctccatcgagaagctccaggagatacaggacgagctcgagaaggtaaatgaggaagcaagtgacaaggttatggaggtggagcagaaatacatgaga

SEQ ID NO: 3214 - DNA, 290 bp, Zea mays
  misc_feature: Incyte ID No: 700347388H1
  unsure 53: a, t, c, g, or other
gcctacctgttgatcgagccgagcgagcagggagagacacggcaccgagtgangccgccgcatcctcctcctctccgatccgtacgtttcctcctccctagcaatcgcaacccgttcagccaatcattgccgtctccaccaactccgttcccctattacctagttagtccagtccgcctgctgcctgcctcaacggatcgacgcgacaggagggagggaggaaggagacggtcgatcagagtctgagacggaggccgatccaccaccgcagcgacgagcgggaggagatg

SEQ ID NO: 3215 - DNA, 289 bp, Zea mays
  misc_feature: Incyte ID No: 700347389H1
cagaacctaccacgagcatcttgccaaaggcgtacttgcggcacaggaggttcccaagtttgtaatggatgaggtctatgacatggagctctacgagtggaccaaggtcgacatctctgatgaggcccagaaggagcgtgtcaatgccatgatcgaggaccaggaaccctttgagggcgaggccttgcttgacgcgaaatgcttcaagtgagtgtgctttatccagagctgtttagccctcgaattggatgtctatgttgatctggtatatcttgctatgaactggtta

SEQ ID NO: 3216 - DNA, 285 bp, Zea mays
  misc_feature: Incyte ID No: 700347393H1
ggtaatttgaacttatctggtcatctggtgcctgagcttgggaaattggagcatctgcagtacctggaactttacaagaacagcattcaaggaacaatcccttctgagcttggtaatttgaagaatctaataagcttggacttgtacaagaacaacatttcggggacaatacctccttcccttggaaagttgaaatccctgtattcctgcggctcaatggcaatcattgactgggccgatcccaagggaactttctggaatatctagtctcaaagttgtcgatgt

SEQ ID NO: 3217 - DNA, 284 bp, Zea mays
  misc_feature: Incyte ID No: 700347394H1
  unsure 28, 48, 57, 60, 93, 112, 129, 138, 142, 146, 153, 216, 235, 242-243: a, t, c, g, or other
aaacataagcttcctcagtatgcaatanctgcacatatccgtgagctncattgaaantanacagacacctgatgtcatatatgatgagttgancatgataaactatgcagantatttcagcactcttanagtcatggnaganctcnatttggnggaggacatgagagcatatgacatggagggtgtcttaatgagaaggaggggtatgcacttttngtctctgaagtccctggtntggcagnnagaaggccatcactagtccaaggagattcatattcgctaga

SEQ ID NO: 3218 - DNA, 285 bp, Zea mays
  misc_feature: Incyte ID No: 700347395H1
  unsure 28, 276: a, t, c, g, or other
ctctcttatgcttagcgagatgcaaganaatctgtcattggtttcttattcaagtcgcatctcttctcagatatggagtgagatgcagacagatttcttgccgaatttcatcttatgtaataccacacagcggtttgtccggtccgcaaaaggaactcaccactcttctcatagatcaagtgcttctactgggaaaccttacttctattgtggatcacatgatttgaccatggcataccagggtctgctgggctgtaccgtgacttttttggagtncctcatatg

SEQ ID NO: 3219 - DNA, 291 bp, Zea mays
  misc_feature: Incyte ID No: 700379603H1
  unsure 286: a, t, c, g, or other
ctacgctatggcagtatgtcatttctctgttacttttccttctcactatgttctcctgcattgagctaggaattgcgtcaaagattagcagtcttccaccagaaattgtttcatatttcactgatccaaatgctactggaccccctcctgacatgcaacttctgctcccatttgtggagtcggctttgccagtggcttacggtgtcttgtctatccaactatttcatgaaattgggcactttttggcagcattccaaaaaatgttaaactgggaatccctttcttnattcc

SEQ ID NO: 3220 - DNA, 290 bp, Zea mays
  misc_feature: Incyte ID No: 700379604H1
  unsure 81, 284: a, t, c, g, or other
actgctctgagaaaatggttgcatcagcctttactgttgatttggacaagcctctagtattccaggttggccatctagagnagcagtatcaggagtgggttcaccagccgattgtttgcaaggaagggccacgattttttgaaaatgatatattggagttcttaacacgcacgaaatggtgggcagttcctcttatctggttgcctattgtatgttggtgcctgagtacttctatcaagatgggcaatactatcacagatgtagctatgatgattgggtttggnatattt

SEQ ID NO: 3221 - DNA, 289 bp, Zea mays
  misc_feature: Incyte ID No: 700379606H1
cgccgttgttgctgggactgcagcgttggcgggccttgtagcgaggagggggtgcggaggcgccgcgactgttcgcgggatgagcttcggcggcagagctccctcgcatcaggtgcgaagaggccgttcgagtacgggagaacgcatgtggtgaggcccaagggcacgcacaaggccaccattgtctggctccatggacttggggacaatggagccagctggtctcaactactggaaactcttccccttcctaatataaaatggatatgccccactgcaccttcaagac

SEQ ID NO: 3222 - DNA, 288 bp, Zea mays
  misc_feature: Incyte ID No: 700379607H1
  unsure 270: a, t, c, g, or other
tgctggacccaagttatcacaaaattcaactgatctggaacatgaggttgcaatgaacctttgctttttgcctaaacaaacccatatttatatctggtatatctgccagtttgtagtgaccatccttctcctagtcaatggccaacaaatggtctcggttctcttccttgcatgaacacattcatgagcttcatgaggtcggtgggcgccgaactgctttcaaggaccaaggaaaaagatgacgaggacgatggtgattatgatatggtntttgatgcggaaggatcc

SEQ ID NO: 3223 - DNA, 294 bp, Zea mays
  misc_feature: Incyte ID No: 700379609H1
aaagatgtgcaaatccaaaccaaagcgcacagacaattgcacttcagagggatattattaaaccttgtgcattgtcttctccatacaccaatataactgcaaagagtatttcagcaccagaccaaataaatgcagaccttgtactaaaccttcaagtgaggcagtcgaggagtaatgaaccccttcaaagtggggttgtgccattccaacatatcaactcatgtctatgatacttcttcagagattgcatggaaatgttatgttttagcaaacaaagtgaaggctatcaggagg

SEQ ID NO: 3224 - DNA, 293 bp, Zea mays
  misc_feature: Incyte ID No: 700379610H1
gtacgctttgattgaatacgagaagtttgaagaagctcaggctgcaataaaagaactggatggagctgagctttataaacaaagaatgagtgttgattgggcatttagcagtggccctgctaaacgcagaaatactcggaaaaggtcaccaccaagagctcgttcaaggaccccacccaggagaaggcactgatgtttccccagcatgtcttgaactacttgctatgtgtgacgaagagcaagaagtctggggattccaaatattaccttggtgtatgtggatcacctgattt

SEQ ID NO: 3225 - DNA, 289 bp, Zea mays
  misc_feature: Incyte ID No: 700379611H1
  unsure 56, 68, 104, 113, 160, 201, 204, 218, 267, 272, 283-284: a, t, c, g, or other
cttatgtaaaggagctaaaggaaaggctaaaggacaacatgaacaaaataattgtntcaccaaatgangcagcagcctctaacagtgaagcaaataagtatatnatttcccanataaaggaggcacaggaagtcaagcgtgcagccataaatggtttgancaatatgattcgatatatctagaacttctcactttaaattngtnttagcttatgcatnttcagttctctatttgtttgatcgctgcatctgtgattttaggtgtttnaagcnacatttccttnntcgtt

SEQ ID NO: 3226 - DNA, 247 bp, Zea mays
  misc_feature: Incyte ID No: 700379612H1
gggaagatgattacagcgacatttatgtccgctctggagtacagtacgaagttcccaaacttgtgagcatatgccgggaagagttggccagacctgcatagttcgtttggagtattcgcaagtgctgtattcgttggatggtagacgaacaccttattgattgtatgacaggatagttgcagcaccaggcgtcactatcagtacaatgcttgatgtactttatttacggcgtcgcagtgaccaaacc

SEQ ID NO: 3227 - DNA, 311 bp, Zea mays
  misc_feature: Incyte ID No: 700379616H1
  unsure 289: a, t, c, g, or other
actttctctggccctttcctctcatgcttttcccatgtttcttggctcgaagcagtccccactagctagaggtctgaccatggaatgatggaattgggttgataaggacgaggaaagagtgtcacagaatatgattgcttgtgtcgtggacgacgatgatcaccgctagtaaagctagatgcatggtcgactgttgcactgtaatctataaaaataaaatactgtacaactagtagaagttgatattgcttatatctaggacactgctaacgcactctcccaccatganactaacttgttaacaaccatta

SEQ ID NO: 3228 - DNA, 139 bp, Zea mays
  misc_feature: Incyte ID No: 700379618H1
acatggaggagtacctggagagcatgaaatctctccgctcctacatgaacgatctggaggacgacgccgcgaagtcctgttcgaggagcagcagcagcgtacagccatcgacgctcacgacagcgatgtcgcgctagtg

SEQ ID NO: 3229 - DNA, 288 bp, Zea mays
  misc_feature: Incyte ID No: 700379619H1
aaaaaagacgtcaatcagcaacaaataagaagaagcttcgaaggctggctggagagttcaacctttttgagaccggtggtttggccatcgtcttctgcgtgtaatgtctcttggaatatggaagtattagtcgttgtgtaggattaaacatctgtagtagcttgtatgctagggatggttgtttagccttagaaactgcacctagatacctcatggcatgtatgcatactgctagtatgtgtagagatcagggaaagcatggagcgggttttgcctcttaggtgcatg

SEQ ID NO: 3230 - DNA, 289 bp, Zea mays
  misc_feature: Incyte ID No: 700379621H1
  unsure 34, 101, 188-189: a, t, c, g, or other
aggtcttatagttttcagctaagccgctcactgnaatcaactgctgaaaataatggaattgatctagtcaagagcatgaattatgcttttcttgagcaganatcagaagctattggtgatttttcagaagaaaataacagccctcctgaggttaccaacactgtagcacttgatggcaaccatgctgnngatctgaaagttgatgcgttcattcctttgcagaattatcactatgccagacacctgttatctgaaggcatgggggaggatgctgcttgcagtgcatttg

SEQ ID NO: 3231 - DNA, 285 bp, Zea mays
  misc_feature: Incyte ID No: 700379622H1
  unsure 41, 53, 81, 150, 172, 176, 184, 190, 202, 232, 241, 275: a, t, c, g, or other
gacgaggcgaaggacggcagcagtagcagctccagcatctnctagcttcttcnttcatgggattcggtctctactaggatnaggggtgcttcatttcatccgatccccaacgacttgagcctgattctggtctcgacgacgatgcggaangggatctgggcatcctgctgcncgcngattcgcnatcttncttctccctccnccacgaagcgacttctcctgccgggagtcntggtaccanctcaccgacgaggattccccatcaagtacgaggncgaccgctgt

SEQ ID NO: 3232 - DNA, 288 bp, Zea mays
  misc_feature: Incyte ID No: 700379623H1
aagaaaaggaagaggacaaggagatgactctggaggaatttgagaaaataagagaggagaagaggaaagcactacttgcgttgaaggctgaggagaggaaagttgaagttgacaaggatctgcgttctctgcagccactttcaaacaagaaagaaaatgatgaagttttcattaagctgggttctgacaaggataagaagaaggaaaatgctgagcgtgatgagcgtgccaagaagtcggtgagcatcaacgagttcctgaaacctgctgaaggagaaaggtactacg

SEQ ID NO: 3233 - DNA, 300 bp, Zea mays
  misc_feature: Incyte ID No: 700379629H1
  unsure 78, 244, 263, 278, 287, 299: a, t, c, g, or other
ctctctcgtcttcttccccgccccaccaggtacccacgcgttcctcagatcagatcggcaaggccaatccgaaatctncgagcgctcgcgctggcgaccacagcaaagatgaggccgcagcacgaacagcgccccagggttcctactctcgtcgcagcggcagcactggtagcggcagcagtgaggggaagatgtcgtcggtgttcagcggcgatgagaccgcccccttcttcggcttcttggngccgccgccgcgcttcgtntctcatgcatggggncggcgtacnggacgccaagant

SEQ ID NO: 3234 - DNA, 300 bp, Zea mays
  misc_feature: Incyte ID No: 700379630H1
  unsure 214: a, t, c, g, or other
cagaagcttgctattggaaccctctctattgaaaaatacccctagatagaaattgatttggttttcaataaagagtgtgagctgtcacacacatcgaaaactacacgtgtatttttctttggttacaaggttgagcaaccaatcgaggaagatgaataatggatcttgattctgaagatgaagagaaggagctaaacattccagtaatcaaggnaaatggcaaaggtgatgggaaggaggaccagagaagtgaagagaaggcagttgctgcagcttcaaaatccaagtcttgggcttgaa

SEQ ID NO: 3235 - DNA, 304 bp, Zea mays
  misc_feature: Incyte ID No: 700379631H1
aacgatgaaaattcagatgttcggcaggctgctgtctatggtgtgggtgtatgtgccgagtttggtggtcatgtttttcgccctctagtaggagaggccttatcaaaattaaacaatgttataaggcatcctgatgcacgacttcctgataatatcatggcatatgacaatgctgtttcggcgcttggaaaaatatgccaatttcatcgggatggtattgatgcagctcaggttgttccagcctggcttagctgcttgcctataaaagacgacaaggttgaagctaaagttgtacatggacagc

SEQ ID NO: 3236 - DNA, 285 bp, Zea mays
  misc_feature: Incyte ID No: 700379635H1
  unsure 175, 197, 244, 270: a, t, c, g, or other
aggcccagtgatgttgaagttgctgtgtagtggaggcaaagacggctccaaacagatgggatcggaagcttgtgaaagtgatagatcacaagaagtcataagctcagttcttgtggatttatctgattgtttgacatgtggggaaacttgttctctggtaagctacttatctttnttagttattcaggatggaaatntgcatttgtacatctagctagattctattcttcaatacctgccaganatggattgaacattgcgatggttttncacctgtcaccggta

SEQ ID NO: 3237 - DNA, 274 bp, Zea mays
  misc_feature: Incyte ID No: 700379636H1
  unsure 220: a, t, c, g, or other
ctgatccgctgtgaacatagctctggagaagttcaacatgcactgtacaatatcttccaatcagccattctccccatgataagggtttaataacagattgtgacccaccaattgtacagtttttgttaccccactttggtgttgtaattcagttcattgtggcgtcattccattacgaggggttgtatacctatgaggttggcacctcagccctaactgnttatacctttgcaataccatatacaaggtgaaatgtatcggtagttctaggcgt

SEQ ID NO: 3238 - DNA, 286 bp, Zea mays
  misc_feature: Incyte ID No: 700379637H1
cccactcttcgcctcctttctggagcagctagggttccgtcctcgatccgatccgccgagtgcacaccacctttccccactccgatcgaatcgatggccgccgagggcgagaagaagatgataaccctcaaaagctccgatggcgaggagttcgaggtggaagaggcggtggcgatggagtcgcagaccatccgccacatgatcgaggatgactgcgccgacaacggtatccctcttcctaacgtcaactccaagatcctatccaaggtaatcgagtactgcaaca

SEQ ID NO: 3239 - DNA, 285 bp, Zea mays
  misc_feature: Incyte ID No: 700379640H1
  unsure 24, 36, 221, 236: a, t, c, g, or other
ccggagcagcagcgatcaaatggngaaagcacaacnagcgagggagctgcagaggagcctccagccgagcagatggagacagacaaacctgagggagccacagatccctcggcttagctttgcaggtgatggaacatttgtgtgattgaccttatacttggttgggggtgaactaagcaagatggttgttcgccacatttgagaatgtgtgttgggacgtncctcgttatttctgnttcttgacggaggtggttggatggttgaaggatgagagcagtagggtac

SEQ ID NO: 3240 - DNA, 291 bp, Zea mays
  misc_feature: Incyte ID No: 700379641H1
  unsure 59, 89: a, t, c, g, or other
gctcctccatggccatggccatggcccgaccttgtgctttccttctcttcttcctagtntcttttctcctacgacggatccggtcctgngagcagcaggaggactaggaggagtggcgtcgcgcaggccacgcagagagtcttcctgtatccacaggctcccaaggtctcctccatcgtgagcagcaagtacaggaccgcgtaccacttccagcctcccaagaactggatcaacgatccaaatggaccaatgtactacaatggtatctaccaccagttctaccagtacaac

SEQ ID NO: 3241 - DNA, 286 bp, Zea mays
  misc_feature: Incyte ID No: 700379642H1
  unsure 65, 105, 107, 109, 271: a, t, c, g, or other
gcacggccggcgcgttcgacttgatggaggggcttgtccgggagatgcggcgggaagggcatgangccggggctggcgtggtgcggtcttttgtcgagagctacncncngctgcggcggttcgacgatgccgtggacctagttcggaaccagctgaacaccttcggggttcaggcggacacggcggtgtacaaccacctcctcaatgtccttgccggaggggagcaggatgaagctcctggagtcggtctacaacgagatgactgatcgcnggattcagcctgatt

SEQ ID NO: 3242 - DNA, 289 bp, Zea mays
  misc_feature: Incyte ID No: 700379643H1
gagaaattagttactcgatcactgtagtgatattattactgaactccaaataagcaatgtcgacaatttcgacatccctcggcctgctaatccgtccgccaagatcatcagctggtacgccgtcctttgggtctctcaaaccagtagtggtgactctcccttgcgctcctgctgagaagaagcggcctcgatccatctgttactctgtggatgccaaggctaacgaccatgccttcaacatctctcccgttgcccttgtgcatcccaacatgccgccaacgtcgacgcc

SEQ ID NO: 3243 - DNA, 290 bp, Zea mays
  misc_feature: Incyte ID No: 700379644H1
gcttaatggcgatatttttggagcacgtgcagaatatcagcatctgtattcagatttatgccctggctttctagaggccattgtgaagcattctaatatggaacaccgactgggagataaagaattgtcctgttcagtttatgaaaaggtcatcgctgctgagaagggaaaggaacagagccagctcttaccaacattgcttattcagtactcccgtttcttatttttggtcatcagagacttggagaaggcaagggagatattaactgtgctgcatgagcagttaaatt

SEQ ID NO: 3244 - DNA, 169 bp, Zea mays
  misc_feature: Incyte ID No: 700379645H1
  unsure 20: a, t, c, g, or other
ctagttctagatcgcttgcncactcttgcttttgtattgttgcttaaatgataaaacatgtactgagagatatttctatttactgtttgattatatttgtgatgtatggacatgtggctactagaagacaatatttgttttgagtatgttgatgaaactacaaaataaa

SEQ ID NO: 3245 - DNA, 305 bp, Zea mays
  misc_feature: Incyte ID No: 700379648H1
attccacttccacttggatcgatcgatcgcatatggcggtactgtggtggtggtcatcgtcctgcttgtcctcccgcgccgtcgctgctgcgctgctttgcctgctggtggctcacggcagcgatggaaccaggcacaacagcaacaatggcggtggtagtggtagttccagcagcagcaagagccacaagcaaggcggagggggacgagcccatgccgcgccgacgacaccgtctccgtctccgtatccgtctccggcggctggcaacaacagcagcagcgacgacgggtggctgaacgcccgt

SEQ ID NO: 3246 - DNA, 286 bp, Zea mays
  misc_feature: Incyte ID No: 700379650H1
  unsure 61, 84, 89, 92, 100, 178, 189, 226, 240: a, t, c, g, or other
gaaccgtacgcgcctcattacgcccatccacgtgctcgcctctccccatcgcataattttnctcggcggcgtcgccatctccancggcngcnggcctgcngccggcaaccggaggcgatggcgagctcgtctgtggcggcggacatggagctggaccgccccaacctggaggactacntcccgcccgantcgctcccgcaggaggcgaccaggaatctccatctgngcgatctgcttganatctcgccggtgctaaccgaggcagcgggtgccatagtcgatgatt

SEQ ID NO: 3247 - DNA, 283 bp, Zea mays
  misc_feature: Incyte ID No: 700379653H1
gatgattcacctgcccaagtgaatgttgaaggagatgtttcagagaaaaaagtagaagttcaagaccagaatgaagtgggtgggatgccctcacgacaagaggaggaggcagcaattaagaaaaagtatggaggaatattgcccagaaagactccacttatatctaaggatcatgaacgtgcttactttgattctgctgattgggctctaggaaagcaaggtggtgttcccaacaagcctaaaggtcctcttgaggcactccgacccaagcttcagcctacgc

SEQ ID NO: 3248 - DNA, 286 bp, Zea mays
  misc_feature: Incyte ID No: 700379655H1
gggagcggaggcgatggctgggaagggaggaaaaggattgctcgccgcgaagacgacggcggccaagtcggcggagaaggacaaggggaagaaggcccccatctcacggtcctcccgcgcgggcctccagtttcctgttggacgaatccaccgtacagctgaagcaaaggactcaggcaaatggccgcgttggtgccactgcagccgtctactctgccgccatcctggagtacttgactgccgaggttctggagctggctgggaacgctagcaaggatctgaaggt

SEQ ID NO: 3249 - DNA, 285 bp, Zea mays
  misc_feature: Incyte ID No: 700379657H1
ggactgtacccattgttctttattttaatgagcctgtcaaaggattaaatcaatcaagtgttaacttaaagtctgatttggagttcagtaaggatattatatggaggcccctcacaatggcagactctgggtattctaactgttgggccacatatctccagattataaatgaatgtggcagtttgcaggaatattctgttgaagtgagcataccctgctcgaatggcattgtatctagaagtggctctaactacaattgtcctgtgcattttacatttggcattg

SEQ ID NO: 3250 - DNA, 286 bp, Zea mays
  misc_feature: Incyte ID No: 700379659H1
aggtaagagatgatctcagttctccagtcttcaccataaacaggagatatattgaggactgctctttcaagaagttccactgaaggtgcttttattgtttcgaagaacacgtccgaaggtaagggcagcccctgtgctgctgacttagctagcaaatcagcatgctcattttgtcctcgagggatatttttgacagaaaatccctcgaaggaagcttcaatccttcggaccgtgtctagatatttttcaagcttcggatctttagccttacagctcttgtcaatat

SEQ ID NO: 3251 - DNA, 290 bp, Zea mays
  misc_feature: Incyte ID No: 700379660H1
  unsure 217: a, t, c, g, or other
tgcgctcatttctgcatccccctcccgccgcgccgcctcaccgccgccggagaagatgggtcgcgtgatccgcgcgcagtaaagggtgcggggtccgtgttcaagtcccacacccaccaccgcaagggccccgcccgcttccgctccctcgacttcggcgagcgcaacgggtacctcaagggcgtcgtcaccgacgtcatccacgaccccggccgtngcgcgccgctcgccaaggtcatttccgccacccattcaggtacaagcaccagaaggagctctttgtcgcagcc

SEQ ID NO: 3252 - DNA, 292 bp, Zea mays
  misc_feature: Incyte ID No: 700379661H1
  unsure 96: a, t, c, g, or other
taccaccaacggaacacgggaacggcggaagcaaacaactagaaattccccagcccggttccttttcgtgcggtttgatctcgtcggaggcccggncgcagttccgccatcagccatcgaattcgatggcggccaacttcgggaacaagatccgcaacgccaagctggttcttcttggagatgtaggcgctggcaaatctagcttggttcttcggtttgtcaagggacagtttgttgaattccaggaatcaacaatcggagcagctttcttttcccagaccttagcggtaaa

SEQ ID NO: 3253 - DNA, 299 bp, Zea mays
  misc_feature: Incyte ID No: 700379663H1
  unsure 6: a, t, c, g, or other
aaaggnctgccagagccactttggcttctcattctggaagtcatcgcagcagtttcattgctttgcttcttaacactttgtaccatgactggcctccgaaggtgcagagccagatcctctgggtctgagaccagtgttccatggacaagagctgtaagctggaaggagaacaccgtaatctcaatcgatgatgacctcctggtaaatgtgccaaagataagccggcaggagctggcagaggcttgcgaggacttcagcaacataattggatcgtctcaggagacagttgtgtacaaggg

SEQ ID NO: 3254 - DNA, 286 bp, Zea mays
  misc_feature: Incyte ID No: 700379665H1
  unsure 36: a, t, c, g, or other
ggaacttctgagtggtgataaggagggccttcttcngctcccaagtgacaaagccctgctgagcgaccctgttttccgccctcttgtcgagaaatatgctgtggatgagaaggctttctttgatgactacaaagaggcccacctcaagctctccgaactggggtttgctgatgcttaaatagaccctatcttggagtgatacattctgctgcctgtatggaatcatgtggtcttttgcatctggagtcaatgtgaacaagcagattgtcgtatgtctttctcgtaa

SEQ ID NO: 3255 - DNA, 281 bp, Zea mays
  misc_feature: Incyte ID No: 700379668H1
ctttctcttccttccggccgcggcaatggcgtcggggaacaacaacaagcagaggagcgaggaggagtggcgcgtcgtactctcccctgagcagttccgcatcctccgcctcaagggcaccgagttaccagggacaggagagtacaacaaattctacggtgacggggtttataactgcgctggctgcgggactcccctgtacaagtccgccacaaaatttgattctggctgcggctggcctgcattctttgaggggcttccaggagccataaaccgaacac

SEQ ID NO: 3256 - DNA, 278 bp, Zea mays
  misc_feature: Incyte ID No: 700379669H1
catgtggttaaattgttgtagacctgtagtggatgttttcacatttacccgcctgaaaccaagataaaatttttgttggtcttggctctcagatatactgctcacccagaagttggcacagttctcagttttttattggacaaggattatattaagtttagaggccaaataacactactgtttggtttgagcagctattatttgttttttggtaggtttgtgcattttggagagaaagtgaagtgccattgcgaacagtgaactgccagggatacctg

SEQ ID NO: 3257 - DNA, 280 bp, Zea mays
  misc_feature: Incyte ID No: 700379670H1
  unsure 228-230, 232: a, t, c, g, or other
ctgacccgcccactctaccttcttccctcttcagtctcctcgcaccaacgaccacatcccaccgaacaccgatcaaggtaaacctgttcgctgctccgccagaagccgaggtcgagctgttcacggcagcgagcatgcaccacgatcccaaccccttcgacgagggcgccgacgagaaccccttctcgaatggaggcggaggagcgcgtggcggaggcgtcaagccgnnntncgggttccggccgacggagcccgcggggttcggcggcggcaggggcga

SEQ ID NO: 3258 - DNA, 280 bp, Zea mays
  misc_feature: Incyte ID No: 700379671H1
  unsure 19, 29, 66, 92, 116, 130, 133, 146, 221, 225, 238, 264: a, t, c, g, or other
ggcatcagtaattaccagnaacaggaganggaggcggcaaagcttgtccagaaacagagtacttanaagctgttggtcaacgaggatgacantactgacaaccagacactggcaantcaaaagacctcancanatccatgcatctnagagtcggaagcatttcaggaggaaagcagatcaagacagtgatggtgatgaagtagtggcaacagattctgganggantgtcctcgacgancagaagaggaggatggagaaggtggnatcggcagttctgatg

SEQ ID NO: 3259 - DNA, 283 bp, Zea mays
  misc_feature: Incyte ID No: 700379672H1
  unsure 33, 53: a, t, c, g, or other
aacccaatcccctttccccacggaaccgccagncagcaaagaccccgccacgngtcgacggaaccggagcccccacgcggaagagagatacgcagacgcacctggagtccagtgcccaacgccgacgaacggcggaggtaccggtgaagcccctcggcgcgagcccgtcctcacccccgaaaacgctctcccgaacccaggacctcgacgggcgagacccgcgcctcgctggtgtggtgactggtgacgacgagcggcgaactcaggagggaagaggcctagg

SEQ ID NO: 3260 - DNA, 167 bp, Zea mays
  misc_feature: Incyte ID No: 700379673H1
  unsure 164: a, t, c, g, or other
ggaggcgacctcaggcaaacattgatattgaacccgttagctgtaacgctgtgtaacagtagaagaaagaagctgaggtcgccaggtaatttattgttaaactgtaggaggccgggtaaactcatgcccttcttgttccaagctaccgtaaaaaaaaaaaaaanggg

SEQ ID NO: 3261 - DNA, 282 bp, Zea mays
  misc_feature: Incyte ID No: 700379674H1
gcaagggttgcccaggggaaatattattacctccctaatgcttcagatgctgtaatttctgctgccaccaagaccgccctgacagacttgaagagctcatgattttgcagcagcggcacccgttttctgtaccttttgatagggatggtgaaccttcattcatgcagtaatttttgcgtaggcctctacaatgacagggggaaacaaacccgagcatggcatcgtgtaaagtgttaaggtccaatggcctcctgtccacgtttggcgatgtaaatcctccgt

SEQ ID NO: 3262 - DNA, 284 bp, Zea mays
  misc_feature: Incyte ID No: 700379675H1
  unsure 150: a, t, c, g, or other
atccagaaggataagggccttgagccctccgagttcgaggactccgtcgcccaggctttcttcgacctggagaacggtaaccaggagctcaagagcgacctcaaggacctttacatcaacggtgctatccagctggatgttgccgggagnaggaaggctgttgtgatccacgtcccataccgcttgcgtaaggccttcaggaagatccatgtcaggatcgtcagggagctggagaagaaattcagcggcaaggatgtggtaattgttgccacaaggaggatcgt

SEQ ID NO: 3263 - DNA, 90 bp, Zea mays
  misc_feature: Incyte ID No: 700379684H1
  unsure 15, 33, 56, 59: a, t, c, g, or other
cggaggcatggcggnggggagcgggctcccgangcgcccgccatgctgcgcaacanatncgagaatggcggttggtggtggtgccaacca

SEQ ID NO: 3264 - DNA, 276 bp, Zea mays
  misc_feature: Incyte ID No: 700379685H1
  unsure 66, 160, 176: a, t, c, g, or other
cgcgcaccaccccctccatccgttccggatggtgccttcgaaatcccgtccggcgccctagcgtantcgggctcggccaggctccgggcccgccgcgccgttacgcagtccagctccacctccagatcttttcttgagtttaaggaagatgcttgccttnatttagaaggcccttnttggtacgtcagcagtgttctttcctataggagtaaatgccattccgtagcatcgtgcgtgatgtaagggatggtttcgggagcttgtctaggaggggat

SEQ ID NO: 3265 - DNA, 277 bp, Zea mays
  misc_feature: Incyte ID No: 700379687H1
  unsure 41, 53, 56, 59-60, 62, 64-66: a, t, c, g, or other
gcgagatactaaaactaaaggtatttggatttggggtactnctatcatcatanacnttnnantnnncaacactttcaaacccttcagtgtctagataaaggacagaaactgaagggtttgaaagtgttgggaaatcaaatgtgtatgatgataggatatttgctttggcgactgtcttaagctcggtccttatctacaaccttcctgagacggtacgtgaagctgatatatctaggctttcatttgccgttgaaattgctgaagagttctatggaag

SEQ ID NO: 3266 - DNA, 177 bp, Zea mays
  misc_feature: Incyte ID No: 700379688H1
cgttggaatactgagtatagttggaagaagggcagcagctgcctcttgatatgtgtaaatttgttggttgtgtacttgtgttatgtcactgatgtggtttctgtgtgtaatatatgtcgctttgacttgtcatgcaacattgaagagtatatggattggtctgttgtatttggcgaa

SEQ ID NO: 3267 - DNA, 281 bp, Zea mays
  misc_feature: Incyte ID No: 700379690H1
ctcccccacctcccggtccggcagcagagagcgggggtgcagagagatcgagatccggaggccgcgagtgggagcgccaccaccagcgactgcggcaatggcgggcacggtgacggtcccggggtcgtcgaccccctccacgccgctgctcaaggacgagctcgacatcgtgatcccgacgatccgcaacctcgacttcctggagatgtggcggcccttcttccagccctaccacctcatcatcgtgcaggacggcgacccgaccaagaccatcaaggtgc

SEQ ID NO: 3268 - DNA, 284 bp, Zea mays
  misc_feature: Incyte ID No: 700379692H1
aagcaatccgcaaaccctttctactttcttcccctgctcgattcgcgcagtgcatcaccggcgacggcggcgatggcacggaggagaaagacggacgccccgccgcggctggacgaggcagatcgcacgctctactccaccttctgcggcgccgccaactccctctcccagctctacgcgcaggccatggcccagcagaagctcaacttccatgccggcgagcgccacgccttagaaaagctctaccagtggatcttgaggaagcacgatgaagaggtaggctc

SEQ ID NO: 3269 - DNA, 287 bp, Zea mays
  misc_feature: Incyte ID No: 700379693H1
  unsure 32, 42, 49, 55, 79, 83, 86, 88-93, 95, 137, 139, 230-231, 233, 243: a, t, c, g, or other
atcaagataaatatgaaactcgactgttggangggcaagaanaacaganagtgangctaatctccatcccaaggttctngganagngnnnnnncngtaatgccccaatctgaggaacttggaatgcagcacaccgancntctcaacaagctttgatgcctgaatatgctctgatgtttggaagtgcagaagacttcaatgtacaatgttgagcggcatgaccacgagggnntnttgtactagngcagttctttattagatgtatgatgatgaccttaggttttgcca

SEQ ID NO: 3270 - DNA, 290 bp, Zea mays
  misc_feature: Incyte ID No: 700379694H1
  unsure 23, 30-31, 33, 54, 90: a, t, c, g, or other
cgcgtgttcctgtaatcctgtantccctcnntntcacactctcactcaccacangcaagcagctagctagctccggcgcacacaaccaancacctgtttaattctgtactgcatgcgtgtgtaatttgatggttcacaataatgagtccctctccggaccttggtagctgcttgcttgtggtgagtgagagtgtgagactgagggagaagaggtggtgggcgtggggctacgtcgagagaggcgtgttcctgtaatcctgtatcgcttcgttttctctgcatgcgtctat

SEQ ID NO: 3271 - DNA, 298 bp, Zea mays
  misc_feature: Incyte ID No: 700379695H1
  unsure 64, 127: a, t, c, g, or other
gcttctcagaattcagttgacccattctcgactagacgagaatgggtcaactggatacagcgcnccaggacactcacgacgcttctcagaattcagcgcccaaagctgcaaatcacgcgaaccaaantggacctcagaacaacagcaaccattcagcgttggtccctgtgaagcccgcgccgaaacgccgtggcaggaaaccgaaacgcgttgtgcacaagcagctggacatcccagatatctgcgaccggcttacatcgtctgtggcgtgcgaagaaatactgtactgtgaggaagt

SEQ ID NO: 3272 - DNA, 327 bp, Zea mays
  misc_feature: Incyte ID No: 700379703H1
  unsure 59, 94, 186, 189, 224, 253, 260, 287-288, 297, 303, 311: a, t, c, g, or other
atcaaaaatgccacttgagctatcgagtgcactgctctcatgaacgggaagttgttgangattctgaaattcggcagcaggcattagaggctanttatatgatgcgtattgcaggatggtggccgaaggtccttttggtcagttaatggcccacgaattctgcaggttggttatgaagatgaaaanganccgaaagtgattgaagcatatgaactattggttcnctgcttgttggtgaaggtgaagatgtacnaagttanaaggagggaccaaggagagaaacccanntggcccgcnggcggnaaaaaggnggcctttttttctttt

SEQ ID NO: 3273 - DNA, 321 bp, Zea mays
  misc_feature: Incyte ID No: 700379705H1
atctttgcttcacaaaaccacttggaacatattaaggtgtaaacaccaacctaccttatagtaatgaaagatgtgcatctgaaatgaaccttattaagggtctttcctctcagtctaccactagcttgtttcaccattctaattcacgggatctccaattacatagaacaggttaccactatgataaactttaggtgggtctcaggccatctcaatcgatgcactattatcacactacgtgatagccccttagtaaattgatctatcagatttttagacatatagacatagtccaacgcgattactccggagttttcaatt

SEQ ID NO: 3274 - DNA, 328 bp, Zea mays
  misc_feature: Incyte ID No: 700379706H1
  unsure 22, 53, 78, 99, 122, 127, 160, 214, 234, 266, 275, 280, 283, 303, 305,: a, t, c, g, or other
aggacggaatcgaaaaggcganaactcagtgtctcgagtttcctcggagcggntgcgatggctgggaagggatggganaggcttggcttcgccgcgaanactacggcggccaagttccgccnagaangacaaggggaagaaggccccaatctcacgctcntcccgcgccggcctccagttccctgttgggggtatccaccgtcagctgaagcanaggactcaggcaaatggtcncgttggtgccaccgcagccgttctactccgcngcaatcctngaggnctngattgccgagttctggaagntngnnggnaatntgnnaaggttttt

SEQ ID NO: 3275 - DNA, 311 bp, Zea mays
  misc_feature: Incyte ID No: 700379708H1
  unsure 89, 185, 187, 190, 195, 197, 202-203, 205, 209, 211, 213, 215, 222,: a, t, c, g, or other
tcatttatgctgtataggaggcaaaaatgaattatattgtgttacctgttggtagaaagaaccttgaaagatagggaacgtgtcgtttntaaatcaaagcggttcctgtgctgtataacatgttgcatgagtattggcgcaacttataagacaatgtcaaatgggtttttgggagtcccaagaangnacnaaagngnacagnnangacnangnangtcgggncgcccnncgtcnaanggnccncgngcgccggnntttattgnngggctcgcnccntnngggngcnntttcccctgttggnncctntgngg

SEQ ID NO: 3276 - DNA, 316 bp, Zea mays
  misc_feature: Incyte ID No: 700379709H1
  unsure 21, 36, 43, 50, 58, 250, 255, 260, 271-272, 285, 291-293, 298, 304-308: a, t, c, g, or other
tagcacgacagcacttccggngaccaggtcccaggntcccagngtccggnggtcccancagtccagcacgacagtcgacagcacttcgggaccacggctccgcgcgttctgctgtgcaggttctagcgttctgctgtccacggctccgcgcgtccaggaggtgaccaccagaccaagcctccgctgtccagaccagggggcaggggctggatttacatggctcaagacttagttctagcttttggggtanccaanaaggncaaattggggnnccgttggagaaangccttnnnggganctgacnnnnnggtttaaa

SEQ ID NO: 3277 - DNA, 280 bp, Zea mays
  misc_feature: Incyte ID No: 700379711H1
  unsure 11, 15, 18, 47, 88, 90, 107, 115, 117, 136, 150, 154, 164, 166, 173,: a, t, c, g, or other
gcacgattctnctcntcngtccgcgtagatctcggtttcggcgatgncggggcgcggcaagggcggcaaggggctgggcaagggcggngncaagcgccacgcgcaangtgctgcncnacaacatccagggcatcangaagccggcgatcngtangctggccacnangggcggngtcaagngcatttctgggctnatntacnnngagacacgnggcgtaatcaagntcttncctcgagaacgtnatccgaanncgnttaacttacncngntcaaggctnac

SEQ ID NO: 3278 - DNA, 225 bp, Zea mays
  misc_feature: Incyte ID No: 700379712H1
  unsure 13, 107-108, 135, 140, 167, 180, 193, 202-203, 207, 221: a, t, c, g, or other
gaagtgaatcctnttgatggacaagaggccaagccgtacaagaatgatctgaaatccttgcatgacaaacctgattgcagcgtaccagaagatgacatcatggattnnaagtctgagagtatagagacatatggncgtcnttatcgtactaatgggctatgagacancgaccaggtgtantatacattccganagtcatatnnaganatcagaagtgggangtgg

SEQ ID NO: 3279 - DNA, 50 bp, Zea mays
  misc_feature: Incyte ID No: 700379715H1
  unsure 23, 40, 42, 45-46, 49: a, t, c, g, or other
ctgatcaagtgaatatatttgancagatgatacgtatctncngcnncanc

SEQ ID NO: 3280 - DNA, 159 bp, Zea mays
  misc_feature: Incyte ID No: 700379717H1
  unsure 49, 52-53, 55, 60, 71, 85, 98-101, 104, 106, 111, 120, 137, 139, 147,: a, t, c, g, or other
atgagttggtgctttgtcgtggttttgtgggatgtaataattcgatgtncanntncactnaggggcgccanggtgcttgttcccntggtttggtggcnnnnagngntttgngtgattagnggggggcggccaccccncnctgcgctngtgcccggnttt

SEQ ID NO: 3281 - DNA, 327 bp, Zea mays
  misc_feature: Incyte ID No: 700379718H1
  unsure 18, 84, 90, 108, 112, 131, 158, 163, 219, 242, 272, 283, 289, 299, 304,: a, t, c, g, or other
agcagaaagcacttccanatctcctcaaggaatatgacatgccagcagggctcttcccacgggacacgactacactatgggttncaatgnagagacaaagaagctganagtntacatcccgtcagcctgtnatgttggttacaaggactgcgtcagtnctgcngttcttcacctgtgtgaccggctaccttgaaaaggggaagttttccgacatcgagngcatgaagaccaaagtgctggtntggaccaaggtgactgccatcaagaccganggcccaaaggnccattncactgcaggngtggnagaaggctcgtagccgtntccct

SEQ ID NO: 3282 - DNA, 321 bp, Zea mays
  misc_feature: Incyte ID No: 700379719H1
  unsure 13, 38, 60, 66, 69, 143, 190, 232-233, 243, 285, 287, 291, 299, 305, 319: a, t, c, g, or other
atgagcttatgtncttatatgactactagctagaagtnagagcctagatacatggctgcntctgtnggngtgaaagctcgagtggctcctaaatggtcgtcgtattagctgatacgacatctacccgatgcaatagataatantgtttacacgcgtgagtccaaaattgttggctttgggtcggagcagntaatgcgagaagtgtattttatcacttctgagtgcaaccttnnttttattatntttccgagctctgccactgcatatgttgtagattctcgccgngnaggnttagtagnattacntggtatcctatgcnaa

SEQ ID NO: 3283 - DNA, 317 bp, Zea mays
  misc_feature: Incyte ID No: 700379721H1
  unsure 43, 247, 257: a, t, c, g, or other
attgttggagatcttgaaaaaattccaggcttcaggattccanaaccaattctacaaaacctactttttgacaattgagcaagagatttttgcagtcctcacagacacattccacaaacctggtttcaagcttcatgtttcggtgctgcaacacttgttttgtgcggttgatggtctaacggagcctctatgggacgcgtcttctgtaccttaccaatatacggataatgctatgtttgttcgagantacaccatanagctcttagggacatcatttcctaacaagacagtaaccgaggtgacaaagtttgtagatg

SEQ ID NO: 3284 - DNA, 323 bp, Zea mays
  misc_feature: Incyte ID No: 700379722H1
  unsure 38, 44, 58, 99, 101, 213, 227, 251, 254, 256, 259, 280, 295, 300, 305,: a, t, c, g, or other
ataacggcataaccctagtccctaccccatataaaacnaggcangattgaggctttcnttccaattccacccatcgccgccgaaatcccgttgcgtctntngcgcgttaccaagctctcaagttttctcgcgccgacggcaatggatgaggtcaccgaggccgtgaacaacctcaacatctcgggcgtaggggccgcgggcgttgccggagcngaagggcacaaggnagtatcgcatccaggtctcccaantantnagnagcccctcttctttcaatgtnaagctccgccagggngttgntcaantgccaaaaggattaggnt

SEQ ID NO: 3285 - DNA, 71 bp, Zea mays
  misc_feature: Incyte ID No: 700379724H1
  unsure 8, 19, 24: a, t, c, g, or other
caagaacnagaagaaagancgatngtgcgtgcagcgtgcatgcatgcatgcggcccacccatgaattatct

SEQ ID NO: 3286 - DNA, 317 bp, Zea mays
  misc_feature: Incyte ID No: 700379725H1
  unsure 15, 101-132, 173, 187, 190, 210, 218, 231-232, 239, 249, 251, 257, 265,: a, t, c, g, or other
agtatagtgcctggngcggggcattacatgtcacaagtaccaatgttccctccaagaaccccattaaccccacagcagatgcaggagcagcagcaacaacnnnnnnnnnnnnnnnnnnnnnnnnnnnnnnnngctcttacatttcctggacagatggtcatgagaccaggcancatcaacggtatgnagnagcggcagcctatgcagggngaccctgncccgggcagcagnngagcgangctggaagcngngtgccnaggttgcnggggggggancaagccnggnannccgtggtnggggagtntctgtgnnntttt

SEQ ID NO: 3287 - DNA, 311 bp, Zea mays
  misc_feature: Incyte ID No: 700379727H1
  unsure 21, 25, 62, 119, 134-152, 187, 209-210, 213, 226, 233, 239, 250, 260,: a, t, c, g, or other
acaatggacgcagcaggtgcntgcntattcattcattcataccgttttggtcgtcgagaggngcgttcaataagttactagtccagtgtccgttataggggagtccggtagtgtccgtnataggggagtccggnnnnnnnnnnnnnnnnnnntcatcttcttcttcgccctttcccctgggaatgantggggtaacttggaaacgttgnncangggggcccagttnaagaatngggaanctggttgttcncgggggaagnangtggttagtgggnaaattgatctgggggcaaagantgaggnccttncnt

SEQ ID NO: 3288 - DNA, 168 bp, Zea mays
  misc_feature: Incyte ID No: 700379730H1
  unsure 28, 44, 61, 73, 75, 113, 119-121, 123-124, 135, 140, 142, 153-155, 162,: a, t, c, g, or other
attgtgaactccggtcgagcttaaaaanagcagcaatggcgaantttggacattgctgctngctgcagtggtngncctctcactcctagtgagccccattgcttgcacccganagctcnnnanngccaagccgangcggngngtaacatgtgnnngtaacgngnncca

SEQ ID NO: 3289 - DNA, 324 bp, Zea mays
  misc_feature: Incyte ID No: 700379734H1
  unsure 27, 45, 58-80, 88, 90, 98, 112, 183, 244, 254, 259, 263, 267, 270, 275,: a, t, c, g, or other
atcctcccggacggccactgccagtgnaccaaacactggcacatncagggttcaccannnnnnnnnnnnnnnnnnnnnnnggagcatnanggggtccnctagtcacggtggnattccagatcctggtgaacaacctgcccaccgcgaagtgcaccgtggagtcggtggagaccgtcagcaaantgctatcctgcaccatccagaagatcaagtctgcgctccaggccagatcgtaacgcctagngtttagcggnatttngaantggntcngggcngcgggtcncannaanaggcncggtgtnggnggntnccgtnnnaaatgtt

SEQ ID NO: 3290 - DNA, 326 bp, Zea mays
  misc_feature: Incyte ID No: 700379739H1
  unsure 6, 37, 39, 214, 224, 239, 242, 244, 254, 259, 261-262, 269, 278,: a, t, c, g, or other
gctgcntcaacgtgtcttccttcccgcggtctctccncngcctcccagatccggcggccatggcaaggaacccgggctgcaccgtcttcataggtaacttggatgacaaggttcctgagagggttctgtatgaaattcttattcaggtaggtcgtgttgtagacctacacatacctcgtgacaaggaaactagccgaccagaaggctaggtttnctgggtatgnaaccagggggattgnccnanatggccgttnaactnanntcatggnctgtgtgtnaagttnntgtgngaaaanccctgtggngtgcggnattctctggggaaa

SEQ ID NO: 3291 - DNA, 322 bp, Zea mays
  misc_feature: Incyte ID No: 700379740H1
  unsure 7, 91, 93, 127, 166, 183, 215, 222-224, 237, 241, 247, 252, 261, 264,: a, t, c, g, or other
taacctnccatggtactggtaacagcagcatggatactaatatagtagccatgcctgttaactccaagtctatatatgatctcaaacgatntnataacgtcacagagttgtttcatcgaagttctantgacagaattggttttcaagtcagctctagtaaagagcntgattctaccattgctngtgtaatgtcagaatacaagagtttgaaacantattgcnnngggcaggtaatgnattnaaggtngtcanaacataggngtntgcaccnttnctttagcngtgcngncaantnttcaantgggtgntggtangnagtntt

SEQ ID NO: 3292 - DNA, 300 bp, Zea mays
  misc_feature: Incyte ID No: 700379750H1
  unsure 11, 16, 18, 22, 42, 73, 87, 102, 119, 121, 142, 171, 191, 194, 205-206,: a, t, c, g, or other
actcatctttncgcgntnagancctctagaatttcccccacncgccactcgcagcagcacctgtagcagccantgacgccagcggancaggtagcaaggtgnataagggggctgccgtncncaaggcaggcggccccaggantaagtcggtgactcggtccgtcaatgccnggcttcagttgccccgtgcngcnggattcgggcnntaatcnagnatcgncgnttacgtcgcagcntgatgtaatggtngcccctgttnatntgnngnnngcntnaggtgantnacnctgtgcgnggtac

SEQ ID NO: 3293 - DNA, 321 bp, Zea mays
  misc_feature: Incyte ID No: 700379751H1
  unsure 2, 19, 24, 43-44, 58, 71, 77, 90, 128, 161, 212, 234, 236, 240, 251,: a, t, c, g, or other
anctggagccgcaggaatnctggnatgcatttttcaagtatgnnacctaattcagatngtaatacgaagantagcangggaccagatcgntcagcatccaagagtgacccaggaagccggaaaaatgngtcctatgacgctgattttaagcttgtctacanagcaatcactgggggagtggtccctgcattttcaacttctggggctggtgntgagtcccatcttccagctagngnaagnagctggagttnacnngaggcacaagtttatcttcanggtccgnaantncgtgtttattcaggngtctggcnctaatggagg

SEQ ID NO: 3294 - DNA, 162 bp, Zea mays
  misc_feature: Incyte ID No: 700379754H1
  unsure 10-11, 29, 53, 65, 94, 102: a, t, c, g, or other
gataatccgnnggcgttgagatgttggtntatcaggatctcctatctggcgangagctcctgttnggattcattcacctacaaggagctcgagnacggcgtnctgtgggaggtcgagggaaagtgggtcacccaaggtcctgttgatgtggacattggtgcc

SEQ ID NO: 3295 - DNA, 238 bp, Zea mays
  misc_feature: Incyte ID No: 700379756H1
  unsure 2, 13, 66, 105, 199-200, 202, 219, 234: a, t, c, g, or other
tncagacatccanccaccagagccggtcgatccgttcgaaacgatccgggaaagattccacgactngggacttctcacattcccacaccgcactgtgccactgcngccggcccgccgcactagccgttgcttcttgcttctcccttcccgttcccaaggagttgtcctcgccggcggatccggggcgccgctgcaagannangaaggaggaggagaggntacagaatggcgtcncgct

SEQ ID NO: 3296 - DNA, 172 bp, Zea mays
  misc_feature: Incyte ID No: 700379759H1
  unsure 21, 51, 84, 140: a, t, c, g, or other
acacatacaactcacatagtnctaacagaacccgacgggattcaggttgangacgtgacggcggaacccccttcgacccctgcnccacggggagacgtggagatgatgaccgaggacgagaaggagaaggccagattgtntctgcctgatttgaggcgaaccccacttctag

SEQ ID NO: 3297 - DNA, 320 bp, Zea mays
  misc_feature: Incyte ID No: 700379760H1
  unsure 4, 67, 172, 209, 252-253, 267, 273, 280, 289, 302, 305, 314: a, t, c, g, or other
cccngcggggagctctagttccgccaagcgtgcgtaccggcgtccggatccgggaccgaagatgaangagtccctggtgcggaacaagccggggatggccagcatcaaggagatgccggtggtgcaggacgggccgccgccgggcgtttcgcgcccgtgcgcttcgcccgcnggatccccacctcggggcccagcgccaccgccatctncctcaccaccttcggtgctttcgcatatggcatgtaccaatanngccaggggaacaangtccgntgggttnctcatagangagaaaattgctngtncgcaatgcnatacct

SEQ ID NO: 3298 - DNA, 217 bp, Zea mays
  misc_feature: Incyte ID No: 700379761H1
  unsure 67, 95, 138, 207: a, t, c, g, or other
gaaaaaggaaaggaaaggacaaaggagcggcggcgaggtctatggcgtcgacggcggggtacctggngcggcgggcggcgcagaaggagcgggtncgcctgctctaccgcagggcgctcaaggacacgctcaactggnccgtccaccgccacctcttctaccaggacgcgtcggatctccgggacaattcgaggcaaccgacaacgnggataacctg

SEQ ID NO: 3299 - DNA, 118 bp, Zea mays
  misc_feature: Incyte ID No: 700379762H1
  unsure 6, 8, 13, 56, 90, 104: a, t, c, g, or other
gaactncnttacntagtgcctactgcctagggaaggaccgaagagaggtgcgcggntggtagcgtgcgattagcagcagcgccgcgggantcttctcatacgcngctcgcctgctggg

SEQ ID NO: 3300 - DNA, 240 bp, Zea mays
  misc_feature: Incyte ID No: 700379763H1
  unsure 230, 236-237: a, t, c, g, or other
ggttttactgggttctgcaccagatcctcgcatacaaagtgactttacaaatttggccagtaagctgcatggtgaataccatggccgagtgaagctatgtctaacctatgacgagccactgtcacatttgatatatgctggcgcagacttcattctcgttccttccatcttcgaaccttgtggtctaacacagcttattgctatgcgctatggatccatcccagttgttngaaaannggg

SEQ ID NO: 3301 - DNA, 142 bp, Zea mays
  misc_feature: Incyte ID No: 700379768H1
  unsure 9, 23, 62, 74, 100, 128: a, t, c, g, or other
gtatctgcngttgaatgggtgcngtttatactagaatgccttcgctcgcaagttgaagctanttgattctggcncgagagagctgctttggaaaagcgangtcctcctcttctgaatgctgcctgggntgcatagactggat

SEQ ID NO: 3302 - DNA, 195 bp, Zea mays
  misc_feature: Incyte ID No: 700379769H1
  unsure 23, 27, 31, 33, 53, 66, 95, 138, 159: a, t, c, g, or other
tgaagtttacttgcatgcagttncgtntctntncttatcctgacataactganggaactgcatgcnagtaaacttcagttatgtcaggataagancagagacgggtgcatcatggcattggctgttgtgagaaatganacctaagatctgcgcaataanttccagactatgcttcagcttgagcagcaaatacag

SEQ ID NO: 3303 - DNA, 180 bp, Zea mays
  misc_feature: Incyte ID No: 700379772H1
  unsure 24, 26, 28, 30, 32, 89: a, t, c, g, or other
gtagtaggtgaagctagtaccgantncnantncccaggggatttcggtctttgattgagggttcactactagcagtatacacgccacanacaccgaaatcccctggggagtcggagtcggtagtaggtgaagctagtaacaaggttggcgaaatattattttctggcctgactgcctata

SEQ ID NO: 3304 - DNA, 213 bp, Zea mays
  misc_feature: Incyte ID No: 700379774H1
  unsure 2, 8, 20, 31, 40, 46, 53, 81, 95, 128, 144, 159, 206: a, t, c, g, or other
gnactgcntccactgcagtnccagctcaganctctcagcngtggcngccggcnaccggcgacatcctccggtatcgactcncgtggagtggagcnttgaaccacgctgcggaactgcattcaccagtncgccgtttccttcgcnttctccgcgtgatcnggttgctctggccactgatggccggtgacattacttgcggatcttgngcaaaaa

SEQ ID NO: 3305 - DNA, 213 bp, Zea mays
  misc_feature: Incyte ID No: 700379775H1
  unsure 3, 67, 211: a, t, c, g, or other
agngggatctcgcgaatggatcaagcaggtacccatcgtatcgccctgccaatgggcattgagagtnttaatgattgcattgacaataatgtgtggttaagtccatgatgttcgcttctgagctgagtgtaattgtaatagttctccatagcagtgatataaagaattgttcctcagtttccttattcaatcatagttatatgaccccccncc

SEQ ID NO: 3306 - DNA, 160 bp, Zea mays
  misc_feature: Incyte ID No: 700379778H1
  unsure 157: a, t, c, g, or other
aagatacgctgagagaaggatacaggttcattctttccgaggaagatgagatggattctacttgggagaaaaggctggtcaaacgttactatgacaagctgtttaaggagtattgcattgctgatatgacccagtataaaaaaggcaagattggacnggg

SEQ ID NO: 3307 - DNA, 225 bp, Zea mays
  misc_feature: Incyte ID No: 700379779H1
  unsure 47, 100, 112, 215: a, t, c, g, or other
gcttcacttgggtattctttttgcaggataagtctgaaacccaaggnaccctcaagcgcttcctaaggagagctcaaaacgagtttgagctcaaggtganaaaggtaaggancgacaatgggtccgagttcaagaaccttcaagtggaggagttccttgaggaggaagggatcaagcacgagttctccgctccctacacaccacagcaaaatggngtggtagaga

SEQ ID NO: 3308 - DNA, 114 bp, Zea mays
  misc_feature: Incyte ID No: 700379781H1
  unsure 5-6, 20, 39, 44, 46, 62, 69, 75, 87, 101, 111: a, t, c, g, or other
atccnnaccaccgcaccganaccgactccgagccccgcngcgcngngctacctccgctcctntcttcgncgctgncggcatcgaggncgaagacgaaggcnatgcatgcancct

SEQ ID NO: 3309 - DNA, 240 bp, Zea mays
  misc_feature: Incyte ID No: 700379787H1
  unsure 2, 5, 13, 17, 64, 142: a, t, c, g, or other
ancgncccccgcncttntgcaggcgagcaccccgccaccagtcggagatgaacgcgtccagganatccagccatctctccagcaaggacagtgcagagaccgcgagggatatcatcaccacgtccggccaaatccaaccccncaaaatcccggacgctgttgctgcgctcgcacaggctgctgcaaaggcaaatgatcttccagggtggccgttgttctcgcctcctaaggtgcagtgga

SEQ ID NO: 3310 - DNA, 218 bp, Zea mays
  misc_feature: Incyte ID No: 700379788H1
  unsure 7, 114, 145: a, t, c, g, or other
gccagtnaaggagcggccggccttgtcgactccatctacgccacgctcccgctggcgcaggcagacctcgtgctctccaacaagctccacctcggccagttcgtccacgtggancgccgcgctggagaccgggctgaagaagagnaaggcgtcttccatgggggacgggcggaagcaaagcagctgctgttgcccgcagtcgttgatgtgcgggtgat

SEQ ID NO: 3311 - DNA, 151 bp, Zea mays
  misc_feature: Incyte ID No: 700379789H1
  unsure 23, 26, 42, 48, 71, 105: a, t, c, g, or other
aaaacgtctaaatttgggaatcngcnatgagaaattgcaatngttttnagactctatcaagtcatacccgnatgaaatcaaacttgttggtgttcattgccatcngggatctactattacaaaggttgatatattcagagatgctgcagtt

SEQ ID NO: 3312 - DNA, 278 bp, Zea mays
  misc_feature: Incyte ID No: 700379790H1
  unsure 18, 21, 54, 98, 135, 216, 254, 272, 274-275: a, t, c, g, or other
actgctcgtaagccggcngcncccgcggccccggccagtccatcccctcgctcnatccccaactccagcaggcagattcagatacatccatccattcncggaccggaaggaaaggaaagggttgaactatgagcnccgtggcgtttcgtcgtcgctgaacccggacgcgccgctcttcatcccggcggcgctgctgcaggtggaggacttctcgcngcagtggtgggacctcatcaccaccactgcctggttcngcgacaatgggtccgcgnanncgc

SEQ ID NO: 3313 - DNA, 252 bp, Zea mays
  misc_feature: Incyte ID No: 700379792H1
  unsure 24, 28-29, 50, 65, 158, 166, 191, 204: a, t, c, g, or other
agaagaacttggcgggcgaaaggngaanncgacgtgctcccgggcgggcngcgacagcgggcatngagcgagagcggcaggcagtggcgaggaacaggaaggtggtgctgcgcaggtacatcgaccgcgcgcccagggaggaagacatggagctcgtncgacggcngcgcctggagctgcgcgtccccganggcggcggcggcnccgcggtgctggtgaagaacctctacctatcctgcgacccttacatgg

SEQ ID NO: 3314 - DNA, 212 bp, Zea mays
  misc_feature: Incyte ID No: 700379793H1
  unsure 54, 84, 169, 176, 178, 206: a, t, c, g, or other
ttcatctcccaggttttcccctccaatcacccccaggtcttcctctcgcgagtngcggtctcgcgcccccctccgccgaccgcngcctcctcacaaccgcggaagctgcttccctctccattggacgcggccagcttccatctctcggtcacctccctctacatcccanggccgcnancaccttccctctacctcacacggccgcnggcttt

SEQ ID NO: 3315 - DNA, 120 bp, Zea mays
  misc_feature: Incyte ID No: 700379795H1
  unsure 17-18, 82: a, t, c, g, or other
atgtttactctttttannataacagataaaccagacttatagcctggccagcaggacaaccgataagtctggtttatctganatgtttactctttttaacatcttgtcgttattattcgt

SEQ ID NO: 3316 - DNA, 215 bp, Zea mays
  misc_feature: Incyte ID No: 700379796H1
  unsure 3, 16, 49-50, 91, 97-99, 145, 169: a, t, c, g, or other
agncctccagagcaanaaaaaatatattatcgaatactaaagcattttnntcatcgatagaatatagaattttaaaaagggagcgaaatangttttnnnctttttgcagctccgtcgtccaccaacctcctccgatccggccgcngcagcgtagccgaattgtcccgcngccgccgccgcgttcttcgccggacacgccacccaccaccacgcgg

SEQ ID NO: 3317 - DNA, 306 bp, Zea mays
  misc_feature: Incyte ID No: 700379808H1
  unsure 79, 167-168, 210, 264, 292, 300-301: a, t, c, g, or other
cggttgccggccatgcgcggagaatttggcccccgagaagcgccacaccttcgtgcacaacgggcagaaggtgttcgantgggaccagacgctagaggaggtgaacatgtacatcgagctccccaagggcgtgcccaccaagctcttccactgcaccatccaggccnnccacgtcgaggtcggcatccgcggcaacccgccatatctcanccatgacctgatgcaccccgtgaagaccgactcgtcgttctggacaatagaggntgctgagatggctataacactgcaaaanagagaganngggac

SEQ ID NO: 3318 - DNA, 309 bp, Zea mays
  misc_feature: Incyte ID No: 700379809H1
  unsure 92: a, t, c, g, or other
ggcagtttggacagtttagaactttccatttcaggactggtgggatgcatgcccacggcacacaaagcactggtggctcacctgtcaggatncttattcagctgttgcctgtcctactgctgctgttgctcaactttctgccatcctcggagcctgtctactcgctctctcgttcctacccttatgagcataagttccaaaccccccgtggagttccatactatgtcaagatgtctaattttgaggagcagtatccacaccaaagcactgagcgagcaacagtggagcgggcatgttgagagggattat

SEQ ID NO: 3319 - DNA, 48 bp, Zea mays
  misc_feature: Incyte ID No: 700379810H1
  unsure 22, 42, 45: a, t, c, g, or other
aatccctcgctagccacttgcnatctgatcaaccagccagcnganctc

SEQ ID NO: 3320 - DNA, 307 bp, Zea mays
  misc_feature: Incyte ID No: 700379813H1
  unsure 43: a, t, c, g, or other
ctgccgtctccaccgccgccgcagccagcgtcaccggaggganctgccgtctcccttgctccacgcgatgaacaccgacatcaccgcctcgactaagccggagtacccggtggtggatcggaacccggccttcaccaaggtggtcggcaacttctctgcgctcgactacatgcgcctctccaccatctccgccgtctccgtcaccgttggctacctctccgggatcaagccggggatccggggcccgtcgatggtcacgggcggcctcatcggggtcatgggagggttcatgtacgcctaccagaac

SEQ ID NO: 3321 - DNA, 264 bp, Zea mays
  misc_feature: Incyte ID No: 700379814H1
  unsure 23, 61, 132: a, t, c, g, or other
gtagcgtagcaagcgcgcgcggnctacttgctagtatacgtacgtccacaaataaaaatanaagtggctagcgtacaaagctaacatctggttgttcgtcccgacatggacgattagcctagctcgatcgcnagctgctgccactctcgttcgatttaatttcatcccatgtgtggcggtgtagggagtgtggatatgatcatccaataaagtagtctactgaaaatgaatcgtcgttgatcatattaatatacatccatctca

SEQ ID NO: 3322 - DNA, 187 bp, Zea mays
  misc_feature: Incyte ID No: 700379816H1
  unsure 85, 95, 141, 157, 165, 174: a, t, c, g, or other
ggatcaatgatctcaagggacttcggatatgcagatgctcatatggataggcacatggtacctatgcagattccaagtacaagtngtcctgtggnctggcgcgaactctcgagatagttgcattaggtttgcctgagcagnccgttgaaggtatganagttatangccatgagntaacacaggcagc

SEQ ID NO: 3323 - DNA, 114 bp, Zea mays
  misc_feature: Incyte ID No: 700379820H1
  unsure 30, 39, 47, 51, 57, 63, 68, 80-81, 91, 94, 100, 102: a, t, c, g, or other
agacgcttcaccatcggaaaggccacagcnagggttcgngacttcgntccncactcnatctcnaccgnagaccgtcgctnngctccgctancgnagcagntncaaatttctctt

SEQ ID NO: 3324 - DNA, 175 bp, Zea mays
  misc_feature: Incyte ID No: 700379824H1
  unsure 34, 38, 51, 55, 76-77, 97-98, 123, 125, 161, 172: a, t, c, g, or other
ctagcaaccgtccccacaatcctccgacgatgcntgcngcaccgacgctantgcncccctgcgacgcggaggagcnncagatggcggagtcctccgnncgcttctccatgttcccgatccgtncnccgcagatctgggagtgctacaagaaggcggtggcntccttctgganggc

SEQ ID NO: 3325 - DNA, 310 bp, Zea mays
  misc_feature: Incyte ID No: 700379832H1
  unsure 186: a, t, c, g, or other
cctcgcccgcccaaatacaaaagcctcagatctcagtgaccagcgccgccgcttcgttcgtgtcgaatagagaagagaggaaatggcggcgagcgagggcgtgctcctggggatgggcaaccccctcctcgacatctccgccgttgtcgatgacgccttcctggcaaagtatgacatcaagctgancaatgccattctcgctgaggagaagcactcgcctatgtatgatgagttggctagcaacagcaatgttgaatatattgctggaggagccacccagaactctatcagggttgcccaatggatgctt

SEQ ID NO: 3326 - DNA, 305 bp, Zea mays
  misc_feature: Incyte ID No: 700379834H1
  unsure 31, 72, 79, 99, 111, 120, 132, 134, 183, 187-188, 200, 254, 262, 276,: a, t, c, g, or other
aaagactatgaagaggtctgggaagcttatnattgggtagcatccatgtatctataactgtgaccgcaactntgaaganacacatgctgtggctcatgngcctcgagatanaaaaaggtnaaattgcaatcnanaacaatctggttgggcagagaatcctgttcgcagagtgtttgagctcanttgnnccttggcaaagncgatgtgcgttgacgaacacctgcattacgatatatgaacagcgtaggaagttngtcgaaangcgaagggaatcanccntcactatagtccaaaaacgtcggtgg

SEQ ID NO: 3327 - DNA, 190 bp, Zea mays
  misc_feature: Incyte ID No: 700379835H1
  unsure 13, 16, 22, 35, 43-44, 89, 91, 96, 105: a, t, c, g, or other
tccactgcaaganagncaaagntgctggcgtcttngaaacganncgacctgatgctatgaacgccttctaccaggcaaccatcaagcanangaganttcctgctnaagcgcatccagaagctgtcacgagttatcgacctgtaggggacagcccttcatgcaggacaggagcttgccttggttcctggag

SEQ ID NO: 3328 - DNA, 300 bp, Zea mays
  misc_feature: Incyte ID No: 700379837H1
  unsure 65: a, t, c, g, or other
ctagaaaagcatacaattatctggacatacatcgattttctgatagtccatacctaaccagagangtgtttccagcactgatacacgtcttttggcttctttgtgatttggtggaaacacttcgctgatcaaattcaagagctcgttgtaacaattgttcgagaacatggtcttggatttagtagtcataagtcgagacacgaaagcgaggatggaaactgttatgtgtttgtgcaactgctcttctgcaaccttaatgaggttgaagaaatttttaacctcttaaggtggtggcacctc

SEQ ID NO: 3329 - DNA, 108 bp, Zea mays
  misc_feature: Incyte ID No: 700379838H1
  unsure 29, 53, 92, 98, 102, 104, 107: a, t, c, g, or other
cttgtgacaatttacctttttatgtactncggatctgtatggaatatgttacnctttgatgcatgtatttacggatttgtatgaaaaaaagnaaaaangggngnccnc

SEQ ID NO: 3330 - DNA, 300 bp, Zea mays
  misc_feature: Incyte ID No: 700379841H1
  unsure 272, 283: a, t, c, g, or other
atatatctgatggtgatcttacttctaataatactcatgtggttgcattctgaagcagctcctgttgtcgacagtgcaacccagcgtctcctggaggaaaataatcagttgcttaaccagatttctgcaaataatgaaacattcaagacagtggagaacacagatctttttctccgcacgagtaacaacatcaaaacaattttaagcagaatgagcgaaacgcctggtatcatgagtcagatgcccccattgcctttatccataaacgaagnccatataaatnctcttattcaactgaac

SEQ ID NO: 3331 - DNA, 300 bp, Zea mays
  misc_feature: Incyte ID No: 700379842H1
  unsure 93: a, t, c, g, or other
cggccagtttgctatggcgaacggcatcatctccaagaagttacacgagcagagaagcgacgggaacgtcatagagcttagtgtccatgcttnctgcccgctgctcaaagggaaaaggggcggtgctgtgacaaaggttgggccatggggcggaagcggagggtctccaatggagctgacagagacggagacgcccatgcgtctggagagcatcaccgtcagcagcggcgtggccgtcaactccatctcattctcctacgtcgactctgccggccacaagcgctctgctggtccctgggg

SEQ ID NO: 3332 - DNA, 304 bp, Zea mays
  misc_feature: Incyte ID No: 700379843H1
aaaggcaacatccacggcgtgcacgaagagctaaatttttccacagaaaccatcaaagaaaccacatatagtgatacttacagctccactcttcccatattccaaagcagtttggaatgcaacatccattgcatctggcatctcggtgttatctagaagaaaataagttagttagacacaagaatcaatacaaaaggtgttaataagatcagggttcctaaccatcacttttccgtaatacatgtgatatcttctctgcacgatacatatgccttcataaacccactttcaagccaggaaaaaa

SEQ ID NO: 3333 - DNA, 300 bp, Zea mays
  misc_feature: Incyte ID No: 700379844H1
  unsure 16, 44, 48, 61, 68, 98, 101, 124, 135, 149, 156, 183, 220, 223, 239,: a, t, c, g, or other
ctcgccgctgccgcancctcaccctcgtccgctcctccgctgcnccanaccctagcctgangagggancctcctccgctaccgagacccacgatgtcnacnatcgctgcctcccgccgctcgtnctcctcgtccncttccgcgaccgcnaagcgcnccgcgattgcggacggccccggggganccaaggcgaccgccgcacaggccaagaagcgcgtggngtncggcaacatcaccaangttgccgcgggggagggagggcttccggtggcggcagctttggaantcntggcgcccacca

SEQ ID NO: 3334 - DNA, 304 bp, Zea mays
  misc_feature: Incyte ID No: 700379846H1
  unsure 71: a, t, c, g, or other
gcaacacgcgcctcgatcctcctcgcccctccggcctctcctcccctccctgcacccgcacctgcggagancgccgcaagctagctgcagaggagcgagacagtagcaggaggaggacgagaggaagaagagatggcgggctgtgatggagccaagtcgtcggcgtccatggaggaagaggcatgcgcggagaagaagtacggagggatcgcacccaagaagcccttgatatccaaggaccacgagcgcgcctacttcgattctgcggactgggtgctgggaagcaagccgcgaacagcagcag

SEQ ID NO: 3335 - DNA, 308 bp, Zea mays
  misc_feature: Incyte ID No: 700379847H1
  unsure 7, 111, 233: a, t, c, g, or other
gccagangctttagacaagcctggcagtcagcttgaaggtgtctccaccagctatgaaggaaaccaagctccagaatctgtgaacggagtggaaacgaaagagagaaaganaaaagacaagaaagataaaaagcggaaacgtgatgaaaaacgattaaagaaagatgacccagagtatctagagaaaaagcgacttaagaaggagaagaaaatggagaaagagttggcaaganagcagctagaaggtgaaggaagagctacccctgagcagccgaaaacagtgtaccttcaggttcactggaagtttt

SEQ ID NO: 3336 - DNA, 304 bp, Zea mays
  misc_feature: Incyte ID No: 700379848H1
  unsure 62, 70, 92, 96, 110, 171, 197, 220: a, t, c, g, or other
gcgacgaagtcagtcgcctaggcagctgacggtggcagctctagcatgcggtcggcgctgtnagcctgcnccgcgaggtcgaggagggaganggancgggacatcatgcncctggcgacccaggcgccaaggcggaaggtgctgacgaggaggtctgtctccctcactttntgattttttgcattagattagacctnttgcttaggaagttgtatctganagaagaactatgaattgacatgttgtcaaagtttcgcttcccgtgaaaatgcctactctcaaggtctgtgttgacattgtgacc

SEQ ID NO: 3337 - DNA, 299 bp, Zea mays
  misc_feature: Incyte ID No: 700379854H1
  unsure 73, 91, 115, 198, 257: a, t, c, g, or other
agttctgccggctgttggactgccagaagctctccctggaagcatgcacccacgccgcccagaacgagaggcngccgttgcgcgtggtggngcaagtcctcttcttcgagcaacnccagctaagaacctcgatcgcagggtgcctgctggtctcggacaacctcgaaggctccaggcctctgtcggacgggcattgcnacatccggcgaggctggagggctgggccacggctgtccgagagaaccaggtcctgaagntcggcatggacaacatgcggacgcggctggccgagctggaga

SEQ ID NO: 3338 - DNA, 297 bp, Zea mays
  misc_feature: Incyte ID No: 700379857H1
  unsure 11, 16, 44, 93, 97, 111, 119, 134, 150, 207, 213, 223, 276: a, t, c, g, or other
ctggtcctganggtcnccacctgggacccttgagagtatcaggnctcccacgtgggagacaagaaatccctgtttaatatttaaacagcagtnttcnccatctgggtcctngcaccccncactctggcctcagncgactgcacagcggcncctgcatccccttggctgtgaggcccctggacaagcagaggtggccagagtgggagncatggncctggggtcncacgaatttgctggggaatctcgttttcttcttaagattttgggacatggttngagtcccgaacatcaccgact

SEQ ID NO: 3339 - DNA, 300 bp, Zea mays
  misc_feature: Incyte ID No: 700379858H1
  unsure 31: a, t, c, g, or other
gctcgaccccagcaacgagggcctcaaagcngggctccaggacgccaagaaagccgccgccgcccctccgcgccgcgggtcgtccggccccgacgccatcggccagatgttccagggccccgagctgtggagcaagatcgcgtccgacccctccacgcgcgcctaccttaacgagcccgattttatgcatatgatgcgcgaagtgcagaggaaccccagcagcatcagtatgtatctctccgatccccgcatgatgcaggtgctcagcctcatgcttaatgtcaagatccagagacccgg

SEQ ID NO: 3340 - DNA, 299 bp, Zea mays
  misc_feature: Incyte ID No: 700379860H1
  unsure 45, 165, 232: a, t, c, g, or other
gcattccccttatgcaatctattggggatgtttacacggacagtnagtccgacaggtgatccctaactgtatcttggcataccctagtaattcaagttgctggctggagtgatgcttatccatgtcttggcatgccatagtgaacatgtaaacctgtgatttgangtgattattcgagtgtaaagaaaccaggattgcgttcgcctatgactatgtgtctagttgtctactnaataagaaacagttattggtttggaatatcggaactgagacaatggtttcctttcggtatttctatt

SEQ ID NO: 3341 - DNA, 154 bp, Zea mays
  misc_feature: Incyte ID No: 700379861H1
  unsure 67, 72, 78, 98: a, t, c, g, or other
tggtggtagtgtagagagccctgcccttccgatccggtccggtccggctggattcctcactttagtnttttnttcgcntcttctctgatcagatgcantctcgccgttgccgtccgtagcaaccgcacgcttcctcgctcgccgcgaaccctag

SEQ ID NO: 3342 - DNA, 300 bp, Zea mays
  misc_feature: Incyte ID No: 700379862H1
  unsure 22, 28, 44, 63, 126: a, t, c, g, or other
gatatgagcagctggcaattcnattttnaggccattatttgatnccccgggacaagtgcactnttacctgaccattttagcttgttcagatggctacacagttgccatgcttcacacagctcagtncaccgtcttgtagttggataaaagatgtcgggaactgcaaggctacgcctgatagggtagccagaagtgcccgagctttgggccactgtcacttccggtgctgtgcaggcccccgtagtgcaaactctttcaagaagaaagactctttcgagaagaaagactcttcctcgaact

SEQ ID NO: 3343 - DNA, 120 bp, Zea mays
  misc_feature: Incyte ID No: 700379863H1
  unsure 9, 15, 34, 40, 44, 50, 71: a, t, c, g, or other
agccgaggntgcgcncatccggacccagacaganctcgcnggcncctgcncctaccaccgttcggcaagcnggagggagatgaggggttcgtcgcggaggccggttgccgtggtgatggc

SEQ ID NO: 3344 - DNA, 128 bp, Zea mays
  misc_feature: Incyte ID No: 700379867H1
  unsure 2, 43, 88, 90, 95, 97: a, t, c, g, or other
gncaggctcaggcaaagggggcggccaacaaggacgagcgatngcgaccaaggtcatctgcttccttgtgctcgcatccctgctcctngncgtcncntttcccgtgtctgctctgcggcagaggtttt

SEQ ID NO: 3345 - DNA, 101 bp, Zea mays
  misc_feature: Incyte ID No: 700379868H1
  unsure 31, 33, 38, 45, 47-48, 51, 72, 86, 96, 98: a, t, c, g, or other
tttcgcctgaagatcaccctgtgctgctgancnaggcncctctcnannccnaggccaacagagagaaaatgncgcagattatgttngaaaccttcntntgc

SEQ ID NO: 3346 - DNA, 297 bp, Zea mays
  misc_feature: Incyte ID No: 700379870H1
  unsure 2, 56, 78, 121, 125, 155, 187-188, 197, 270: a, t, c, g, or other
anttaccatccacaatcttgagtttggagcgcatcacattggcaaggcaatggcanattgtgacaaagctacaactgnatccgatacatactcgaaggaagtggccggacatggagctatngcanctcactactataaattccatggaattcganatggaattgatcctgatatttgggatccatannctgacaaanttattccggtccattatacatcagagaatgttgttgagggcaagagtgctgcaaaaaaggcattgcagcaganttactggatgacagcaaactgataccc

SEQ ID NO: 3347 - DNA, 296 bp, Zea mays
  misc_feature: Incyte ID No: 700379874H1
  unsure 113, 240, 246, 256, 295: a, t, c, g, or other
tcggatccggcggccatggcgaggaaccccggctgcaccgtcttcataggtaacttggatgacaaggttcctgagagggttctatatgaaattcttattcaggtaggtcgtgntgtagacctacacatacctcgtgacaaggaaactagccgaccaaaaggttatgcttttgctgagtatgaaacagaggagattgcccagtatgccattaagctattttctggccttgttcgacttcgnaataanacacttaganttgcgatctctgggcaagacaaaccctcattaaatggcna

SEQ ID NO: 3348 - DNA, 298 bp, Zea mays
  misc_feature: Incyte ID No: 700379877H1
aaggaatcttacggttacaaaatatatgaagcagcctatttttgtgtattatgaacttgataacttctatcagaaccataggagatatgtaaagagccgaaatgatgcgcaactaagagatgctagtaaagctaaccagacatccgcttgtgaacctgagaagaccacagctaatgggcaaccaattgttccttgcggccttattgcttggagcttgtttaatgatacatataatttcactcgtggtaatgagaacttgacagtggacaagaaagacatctcctggaagagtgatagg

SEQ ID NO: 3349 - DNA, 299 bp, Zea mays
  misc_feature: Incyte ID No: 700379878H1
  unsure 60, 214, 278: a, t, c, g, or other
agcagtccacggagcggctgagaatcccaaccatgttcaaccagcacctcaaggagcagnagccaaccggagcagtttccctgagaggcccgagcggcaacagatggcaggcagcgctcgcttcagagtccgagtccgaggccgcgtggtgcttcgaccagggctggaaggagttcgtcacggaccactccctcaggccaggccacttcctggncttcacgcgcgacgggcccgcccagttctccgtggcggtgttctcgtcgtcaggcgtcatcganccggcagccctggacgcgagg

SEQ ID NO: 3350 - DNA, 87 bp, Zea mays
  misc_feature: Incyte ID No: 700379881H1
  unsure 15, 17, 24, 26, 30, 44, 50, 74-75, 80: a, t, c, g, or other
acggtagagcaagananactggananatgnataagagcctactnactctngggacgtgtcatcagtgcacttgnngagcnttcagtt

SEQ ID NO: 3351 - DNA, 294 bp, Zea mays
  misc_feature: Incyte ID No: 700379882H1
  unsure 2, 10, 24, 30, 48, 89, 98, 106, 197, 209: a, t, c, g, or other
antccgcctnctcatcagccggtngtctanatggtttgaacatacatncgaacgagttcgcctttgaggaatctgtttcaaccggtganattgacagnacgatccngtccccgctagacaaggttgagaagttcaagagcatcagaagcgacgcggacagtacggtgccattcctgtctgtttacatcggagactcngtcggtgatttnctctgcttattggaggcagatatcggtatcgtcgttgggtcaagcacaagcttgcgtagagtgggcagacagttcggtgtttcct

SEQ ID NO: 3352 - DNA, 295 bp, Zea mays
  misc_feature: Incyte ID No: 700379892H1
  unsure 184, 187, 241: a, t, c, g, or other
gggctgaaaataacgaggaaggcacaaaggatgcggatgcggaggggcatgggacaggttcaggtgccactgaaggcagtgccgggaggggtttcaacaatggcgggttcagaagggatggtggcttgcggatgcagaggagagtggactataattcgctgccagagccagctccaagggagcntcncaggaatgaggacccgaatttggtgagaagaaataagaggatgctggggcagcntcttgtcggtacattagagaaatttcaacaagaagataaaaaactatctaactt

SEQ ID NO: 3353 - DNA, 296 bp, Zea mays
  misc_feature: Incyte ID No: 700379893H1
  unsure 103-104, 110: a, t, c, g, or other
ttgggaaaaaagcagcaatctttgttgctgctctctattaatctctgtatgtgtaggtaacccgttcaagatgaagcaccttacagtggccagagtaggagcnncaaganagaaccgagaggaaggtggaaagcaatcggccaataagcagacgaggagtatgtgatctggctagtagcgggtacaggcgctaatggcgtcaaatgttttgtatcagcatgttttgcttttgcttcgctcctgaccgctgtgcaaagagtagacagcttgtttctttcggaggcaagtcatctgag

SEQ ID NO: 3354 - DNA, 297 bp, Zea mays
  misc_feature: Incyte ID No: 700379895H1
  unsure 99: a, t, c, g, or other
gaggtctcatgaaatatttctgaaaagcttacataagtgccgaatttgtcttagtgaaaatactggcagaaatttcatcaagctcccatgccaccattngttttgcttgacgtgtatgaagtctcactgcagaattcacgtaacagaagggagtttaaccaagctcacatgccctgatacaacttgctgcagcccacttccaccatcagttttgaaaagcctcctgggagatgattgctataagcgatgggaatcattcgcgttacagaagctcttagatacaatgcctgatctggt

SEQ ID NO: 3355 - DNA, 298 bp, Zea mays
  misc_feature: Incyte ID No: 700379896H1
  unsure 6, 111: a, t, c, g, or other
ggagtntgttgctggtgctatggaattgcgccccgacagcagtgtcaaccgcacaataattgaaaagctctcggtgaaggctccatcaggtgattcaaagctaaaagtctngaaagctattgcccaagagtacaatattgaatgggattcatctaatactgaagcagaattcaacaagaaatatgaagatctactggacggctcgggatcttcggtccaccagatccagacacctatcattgagggctcagtgagctcaccagttgtttctgctccaagagataagacgccagcattg

SEQ ID NO: 3356 - DNA, 199 bp, Zea mays
  misc_feature: Incyte ID No: 700379902H1
  unsure 121, 190: a, t, c, g, or other
tggaaatggaggtttacttgagacgcatgaagaacacagcgagttgatgttattgggcttgactggacagtggacatgactgatggaaggaggcgccttggtaatggcattagtgtacaanggaatgtggatccagcatttttgttctcaccattaccagtactgacttatgaaatccatagggttgtgnaagcagctt

SEQ ID NO: 3357 - DNA, 287 bp, Zea mays
  misc_feature: Incyte ID No: 700379903H1
  unsure 106, 139, 208: a, t, c, g, or other
ttattggtcgcaggggtagagaatctgacatggatatggaaattgtgattgaggaatgatgatgtttctgcaaaaatgacgcactaatatattgttgtgcttatantctgatacacctaagtaatgcattacattttgnaaacaggccaagcagtgcaagttccggactaaggatactccggagtttgcattaccttcctggtttgcntgtgatgaattggaattcgcctaaaactcttttagtcattagagttggaagtgaagaaactcccacccgtaacttgtgt

SEQ ID NO: 3358 - DNA, 295 bp, Zea mays
  misc_feature: Incyte ID No: 700379905H1
  unsure 107, 137, 162, 185, 274, 291: a, t, c, g, or other
gctgttggagcacttgtcgtgtatgatgtgacacgccatgtgacctttgagaatgtggagaggtggttaaaggagctccgggatcacactgatgcaaacattgtcancatgcttgttggcaacaaagctgatctgcnacaccttagagctgtatccgtggangatgccaagggcttcgccgaganggaaagcacattccttcatggaaacatccgcactggagtccatgaatgtcgagagcgctttcaccgaggtcctaactcagatctatcgngtggtcagcaagaaggncctt

SEQ ID NO: 3359 - DNA, 298 bp, Zea mays
  misc_feature: Incyte ID No: 700379907H1
  unsure 27-28, 42, 66, 72, 74, 76, 91, 100, 105-107, 120, 130, 148, 150, 154,: a, t, c, g, or other
gtcacctggtatagggtcctggggacnncagagactccatcnatccttacttaggaatgagcatgntcagtntnangcagtggttgctgcngcagctgcntcccnnncccggtgggtatntgaagcagcnattcctagaccttcaacnanctangcagtncncacaggagcngtagcaatctgaatccgctgttgcagcancaaatactacagcaagcgagccaanagcagatggtttagttctgatgctcaaaatattcagtcngtgctcaaccnaggtgctattcagcagcagctc

SEQ ID NO: 3360 - DNA, 292 bp, Zea mays
  misc_feature: Incyte ID No: 700379908H1
  unsure 32, 72, 119, 179, 248, 260: a, t, c, g, or other
gtttctatgagcggtcccctgatttgctagangctgcagtagctcacatccagttggtcattgtaaccaagntcatttcgaaggtgcagcaggacattcctggacctggagtgaaggancagctccagaacctttgcaatgtctatgccctctacattctccacaagcacctgggcganttcctggcaaccgggtgcatcacacccaagcagggagcgctggcaaacgagcagctgggcaagctttcngcacaggtgcgnccaaatgctgttgcgctggttgatgccttcaa

SEQ ID NO: 3361 - DNA, 291 bp, Zea mays
  misc_feature: Incyte ID No: 700379911H1
ggaaactctgttcaaacctgacatgggatgagctttctgcttccacttgagagtaaatgcaaaggtcgatatttatttgtgtgcctcagcgcaacaagtttaaattggaaggcacacaacagcagaatgcgtacagaaagagtaaaaaagaatgcttgagaaatgtccgcaagatctgtgcatctttcctattcatttgccatcaagccgtgttctttgccaccctccgtcgcttcacctgagttggctgtttgatgaaatgttggcaagatctgtgcatcatctttcata

SEQ ID NO: 3362 - DNA, 283 bp, Zea mays
  misc_feature: Incyte ID No: 700379912H1
  unsure 51, 90, 196, 207, 232-233: a, t, c, g, or other
cgaacaactaagggctgtgttgttgactctgtagaacgagttgccctacanccttccagttttattgcttggaacatcatcagtggttantactgaccttgaagaagagtgtgcttccatattctcttctcgcaatgtgtatcaagtggatcaaccaagttttgacgatagattgaggtacttcagtatattgttngagtcattgcnctctttccaaatggaagaatcaagnnacaagtcaaagaaacagaagtctgctattgaccttcccaaagccccgaaa

SEQ ID NO: 3363 - DNA, 180 bp, Zea mays
  misc_feature: Incyte ID No: 700379913H1
  unsure 74, 91-92, 126, 162: a, t, c, g, or other
ggatgccagattttatgtaataaaatcctacactgaagatcacattcacaagagcataaagtataatgtttggnccagcactcccagaggnnacaaaaagttaaatgctggttatcatgaggcaanaagcgaaggaagatcattgtcctattttcttgtttntctcggttaatagcagcg

SEQ ID NO: 3364 - DNA, 292 bp, Zea mays
  misc_feature: Incyte ID No: 700379915H1
  unsure 138, 213: a, t, c, g, or other
gcgtgttgtcggtagtgaacttattcaaaagtaccttggggatggtcccaagctagtcagagaattgtttagggtggctgatgaactttctccctcaatagtcttcattgatgagattgacgcagttggaacgaagangtatgatgctcattcaggaggggagcgtgagattcaaagaactatgttggagctgctgaatcagctagatggttntgactcacgtggagatgttaaagtcattctagcaacaaaccgcattgaaagtcttgatccagccttgcttcggccaggc

SEQ ID NO: 3365 - DNA, 120 bp, Zea mays
  misc_feature: Incyte ID No: 700379916H1
  unsure 2, 50, 60, 80: a, t, c, g, or other
antcgccgtcgtctgctccgggctgctgttctgcgcctccacaaggcttnggcctctgtngtaagatttaagcttaaccnccaaccatgggcaaggagaagtcccacatcaacattgtgg

SEQ ID NO: 3366 - DNA, 289 bp, Zea mays
  misc_feature: Incyte ID No: 700379925H1
  unsure 18-19, 174-211: a, t, c, g, or other
gtttgctctagggttttnnccacgccgccgccgctctgccccttccaccccaccgatataccaagatgacggcgcaggctgcggaggagctcgccgcccagatcgagcagcagaagctcgaggagcagaagaccgaggcagaagaggttgtggtggaggaggatgacgaggatnnnnnnnnnnnnnnnnnnnnnnnnnnnnnnnnnnnnnnactggatggacaagaaggggatgggagtggcaagtcgaagcaaagcaggagtgagaagaagagccgcaaggcatgctg

SEQ ID NO: 3367 - DNA, 288 bp, Zea mays
  misc_feature: Incyte ID No: 700379926H1
aattaatgttccccgctcaaggtttctcccagtgaaggctacatctgatctgttgcttgtgcagtctgatctttacaccttggttgatggctttgtcatccgcaacccatccagagcgaatccagctaacccttcaattgagcttggacctgagttcaagaaggttgccaatttccttgctcggttcaagtccatccccagcatagttgagcttgacagcttgaaggtttctggtgatgtctggtttggctctggaattacactcaagggcaaggtgacaattatcgc

SEQ ID NO: 3368 - DNA, 288 bp, Zea mays
  misc_feature: Incyte ID No: 700379928H1
gattcttcctcttccccacacctaaaagatccgaatctagggacgaccgggttcctccaccccaggattctcgtggcgacctcgcaacaaccttgctcttcgcatcttttcagttgccgaatctctctcgccttctctgcttcaggctatagtcagtctgttcttggtgataggtttagtcacagtaactcttctactatcgtttgcttgctcctccgatttgcgccgagaagcaaccgctatagttttcagcggtttcttttgttccacttgatgttgctttcgctt

SEQ ID NO: 3369 - DNA, 214 bp, Zea mays
  misc_feature: Incyte ID No: 700379932H1
  unsure 192-193, 206: a, t, c, g, or other
cttgtaggaggaattgatgaggttgcagttagaagcaactgctaaatcaaaacagctgactgaggttcatggagcatggttaccaccttggttagcgacacactatgctcgttacatggaggttgtctcaggtcactggaattatcatggaaaacctgctgtgcagaatgttttgcataaggcatcagaaanntcagcacatgcanagatgtgg

SEQ ID NO: 3370 - DNA, 298 bp, Zea mays
  misc_feature: Incyte ID No: 700379934H1
  unsure 17, 52, 125, 134, 137, 140, 184, 193, 209, 230, 234, 261, 268: a, t, c, g, or other
gagacgccacgactgtncctcaggatgcttcgccgcagcctgagtgccaggnggccgagcctgcacttaatccaaaggaggaagttctgaacggggaggtttgtaactcgctaagtgacctgganaagcctgtngcngangaaacgccgtttcctgatgtcataaatgaagtgccaaataatgntgcagtggnccaccaatttcatccnctcctgtaccattggaaggangcancaaagaagtcatatgcttcaattgtanaagtcangaaagagcatcggccattagcacctgcatt

SEQ ID NO: 3371 - DNA, 293 bp, Zea mays
  misc_feature: Incyte ID No: 700379935H1
  unsure 87, 172, 236, 238, 250: a, t, c, g, or other
gggacgccctgctggaggaggtatccacgagcacgtggagatgaggaagctgtccggcgacaaggagaaggagtcggacgacttcancgacatcttcctctccagatacgaggagtacggcttcaccatggataacgtcaagtccctcctcatgaacgtgttcgaggcagcnatcgagacctcatatctggtgctgtagtccgccatggccgagctcatgaaccacaggcgcgtcntnaagaagctgcancggaggtacgggcgtacggacggagaagaagctggacatgatc

SEQ ID NO: 3372 - DNA, 281 bp, Zea mays
  misc_feature: Incyte ID No: 700379938H1
  unsure 51, 180: a, t, c, g, or other
atttccgtcttcccgtgggatcccagccgccgccgcaagaagaagagctangggacttccaggtgtcgcgagaagatgccgaagcagatccacgagatcaaggatttccttctcaccgcgaggaggaaggatgcccgatcagtgaagatcaagaggagcaaggatgttgtcaagttcaangtccgctgttccaagtacttgtacacccttcgcgtattcgacgctgagaaggcaaacaagttgaagcaatctctccccccaggcttgagcgtccaggaggt

SEQ ID NO: 3373 - DNA, 286 bp, Zea mays
  misc_feature: Incyte ID No: 700379942H1
gacgacaactgggtgagtgcagcaacaccagagaggcctgttcgtgggattgatgatccattattaagcggaagcgcaagtgacagtggtgtcacaaagggcagaaaatatcgcagagttgtgagctcagttactgctgtggacagctggggaggtggtgatcaagcttctgacggatatgagatcaggggtcgccgctgggctgtaaaaagctaacgatttacatagcgagatggtaaattcgaaccatatcgcgtggggggaaaaggacttttaggtttgcaac

SEQ ID NO: 3374 - DNA, 272 bp, Zea mays
  misc_feature: Incyte ID No: 700379943H1
cggagaaaccttctgcctaaggcggcctttttttcagtaagaagcttttggtggtctgctgtgcttaatcatgcttttatatggcttctacatgttgtggttctttcttgatctgcaccgcgcttatcgtttgtgttgtactgccctaataagtggtgcttatgaggactgtttctggttttgctgcttatgttgtaatgctttgaaacaatgaaagaagctacaggccacagctattttgagaagtaatggaacctcgtgccgttttgatt

SEQ ID NO: 3375 - DNA, 285 bp, Zea mays
  misc_feature: Incyte ID No: 700379947H1
gataatcttgacattgatgctagcaatgggaactgtcttgaagctcatgcgtttcttcaactcctggcaacctttggtatttctgctgaattcaatgaagatgacttgtgcaaattgcttccatatgtcagtcgtcgtcgtcagacacctgaactttgtcgattgcttgggttgtcgcagaaaatgccaggtgtcattgaagttctggtggaaagtggaagacctattgatgcaattaatttggcttatgtgtttgagcttactgaacaatttgaaccagtacac

SEQ ID NO: 3376 - DNA, 293 bp, Zea mays
  misc_feature: Incyte ID No: 700379949H1
  unsure 127: a, t, c, g, or other
atcgatgcagcaagggagagaatcctcctaccgtggatggtagcgatctgggtgacatcgactcgggctgggttatcctcaagaactcggatgtcgtttccgcggatttggcagccgccgccgtctntggcggtcagcgtctaggctcttctacgattcctagctgggcacggtgggttctcggaggtgtggtttacacgctcgtgccgttctacaacagagttaggcatctcgaagacgagacggtggattcgtggagaatgctgtggaggttgtggagcatttagctgaag

SEQ ID NO: 3377 - DNA, 216 bp, Zea mays
  misc_feature: Incyte ID No: 700379950H1
  unsure 2, 212: a, t, c, g, or other
cnaccttcagaacggtggcagttctaacattagtgcaggcgctaccttttcggcccaacggtggctggactgggagaagaggaagaagcaacctgaactcgaattcaggtggtggaagcaacctgaactcaaactcaggtggtggaagcaacatgaactcgaattcaggtggtggaagaggagggattcagggtaccagaagacagaggacnaatt

SEQ ID NO: 3378 - DNA, 290 bp, Zea mays
  misc_feature: Incyte ID No: 700379952H1
gaggtgtggatttggcggtttgcttgtagggctctcgcctctcttcccagatacgctcatgattggcatggagctcagggacaaggtaacggagtatgtgaaggagaggattttagctctaagagctgcaaacccaggacagtatgataacatatccgttgtccgcacgaactcgatgaaatacattccaaattacttcagaaaggctcagctcaccaagatgttcttcctgttccccgatccccacttcaaggagaagaaccacaggaggagggttatcagcatgcagc

SEQ ID NO: 3379 - DNA, 287 bp, Zea mays
  misc_feature: Incyte ID No: 700379953H1
  unsure 134, 143, 191, 238, 254: a, t, c, g, or other
gaagaaggcgaggcgcccaaccgagagcaccaggggaaaggaagtgcgcctaggcatcgacatggaggacttctacgtcacgatcctctacggcctgctgctcgtagccggcggcgtagcgcttacatgaagcncggcagccngcttctctggtcgccgggggcgattcggcgctgcgctccttctcgctngtgcgctcagcgcctgggccttcggcgcacggcagaggtggcgctgnacccatctttgccacngtccttcagatcgtttatgctgtgctattgact

SEQ ID NO: 3380 - DNA, 277 bp, Zea mays
  misc_feature: Incyte ID No: 700379954H1
atttgatttacaaaatattcccccctgaaataaaggacactcctgaagccccagcattagctgccgagaagctaaagaacatgggtccagtaacaaaaaatgaatgggtcatgattgggacgatgcttcttgcagtctcactatggatttttggggaaactattggcgtatccagcgttgttgctgcaatgattggactctcaatacttcttgtgcttggagtgctgaactgggaggattgtttgaatgagaagtctgcatgggacaccctagcttg

SEQ ID NO: 3381 - DNA, 285 bp, Zea mays
  misc_feature: Incyte ID No: 700379957H1
accgctgttaggttctaccaggagaccttcggcgtccctccggccacgcgagctcgccgaaatggtcgcccacaggttccatcagtaccaggtggtgggtcgcgcgctgccgaccccaaccgatgagcaccccaagatctaccgcatgaagctctgggccaccaacgaggttcgcgccaagtccaagttctggtacttcctgagaaagctcaagaaggtgaagaagagcaatggccagatgcttgccatcaacgagatctttgagcgcaacccgaccaccatcaa

SEQ ID NO: 3382 - DNA, 279 bp, Zea mays
  misc_feature: Incyte ID No: 700379958H1
  unsure 114, 158-180: a, t, c, g, or other
atgggcagggtggtctgcgcggctcttcggaagtgccgcgccgcgttcctggggacctgagcgagctgcacgagctggagcccgatcactacgccagcaggaagaggtttcgantgaacccgacgagctccatggggttcctgaacagggcagcggtnnnnnnnnnnnnnnnnnnnnnnntctccggcgggtggacgctgtgcacggtgactgaggtggaggagacggcggcggtggagagccggaggtgagcttcgcgagcaggagccacggcgccat

SEQ ID NO: 3383 - DNA, 285 bp, Zea mays
  misc_feature: Incyte ID No: 700379959H1
  unsure 111: a, t, c, g, or other
gagatccctaagtttcgatccactgtcccagtggatttgggactgcgatggaggagcagttcatcctccgcgtgccgccatccgtcgcagagcggatcgagcgcctcatanaatgaatccgccgcctcctcctccaaccccgacgaggcctccctggacctctccttctcagaggatggaagaaatggcacatttatgatcggtaatgagagctttcctgcttctctcttggatctacctgctgtggtggagtcatacaaaacatatgatgattctgtactaatt

SEQ ID NO: 3384 - DNA, 284 bp, Zea mays
  misc_feature: Incyte ID No: 700379962H1
  unsure 23, 30, 47, 59, 67, 78, 124, 131-132, 179, 256, 259: a, t, c, g, or other
ctggtatgttcttgcaatccagngcattgnttcctgcctccaggaanaatgcaagaaanacaatagntgtgatcgganatcactagcttgttcgaaggagatatgctttcaccctccttggtcntcgaatnntaatgggtttgcatgtgatacgaacatgacctcctttagtcaacganatgtgtctacttgtttaagtggtaaagggtcgtttgcttatggaatctatttgggggctcttcctgttatatcgagnaantcgcttgctgtcaaaattctctatc

SEQ ID NO: 3385 - DNA, 286 bp, Zea mays
  misc_feature: Incyte ID No: 700379963H1
  unsure 16, 27-28, 148, 157, 180, 221, 228, 283: a, t, c, g, or other
tgaaccactagaagtnattcgtgaaannacactccacagaaccaaacatcaatgctgcagctattctaccatcaagacctgtgagcaatacatttaacctgcttctggaaggtgacatgaatccaagtcatggcaatgggcttgctgnaatagagancataatcaaccagagatattttnctagggatgagacactacgtcttatagagatcatgcggtcnaggactnctgattttactgttgaagaccagagacctccagtatctactgcaaaaggtttganact

SEQ ID NO: 3386 - DNA, 127 bp, Zea mays
  misc_feature: Incyte ID No: 700379964H1
tttcattcagtggtcccctctgggaacctacatggcaacggttcataggcagggatcacaggtgtggggcggtgaaaatggcttcgagcgtttgatgcgttttgctcattccatggtgaaactgatt

SEQ ID NO: 3387 - DNA, 287 bp, Zea mays
  misc_feature: Incyte ID No: 700379969H1
  unsure 15, 95, 113, 127, 156, 171, 182, 194, 223, 254: a, t, c, g, or other
cgatagggtcatcancacagatctccatgtttgtggtaataataataggaattccataataatacatagtgtaacagatacaacaactaccctantctggttttacaattttnttgtcattagccanatcatgttttagacagtagataccacctntttccaataattgtnctggtattctnttgcatgatctncagattccattctgcgtggtaattggctngatgatgggacaagaaatggacttgaatttncaactgttcgagacagcgactctctttataact

SEQ ID NO: 3388 - DNA, 231 bp, Zea mays
  misc_feature: Incyte ID No: 700379973H1
  unsure 32: a, t, c, g, or other
ggccgccgcgcgagcttgggttagtgtctctnctaagcggagacctgtgagaggagccatcatcatggccgctgttgagactgttgtcctcaaggttgctatgtcatgcgagggttgcgccggggcggtcagaagagtgctctccaagatggaaggagttgaaaccttcgacatagacctcaaggagcagaaggtgacagtcaaaggcaatgtcaagcctgaggacgtctt

SEQ ID NO: 3389 - DNA, 282 bp, Zea mays
  misc_feature: Incyte ID No: 700379975H1
caacacaatccaaagaacgacgcgggggagcgagcgataaagccagaacaagaggagcgatccagaggagaagacgaaagagtcaggggagctgctaaggaccgatggccgaccccagctattggatagggatggacatcgaaacctccgtcacgatgctcgtcatcggtctcgccaccgccgtcgtgagcgtgtgcctcttcttcattttcatgtgcatcgtgcaatggtggtactcgccacggatgcgcgtcttcaggctcggcggcgtcaccaccctga

SEQ ID NO: 3390 - DNA, 282 bp, Zea mays
  misc_feature: Incyte ID No: 700379976H1
  unsure 54-85: a, t, c, g, or other
tggcttcaaacagtgctggaaagctgaagtctcagaagaaaaggaaggcaagtnnnnnnnnnnnnnnnnnnnnnnnnnnnnnnnnttttgtagcttctaaagcaaagaccaagaggcacaaggcctagttaggtcctagcatctcattatcctagtaatgagacgtgttcttcagacaatttctagctcgggatgaccttggatgattgttccttccattggtttgctcatttggggcgcgcacaactaaattctgtgaagtagcgtgttgtgttgtgtcaa

SEQ ID NO: 3391 - DNA, 262 bp, Zea mays
  misc_feature: Incyte ID No: 700379978H1
  unsure 60, 204, 206, 208-209, 230-232: a, t, c, g, or other
gctttatagctgatgaggaataccaacaatttgaggaacctgtccaacatgactttgacnactgggtttgggaagaagctcagcagccttctggatagatgtttatcagagtatgacatggaggctatttattttgatgaaggtgtcagaagctcgaaaagacaacaacttgagtctaaactgttacagcttgtcaatcctgcntntnnatctcttctaggtcacttacnnnctagaactttagaagcatttaaggagtact

SEQ ID NO: 3392 - DNA, 195 bp, Zea mays
  misc_feature: Incyte ID No: 700379980H1
  unsure 183, 191-192: a, t, c, g, or other
gtgttgcggtgccaggaggcgatccagtccatggcgttccctgtgcctgtgccgcagagccctgtgggggtgctggacgcgggctacctcagctacaagagcgaagacgatgccgcggcagcagcgactgctgcttcacatggggcctctggctcttcaagctcctctccggtgaccagcaanaggagaannctc

SEQ ID NO: 3393 - DNA, 184 bp, Zea mays
  misc_feature: Incyte ID No: 700379982H1
  unsure 85: a, t, c, g, or other
gtacatcaaggcatgagcctcacttccagagcttgcgcagggacatgttcttctccgtgtctttcttcatcaccttggccactgncatcttcgaagtcctcctgtgtaacgtgtaagggcatgctacggaccttgtgcgacgtgccttgcatgcctgtgtttaaaggttccttataacggttct

SEQ ID NO: 3394 - DNA, 281 bp, Zea mays
  misc_feature: Incyte ID No: 700379985H1
cctagggtttttgattttagccgccgccgctgctcatctcacatccctcgagaagacgcctgctcctcgccgatcgatacgatggccgtcttctccgacctccacaccgccgacggcctcaagtccctcgaggctcacctcgccggcaaaacctatgtgtctggtgactccattactaaggatgacattaaggtcttcgccgcggtgccgtcgaagcctggcgctgagtttcctaatgccgcccgctggtacgagaccgtctctgcggctgtagcctcaag

SEQ ID NO: 3395 - DNA, 283 bp, Zea mays
  misc_feature: Incyte ID No: 700379986H1
  unsure 33, 41, 91, 95, 104, 111, 128, 145, 152, 157, 167, 179, 204, 210, 213,: a, t, c, g, or other
cctagctactggcaagatcacacgaagaaccanaaaccttngctaagaaatgtgcaacacagcagtcatacggaagtagctgctgaactgnagancatgagganatggtcnctgtaccttgagaaacncaggaggtaccagtgancgctgcnaagtngcccagggangacaagtctgangacgccatgatgtcgttcatctgcnaagatntanaagacncagaaccanatcaaaaactgtaccgatcagaatccaaacatttgaaggaantcgcagcggcagt

SEQ ID NO: 3396 - DNA, 278 bp, Zea mays
  misc_feature: Incyte ID No: 700379988H1
  unsure 78, 93: a, t, c, g, or other
cgaaggtctcctgacacggcgcgcgtgaggagcaagatgatctacgccagctccaaggagaggttcaagcgggagctngacggcattcaggtngatctacaggccaccgactccgccgaggttggccttgacgtcatccagggccgtgcaagctgaggatgcccagcgatgaactgcccatgccagaggatgtatgagcatcatcagttcagatgagaacttgactgggcgggctatgtaaaaactgcatccaccgcagtgatgaaatcaatctaatc

SEQ ID NO: 3397 - DNA, 280 bp, Zea mays
  misc_feature: Incyte ID No: 700379989H1
  unsure 12, 16, 18, 22, 47, 127, 218: a, t, c, g, or other
cgctcttctgcngcancnccanctctcgtcctcccggcgtcatcgtngccgccctgatctccgcaggccggcgtgtggcggagatccatccgtgcttgaactgactccttccttagctacaagtacntattatcaaccatgtttggacgcatgccaaggaagagtagtaacaataccaagtattacgaggatcttggtgtgtctaagaccgcaagttnaggatgagcttaagaaagcatacagaaaagctgccataaaaaaccatcctgataagggtggt

SEQ ID NO: 3398 - DNA, 275 bp, Zea mays
  misc_feature: Incyte ID No: 700379992H1
tttgaatttgcaggtaaagatggcagaggatatggtagcgagaagtgctgtatcgtgtggcctaggcgaccttggcctggcaccatacgtgaactcaaggaagatgtgccaagctttgaatgtgctcacagggttggatttactagggagtgatgcgttcaggggtccaaccgcaggtacacgagtacagaactcaccagtacagagcactgcaagcctagagagtctggataaccgaaagtccaacgaggtgaccagttgcgcggcggacattt

SEQ ID NO: 3399 - DNA, 225 bp, Zea mays
  misc_feature: Incyte ID No: 700379996H1
  unsure 188, 211: a, t, c, g, or other
gagtccaagtggaagatattaggggagttagctatgtcaagtggaaagcttgagatggcagaggagtgtcttctacatgctatggacctcagtggtttgttgcttttgtattcttcccttggggatgctgaaggcattaacaaattggcatctgtagccaaagaacaaggaaagaacaatgttgcttncctttgtttcttcatgctaaaangctggaagagttct

SEQ ID NO: 3400 - DNA, 75 bp, Zea mays
  misc_feature: Incyte ID No: 700380005H1
  unsure 34: a, t, c, g, or other
cacagattttagtgcacaagatgtatatgttcanaaagttggatgtagttgcaagcagcttgatttttgccaaaa

SEQ ID NO: 3401 - DNA, 110 bp, Zea mays
  misc_feature: Incyte ID No: 700380006H1
  unsure 28, 38, 49, 89: a, t, c, g, or other
gttgaatctgagattaaagctattgtanaggcttcttngaagagcccgntgttttctcaattgcataaaggagcttgtgcagttccagnagcgaccagggtgaaggctat

SEQ ID NO: 3402 - DNA, 119 bp, Zea mays
  misc_feature: Incyte ID No: 700380007H1
  unsure 39, 54, 74, 77-78, 80-81, 105: a, t, c, g, or other
ctgtagcggttcctttggagagtgtgtgtggcgggagantgaaaccttgggggnaaatgctaggagattctttntcnntnngttctacttttcgctcggaaagtntttaaatcctcatt

SEQ ID NO: 3403 - DNA, 189 bp, Zea mays
  misc_feature: Incyte ID No: 700380008H1
  unsure 183: a, t, c, g, or other
cactactaccccgagcatcctccccaacatcgcccacctggtccgccccaacaccatctccctgctgttcagcatgggcgagtggatgaaggacgtatgtgttggatctccacatactgagcttcgtgaacggggcggaggggaggagcaggagtggaggaggatcttcctggcggctgggtncgttaa

SEQ ID NO: 3404 - DNA, 188 bp, Zea mays
  misc_feature: Incyte ID No: 700380015H1
  unsure 73, 83, 90: a, t, c, g, or other
cacataagcaatacatggttatgggatcgtgttcgagttagcggtggtgcatatggaggattttgtgattttnacacccattncaggagngttctcatatttatcatatcgtgatccaaacttactgaaaacactagaggtcctatgatgagacagcaagattcctcagagagctagaattggatgat

SEQ ID NO: 3405 - DNA, 112 bp, Zea mays
  misc_feature: Incyte ID No: 700380017H1
  unsure 18, 21, 24, 46, 79: a, t, c, g, or other
acccaggagagggcatgngtncanggcatgggtttctggtatggtnccttgaatccatgccctgcacccaggagagganttgctgccttgagtgttacaagaccaatacaaa

SEQ ID NO: 3406 - DNA, 120 bp, Zea mays
  misc_feature: Incyte ID No: 700380020H1
  unsure 28: a, t, c, g, or other
gaaattcgaggtgccagcgaagatcgtngctgttgcctgaaccgtggacgccggagtccgggctggtgaccgcagcgcttaaactgaagagggagcaaataaaggccacattcaaagacg

SEQ ID NO: 3407 - DNA, 119 bp, Zea mays
  misc_feature: Incyte ID No: 700380023H1
  unsure 13, 19, 39, 49, 54, 83, 85, 92, 104: a, t, c, g, or other
cccaacgcacccncctcgnctcgggatcccgccgccgcnaccatctgcntttgntcccccacccgcaggcagcgagcgacagnancggcganggatggcctgcnctggggagccgtccc

SEQ ID NO: 3408 - DNA, 132 bp, Zea mays
  misc_feature: Incyte ID No: 700380025H1
catcgtagccatgcatgaaagcaacagcagcagccaagaatgtaccgtgctccggagcacacactccagtttaccatgcacgtacgtacacatgctcgatctctacgccttcccctcgttggccatcctgaa

SEQ ID NO: 3409 - DNA, 95 bp, Zea mays
  misc_feature: Incyte ID No: 700380028H1
  unsure 61, 63, 81, 86-87, 94: a, t, c, g, or other
tatggtttagacagagggaatcagggaagtgaactagacggtaccacgatactccgacgcncnctttgctacctccggaancctannccgccgna

SEQ ID NO: 3410 - DNA, 180 bp, Zea mays
  misc_feature: Incyte ID No: 700380029H1
  unsure 63, 152-153, 158: a, t, c, g, or other
gccggaggtagaaagaccagagaagatggcgaccaccgagccggcggcggtgaggctggtggnctccttcgccagcccgttcgtccaccgcgccgaggtggccctgcgcctcaaaggggtgcctacgagctcatcctggaggacctgggcannaagancgagctgttgctggaaaacaac

SEQ ID NO: 3411 - DNA, 115 bp, Zea mays
  misc_feature: Incyte ID No: 700380031H1
cgagctcttacggagatgaatggcaaaatggttggaagcaagcccctttatgtagctcttgcgcaggtaaagaagacagaaaggcaaagctacaggcacaattttcacaaatgcg

SEQ ID NO: 3412 - DNA, 283 bp, Zea mays
  misc_feature: Incyte ID No: 700380042H1
  unsure 7, 27, 33, 64, 187, 192, 217, 252, 258, 260, 268, 272, 280: a, t, c, g, or other
gcgagancgagtacacgtctgacgagnagcccnatggtaatttatgtcaacacgcacgccattnctggatgcccgcaggaaaggggcgagaaccgccgcagctcaggggggcgataaggaggcctcacagggacctagagtgattgttgtggggccaacagattctggaaaaagtactctctgcaanatgcntcttagctgggctgccaaactgggntggaagctaacgtatgtcgatttagatattgggcngggaananagaagggncccnggaagatnttc

SEQ ID NO: 3413 - DNA, 228 bp, Zea mays
  misc_feature: Incyte ID No: 700380043H1
  unsure 15, 47, 53, 159, 211, 216, 225: a, t, c, g, or other
gatgtgacatttgcngcgtggaaatcaccgacgacgcgcagcggtgnaccgcncacccgttccgtcggagcactgcgttcctcttcggcaatgagggtactggactttcacaaaaagagtgcgagatctgtgacttctttgtctacatccctcagtatnggtggtggaactgcatctctcaacgttactgttgcagcttcaattgttctcnagcanttggggtcnggg

SEQ ID NO: 3414 - DNA, 277 bp, Zea mays
  misc_feature: Incyte ID No: 700380044H1
  unsure 26, 28, 40, 68, 123, 150, 152, 156, 158, 168, 174, 179, 181, 184, 189,: a, t, c, g, or other
cgaaaacaatggagccggtgcggaanancgtgtgcgtgancggcgctggcggcttcgtcgcgtcgganctggtgaagctcctcctctcccggggccaatacgcggtccgcggcaccgtgcgcnaccctggtgctagcaagaatgcccatntnaagntnctggaagganttaagnaaagntnccncttcntcangctgatctgatggactacaacagcattgcatcagcagttgccggctgtgagggtgtcttccatgtagccatcctgtctttccca

SEQ ID NO: 3415 - DNA, 147 bp, Zea mays
  misc_feature: Incyte ID No: 700380045H1
  unsure 7, 75: a, t, c, g, or other
caggcangagtgctggagggcggcagggcgaccggagcgacgctgaccggaaaggagattgagattgacattganccctacagacaaggtggagcgaatcaaggagcgtgtggaggagaaagagggaatccccccacaacaggcaga

SEQ ID NO: 3416 - DNA, 205 bp, Zea mays
  misc_feature: Incyte ID No: 700380047H1
  unsure 2, 7, 67, 92, 137, 196: a, t, c, g, or other
gncgaanatggcggaggtgcaggtcctggtgcttgatggtcgaggccatctcctgggccgcctggcngccatcgtggctaaacaggtactgntgggccggaaggtggtggtcgtacgctgtgaaggcatcaacattnctggcaatttctacagaaacaagttgaagtacttggctttcctccgcaagcggatgaanaccaccctt

SEQ ID NO: 3417 - DNA, 188 bp, Zea mays
  misc_feature: Incyte ID No: 700380049H1
  unsure 66, 75, 78, 94, 107, 119, 136-137, 177, 183, 185: a, t, c, g, or other
gctagagacaaccgctgcgtaaacgaatccatcgccatggcgtctcgtctcgttgcggcggcggcntcctcctcntcnctctcctcagcgtccnccctcgctacgcntaatctctcgcngcggccttgcggtgccnnagacggccatgggtctgcgaaggtgcccttgtggaaaganccgttnanccc

SEQ ID NO: 3418 - DNA, 206 bp, Zea mays
  misc_feature: Incyte ID No: 700380053H1
  unsure 98, 120-121, 126: a, t, c, g, or other
aacaagcgtgagtacaaccgcaaagttcgtgaggttgtggagcagagctgggacagctgattaaaacttagagctggacagccgattaaaactttatnggcttcaccagatggtgcagannaggcnccacctttcctaggttcctaggtcgttttattgacttaaccgttaaaaatccccaggtatcgttgtgttctgtggttcag

SEQ ID NO: 3419 - DNA, 290 bp, Zea mays
  misc_feature: Incyte ID No: 700380054H1
  unsure 33, 62-63, 65, 78, 153, 175, 183, 222, 224, 230, 234: a, t, c, g, or other
cctagcacgacagcacttccggcgaccaggtcncaggctcccagcgtccggcggtcccagcnntncagcacgacagtngaccaggcacttcgggaccacggctccgcgcgttctgctgtgcaggttctagcgttctgctgtccacggctcagngcgtccaggaggtgaccaccanaccaagcntccgctgtaccagacccaggggcaaggggttggttttanangggctnaagnctttaggttctagcttgttgaggtatacaaacaagtccaaattggggatccgttgg

SEQ ID NO: 3420 - DNA, 205 bp, Zea mays
  misc_feature: Incyte ID No: 700380055H1
  unsure 25, 94, 161: a, t, c, g, or other
gtgcaacgcaacgttggcgcttggnggccagtagtagcagcaaacttagcgtcgctccttcctactagacgagagatcgagaaaccatggccangctccaagtcactcctggcgccgcgttcaccgagtgcaatgacctcaacttccagggctgaacatgnacaacacgccctgggtcccaaggccaaccaagctgcgatcctag

SEQ ID NO: 3421 - DNA, 197 bp, Zea mays
  misc_feature: Incyte ID No: 700380056H1
  unsure 48: a, t, c, g, or other
cgagctcgccgaaatggtcgcccacaggttccatcagtaccaggtggngggtacgcgcgctgccgaccccgaccgatgagcaccccaagatctaccgcatgaagctcctgggccactaacgaggttcgcgccaagtacgaagttctggtacttcctgagaaagctgaagaaggtgaagaagagcaatggccagatgc

SEQ ID NO: 3422 - DNA, 103 bp, Zea mays
  misc_feature: Incyte ID No: 700380057H1
  unsure 3-4, 34, 41, 43, 57, 61, 102: a, t, c, g, or other
gannacaagagcgcacatggaagcattccgtgangtgcttnanaaggagctctctgncgtnacacttgacgcagtgcattatgaaggatggttatgaagaang

SEQ ID NO: 3423 - DNA, 188 bp, Zea mays
  misc_feature: Incyte ID No: 700380058H1
aacaccgcgaggacctggacccagaggtacgccatgtagggagggggtacctacctggccctttgggggtccgccggaattgccgctgctgcgttgtgttcctggacctggacctggactggagactggacgtgtctccgtgtatcgatcctgtgctgtataatgatgcatcagattgggtttgcagt

SEQ ID NO: 3424 - DNA, 120 bp, Zea mays
  misc_feature: Incyte ID No: 700380060H1
  unsure 6, 68, 116: a, t, c, g, or other
gggaanagagaacgtgagatttgggaattggagatatcacaagccctgcagatttctttccgattgtnttgggacttagtgtaagaccaagtcttgtccatgatagagcatgttcnaatt

SEQ ID NO: 3425 - DNA, 100 bp, Zea mays
  misc_feature: Incyte ID No: 700380061H1
  unsure 30-31, 51, 62, 74, 80, 91: a, t, c, g, or other
cggtgaaatacctggagtgctcagctctcnnccagagaggcctgaaaaccntgttcgaccgnggccatccgggnccgtgntgtgccctcancacaacgcg

SEQ ID NO: 3426 - DNA, 231 bp, Zea mays
  misc_feature: Incyte ID No: 700380063H1
  unsure 200, 221: a, t, c, g, or other
cgttgctctcaccggtggaaggaagtggaagtagaaggctggaagcggaagcattcgatttccatcgtggggcatggcggcggaggggaagaggaagggcgtcccggcgctagggtggtggctgatgctagttcggctccctccgcctcgcctccgtctggttcggcttcttcgacatctgggcgctcgggtcgccgtcnttttcgaaaacggagatgacntgatgttcat

SEQ ID NO: 3427 - DNA, 284 bp, Zea mays
  misc_feature: Incyte ID No: 700380064H1
  unsure 119-121: a, t, c, g, or other
gacaactctctctaccgtccgataccccaagcaccagcgcggcggcggcgaccatggctgtccggaaagaacaagaggatctccaagggaaagaagggtggcaagaaaaagaccgtcgnnnctttctctaagaaggattggtatgacatcaaggcaccgtcggtgttcagtgtgcgcaacatcgggaagactctcgtatccaggacacagggtaccaggattgcttctgagggtctgaagcacagagtctttgaggtttgcctagctgatcttcagggcgacga

SEQ ID NO: 3428 - DNA, 237 bp, Zea mays
  misc_feature: Incyte ID No: 700380066H1
  unsure 2-3, 42, 46, 75, 102, 136-138, 162, 166: a, t, c, g, or other
gnnagagaaggcagggaaggagtccaaagactcggaaatganagancaagatagggaaggagtccaaagatgtanaaatgaaagataagttcagtgaaagantccaaagatgtggaaatgaaagagaagcccgggnnnggactcaaaagatgtaaaaacganagancaaggcagggaaagagtccaaagactggaagtgaaaggggaggcaggaaagaatccaaacatggcgaacga

SEQ ID NO: 3429 - DNA, 120 bp, Zea mays
  misc_feature: Incyte ID No: 700380068H1
ggctgctcgcaagcttggtgctgatcttactgagctgcgtgtgctgcggatggaacatgatgagaaccagcggctaagaaggaaaaacaggtgatggaggatgacacaatgaagcgcctt

SEQ ID NO: 3430 - DNA, 274 bp, Zea mays
  misc_feature: Incyte ID No: 700380073H1
  unsure 4: a, t, c, g, or other
aganaacttggtgacatccatgttttagcgagggaaggagcgactgaggatatagtgaagtttctggcagcgggtgtggaagtcaacatgagagatactgaaggtagaactccgctgcactgggctgttgaccgtggccatcttagtgctgttgaggttctgcaaaagcaaatgcggacctgaatgccaaggtaagctggaactactgtatacttattgcgtgctactatcgtggcagatcctcatctatttgatgagtaacatggagaaatag

SEQ ID NO: 3431 - DNA, 127 bp, Zea mays
  misc_feature: Incyte ID No: 700380077H1
  unsure 87: a, t, c, g, or other
gctggttgggatttactcgtgaaccagagtttttctatcttatatcctgaatttgttatcccaaagtttcctggctttttaactatnttgttgttacatgttgatattgctttgttcatccttattc

SEQ ID NO: 3432 - DNA, 100 bp, Zea mays
  misc_feature: Incyte ID No: 700380079H1
  unsure 3, 12, 25, 32, 35: a, t, c, g, or other
ggnagatgtatngcttgcccacttngcctttntanccttttccccattttgtacgagaaactggaatgttgtttgcagacaccggtgggtcgatattcac

SEQ ID NO: 3433 - DNA, 207 bp, Zea mays
  misc_feature: Incyte ID No: 700380080H1
gcaacactatgaaatatggtatgcatcgttgagctaataatagcatataagtcttcagcaacttgccatcagtacaaggaaactagtgggggatcaaaacacaaagacatggctatatctacttctccgaggagttggggccgcgtttcttgccgaatccgacgacggcggtgacgaagcggcggttgtactgcatgcgcttgtacg

SEQ ID NO: 3434 - DNA, 109 bp, Zea mays
  misc_feature: Incyte ID No: 700380084H1
  unsure 13, 26, 29, 33-34, 39-40, 43, 49, 63, 66, 94: a, t, c, g, or other
cacacagcagccnttttgttctcccngcnagcnntctcnntcnctatcnactggcgaagaatncgncaccgccgccgctctacgcgagatcgcncaggtcttcgccaac

SEQ ID NO: 3435 - DNA, 85 bp, Zea mays
  misc_feature: Incyte ID No: 700380085H1
  unsure 60, 66-67: a, t, c, g, or other
caagggtttgactttcaatagatcgcagcgagggagctgctctgctacgtacgaaacccngacccnngaagcaggtcgtctacga

SEQ ID NO: 3436 - DNA, 277 bp, Zea mays
  misc_feature: Incyte ID No: 700380088H1
cacaatattatgcttttgttgaagaaaggcagaaagttcattgcctgaatacacttttctcaaagcttcaaattaatcaatccattatattctgcaactctgttaatagagttgagctgctggctaaaaaaataactgaactcggttattcatgcttctacattcatgctaagatgttgcaagaccacagaaatcgagtatttcatgattttcgtaatggtgcttgcagaaaccttgtgcacagatctgtttaccagaggaattgatattcaggctg

SEQ ID NO: 3437 - DNA, 196 bp, Zea mays
  misc_feature: Incyte ID No: 700380090H1
  unsure 117, 138, 175, 180: a, t, c, g, or other
tcaatgatgacgagatatcatccgtgaaggaacataccaaggccaccacacccctattgtacaaaaaggcctccgatacggaataatcctgtttattgtctccgaagtattcttctntgccggatttttctgagcatnttatcattccagcctagttcctacccacgactaaggnggttncggacccccaagggat

SEQ ID NO: 3438 - DNA, 224 bp, Zea mays
  misc_feature: Incyte ID No: 700380093H1
  unsure 67-68, 169: a, t, c, g, or other
gattaagaaagttgtagactgggaagaatcacgctctttcttctataaaaggctacggaggaggatnncctgaagatcttcttgcaaaagaaataagacgaataattggtgacaacttcacgcaccaattcggcgatggagcttatcaatgaatggtacctggcttctnaggccaacaacagggaagcactgcggatgggatgatgatggagctttgttgcctg

SEQ ID NO: 3439 - DNA, 212 bp, Zea mays
  misc_feature: Incyte ID No: 700380094H1
  unsure 30, 43, 59, 77, 93, 124, 171, 189, 205, 207: a, t, c, g, or other
gagccagtaacaaaattgttagaaagcagntaccatcaaattngttctgggaagtgtgnaatcaaagttgcaacaanccaaagaggtatatangcagcaacagcaacaacaaaaaggtggaatnggtgctgcagctggtggacgaggtggtacgaggggtcgtggccgagntcagggcccaaaattggnacaaggattttattantnatggt

SEQ ID NO: 3440 - DNA, 221 bp, Zea mays
  misc_feature: Incyte ID No: 700380095H1
  unsure 49, 107, 195, 205, 210, 214-215, 218, 220: a, t, c, g, or other
ccagcattgtgcaaggctcggaagagaaccaggaagtgaaactgggtgnaaacagaaagctcaatggatgggctaggttcccagatcattagggcagagtttgcacntcctctggtcactggaatccacccagcccacgaatcatctccctcttgaaggatttatttctactgggttttggaacaaactcctgcngagaccccanggccngaanngancna

SEQ ID NO: 3441 - DNA, 276 bp, Zea mays
  misc_feature: Incyte ID No: 700380096H1
  unsure 73-74, 115, 119, 121, 179, 243, 254: a, t, c, g, or other
gttacgtctgaaagtactagaagatggactaagggggccaccaagtggctctattcgtccacctactgaaggnnagagctttagcaatgtcccttcccgccggttgtcactcggnggancngataatatgttcaagattgtctcctaatgggttattgtcaaggcgatctccttacttntaattcaagatcatctcttacgtcaaacagcagcttggtcctgaagcatgctaaaggcacttcnaagtcattganggcggaataggtcactagatag

SEQ ID NO: 3442 - DNA, 314 bp, Zea mays
  misc_feature: Incyte ID No: 700380106H1
  unsure 9, 63, 78, 85, 88, 96, 118, 129, 141, 250, 259, 310: a, t, c, g, or other
atcgcatgntgctgtgtatgagttcttcaaatacctaatcactacaaggcaagaagagtgganggctggcaagtgaantagcacngancgaagccnggggttcagatgacactgatgnatcctggtcanattctctgtctnctggaatgctcccacctcaagtggagttagaaggaaggtagaggggctctcccccaggattttggtgttttgactaacaccagttcctgccaacctctgttgccaccantttccttcnaggccctgaagcacgtgcagcaaagcacaccacagcacctttgatagcctntctc

SEQ ID NO: 3443 - DNA, 309 bp, Zea mays
  misc_feature: Incyte ID No: 700380108H1
  unsure 105, 147, 165, 288, 294, 298: a, t, c, g, or other
ccatctcttcgactcctttctggagcagctagggttccgtcctcgatccgatccgccgagtgcacaccacctttccccactccgatcgaattgatggccgccganggcgagaagaagatgataaccctcaaaagctccgatggcgangagttcgaggtggaagangcggtggcgatggagtcgcagaccatccgccacatgatcgaggatgactgcgccgacaacggcatccctcttcctaacgtcaactccaagatcctatccaaggtaatcgagtatgcaacaagncgtacntgcngccgcagccgc

SEQ ID NO: 3444 - DNA, 310 bp, Zea mays
  misc_feature: Incyte ID No: 700380110H1
  unsure 180, 228, 234-235: a, t, c, g, or other
aaggagtcggagggaaccgaaaaactcagggtctcgaatttcctaggagcggaggcgatggctgggaagggaggaaaaggattgctacgccgcgaagacgacggcggccaagttcggcggagaaggacaaggggaagaaggcccccatctcacggtcctcccgcgcgggcctccagtttnctgttggacgaatccaccgtcagctgaagcaaaggactcaggcaaatngccgcnntggtgccactgcagccgtctactctgccgccatcctggagtattgactgccgaggttctggagctggtgggaagc

SEQ ID NO: 3445 - DNA, 313 bp, Zea mays
  misc_feature: Incyte ID No: 700380113H1
  unsure 43, 88, 90, 98-99, 123, 125, 193, 236, 247-248, 279, 294-295, 306: a, t, c, g, or other
acacggcgctcgctccctcctcgagagcgtgtatgcgcagtgncagctcggtaaggcagatgttgctgaatcgtctgtccagcgtttntncgctcgtnnaacagcgcagaagttgcatgcagncntcggcaagttcgccgccgccgcatgctggagctggaagaagaagcgcgaggagctacccctggttcanggccagactggccgccaagccgccgcgcgcctcaccggcgaanggcggcattgnnttcgaccagcgacgatgacgacggcgttagntcggcaccgtgaaannccggggcaacntcgacac

SEQ ID NO: 3446 - DNA, 311 bp, Zea mays
  misc_feature: Incyte ID No: 700380115H1
  unsure 145, 172, 190, 210, 219, 279, 307: a, t, c, g, or other
gcacaggcgcacagcacacgaacacacaccgcgcacagctccgaggtgatcttccggcggcccggcgagatgagccgtggcacaggcgcgggctatgaccgccacatcatccatcttctcccccgaaggacgcctgtaccaagtncgagtacgcgttcaaggcggtgaagtnggcgggtgtcactcgatncggagtccgcggcgcgactnccgtctgcnttgttacgcagaagaaagtcccggataagttgtggatcagacgagcgtgacacactgttnccgatcaccaatacgtcggattgttgcnactg

SEQ ID NO: 3447 - DNA, 299 bp, Zea mays
  misc_feature: Incyte ID No: 700380117H1
  unsure 4, 55, 62, 91, 107, 109, 126-127, 160, 170, 172, 195, 199, 261, 268,: a, t, c, g, or other
gatnctagtcccagtgacaaactcgaagacatctaatagtctgaagacccttgtnccgtgtngagcaaaggacctggaggttttcagagangaagggtgaatcaagnangttccgtggcgtgcgcnngcgacgctggggtcatcgggagccgagttcgtnatcctgtgananaaaccaggaagtggattggctcntatnactctgaggaggtgctgctgcggcatatcatgcgtatgcaaaacagatccgtgaagattgcnagtcatnaaganccaacggtctgtntcagaacgtgcag

SEQ ID NO: 3448 - DNA, 317 bp, Zea mays
  misc_feature: Incyte ID No: 700380119H1
  unsure 4, 11, 40, 65, 67, 83, 86, 110, 122, 132, 142, 154-155, 176, 200, 220,: a, t, c, g, or other
tcancgccgangccgcgccgccgcagcaactgtcaccgtngctatggcccgtatcaaggtgcacnanctaccgggggcagcancangacggactggcaggcgcactccangagatgaagtcntgagctctcnctctcacagngtaaccaaggtnnaccggcggcgcacccagcaanctctccaggatcaaagtggtgggnaatctatcgcgcgcgtgctnacagtgatcttngnaagaagcanaagtcngngttgcgggangcgtacaagnagaagaantggtccccctcgantnncganctnagaacacgcgtgcc

SEQ ID NO: 3449 - DNA, 291 bp, Zea mays
  misc_feature: Incyte ID No: 700380122H1
  unsure 35, 52-53, 73, 77, 86-87, 103, 105, 119, 129, 138, 154, 165, 183, 187,: a, t, c, g, or other
cagaccttctatgctcttgtgatggcagtggtganatccggtactggaatgnnacacagtttgcatgcttgcntgcnataaagggnngtagtgaccaagtccngnttcagcctcatgtnagacagtttntagccgcanctgatgaaaacgtggnttccatatttnacattgagacacatgggnaaanatacactctacagggccataacactgatgtgcagtcagtgtgctgggacaacatggggatatatgcatctgtnatcagactagttaggtttggtcatgtcactg

SEQ ID NO: 3450 - DNA, 312 bp, Zea mays
  misc_feature: Incyte ID No: 700380123H1
  unsure 7, 10, 22, 25, 27, 44-45, 74, 82, 97, 111-112, 119, 128, 141, 158, 170,: a, t, c, g, or other
gagggtnttntcatacatgganggntncacattgcctgttgctnnttcgaagtattcaataccgctcagtattntaaatggngtgattctacagatntggtagtgggatcnntaggaangcatatgcngccaaccagggtncaaatgttttggaatgntatgaaccaaanttttaagtaggnaagtcacccaaacacttctggctttcncttaagtgtctggcccgcaatactgtaggaacaagcatgatctgttactgtgatattttaaatatccacagtactcactttttncnngtgatccgngtantgc

SEQ ID NO: 3451 - DNA, 305 bp, Zea mays
  misc_feature: Incyte ID No: 700380124H1
  unsure 50, 56, 85, 103, 106, 109, 113, 217, 227, 256: a, t, c, g, or other
ccaccacctccctccgcggctccgccttccgccgcgaacacgccgctgtntcgacnccttctcctcctgccttcagcaagatggnggagattgagataagaancancanctgntgacttccgcttccctacaacaaaccaaacaaggcattgttttactcgctatgtcgagtaccacaggtgtttgaatgccaaaggggatgatgctggtgtttgcnaaaatttgcnaagtatacaggtccctttgccctggagangggttgagaatggaacgagcagaggagaagggagttccaggacctctct

SEQ ID NO: 3452 - DNA, 305 bp, Zea mays
  misc_feature: Incyte ID No: 700380125H1
  unsure 16, 265, 275, 277, 287-288, 290, 292, 294, 296-297, 302: a, t, c, g, or other
ttctagatcgcgagcngccgtgagtgtaattctgatagtgtccgttgccggttgtgataaaataaaatagcaatagagtactgggtacagaagacttgccggaggattcggcatcaatggacatgtatatccattgcctttttatatgttgatcctttttgtatcacacgtaatgttgcatagatacaacaatgatgtacaacacacagtgtactcatgcatttatacatgtattcagataactggattcaatagtaaaaaaaanaaagagaaananaaagaagaannangnananngaagntac

SEQ ID NO: 3453 - DNA, 306 bp, Zea mays
  misc_feature: Incyte ID No: 700380126H1
  unsure 103, 192: a, t, c, g, or other
aaagaacagtattttgtcaatgttggagttgactgtgggttaaccatcgctggtttctactacgtctgcttttcttgtagtgatggctccattagtggatttnattatgatccaaatagcagtccgtttcagaagctcgaattgaagtgtaccaatgagaaaaattctggattcaccttttcatcctatgantgcagtgacagggccaaatgccctcgacagacaactttctgtcagcatatagtgtgtactgaactcatactccccaaatgctgctgtatgaaagaaaggagtggtggtttatgc

SEQ ID NO: 3454 - DNA, 283 bp, Zea mays
  misc_feature: Incyte ID No: 700380127H1
  unsure 31, 37, 88, 91, 104, 107, 113, 121, 126, 160, 222, 261, 273, 277-278: a, t, c, g, or other
gacaacgccagcatcgggaatacgctgaacnaggggnagcactcgagcgtgcagtgcttgcagccatagcggtgaacctgatcgtcancgnggccattagtagncancggatngtgcagancctgnccgagcctcgcccggaagatctgcgagcgggtgnaccggtcgcccaaggcgaaggagaaactggccaagctgcagagggagtacgcgctgcctcancatcacctcatccaggacgtccctccaatagagcattcntccacacaattncctnngaacg

SEQ ID NO: 3455 - DNA, 307 bp, Zea mays
  misc_feature: Incyte ID No: 700380129H1
  unsure 9, 91, 98, 260, 289: a, t, c, g, or other
gtgcaagcngtctcaccttttgttctccagcagcatgctcctgacagtttggagaacatgcttgtagagatctcgtcagcaatctcattgntaactantcagaagactcttgaccttataatgatccttaactctaaaaggtttctggatagattagtttcaagcttagaagagaagaagcatcacgaataaaactacgggaaggtttaggcgatttatctgttaagcgtatggagctgcaaaacgcactgtcatcatcntggccaaagcaagaggcagcaattacaanaacaagggaataaagaag

SEQ ID NO: 3456 - DNA, 304 bp, Zea mays
  misc_feature: Incyte ID No: 700380130H1
  unsure 214, 259: a, t, c, g, or other
ggcagatatattagttgagagaccatctcaatatgctcgtagggtagaagatattacgctcatattcaagaacttacatcatcttctcaattccttacgacctcatcaggcaagggccacattgattcacatgcttgagagccaaattcggcaccgcaaggaagcaattgaagatataaagcatttcctatttgctgtatccaccttccatcanctagcactacatcgtctgtaaaaaacatacataggggatatatcntgtgatctcatccatcaccaggcaaaaaggaggagggaggagcgc

SEQ ID NO: 3457 - DNA, 323 bp, Zea mays
  misc_feature: Incyte ID No: 700380133H1
  unsure 70, 80, 103-104, 121, 132, 135, 212, 246, 280, 307: a, t, c, g, or other
ccgcggaggccgccaagctcgcccggtacaacaagaagcccaccatcacctcccgcgagatccagacctnccgtcccgcntcgtcctcaccggcgagctcgcnnagcgagccgtctcgganggtaccaaagncgntcaccaagttcacctcgtcttaggccggcttgttgtaggcgtgcgttgttgtactgcttctccaagcaagcactgtncatgtgccgcttctgcatggcagtagtggtggtnggctggtgtgtgtaagtggtgcatggcttttgcntgtgttgtgatttagtcaggtggtaangtattgctaaaaaaaa

SEQ ID NO: 3458 - DNA, 144 bp, Zea mays
  misc_feature: Incyte ID No: 700380135H1
  unsure 4-5, 18, 34-36, 84, 89, 94, 98, 104: a, t, c, g, or other
gcgnnaagtaggggaggncggtgctccgccgcgnnncgcggttgctatcgcttcgcagaacctactgcatgcagacagctgcanaaganttgangganagtgangctgctgggtctgcaaacgcgatggataacgtgcagccga

SEQ ID NO: 3459 - DNA, 83 bp, Zea mays
  misc_feature: Incyte ID No: 700380136H1
  unsure 23-25, 30, 50, 52-53, 68, 72: a, t, c, g, or other
gacgaggagaagcagaagcacgnnnagcanctgctgatggagcaccacgncnngcagtgctgctggancagnagagaccacca

SEQ ID NO: 3460 - DNA, 308 bp, Zea mays
  misc_feature: Incyte ID No: 700380138H1
  unsure 38, 46, 50, 68, 72, 99-100, 102, 104, 110, 139, 152, 178, 186, 195, 307: a, t, c, g, or other
gtccgctttggagtcagagacgcacggaatgggcgccntttgcaanggcnttgctctgcacagcccanggtntgttccgtactgtcgctacattctttnncntnactgantacatgagaggtgccatgaggatctcggncctgtctgaagcnggagtcatctatgtcatgacccacgnctctattngtctcgganaggatggcaccgacccatcagcccatcgagcacctggtgagttccgtgcgatgccggacatactgatgctccgccgtgctgatggcaacgagactgccggagcatacaaatnc

SEQ ID NO: 3461 - DNA, 145 bp, Zea mays
  misc_feature: Incyte ID No: 700380141H1
  unsure 17, 59, 69-70, 74, 87, 91, 99, 108, 113, 121, 144: a, t, c, g, or other
ctggccaaggtacaganagctgtgtgcatgctgagcaataccacagctgttgccgaggnctgggctcgnntggnccacaagtttganctgntgtatgcnaagcagtgnacagntgggggtnattaaagttacccttgtacttgna

SEQ ID NO: 3462 - DNA, 304 bp, Zea mays
  misc_feature: Incyte ID No: 700380142H1
aagctgtcagaacattccgcccattgaacggtgataccacgtgcactggcttttgaaaccagttggctattggaagtgctgggctcctgtcaaccaacgatatgaactgcaaaactgggtcgtagcagcttcttcatggagtttgcttttcgaacagaacagcgagtgatgcaagttgcaagctcatgattggcagttaagaaagataccctactgagatagtgccaatgggtgctctgcatgtaagtactactactacaactgtgtacaggacactgtgtaatgcactaggttagcagcttgc

SEQ ID NO: 3463 - DNA, 300 bp, Zea mays
  misc_feature: Incyte ID No: 700380143H1
  unsure 119: a, t, c, g, or other
attcctttatccgtggaatcgggataacaagaagtgacgacagcttaattcgtgttgatcgtctagaataccacatcaggggagagcttaacaaaacagcccctcgaaccatggttgtnttgcgtcctctaaaggtggtaataactaacttggaagaaggaaaagtactagaccttgatgggaaaatgtggccagatgcttctgatactgatgcttcctctcactataagcttccgttctcaagaactgtctacatgagaaaactgattttcgccttaaggactcaaagactactatggg

SEQ ID NO: 3464 - DNA, 300 bp, Zea mays
  misc_feature: Incyte ID No: 700380145H1
  unsure 53, 56, 87, 92-93, 117: a, t, c, g, or other
tcttccactcacccctctctcgttattcacccggtctcctctcctgcaaagangangatgagctcgctacacgccacacgagcgganttggnntggttgtctgtacctgaacaaagncgaggcccgggacaagatctgcagggcgatccagtacggctccaagttcgtaagcaacgggcagcctggcactgcgcaggaggtcgacagatcgaccaccttggctcgcaaagtcttccggctctcaagtgggtcaatgatctgcatgctcttatcagcccgccggccaaagggatccgctca

SEQ ID NO: 3465 - DNA, 300 bp, Zea mays
  misc_feature: Incyte ID No: 700380146H1
  unsure 43: a, t, c, g, or other
cactggcaaagttatatgctgccaagtacaagttgcggtcaanggcaaaggtctataagatcgcgtcaagaaatcttagtcggccattgaaggataagaaaggccagtcgccagagtatcacaatttgctgagaatgggccttgttgattcaattgatggtcttcagtatacaaggatgtcgatggttcctgatcctgattacacgccgttaccattggatggcggccagatcatgagaagatttgctggagtactaaagctcacagatcaacagacttgaaagagcagagaaactgcac

SEQ ID NO: 3466 - DNA, 288 bp, Zea mays
  misc_feature: Incyte ID No: 700380147H1
  unsure 74, 119, 284: a, t, c, g, or other
gcgccaagagggtgcaccgagaagacgtgctaaaccaacggagagtagacgtaccgcattgagaagatgtgctnaaccaacaaagcagaataggaaatgtgttgcgatttcactgagtnttgtaggagttcgaaaccagttgtttaagttttagctggtagagcaaaagagcattcactttcaaggggctttattggaacctcttgaacaacagacattgtaatgataaacagcttagaaatgcgccatgccggtgtagcagtacaccagcaccccgtctctanaaaa

SEQ ID NO: 3467 - DNA, 234 bp, Zea mays
  misc_feature: Incyte ID No: 700380152H1
  unsure 43-44, 47, 62, 69, 73, 77, 86, 103, 106, 119, 133, 147-148, 159, 172,: a, t, c, g, or other
ggtgaaaggactcacctgaactttggacagctgacctgggctnnccntagctcaaaacacantggggantcanaganaaggggctngaaaggggggaatggcncanatttcaagaagcnatatattgtttgtngtggttgtgtgtgnntgtgtgttttntctcactctttcntntnattntttttgantgggggaggctatttatngtatgagagtggtgtctggatatatcct

SEQ ID NO: 3468 - DNA, 171 bp, Zea mays
  misc_feature: Incyte ID No: 700380155H1
  unsure 22, 88, 133: a, t, c, g, or other
ggtacaaatccatggctgggtntcacttcaaaaaaatattatctgagattccttactgtggaacaaagttccatcaaagccaatttanaagcctatgtaaaaaaataattattcttgctgtactgtatacaantaatcaggccaagtataataaagcaaatcagtcctacc

SEQ ID NO: 3469 - DNA, 193 bp, Zea mays
  misc_feature: Incyte ID No: 700380156H1
  unsure 105: a, t, c, g, or other
ccctgtgtctattattatattcatatctctacactgcaaatttggggtctcaatttttactgtgcctttgtttttactagtgtctgctgttgcaaaaagaagacnttctctgcctgagttttaatttttgtccaaagttaattttaatctatacaattaaaaccttttgcctatcaaaaaaaaaactcgagcc

SEQ ID NO: 3470 - DNA, 300 bp, Zea mays
  misc_feature: Incyte ID No: 700380161H1
  unsure 89, 111, 222, 232, 270: a, t, c, g, or other
caggactgggcttagctgtccagagccctgccggagggtgctgggggctgtccctctgcaggcactgtgttttcctccaggggctgtcntcagaacacccctcctgctccntggggctcctcagggagccatttcagctggagtctcaggtctcaaaaacaacttctccaggaggccaaaaaaagactgggttggcttctggtcctcatgatggcttttatnctcctggganactttgggtatattcatgggcatgtttccatctgtctnttctacctgtgccacccctgccctgattcc

SEQ ID NO: 3471 - DNA, 310 bp, Zea mays
  misc_feature: Incyte ID No: 700380163H1
  unsure 5, 20, 46, 50, 52, 59, 71, 76, 94, 108, 112, 119, 123-124, 130, 132-133,: a, t, c, g, or other
gggcnctcacttcatccggngactagcaccgcgtcccggcataganagtncnagcactngtccgcgccatnacctntgtgctcccgaggtcgcntgcatctactcggncctnatgctgnactnngatgangnnacagtnacggaggataagatcaatggcccncattaaagcagccggtgtaaatgttgagcctgttggcctggncttgtttgcaaaggccctggccaacgtcaacattgggagcntcntctgcaatgtangggccgntngacctgctccagcagctggtgctgcancagcaggaggtcc

SEQ ID NO: 3472 - DNA, 311 bp, Zea mays
  misc_feature: Incyte ID No: 700380165H1
  unsure 4, 43, 55, 96, 99, 127, 156: a, t, c, g, or other
ccgnaacctcgctaaagcccgatgaactgagcctcctgaaganaatatggcgaancgtactacctcccggactggtgctcaccttcagactatgtnaanattgccaagtcactgtctctcgaggatntcacgacagctgactggtcggagaacgtngccccgttttggcccgccgtgataaaatcagcgctaacatggaagggcttcacctctctgctgacgaccggatggaagacgatcagaggcgcgatggtgatgccgctaatgatccagggctacaagaagggcctcatcaattcaccatcatcacc

SEQ ID NO: 3473 - DNA, 296 bp, Zea mays
  misc_feature: Incyte ID No: 700380166H1
  unsure 41, 48, 54, 68, 92, 162, 204: a, t, c, g, or other
agcatgatatatcaaacacttatgaaaatccatctcctatncattgtngatgangctatgctagaaanagtacttggggcctcctagatttnatgacagagaagctgcagatcgtgtagcaagcccaggagtctcagttggcctgtctggacttcggttggncgggaagttcagtttgtggaggctacagccatggtgggtaanggtgacttgcattgactgggcagcttggtgatgttataaggagtcagcgcactagctttgacatgggtgagagcaagagctgctgacctcaa

SEQ ID NO: 3474 - DNA, 68 bp, Zea mays
  misc_feature: Incyte ID No: 700380167H1
  unsure 13-14, 44, 47, 51, 55, 62: a, t, c, g, or other
atgagtttgatannctgaatgatcaagatcgagttgctattcangangttntggnacagccnacctgt

SEQ ID NO: 3475 - DNA, 68 bp, Zea mays
  misc_feature: Incyte ID No: 700380170H1
  unsure 50-51, 54, 58, 61, 63-64, 66: a, t, c, g, or other
ctcgctccgccgccctcatcaaccagaaatgtcatgtgaagaagcagganngangtangancnngntc

SEQ ID NO: 3476 - DNA, 296 bp, Zea mays
  misc_feature: Incyte ID No: 700380171H1
  unsure 2, 30, 40, 43, 76, 92, 103, 110, 149, 205, 232, 274: a, t, c, g, or other
gnacggcgacggcgacgtggtgcaggtggncctgatggantcnaagacggcgcgcggcccgccgacggggcggtgngacgccgatgcgcgantcctggggtcngtctggngcatggacaccaagcaccgcatgcagccgcacttctccntccgcatccgcaacgagtccggcaagacgctcgtcgccaacaacgtcatcccggcnaactggcgccccaacaccttctaccgntcttcgtccagtacagctaaccgatcgggatccgtgcctgcncgcaattggagctggctggtgg

SEQ ID NO: 3477 - DNA, 300 bp, Zea mays
  misc_feature: Incyte ID No: 700380172H1
gggagtctggagacgacgtgcagaaatggcacctcgaaaggggaaggaaaagaaggaagaacaggtcatcagcctcggacctcaggtggctgaaggagagaatgtatttggtgtctgccatatctttgcatccttcaatgacacttttgtccatgtcactgatctttctggcaaggaaaccatctgccgtgtgactggtgggatgaaggtaaaggcagaccgagatgaatcctcaccatatgctgctatgttggctgcccaggatgtggcccagaggtgcaaggagctgggtatcaccgc

SEQ ID NO: 3478 - DNA, 300 bp, Zea mays
  misc_feature: Incyte ID No: 700380177H1
  unsure 39, 66, 70, 108, 217-218, 294: a, t, c, g, or other
gtgtactttccacaggcaaaagtctgcatgctccatgtncccttggccttggggagagcaccatanagcncttcattcggtagcttgccatgccgatggtctcgtcangaacaaccggcttcagaagaatcggaaatgaccgtccaaagtatgtcccttaagaaccacagattggagtaacctatagccggtggtaatatataggtacacaggaaanntctttgtttttgatgttgcctagcggatggcagtgaagttttttttgttgcttccagaggcaatgtttgttgtgancgtagc

SEQ ID NO: 3479 - DNA, 307 bp, Zea mays
  misc_feature: Incyte ID No: 700380180H1
  unsure 41, 100, 127, 132, 176: a, t, c, g, or other
ctcaggttcaagaacaccctcgtccgccgccgccgctcctncggctacgacccctgcacggagacctacgccgagaggtactacaacaggatggacgtgncagaggggcgatgcacggccaacaacnacggngatcccctaacagatggactgcctgcagtgatgtgctgatcaanacatggcaagattcagagttctccatgctgccgacgtacaagaagctgatgaaagcaggactgaggatatgggtgttcagcggcgacacagattcagtcgtcccggtgaccgcgacgaggttcgccatcag

SEQ ID NO: 3480 - DNA, 300 bp, Zea mays
  misc_feature: Incyte ID No: 700380181H1
  unsure 13, 50, 61: a, t, c, g, or other
gccatggcctgcntgcacgaccacagctgcgaggatcacaactgcgccgncgactggtcgntctacaaccacatacgacgtccccaaggtggtggctctcaacgaatcggtgaccgggagcgtcaagtccgtcttcaagccctgggagcagcgccttgacacctcggggggttttgaggagagtaatgagggtgaccctgagctacttattttcatcccgttcacatcagatgttaagatcaagagcatttctgttgttggtggtgctgatggaacaagcccgtcaagaatgagagcgtt

SEQ ID NO: 3481 - DNA, 299 bp, Zea mays
  misc_feature: Incyte ID No: 700380182H1
  unsure 4: a, t, c, g, or other
aganaatgaacaagaacaagaagcttgttaagaggcttgccaagaagtaccatgctttcttggcatcagaggccatgcatcaagcagattccccgtctccttggtcctggtctcaacaaggcaggcaagttcccgaccctggttactcaccaggaatccctcgagtccaaggtgaacgagactaaggcaaccgtcaagttccagctcaagaaggttctttgcatgggtgttgccgttggcaacttggcgatggaggagaagcagatccagcagaacatccagatgagcgtcaattcctt

SEQ ID NO: 3482 - DNA, 295 bp, Zea mays
  misc_feature: Incyte ID No: 700380186H1
  unsure 108: a, t, c, g, or other
gcctccgacatcctactttcgtcctcacgagtgaccgataatccgccggcgctaagatgttggtttatcaagatctcctatctggcgacgagctcctgtcggattcantcacctacaaggagctcgagaacggcgtcctgtgggaggtcgagggaaagtgggtcacccaaggtcctgttgatgtagacattggtgccaatccatccgccgagggtggtgaggacgaaagcgttgatgacacagccgtgaaggtggttgatatgttgacacttccgtctacaggagcaacctcctt

SEQ ID NO: 3483 - DNA, 298 bp, Zea mays
  misc_feature: Incyte ID No: 700380187H1
  unsure 21-22, 41, 72, 119, 202, 283: a, t, c, g, or other
cggccgctggacttggcttgnnctgtgaggggtgggagggnaggatagcaccggaagatgctgctccgggcncaacaccagcacctggccaggctctcccctcccaggggcagcgccangtccccaggggctgccagagccctgtgtgccttgccgcattcccctgatgcagcttttggcaactgaaaggcagggctctcgntgagtgcacctggggcttcctgagcccatctgcggcggccccaccctggcctaggtgctgagtgcagtgctgcagacagcncctccctccttagtg

SEQ ID NO: 3484 - DNA, 172 bp, Zea mays
  misc_feature: Incyte ID No: 700380191H1
  unsure 119, 129, 131, 138, 144, 147, 153, 155, 157-158, 164, 166: a, t, c, g, or other
tttaacatttaggctttcagcttgtaaattgccttaatactaacagcaaaacaatgtaaataccgccttttgaacagagatttgcctaatcaaagcaagggtctgtttggaagtaaaanaacaaagaananaaaaagngggggnccnccgacnangnnccccgncnccccgg

SEQ ID NO: 3485 - DNA, 300 bp, Zea mays
  misc_feature: Incyte ID No: 700380194H1
  unsure 13, 17, 29, 31, 33-34, 39, 45, 56, 71, 77, 80, 83, 86-87, 105, 112, 119,: a, t, c, g, or other
accaattgttgtnaccnttattatgttcncntnnattcnatgacncatcatcagancgcctaatcagcaancgactncantcnttnnggcaatgactaatccagncttatcntcagacnaataatgttaatccacacaccaaaaggacnaanctgagccctaatanttgtntcccnaattatatttatcggctcaaccaaccttctagggcttcttccccatacatttacccctaccactcagctatctataaacctaagcatagccatccccctatgagcaggagccgtaattctaggc

SEQ ID NO: 3486 - DNA, 298 bp, Zea mays
  misc_feature: Incyte ID No: 700380195H1
  unsure 35, 58, 72, 96, 225: a, t, c, g, or other
attagctaagctgctgaaggcaagggtggtagaanactgaactctgccctgttgtacntcagctccgtctcngttttctccaacatcttatcttcnctgacactatcggtagccgccactgcaaaatcaaggcggaatactcctacatggattagagtaaggtacttagcttggccagggagggaactccgagctgaaacttgggcatttctggttgagaaaganaagacgagactggtttccaccaatttctcatgttcggttgatcagatgtgtaggtggcagtgcagcaagatga

SEQ ID NO: 3487 - DNA, 232 bp, Zea mays
  misc_feature: Incyte ID No: 700380201H1
  unsure 5, 17, 33, 58, 64, 68, 75, 78-79, 84, 93-94, 98, 126-127, 130, 152, 164,: a, t, c, g, or other
gggangagttctcggcntctcacaagtcgcganagagagaggcggagttgcggagagnatagcngaancagcagngtnnaaggnggagagtcnncgangcccacgacaccattcgcttcagcatcnnacnccggcgtcaaagccgactacgncccgccgcaccngctccagtctacnatccaatcggagaccnagttctnggcggacaagatgaagttcgggacanagacca

SEQ ID NO: 3488 - DNA, 317 bp, Zea mays
  misc_feature: Incyte ID No: 700380203H1
  unsure 44, 189: a, t, c, g, or other
ctctagttcagggtccagttctgagtctgagtcagaatcaagcnctgatgagcgtgacagaaggcgaagtaataaagaggaggaagaggacttgagagcacttccaactatgctttttggaattcatgtatttggttttgtttaaatgtgcttcttcagtatacatgtgcagtatgtgatctagctctncgatgtgttagtggtaatcagaaagccgtaacagtaagatactatccgaacttgtacgtggcaggttggtagtccagcaacaaagggccaacagagatctgtttattttcataacttccatgcagaac

SEQ ID NO: 3489 - DNA, 313 bp, Zea mays
  misc_feature: Incyte ID No: 700380204H1
aaggagggcatttatagcatccttgggatactggggtatgtttctaattggtgtttctttgggtttctatctgttttttgacactagttcaaagggcaagaacaggaacactcaagtcatgaaaatctgggttcttgctgcgttgttttggattttggcaatcatctttgatagctatattgagagagtttctcggcgaatgtgcaactttgcttatgttatgcttgtttttggccagaattttcaggttttatgtatcctcacattagctgggttcgtctcatataaaaagaactggttcttgaagatgcat

SEQ ID NO: 3490 - DNA, 309 bp, Zea mays
  misc_feature: Incyte ID No: 700380209H1
  unsure 68, 104, 287: a, t, c, g, or other
gaacagagaccagaaagagtaaaaccttttatgacaggggctgcagaacaaatcaagcacatccttgnctaatttgcaaaaactaccagttctttattggtganaacatgaatccagatggcatggttgctctattggactaccgtgaggatggtgtgaccccatatatgattttctttaaggatggtttagaaatggaaaaatgttaagaaatgtggcaattattttggatctatcacctgtcatcataactggcttctgcttgtcatccacacaacaccaggacnctaagacaatgggactgatgtc

SEQ ID NO: 3491 - DNA, 53 bp, Zea mays
  misc_feature: Incyte ID No: 700380213H1
  unsure 10: a, t, c, g, or other
atacatggtncatagctgtttccctgtgtgaaaattgttataccgacttcaca

SEQ ID NO: 3492 - DNA, 310 bp, Zea mays
  misc_feature: Incyte ID No: 700380215H1
  unsure 308: a, t, c, g, or other
gatatgagtgctgctggacttggattaaacaagttttgttatgctggattgataactgcattcaagaacaagacaccaaccgctgaggaaactatggcgaagattcttgacttcgtcgggcagtcgaaaggttggcaatatgttgaaagagtatcaaaggacattgctgagaatataatgatgaatgtgtcagaggaagaactgtacaacctcccaacagcagaatatgtaaataggcgaggaggatttgtctttaaacaacatacagtttatcatgttgctctccaagcttgtgcagaattgcgaanca

SEQ ID NO: 3493 - DNA, 311 bp, Zea mays
  misc_feature: Incyte ID No: 700380217H1
  unsure 86: a, t, c, g, or other
gtctggcagagaagatgctggctggtgaggtgaaagaaggtgactctgccatcgttgatgtggattcagatggcaaggtgatagtncctgaatggtggtagcggtgttgctgagccactggaacctgctctcagtacctaaccgaggtcaaaatcatcattggtccgaaatatggccttctttacaagtcagctgggtttctcgtgatggtaaaaactagactgacattacttggccgcccatagttgctttatctttcgtttatttctttttgttggaagtgaggcatagggttgctatggaaatgaata

SEQ ID NO: 3494 - DNA, 305 bp, Zea mays
  misc_feature: Incyte ID No: 700380221H1
  unsure 13: a, t, c, g, or other
ctacatgcatganagcgctggtggaacagattacgttaactcgagggagatatcatgcgaactggtcttggatccttatcccaaagggtacacaattgtgccaactaccatccaccctggggaggaagcaccttttgttttgtcagttttttcaaaagcatcaatcagactagaggctgtttaattcaagattgagatcccatgtgtttggtggtagctgcgtctgctgggcacccgtgcacgcaggatccagctgtgggttctccggaatagataatgggtataggaattgcctcctggacaac

SEQ ID NO: 3495 - DNA, 309 bp, Zea mays
  misc_feature: Incyte ID No: 700380222H1
  unsure 55, 65, 69: a, t, c, g, or other
ccaatttacagcgtctccctcctattctgtagcgcgacggcaccactaaaacctngcagaggctncgtngccgccaccgccagccgcaacaaggaaggaaccaggaacacgatgcccaagtccaagcgcaaccgcccagtgaccttatcgaagaccaagaagaagccaggtttggagcgcaagggcaaagtagtcgccgagataaaagatgccgtggacaagtacaccagcgcctatgtttttacctacgataacatgaggaatcagaagctcaggacctcagggagcagctcaagtcttctagcagga

SEQ ID NO: 3496 - DNA, 113 bp, Zea mays
  misc_feature: Incyte ID No: 700380223H1
  unsure 21, 34: a, t, c, g, or other
gtagaggaaaaatagtgaaancctttgggatttnaatctgtgtgtgcgtgtttgtgtgtgagagagagtgagaaatgtagtgtttcattttgtatgcattaaactgtcttgcc

SEQ ID NO: 3497 - DNA, 110 bp, Zea mays
  misc_feature: Incyte ID No: 700380226H1
  unsure 14, 26, 54, 62, 65, 78, 107, 109: a, t, c, g, or other
gcagctttgaacanatcagtcatagnactgcctatagcattagccagtgaccanattagggncanacgtcttgggcancagaattgcttatccaagggacatttccncng

SEQ ID NO: 3498 - DNA, 94 bp, Zea mays
  misc_feature: Incyte ID No: 700380228H1
gggtattgtatggtgacgtaatcatcaactccttttgcattattggccaattcaataaaaatatgtccgggcattattttggctcgttcgcact

SEQ ID NO: 3499 - DNA, 300 bp, Zea mays
  misc_feature: Incyte ID No: 700380230H1
  unsure 4, 7, 64, 107, 125, 154, 175-176, 214, 216, 229, 238, 272, 293: a, t, c, g, or other
gttncanatgtcgagctatattacaaggcagttcacttttatttgcaagagcatcctgatctcntgcaatgatatgctaaacgtgcttgcacttcgtttagatcacnccagagttgtagacatantgcgcaaggctggtcagttgcatcttgtnaaaccatatatggttgcagtnncagagtaacaatgtatctgccgtgaatgaagccttgantnagcttatgtcganagaggaggnctacgagagactccgtgaatcagttgacatgcangacaatttgaccagatggtcntgcccag

SEQ ID NO: 3500 - DNA, 157 bp, Zea mays
  misc_feature: Incyte ID No: 700380231H1
  unsure 85-86, 91, 93: a, t, c, g, or other
atagatccaaatattttgatattgataaagatatagtgaatgccgaacagacagtattcatgagccagtggtgttccatccaacnnaccancnaaagggtggttagcaatacaagtagaactgcttaaaacacaatcctagggccgggcgcagtgaa

SEQ ID NO: 3501 - DNA, 307 bp, Zea mays
  misc_feature: Incyte ID No: 700380232H1
  unsure 79, 125, 163, 184-185, 234, 246, 272, 290, 299, 306: a, t, c, g, or other
gtagagtgatgcgtaccaggcgacagggtgctacaacatgctgtgctcagggttcatccagattcaacaaccagattcnccatgggcgccacatcttcccgacctcgagctactccggctcccantatgatatcagcatatgatctggaaggaccccaagganggcactggtggatgcagttcnncaaggacttacgtgctggggtactggccgtcgttcctcttctcgtaacngggcggacagcncgtcgatggtggaattgggccgggangtggtgaactcgcaagcngacggcgtncacagtnc

SEQ ID NO: 3502 - DNA, 305 bp, Zea mays
  misc_feature: Incyte ID No: 700380233H1
  unsure 88: a, t, c, g, or other
cagggtgatgagaaaatgatatcagggagctacaagaagcttgctgttgatctgaagccaggcagtgtcatattgtgtgctgatggtnccatcactcttactgttcttcactgtgataaagaacaaggcttggttcgctgccgctgtgagaacactttcaagcttggcgagaggaagaatgttaatcttccaggagttattgttgatctccccacactcacagacaaggacaaggaggacatccttaaatggggtgttccaaacaagattgacatgattgccttgtcattgttcggaaaggttcg

SEQ ID NO: 3503 - DNA, 300 bp, Zea mays
  misc_feature: Incyte ID No: 700380235H1
atttgttagcagaactgatgctgaagaagcactacaaggattaaatggatcactcattggaaagcaggcagttcgcctttcatgggtccgcagcccatcgcataagcagtctaggggtgactccgtcaacaggaggaacaacatgtactatggcacaccattctacggcggatatggctatgcctccccggtgccacacccaaacatgtacgctgcagcgtatggcacgtacccgctatatggcaaccagcagctagtgagctagagagctcccctccgacgtgtcccctctgacgggaa

SEQ ID NO: 3504 - DNA, 300 bp, Zea mays
  misc_feature: Incyte ID No: 700380237H1
  unsure 2, 10, 82, 115: a, t, c, g, or other
tncctctgcncgcagagggaccacgacgtcggatccctctgcgcgcagagggaggaggagcacccgttcgaaccccaagcangcgtatcgactcgtcgctcacaagtgaagatanggagctgaagcggaagcaagcccgcgtcagagccacgttcgtgcaggacctgctgctctctactctattcggcgactgatgacgaaccagagcgagcctaagctattatcactggaagggtggaggtccacgaagaccagcgcggcggtccagaacacctctagtaaggtgcagagttgatgtgg

SEQ ID NO: 3505 - DNA, 119 bp, Zea mays
  misc_feature: Incyte ID No: 700380240H1
  unsure 50, 59, 70, 73, 78, 82: a, t, c, g, or other
gaacatgctttgtgctttggtttcaggagactagactcttgtagtaaacnctacaaacnggcaatctttnggnccgantttnctacaagagtctagtctcctgaaaccaaagcacaaag

SEQ ID NO: 3506 - DNA, 187 bp, Zea mays
  misc_feature: Incyte ID No: 700380241H1
  unsure 18, 20, 104, 107, 130, 145, 184, 186: a, t, c, g, or other
cttttggctgtataaganangattacgcaccgtttcattttacactagtaacagataagtagtagtataaaatgaaacggtgcgtaatcctctcttatactacnacntgatctgttactagtgtattgcncgcgcctatgcgcgntggctgaatagcaacttgaaatgttttatgaggataaancna

SEQ ID NO: 3507 - DNA, 309 bp, Zea mays
  misc_feature: Incyte ID No: 700380249H1
  unsure 101, 148, 159, 180, 291, 303-304: a, t, c, g, or other
gccttggctgacctgaccagcaagcaaataggcccagccaactccgatcccaccggcaccagccgcccgcaacccgcaaagctgcttcccggactagctanggtttcgtctacgccgcttgatctagtcctctctcccggcacgcgangtagggcgcangttgatggcggcggcaccggnggccgtaaggcggaggccgccaagatggactcctcgaagaacgatgacgagttcgaagagttcgagatcgaccaagatgggatgacaggaggaagcaacgaagcgttcaancattggaagaannttggg

SEQ ID NO: 3508 - DNA, 305 bp, Zea mays
  misc_feature: Incyte ID No: 700380252H1
  unsure 199: a, t, c, g, or other
ctgctggagctggcaaggtcaccaagtctgcccagaaagctcagaaggctaaatgaatattatccctaatacctgccaccccactcttaatcagtggtggaagaacggtctcagaactgtttgtttcaattggccatttaagtttagtagtaaaagactggttaatgataacaatgcatcgtaaaaccttcagaagganaggagaatgttttgtggaccactttggttttctttttgcgtgtggcattttaagttatagtttttaaaatcagtactttttaatggaaacaacttgaccaaaaatt

SEQ ID NO: 3509 - DNA, 306 bp, Zea mays
  misc_feature: Incyte ID No: 700380256H1
  unsure 7, 103: a, t, c, g, or other
ggcgcanagaatctggtgtctcttgctccgaccccgttggcgactgagacgcgatccccttctcctgcactgccgtcctccgtcgctgcgatgcctcggtatnactgtgactactgcgacacctacctgacccatgactcgccatctgtccggaaacaacataatgctggatacaaacacaaggcgaatgttcgaacctactatcagcaatttgaggagcagcaaactcaaagtttaattgatcaaagaatcaaggagcatcttggacaagctgcagctttccaagcaggtgcccctttcaaccaa

SEQ ID NO: 3510 - DNA, 308 bp, Zea mays
  misc_feature: Incyte ID No: 700380258H1
  unsure 44, 67, 77, 85, 152-153: a, t, c, g, or other
cggaaaaagaaagagaggagaagcgaaggaggttctcagttggngcggctccctctccccgcgcgcnccaccgcctnccgatccnagcagccgcctacagtcaacccattcaacctcaaatgttccttgtgaggtatcatgacagaacagcnngaaggtgttagcaagagctcttcctcaagtattagtcgcagcactgcaggagagtgaggaggaactgaccatcggtacccttataaccgaagcaacaaacacaacaaacagtgccaagagtcttggaaagcgcctttcacattagattcgatccc

SEQ ID NO: 3511 - DNA, 304 bp, Zea mays
  misc_feature: Incyte ID No: 700380261H1
  unsure 8: a, t, c, g, or other
accggcgngaagggtgcagcagcgccgacgagcccgtggagactgtgcacggtgtcccaggtggaggagctgaagatgctgctccggttgctgccggtctgggcatccatggtgctcttcttcgccgtcagtgcgcagacggtaaccacgttcattgagcaggctagggtgatggacaaccgcatcggcccgttcaccattcctccggcgtcgatagcgaccttcgacgtgatcagcgtcatggtctgcgtccccgtctacgacgccgtgctggtgcctctggcccggcgtgccactggcaacg

SEQ ID NO: 3512 - DNA, 304 bp, Zea mays
  misc_feature: Incyte ID No: 700380263H1
  unsure 185: a, t, c, g, or other
gttacgtctgaaagtactagaagatggactaagggggccaccaagtggctctattcgtccacctactgaaggaaagagctttagcaatgtcccttcccgccggttgtcactcggtggagctgataatatgtcaagattgtctcctaatgggttattgtcaaggcgatctccttcttttaattcancatcatctcttacgtcaaacagcagcttggtcctgaagcatgctaaaggcacttcaaagtcatttgatggcggaactaggtcactagataggagaaaggtacatggaaatggagctcat

SEQ ID NO: 3513 - DNA, 240 bp, Zea mays
  misc_feature: Incyte ID No: 700380265H1
  unsure 2, 6-8, 11, 14, 16, 19, 22, 28, 31, 40, 42-43, 45, 49, 53, 81, 87, 112,: a, t, c, g, or other
cncgannnganttnanggnatncgcatncanatcgtctcntnntncgcngacnccgtctctacttcattggtagcaccttnatccgnccccagtccagcccgccgccatggnggcgctgacggccacggacaaatgcttctccccggccagggcnatgttcccgatgccgattgtgaggccacctgcatcaccagaccatgccagtcagtatctggaggacttgttgcaggagcaacaga

SEQ ID NO: 3514 - DNA, 306 bp, Zea mays
  misc_feature: Incyte ID No: 700380266H1
ctccagaaccccaaatccagttccgttccaatcgccgagaagggcagcaaaggggagaaaaaaaaaggaaatctatggcggcggccggcggcgagaacagcggcgctggcgagggcgagggcgagttctacctgcgctactacgtgggacacaagggcaagttcgggcacgagttcctcgagttcgagttccgccccgacggcaagctccgctacgccaacaactccaacttacaagaacgacaccatgatccgcaagaggtcttcgtctcgccctccgtcctccgcgaggccaggaggatcatcc

SEQ ID NO: 3515 - DNA, 300 bp, Zea mays
  misc_feature: Incyte ID No: 700380270H1
  unsure 275: a, t, c, g, or other
gtacgctttgattgaatacgagaagtttgaagaagctcaggctgcaataaaagaactggatggagctgagctttataaacaaagaatgagtgttgattgggcatttagcagtggccctgctaaacgcagaaatactcggaaaaggtcaccaccaagagctcgttcaaggaccccacccaggagaaggcactgatgtttccccagcatgtcttgaactacttgctatgtgtgacgaagagcaagaagtctggggattccaaatattaccttggtgnatgtggatcacctgatttcgatggt

SEQ ID NO: 3516 - DNA, 220 bp, Zea mays
  misc_feature: Incyte ID No: 700380271H1
ccaagggtttcgtgtcaggaacaccgagttatctttggccaaagatgggtctatcagagggggcagaaccaaggcatttcttgtgttttgtcttgtccaagtgtggagtcccgatgccatcttctgatatgggttaggttagttaatttggaacgattttgtcaattagagtgactggatttaaggtccaaatctgaatgaacatggggatgttctgatt

SEQ ID NO: 3517 - DNA, 132 bp, Zea mays
  misc_feature: Incyte ID No: 700380272H1
  unsure 10, 12, 18, 22, 24, 39, 53, 55, 100, 102, 106: a, t, c, g, or other
agcacgtgancntgatcncagnanacttgaaggtgggcncatgcttgcccaananaccacctgtgaaaccacccaccgagcctattggctttgatttggnanttgngaaaagaatccaggagcgagaatcat

SEQ ID NO: 3518 - DNA, 298 bp, Zea mays
  misc_feature: Incyte ID No: 700380274H1
  unsure 6, 13-14, 23, 34, 75, 77-78, 81, 86, 103, 150, 196, 214, 220, 225, 243,: a, t, c, g, or other
cgcgtnggggacnnctattaggnactatgtgtcnagattatcaaagtgtgcctggcgctgaagcatcggaatggngnntanagaantttggaggaactacatnaacaggtgttgaagggaaggggcaagttcgcccaggatgtcagtcangatgacctgatcagagccatcaagaaactaaaggcacttggcactngcttcggcatcatccctntgggcngcacntacctcattcagtctatnccagctgagctcananggatcacaccgtggngctgcancnggcagagaagaatgg

SEQ ID NO: 3519 - DNA, 298 bp, Zea mays
  misc_feature: Incyte ID No: 700380277H1
  unsure 162: a, t, c, g, or other
ctttcttgcactttcagtcgagtccagacctgcggaatatagatctaccaatcgaccgacccggatccttcccttccgtctgacgtcgtcgtagcagatcttatctcaaaccctaccgaccaacagctgcttgctcgggacgggaaccggagttggattgcnatggcgctgcagtacgtggaggcgcagggacaggcgcgcccggacctcgccgactggtatgcttccctcgccgacctctaccagcagaagctatggcaccagctcaccctcaagctcgaccattcctacagctcca

SEQ ID NO: 3520 - DNA, 299 bp, Zea mays
  misc_feature: Incyte ID No: 700380278H1
  unsure 118: a, t, c, g, or other
ggttttactgggttctgcaccagatcctcgcatacaaagtgactttacaaatttggccagtaagctgcatggtgaataccatggccgagtgaagctatgtctaacctatgacgagccnctgtcacatttgatatatgctggcgcagacttcattctcgttccttccatcttcgaaccttgtggtctaacacagcttattgctatgcgctatggatccatcccagttgttcggaaaactggaggcctgtacgacaccgtttttgatgtcgacaatgataaggatcgggctcaagcacaag

SEQ ID NO: 3521 - DNA, 300 bp, Zea mays
  misc_feature: Incyte ID No: 700380280H1
  unsure 146, 262: a, t, c, g, or other
cggagatattcattcgggtccatgggtcggctgctgctggtgagcctcccggcgacgggcgccgtcatctaccgctgcaagcactgcgacacccacctcgcctacgacaccgacatcatcgcaaggacgttccgctgcaagaacgncaaggcctacctcttcaacaggatcgtgaatgtgaatgttggtacgaaagaggaggaccggatgatgacgacgggcctgcacaccgtgtgcgacatcttctgcgtcgcctgcgganccatactcggctggaaatacctcgtcgccttcgacaag

SEQ ID NO: 3522 - DNA, 240 bp, Zea mays
  misc_feature: Incyte ID No: 700380282H1
  unsure 2, 8, 45, 73, 79-97, 103, 153, 202: a, t, c, g, or other
cnccctcncaactgcttacagaatggatcatgtcccccttatgtngaggtgaccacttaattgctttcctgcntccttnnnnnnnnnnnnnnnnnnngactgngtttttgccactgatttagccatgtgaaactcatctcatcacccttttcngggtttgaagctgctgtctctagaagtgccatctcaattgtgctttgtntcttccagtgctggagaaatcttgaatagcttatgtac

SEQ ID NO: 3523 - DNA, 280 bp, Zea mays
  misc_feature: Incyte ID No: 700380286H1
gcattttcaacttgggtcttcatagagcagtgctgggactttgcaggccacagtggtctctgcacttgtactgatgtgcggcagaagaatgaaccttggccccgttggttgacctgagtttcttgtccatgaatttatttggaaggagagcttgcattcttttttcacttgtaccgaccgttatctttggagttgtgatgttagcagttcgaattctggtgttgacaacttatagaccatcatttcttctgtaacatagataagaaaatactatttgact

SEQ ID NO: 3524 - DNA, 116 bp, Zea mays
  misc_feature: Incyte ID No: 700380288H1
  unsure 33: a, t, c, g, or other
taaagaacgcgacttccacaaacctggattttntatgtacaaccctgaccgtgaccgtttgctatattcctttttctatgaaataatgtgaatgataataaaacagctttgacttg

SEQ ID NO: 3525 - DNA, 79 bp, Zea mays
  misc_feature: Incyte ID No: 700380289H1
  unsure 63, 65-69, 75: a, t, c, g, or other
ttaaaccatcatttatttgatgcactcaagcagctggtgaattttgatggactagataaacgntnnnnngtaganacca

SEQ ID NO: 3526 - DNA, 290 bp, Zea mays
  misc_feature: Incyte ID No: 700380292H1
  unsure 212-213, 215: a, t, c, g, or other
atgtcatagacgtagttttcgcatccttgaattaaactgccttaactccttttgtggtataagcaaaactacatggactctgtcctggtatccttttcctgtgtggttgccccgtgtcctctggcctagggttaagtgtgcaagataactactcgtgagtattcagaatgttgttcctaataaatgcacttgttgtctgtcttctttaatcnnancacatcttatatacagcagtcagagatgagtatactagaatcatggattgctggaggtcttttaatctgatgttc

SEQ ID NO: 3527 - DNA, 292 bp, Zea mays
  misc_feature: Incyte ID No: 700380293H1
cgggcccttccgtagctctaggaatgtcgaagatggctgcgcagactgttggtaactcagtatccgagtttctgtcgggcttcagcgatgggaagacagactcggcagcgagagtttcattcaagtacgggtgcacgaggggagtctttggcgcgccgttcttctttgtgaatggcttcctccagcctgggggcggatcgcctatgcgactacagcacgtggatcggcatcctggacccccttgtttcccagaacggtgaacggatcgagatgtttacttcgatgtaagtga

SEQ ID NO: 3528 - DNA, 292 bp, Zea mays
  misc_feature: Incyte ID No: 700380295H1
gggaatcatcagagtgtccttaccttctattcataaatgttctatacagtggacagccctccagaatggtacttcagtgcctagtgtagtaactgaaatcttcaatgacacattaacatcacaatggcgaatggtgacttttctttcacgatttcattaatttgaaagcacacaggaaagttgctccattgataacgtgtatggagacttcggttttagtcaattccatatctcaatcttaatggtgattcttctctgttgaactgaagtttgtgagagtagttttcctttg

SEQ ID NO: 3529 - DNA, 305 bp, Zea mays
  misc_feature: Incyte ID No: 700380401H1
  unsure 299: a, t, c, g, or other
caagtcttctggtggtttgtcagaggtcgaaattgagaagatggtgaaggaggcagagctacattctcagaaggaccaggaaaggaagtctcttattgatctcaagaactctgcagataccacgatctacagcattgagaagagtgtcagcgagtacaaggacaaggtccctgctgaagtcaccaaggagatcgagtctgctgtctctgatctgagggccagctatggctgaggacgatctggacagatcagcagaagctggaagcagcaaacaggctgtttcaagattggagagcacngcaaca

SEQ ID NO: 3530 - DNA, 300 bp, Zea mays
  misc_feature: Incyte ID No: 700380405H1
  unsure 16, 24, 195: a, t, c, g, or other
gttcggtcggaacgcngcgcacgncggcggcgatagggagagaggagagagtctgcaggatccagcaggccgagggaggagtcagcggcgggccggagaatatgagcggcaacggcgcgaagaaggtggtcgatgcggcggtgaaggccggcaggacgatcatcgactgggacggcatggccaagttgctacgtncaccgacgaggccgcgcaaggagttcgccgccctccgccgcgctttcgatgactcaaccaccagctccagaccaattctcccaggaaccccagccgattgattgg

SEQ ID NO: 3531 - DNA, 300 bp, Zea mays
  misc_feature: Incyte ID No: 700380408H1
  unsure 2, 9, 11-12, 23, 33-34, 42, 106, 114, 123, 194, 196, 254, 257, 259, 295: a, t, c, g, or other
gnggccgcncnnactctctctancgtccgatannccaagcancagcgcggcggcggcgaccatggctgtcggaaagaacaagaggatctccaagggaaagaagggnggcaaganaaagaccgncgaccctttctctaagaaggattggtatgacatcaaggcaccgtcggtgttcagtgtgcgcaacatcggananatctcgtatccaggacacagggtaccaggattgcttctgagggtctgaagcacagagnctntnaggtttgcctagctgatcttcaggcgacgaggatcnagctt

SEQ ID NO: 3532 - DNA, 298 bp, Zea mays
  misc_feature: Incyte ID No: 700380409H1
  unsure 70: a, t, c, g, or other
cgagctcttacggagatgaatggcaaaatggttggaagcaagcccctttatgtagctcttgcgcaggtanaagaagacagaaaggcaaagctacaggcacaattttcacaaatgcgtcctgttgcaatggcgccttcagtaggtcctcgcatgcccatgtttccacctggtgtccctggagttggtcagcagctgttctatggtcagccaccaccagccttcatcaaccctcaggctggatttgctttccagcaacctctgatgcctggtagaggcctggtggtccaatgccgaactt

SEQ ID NO: 3533 - DNA, 299 bp, Zea mays
  misc_feature: Incyte ID No: 700380411H1
  unsure 164, 201, 236, 267: a, t, c, g, or other
agcctgcagccctccatccacgaactcccgttctccatttccagccatggcggtgtcgatcgagctcaccaaggagtacggctacgtcgtgctggtgctggtggcctatgtcttcctcaacctttggatgggcttccaggtcggcaaggcccgcagaaagtacnaggtgttctaccccaccatgtacgccatcgagtcggncaacaaggacgccaagctcttcaactgcgtgcagngggggcacaggaactctctagagtggatgcncgttttcttcgtcatactgctgctgggcggtc

SEQ ID NO: 3534 - DNA, 74 bp, Zea mays
  misc_feature: Incyte ID No: 700380413H1
  unsure 37: a, t, c, g, or other
cacccgtcatgtgtgagagagcagaagatagcctgtnagccagtgctctagaaaacatcatgtaggaggccggt

SEQ ID NO: 3535 - DNA, 124 bp, Zea mays
  misc_feature: Incyte ID No: 700380415H1
  unsure 24, 39, 123: a, t, c, g, or other
cttgtaatgatcttcatgatttgngagggccttcgcatncaaaacgagaagtgctctcaatttcctactcttcaactaacctagaatgactgccatggatgccccccaccttaccacacattnc

SEQ ID NO: 3536 - DNA, 294 bp, Zea mays
  misc_feature: Incyte ID No: 700380417H1
cccaagtgacaaagccctgctgagcgaccctgtcttccgccctcttgtggagaaatatgctgcagatgagaaggcatctttgatgactacaaagaggcccacctcaagctctccgaactggggtatgctgatgcttaaatggtccatatcctggagcgggacacaaactgctgcctgtatggactcgtgcgattcagggtgaaccatcagattgtctagtgtctctttgtaataaattatctgttctggtacttgtctatggttgaatcggaacccatttccgtttgcctagat

SEQ ID NO: 3537 - DNA, 297 bp, Zea mays
  misc_feature: Incyte ID No: 700380422H1
  unsure 50, 54, 61, 65, 74, 83, 98, 129, 132-154, 181: a, t, c, g, or other
caaatcgccccccttcccaaaccctcttcttcccccttcccgtgcacganccanatccganggcncgatccgtnggccatggngctggagtgggtggngctgggctacgcggcgggcgcggaggcgatncannnnnnnnnnnnnnnnnnnnnnngggctggacggcctgcgccggggcatnatctccgtggtgcggagcgcgctgaagcccatgatgtcggtggtgcccttctgcctcttcctgctcatggacatctactggaatacgagacgcgccccacctgcgaacgacgagca

SEQ ID NO: 3538 - DNA, 193 bp, Zea mays
  misc_feature: Incyte ID No: 700380425H1
  unsure 54, 105: a, t, c, g, or other
gggaacatgtggatatcacacgcacgcgcctacgcttattagccctcattcgangtcgacggcacccgtcttctctccgcactcgaaaccccatccttgactagntccgatctggtacgagatggccggcaagatgaaggagttagacggcgccagccctggccaagatcttcatggcgggctctccaaggat

SEQ ID NO: 3539 - DNA, 240 bp, Zea mays
  misc_feature: Incyte ID No: 700380426H1
  unsure 2: a, t, c, g, or other
gnaaaaacccaaagtcggagagcgcacaaggtgaggctgctgccggtgcgatggctggtcgcggtcgaggtgcaatgcgaggacgtggtggcaggggcatgcgcaggcgataaactgggtcaagtagatcatgaagagatgcaccaggcgtttatcagtgtaccgttccgctggatgtgttatagtagacctgagcttcggatctaatttgtttgacattatctggtttatggctgtctt

SEQ ID NO: 3540 - DNA, 297 bp, Zea mays
  misc_feature: Incyte ID No: 700380431H1
  unsure 30, 100, 199, 210-211, 216: a, t, c, g, or other
gaagtaggtcttgagcaggtacctgatgtnattcacagctatcatatatgtgtagtaaaaaataagcgtatagattcagatattattgccaaggcaactncagatgaggattataatgcagtatggtgttgggttagaaggtgttgatgtaaatgcctgctacagaacacaaaattcaaagttggcacgaataccggangtacgacaggnnaatgnctgtctctgcgcagaaatggcatctatctactctaggcatcgcgtagcaaaaggagaggatacgctgtgaaccggaaagac

SEQ ID NO: 3541 - DNA, 304 bp, Zea mays
  misc_feature: Incyte ID No: 700380432H1
  unsure 31, 46, 65, 154, 185: a, t, c, g, or other
agcagtctgtgatggacaagatctccgagangttccacggcggggnctcctcgtcgtcgtctgantcggacgacgagaagaagaaggggtcttcttcggcgtcggcgacggaggccatgaaagccaagatctaccgtctcttcggccgcgagangcccgtccactctgtcctcggcggcggcaancccgccgatcttgtcctatggaggaacaagaagatctcaggcggggtactcgctggtgccacggccatctggctcctgttcgaggttatggagtaccatctcctcaccttggtgtgcca

SEQ ID NO: 3542 - DNA, 291 bp, Zea mays
  misc_feature: Incyte ID No: 700380433H1
  unsure 36: a, t, c, g, or other
tgcatatccaacgtgaccgcccgcctcgcgccggangccaaggagctgcagtggaactgcaccaacgtcaagggggtcacctcccacgtctcgcccaagccgtgcccggagctcgccgcggagggcaagccgtgcgccttcccggaggaagagctcgtacatcggcccacccgagctgccgaagtgtagctattgaggccgattgccaaaagagatcattgatcatataggctcttcggtgatagtctagacaagcatatgagaatgcagctgaaatacgtttgcattaca

SEQ ID NO: 3543 - DNA, 299 bp, Zea mays
  misc_feature: Incyte ID No: 700380434H1
  unsure 64, 85, 180, 204, 222-223, 276, 286: a, t, c, g, or other
cactgccgcgccgccaccccctacaggtaaggaagaggagggcaggatgtcgcaccgtaagttncgagcacccgaggcacggctnccctcggcttccttcccaggaagcgctcctcccgtacacggcggcaaggtgaagtcattccctagggatgcaccccaagaagccttggccatctncactgccttccttggctacaaggnctggcatggactcacatnnttccgtgaggttgagaagccaagatccaaattccataagaaggaaattgtgangctgttaccntcattgaaacccc

SEQ ID NO: 3544 - DNA, 289 bp, Zea mays
  misc_feature: Incyte ID No: 700380437H1
  unsure 3, 272: a, t, c, g, or other
ggnattcagcagacttagggcatgtacaagtctgagactccatttttctatgagacagctaagagactatatgacataactttaagactcagtattataaatgcggttaatagacaacatgcgtagagtcgtaaagaggcgggctctagcgaagagcttggctcttgtattttttttcatatagtcccttagagaactctcaagagcaccatatattaaatagggttgtacaggcacttagtaattgattgtaggatatgccagatcctcgnagcttgtgttgtcctaa

SEQ ID NO: 3545 - DNA, 282 bp, Zea mays
  misc_feature: Incyte ID No: 700380438H1
aggcattgtggccattcattctggcttcaaactttaattcctttcctatcatggagcatgaaccagtcatatcctgttgaaagcctggaactgaaggataatctggcaaatgagacagcagcagagcatctcctcttaaggatacgtgccttggactcatgtttgaatcgaacagtctcaaagtggaagaacaaattcttgtcacttttttacagctttcttggagctgctcagtccatctcccagaggcattggtcgtatcttgctcaacgctaatttctc

SEQ ID NO: 3546 - DNA, 281 bp, Zea mays
  misc_feature: Incyte ID No: 700380439H1
gtgacagctgagcaggttgatacatttgatgaagaacttaagaagctggttggaatgggatttgaaaagactcaggctgaagttgctcttgctgcagctgatggggatccaaatgttgccattgagattctgatgagtcagcagggttgaagtttgaccataaagtacaaattgaaaggaagcacggtatcgagccattttttgttctacaaaggttcaaaaagtaggctgtggtttggggagtcgaaaaaggatggcgcatctgtttataccggggtgcg

SEQ ID NO: 3547 - DNA, 284 bp, Zea mays
  misc_feature: Incyte ID No: 700380440H1
  unsure 246, 253, 270: a, t, c, g, or other
atactcagacccttcgaccaggagtcaaattgactttatcagctttaatcgatgggaagaacttcagtgcaggaggtccacaaggttggcttgggatttgaactggaagcttaatgtggtttgaggaaagcatcagatttgtccctggaagtgaagagaaatgaacccactatgttttggcctaaaattcttctgtgaaatttccaaaagtgtgaactttttattcttccaagaattgtaatcctncccacangaagtctagggttgcgnatccctcctgaggg

SEQ ID NO: 3548 - DNA, 258 bp, Zea mays
  misc_feature: Incyte ID No: 700380441H1
  unsure 3, 99, 102, 104-105, 257: a, t, c, g, or other
tgncactggggtcatggcggttgtggcagctggggaggtttggccccaacagccctacctgtggcctgcttccctgtgtgtcggggtcctccagggagntgncnngccaggtggaggccacggaggcagggtctctggggactgttcggggggtacagagggagaaggctctgcaagagcttccctggcaatacccccttgtgtaattgctttgtgtgcgacagggaggaagtttcaataaagcagcaacaagcttnc

SEQ ID NO: 3549 - DNA, 282 bp, Zea mays
  misc_feature: Incyte ID No: 700380442H1
  unsure 7, 30-31, 59, 98, 115, 155, 161, 166, 176, 181-182, 184, 186, 191,: a, t, c, g, or other
gtgaggntggtgtctagggtggatgttggnntggtgtgttcgtgggcgggggaattaanttcggaaaggtgcgtgcaggggtatgggggttgtgtatngtgagtaggatttgctntggagttctctgggtaattgatggttgttgtgtgttttgntatggntctgngtttcgatgnacatnngngnttgtntgaagttatggagctgttttgcggnnatcnttgagacncatccatttcaagtttttcttagttttcatnanattttggttcttctgggtgg

SEQ ID NO: 3550 - DNA, 289 bp, Zea mays
  misc_feature: Incyte ID No: 700380444H1
  unsure 19, 40, 48-49, 73, 75, 93, 101, 104-107, 109, 112-113, 118, 156, 191,: a, t, c, g, or other
gcatatcatttcgtaccanacaagcaatgaatcctacgangggtcatnncagtcttcttaatgatttcgggcnanggatgtggtttcagttgnagagaacntannnntnaanncgctncatccggcaggtggttcccggtggagatgacaacgatntggagctgaacgcggagtcccacttcctgagcttngtgcagcggttcgggcaagtntacaaggacgcngacgagcacgcgttacnggctgtncgttttcaangccaacctgcgcngngcggannggcancagc

SEQ ID NO: 3551 - DNA, 296 bp, Zea mays
  misc_feature: Incyte ID No: 700380448H1
ggaattcctgagaatgtggaggctcagcctgttgcccgagcacctgctgctggccaacaaacaaatcagcaggccgcatcacccgctcagccagcagttgcattgccagtgcagccatcacctgcctctgcagggcctaatgcaaatcctttgaacctttttcctcagggtgttccaagtggtgggtccaacccaggtgttgttccaggtgcaggatctggtgctcttgatgccttgcgacagttccacagtttcaagcactccttcagttagtccaggctaatcctcaaatcttg

SEQ ID NO: 3552 - DNA, 304 bp, Zea mays
  misc_feature: Incyte ID No: 700380449H1
  unsure 301: a, t, c, g, or other
gggctgcaccagttctactacatctttgggttcctcttccttgtgttcctgattctcatcgtgacatgtgctgagatctcgattgtacctatgttacttccagctctgcagcgaagattacctgtggtggtggaggtcgtacttgacttctggttcctctgcactctacctcttcttgtatgcaaccttctacttcttcacaaagcttgagatcaccaagtttgtctcagctgttatgtacttcggttacatgctcatgcctcgtacgccttcttcgcttgacggcacaatcggattctangct

SEQ ID NO: 3553 - DNA, 291 bp, Zea mays
  misc_feature: Incyte ID No: 700380450H1
  unsure 7, 11, 89, 105: a, t, c, g, or other
gtttgcntgtncgatgccacttcgcctcatccatacctggagttcagaattggcgaacacctatccacttagctatctgtttcatagtncagtattgtgtcagantgttgtttttgtgcaatatttgattggctactagtctgtttgtgttactgttcaagtttatggtagtgatcatatatggcggccggagtgttccagccgatgctgtggcatctgttgcttcaagtaaaactagtcatgttagtacttcagttatttttggtcccgattcgtgacagttgaagttcc

SEQ ID NO: 3554 - DNA, 146 bp, Zea mays
  misc_feature: Incyte ID No: 700380452H1
cactggcaaagttatatgctgccaagtacaagttgcggtcaagggcaaaggtctataagatcgcgttcaagaaatcttagtcggccattgaaggataagaaaggccagtcgccagagtatcacaatttgctgagatggggcctgtt

SEQ ID NO: 3555 - DNA, 143 bp, Zea mays
  misc_feature: Incyte ID No: 700380453H1
  unsure 2-3, 27-28, 30, 36, 47-49, 63, 69, 106: a, t, c, g, or other
gnncaaccagtacaccaccgccaccanncncgggcngaataactctnnngggcaaccgccgcncttcgncggcaaagaacgcccaccagatccaccccggcctgcnatggagtccgcggtgaacccgaaggcgtacacgctgg

SEQ ID NO: 3556 - DNA, 285 bp, Zea mays
  misc_feature: Incyte ID No: 700380454H1
  unsure 270, 275: a, t, c, g, or other
atgattttgagattcagcacggtaacgaagatacattcagggagatgcttcgtatcaaacgcacagtggctgctagccgcagtcagacacatttcatactgccagagtacttgatgcagagggatcagaagttaaacctggacgaagcagttgacactctgaagcgtgctggcgtccctgaggacgagatggcagctttggaaaggcaatggctaccggaccatctactgccccaccagcagcaccagcatgccccagctctgctaacangatgngacttgtcat

SEQ ID NO: 3557 - DNA, 145 bp, Zea mays
  misc_feature: Incyte ID No: 700380455H1
  unsure 2, 35, 53, 59-61, 64-66, 70, 79, 82, 85, 113, 126, 133, 144: a, t, c, g, or other
gnagcaccaaaaaccctaccaccagttctagaccntcccggctctagcttccncacacnnngtnnngtgnctcgtgggntcnggnggtggctagattcagggtgcgggaatcngcgtcgtcgtccnaagatgncatcccttctnt

SEQ ID NO: 3558 - DNA, 293 bp, Zea mays
  misc_feature: Incyte ID No: 700380456H1
  unsure 156, 160: a, t, c, g, or other
gggacaaccttgggaggagataagcttgtcactgttgaagatattgtccgtcagcattgggccacatatggtcgccattattacacacgctatgactatgagaatgtcgatgctggggctgcctaaggagctgatggcaaacctagtaagcatgcngtcnatcactttctgatgttaacaagttgatcaaggagatccggtctgatgtttctgaagtagttgcagctgacgagtttgagtacaaggatccagttgatggctctgtgtccaagcaccagggcatccgatactct

SEQ ID NO: 3559 - DNA, 290 bp, Zea mays
  misc_feature: Incyte ID No: 700380457H1
  unsure 159-186: a, t, c, g, or other
ctcatatacctgctgctcgccccgacgcgcatcaactcccgccgccgccccttcctctccgtcgctcgcctcgcgcctacgccaccacctctgccatgggccccgaagaaggataaggccccgccgccgtcgtccaagccggccaagtccggaggcggnnnnnnnnnnnnnnnnnnnnnnnnnnnnggtaagcaaaaggagaaggtcaacaacgctgtgctcttcgaccaggccacctatgacaattgctctccgaggtgcccaatacaagcagatcaccccatcgtcct

SEQ ID NO: 3560 - DNA, 206 bp, Zea mays
  misc_feature: Incyte ID No: 700380461H1
attgtccacattggattggtttgtagcatagttacaggtttctgcttttgtatagagcatatagtgctgtgttttgatgggaaaactgactcgtatggtccgccaagttttaaggtgcatatggtttggtcccacatgtaattacctgtggatttgactgttataaactggccaagtgaaagaatatattgaagactgagattgtt

SEQ ID NO: 3561 - DNA, 145 bp, Zea mays
  misc_feature: Incyte ID No: 700380463H1
  unsure 51-52, 60, 66, 78, 81, 126, 143: a, t, c, g, or other
gcggaaacgtgttatgatgtgtatataaaaaacgtagcatgtgctgcatgnncttcagtngttagncatcctacaggngtncatgcagcacatgctacgttttttatatacacatcataacacgtngccatgtgctgcatgancc

SEQ ID NO: 3562 - DNA, 293 bp, Zea mays
  misc_feature: Incyte ID No: 700380465H1
  unsure 258: a, t, c, g, or other
agaagattgatttcctcttattcgcccttctgtctgcattatataatatttacaatggtataaaaaatcatatatgaagcaaaagggcgtcatcaaatttaagtgcagcttcatcttttggatttgactttgcagtttgtagggaactgcttcagcgtccttttttcatctgaacctgagggaagcaatttccctcttttttcactttatattttatgaataatgatacgcagatagatgatgggagatgatatgacnatgatgtttggtgcacagatgagatgataaaaggg

SEQ ID NO: 3563 - DNA, 210 bp, Zea mays
  misc_feature: Incyte ID No: 700380469H1
  unsure 2, 85, 97: a, t, c, g, or other
gngacctggcgactccttgacgttgacaatcgagtagtactcccgattgaagcccccattcgtataataattacattcacaagangtcttggcactncatgagctgttccccacattaggcttaaaaacagatgcaattccggacgtctaaacccaaaccatttcacgctacacggacggggggtatattacggtccatgctctgaaatc

SEQ ID NO: 3564 - DNA, 94 bp, Zea mays
  misc_feature: Incyte ID No: 700380470H1
  unsure 2, 21, 32, 36, 38, 49: a, t, c, g, or other
gncttgattccctggcactcnttcctattacnacantntagccggtgcngtgtgtgttatgcaacggtagcatcgtgtctccggaagataaaaa

SEQ ID NO: 3565 - DNA, 278 bp, Zea mays
  misc_feature: Incyte ID No: 700380475H1
  unsure 2, 29, 32, 94, 148, 185, 187-188, 260, 266: a, t, c, g, or other
gnattcagagtttttggatgctgaaaggnatnctcatggagatgatgggtcaacggcatcgacagcagtgatggttgctgatcatcttacgtgnccaaatgtcggagactcgagggctgttatatcaaaggctggcaaagctattgcnctctctgaagatcacaagccaaacagaatgactccangnntcgaattgagagtgcggtgggatattagtgggcagaattggagggtagtggtgtactgcgatgtctcgggcnttggcnaccgtctcttaa

SEQ ID NO: 3566 - DNA, 288 bp, Zea mays
  misc_feature: Incyte ID No: 700380478H1
  unsure 30, 272: a, t, c, g, or other
gtaccagcaaaatatgataattcgtctgtntcaccaccaaagttaactttcatgagtgcaccaatgccgataaatggtttgccgattaatagacaacaacttgctgggactggtagctttgacagccactgttctcctgcatctggcacttcacagggatctgcagatataagtgatgccatggatcagcccccatctgattatctgacgaggattagattgttggagcatatgcatcagccatagcagggttggtcagagatgagatcaangtggcagacattggag

SEQ ID NO: 3567 - DNA, 293 bp, Zea mays
  misc_feature: Incyte ID No: 700380479H1
  unsure 68: a, t, c, g, or other
agaagttcgagccgaaataccgcctcatcaggaatggtcttgctactaaggttgagaagtcccgcaancaaatgaaagagcggaagaacagggccaagaagatccgcggtgtcaagaagaccaaagctggtgacgccaagaagaagtaaacgttcgtttacatttgtattactgttctgggctctgggtggtctagctgcaatgtcataattatggtcgtgttaggttttgttccacccttggcactgaagtgattttttgtaattcctcggcactgaagtgaagttttgtca

SEQ ID NO: 3568 - DNA, 208 bp, Zea mays
  misc_feature: Incyte ID No: 700380480H1
  unsure 4, 24, 30, 37, 40, 54, 57, 65, 71, 73, 80-81, 85-86, 101, 118-119, 151,: a, t, c, g, or other
cggnatcaaggagccagagagcgngacgcngcgagcnttncgccggagatcganacngtagctanggtttnangcgccgnnctgnngtggattagatgtcnacgcaggcgaggaagcnnctcatgcgggacttcaggcgcttgcagcaggncccncccgccgggatcagcggcgcgcancacgacaacaacatcatgctctgtangct

SEQ ID NO: 3569 - DNA, 280 bp, Zea mays
  misc_feature: Incyte ID No: 700380481H1
tccagtttcattctttattgacattatccagcttgctacgttgcatgttaccatccttcactggttaatctcatcgttatattcaagacaaattcagacagtagcatcattgtggcgtcttttcagagggcgcaaatggaatcctcttaggcagaggttagatagttatgactacacagttgaacagcacgtggttggttcccgttgtttacaccaatcctacttctatactacaacttctgtatctagtatctctctacctgacaacaaggttatcggg

SEQ ID NO: 3570 - DNA, 177 bp, Zea mays
  misc_feature: Incyte ID No: 700380484H1
  unsure 13, 17, 26, 29, 172: a, t, c, g, or other
agctcttgcgcangtanaagaagacnggnaggtccagctacaggcacaattttcacaaatgcgtcctgttgcaatggcgccttcagtaggtctcgcatgcccatgtttccacctggtgtccctggagttggtcagcagctgttctatggtcagccagcaaccagccttcatnaaccc

SEQ ID NO: 3571 - DNA, 174 bp, Zea mays
  misc_feature: Incyte ID No: 700380486H1
  unsure 132: a, t, c, g, or other
ggaattcaggagctctttgatgcagcagatggtgtggagtagtagtggcggcggtacagacagcaagaatatgatgagtagtagtttgatgcctgtgccgaggagcaagaagaagagggctcccaacaagangcccccttatcttctccttccatgctcctcctcccgcagcac

SEQ ID NO: 3572 - DNA, 275 bp, Zea mays
  misc_feature: Incyte ID No: 700380488H1
  unsure 163: a, t, c, g, or other
atctaatcctgccggaggtccaagcaacatctctttcagcgaagagcctgtagtgaagacagcaaagaaaatccacaaccagaagttccaggagctgacaggtaacaacatcttcaaggaggacgtccctgcctcggccgagaagtctctgagctctgcgaanttaaggagatgagcggcagtgacatcttcgccgatggaacgccagctccccgagaatacttggcggcatcggaagcccctggcggcgagagcagcatcgcgctgatctgatt

SEQ ID NO: 3573 - DNA, 161 bp, Zea mays
  misc_feature: Incyte ID No: 700380489H1
  unsure 2, 16, 96, 110, 115, 143, 147: a, t, c, g, or other
gntgtgtggagcaatncaggtcggtttctatctatttacaatttctcccagtacgaaaggacaagagaaatggagcctccttaccataagtgctcncaaccaatttatgnaaaanatctcaataaagtatatatgtacaatanatanacctagcccaggtt

SEQ ID NO: 3574 - DNA, 281 bp, Zea mays
  misc_feature: Incyte ID No: 700380491H1
  unsure 105, 117, 126, 181, 216, 229, 258, 279: a, t, c, g, or other
attgaaggcgtgctgcgcttggtgaggagcttgccattttgaaacaagaagatatacgggctggtggatctagtccccaaagagggaagaatggaaactctaggncaaatacttgtncaccaaatngcatgacaagctaggataacatcgttgagagcatggtgacaatcgctcaaacacncttgttggcaatgggcttctcagactctcagattntgaagaaagagancgtgcctctctgggcgtagtcgttggaancaattgcgatcaatgggggangc

SEQ ID NO: 3575 - DNA, 279 bp, Zea mays
  misc_feature: Incyte ID No: 700380492H1
  unsure 77: a, t, c, g, or other
gtcaactgttggcgcacaagcaacagcaaaattgtttgctgccacttctcttcagatggcaagattttggctagtgncaggacatgaaaagaaggctgtactttggaacatggaaaattttcagacacagtatacaccagaagagcatgcccttattatcactgatgtccgtttcaggcctaactctagtcagctggcaacatcttcttttgatagaactattaaattaggaatgctgccgatcctggattccctttgcatacattcatgggcacacgg

SEQ ID NO: 3576 - DNA, 200 bp, Zea mays
  misc_feature: Incyte ID No: 700380494H1
cacccactcagttactccgctctaccggctacacgcatagtgtcgcttcgcctccagtccaccctcctgttatcggagcgttcgtgccgtctcgtggaggccagatccgcaagtttacgctaggcggtggagccagaagccagttccgcgagctccccttccctcttcgccgaataagcacgaaaaaggagatcgggtaa

SEQ ID NO: 3577 - DNA, 288 bp, Zea mays
  misc_feature: Incyte ID No: 700380495H1
  unsure 21, 223, 225-226, 236, 242, 246, 254, 284: a, t, c, g, or other
ggggagctgttagagtaaganaaattattattctttactaatatctgttttgagttagattctagtaaaaaaaactgaacggagtattcaaagggaactacgaattttgtgccccatctggcgatggaaaattcgccattgaaatccctggtggcagagcccgagcagcgaccgccgaggttgagacttgagagacctatgaaaccgcgaggcgccgcacacnannaaacccgggnttcccngaanatgcgganacaggcgtgggggcgcggggcggtggcgcnctta

SEQ ID NO: 3578 - DNA, 204 bp, Zea mays
  misc_feature: Incyte ID No: 700380496H1
gctcgacctcgtcgtctccacctccggcaagctcgtggaaatttacgaggacaaggacaatgctaggaaggatgagatcaacactcatcttactgcacccacgcaaagtggactgtttagcaagtactatgaaaggctcaaagagatccgtgaatatcatcggcggaacccatctgcccgctttgttagtacaactgatgacta

SEQ ID NO: 3579 - DNA, 358 bp, Zea mays
  misc_feature: Incyte ID No: 700380501H1
  unsure 4, 174, 191, 208-210, 223, 225, 239, 243, 252, 257, 266, 285, 287, 293,: a, t, c, g, or other
cggngttcattgaattgcggcgtcaagctctggatttattcgttaacaggatagcttcacaccctgaactcaagcaaagtgatgtcttgaggacatttttgcaagcagatgaagagataatggataggggcaagatcttatgagactggtattttaaggaaccggcagatttcntaccagtgtttaagggngtgccatccaaaggtcnnntggaggtggttcntngggaaaaggaaaancctngggagggantttantcccggaantttgagaagccttaaaaantnccttanttggagctcnnganaatccctttggccgngggncccnaaaaaaagnnntacngnctttgtggaaa

SEQ ID NO: 3580 - DNA, 330 bp, Zea mays
  misc_feature: Incyte ID No: 700380508H1
taacagtcgaagagaagtcctaccataagtcatgcttcaaatgctcccacgggggctgcgcgattacaccttccaactatgcagccttggagggcatcctctactgcaaacaccatttctcccaacttttcaaggagaagggaagctacaaccacttgatcaagtgcgcgtccgtcaagcgcgctgctgaagcacagccagaacaaccggcctctgattcctcctcctgaccacgccatttaaacagtgggggtttggaggcgagagagttgggaagcctcctgtttctacttaaaaccgcgtgatgtatgttattccatctatgccccg

SEQ ID NO: 3581 - DNA, 328 bp, Zea mays
  misc_feature: Incyte ID No: 700380511H1
gaggcaacgaccaaacgtccaaacccttccccctccctagctccgtgctccagcgggagtccgcggcggcggtgaagatgattatcccagtgcgctgcttcacctgcggcaaggttattgggaacaagtgggatctatacctcgacctcctccaggccgactactcagaaggggatgctctggatgctttggaattgttccgctactgctgcaggcgaatgctcatgacacatgttgacctcattgagaagttgctcaactacaacaccctagagaagaccgagacaagttaagcgagcacatcatgctccaaaaacactactgtttg

SEQ ID NO: 3582 - DNA, 324 bp, Zea mays
  misc_feature: Incyte ID No: 700380514H1
gcggcgggggcgggggcggtgggttcccgggggtggcgtgggaggtgttgcggcggcacttctctaagaagcggtccgtggacgtgaggcggatcaaccccaaggtgcccaaggaggaggccgtcgccatttccggccgactcctccagatcctctccgaccatgggcccctcaccgtcggcaacacctggaaccacgccaaggatgctggcatcgctggtctgaacagcaagacgcacatgaagatcctgctgaaatggatgacggggagaaatgtcgtgaagctgacctgcgtgcacgtgggcaacgcgaagaagttcctct

SEQ ID NO: 3583 - DNA, 321 bp, Zea mays
  misc_feature: Incyte ID No: 700380515H1
  unsure 85: a, t, c, g, or other
atcaggccaaaaggacggagaccagcttaggcgaaacgcagacgtagtggagatcctgaggaagaccaggttcccgcacgttcanggagcaggtgaagagaagtcaccggagacgatcctggatcacgatcgtgttatttggctggggacctgaactaccggatcgcgccttcctaccgctcggtgaaggcttggttgagatgcacaactggaagcagttgctggaaaaggaccagcttcgcatagagcaaaggtttggccgggtctcgcgggctggagagaagggaggatctacttcccgcccacctacaagtatcgtac

SEQ ID NO: 3584 - DNA, 326 bp, Zea mays
  misc_feature: Incyte ID No: 700380516H1
  unsure 27, 82, 85, 94-95, 164, 235, 238: a, t, c, g, or other
cttcatcttcctcgcagcgccggcgcnccatcttactctccctcccttactagcgcttggcacgcaggtgacggctgcagcnganggcgttcannctcgggctctcagtgacggcatcagcggcttcccctcccgcctcttgccagtcctatcgcgccctcgcntcgggtcctctgcacaccgtccagtgaccttgcgtgatggactggataaagttttgcagcgatttaccgcnatngatgggaaacagcatgcattgcttgataatcttaatcaggaatgtcccagaagtctgtactattgggtgatggtttaaactgtcagcc

SEQ ID NO: 3585 - DNA, 336 bp, Zea mays
  misc_feature: Incyte ID No: 700380517H1
  unsure 196, 204, 206, 210, 266, 275, 283, 286, 297, 317, 331: a, t, c, g, or other
gataactaggaggttcggcatgggtacatgtattgtcattattgtttgtcgcgagtacctttgtaaatttagaaatgagtctaaccatattttcttagttatgtgtgagatactggaggccaccaaagctagaaatacgttgattactatatattaatgcagagcatgggagcaaagctgatctttaaaatatacnggtaactncnttantttctaggccacaaggtcacgtttggacgacccataataggcttggcaacccttcnaaatggggncattaagnttncccaaggggcnaatggcaatcctctgctttngggtcccatgtaanaaccc

SEQ ID NO: 3586 - DNA, 296 bp, Zea mays
  misc_feature: Incyte ID No: 700380519H1
  unsure 169, 245, 259: a, t, c, g, or other
accgcccactcaccgcctccggtcgctcccaagagcgttgctccgctgccgcagaaggtccaggaacccgaagcgtccgacgaggatgagtatgaacgatgaagatgacgagcccgcagagggtcccaggaaacccgaagcgttccgatgaggatgaatatgacgaagnaggaggatatcgaagaggacgagaaggccaaccacgtggtcccttcttccgccaccaagaacccgcctccgcggcngcagatggcgagtnttccgagcttccgacgaagaagaggtagggaggcggg

SEQ ID NO: 3587 - DNA, 259 bp, Zea mays
  misc_feature: Incyte ID No: 700380524H1
  unsure 96, 169, 181, 203, 214, 218, 244-245, 252: a, t, c, g, or other
cccgcgggtctgtctcttgcttcaacagtgtttggacggaacagatccggggatctcttccagctccgaccgccctccgatttctcttccgcttgnaactccgggacatctctcggcattcctgcttctggaactgcagcacgtttgtgtagtcttctgcaacaaccangagctccagtcntagattatccacgagtgagcancgtaaagctgncatngactgagctctaactacttttggttnnttgacgnagtggct

SEQ ID NO: 3588 - DNA, 314 bp, Zea mays
  misc_feature: Incyte ID No: 700380527H1
  unsure 14, 23, 86, 288: a, t, c, g, or other
gaaaggtcgaagcntcgtctctntcggcacggagcctagtgcccggcctcgtgagatccgaaattcagaatcgaggatggcgacgnaccgcgactaggcggtggtggaggcggcacgacggcggcgacgatgacccagacgacctcgtccccatggacacccaagagcaagaagagctggtccggtctctggaggctaagcaggcgcacaaggccgccgttggaggcgcgtcttcgcggggttctcctaggttacgcggcttccttgtctatccagtttccatcatgntggtctccctgggagtgcgtaccatg

SEQ ID NO: 3589 - DNA, 318 bp, Zea mays
  misc_feature: Incyte ID No: 700380530H1
  unsure 37, 75, 87, 90, 101, 137, 163, 298: a, t, c, g, or other
atctcggcagggcgccgcagggaagaggaggccgagngctctacgtctgccatggcgagctcttccgaccccganaagctcatgtcncanagccgacaaantgtaattaggcttgcacggaagctaccaacaggtgntctgcaggccatcaagaaatctgacnatggcgaggaatcctggacgaggatgacctgacttaaaacgatctcccgagccaaaaggtgcagagaacaaacgtcatagtttgccatcggtgggggaacaactgtaaaaagaagttatgcgagttacatactanaaacttgtgggcagcattcc

SEQ ID NO: 3590 - DNA, 320 bp, Zea mays
  misc_feature: Incyte ID No: 700380531H1
  unsure 78, 307: a, t, c, g, or other
gattttagccgccgccgctgctcatctcacatccctcgagaagacgcctgctcctcgccgatcgatacgatggccgtnttctccgaacctccacaccgccgacggcctcaagtccctcgaggctcacctcgccggcaaaacctatgtgtctggtgactccattactaaggatgacattaaggtcttcgccgcggtgccgtcgaagcctggcgctgagtttcctaatgccgcccgctggtacgagaccgtctctgcggctgtagcctcaagattccctggtaaggctgttggtgtaaatctgcctgcnggatcagctcctg

SEQ ID NO: 3591 - DNA, 193 bp, Zea mays
  misc_feature: Incyte ID No: 700380546H1
ctaggcgcttcgcgggggatctgatggtggtcctaccgcctattactccttatcgctctagtttttgctatcaatgattatgtgctaggagttttatgttacttataaactgctttgagcctcgatgggagttgaacttaatgtggagtgtatctgagatatgaagaactcattatatggctaatatctcttg

SEQ ID NO: 3592 - DNA, 314 bp, Zea mays
  misc_feature: Incyte ID No: 700380548H1
  unsure 8, 10, 13, 16, 26, 32, 38, 51, 54, 198, 222-228, 257, 287: a, t, c, g, or other
tctcagcngngangcntgcgggcgtntcctancctgcncactctccggacnccnacgccgtcggcgaagagaccgggcaagagcccgattcccagaccccgcgagcaatccttgatatacctgatggctatgattgatgagcctctgtacccaattgctgtactgattgatgagcttaagaatgaggacatccagttncgtctaaactccattagaagactnnnnnnnattgcacgggctcttggagaagaaagaancaggaaggagctgattcccttcttagtganacaatgacgatgaagatgaggtgcttc

SEQ ID NO: 3593 - DNA, 308 bp, Zea mays
  misc_feature: Incyte ID No: 700380551H1
  unsure 108-109, 114, 117, 124, 133-134, 139, 141, 151, 161, 167, 176, 179, 185,: a, t, c, g, or other
gtttttaaagatatttgcttccaaaacacaatggatttatgggaaggggtgtgagctttaaagaacatgtgtttttaaagatatttgcttccaaaactcctaagatgnntgccntcnttgaggnccaacttcnnggagnantgtggttccnggttccaggntgtcancttgctttngtnactctnggngcangctgatatntagaaggctatngggaggtgaacaacctataaaaatattctaataaaggcttgaaataagactagagctggttaaaacttatatgtgagaagcatattcttgatttg

SEQ ID NO: 3594 - DNA, 316 bp, Zea mays
  misc_feature: Incyte ID No: 700380552H1
  unsure 2, 6, 56, 88, 96, 100, 109, 123, 125, 127, 136, 146-147, 154, 164, 170,: a, t, c, g, or other
cngtcncgcgggtctgtctcttgcttcaacagtgtttggacggaacagatccgggngactctcttccagcctccgaccgcacaccganttcctctnccgntggaaaccntccggggacccatntncntgggccaanttcctggctnntgggacntgcaagcacngttttngnggtnagctcnttcttgcnaacnaaccatgagctccnagattcgtnagaattattccacngacgtggaggcagccgtcaacagcctggtcaatttgtacctgcaggcctcctacacctacctctctntgggcttctatttngacc

SEQ ID NO: 3595 - DNA, 309 bp, Zea mays
  misc_feature: Incyte ID No: 700380556H1
  unsure 120: a, t, c, g, or other
acctgcgcatccgcaaactcatattcaccaacggtgacatggtccacgccgtgagagccctcaagaggctgggcctggaggactgctttcgaggggatcatctgctttcgagacccctgnaacccgccctgcccgccgcagggagaaccaggagcccgagatcttcgacatcgccgaccacttcgcccgctccggcaccgccgacgagctgcccaagacccccgtgctgtgcaagcccaacgtggacgccatggaggaggcgctcaggatcgccaacgtcaacccgcacaaggcgatcttcttcgacga

SEQ ID NO: 3596 - DNA, 308 bp, Zea mays
  misc_feature: Incyte ID No: 700380557H1
  unsure 17, 95, 114, 116, 129, 134, 144, 182, 185, 188, 209, 271, 290: a, t, c, g, or other
cgtgaattggcccatanggtggatgatgctcttggggtcatgactgcatcggggcttacagtcgaccacccgataatgacgactactgacttctngacctcgcaacgaggtcgntncgcttaccctaangagcntggctcttancccgtgaggattccaccagtggccttttctcatgattngtncgncccacatgttgtgggttggtnagcgcactcgacaactcgatggagctcatgttgaattcctccgtggtgttgccaaccctctnggcataaaggtgagcgacnaaatgaaccccagtgagt

SEQ ID NO: 3597 - DNA, 296 bp, Zea mays
  misc_feature: Incyte ID No: 700380558H1
ggttggcataatacggaaggcaactctgtccaatggctttgcatagcctgtgttgaccgaaaagggatgatggcggaggttacatcggctcttacagcttgtggaattaccatatggtcttgtgtggcagaagtcaataaaaggaggggaatgggtgtgatgctgttccattttgagggaagctatgagaacgtggtcagtgcgtgttcaagtgttgacatgattctggtgttcttggttggtctgtgggatgtagctggtgtccatgggtgttcttgagtgctaatcggtaccaa

SEQ ID NO: 3598 - DNA, 308 bp, Zea mays
  misc_feature: Incyte ID No: 700380563H1
  unsure 82, 206: a, t, c, g, or other
cccagacccagcagctattgtggtcgtccctcagccgcgtcgcaccgcatgcgcattctacgattcgaagctctctctgctncgcagccatggcgaagaattacccaaccgtgagcgccgagtacagcgaggccgtcgagaaggccaggcgcaagctccgcgccctcatcgccgagaagagctgcgcgcccctcatgctccgcctncgcgtggcactccgcggggacgttcgacgtgtcgtcgaggaccggcggtcccttcggtactatgaagtgcccggcggaactggctcacggcgccaacgcggg

SEQ ID NO: 3599 - DNA, 297 bp, Zea mays
  misc_feature: Incyte ID No: 700380564H1
taggaagacaagtcgagcacgatggacagagtaggcatcacccaacacagatcgatcgtcatgagctcagaaggattttatgagatcaaccaaatcggttaaatccgtgcggggtgacgtatttcgtcgacgtcgacgccgatgccgatgcctttggccgcagcgatcttgaattccttcatcctctccttgatctcctccccttccttggtgccaaagagcctgtcgatggcggccttgacctggcctctctccagctgttcccccacgagctccgtgcccaccttccacacgtcg

SEQ ID NO: 3600 - DNA, 313 bp, Zea mays
  misc_feature: Incyte ID No: 700380565H1
  unsure 154, 158, 162, 167, 176, 179, 186, 200-201, 229, 234, 239, 246, 265-266,: a, t, c, g, or other
ggtccacaaggttaccgacctcagggtcatggtgccgcttctcagttggggccacgctctcagaatcatggctatggatacccacctagaggtatgcctccacctcaaaactacaacgcaccctacggtgggtaaccaacggaaggaaccgtcnaganggtnggcantgggttggnacnaaaggcngggccaacaaaccnntctttctaaccaggttgttggtcctgantatanaagcnagggatntcagccatatgttagccanncnacccagntacctccttggggcnagggaattacaaacanttatggg

SEQ ID NO: 3601 - DNA, 310 bp, Zea mays
  misc_feature: Incyte ID No: 700380569H1
  unsure 2, 4, 13, 111, 121, 124, 134, 146, 159, 174, 191, 195, 213: a, t, c, g, or other
anancccctcgcnccgccgacctcttcagcctcgcagcacaccgccgccagcccgagtgaccgcttgcagcctagggtttccgtcggcgatggcggggtaaagggaggaanggtcctgctnggnggcaaagaangaccggcggccnaagaagccaccgncaaggacaaggacanggaagaaggcccccgtntcgngctcctcccgcgccggcntccagttcccggtgggtcgcatccaccgccagctcaagtcgcgtgcctctgcgcacggccgcgtcggcgccaccgccgccgtctattccgccgccat

SEQ ID NO: 3602 - DNA, 297 bp, Zea mays
  misc_feature: Incyte ID No: 700380571H1
  unsure 110: a, t, c, g, or other
gcgctaccagcagggcctccccgccgagtgctccatgcagtagcgcccggttattcctcgcccgtccaacaatggcgcgcgcgcgcgtgtgtgtgcatgtggtccgctcntattgctaccgcaacgacgatcggtgtcgatcaccggatcaaggcaagacgaaaggcatcgaaacatggtagataaataaaggacttgacgatttgtaacgcatagctggtgcgtgcgtggtgtggtggtaagaaattcttctgctgcctgtgttcttgtagcctcctcgtcctcgcccaccctgtt

SEQ ID NO: 3603 - DNA, 124 bp, Zea mays
  misc_feature: Incyte ID No: 700380573H1
tggaaatagtcgataaagtcataatagagtgttcttaaatagggaacagaactatttatattgaaacccgtctatgatgtgtaaatttctacccgaatgaaatggaaattatggaaatcatagt

SEQ ID NO: 3604 - DNA, 298 bp, Zea mays
  misc_feature: Incyte ID No: 700380574H1
  unsure 52, 103, 113: a, t, c, g, or other
atcctcaccgtcatgggcgtctccaagtccacctccaagtgcgccaccgtcngcatccagggcatcgcctggtccttcggaggaatgatcttcgcggctcgtntactgcaccngccggcatctccggaggacacatccaacccagctgtgactttcgggctgttcttagccaggaagctgtccctgactagggccctcttctacatcatcatgcaatgcctgggtgccatctgtggagctggagtggtgaagggcttccagcagggactttacatgggcaacggtggtggcgccaatg

SEQ ID NO: 3605 - DNA, 294 bp, Zea mays
  misc_feature: Incyte ID No: 700380575H1
  unsure 2: a, t, c, g, or other
cntcattgaagttggtacaatggtatctccaaccatttatgctcgacgctgcttatcatatctgatgaatgacatgccacaggaggcattgaatgatgcagtgcatgctctggtaatatctccgacatggtcaacagcattctatcttcaggcagcagcacttttatcacaaggcatggagaatgaagcccaagaagcactcagggatggttatagcctagagcaaagtagcagcggtggacattgagtgtgaacagatttgtagtcccccaaatgcacataatttcaggtgct

SEQ ID NO: 3606 - DNA, 292 bp, Zea mays
  misc_feature: Incyte ID No: 700380576H1
  unsure 31, 47, 50, 83, 107, 129, 159, 163, 174, 187, 189, 205, 288: a, t, c, g, or other
ttaccttgcgcgcgacagggtcgaaggggantctccggaggatggangtnggcaggactccgcggcgacgggcgtccccagcngcggctgtgctttcgctgcttctnttcgccgtgctattcgtgggtnaagtgggccgggcggcggcagcgttgggtncgcncggcgccggcnctgtacaagcacncntcgttcttcgaccgcnacggcgacggcgtcgtctccttcgcggagacgtacggcgcgtttcgggccctcgggtttggactcggcctgtccagcgtcacnccgc

SEQ ID NO: 3607 - DNA, 295 bp, Zea mays
  misc_feature: Incyte ID No: 700380577H1
  unsure 119: a, t, c, g, or other
ctcgaaggggagaggacagaagagggagatacaggttaatttttaggtaccagatcatctgatttctcagaagcaaaatgttgtttggagctcagtgacaccatcttgtaatgcctgtncattttacgggaaatggaggatcattctgtccatcccatgtctaagtctaaccatggctccttgtcaggaaatggttatgagatgaaacattcaggccataaagtttgcgatagggattcatcatcggagtctgatcggtctcaccaagaagcatcagcagcaagtgaaagcagtc

SEQ ID NO: 3608 - DNA, 297 bp, Zea mays
  misc_feature: Incyte ID No: 700380579H1
  unsure 100, 118: a, t, c, g, or other
ccatctactagattcacccctggtggaggaggagaagaaggtaagcgaagatgctacggcggaacatacgtcagcgtcgggagtacctgtactccaagancctcgagggcccccagcnggcgctgttcgagaagaagcgccggatccgggcggcgctcgaggagggcaagcccatccccaccgagctccgcaacgaggagcacgacctgcggaggcagatcgacctcgaggaccaggagcgtcaagttcccaagagcatcgttgacaacgagtacgctactgccaccattcgggagc

SEQ ID NO: 3609 - DNA, 309 bp, Zea mays
  misc_feature: Incyte ID No: 700380583H1
  unsure 56, 93, 104, 111, 130, 146, 149, 157, 160-161, 163-164, 182, 198, 204,: a, t, c, g, or other
aggctctgaaccgacaaatttggatgtttaacagacctgtaaatggttctgtactnctaaaatatagtatatagagaatacatgcatcttttncatctccaaanatagtcngtaaagaatccatccaaangttaagaagcaacggnatncatccgcnagnnanngacagggccgtacggttnctactcctataccacngtgctnaatttattgtgtttgccccattcacatggcacatgaccggtaaaantcaanatnganngtgaaatatggtacactattgntatagaggagaantttagaggacat

SEQ ID NO: 3610 - DNA, 294 bp, Zea mays
  misc_feature: Incyte ID No: 700380584H1
  unsure 109, 111, 126: a, t, c, g, or other
caatcgaggatggagtacgagcttgctgggccagaaatgtctctctttgaaccattgggcagagcggaagggaagcgatgaaggatggatccattacgaaccctgctgntngtccatgccattggntgacacaaccaaacatcgtttgccagaaggtcgggcaaaaacatgccagtccgtggcgaggtggggcggggcatcgaccatccactcggggagcataacctggcgcgcgaaccaccgacgcgcttcggagccgcggacctggaggcggcggcggccgccgactagtga

SEQ ID NO: 3611 - DNA, 296 bp, Zea mays
  misc_feature: Incyte ID No: 700380585H1
  unsure 129, 131, 140, 161, 168: a, t, c, g, or other
ctaccattctgtcggtaacggtaagccgaggctgacggcggtgtcggtgaacaggtacccgccgccggctgctgagctgagtgggagccagaacgcggcggccaagggctagcagttcggcggtcattngnactctcgtnccggtgtgcacaagttgaggngcttgcntgtcaacaagtcccgatcaggtcaacgtaataagcaacagcagcgtcgactcgaccgctgcgtcggcaccgccgccgcggcggagggaaagctgcttcggctccaggccggttctacaaagagcggca

SEQ ID NO: 3612 - DNA, 296 bp, Zea mays
  misc_feature: Incyte ID No: 700380587H1
gtcaagtgttatcatgcagtgtttaagaattgcttcggtaaaggctgctgatataacaagcaaaataaagaaagcagtagactcatacaccaccgagaaaagcccctaaagaaaagtaaaacgtttggccaacctcggttccctccagaaaattaatgtcactaatgtaactatggacggcaaaggtgatggtgaattggaaaagcaatctatgcagatgcatagtgatgttcagcagataagcaaaggtgatgagaaccagcaaagtataaaaaggattcacccttgactaggga

SEQ ID NO: 3613 - DNA, 289 bp, Zea mays
  misc_feature: Incyte ID No: 700380589H1
cgtgcacgtatctaaattgtctatcagtactgacttttcacactcgggtatagaaactgtcggcacttgaagatgaacaaagcgaaattaccctcaaaaaaagcccctagaaaccaaaccacccctaagacaactatcgattagctaggatcacgaggtgatgaatggtagaacggctcgatttatcgtgttgacgaggtggcttaccagctaggtaaacgagcagacgacccgggcggcctgttggccttatctggcttgtcatcgcgacaacgctgactttgttgtt

SEQ ID NO: 3614 - DNA, 289 bp, Zea mays
  misc_feature: Incyte ID No: 700380594H1
gtggctacaaacaagtatttcaagaaaatagtgtcaatggagaatatctagaaagcttgtccatgtttactactgagcagattctgcgctttattaggcggtgccatatgaaatggggagactttatcacactgtgcaaagagttgaggcgcattaaagtggcgtgccttaaaggggagcaagaagtccgcaggccatggtgggcgccggcatgcctctccgtagttttcgtgagggcagccaagcagaacaggaagtcccgtgttgtctcgttgaagctggaaccata

SEQ ID NO: 3615 - DNA, 290 bp, Zea mays
  misc_feature: Incyte ID No: 700380596H1
agcctgcagccctccatccacgaactcccgttctccatttccagccatggcggtgtcgatcgagctcaccaaggagtacggctacgtcgtgctggtgctggtggcctatgtcttcctcaacctttggatgggcttccaggtcggcaaggcccgcagaaagtacaaggtgttctaccccaccatgtacgccatcgagtcggagaacaaggacgccaagctcttcaactgcgtgcagagggggcaccagaactctctagagtggatgcccgttttcttcgtcatactgctgc

SEQ ID NO: 3616 - DNA, 322 bp, Zea mays
  misc_feature: Incyte ID No: 700380601H1
  unsure 10, 70, 163, 167: a, t, c, g, or other
agatccggancagccgcagtcccaccgaccccgccgccggtcgccctccatctcctcgccgctgcctctncgatctttgtacagtttctgcttttcaataatcaagatgagccgtggtggtagtgccggtggtggtcaaagttctctgggttatctctttggnagcngtgagccccccaaaccagcagtggcaccagctgcaagtgctccacctgttgagaaaccatctgctgcaaagactgatgcggccaagcaggttgctgctggggttaccagccaaaccaataattaccacaggtgatggtcagaacatggcaattcc

SEQ ID NO: 3617 - DNA, 312 bp, Zea mays
  misc_feature: Incyte ID No: 700380602H1
  unsure 300: a, t, c, g, or other
caaagaactcaaagcaagaggtgcttgctactactgcaaaaatgaagaacatattattcgcgaatgccccaagaagcgtctagaccaactaaagaagaagacggtgaagcaagacccaaacaataacccagaagaccaaccattttataagtatgatgatgaaggtcgcttgattagtatacattttggagcaaagaagtaaggaagttcctaagtttggaggagttcatgtgaactaagaacctacaaataaccagtatctccttgcttcgtgctagccttctaatctcgaggacgagntcttttaagggg

SEQ ID NO: 3618 - DNA, 316 bp, Zea mays
  misc_feature: Incyte ID No: 700380603H1
  unsure 17, 190, 280, 308: a, t, c, g, or other
caaaaccctcgctcgcnccccaccaccccgccgcgccgccgcctgtaaccagctgcgtcaagatgagtcggcaccctgaggtgaagtgggctcagaggatcgacaaggtttacatcactgtacagttacctgacgcaaaggatgctaaggtcaatttggatccagatggtgtcttcacattctctggcantgctggtacaaacttgtatgaattgaaactagatctgaatgacaaagtaaacgttgaggctagcaaaataagtgtgggggtcagtccagntctgtatcgtagaaaaagctgaagccantggtggaa

SEQ ID NO: 3619 - DNA, 320 bp, Zea mays
  misc_feature: Incyte ID No: 700380604H1
gggcacacgcactacacgcacggcacgcagatacatatagagagaggttagctatagcttgcacatctatttaactaactaactaactggctagctagctcgatccgcagagcaaagcgaaagcagcaagaagcaaagcaatggagaaccctgcgagtgtgctagttctaccagcgcagttcaccaaactcaccttcggaaacctgtacatccgccgggccgggccgggcagcagggagataaccgaggagggcaggtgcgacctggacaagagatacgtgagtgacttccccgtctacgacggccgcggcccgacgcca

SEQ ID NO: 3620 - DNA, 311 bp, Zea mays
  misc_feature: Incyte ID No: 700380607H1
  unsure 22, 28, 40, 97, 215: a, t, c, g, or other
gacgagaagacggaggcgaagnacagcngctccggctggnagctgctgtactgcggcgggacgagcttcgacgccatgggtcggaaggtggtgggcngggcgcagggcaacctggtgtcgccgactcggctgcccccgctcgtgggcgttgatatccgcttcgttgcctctggatgcactgcttgccactgtgttgctttagatgctggaggcanatgttatacatggggtcgcaacgagaagggacagctagggcatggagatactctctgcgtaacctgccgatgttgtttctcaatatcaaaatacaa

SEQ ID NO: 3621 - DNA, 315 bp, Zea mays
  misc_feature: Incyte ID No: 700380608H1
  unsure 185-188, 222: a, t, c, g, or other
ggtgccatgaggatctcggccctgtctgaagccggagtcatctatgtcatgacccacgactctattggtctcggagaggatggcccgacccatcagcccatcgagcacctggtgagcttccgtgcgatgccgaacatactgatgctccgccctgctgatggcaacgagactgccggagcatacannnnccgcggtcctcaacaggaagaggccgtccatccncgctctctccaggcaaaagctccctcacctgcctggcactcgatcgagggcgtggagaagggcgggtacaccatctctgacaatcgaccggca

SEQ ID NO: 3622 - DNA, 310 bp, Zea mays
  misc_feature: Incyte ID No: 700380615H1
ggcagttgattgtcaaccatgtgagcttgagaagtaatttaggttgtgcaggtgtgacttcaggtgaacataaaaagttggtttcacttggatttgctagacagtgtctactcaatgcgctgctactattgaatgctactgaacaggaaaattgggtaaccacatctaatgcagaggattacatccaaggaacattacaaggatataaaaactcaggtcagaagaacactacaagtacggattctaaaacaccttctgccccaactctagctaatgtaaatggtgaacaaaagggaacgagctgaatgct

SEQ ID NO: 3623 - DNA, 280 bp, Zea mays
  misc_feature: Incyte ID No: 700380616H1
gagacagatggagggtaccctatttacaactgagtcagccaagccactgatgggaatatacagatttaggtgctaaaccgtttattttccacggatgagtcacaatctgaagaatcaaacttccatcctgaaaatctatatgtttcaaaaccacttgccatcctgttagattgccagttcctgggaccaggcctcagactgtgaagtatatatcctccagcattcagtccagggggagccacggaaaccagttcttgcttaagccataaagtcagagatg

SEQ ID NO: 3624 - DNA, 230 bp, Zea mays
  misc_feature: Incyte ID No: 700380620H1
  unsure 6, 16, 26, 29-30, 33-34, 37, 47, 72, 83, 89, 92, 106, 212-220: a, t, c, g, or other
aaaatncagtagctantaaagaaganaannaannttncagctggagntaaatctcttcgtacagcagaaacngctagtgtaanggaaancancggtaacatctcanggatgaacagcagcgacgataatgtggtggttgagaagaccgttgtgatgctcgaagatgaggcggtcattctacattctggaagaaatgcagcaaaggaaacttnnnnnnnnngacaggacag

SEQ ID NO: 3625 - DNA, 300 bp, Zea mays
  misc_feature: Incyte ID No: 700380623H1
  unsure 273, 300: a, t, c, g, or other
atttccagttgcattttctgacataaatattgtactcctgcagaagtttcatttttatttctcctttgctgtccctatttgctcaatacgcctttttggaccaggttttatcctggccatatgtatgcctattaatgcgctcttttgtgtgcgtttagatggacccgaagtttctgaggaactgaggtactcaaggaagggcaacaagaagagtggcgaggctgagtccgaggagtaagatgatggtgatgagtttgtggcgacaatgcatcnttgtatcgctaagagtctagcgtgaan

SEQ ID NO: 3626 - DNA, 304 bp, Zea mays
  misc_feature: Incyte ID No: 700380625H1
  unsure 70: a, t, c, g, or other
gtttggggttctgtgggtttgggtgggaagagggccatctgcctgaatgtaacctgctagctctccgaangccctgcgggctggcttgtgtgagcgtgtggacagtggtggccgcgctgtgcctgctcgtgttgcctacatgtccctggctgttgaggcgctgcttcagcctgcacccctcccttgtctcatagatgctccttttgaccttttcaaataaatatggatggcgagctcctaggcctctggcttcctggtagagggcggcatgccgaaggtctgctgggtgtggatggatgctggg

SEQ ID NO: 3627 - DNA, 139 bp, Zea mays
  misc_feature: Incyte ID No: 700380628H1
  unsure 124: a, t, c, g, or other
gtccatgtttgtagtgaacaaccaacatgtaaagtgtcatgtagaaatgcgcatctgaggtccttgttcaaacttgtgtatcgtgctttgttagaaccgaaataaaggcaaaagttcgcccctnctttctaggcgttcg

SEQ ID NO: 3628 - DNA, 300 bp, Zea mays
  misc_feature: Incyte ID No: 700380634H1
  unsure 13, 39, 45, 48, 51, 53, 73, 90, 96, 165-189, 299: a, t, c, g, or other
cctagttcgaacncgccgccgtcaccgtcgtcgctcgcnctctcngcncgncntcggagcgagagtaggggcntgtcggcggtgaaagcnactgcntcagccatggcggacgaggagcattcggagaggagagaggaggcctccgagcttgcccccttcgacccnnnnnnnnnnnnnnnnnnnnnnnnngttgtcatccaagaaccttctgatgaagtggacaagcttgcagagaagacagaaacatggcatcgcagaacccgctgaattaattcatggatgaagaagaaaaagaagang

SEQ ID NO: 3629 - DNA, 149 bp, Zea mays
  misc_feature: Incyte ID No: 700380639H1
gtaatgtcaaaaggcacactccaaggtgattcagtggtagttctgccatcatgttagttgttacagtaattcttccatcacttgtttgtacaactcatacatgtcatgccaccctgagatttatgtcattcagttgtcagtcaaaaaaa

SEQ ID NO: 3630 - DNA, 132 bp, Zea mays
  misc_feature: Incyte ID No: 700380640H1
  unsure 88, 112: a, t, c, g, or other
catcttcctaagtcatcagccccagcgagacattgaagcatggggaaacttaaacagtatggtgatgattaatctcagcatttttttncttgcagcaatcaatatggacttngcttaaaaaaaaaaaaaagg

SEQ ID NO: 3631 - DNA, 295 bp, Zea mays
  misc_feature: Incyte ID No: 700380642H1
gttggacttggccacccaattgagtacatctgccttgatctggaggcacctaatgtgtgcaagtactgtggtctccgttatgttcaagttcaccatcactaaattgggaagatactgccgtctaccgctgcagaagctgagttgaggagtttatgtgcacacacatttgttccacaatgttctgtagtgtactttgtactatgctgcgggcaaaatattacctttgatgatcatcctcttctcgggcgatcgtttataatcctgtcttagtatggttcattttctacagatgaat

SEQ ID NO: 3632 - DNA, 292 bp, Zea mays
  misc_feature: Incyte ID No: 700380647H1
  unsure 273: a, t, c, g, or other
gcttgcacgcatctacgctgctgaaattgtatctgccgtagcccacctccatgccaatggtattatgcatagagatttgaagcctgagaacatcttactggatgctgatggtcatgctatgctgaccgactttggcatggcaaaagaatttgatgaaaacactagatcaaactcaatgtgtggtactgttgagtacatggccccagaaatttttcagggccgaggtcatgataaggctgcagactggtggagtgtgggaatcctcttttgaangctacgggaaagccaccgt

SEQ ID NO: 3633 - DNA, 93 bp, Zea mays
  misc_feature: Incyte ID No: 700380648H1
  unsure 63, 71, 75, 78, 84, 88-89: a, t, c, g, or other
catcaatgtcagcatcaggtaactttacctgctggttggttatcttaccatcattggtgagancttcaatncaantcnttcccnttannacac

SEQ ID NO: 3634 - DNA, 110 bp, Zea mays
  misc_feature: Incyte ID No: 700380654H1
  unsure 95: a, t, c, g, or other
gccaatgttggtgctgtgcaaaaagccgaaggagtaaaggtgctgcaatgatgttagctgtggccactgtggatttttcgcaagaacattaatanactaaaaacttcatg

SEQ ID NO: 3635 - DNA, 300 bp, Zea mays
  misc_feature: Incyte ID No: 700380655H1
  unsure 4, 13, 21-22, 82, 92, 94, 108, 120-121, 127, 165, 250, 252, 299: a, t, c, g, or other
gtcncacccggtnaagctggnnccgttcaacccggagtaccaggacgagtcggtgctgtggacggagagcggcgacgtgggnaagggcttcngntgcgtccgcatggnccaacaacatcnncctcancttcgacgccttccacggcgacaagggccacggcggcntgcgcgacggcaccaacatcgtgctctggaagtggtgcgagggcgacaaccagcggctggaagatcgtcccctggtaaatgtgcngntctgtggctgcactggtcatcaccatgatctagagctttgaaggcana

SEQ ID NO: 3636 - DNA, 304 bp, Zea mays
  misc_feature: Incyte ID No: 700380656H1
ccttttctaagacggcttcagcgggcaggaggtgcagctgctcatccaccacaggctcctgctcgggtcgagaaccgtgctcctctgcctgcccagaatgatggcaatgagcagcccaatgtgaccgacaaaagaattaaagctcaaggatatggagaaggacaaggatcaagttgctagggcatataagaagaaagttaaaagcaacccatgccctgcaaaccctgaccaagctgcggagaaccacgaacaagatgctgcagctggtaacgagaatccgcaagaggcagaggtagaaggcaat

SEQ ID NO: 3637 - DNA, 300 bp, Zea mays
  misc_feature: Incyte ID No: 700380657H1
  unsure 26, 152-170, 280: a, t, c, g, or other
attttcttgctgatcacagctagtanggagcgagagttaccttgaaatcaaggcagtacgtacgagtacgatcgacaatgtgcgacggtcacttctggcacctttctgagcctttggtccccagtgcggccggcagtctcctccgcgagacnnnnnnnnnnnnnnnnnnnttcccgacggaggccccggtccctttctgtgtgctgcgaggccggccggaaaggggatcacaacccaaagacggatctgcatccatttaacatccctgccttcgttctgntgcacccggtggcaccacgt

SEQ ID NO: 3638 - DNA, 155 bp, Zea mays
  misc_feature: Incyte ID No: 700380658H1
  unsure 37, 44, 122, 124: a, t, c, g, or other
ctcaggcgcaacgcaacaacacaaggcggcggttatngcctctnctgctgcgacggctacgatggggacggggaaggtggtttgcgtcaccggcgcatcagggtacatcgcgtcctggattntnaggctcctactcgaccgcggttaaaccgtcc

SEQ ID NO: 3639 - DNA, 296 bp, Zea mays
  misc_feature: Incyte ID No: 700380660H1
  unsure 100, 103: a, t, c, g, or other
agacaatgctgctgtcatccactacaatggtaacatgaagccctggctggaaattgcaatgataaagtatcggccttactggacaaagtacatcaattancancattcctacattcatggatgcaagatcagccaatagaaaccaccctcagatattcttatgtgatgaacattgaagttggatgggactcaaaatgaaatcagtataactatcacatgttctttattcgtgttatattagattgttagttatcagtgtatgtagtttcgtcgccctttgtggtgcttctccccta

SEQ ID NO: 3640 - DNA, 146 bp, Zea mays
  misc_feature: Incyte ID No: 700380661H1
  unsure 4-5, 19, 82, 99, 105, 115, 140, 142, 144-145: a, t, c, g, or other
cttnntattatttcactantactaacaacaagactaacacacacaagcacaatagacgcccaagaagtagagacagtttggncgattctcccaggctgncattcntatagctaantgcccttccctccctacgaattccncncnnc

SEQ ID NO: 3641 - DNA, 300 bp, Zea mays
  misc_feature: Incyte ID No: 700380662H1
  unsure 182-183, 296, 298: a, t, c, g, or other
atggtgtgcagataaagaaacccatagaggtatcagcaccaaaatatatggagtatctgatggattggattgaaggccagcttgacgatgaatccatatttcctcaaaaacttggcacaccattcccaccaaacttcaaggaagtagtgaagacaatattcaagcgcttgtttcgtgtttanncccacatctaccactctcatttccagaagattgttagccttaaagaggaggcccatctcaatacctgtttcaagcacttcatctgtttacaaatggagtttggcctgattggngnga

SEQ ID NO: 3642 - DNA, 300 bp, Zea mays
  misc_feature: Incyte ID No: 700380663H1
  unsure 297: a, t, c, g, or other
gttctatgagggtggtgcagcagccattttcccagatgcatgggaaccatttagagattttattcctgaggatgaaaggaattgtttcgtagatgcttataacaaaaggttaacttcctctgatcctattgttcaggttgaagctgctaagcgctggacgatgtgggagatgatgactgcgcaacttatccaaaacaatgataacattaaacgaggagaagatgatgaattttcactggcatttgcaaggattgaaaaccactactttgtgaataagggattttaccctcggactcntcc

SEQ ID NO: 3643 - DNA, 134 bp, Zea mays
  misc_feature: Incyte ID No: 700380664H1
  unsure 4, 15, 19, 64, 88-89: a, t, c, g, or other
cttntcccgctcgtnctcntcctctcctcctggacagcagagcacagcacaacacaccgagaangaacaagcagccgccaccggagtnnggaaccaccatcagcagcagcacacccggtcaaccttccacacaa

SEQ ID NO: 3644 - DNA, 297 bp, Zea mays
  misc_feature: Incyte ID No: 700380665H1
  unsure 89, 140, 221: a, t, c, g, or other
gcaaggaagtctacttcagggatatatggccctcaacagaagaaattgcgcaggttgtccaatccagtgtgctgcctgacatgttcaanggcacctatgaggctatcacaaaaggcaacccaatgcggaaccagctaacntcccagaagcgtcactctactcatgggattccaaatccacttacattcatgagcccccttactttaaggacatgaccatgnccccacctggccccttctacagtgaaagatgcctactgcttgctgaattcgggggacagctcatacagatcacatt

SEQ ID NO: 3645 - DNA, 91 bp, Zea mays
  misc_feature: Incyte ID No: 700380673H1
  unsure 10, 16: a, t, c, g, or other
ggagctgctnctgctnacgttacgaaaccccgaccccagaaagcaggttcgttcttacgaaatggttcttagcgcccaggttcccacaaca

SEQ ID NO: 3646 - DNA, 82 bp, Zea mays
  misc_feature: Incyte ID No: 700380675H1
  unsure 37, 71, 76: a, t, c, g, or other
tggaaactttacctacaaactccttcgtatgatctgnggagaatgtacagaacttattacatcaataaaanacttnaacttc

SEQ ID NO: 3647 - DNA, 300 bp, Zea mays
  misc_feature: Incyte ID No: 700380680H1
  unsure 14, 30, 40, 65, 84, 141, 158: a, t, c, g, or other
gtgctgcctgcgcntttgccagcgcgcgcnccaccaccancggaaaagaaattccccaattctantccacccggcgcgctctcnccacgcgcatccggatccgtccgctctgatcgagtgagttgatctggactctctgcntgcctgtgagggccganggcggcatggacgagttcgagctggaggacaacctcgagttcatcctccagagcatccaggagctgatggaggacccgggggacaacaacgccttcggagacgccaaccagaacgagctcttcgccagcatcgttaactacg

SEQ ID NO: 3648 - DNA, 292 bp, Zea mays
  misc_feature: Incyte ID No: 700380681H1
  unsure 8, 21, 35, 38, 40, 73, 85, 97, 100, 137, 145, 154, 215, 252, 280: a, t, c, g, or other
cgccggcntgcttgtgatctnaacccaagtcgtgnctncnctccggtcacccgtcgctccacgcaaccatgtngaggaggaagancagggagcccanggnggagaacgtcacccttggacccactgtccgtgaaggngagtatgnctttggtgntgctcacatctttgcatccttcaatgacaccttcattcatatccagtgctttgtctggganggaaactctggttcggatcaccggtggcatgaaggtngaaggctgaccgtgacgagtcgtcaccntacgctgctatg

SEQ ID NO: 3649 - DNA, 287 bp, Zea mays
  misc_feature: Incyte ID No: 700380682H1
  unsure 40, 210: a, t, c, g, or other
gtgacgtatctaaattgtctatcagtactgacttttcacnctcgggtatagaaactgtcggcacttgaagatgaacaaagcgaaattaccctcaaaaaagcccctagaaaccaaacacccctaagacaactatcgattagctaggatcacgaggtgatgaatggtagaacggctcgatttatcgtgttgacgaggtggcttaccagctanctaaacgagcagacgacccgggcggcctgttggccttatctggcttgtcatcgcgacaacgctgactttgttgttga

SEQ ID NO: 3650 - DNA, 288 bp, Zea mays
  misc_feature: Incyte ID No: 700380683H1
  unsure 68, 94: a, t, c, g, or other
gggacgaccgagcggagtctagactcgagagcaacctcgacctcccggatctctctcccacccacgcntcgttcggcgccgtcgtctgctgcancgatggcctcccccgacctgctcttcaatctgcggaacctcttctacctgggcgcctaccaggcagccatcaacaacagcgacgtcccgggcctcgacgccgacgccgccgctgagcgcgacgccatcgtcttccgctcctacatcgccctcggctcctaccagctggtgatcagcgagatcgactcgtcagcc

SEQ ID NO: 3651 - DNA, 289 bp, Zea mays
  misc_feature: Incyte ID No: 700380685H1
  unsure 133, 168, 282-283: a, t, c, g, or other
tgaaggggttggaggtcagaaaggtgctggaggctcccgaggaggtcaagtgcgtgcccatgaagaatgtgctcgagcccggtgacatccccacgcttgctgagctcgggctcactgcgccaccagccatgtncacaggactcaaaacctgctgttggctctactctncattggtggtgagacagaagctctggagaggttgaagaagtttgctgcagaatgctctatgcagccaaacaaatagacaaaagcattacccaagatagcatatatggtgctaanntctctt

SEQ ID NO: 3652 - DNA, 287 bp, Zea mays
  misc_feature: Incyte ID No: 700380687H1
  unsure 237-238, 268: a, t, c, g, or other
gttccagcttctatttttgctccaaacaagtcgtgctccactagggatcctatccagattcgtggggacacccccgtccagttccagccttccaacttccaaccctctcctctccgcaggctgtagcatttgtcgggttggattgggttgttccgcttgggtagcctggtgggatcgaaatctgtgtgggatccatggcggcggtcgaggggacgacgaagaagaagatgacgcganngccatcttcgtggcactgcggtcgccgganctggaggtgctgggcctca

SEQ ID NO: 3653 - DNA, 289 bp, Zea mays
  misc_feature: Incyte ID No: 700380693H1
  unsure 2, 9, 16, 23, 44, 57, 78, 80, 84, 88, 111, 170, 203, 215, 224, 229, 236: a, t, c, g, or other
tnaaggaanatgagcnttacganattaatattcctccgagcttngtagcttctgttngcactagagtacatggattancntgtnggtntgattgtattgtttaatgggagnactgtgcaaaggtggcttaccactgctccaggatcccctacaactcactggtaccaatnacgatgtgtgcttcacagccattgtatgtcatngccggccaaganataactgtnccatnttcgtcncgtagcccatagtgctcaaagctacacaatatacttgacaatgtcagctaaaa

SEQ ID NO: 3654 - DNA, 291 bp, Zea mays
  misc_feature: Incyte ID No: 700380694H1
  unsure 91, 134-135: a, t, c, g, or other
gataaacgtcgaccattatgggaccttacagcaccgccgtcgccgtaagcgcatcgccggttcctgcaggcttcctcactcttgacgcgancccgtggttcttggaggcccacggtggcggcgttgcggctttnngcttccgtgaaatgcagtcggcgggcactcaccgtgacctgtgcgctcccggagaaagaacggccggcggcattcaacatcccgcccactgctctgctgtgccccgtgcccccgccggacggcaaggaacggtgggacatcaaggaggaagatgac

SEQ ID NO: 3655 - DNA, 310 bp, Zea mays
  misc_feature: Incyte ID No: 700380701H1
  unsure 12: a, t, c, g, or other
aatgctattgtngctcaaagcctattgacatacctagatggagtggaacctttaagatagatggaaaggaacacatatcactggctggacatttgtcatccaaatcttgtgagaaagtgtggaaattgtcatcattgccgaaggtggttcaagtgacaaaggttcctagaatggcagtgtggcctaagatatttaaagcatcagaacccagtggtgacaatattggcctatattcttccctcctgaaatgaggcacgatgaagaactagatcaactagtaatgaagtcatggataaagattgacttgcga

SEQ ID NO: 3656 - DNA, 304 bp, Zea mays
  misc_feature: Incyte ID No: 700380706H1
  unsure 4: a, t, c, g, or other
tggnagggcacttcgtttgtgcagagaagcaaatccaagaagaagcagacctgaagctagctctccagagtagttaatccttggaggatctagaatgaggcatttgagggtagcccttcacaagtgacttctgcagaaagatagatgcctaaggaggtgctgaaaaatgtagtttcgtggtcgaacatctttgttgacaccattttcgaccttgtgtacttcacatggaacttttcttcaaacaaagttttgttaaaaaaaaggtatatgctgttgctctgtgattctgatcttttatcgctgt

SEQ ID NO: 3657 - DNA, 247 bp, Zea mays
  misc_feature: Incyte ID No: 700380707H1
  unsure 38, 155, 183, 194, 205-206, 208-209, 214-216, 221, 227-228, 234-244, 246: a, t, c, g, or other
tcacatctggagacaaaataaaatgtgcaatatttttnatgtaggcgagctaacacagtgtacctaattgcagaattatctgattaatttgtaatagataagttgtataacattttcatatcttaaaatgttttttagatcaatcttgaagagcnaatattttcaaaataaaattctacaganaaaaaaaaaanaaaaaaaaaannannaaaannnaaacnaaaaannaaaaannnnnnnnnnncng

SEQ ID NO: 3658 - DNA, 103 bp, Zea mays
  misc_feature: Incyte ID No: 700380709H1
tgcatgaaggttggaagaacaaaaacaaagcaaagagctgatccctagcttagtgcttctgatctatatatgatgtgtatacacaactctgctgtttcggatc

SEQ ID NO: 3659 - DNA, 298 bp, Zea mays
  misc_feature: Incyte ID No: 700380711H1
  unsure 103, 115, 121, 136, 159, 163, 165: a, t, c, g, or other
ctctgatgacgagtggcttaatggtgaattcatcacaactgtccaacagcgtggtgctgcaatcattaaagcgagaaagttctccagtgctctctcggctgcnagctctgcttgngaccanagccgtgattgggtncttggaacacctgagggtacatntgtntnaggaggtgtgtactctgatggttcatacggtgttccttctggactcatttattcattcccagtaacatgcagtggtggtgaatggaaaatcgtcaaggcctcccgattgatgagttctcaaggaagaagatgg

SEQ ID NO: 3660 - DNA, 300 bp, Zea mays
  misc_feature: Incyte ID No: 700380713H1
  unsure 2, 14, 54, 114, 128, 164, 169, 273: a, t, c, g, or other
cncggccacatgtnctgcggatgctgcagaagtgtggaccatggcgggaccccnaggacacttggcacaggcctggaagaggccgccctcgtcttgtctcggctccctttcatngacagactggcctncttagctttactataaatttgtgagtgaagttagancccanctcacttagccagctcactttgagggcatcctataaacacccaactgttcttttatcgtctcggttttagccaaaagtgaaattagcatgactgcatctttcanacaaaaatattgatttctgcttttagg

SEQ ID NO: 3661 - DNA, 178 bp, Zea mays
  misc_feature: Incyte ID No: 700380715H1
  unsure 3, 10, 16, 46-47, 49, 77, 79, 88, 100, 113, 127-128, 170: a, t, c, g, or other
ganagttcanttccanggacgatatggaagataagacaaccctacnncngccaaattcctttgattaaatgtgtgancnggtttatangcatgagtgtgntacttctcaggcnagatgtgttaagannaccggggactgtaggcctatggtactaataaacacgtatttnatgaaatg

SEQ ID NO: 3662 - DNA, 152 bp, Zea mays
  misc_feature: Incyte ID No: 700380717H1
  unsure 6, 8, 19, 42, 82: a, t, c, g, or other
tagaananccctccataancctggagtgactatatggatgcnccccaccctaccacacattcgaagaacccgtatacataanatctagacaaaaaaggaaggaatcgaaccccccaaagctggtttcaagccaaccccatggcctccatgac

SEQ ID NO: 3663 - DNA, 300 bp, Zea mays
  misc_feature: Incyte ID No: 700380719H1
  unsure 4, 19-20, 31, 36: a, t, c, g, or other
taanacagagaaccctganncttcctaaggngctcnagggaacaatgaaatctttacgcatactgtcgggggttgagattgtggagggatcaacagctgcatcagacttcagttacttcactactctgaggaagctggcaatttataggatccaccacaatgaagatatattcaaaaatttgctgtcctcgatccagtacctcagtggttattcactccaaactcttttaatcgttgatgagtcatctgaattcttcaagaccctggagtcaatgtcgtcatcccatctaactgacctga

SEQ ID NO: 3664 - DNA, 299 bp, Zea mays
  misc_feature: Incyte ID No: 700380722H1
  unsure 22, 38, 60, 261, 269: a, t, c, g, or other
gtcatgccgagcttctattttncccaccccttattaanttattcccatgacttgcgagtntagaggcaactaagaatgagaggcgcagttttgaactgtggaaatagttttcgtccatcggttttgcaccatgaaaatctaaggccctcactcctatgctccataatagccatgtttatgattgagcaagccatatccacaactatcttgctacctttctcatagatagtttgtgcaacccatcatcccaaattaccaaanatattgantaacaaaattcaatcaagaaaaaactttac

SEQ ID NO: 3665 - DNA, 294 bp, Zea mays
  misc_feature: Incyte ID No: 700380725H1
gattaacttcatcaaagtgttgacagaacacgaggatgcattcgacgtgctgtactgcatagcgttcgagatgatggacgcccagtggctagcaatgcgagcctcgtacatgcagttcaaagaggtgctggaggccacaaggcagcagctcgagagggagctctccctggaggatctcaatagcatccatgacctccctgcctgcaaccttttgtacaaatagtactaatggtagttagattactgtgatacagtcaaaaggaaatttgtatgatgatcaggttgcatgtaaca

SEQ ID NO: 3666 - DNA, 228 bp, Zea mays
  misc_feature: Incyte ID No: 700380728H1
  unsure 75, 78-79, 91: a, t, c, g, or other
acactgatgaaaacagtggagctgggccgtcggtacttcccgaactgctcgcaggtgctggacaagttcctggangannatctgccggaangtctggaccagttctacctccagaggggcacagccgatcggtcagaaggtgaagaggatgcgcttctgcgagctgaaagaggacgtgctgaaggcgtttagcaaggacaaggcggagggcagcgtgttctcgggcct

SEQ ID NO: 3667 - DNA, 299 bp, Zea mays
  misc_feature: Incyte ID No: 700380731H1
  unsure 127: a, t, c, g, or other
agccaatcacacggaaaaagaccctaacctaccacaaacttatcttccaaccaatccatgcgctgttgctagacatctcggtgtttttgtagattgaggatgaatcgaagatccgatcgacacaacncggaagcgcggtgacgaagctctcgccgagccagtcacggtgatgttctgggttgcaccagaagatgaacgaaccatgagaaattcctcgttggagttgtcgttagagttgggaagagagtcgtacttcgacgagatggtcatggcggcttatggctacaacttatctggca

SEQ ID NO: 3668 - DNA, 177 bp, Zea mays
  misc_feature: Incyte ID No: 700380732H1
  unsure 138, 160, 162, 170-171: a, t, c, g, or other
ggttgaatgtctccagcactatgcatccctattttctatttattgtgtacactcactttcagtaatgtgtttcaaactggtgttttttaaaaaacaaatcaatgtaaggactgaagtgaagtagcaatgtaataaagntaatttgttatttttttgtaananaaaaggtnnggggac

SEQ ID NO: 3669 - DNA, 280 bp, Zea mays
  misc_feature: Incyte ID No: 700380733H1
  unsure 26, 47, 101, 124, 149, 197, 205, 210, 213, 215, 245, 257, 263, 266, 275: a, t, c, g, or other
ggcaaatatacacaggcagaaggaanaaattattaatgcgatgaganaccacaagaagacacgagaagagatacaaagacgtgttgatatcaaaaagcgantactgaaggacatatccagagangacgatgtagaatccagcacgaganagcttgttaatcaggttgctaacataaatgatgagaggtttcatgcantgataaancttanggntntgcttactgaagctgttgctctcaaatggngtcacacagaanagtatntgnctttttggntcgat

SEQ ID NO: 3670 - DNA, 298 bp, Zea mays
  misc_feature: Incyte ID No: 700380734H1
  unsure 2, 4, 6, 24, 45-46, 91: a, t, c, g, or other
cncnanctggtccacctgcctgangagttgttaaggcttccggcnngtggaccagtttggggcacttgcaaagcgtcagcaccctgagacntatcatggatccacactggtccacctgccacaagagttgttaaggcttccgaaactacgcagtctggctcttatcgcaatgcctctgggttgctaccagaaaggtgaggttcctcagggggtgaagatttcagagtcagatgatgagaaagttttccagcatcttcctatttggcggtggtccacctgtctgccccgcccgcatttg

SEQ ID NO: 3671 - DNA, 293 bp, Zea mays
  misc_feature: Incyte ID No: 700380744H1
  unsure 2, 7-8, 16-17, 27-28, 37, 42, 44, 47, 50, 54, 58, 67-68, 74, 79, 82,: a, t, c, g, or other
anggaannggcagacnntaccagcagnncctactaancaacngnaanatntccncccncaaacaatnncatagntatgnccnanntcaaattcaaaaccnctcacaatgccacacnacanacnaaatanagcatggtttgatgttgctgatctttctgaggatgctcctgatgacattgagggaatcgatgcctcagcagcacatgttgcgaatttgtngtcaactgaacctgctgacatcaaacttggtgtnagcggnnctagtatgggtgctgctactgctctgtactctg

SEQ ID NO: 3672 - DNA, 293 bp, Zea mays
  misc_feature: Incyte ID No: 700380745H1
  unsure 64, 67, 94, 143, 238, 252, 278: a, t, c, g, or other
agaatagatgctgttgatgcaagcactgtgaagcgtgttgcaaaccgcttcatcttggatcggnccnatcgcagcaatagcaacatcctgatcnaaacatgaagctattgctgcgatgggaccgatccaaggacttccagacnacaactggttcagacgccggaactacatgctccgttactaagatcaatctgccggtgtaccatgtttacggtgtgcaaggacaaagataaaattngcctctttcggcgnccagtatatcaaggctcagcactganatcgcttgctgcgac

SEQ ID NO: 3673 - DNA, 288 bp, Zea mays
  misc_feature: Incyte ID No: 700380746H1
agaggatggtgctgatgagggcaaagatgccccgaaaggtgatgcaggcgagggacagtaatcttcggagggggtgcaaagttgttcgagccccaatgttttagatgctctatgctgtcgaagctgtgctgtgccattattgtagctgatttcgtctccattcacttcttttttcttgttagtaggctggtagtggtcgaattaatttgctttgtgttgccgctagtccatgtggactggtattgttcccctggatttatttggcaagcgtgtccgtgctcgctctag

SEQ ID NO: 3674 - DNA, 286 bp, Zea mays
  misc_feature: Incyte ID No: 700380747H1
  unsure 14, 19, 22, 28, 44, 82, 91, 101, 126, 141, 147, 151-152, 154-155, 181,: a, t, c, g, or other
ccggtctcctccgnccgtngcnttcgtnccctccatctccggcngcgtcgccggcgagcccgacaccgcgaatcggatccgncgacaaggngagagggaanagatggggcttacgttcaccaagcngttcagccggctgtncgccangaannanntgcggatcctgatggtgggactcgangncgccggaaagnccaccatccnctacaagctgaanctangcgatatngtcaccaattcctncnatngntttcatttgaagctgtgggnanacatngtnttctgt

SEQ ID NO: 3675 - DNA, 176 bp, Zea mays
  misc_feature: Incyte ID No: 700380748H1
  unsure 2, 4, 6, 10, 16-17, 27-28, 32, 37, 42, 50-51, 75, 77, 96, 100, 104, 135: a, t, c, g, or other
cnantncatnagaaannggctcactcnnaagnggtgngagcnaccttaanntcaaccatcacgtgaataacgtcnantacatcggtaggattcttnagantgcncccatcgcgatcctggagaagcaagagctcncaagcatgacgctggttacaggaaggagtgcggactcgaaa

SEQ ID NO: 3676 - DNA, 309 bp, Zea mays
  misc_feature: Incyte ID No: 700380754H1
  unsure 15, 38, 42, 51, 86: a, t, c, g, or other
agagaagcttaaggntctccacttccacaacaacatancaangagatgaangtgctatgtatattgctgagatggttaagcgttcnccatgtgtagagagtttcaggtgctcagcaacaaggataggatctgatggtggagtcgcattgtctgaggcattagggacatgcactcgcctgaagaaacttgatctcagggacaacttgtttggtgttgatgcagggttagctctcagcaaaacccttccaaagcttcctgatcttgttgagctttatctcagtgatctcaatctagaaaacaagggtacta

SEQ ID NO: 3677 - DNA, 313 bp, Zea mays
  misc_feature: Incyte ID No: 700380759H1
  unsure 63, 68, 84, 106, 286: a, t, c, g, or other
attaaagaaaggcacactgcctaatgaagccagtaacagttctgttatatataaacttagaanaggcngaggagttcgatcagncacttgattttcttgctgaaangcagctggcaagtctaaaatcaagtgaaatctcctgtgatgcacttgtacacggcctttgtgccatgggaagaccttctgatgctagaaaggttttggaaatgctaaccaccttgggatctgcaccatcctatggcatgtttagagttgtttttgataactagtgcagaagtagcaatcnacagaaagctgcggcacttctgcatga

SEQ ID NO: 3678 - DNA, 317 bp, Zea mays
  misc_feature: Incyte ID No: 700380763H1
  unsure 187: a, t, c, g, or other
agagtggaacatgttgaccattctagaaagtctgcagagcaggctgtaaaggcgatcaagggcaaagagtccggtgaaccagttccggagtatgactacctgccatacttctactcccgatcattcgacctggcgtggcaattctacggcgacaacgtgggcgaaaccatcctgtttggcgacagtnaccccacctccagcaagcccaagttcggctcgtactggatcaaggacggcaaggtcttgggcgccttcctggagggcgggtcaccggacgagaacaaggcattgccaaggtggcgaaaacccagccgccg

SEQ ID NO: 3679 - DNA, 310 bp, Zea mays
  misc_feature: Incyte ID No: 700380765H1
  unsure 72, 79, 83, 112: a, t, c, g, or other
aggaatacgatacgccgctcgcctgaatcgagaccaccaccgctcccgctctgcctcacctcgccgactagngtttttncagnccgcggatctcgccgtccccgccatgganacgtcgggctcctccgcagccgccggcgacgccccgaccaccggggagcaccggatggggaccaccattgtcggggtctgctacgagggtggcgtcgtcctcggcgctgattccagaaccagcactggaatgtatgtagccaaccgtgcttcagacaagattacccaattgacagacaatgtgtacgtttgtcgtctg

SEQ ID NO: 3680 - DNA, 300 bp, Zea mays
  misc_feature: Incyte ID No: 700380772H1
  unsure 298-299: a, t, c, g, or other
aaagccttcatcgagtggatcgacacgcacacattttcaggacgctgatgatggaacccctttgcaacatcaaagttcaacagagcaatcaacacagttgtagttgcttcccagcatatcaaccaacaattgaattgaatctgtcaatctgttgtgtaacattagctaatatctgttcgaaacctgttgttaaattgtatcagtagtgtaacagttgctgagatttgttcaaaaactgctattttgcatttgtccgtgaatcagttttttgcatcattgttgaaaaaaaaaaaaaggnng

SEQ ID NO: 3681 - DNA, 304 bp, Zea mays
  misc_feature: Incyte ID No: 700380774H1
  unsure 31, 33, 99, 117, 151, 257, 276: a, t, c, g, or other
atccggagcagccgcagtcccaccgaccccngngccggtcgccctccatctcctcgccgctgcctctcgtttctcttttcaataatcaagatgagccgnggtggtagtgccggtggnggtcaaagttctctgggttatctctttggaagcngtgagccccccaaaccagcagtggcaccagctgcaagtgctccacctgttgagaaaccatctgctgcaaagactgatgcggccaagcaggttgctgctggggtacnagccaaaccaataactacnacagggctgatggtcagaacactggcaa

SEQ ID NO: 3682 - DNA, 308 bp, Zea mays
  misc_feature: Incyte ID No: 700380778H1
  unsure 154: a, t, c, g, or other
gaaaaaaatatccctcctaggaattggtgaggcatgaaaaacttttttcacaggaacgaggaccaacggaaaagtttccgtttccctgctcgagccgctcccccgtcctcttccttcctctcgagtagcctcgcaaaaccctaaccctagctgnggacgccgtcgccgcctccgcgcccaaccgatgtctgattctgaggcgtccccaccgcccactccggccgccgcaacgcccgcagcgccggtggagacctccccgtcctcggcgaggaaggaagaactgctgcctgtggaggaaaagattcgga

SEQ ID NO: 3683 - DNA, 305 bp, Zea mays
  misc_feature: Incyte ID No: 700380779H1
gccaatccgaaatctcgagctttcgcgccggcgaccacagcaaagaggaggccacagcacgacagcgccccagggttcctactctcgtcgcagcggcagcagtgaggggaagatgtcgtcggtgttcagcggcgatgagaccgcccccttcttcggcttccttggcgccgccgccgctctcgttttctcatgcatgggggcggcgtacgggacggccaagagtggcgtcggcgtggcgtccatgggtgtcatgcgcccagagtcgtcatgaagtccatcgtgcccgtggtatgctggtgtctcgt

SEQ ID NO: 3684 - DNA, 314 bp, Zea mays
  misc_feature: Incyte ID No: 700380780H1
  unsure 2, 116, 233: a, t, c, g, or other
angggaatgtaattcccagcattaaagctctaaccttctataaatccagtacatttgaagttgatgttttgtatgtggacacatgcgactcgcaaattccacagaagataagcacntacacaattggacctttccaaccctccaaaggtgagagggccaaactgaaagttaaagtgcgtctcaacatccacgggattgtcacagttgattcagctatgatgctggaggagganaaagcagttccagtctcatctgctaatgaagctccaaaggatactacaaagatggacacagatgatgcaccaagtgatcct

SEQ ID NO: 3685 - DNA, 295 bp, Zea mays
  misc_feature: Incyte ID No: 700380786H1
  unsure 6, 17, 97, 109, 190, 265, 284: a, t, c, g, or other
cttggngtccgcctcancccgccgccaggagaaccggctcggtcggttcgtcgaagatcccggatctgctctatcacgaggtctttcggcggatatngtctcgcgaggngtagcgagccaaggtctggtcgcctgttcaggagagtttcgagaagctgaaatggctcctaaagctgctcctgccaagaanggtgatgccaagacccaggccttgaaggttgccaaggctgtgaagtctgggtcagtaaagaagaccaagaagatncgcacgtccgtgacatttnaccgcccaaga

SEQ ID NO: 3686 - DNA, 295 bp, Zea mays
  misc_feature: Incyte ID No: 700380789H1
  unsure 6, 22, 60, 62, 66, 87, 91, 108-109, 125, 133, 169, 174, 232, 283: a, t, c, g, or other
gcagtngtacactgttcgtgcnagcggtaccattgccttagattggttactagcttctgnancttngaagatggagatattggcacntctnacggaaccatttctaannatgattcaacaccccntcttgttntgatacctggattaactagtgattctagtggctgcntatgngaagcacttggtcttttctatggcaatcaaaggatggaatgttgttgtaagcaaccanaggatcttggtggcatctccacaacatctgattgctttacaatgccggtangatggcagatat

SEQ ID NO: 3687 - DNA, 210 bp, Zea mays
  misc_feature: Incyte ID No: 700380791H1
  unsure 4, 6, 9, 67, 76, 90, 100, 130, 169, 171, 196, 198, 203, 206: a, t, c, g, or other
cagnangantaacagcaaacattacagcaggccatctattaatgcatctaatcggaggagctacccnagtacttanagacatcagcccancaaccgctanaattacatttattattctacttctacttanagtacttgaatttgccgtagccttaattcaagcctatgnantcacccttctagtaagcctgtaccnanatganaanacat

SEQ ID NO: 3688 - DNA, 299 bp, Zea mays
  misc_feature: Incyte ID No: 700380794H1
  unsure 67, 229, 234, 292: a, t, c, g, or other
agctggcccaaaaccgccacgccagccagaacccaactcaaggggttcgaagatgccacctccgaangatgaggatgacagcggaggcgaggaagaggaggaagaggaagatcacgaaaacacgctgtgtggttcttgtggtgacaactacggacaggatgagttctggatatgctgtgatgcgtgcgagacttggttccatggcaagtgtgtcaagatcactcctgcnaaggncgaacacatcaagcactacaagtgtccgaactgcagcgtagtggcaagagagccgaanatgatgt

SEQ ID NO: 3689 - DNA, 297 bp, Zea mays
  misc_feature: Incyte ID No: 700380795H1
  unsure 9, 205, 223: a, t, c, g, or other
atgattgtnacctctgcattaatcatatggaagggtttgatagttttcacggggagcgagtcaccagttgtagtggtgctctcgggtagcatggagcctggatttaaaaggggtgatatcctgtttttgcatatgagcaaagatcctattcgcacaggagaaatagttgttttcaatatcgatggtcgtgagattccaattgtcnaccgagtgattaaggtcnatgaacgtcaggacactgcagaagtggacatcctcaccaaaggtgacaataattttggggatgaccgactattt

SEQ ID NO: 3690 - DNA, 102 bp, Zea mays
  misc_feature: Incyte ID No: 700282401H2
  unsure 44, 90: a, t, c, g, or other
gacatcgtgccaacacctgtaaaggttgagcttatacgaagatnggccacatccggattacctgttgtggaggcaacgagttttgtatcncccaaaatgggg

SEQ ID NO: 3691 - DNA, 315 bp, Zea mays
  misc_feature: Incyte ID No: 700282404H2
  unsure 300: a, t, c, g, or other
atggttgctggtggtctggccgctggtcaaacgccatatgcaattagtgccgttgtaactgggttggctcggttgacttatgaattctcagagcttatcggagtcgcatacaagctccttcctcagactttcttgcttatgcaaaggaacaaccgggaaatagtcaaagcgaacttaggttttgtcaaagctttagttgctaaatctaaagctgacatattgcatgaacacttgactggagttgttgagggcctgctgagctggcaaagtgatacaaagaatcctttaaagctaaggtcnagtcactcatagaaa

SEQ ID NO: 3692 - DNA, 209 bp, Zea mays
  misc_feature: Incyte ID No: 700282405H2
  unsure 6-7, 29, 31-32, 42, 49, 69, 74, 89, 102, 124, 138, 165, 173, 185-186,: a, t, c, g, or other
aaaacnncaagcatagatcagtggatacnannccatcatccngcttggncccggccggctggtagatcntcgtncccggagtcgtcganggaataacgaacnggcgcagaggaggccaataatngccaccatgaagcngggttccaagccggagattttcgtccnccaagacntcacatggaganncacgancganctcgagagnnatg

SEQ ID NO: 3693 - DNA, 184 bp, Zea mays
  misc_feature: Incyte ID No: 700282406H2
  unsure 10, 27-28, 33, 36, 78-79, 88, 105, 108, 111, 138, 180-181: a, t, c, g, or other
ccgctttagntcagtttttttgttttnngggtnggntcgatcatttggctgtagcgtgaatcgcatggacaacagacnnccaattacnaagcaaatattttttcntcntcngcatatatttgaagaatcttgttcacncccccctttcgaaatgaaatgcgggaatttttttttcttgtnncca

SEQ ID NO: 3694 - DNA, 185 bp, Zea mays
  misc_feature: Incyte ID No: 700282408H2
  unsure 5, 27-28, 33, 36, 78, 84, 108, 137, 176, 179: a, t, c, g, or other
ccgcnttagctcagtttttttgttttnngggtnggntcgatcatttggctgtagcgtgaatcgcatggacaacagacnccaatncactaagcaaatattttttcctcntcagcatatatttgaagaatcttgttcangccccctttcgaaatgaaatgccgggaacttttttttcntgnacccaa

SEQ ID NO: 3695 - DNA, 180 bp, Zea mays
  misc_feature: Incyte ID No: 700282409H2
  unsure 27-28, 33, 78, 88, 111, 138, 159: a, t, c, g, or other
ccgctttagttcagtttttttgttttnngggtnggttcgatcatttggctgtagcgtgaatcgcatggacaacagacncccaattacnaagcaaatattttttcttcttcngcatatatttgaagaatcttgttcacncccccctttcgaaatgaaatncgggaatttttttttcttgtt

SEQ ID NO: 3696 - DNA, 180 bp, Zea mays
  misc_feature: Incyte ID No: 700282410H2
  unsure 10, 27-28, 33, 36, 78, 85, 88, 105, 108, 111, 138, 157, 179-180: a, t, c, g, or other
ccgctttagntcagtttttttgttttnngggtnggntcgatcatttggctgtagcgtgaatcgcatggacaacagacncccaatnacnaagcaaatattttttcntcntcngcatatatttgaagaatcttgttcacnccccctttcgaaatgaaangcgggaatttttttttcttgtnn

SEQ ID NO: 3697 - DNA, 187 bp, Zea mays
  misc_feature: Incyte ID No: 700282413H2
  unsure 7, 26-27, 40, 46, 61-62, 64, 67, 79, 119, 128, 148, 184, 186: a, t, c, g, or other
gcgatcnctcggagcagagagagacnncctcgcctccatncccatncccgccgccgccgtnncnacngtcgctaataanccgccgcatccagggatggagatgaagaagatcgcctgcnccgtcctcntcgccgcctcggccaccgtngcgctggccgcggaggcgccggctccgtcccccacnanc

SEQ ID NO: 3698 - DNA, 184 bp, Zea mays
  misc_feature: Incyte ID No: 700282414H2
  unsure 122: a, t, c, g, or other
atcaaagagcacggtgggcgatgacttctcctttacgctcaaggagggcccgactggcacctggacgctcgacaccaaggccccgctcaagtaccccctttgcatccgctttgctgtcaagnccggcggctaccgcatcgccgacgacgtcatccctgccgatttcaaggccgacaccacctat

SEQ ID NO: 3699 - DNA, 311 bp, Zea mays
  misc_feature: Incyte ID No: 700282415H2
aaaatacaggaggtgttgttcaagagagagtaccaaattctcaaggagctcagtctgagaatgatcctaacaataccactatatttgttggtgggcttgaccccaatgtcactgaagataccctaaaacaagttttttctccttacggtgaagtcgtccatgttaagatccctgttgggaagagatgtggttttgttcagttcgttaccagaccttctgctgaacaagcgctgctaatgctgcaagggccttgattggtgcacagaatgttcgactttcaggggtagaagcctgtcgaacaagcaggctca

SEQ ID NO: 3700 - DNA, 108 bp, Zea mays
  misc_feature: Incyte ID No: 700282417H2
  unsure 7, 20, 22, 33, 38, 41, 65, 67-68, 85, 87, 94: a, t, c, g, or other
gatcgtngcgtcgaggtacncnactcatgcacncagcnacncacgtactatttgctcatcaagcnannaaggattcttggttacncnagctcgncggtttcttggttg

SEQ ID NO: 3701 - DNA, 283 bp, Zea mays
  misc_feature: Incyte ID No: 700282419H2
  unsure 67, 262, 279: a, t, c, g, or other
agcacgtatacagggacagggaagaaggacatgcatgcgtcgccatagctcagactcagtgcgcgancacaacgaacgtgcacacgcgccagacgtctcactgacagttgcggcccacaccatgactttcacctggacgcctagtcagccaagacctgacccatcctggccatccaaccaatccggtcaacgggagaacatgtacgaggcgatgtcgccgcgccgggcgctcctcgccatcctcctcgccgtcgccctcgcntccgcttcctcggcacnccag

SEQ ID NO: 3702 - DNA, 312 bp, Zea mays
  misc_feature: Incyte ID No: 700282420H2
  unsure 34, 55, 58, 61, 87, 137: a, t, c, g, or other
catggggacacttatcatttgattctcaagaacngcaatcaattcacagcagatntcngcnagcgtttgaccgggaagccagtaccnggatgggtgaatcgactcgccagattaggttccttcttcaattgtgtatngcctgacagtatcaaggtttcagcagtcagagatgtaaatgcacatccagatttttctgatgatggcttggggtccaatgcctcgatccttgagggaagtgatgacgatgatttagaccaactcctaagaacacctaacagcgacactgtgtcttcaagggacaagacactcctg

SEQ ID NO: 3703 - DNA, 312 bp, Zea mays
  misc_feature: Incyte ID No: 700282421H2
gtggaaaatttacgagaccagctgcagaaggagagaaatttgagggcttcattggagtctgggttaatgaatatgcgaagaggacaagtgtccttcccatcaacgatagacaccaagactaaagctgatcttgaggaagttgctgctgctgaagctgatattatgaacttgaagcaaaaggtttctgatcttcgggggcaactcaactaccaagtccagttgagttccacctcgttatgtgaatcatgcaacaagcgggcaataaatgcagacaagcttgtcgaaggtgaacaaaatgctggcctttctcca

SEQ ID NO: 3704 - DNA, 310 bp, Zea mays
  misc_feature: Incyte ID No: 700282423H2
  unsure 42: a, t, c, g, or other
ctggcttcaagcctccgatccgcccaaggcatcataaatgangaatatgggggcacattgtatgatggattcctggagtgctaaatgctactccggggttgtcccaaatcatttatagcttggcaggagtagcaacaggcatctattcttcactgtcagggtaaattaccttcggcagtctccactttatataccacatgcttcttcaagcacagtgagcatttcctaattcctattataccgcttaacaataatctcgaaggagaagtgcaatttctttgtcttccttcgtaccagacaacccttcata

SEQ ID NO: 3705 - DNA, 313 bp, Zea mays
  misc_feature: Incyte ID No: 700282424H2
  unsure 7, 148-174, 289, 307: a, t, c, g, or other
gggctcnccaaagatagcatagcagcagcactcacaatagcaaaaaccaccatccgtcgtcgccaaccgtagcaagaacatccaccaccgcccagcaataatggcgcagagcatgaggattgtggcgctggccctggtggccctgctnnnnnnnnnnnnnnnnnnnnnnnnnnncaccgcgtacggctgctacgacgactgctacgagcgctgcgccaacggcaagaaagaccccgcctgcaccaagatgtgcaaccaggcgtgcggtccacggatcagggcgccggtnccgccggcgccgcgccgntttgat

SEQ ID NO: 3706 - DNA, 307 bp, Zea mays
  misc_feature: Incyte ID No: 700282425H2
  unsure 63, 174, 279: a, t, c, g, or other
caccacattccgtattacaatggttaaagtttttatatttgcttgattctctttttttatatnctaattgacttttttctcttctatattatccacttgtgtgggttggttatagcttgtgatttcacatttcatttgttagcggccaagatgtatttctgttagtttatgacnaccactcaggaacttatgtgtccatcatttgagtagaataaaataggtgaacttactggtattatttcatgtgttctccctgcttccatttgaaaactataaatnacctgatgattgtaattcactaggattt

SEQ ID NO: 3707 - DNA, 180 bp, Zea mays
  misc_feature: Incyte ID No: 700282426H2
  unsure 8, 30, 36-37, 50, 81, 92: a, t, c, g, or other
ggcacacnggatgcaaagtttaaggaagcntcagannctgataagaaagnccaagaattggaaaaggaaatccaggattcncagagagaagnccgagttttatcgcaccaagatgcaggagcttattctttacaaaagtaggtgtgagaacaggcttaatgaagtctcagaaagtatgtc

SEQ ID NO: 3708 - DNA, 310 bp, Zea mays
  misc_feature: Incyte ID No: 700282427H2
  unsure 38, 77, 162, 178, 196, 202, 273: a, t, c, g, or other
gcgtgacacctgacgagctgagcaggcaggcggtagtngccgagcgaaagcatcctcgatctcgtcgtatcgtagcngccgccgctcagagcaatggagagagcggtgccagttcggaagtcgcacaccaacacggccgaccttctctcctggtcggccacnggccctgacgcatctncctcgccggccgcgtccncccgcnccagcctcaagccggccgcggggattacaccggcgatgttcggcgcgccggtcaccgagcaggaggccgangatctgagcaagagtgaaaggaaattttgctctggct

SEQ ID NO: 3709 - DNA, 219 bp, Zea mays
  misc_feature: Incyte ID No: 700282428H2
  unsure 9, 23, 78, 82, 88, 109, 118, 120, 135, 140, 169, 172, 195, 215, 218: a, t, c, g, or other
agggttatngcttatgagaaacntctctagtatgtcaagcatcctgacagaataactgaaaagaagaatcttgtcacnctgncccagncccataatgacagaagccttnctagttatncngtcaggatgcttganatacnagagaagtttctcataaggaagggttatngcntttcacgcttcgatggaacaacnccgatgaatgcacgccaatnacnc

SEQ ID NO: 3710 - DNA, 144 bp, Zea mays
  misc_feature: Incyte ID No: 700282429H2
  unsure 28: a, t, c, g, or other
ggattaataaagggcacttattccaganaacaaagttacatctcggtactaggactaacacagaaatgtaactttgttctctggaataagtggattaataaagggcactttcgtttgtgtgtcgtcctgagctgccttgtccgt

SEQ ID NO: 3711 - DNA, 308 bp, Zea mays
  misc_feature: Incyte ID No: 700282431H2
  unsure 29, 46, 77-78, 80, 90, 99-100, 107, 119, 147, 159-160, 173, 183, 241,: a, t, c, g, or other
gcgctctgggccacgctgtgccagccacngctgcagactctcgtgnccctacttcgtcgtgggcctagtcatcttcnncnccctcccgtngcctcctcnncaccatngccgccggcgtnccgctctactggactctgcccatcttcngggccacgtcanncgtcgccgcgatnggtgcctgtnccgcatcgaagtgggccctggttggcaggcgggccgacggtgacacggtgcacatctnggcgccgcncgtgttcctggacacngtctggcagnncgtgcgcacngctaccgaggagtattctcgg

SEQ ID NO: 3712 - DNA, 250 bp, Zea mays
  misc_feature: Incyte ID No: 700282433H2
attctgccttcgacattgcttcgatgtacctgaaggttttgtggccgatgaaaatgatagttcttgtgcaaaagaatcacacaaaaatgggacttcagattcagatttggattggaacttgactcctaaggagaaagctcgaaagtgctaacaaggagtctgaaaatcttgaaagagagatgtcgtcattggaaaggcaaagtatgcacaaaagaaaacttgattcttcatctctgagatacaaaagttg

SEQ ID NO: 3713 - DNA, 190 bp, Zea mays
  misc_feature: Incyte ID No: 700282435H1
  unsure 5, 16, 23, 34, 36, 49, 57, 94, 154, 185: a, t, c, g, or other
taacnaacgaactgangtcgacnacgactgatcnancagcgacgattcncggctgtnctgaacagcaggaagactcccgcaggtggttgcagtnctggttgcggcggcgctgctggcgtcgtccgcttcggcggcgatcacctgcgggcaggtngggtcgtcgctggctccgtgcatcccgtacncgacg

SEQ ID NO: 3714 - DNA, 247 bp, Zea mays
  misc_feature: Incyte ID No: 700282436H2
  unsure 16, 110, 155, 219, 236: a, t, c, g, or other
gccgcaacgaagggangccggggccgccactgttgacacggggtcatgtcgccgttccaacctagggtggttcctaggagcttcgcagggcttcggcagacgtgcttgtngcgatgccgggcagattcgaggtcggagatcccgggaattgcacnccgacgttgtcctccgacgtgcgtacgtacctcatcgaggctagccctagccaccgcttgaacnccgtggacgagcaagtnatcgaggagcc

SEQ ID NO: 3715 - DNA, 300 bp, Zea mays
  misc_feature: Incyte ID No: 700282438H2
gcaagcagcacacgagacgatatagagggagggatcatggctctcttccgtgccgccgcgtcaggagggttcgcgctgatccttctcgcgtgctgcagcctcataatgctggcggcggcgtctggcggcggcggcgtggacgacgacggcgtcggtggtgacaggctgatgatggaccggttcctcagctggcaggcgacgtacaaccggtcgtacccgacggcggaggagaggcagcgtcggttccaggtataccgccgcaacattgagcacatcgaggccaccaaccgggcgggcaac

SEQ ID NO: 3716 - DNA, 265 bp, Zea mays
  misc_feature: Incyte ID No: 700282439H2
  unsure 19, 47-48, 50, 65, 84, 101, 114, 151, 153: a, t, c, g, or other
gcctgagcgagcatccacncgccagcatggcaagcagcgtcttatcnngnccggcgccatccacngggtttcttcttttaatcngggactttgttgctgtnggacgaatgaatncccttcgatcggttagctttaatctgtctcgttagtntntcgtgttcgtgtagcaccatgccacacaccagccgtgtgctctgtcacgtgggggccactcgtggggtctcctgctgctgtcagaacgaataagagaagatggaatgtgatg

SEQ ID NO: 3717 - DNA, 305 bp, Zea mays
  misc_feature: Incyte ID No: 700282440H2
  unsure 56, 78, 179, 218: a, t, c, g, or other
aagaaacccacggttcttggcgaacccaagtggcgagccaagcagccatgtgaggngtgttgcacccggcaacacatncgtcctcagcaatgccgtcaaggcagccttcggagaggctgacctactctgggcagtcgatattcttcggtggccccatgctgaacacccctagcctgggngcccagaggaacgaggcaggcgcaagagcgcgtccgganggaagcagagatcctaatgcccagcagcgtgacatccggggtgagaaagcgaggacaggctccttgccagtatttgctcctgggacg

SEQ ID NO: 3718 - DNA, 236 bp, Zea mays
  misc_feature: Incyte ID No: 700282441H2
  unsure 13, 45, 90, 148, 180, 217, 234: a, t, c, g, or other
ggcatggaaaggngcgttgtcttgtaaacagacatggttacaagngcatacatgtgcagaactaatcaacatcgttttgcgattgtagtnctgaagaactaatcagagttgtcgtgcataaatgaaaacggctgtcttctgtctaacngggtatgagcagacaagcatatggcatattancatgcctacgaacaaatgaatatacttatagtttacngagaggagatgcgtacnga

SEQ ID NO: 3719 - DNA, 304 bp, Zea mays
  misc_feature: Incyte ID No: 700282442H2
  unsure 69: a, t, c, g, or other
taaaattccccattccaactcacacagatctcgtacccggcagtgcgcgacgaatctcgcggggcggangtggtggcgcgactgaggcggtgtcgactccgacgaactcgcagccaccgggggatacgcagcagcagcaccggcgtactccatcgacgttcatatttaaggacttggtttggataattctactcgtcaacaaaagtgattaaaaatggtggttcttgcagcttcaatcgtttcaaagtcgggaaaagcacttgtttcaagacagtttgttgacatgtctcgcataagaattgaa

SEQ ID NO: 3720 - DNA, 304 bp, Zea mays
  misc_feature: Incyte ID No: 700282445H2
  unsure 225: a, t, c, g, or other
gcagctcacgtggaggtagagggctctgaggtgacctacgggagtgtgattaagctgttgcacgagaagacaaagcaccgtctgcactcacatgatgtgccgtacggctcaggcagcggtcagcagtctgtcaccggctttcctgaaggcgatgactcaaatagctactggatcataaagcctactccagattcatcgtctaagcaaggtgattccattgaaacnggtggcatcatcaagttgcaacacatgaagactcggaggtggttgcacagtcacctgcacgcttcaccgttatctggta

SEQ ID NO: 3721 - DNA, 99 bp, Zea mays
  misc_feature: Incyte ID No: 700282448H2
  unsure 19, 21, 37, 49, 54, 64, 66, 74, 83: a, t, c, g, or other
attcggatccacctgtatncntctccgttcgttcacnccacaggcaagncacangggctgtgangnagagcgangagcggagnaggacatggtgcacgg

SEQ ID NO: 3722 - DNA, 101 bp, Zea mays
  misc_feature: Incyte ID No: 700282452H1
  unsure 4, 6, 12, 17, 27, 41, 54, 60, 67, 88, 90: a, t, c, g, or other
caancncgcacnacacnacaccaagtngaggagctcgaganggcaccaataatngccggngtgaacncccagcgtcgtcgggctcaancngcagcggcagt

SEQ ID NO: 3723 - DNA, 188 bp, Zea mays
  misc_feature: Incyte ID No: 700282454H2
  unsure 7, 39, 161, 169: a, t, c, g, or other
tgcaacngggaggtttgtaactcgctaagtgatgtgganaagcctgttgctgaggaaacgccggttcctgatgtcataaatgaagtgccaaataatgttgcagtggctccaccaatttcatcccctcctgtaccattgaaggaggcaccaaagaagtcatntgcttcanttgtaaaagtcatgaaaga

SEQ ID NO: 3724 - DNA, 323 bp, Zea mays
  misc_feature: Incyte ID No: 700282457H2
  unsure 78, 164, 172, 242: a, t, c, g, or other
gcggctcaagtccgtcgtgtcacgctacgccggcaaggtcatccactgggacgtggtgaacgagaacctgcacttcancttcttcgagacgaagctgggccccatggcgtcggcacagatctaccagcaggtggggcagctggaccgcaatgccatcctattcntgaacganttcaacacgctggagcagcccggcgatcccaaccctgtgcccgccaagtacgtggccaagatgaaccagntccgcggctacgccggcaacggtggcctcaagctcggcgtcggcctcgagagccattcagcacacccaacatcccgtacat

SEQ ID NO: 3725 - DNA, 324 bp, Zea mays
  misc_feature: Incyte ID No: 700282458H2
  unsure 74, 197: a, t, c, g, or other
accttttgttagatggcttcagcgggcgggaggtgcagctgctcatccaccacaggctcctgcttcgggccganaaccgtgctgctctgcctgcccagaatgatggcaatgagcagcccaatgaccctgcaaaccctgaccaagctgcagagaaccgtgaacaagatgctgcagctggtaacgagaatccacaagangcagaggtagaaggcaatcggcgtaattggctggaaggtgtcttgaaagagatccagctggttgttgtagggtttgttgcatcgttcttcctggttttcagcacaatgactaggcctcatcttgtca

SEQ ID NO: 3726 - DNA, 266 bp, Zea mays
  misc_feature: Incyte ID No: 700282461H2
  unsure 2, 6, 20, 25, 47, 54, 60, 82, 84, 90, 112, 121, 129, 140, 143-144, 161,: a, t, c, g, or other
angcanagcgttcaggatanacatngctgccacctttgccttcatcnctctccngctacnggtctgcgtccagagcgcggcncntgttcntcggcttcacaaggagcgagtnccctgaagntttcgtcntcggatccgcnacnncggcttatcagtatganggtgctgtnggtgaggatggtaggagcccaagcatctgggacaccttcactcacgcaggganaatnccggacaaaagcaatggtgatgtagccgccgacnggtac

SEQ ID NO: 3727 - DNA, 318 bp, Zea mays
  misc_feature: Incyte ID No: 700282462H2
  unsure 41, 110, 120, 141, 163, 187, 247, 261, 308, 315: a, t, c, g, or other
aatggcgatgaggtcgctagcgctactggtcctcctcagcntgctggttgttggtgtggcgcaggcggtggagttggagatggagttggtgcctgctgatgcaattgcgntgactatggntcgtgagccgccgcaggagtncgcgaccccggtgagcgtggangaggcgtgccgcagcgcgtcgganaccacgccggcgtggctacgaccactgcatggcgtcgtgggcgccgacccgcgcacaagnaggccggcaacaanaacatgcacgctctggcgtgtggccaccaggatggccatcgaccacnccgccancac

SEQ ID NO: 3728 - DNA, 126 bp, Zea mays
  misc_feature: Incyte ID No: 700282463H2
  unsure 23, 29, 61, 67, 76: a, t, c, g, or other
atgatgtaccaggatgccagtantatgantaccgctctcaggtatcttcaagaagcccttntgaagnatgagcganttcttgggcctgtccatgttcaaacagctgtgtgctatcatgctctagcc

SEQ ID NO: 3729 - DNA, 323 bp, Zea mays
  misc_feature: Incyte ID No: 700282464H1
  unsure 313: a, t, c, g, or other
catcgatctccccccagcggcgaggagagccggcggccacaggaaggagaaatggttccgcacacaacgctctccgggtgtttttcatcctagccgtggtatgtgccgtatgcacagcgaaaaggacaggagccaagaaggaagaatcggcggcagccctggtggtgctgctggaagcagcggcgggacgttcgacatctccaagctcggcgcgaccagcgacggcaagacggactgcacaaaggcagtccaggacgcgtggacgtcagcgtgcgaacgaccggaagcgccacgtggtgattcccaagggcgntaacctggtc

SEQ ID NO: 3730 - DNA, 320 bp, Zea mays
  misc_feature: Incyte ID No: 700282465H2
  unsure 16, 95, 150, 155, 231, 264: a, t, c, g, or other
gtcatcgggagccacntttccaccatctatcactatgggcttcgcaaaccttatgatgcgcaggtatgttgaggccactcgtgaattcaacaagnttcttctgtatatcctcaagtacaagcagtatcatcagaagtcccctcagtatgntcagntactgaagaaaaatgagcagatgtatgcactgttggtgatttgcctatctttgtgcccacagaacaagctcattgntgaaaatgttagcacccagctgaaagaaaagtntaacgacaagatgacaaagatgcagaggtatgatgatgaagcatacgctgcttatg

SEQ ID NO: 3731 - DNA, 237 bp, Zea mays
  misc_feature: Incyte ID No: 700282467H2
  unsure 21, 48, 56, 78, 141, 143, 145, 147, 158, 227: a, t, c, g, or other
cagtgtactccaaatgtgtgntccaacccttacacgtttgatgcaaantttgttcntttcttgtctttgacttgatcnggtagtaccaaggaaataagcacgggaaagatgcaagctttgtgtcgaacatgtgaaaaaaantntntntgtatgagcantttttgtctttttttttggggccagttgtagctgttactaccattaaacagtaagcaaaactgtttgcnttttatctgt

SEQ ID NO: 3732 - DNA, 319 bp, Zea mays
  misc_feature: Incyte ID No: 700282470H2
  unsure 5, 33, 64, 100, 103, 114, 210, 220, 245, 249, 280, 308, 314, 316: a, t, c, g, or other
ctcgntccatcgcctcgccgcagcacacacgangccggcggcgccatggccatgaagctggacntgtccgcgcttcgagaccaacttcgccaacctgacngcntccgcacggcnacgacacgtacttctccgccgaggcccccgacgtgccgtccatggtgctccccatctgcgacgacttcgacggcttccaggcggccaccaaggatntggtgaagantaagaaggggacgaccacgcttgcnttcntcttcgacaagggcgtcatcgtcgccgctgnttccagggccagcatgggcggttatatntcctcncnaac

SEQ ID NO: 3733 - DNA, 244 bp, Zea mays
  misc_feature: Incyte ID No: 700282471H2
  unsure 20, 25, 29, 81, 95, 101: a, t, c, g, or other
ataaatgaagtcacacatanttacnccantcttctcagtggaggtacatcagcaaccgaggtttataaaggaacgcttgangacaacacgatggnggcggngcatagattggtctacgagggctctgaggaggcgttcatcaacggagggatggtcgtgtccaagatcgcccacaggaacatcgtcagagttctgggctgctgtctggaaccccagaccaccgctttcctctacgagtacgtcg

SEQ ID NO: 3734 - DNA, 318 bp, Zea mays
  misc_feature: Incyte ID No: 700282472H2
  unsure 14, 24, 27, 48, 90, 158, 173, 214, 249, 251, 268, 283, 311: a, t, c, g, or other
atcaggaggacggnggtttcctcnccnccgttctagagaaccgaaccnccattctagatcccttcgcacaacgaaccttcccttgtcggngcgcatgagaacctgtgtgtccgagccctagacgcagagtttggtttgtcgccttggaggagctgacncgtccgtcaccaggngaccagggacggctgccctgtcatcttccatgacaacttcntctacacgcaacaagacggccaagtctcagcgaantngttaccgagctgaaccnggacgagttcctgtnctacgggccgcaaagagaccaggggaangccggca

SEQ ID NO: 3735 - DNA, 247 bp, Zea mays
  misc_feature: Incyte ID No: 700282473H2
  unsure 22, 84, 213: a, t, c, g, or other
attaacggcgcctgattccgantggttttatttccgcgcgtgtaattaacgtgtggcaggaatacagcctcacgtgaccatctntcactttcgaccttccccaggctctccaggatgaatacaacggcctgctcagtccgagaatcatcgaagacttcaccgcgtacgcagacgtgtgcttccggagcttcggcgacagggtgaagcactggntcacggtgaacgagcccaacatcgagcccatcgg

SEQ ID NO: 3736 - DNA, 317 bp, Zea mays
  misc_feature: Incyte ID No: 700282475H2
  unsure 40, 49, 120, 193, 234, 302: a, t, c, g, or other
ccgatatcatggcgagagcttgcaaccacgcgctgagacngctgcccanttccatcgccacgcagctgggcatgcagcggaagcagcaccagatgcagaaacctcagcgtccacgcgcantttccacccaagacgatgcttacacgaccgagccgccactgaagaaagcgcaagtcacacagagcctccggangacccgccggagggcacccggcggcgcgcggcagagcctgntctccgtcgggacgtcgtgcggcggaggtgatcagtggagcagcgacatcgcactgacgttgcggcantgcgactagacgact

SEQ ID NO: 3737 - DNA, 234 bp, Zea mays
  misc_feature: Incyte ID No: 700282477H2
  unsure 8, 15, 21, 29, 72, 81, 86, 88, 104, 113, 120, 126, 155, 176, 182, 201,: a, t, c, g, or other
attgaggngaacatngacaanctcgatcncgtgcttgtagagaaggacgattctgaaaatctttccagcccnagcagcacngcatncntctccatgcagcaacnaagagcagnggatatngttacncctgacaagattgcagacggaatgacagngcaagtagggattgttaaccngctacnggaaacacatggaggggcncaccgtcaaggggatgcaacgnggtcaccgcca

SEQ ID NO: 3738 - DNA, 231 bp, Zea mays
  misc_feature: Incyte ID No: 700282478H2
  unsure 2, 18, 71, 81, 88, 98, 113, 150, 152, 154, 186, 188, 190, 199, 207, 215: a, t, c, g, or other
anaaggtcatcgccaaanacgtcatcccgccgaactggagacccgatgccgtctacacttccaacgtccanttctactagnctttganttcccttcgnttcatccggcgcggngggctatggacctgcagcagcaagctaattaagtttntntntatgcatgagagagcatgcaccgctaaccatntntnctactgagncttctganttctagtntatgtaatcctttgtt

SEQ ID NO: 3739 - DNA, 230 bp, Zea mays
  misc_feature: Incyte ID No: 700282479H2
  unsure 2, 4, 33, 81, 94, 98, 102, 106, 126, 148, 157, 159, 171, 173, 179,: a, t, c, g, or other
ananacaccaagcgtcaaacttgccaagcagcnagcaaccaacccaagaaagctagacaccatacccatgggctcgcgtangtcgtcttcgtcnttgntacnctcntcttcgtcgccatggttgtngcaccgatggccgaggcaaagnccgctgatncncctccgccgacnancccggncccgnngctgacgcactgccgatggacctagcggaccggcgggtgcacngg

SEQ ID NO: 3740 - DNA, 119 bp, Zea mays
  misc_feature: Incyte ID No: 700282480H2
  unsure 20, 60, 77, 105: a, t, c, g, or other
gtgagttgattcctggaggncgtaacatcagggttactgaggagaacaagcatgaatatntcgaccgggtagcagancatcgttgaccactgccatcaggcctcngattaatgccttcc

SEQ ID NO: 3741 - DNA, 311 bp, Zea mays
  misc_feature: Incyte ID No: 700282481H2
  unsure 39: a, t, c, g, or other
gccttaccagttcagcaggcagagacatctgcggcaaanggggagcgcagaaaccaaaagcttgccagaacgggcatgttcatgaagccactgaatggcctggtgcacgggcactattcagcgactcgctgcaatggcgtcattcccatctagcaggctgttttcgcttgttctttttctttccgttctacctacctgcagggcaaccaggaagagaagggctgtttgctctagcgacacggcagccgtttccgatgttttaacgaggaagcaattggcatgcaaagctgtcgcgcgcataagaggcaaat

SEQ ID NO: 3742 - DNA, 308 bp, Zea mays
  misc_feature: Incyte ID No: 700282482H2
  unsure 2, 6, 12, 18, 45, 64, 100, 125, 150, 164, 172, 175, 188, 195, 202, 205,: a, t, c, g, or other
anaacntctacngggacnccgttggtacagttgctacctttatcngatggagagcggataaccncccatcattcctgtgagtgaatttggtgagaaccantatctagtgatgctcaccgttaatngctatatcaagaaagtaccccttantgccttttcatcantcagatcnacnggtatcatatcanttcaacnggttccnggngatgagcttaagtnggtccgtcatgtggcaatgatgaccnggttgcatggcttcacagaaaggaagggtaatagtcaactcatgtggnaagcttcgnnccntg

SEQ ID NO: 3743 - DNA, 308 bp, Zea mays
  misc_feature: Incyte ID No: 700282485H2
  unsure 34, 52, 127, 132, 145, 199, 208, 225, 265, 269, 284, 287, 290, 294, 296: a, t, c, g, or other
caggaagccggaagcaggaagcaggggctaaccnccgagcggcgaggatgangggcggcggcgggatgattgacgatgaagagcgggtgggccacgcggagatcccgaccagcttcggccccgagcngcgcncctgcctccgatnccgcctcgtcaagacctacgaccaggaacccttctccgctggcgccgctccccncccccctcntcactcctaggcctgcngtctaggttcaccagcctcccgttgaagggagggttcgangacngggggtttcgtttcnccnggngggncngttctcggcggc

SEQ ID NO: 3744 - DNA, 309 bp, Zea mays
  misc_feature: Incyte ID No: 700282486H2
  unsure 198, 206, 264-265, 289: a, t, c, g, or other
cgtcgacccaccctcgcgtgatgtcaccaccacccccgctgagctcgtcaccttcttccgcgacatgtccctcatgcgccgcatggagatcgcggccgactccctctacaaagccaagcttatccgtgggttctgccacctctacgacggccaggaggccgtcgccgtcggcatggaggccgccatcacccgctccgnttccatcntcaccgcctaccgcgaccactgtacctacctcgcccgcggaggggacctcgtctccgnnttctccgagctgatgggccgcgangtgggtgctcccgcgggaag

SEQ ID NO: 3745 - DNA, 290 bp, Zea mays
  misc_feature: Incyte ID No: 700282487H1
  unsure 24, 29, 35-36, 75-76, 78, 82, 89, 92, 112, 122, 131, 151, 163, 175, 190,: a, t, c, g, or other
ccgttattaagaagatgatacgcngcgcngcaacnngcggcgggtgcgtcgttcgtggagcggcgatcggagatnncnggcngtcaacnccngcagcgtgcggataccgacnggcaacgatnggtggtgcnccggcctgaagtcgcgggcngcggatctcgcnggcctcgagatngccaacctgcgcagnggcgtcgggnggtcttccgcgcgancccgcctacgggcgcttgcaagcnacggcggcattgacctgaagatattccattgangaagttcngttaatctca

SEQ ID NO: 3746 - DNA, 101 bp, Zea mays
  misc_feature: Incyte ID No: 700282493H2
  unsure 47, 49, 57, 67: a, t, c, g, or other
tcctcgtcaacgtgttcaacatgctcgaccagccgctcctcttcacntngcacgggntccagcagangaagaactcgtggcaggacggcatgccgggcaac

SEQ ID NO: 3747 - DNA, 83 bp, Zea mays
  misc_feature: Incyte ID No: 700282494H2
  unsure 5, 11, 52, 57-58, 63, 79: a, t, c, g, or other
caacnccaacnggacgacgaccacgacgaccaacgccgccgaagaccacgtntagcnnctaantggcgtgcagtgtgcntggt

SEQ ID NO: 3748 - DNA, 59 bp, Zea mays
  misc_feature: Incyte ID No: 700282496H2
  unsure 13, 17, 25, 35, 47, 52: a, t, c, g, or other
taggcgtcgagcncgcncgcggctngtggagtgtnggcaaacaaccncggcngccacgc

SEQ ID NO: 3749 - DNA, 331 bp, Zea mays
  misc_feature: Incyte ID No: 700282501H2
  unsure 21-22, 66: a, t, c, g, or other
gggcagcgtggcatgccaggnngctgctacgtcatgtgcctcacggacaacagctttcaagaaccncccccgtgggcgacctcgtcgacaagctcatcgccgagtggaagacgcaccgcgcgtccgccaccaccgatcacaatggggcggtggagctccacctgcccctaggcgactttaagttcaccgtaagccacccatctttgaaagccgctgctgttcaaaccatgaccgtcgacaattcggcgtcggcgtcccagcataccatcaacgtcaatcctaggagacgacatcaggcactctgtggcggatctttaattaatttttcttt

SEQ ID NO: 3750 - DNA, 159 bp, Zea mays
  misc_feature: Incyte ID No: 700282503H2
  unsure 10, 19, 61, 81, 104, 114, 139, 146: a, t, c, g, or other
ggaggtaccngctacgacnagctagattccacgcgcgatggcgcccaccaggatccgcgtngccttgctgagcttggcgcnggtggggctgctcatctgccacntcgccaccancgcctccgccggcaagaacagaatncgcatcntcgacagcgtcga

SEQ ID NO: 3751 - DNA, 157 bp, Zea mays
  misc_feature: Incyte ID No: 700282504H2
  unsure 18, 29, 34, 85, 102, 104, 120-121, 156: a, t, c, g, or other
ctaggtgtggtttcagtncattagcagtnaaggncctccagcaatatggtgtccccatcagtgctagagatattctttcagatcnaaagctcaaagagagtntnaaagcatacagtaacnngcctacgtttccacaaatatttatcaaaggagagnt

SEQ ID NO: 3752 - DNA, 319 bp, Zea mays
  misc_feature: Incyte ID No: 700282505H2
  unsure 2, 8, 28, 117, 133, 190, 195, 197, 237, 288, 304: a, t, c, g, or other
tnggaggnctgtcggtgcagaacgcacngaggaacaagaggctcttcatcctagaccaccatgaccatttcatgccgtacctcgacgagatcaacgagctggaggggaacttcatcnacgccagcaggacccnactgttcctgaaggacgatggcacgctgaagcccctggccatcgagctgagcctgcnccacncngacggccagcagcgcggccgcggtcagcaaggtgtacacnccggctcacaccggcgtcgacggccagtctggcagctcgccaaggcttatnctgcgtaaacgatctncctggcatcagctga

SEQ ID NO: 3753 - DNA, 320 bp, Zea mays
  misc_feature: Incyte ID No: 700282508H2
  unsure 6, 12, 33, 42, 45, 58-59, 128, 140, 157-158, 208, 218-219, 237, 285, 296: a, t, c, g, or other
cccggnccgacntccccgcggggttcgtcttcngcgtcggcnccncccgcgtaccagnnccgaaggtgcagttgcagaggacggaaggaagcctagcatctgggacacattcacacatgaaggctatncccttgacaacnccacaggcgatgtaacnncggatcagtatcataagtacaaggacgacgtaaagcttctgcatgagatnggtgtcgatnncctaccggatgtcgattncctggcctcgacttatcccagatggtcggggagccgtgaatccgaagngctggagtatnacaacaatctcatagatgagtcct

SEQ ID NO: 3754 - DNA, 238 bp, Zea mays
  misc_feature: Incyte ID No: 700282510H2
  unsure 2-3, 5, 14, 16, 44, 63, 101, 116, 119, 163, 189, 204: a, t, c, g, or other
cnncncctggatcncncctgcaaccttgcaaaacagggccttcnatgaggcgatctctgagcnagacagcctggggagaggagtcatacaaggacagcacntctgatcatgcagcnccngcgcgacaacttgaccctatggacttccgacaccaacgaggatngcggcgacgagatcaaggatgctgcngccccgaaagaatcngcggagggtcagtaagatggattcagtctcacga

SEQ ID NO: 3755 - DNA, 160 bp, Zea mays
  misc_feature: Incyte ID No: 700282511H2
  unsure 21, 157: a, t, c, g, or other
aagatgtgtgaagcggcaatnggatgcttgctgtaaggtaatatgtttggcttgctaggcatgctacacgctatttggatgtagcaacgttatcaccagctgtatacgctttttaatcgacaacatttgaataatatgtacataacattatgttgtnctc

SEQ ID NO: 3756 - DNA, 240 bp, Zea mays
  misc_feature: Incyte ID No: 700282512H2
  unsure 2, 8, 11, 14, 39, 46, 49, 56, 85, 98, 105, 118, 121, 124, 143, 172, 181,: a, t, c, g, or other
cnggaggntcnagnggtatggtagatatcaacatggtanccgcaanacngtttgtngtgattgcatcatgcttcttgataacacnctacaagctgatntcccatnggtttgtggagcntcnggnggttatcttttgcataggnggtgtggagggtctgcaaacatgcttggnggccttacngtcaatgtcaaggcggtttaaaccngctgcagaatcgtatgtnaaagtnccanntttgg

SEQ ID NO: 3757 - DNA, 318 bp, Zea mays
  misc_feature: Incyte ID No: 700282513H2
  unsure 2, 26, 46, 67, 73, 82, 133, 194, 200, 215, 234, 260, 300, 312, 316: a, t, c, g, or other
gngacacacaggattgtccgtcaatncaccatttaatgctaaaggncttcggcagacaagctttgcnggtgtngaggttatnccctcttctaccagaggaatccatggctgtggacatacctgaagaggaccnggagataagcttcacaagagctggaggtaaaggaggccagaacgtgaacaaggtggaaacngctgtncgcatggttcatatncccaactggaattgcagtncgttgctcagaggagaggagccagcnggccaacaaaataaaggccctcagccggctcaaagcgaantgctggtgatcncccngg

SEQ ID NO: 3758 - DNA, 231 bp, Zea mays
  misc_feature: Incyte ID No: 700282514H2
  unsure 4-5, 22, 36, 51, 89, 133, 200, 215: a, t, c, g, or other
atcnngggttctggatgcaccnccagaaatttcacntccccaacctgaggnggtggtggcaacaacagtaattcacacagccgaacaancacatggaggatgtgttgcctccagcaattgaggatggtgcacnacaagcaaccctcgaacatgctgttggcataccggaagttacacccgctgatgtcttgctggatgtngcaccttctgctgtnggagaatcaggtgatg

SEQ ID NO: 3759 - DNA, 230 bp, Zea mays
  misc_feature: Incyte ID No: 700282516H2
  unsure 10, 17, 49, 57, 62, 68, 91, 122, 131, 135, 215: a, t, c, g, or other
ctcccgaacnccgaacnacaagtttcgcttcttcgtcgcgacgactggncgagaccnccgcngccgcngccgcctgagttctttagaaatngctgatggtgaggacatccagcctcttgtcngcgacaatngcanggaatggtcaaggctggttttgctggcgacgatgcaccaagggctgttttcctagtattgttggccgtcctcgccacacnggtgttatggtaggg

SEQ ID NO: 3760 - DNA, 235 bp, Zea mays
  misc_feature: Incyte ID No: 700282517H2
  unsure 7, 34, 54, 73-74, 76, 115, 118, 171: a, t, c, g, or other
cccaggngacggaggaccagatccagcgggaccnagccatgaacaagttcgacngggaccacccgatgcaccnncnggcgacgagcccgacggccgtgaagcaggtgagctgcgngtnggacgcgtacgaggccaccaagggcgcccacgggctgtgcatctgaccgagtnggacgagttcaagaccctggactaccagaagatcttcgacaacatttcagaagcccgcttcgtt

SEQ ID NO: 3761 - DNA, 232 bp, Zea mays
  misc_feature: Incyte ID No: 700282518H2
  unsure 7, 34, 54, 73, 111: a, t, c, g, or other
cccaggngacggaggaccagatccagcgggaccnagccatgaacaagttcgacngggaccacccgatgcaccngcagccgacgagcccgacggccgtgaagcaggtgagcngcgtgtgggacgcgtacgaggccaccaagggcgcccacgggctgtgcatcctgaccgagtgggacgagttcaagaccctggactaccagaagatcttcgacaacatgcagaagcccgcttc

SEQ ID NO: 3762 - DNA, 231 bp, Zea mays
  misc_feature: Incyte ID No: 700282520H2
  unsure 7, 34, 54, 73, 111: a, t, c, g, or other
cccaggngacggaggaccagatccagcgggaccnagccatgaacaagttcgacngggaccacccgatgcaccngcagccgacgagcccgacggccgtgaagcaggtgagcngcgtgtgggacgcgtacgaggccaccaagggcgcccacgggctgtgcatcctgaccgagtgggacgagttcaagaccctggactaccagaagatcttcgacaacatgcagaagcccgcct

SEQ ID NO: 3763 - DNA, 233 bp, Zea mays
  misc_feature: Incyte ID No: 700282521H2
  unsure 4, 54, 56, 106, 125, 208: a, t, c, g, or other
gacncgccggggacagagagagagaccgacgcgccggcagatcccaagctcacncncagagggggaagagggcgaccgaaggcggcgatgggtttcatcatggacntcgcggagaatctgatccncccgtctgatggaggacccggacaagcgcgaccaggttcggcgggagcatgtctacaagatgaaggagcggtgcgagcgcacnaaggcggcgtggagcctccctctgc

SEQ ID NO: 3764 - DNA, 230 bp, Zea mays
  misc_feature: Incyte ID No: 700282522H2
  unsure 4, 22, 36, 132: a, t, c, g, or other
atcnggggttctggatgcaccnccagaaatttcacntccccaacctgaggtggtggtggcaacaacagtaatcacacagccgaacaagcacatggaggatgtgttgcctccagcaattgaggatggtgcacnacaagcaaccctcgaacatgctgttggcataccggaagttacacccgctgatgtcttgctggatgttgcaccttctgctgttggagaatcaggtgatg

SEQ ID NO: 3765 - DNA, 232 bp, Zea mays
  misc_feature: Incyte ID No: 700282532H2
  unsure 4, 12, 54, 56, 63, 70, 85, 107, 126, 205, 209: a, t, c, g, or other
gacncgccgggnacagagagagagaccgacgcgccggcagatcccaagctcacncncagaggnggaaganggcgaccgaaaggcngcgatgggtttcatcatggacntcgcggagaatctgatccncccgtctgatggaggacccggacaagcgcgaccaggttcggcgggagcatgtctacaagatgaaggagcggtgcgagcncacnaaggcggcgtggagcctccctct

SEQ ID NO: 3766 - DNA, 223 bp, Zea mays
  misc_feature: Incyte ID No: 700282541H2
  unsure 10, 16-17, 49-50, 92, 118, 220: a, t, c, g, or other
cttacttgtnagaacnnctaattgagaacaagctgaaccagaacttatnnccggtaattcaaggcagctttcaaaatatccaagcagaagtngggtcagagaaggtaaatgtgatccngattgcacgaaggtgcacacgaaggataggtactcgaatgtggagacgaggagctgatgcagagggttttgctgcaaacttcgttgaatcagagcagataangca

SEQ ID NO: 3767 - DNA, 229 bp, Zea mays
  misc_feature: Incyte ID No: 700282542H2
  unsure 2, 22, 42, 48, 56, 126, 130, 147, 157, 168, 189, 199: a, t, c, g, or other
gncgtttacagacaaacaaatncggggaatttatttgatgcntctatncgattacncggatgatacacgctatgtgttgagtcatgaagaggtgtctaagcatgtggcttatgggaggcctgatcnaacnaggtcatggattaaacnccttatcacntgtgccaaggnatggatcctcagaagagagtncacaagtatncacgctgaagatgagaacgcgcatctatct

SEQ ID NO: 3768 - DNA, 224 bp, Zea mays
  misc_feature: Incyte ID No: 700282543H2
  unsure 2, 19, 27, 35, 46, 51-52, 57, 102, 119, 122, 124, 127, 131, 165, 185,: a, t, c, g, or other
cncctatctcgccagcacngccgcatnaccgaagntcgcaaagatngcggnnccgcngctgacgcagaagatcgtgaagaagagggtcaagcagttcaagangccccatcttgatcgcnaanangtncctnaagccaagctggcgcaggcccaagggtatcgacnccccgcgtcaggcgtaagtncaagggatgcaccttgatgcccaacattggatatngctc

SEQ ID NO: 3769 - DNA, 222 bp, Zea mays
  misc_feature: Incyte ID No: 700282544H2
  unsure 4, 201: a, t, c, g, or other
tgtncccggagcacaagtacgagatcgtgaagcggctgcaggaccggaagcacatctgcggcatgaccggggacggcgtgaacgacgcgccggcgctgaagaaggcggacatcggcatcgcggtggacgacgcgacggacgcggcccggagcgcgtcggacatcgtgctgacggagcccgggctgagcgtgatcgtgagcnccgtgctcaccagccgcgcca

SEQ ID NO: 3770 - DNA, 223 bp, Zea mays
  misc_feature: Incyte ID No: 700282545H2
  unsure 44, 126, 147, 159, 168-169, 196: a, t, c, g, or other
gtagcataccataccgcgcggaccgggccgggagaaacaaaacngacaaggacgatatggtgcgtaccttcgtcgcgctgatcctcgtcgccacggccgtagccgccgtggccacagccgcacccncgccggggtttgtcgtcaccngccgcgtctacngcgacaacnnccgcgccgggttcgagaccaacgtctnccacgccatcgaaggcgcgacggtgga

SEQ ID NO: 3771 - DNA, 223 bp, Zea mays
  misc_feature: Incyte ID No: 700282546H2
  unsure 23, 158, 199: a, t, c, g, or other
ctcgaagcttgcgttcttgtagnagaggtcggcagcaagcggtagagcgagaggtcgagaagatgaagagcagcactcctgttggcgatcctagttctccaggcccttctggtctctacggccgtggccaaaggacctgcagggccgaagaagcagtnctggtgcggcgagtgcaccagctggtcgggcgtgtggaccngcgacgacctcctcaccaagtgcg

SEQ ID NO: 3772 - DNA, 222 bp, Zea mays
  misc_feature: Incyte ID No: 700282547H2
  unsure 30, 42, 46-47, 118, 124, 151, 207: a, t, c, g, or other
aggagaggagagatatgcagctcacgagcnccaccaaatccngacnnccccaaagctgtggtcgcgatccaaacagaagggaaatgatcaggcgacaacccggcatggatcggttccngcagcngctggccgccggcgtggccgtgctacngctagtggcaccgccggccttggctgacgacgacattgtagaagtcggcgtcaacnggggttcgcagctct

SEQ ID NO: 3773 - DNA, 222 bp, Zea mays
  misc_feature: Incyte ID No: 700282548H2
  unsure 45, 58, 89, 114, 120, 130-155: a, t, c, g, or other
ggtgaagcaagcagcacacgagacgatatagagggagggatcatngctctcttccgtnccgccgcgtcaggagggttcgcgctgatccntctcgcgtgctgcagcctcatcatnctggcngcggcgtctnnnnnnnnnnnnnnnnnnnnnnnnnncgtcggtggtgacaggctgatgatggaccggttcctcagctggcaggcgacgtacaaccggtcgtac

SEQ ID NO: 3774 - DNA, 135 bp, Zea mays
  misc_feature: Incyte ID No: 700282549H2
  unsure 31, 43, 48, 50, 71, 119, 125: a, t, c, g, or other
aaggagaggagagatatgcagctcacgagcnccaccaaatccngacgncnccaaagctgtggtcgcgatcnaaacagaagggaaatgatcaggcgacaacccggcatggatcggttccngcagcngtggccgccg

SEQ ID NO: 3775 - DNA, 196 bp, Zea mays
  misc_feature: Incyte ID No: 700282550H2
  unsure 4, 34, 39, 138, 180, 192, 195: a, t, c, g, or other
cacngcacggagagcaagcaagaaagcaaccacngcacngccactacctaacaatggcccgcgcctacgtgtttctcgtcgtgctcctcctggccgctgtcatcgtggcaccgttcgcgggagcgacgcgtgtcgacntcgttgagggcaggtccatggcgtccgccgacgcgccggagncgccgcaccatnacnc

SEQ ID NO: 3776 - DNA, 309 bp, Zea mays
  misc_feature: Incyte ID No: 700282553H2
  unsure 6, 8-9, 11, 16, 74, 77, 80, 98, 121, 123, 178, 184, 206, 243, 249, 267,: a, t, c, g, or other
cgtccncnncnccacngccccagaggccaagccaaaggtccagcaatggcgaggtctccccggcttctcgcgcngcngcnggctgtcgtctggatatncggcgcggccctagtagcgcgtncngacccgatgctcgagaggttccagcagtggatgggcaggcacggccggctgtacnctgacnccggagagaagcagaggcggcncgaggtgtaccggaggaacgtcgagtggtcgagaccntcaacnccatgggcaagggtacangctggccgacaacaattcgccgactgacgaagaggattcang

SEQ ID NO: 3777 - DNA, 313 bp, Zea mays
  misc_feature: Incyte ID No: 700282554H2
  unsure 6, 8-9, 11, 16, 75, 78, 81, 99, 122, 124, 179, 185, 207, 245, 250-251: a, t, c, g, or other
cgtccncnncnccacngccccagaggccaagccaaaggtccagcaatgggcgaggtctccccggcttctcgcgcngcngcnggctgtcgtctggatatncggcgcggccctagtagcgcgtncngacccgatgctcgagaggttccagcagtggatgggcaggcacggccggctgtacnctgacnccggagagaagcagaggcggcncgaggtgtaccggaggaacgtcgagctggtcgagaccntcaannccatgggcaacgggtacaggctggccgacaacaattcgccgacctgacgaacgaggattcag

SEQ ID NO: 3778 - DNA, 316 bp, Zea mays
  misc_feature: Incyte ID No: 700282555H2
  unsure 8, 11, 18, 120, 207, 238-239, 293, 299, 315: a, t, c, g, or other
ccgccccnccnccccgcntcaaggctctcctctccggaggtctgataggcaacccaataatggcagaagtcctatcaggatctcatgaacaccgtctaagctctgccttagatggacacnacgacgagaagaggaaatccaatgtggaatacacagaggacgagaagaaagccgtgatcgcggctctgaaaaagaaggctttgagcncctcacagaagtttaggcattccatgaaganngggaggaagagcagcaaggtgatgtccatctcgattctggatgagcgtgaaccngaggangtgcaggctgtggatnc

SEQ ID NO: 3779 - DNA, 314 bp, Zea mays
  misc_feature: Incyte ID No: 700282558H2
  unsure 9, 47, 53, 62, 186, 203: a, t, c, g, or other
gtgtctatntcggatatcaacatgaccgaagtagagttgtctgtgtngctgtnagctaagtnggaggaaagaggatttcctagtaccatagagagtatagatggcatgtatatattggaagcggaggaactgtcctattggatggggaggacagttcacaaggaggacattaagtcaccgatcatncatgctcaaggcgattnccgcgtatgacttgcggatctaacatgttttttggatggtaggatcgaacaacgacgtgaacaagttcaaccaatcaccgttgttcgctgatgcactcaagggtgaagcac

SEQ ID NO: 3780 - DNA, 315 bp, Zea mays
  misc_feature: Incyte ID No: 700282559H2
  unsure 4, 9, 24, 46, 54, 80, 105, 159, 216-217: a, t, c, g, or other
agtnatccnaaggaggtactcacngagaaggttcttttccagaacnctgatccngcatccattaataaacattcagtgcnccagaataacaataaaacaccagtnaaggatccagagaaaaagcagcaagcggtcaacgaagaagctcgcaaagaaggnggtaatgacaactcatctcatgaaacaggagcttcatctccgagaagatgtgatccnnccttcgaatcaggacgttgaggctgaccaggacgatagccttacaacttctaatcaatctggtggttctgatgaaatagaagctacatcttctaatga

SEQ ID NO: 3781 - DNA, 314 bp, Zea mays
  misc_feature: Incyte ID No: 700282561H2
  unsure 2, 17, 44, 80, 139, 183, 230, 278, 289, 300, 302: a, t, c, g, or other
gnccccgctcaagtacnccctttgcatccgctttgctgtcaagncccggcggctaccgcatcgccgacgacgtcatcccngccgatttcaaggccgaccaccacctataagaccacactccagcatctaatcaatctcnggtgatgaattagatttcaaaagagctcatctagcgcacatgtnagcaagacaatattattttttctatggttattttgtggaaccaaacnacccaagaaataagtgctgctagatgtaccttctgaccttgttgtatngggttgatatnatacataaacnanatacatatttat

SEQ ID NO: 3782 - DNA, 316 bp, Zea mays
  misc_feature: Incyte ID No: 700282562H2
  unsure 17, 44, 80, 182, 229, 277, 288, 299, 301: a, t, c, g, or other
ggccccgctcaagtacnccctttgcatccgctttgctgtcaagncccggcggctaccgcatcgccgacgacgtcatcccngccgatttcaaggccgaccaccacctataagaccacactcagcatctaatcaatctctggtgatgaattagatttcaaaagagctcatctagcgcacatgtnagcaagacaatattattttttctatggttattttgtggaaccaaacnacccaagaaataagtgatgctagatgtaccttctgaccttgttgtatngggttgatatnatacataaacnanatacattatttattt

SEQ ID NO: 3783 - DNA, 319 bp, Zea mays
  misc_feature: Incyte ID No: 700282564H2
  unsure 71, 87, 282: a, t, c, g, or other
cccttcatcctccgctccagacttccagcatctccgctccggctgcgctctgccttgctttcctgctaccngctctagcgcgaggangagaggtacggcggccgatctggcggcgcaggcggagggctcggccggggccggcaagtcggcgccgaacatggggaggggccgggtcgagctcaagcggatcgagaacaagatcaaccgccagtcaccttcgccaagcgccgcaacggcctgctcaagaaggcgtacgagctctcggtgctctgcgacgccgangtcgcgctcatcatcttctccaaccgcggcaagtcta

SEQ ID NO: 3784 - DNA, 179 bp, Zea mays
  misc_feature: Incyte ID No: 700282565H2
  unsure 24, 26, 35, 40, 70, 98, 120, 135, 152, 168: a, t, c, g, or other
cggaggtgttatgcaataattatncngatgaaatnaagcnagaggagcatgaccacagcctcctccaatncagtaattgggaatcttcagagttatcntcacaaagcaagcaaggttccngctatggttgattcngacaagtcagggggacnaaaggcttgctatgcncagaatgcagt

SEQ ID NO: 3785 - DNA, 207 bp, Zea mays
  misc_feature: Incyte ID No: 700282566H2
  unsure 5-6, 34, 41, 72, 93, 169: a, t, c, g, or other
gaganncccagctccggccggaagaagaagaatncacgacnacgatgactcctgatgacgacggcgcgaggnagccacgttacaaaaagaacnacgacgacgacttcggatgacgatgacaggaagaagcgctacgagaagaacgaccgccgccgccgccacgactatnacgattgagctatatgcatgcagtctcgtatatacaca

SEQ ID NO: 3786 - DNA, 308 bp, Zea mays
  misc_feature: Incyte ID No: 700282568H2
  unsure 3-4, 15, 19-20, 31, 38, 70, 95, 169, 171, 190, 193, 206, 229, 252, 255,: a, t, c, g, or other
acnncttcttatccngacnnacccgaggacngatcatnagcccattaaggagtctgcccttggaaacatnccccaccatcgccttctgtgatacngattcccctatgcgctatgttgatatcggcattcccgccaataacaaggggaaacagagcattggttgtctgtncnggctgctcgcccgaatggnccnccagatgcgcggnacaattcttccaggacacaagtnggacatcatggtagatcttttcntcnacagagacccagaggaagcgaanagcnggaggaagaagaggctctggttgcac

SEQ ID NO: 3787 - DNA, 200 bp, Zea mays
  misc_feature: Incyte ID No: 700282569H2
  unsure 4, 51, 78, 90, 101, 112, 144, 155, 166, 198: a, t, c, g, or other
cacncaacgaacgaactgaggtcgacgacgactgatcgagcagcgacgatngcggctgtgctgaacagcaggaagacnccgcagtggttnccgtgctggtngcggcggcgcngctggcgtcgtccgcttcggcggcgatcaccngcgggcaggtngggtcgtcgcnggctccgtgcatcccgtacgcgacggggaggncc

SEQ ID NO: 3788 - DNA, 310 bp, Zea mays
  misc_feature: Incyte ID No: 700282570H2
  unsure 3, 34-35, 37, 41, 58, 62, 67, 96, 108, 117, 140, 173, 180, 233, 237: a, t, c, g, or other
atncctctcgtctcgatcagctcgcttcgtgacnncnctcncctctcgatcgattgcntccncccancgaggcgggggaaagcgccgcccagatcnccgtaggaagcngcgatcacncccagctctgagcataagtttcngcagggaggctcgtgaagtcagtagtcgtatcnggcagtngcagcacagcgcaccatggaatggctgagctggagaacggtgtgttgtttatnagtnctgtgcaccgtgctgttcttgcgcccggtcgagggcattcgcttcgtgatcgatagagaagagtgcttctcgc

SEQ ID NO: 3789 - DNA, 175 bp, Zea mays
  misc_feature: Incyte ID No: 700282571H2
  unsure 16, 32, 50-51, 53, 59, 77, 90, 95, 97, 101, 112, 115, 128, 144, 155,: a, t, c, g, or other
catcaacgaacgaacngaggtcgacgacgacngatcgagcagcgacgatnncngctgtnctgaacagcaggaagacncccgcagtggttnccgtncnggtngcggcggcgcngcnggcgtcgtccgcntcggcggcgatcaccngcgggcaggtngggtcgtcgcnggcnccgtg

SEQ ID NO: 3790 - DNA, 305 bp, Zea mays
  misc_feature: Incyte ID No: 700282575H2
  unsure 5, 29, 44, 64, 99, 114, 142, 174, 191, 303: a, t, c, g, or other
gatcnaagcaaagacttgatttagttatngacggattggtaggnctcttgaaagttcgcgtggnccggggtatcaaccttgcctaccgcgacgcaagangcagcgatccgtatntcgtcctacggcttggcaagaagaaacngaagacaagcgtgaagaagagatccgtgaacnccatatggcaagagganctaactcctgaccgtcacagatcccagccaaccatgaagctggaggtgttcgacaaggacaccttcagcagagacgaccccatgggagacgcggagtggacgtggcgccatnat

SEQ ID NO: 3791 - DNA, 305 bp, Zea mays
  misc_feature: Incyte ID No: 700282578H2
  unsure 266, 297: a, t, c, g, or other
gtcttttccttttaggtcggtttcatcctccaccatcgtccttgtgctaaaccgaagcttctccagccatagcttcggagtcggtccatccttcttctagatcacactttttcataccatgcacgccttcatcttaaagccgaagttcctgtgacagtatactatactggaaaacatgttacttgtgtttttgaggaccttcggatgatgaaggccaccaacacacaccaaggaaatcttcgtcaacatcgatatgaacaacagtngtggcatagcataagttttaattattgcganatgaaaac

SEQ ID NO: 3792 - DNA, 120 bp, Zea mays
  misc_feature: Incyte ID No: 700282584H2
  unsure 8-9, 27, 43, 81, 84, 117: a, t, c, g, or other
aatcaacnnctcatgatgaattatatntcaaaagagctcaccncagcgcatgtgttacaagacaatattattttttcaatngcnttttttggcaccagaccacccaagaaataagtnatg

SEQ ID NO: 3793 - DNA, 145 bp, Zea mays
  misc_feature: Incyte ID No: 700282588H1
  unsure 45: a, t, c, g, or other
ctgatgaagagtttgtgagactaacaatgaaagctttggcagaanaacctatcccactgtcagatgatttgcggcatgaactttcctgggaggcagcaacagaaagatttattagggttgctgatattgcaccaactgtgcctgt

SEQ ID NO: 3794 - DNA, 145 bp, Zea mays
  misc_feature: Incyte ID No: 700282591H2
  unsure 9, 18, 44-45, 59, 69, 90, 95, 105: a, t, c, g, or other
gacatcgtnccaacaccngtaaaggttgagcttatacgaagatnngccacatccggatnacctgttgtngaggcaacgagttttgtatcncccanaatgggtacntcagttagctgatgcgaaggatgttatggaagcagttcgg

SEQ ID NO: 3795 - DNA, 240 bp, Zea mays
  misc_feature: Incyte ID No: 700282592H2
  unsure 9, 27, 36, 43, 53, 80, 217: a, t, c, g, or other
aatcaaccnctcatgatgaattatatntcaaaaganctcaccnagcgcatgtnttacaagacaatattattttttcaatngctttttttggcaccagaccacccaagaaataagttatgctacatgtctcttctgacgccttgttgtgttgggttgatattattacataaactaaatacattatttatttaagattttaggagaaatatgttgatcngatccaccttcattatcgagatg

SEQ ID NO: 3796 - DNA, 294 bp, Zea mays
  misc_feature: Incyte ID No: 700352602H1
tgtggttaagcgtgatgatttgtttatcacctctaaactatgggctgctaatcatgcacctgaagatgtggaagagggaatcgacaccacacttcaagatttgcagcttgactacttggacttgtacctcatccatggtccaatccgcatcaaaaaaggaactagcacgatgacccctgaaaactttctccatacagatatccctgctacatgggcagcgatggagaagttatacgactctggcaaagctcgtgcaatcggcgtgagtaacttctcttgtaagaagctgcatga

SEQ ID NO: 3797 - DNA, 290 bp, Zea mays
  misc_feature: Incyte ID No: 700352605H1
ccatatccgatgtggagatcaaagagcacggtggtgatgacttctcctttacgctcaaggagggcccgactggcacgtggacgctcgacaccaaggccccactcaagtaccccctttgcatccgctttgctgtcaagtctggcggctaccgcatcgccgacgacgtcatccccgccgatttcaaggctggcaccacctataagaccacactcagcatctaatcaacctctcatgatgaattatatttcaaaagagctcacctagcgcatgtgttacaagacaatattatt

SEQ ID NO: 3798 - DNA, 220 bp, Zea mays
  misc_feature: Incyte ID No: 700352606H1
  unsure 103, 132, 189, 194-197: a, t, c, g, or other
cttcggaggaaaatttcaggctgaaggtttagcgggtgccgcctctaaagagagcaatcactacacttatggctgggattttgcgcttagtagttcaatggcncccaggcagactacagaccgtgacaaaangtgtggagtctcttatttgtacagattggattcgtcacaaattcaccagatcaaganttccnnnnaaagtgtttcaggccttcacctg

SEQ ID NO: 3799 - DNA, 180 bp, Zea mays
  misc_feature: Incyte ID No: 700352607H1
  unsure 9: a, t, c, g, or other
gtgtgcgancttgtccagagagaggtgcacgcctggctgctgctggtatatatggtattctgaagaagctgggcaaagacaaattgctaggtgactttagccaacaaaggactgtagttgctattgacggtggcctatacgagcactacaagaagttcagtgcctgcctagaggcgacgc

SEQ ID NO: 3800 - DNA, 224 bp, Zea mays
  misc_feature: Incyte ID No: 700352608H1
  unsure 8, 88, 90, 94, 117, 133, 158, 168, 205: a, t, c, g, or other
tcgccgcnccccctctccgcctcaaggctctccttctcggaggtctgataggcaacccaataatggcagaagtgcctatcaggatctnangaanaccgtctaagctctgccttaganggacactacgacgagnagaggaaatccaatgtggaatacanagaggacganaagaaatccgtgattcgcggcttctgaaaaagaaggntttgcagcgcctcacagaa

SEQ ID NO: 3801 - DNA, 180 bp, Zea mays
  misc_feature: Incyte ID No: 700352610H1
  unsure 178: a, t, c, g, or other
acgcatctgaagcaagggggggaagggccaagggggatcggtcttgttctcggagagggttgagctgcttgacggttttgactcggatcatggtgtgcagctctatcagatagagagctgacgtgaggtgtgagacgcggatcgtggagtactactcagtaggagaggtggggagggnga

SEQ ID NO: 3802 - DNA, 291 bp, Zea mays
  misc_feature: Incyte ID No: 700352612H1
  unsure 32, 222: a, t, c, g, or other
gactgaaccatattctagcaagaccgaagganagaagtcgaaacaaaaacgtgtattgggcccagcaagaccagatttccttgaagccagacaagactctgaaacatgggtgccacctgaaggtcaaactggtgatgggcgcactgcattgaatgaccgtttgggttattgaaaagctcttccagcaacagttcccttgtggagaagtgcagtatcgtgccntatggttttgagcctgtttggggctccatattctgtgaagacaagcattagagttaagaatgcttattc

SEQ ID NO: 3803 - DNA, 240 bp, Zea mays
  misc_feature: Incyte ID No: 700352613H1
  unsure 28, 40, 54, 62, 76, 83: a, t, c, g, or other
gggcctctcggctggactgcaggcctcngacctgcctgcnagcgccagcctgcnagccaagnctgacctcctgctncagcacncagccaggccgtgaggagggctcccctcttagagctggaacgcctgaaactggagcctcacgaagggctgctgctccgcttcccctacgcggcctgacttcagcctgacatggacccactacccttctcctttccttcccaggccctttggcttctg

SEQ ID NO: 3804 - DNA, 226 bp, Zea mays
  misc_feature: Incyte ID No: 700352614H1
  unsure 26, 30, 58, 65, 78, 113, 132, 136, 147, 150, 154, 187, 211: a, t, c, g, or other
cgttgaactgctgtggtttggctgangggnctggaacagtttatctcagacatctgcnccaaganggacgtactcganaccttcaccgtgaagtcctgtcctgatgccatcanagaggtcttcgacaataanttcnacatcatcggngcngtgnggcatcggcattgccgtggtcatgatatttggnatgatcttcagtatgatcttgtgnctgtgctatccgcag

SEQ ID NO: 3805 - DNA, 228 bp, Zea mays
  misc_feature: Incyte ID No: 700352615H1
  unsure 95: a, t, c, g, or other
gagaacaggctgttgatgtcatttgttaatttccatgagcaagagaagatctctaaagaaatcgtaacacacgctatagaaagctgcatgaaganacaagcagataacctgttgaattcactggacgttatcagcggtaggttgtcacagttggagttatactgctatagactggaaaggtccattggagaattacgaatgacgtgatggattatcataacgaagcaa

SEQ ID NO: 3806 - DNA, 203 bp, Zea mays
  misc_feature: Incyte ID No: 700352616H1
  unsure 199: a, t, c, g, or other
gaacacacaaaatgagggttcttgtagagaagctgttagtctctgtgtttttagcagcattctattcagggtgcatggtcgtgtctctagaatatgatcacacggcaagcatcgagtgcctggcgacccatgaaacccttgtacaagggcggcattgtccagaacagcgattcaacagcggactgatgggctggtcganacac

SEQ ID NO: 3807 - DNA, 217 bp, Zea mays
  misc_feature: Incyte ID No: 700352619H1
  unsure 27, 29, 58, 67, 70, 92, 95, 98, 113, 194, 199: a, t, c, g, or other
cgcgaggcgtagggacagttactgcancngcggtgttgtgctgtggggaagggagaangatttgtanacnccggagcgaggttctgcttacncgnagncgctgctgtgcgganacccccgggtgaagccaccgtcatcatgtctgaccaggatggcaaaaccttcaactgaggacttgggggataagaaggaangtgantatattaaactccaaagt

SEQ ID NO: 3808 - DNA, 157 bp, Zea mays
  misc_feature: Incyte ID No: 700352622H1
  unsure 2, 11-12, 56, 130, 132, 134, 139, 141, 147, 149, 151, 155: a, t, c, g, or other
gnagattaggnnctcgatccctataaatagacacgccgtttatctatttatagggntcgagctcctaatctcctatacaattatagtaatgcttcgagtctatcaaatgggttggtcatttacgaacttnananaaaananaaaaanananaaangg

SEQ ID NO: 3809 - DNA, 287 bp, Zea mays
  misc_feature: Incyte ID No: 700352623H1
cagaacttgctgctaagccgattagtgccgctgatattgatgccatattcactaaagaagttgttaatccctgccagcaatgctgtagagtcttctcaaacagtgggggctcaaatggtcagtggaaattgtcaagaaagtgttcacgacgaagcggacagctctgacaaccatggaaagaatacagaatcgtcagatcagacaactgatatggtggaacgtgagactggcctgctgcaaaactggataagttggagaatggtccaaagatcagtgagagtaatccg

SEQ ID NO: 3810 - DNA, 287 bp, Zea mays
  misc_feature: Incyte ID No: 700352624H1
ggagtgtcaacaacagacattgttggacggatgcttctttgtgttagagagagatcatctgatgcacataatcattcttcactacaaaggcagttcagtagcggacatggtcagaaagtcgatgatactggatctggaactggtacaagagtatctcatttccttcccacatctaggcgaatagttcagttctcaaatagcaggggtccaggtccagattctcgaatagtttacatggatggtgcttttgatctgttccatgctggacacgtcgagatattacgact

SEQ ID NO: 3811 - DNA, 217 bp, Zea mays
  misc_feature: Incyte ID No: 700352625H1
  unsure 157: a, t, c, g, or other
ccggaacggaaccaaacgccaaacgctgctgcgctctctccttctcgtcctgaccccccagagcgagagggaggggcacccagaggagcctgtcgttttgatcggtgtctctgcccccgttcccgcgaggagagaacaacctggagaaaatggcgcngatctccggagccacggcagtccttgtgatggccgtcgtcgccacgctcgccgccgcggc

SEQ ID NO: 3812 - DNA, 221 bp, Zea mays
  misc_feature: Incyte ID No: 700352626H1
  unsure 7, 17, 30, 32, 41, 73, 76, 79, 85, 94, 96, 103, 110, 114, 118, 127-128,: a, t, c, g, or other
atcgagnttggtgatangctggttgcccananaagaatttncagttcaactttaagcttaccatgagaacaancanatncagaangtaaacttnanttatagncaaaagngggncagntctttaggnnaaggaaanaaccttaaatagtgaatnagcaactacatcacttanccantgtaggcttaaaagcagccatcaatacananancgntcaaggctc

SEQ ID NO: 3813 - DNA, 287 bp, Zea mays
  misc_feature: Incyte ID No: 700352627H1
  unsure 96: a, t, c, g, or other
gtgtacaaattattgcagcttcgaaacgaatttgtattgccaattgtcgtgaatgtatcttctacttgggagtaaatcaccaaccacttattgtangggataaccataaattacaagttgccccatttaatacttattatccacaactcggggaacatttggcacaagttggtgtggatcctaatgtcaacaagtgggaccaaccttttgtgttgggagttgttgatctgcatgactcatatctcatcctgccggggtttctgatgtccaggctgagtccaccactt

SEQ ID NO: 3814 - DNA, 292 bp, Zea mays
  misc_feature: Incyte ID No: 700352629H1
ggaggatgccaaggaggagctctactcccttgtcaccgtcgcggagatccccgccgagggcttgaaggggctggggaccaaggtcgttgacgaaaccgattaagctgtcgcgttatctacatctttagagagttcctagtttgtatttgcaacagcaaaaccttttgtattcacaaagttgtctatttccgcaacagaattgcatggctagttttcttttcattgctgctgcatcctttcttcattatcgccccctgggaagtcgctgctcatgggacaagtttggaaatct

SEQ ID NO: 3815 - DNA, 240 bp, Zea mays
  misc_feature: Incyte ID No: 700352630H1
cgagcgagatccccctctcccgctgccggatccgatctgacctgacctcgtcgccgcctgccgtgggagggagaagaggaagaggaggcggaggcggcggagatggcaccggtgtcagcgctcgccaagtacaagctcgtcttcctgggggaccagtccgtcggcaagacgagcatcatcacccgcttcatgtacgacaagttcgataacacctaccaggctacgattggtattgatttc

SEQ ID NO: 3816 - DNA, 289 bp, Zea mays
  misc_feature: Incyte ID No: 700352633H1
ccggtgtgagtcatcacagcctcctattctctaaaactgcaaccctgcccactctgagtgagaatgatgcactggacagcaaacctcggggcatgcccatgatgccccagcaatattacaagggatcctcatctgactatgtcgccaacggggcatcttttgcgctgaagccaaaggatgaaagtttcactgttcgaaactacattccaagtaacagaagcgcagagagtctgaagagataaaggcaagaatcaaccggctttcacagacctctcaaaggctgtgctgt

SEQ ID NO: 3817 - DNA, 197 bp, Zea mays
  misc_feature: Incyte ID No: 700352635H1
  unsure 51: a, t, c, g, or other
tgatcgatccgtatgtgtgcgtgcgtgtgtggcgttgctctttcttctttngtgtagctgtgccctgccaccggccgacgtgcgtgcatgccatggtggcgggcagcgttttctaaggtcatatactgttgttgtgtttaagtacatcttgcgtactcaattccttctaagtaagtatcctaatactagaatgttcc

SEQ ID NO: 3818 - DNA, 286 bp, Zea mays
  misc_feature: Incyte ID No: 700352636H1
  unsure 32, 34, 80: a, t, c, g, or other
agatttccaccaccaccgccgaaccgccccgncncctcctcccctctcgcgctatggcccagactgttgtgctcaaggtnggcatgtccctgtgagggctgtgttggagctgtcaagcgggtcctcggcaagatggaaggcgtcgagtcctacgacgtagacatcatggaacagaaggtcaccgtgaagggcaatgtgacacctgacgccgtcctgcaaactgtttccaagactggcaagaagacttcgttctgggaggctgaggccgtgacaagtgaatccgcca

SEQ ID NO: 3819 - DNA, 215 bp, Zea mays
  misc_feature: Incyte ID No: 700352639H1
  unsure 66, 68, 160, 162, 178, 195: a, t, c, g, or other
accaggaggagctggacacggtgctcaaaaccatcgagacgttcccgccggtggtgttcgccgganangcgcgccacctcgaggagcgcatggccgaggccgccatgggccgcgccttcatcctccagggcggcgactgcgccgagagcttcaaggagtncnacgccaacaacatccntgacaccttccgtatcntggtgcagatgggcgccgtg

SEQ ID NO: 3820 - DNA, 286 bp, Zea mays
  misc_feature: Incyte ID No: 700352642H1
aggagatcaagggggagctcgccctcgtgccccagtccccagacaagtcgctcgcgcgccacaagttcgtcgatgactgcgaggccgccctcaacgagcagatcaacgtggagtacaacgcctcgtatgcataccactccctcttcgcctacttcgaccgcgacaacgtggctctcaaaggatttgccaagttcttcaaggaatccagcgacgaggagagggagcacgctgaaaagttcatggagtacagaacaaacgtggaggcagggtgaggctccaatcgatt

SEQ ID NO: 3821 - DNA, 290 bp, Zea mays
  misc_feature: Incyte ID No: 700352645H1
  unsure 18, 66, 98, 198, 205, 275, 284: a, t, c, g, or other
ggaatacagaatgcgaanaactcccctatctgaggaaatggaggatttaaggaagcaacggcaganatttgaagaagagtgggaacaactagacgaanagagagccctccttgtagaggaggacaaaaggttgaacattgagaggatgaatttagaacggtggcgtgacaacgaagaaaaaaggttaaatgatatganactcaanatggatgaagaatacaagcagcagctggagagtcttgagcgcaaggacaaggctttgagtgatgtatgangcacaagcnatggaa

SEQ ID NO: 3822 - DNA, 293 bp, Zea mays
  misc_feature: Incyte ID No: 700352646H1
acctcgtgaaccccaccgttgcggagagagagagaactaggggaaggaattgacgccgccaggatgagtccgtcgcgtcgccggtgaacctcttcggtgcgggcgaatttgcttcggcgtgtggctaagtggagtcgtagtcgtcagggtttccgccagcgccggcgattggagtcgtgcgttggtgcggtgggcgaattgctcgccgccgtgtcactgcaagcgagttccgcccctccccgtggaccagcgtcgtccgccctcggccgtccgttgacgagcaagccactgtg

SEQ ID NO: 3823 - DNA, 224 bp, Zea mays
  misc_feature: Incyte ID No: 700352647H1
  unsure 10: a, t, c, g, or other
ggtgcgatanttgtcgcctggagaagaaggaaggaggagcagtccgagtttatatcatgaccttgggtgtactggcaccgtatcggggtcttggtattgggacaaagctgctgaatcatgtgttcgatctctcagcaaagcaaaacatctccgagatatacttgcatgttcagaccaacaacgatgatgcaattgctttctacaagaagtttgggtcgagataa

SEQ ID NO: 3824 - DNA, 153 bp, Zea mays
  misc_feature: Incyte ID No: 700352648H1
agctcacattcgcctcgacacaacacggtctccggtttcaacattcatttctaaccagggttcctccagcccagccgccgccactgttgcggagtcacatcgcctcgacacaacacggtctctggtttcaacgtataataactgggctgcgag

SEQ ID NO: 3825 - DNA, 288 bp, Zea mays
  misc_feature: Incyte ID No: 700352649H1
  unsure 12, 31, 42, 56, 71, 73-74, 78, 83, 242, 257, 266: a, t, c, g, or other
gcagccgcgacncatcgcgacctgacccgancctcccgaggncgccagccttatcntctccgcctccgccncnncgcngtccnctccgacccatcacaagcgcgagtagaagacatggcctcgacgttcggtgccacttctacagttggccttatggctgctccaacggggaagaatgtgcgccttcagaggagggctaacttcagagtaaaagcggctaaggagtgtacttcaacaaggangggtcagctatcaanaagctccanactggagtcaataagcttgcag

SEQ ID NO: 3826 - DNA, 281 bp, Zea mays
  misc_feature: Incyte ID No: 700352651H1
agcacacttgtaaaccgaattactagggtctttgacaaggatgatgatccttttgcaccagatccgagcacaggtgtcatgcaattcaaaatcaaatggtacaatgtttcttcgcgagtatccaattccaaggaattcaagtgccgtatgtatttacgatacacgtggctggtcaaacgacctagagaaaaatttcaaaatgctgcatcagtggatgacaaaaggaataagccatggggagacaacaatgtgggatgatgatgaaggcaataagataggga

SEQ ID NO: 3827 - DNA, 285 bp, Zea mays
  misc_feature: Incyte ID No: 700352654H1
  unsure 29, 182, 208: a, t, c, g, or other
agaataaacgccgccgggcatgggcgaantaaagctcaacaacgtgaccgtcctgctggtggccctcctcctcctgagcagtggcgttcaggacgctgccgccatgccaggcacgttgaactacgacgcgattgtcgccgacgagccaaacggaaagaacaaggacctgtaccgccccgtcnccaacgccaataaatacacccgcggntgcgagcccatagaacgctgcaggggcgcgcgctgatcaccaagcatatacatatagcacatcgatttcttattatt

SEQ ID NO: 3828 - DNA, 287 bp, Zea mays
  misc_feature: Incyte ID No: 700352656H1
  unsure 4, 10, 15, 17, 28, 60, 66, 79, 85, 87-88, 106, 109, 114-117, 134, 149,: a, t, c, g, or other
gcangcggcngttcnanaggggcgatcnacagggagccgcagaactggtgcaggcacgangaggcnaaatactggcaanaattantnntagttcactaccacagtnatnatggnnnntacaaaggaagaggtanatctaacttctcttncnctcgagtttcncgtagtgaggctgcagtttctattggttctactcctcttagcnaagnaattggctaagagttcaagcttcaattcnaaagcagtnaagcnctgccgtcccatcgagtacggtgagtantctttca

SEQ ID NO: 3829 - DNA, 285 bp, Zea mays
  misc_feature: Incyte ID No: 700352657H1
  unsure 62, 272: a, t, c, g, or other
gctgctgcgagcctgcgacctccgaggcggagtcaatggagttatccactcccgttgggagnccccttgctagaacagcgaccatggccctcgttagccccagcttcaagataaccaatcaaatgcgtggcaggggtatgccacttgaatgccaatttcctcataggctaccatctgtagcttgttcaatgttgttaaacacacaaccttcacaacgaacccaaccataaaagattgtggtttgcttcaggtgcaatgtacagaaaacctgntgcagtcgccaat

SEQ ID NO: 3830 - DNA, 286 bp, Zea mays
  misc_feature: Incyte ID No: 700352659H1
  unsure 79, 163: a, t, c, g, or other
cgctccgttcgagtggagcgcacaggcaccggccggccgaccagagagggagcggatcgagggggactcggcttgagtngaggagatggaccgcaaggatgtcgggatcctcgccatggacatctacttcccgccctcctgcgtgcagcaggaagcacttgangcccatgatggggcgagcaaaggcaagtacaccattgggcttgggcaagattgcatggccttttgcagcgaggtggaggatgtcatctcaatgagtttgacggttgtcaattctctgctgaaa

SEQ ID NO: 3831 - DNA, 280 bp, Zea mays
  misc_feature: Incyte ID No: 700352666H1
  unsure 25, 255, 271: a, t, c, g, or other
tcctggtgtcgccatgggccgccgncccgcccgttgttaccggtattgtaagaacaagccgtacccaaagtctcgcttctgccgaggtgtccctgatgccaagattcccatttttgacctggggcggaaaaaggcaaaagtggatgagtttccgctttgtggccacatggtgtcagatgaatatgagcagctgtcctctgaagccctggaggctgcccgaatttgtgccaataagtacatggtaaaaagttgtgncaaagatggcttccanatccgggtg

SEQ ID NO: 3832 - DNA, 279 bp, Zea mays
  misc_feature: Incyte ID No: 700352667H1
  unsure 2, 7, 27, 29-30, 73, 109-110, 127, 178, 183: a, t, c, g, or other
gnaattntgagagccattttaatatantnncctccctagaaacataccttttagggaatttttatacactaanccacatgttatttaaatacgtacatgtttaacatanntacatacatataattcncatgcatacttaacacttatgttaaatatattccatgtatatacatatgtncacantatatgcatatatacatgtgggtatgtggtatgtgtgcatgtgtgtgtatggccagctacataatttgtgggactaagggcaaaatgaaactgtac

SEQ ID NO: 3833 - DNA, 280 bp, Zea mays
  misc_feature: Incyte ID No: 700352669H1
  unsure 273: a, t, c, g, or other
ctatttcagtttggaactgaactgggaatgacgaggccgaggaccaaaagcaaattgacaccttctccgttcccgacgactcacgtgagcgtggagcggcgactaggcgaggccatggcctccggcatcggctccggccagcagcaacccccagttagattggatgccctagcagcgccggcggcagatgctgacccgggagccgtcggcgacaagctcgtcttcgaagcgccgcctcagcccgtgagggaggactacgtccagaacgccgtnaatttct

SEQ ID NO: 3834 - DNA, 278 bp, Zea mays
  misc_feature: Incyte ID No: 700352673H1
  unsure 2, 51, 54-55, 58-59, 128: a, t, c, g, or other
ancaataacagaaagcccagcaaaggtagagaatgaaaattcatcagaaangcnnctnntatctgacagtgttacagaggaggcaaatacagatactacggtaagaggaaatgaggatgctgaagagnaagcacaagatgttggtagcagcaaggatagtagtgtcgaaggattaaaaagtgttttgaatttttttaagtctcggattcctgaattcaaagttcagtgataatgttgatgtggctgaggaaactgattagctgcaaattcgtctgaag

SEQ ID NO: 3835 - DNA, 280 bp, Zea mays
  misc_feature: Incyte ID No: 700352675H1
  unsure 7, 18: a, t, c, g, or other
gcaaggncacgtaagacngtcgtctaattcttggatcgaattagacgacttcttcgtccctctcttcattagcacgctaacttgtaatctgcaggatctaagcaaagacttgatttagttacggacggattggtaggcctcttgaaagttcgcgtggtccggggtatcaaccttgcctaccgcgacgcaagaggcagcgatccgtatgtcgtcctacggcttggcaagaagaaactgaagacaagcgtgaagaagagatccgtgaaccccatatggcaag

SEQ ID NO: 3836 - DNA, 286 bp, Zea mays
  misc_feature: Incyte ID No: 700352678H1
  unsure 12: a, t, c, g, or other
tcatcgccaaanacgtcatcccggcgaactggagacccgatgccgtctacacttccaacgtccaattctactagactttgaattcccttcgattcatccggcacagcgggctatggaccttcagcagcaagctaattaagttggcagcatgcaccgctaaccttatatactactgagacttccaaattctagtatatgtaatcctttgttcgggttcatgatcgaattccaaagagtggaaaacaagcaaaaggttaaatatacatgccatttttggaggcatttt

SEQ ID NO: 3837 - DNA, 235 bp, Zea mays
  misc_feature: Incyte ID No: 700352679H1
gtgggcagcagcttaaataatgagtcacttgaatccgaatactatctgaaagctattgctgatttggccttgatacctgatataggattcctcgatgtccagtttttcttgttctcaaggaatcatagtgcgataatcaaccttattggactgcactactcgatcgcatctttgcatgtgctgccaactgaagtcagtaaagcactccagctcaccgagtagcagaaagggtagt

SEQ ID NO: 3838 - DNA, 320 bp, Zea mays
  misc_feature: Incyte ID No: 700352680H1
  unsure 290: a, t, c, g, or other
caattagctggagacgagcattctcagtcacagaaaatttcccgtggccggattgaacatcctcacgtgtcacctcttcacgaggaacttatccccacttcaattcatacccctggatcaccctattcttgtgatgtcccgatggttgaagaggccatagacgccatctgcaagagccacggaacacccaccagatgagaagattgccatcaccaaagctattataaatgtatcgaatggatccaagcccccactctttgctggcatcatagcacttgtgatgagcatcnaacgatggtccgtctgacccgcagcatgat

SEQ ID NO: 3839 - DNA, 236 bp, Zea mays
  misc_feature: Incyte ID No: 700352682H1
  unsure 26, 70-94, 230: a, t, c, g, or other
tcgcccaagaaaggagcggctctgtncgccggtgccggaggtattcgtcatcgccacagccgcaacctcnnnnnnnnnnnnnnnnnnnnnnnnntcgcccaagaaagaagcggctctgtcgccggcgccggagcctattcgtcatcgccgccgccttaacctcgaaggacgaggaggaggtggaatcgcccaagaaagaagcggctctgtcgccggcgccggcgccgganggcatc

SEQ ID NO: 3840 - DNA, 276 bp, Zea mays
  misc_feature: Incyte ID No: 700352683H1
  unsure 24, 71, 116, 181: a, t, c, g, or other
tcgcaaatatgtctccggaatatngtgcaactatgggattcttcccagttgatggaaagacgctggactanttgaagcttactggccgaagtgatgatacagtggccatggttgantcctacctgcgtgcgaataagatgttcgttgatcacagccaggttgacgctgaaagggtatactncttcctatctagaacttaacttggaagaggtagaaccatgtctatcaggaccaaaacggcctcatgatcgagtgacattgaagaatatgaagtct

SEQ ID NO: 3841 - DNA, 277 bp, Zea mays
  misc_feature: Incyte ID No: 700352684H1
  unsure 121-122, 128, 268: a, t, c, g, or other
tttaatctgatgcagtctcaaaagagcagagttttgggagcaatgtcatcctctttgcctattctgccaaatcctttgaaagggagcttcccaaggcctcataacccccagcatattcctnngttgangcagcttcctgatgactctatgcccttgtgtattgacacacatcagtctgttagtttgcacccaagagctggtgttatcggggtaccatattcaggctacactgctagtccacttgattctgtgtctaaccttgatagcnagacaatgg

SEQ ID NO: 3842 - DNA, 177 bp, Zea mays
  misc_feature: Incyte ID No: 700352686H1
  unsure 6, 11-12, 14, 16, 18-19, 24, 102, 107: a, t, c, g, or other
catggnaatcnncntngnnccganaccatattctatctcccgttcaatgcgtgcgtgcgcgcgcagacacgacgcatggtggccgggggatagaatatggtntcgtncaatgcagattgccatgctatagctccagagtttatctacctggtagcaccatgacacgatggcccgttc

SEQ ID NO: 3843 - DNA, 278 bp, Zea mays
  misc_feature: Incyte ID No: 700352688H1
  unsure 212, 270: a, t, c, g, or other
acgatttcttcgccatgaccatgacgtctcgtttcgttgcggcggcctcttcctcctcgtcctcgtgccccctgcgcctgcctaatctctcgccgcggccttgccggtgccgcagacggccatggacctgcgaaggtgcccttgtggaaagatccgttgagcccgagcaagtggaaggaagagcactttgttctagcaagcctctctatgtngggggctcttttttatggtggtttcaagttttttggtggaaagaaggaagacaagatngaggtggc

SEQ ID NO: 3844 - DNA, 274 bp, Zea mays
  misc_feature: Incyte ID No: 700352689H1
  unsure 22, 200, 256, 272: a, t, c, g, or other
tgccaccaccgccatgccattnccgccacagccagtccgtcgctcttgccctatcctgttagccgtcaacgacacctgtggtgtgacgaggatggcatcaacatgtgcggcaagggtaccgtctctgcggtgggcgccacaacgtggctgggtgggttcgtgggtttcagtacgcccagcgaaatgcaggacatcgggangacatgccgttgtgtgcgctgctgttagcttcagaccatgcattgacattcacaanggaaaagttaaacagntg

SEQ ID NO: 3845 - DNA, 220 bp, Zea mays
  misc_feature: Incyte ID No: 700352691H1
ccgcttcgtctccgccgtccccacgccaagaagcctgcgcctggggaggcggcagcagcagcatccgccggctctgaagctcgattcttctcaggagacgacggcgatcgcggcggcgatgatgaacacgggcaggccgacggcgaggatggacgtggaggtgaacgactaccaaccgtcgggtcccaacaaccgccacgacccacccaagggtcttgga

SEQ ID NO: 3846 - DNA, 272 bp, Zea mays
  misc_feature: Incyte ID No: 700352692H1
  unsure 265: a, t, c, g, or other
ccaataacccagttaggtattatagattagtatttttgctagttgcctacctactgagataaataagcacaatcttgcaatggatccaataacccagttaggtattatagattagtatttaagtttgctgtagattgtgtgtgtgtgtgctaagtaaaagttccatgattcacaattttagtattaacccatgttgcaaaagctgttactggccaacagattgtaatgatgtgtaccatataacacaagcattaactaggcttancgtttgt

SEQ ID NO: 3847 - DNA, 284 bp, Zea mays
  misc_feature: Incyte ID No: 700352693H1
  unsure 161: a, t, c, g, or other
agcactgaagaaggctgcgcgaggccgaggcacgtcgtcctagaccatctctacatcgagaagggctggggcgcacatccgttggtggccctcagctacacccacaggttccgctccaagtacgtgacctgcgtcctgtacaaggccatcgagcggtagcntgaccattgctgtgttgtgggccggcaactatagctagatgtggtggacttagcatttcattcaggtttagaagtctctcctgcataattcgttcatctgctaaactaaagaggtgggtgcaa

SEQ ID NO: 3848 - DNA, 272 bp, Zea mays
  misc_feature: Incyte ID No: 700352695H1
  unsure 38, 222: a, t, c, g, or other
ccacctcccggtccgctagcagatagcgggggccaganagatcgagatccggaggcgctaggccacccatcagcgtctgcggcaatggcgggcacgtgacgtcccggggtcgtcgaaccctcacgccgctgctcaagacgactcgacatgtgatcccgacgattcgcaactcgattctcgagatgtggaggcctcttcagctacactcatatgtgaagacgngaccgacaagacataagtcccgaggttcatagagttaaacggaagaataa

SEQ ID NO: 3849 - DNA, 252 bp, Zea mays
  misc_feature: Incyte ID No: 700352696H1
catagcgtgtaactttttttccttcccatttttccgtttagttttttgctggctgtgtgtgagcattcgtgtagggtgttgtaggaaaactgagaatgaaggtggtattaacgtatccccgtggcgtgacgttatttagacaacgacccacggatggatcaaattttgcgtgtattggggccaaaacagttctgctcaaggattgaagttggaaatttgaattgttccgtgtactgatggactttttgctgg

SEQ ID NO: 3850 - DNA, 290 bp, Zea mays
  misc_feature: Incyte ID No: 700352701H1
  unsure 75: a, t, c, g, or other
catttgcaggtattgctggacatcttcactggggtgcggctttacttgccaccctccacaccagatctttcagcnctctcagacgctaactttgtggcattcgacggggacctggtacaggaatttgatatgacttcagccacgcacgtgctgggtagcagggacaagaaccctgcggcccagcaggtctccccagagtggatttgggcatgtatccggaaacggagactggtagctccctgctaggtttgctgtcttccctctcctcagccatactctcctttaccata

SEQ ID NO: 3851 - DNA, 281 bp, Zea mays
  misc_feature: Incyte ID No: 700352703H1
ggagtagtgctaccgctgacaaggcgagtgtgggagcaggggaagcatcggcgcgagctgctggttcttttgaagactctgctcagctatcaagagtgacgaaggatcatacgcacatggtgaacggaagcccccgagaaatccaaagccatcagagttgcagtggaaggagtcgtatcaaggttcaaatgcatggaaatgacgtgtgcagagctgtggatttgggaaatctggatgggtacgagcagctgatgggtggtgagtgatgtttgagatcaaag

SEQ ID NO: 3852 - DNA, 281 bp, Zea mays
  misc_feature: Incyte ID No: 700352704H1
  unsure 95, 258: a, t, c, g, or other
tcgaccgcgacggcgacggcgtcgtctccttctcggagacgtacggcgcgtttcgggcactcgggtttggattcggcctgtccagcgtcaggctngcgctcatcaacggcgctcttggtagcaagtgcagacctcaaaatgcaacgtcatcgaagttggatatctacatagaggacatccagaacgggaaacacggaagcgattcaggggcatacgacgccgaagaaggtttgttcctgagaagttcgaagagatatngcagcacgccaagactgtccccg

SEQ ID NO: 3853 - DNA, 281 bp, Zea mays
  misc_feature: Incyte ID No: 700352705H1
ggagcagatccaacaaaggttcaaatttgtggcatggattatggcttctatgagaagaaaattgaaatccgtcattcaatagagagtgaaggcattcctcatacttacatatgctgcaacttctttatgcgctatttgcttccttcactggtgcaacctgggctagatgctcctcctagagatgaaatcaaaatatttggtgaaggaaatactaaaggtgtttttgttaaagagaatgatgttgctaaatttacaatacacatagaggatcccagaacatt

SEQ ID NO: 3854 - DNA, 281 bp, Zea mays
  misc_feature: Incyte ID No: 700352707H1
  unsure 153, 155, 208, 261: a, t, c, g, or other
aagaatgtcctcatctttgaccttggaggtggtaccttcgatgtctccctccttacaattgaggaaggtatctttgaagtcaaggccacagctggcgacacccatcttggtggtgaggacttgacaacaggatggttaaccactttgtccagnanttcaagagaaagaacaagaaggatatcactggcaacccgagggctctccggangctgaggacctcttgtgagagggccaagagaactctgtcttccactggccaanacattgagattgactcgctg

SEQ ID NO: 3855 - DNA, 284 bp, Zea mays
  misc_feature: Incyte ID No: 700352708H1
cggggacaggctcacgctggcggacgtctgcctcttcacgacgctcatccgattcgatctcgtctacaacacgctgttcaggtgcaccaggcggaagtggccgagtaccctagcctccatgcctacacgcgcgacatctaccagatgcccaaggtcgccgagacgtgcgacatggaggccatcatggcaggatacttcaagacactcttccccctcaaccccggcgggatccagccacacccgccggccaacctgcgatagagcgctcttgaggccgcatggta

SEQ ID NO: 3856 - DNA, 284 bp, Zea mays
  misc_feature: Incyte ID No: 700352709H1
  unsure 219: a, t, c, g, or other
ctcccttcgtcaccatcacatccagccagccaacaaaaatgtcgcgcgtcacagctgcggtgctcttctacatcctcgccgttgctgccctcagcgcggccgaggccccggcagagtcaccgaaggaaggcagtgctgccaaggcactgagtctgccaagagaatgctgcccccgctgaagcacccgaagccgcatccacccccgtcgccgccgctgcnccatcgccgtcgtctaggaagtctggtccagctaccgcgccacacgcctctacaccccttctttc

SEQ ID NO: 3857 - DNA, 68 bp, Zea mays
  misc_feature: Incyte ID No: 700352710H1
ctcacaatgtgtaatgataataacggatgctactaacgtaccgttacggataatgggtacgtagctca

SEQ ID NO: 3858 - DNA, 285 bp, Zea mays
  misc_feature: Incyte ID No: 700352713H1
  unsure 10, 71, 74, 95, 142, 159, 193, 212, 221, 246, 260: a, t, c, g, or other
cgtgcttgantgaaacgcacccagtccccgctcctgtttcgatctcccgaatcccgatcccgctaccggangcngaggcgatggcggcggcgccnccggtaaggttcccggtcttcgggctcgtgcggctgctgggcttggncgccgcggcggagatcntcttctgggccgtccacttccgaggcggcatggngctctccagcgaagagganagcaagctncccatcttcaacgttcacccagtgntaatgctgattggntgtgccttgaatggccgaactcttt

SEQ ID NO: 3859 - DNA, 283 bp, Zea mays
  misc_feature: Incyte ID No: 700352714H1
  unsure 7, 34, 36, 79, 91, 140: a, t, c, g, or other
cctcgcngcccaccgcgcctcgtggcggcaactngncggccgtcgctgccgccctacgccaggtgccgaggtgattttnccgccccttggncggcgacgagaactaccagatactctgagcctggctgccgaaacttccnttttgagtccctgttacattcggattcgtttttgatgacttcatcaagaagcaacagcaggagccacagtcgcagcaggagcaggagcaggagccgcatcctcagcgaagagataggttggagaacgtgcaccccgccgcagt

SEQ ID NO: 3860 - DNA, 136 bp, Zea mays
  misc_feature: Incyte ID No: 700352716H1
  unsure 9, 68: a, t, c, g, or other
gtgacaganagcaaccaaatgcagactaatcttagttgattttgcaagtagtgacgtattgtaaattncatattcatgatattctttcattcaccatctttgttgcaaaggaaaaggatggaaaagtaatatatac

SEQ ID NO: 3861 - DNA, 284 bp, Zea mays
  misc_feature: Incyte ID No: 700352717H1
  unsure 9: a, t, c, g, or other
cgcctaatngagggcattaacacgcacagcggttaccatttcccgttcagcccttgcaggctgattccattctacggaggggctgcataccatgactaccatcactatgcaggaggccgtagccaaagcaactttgcacccctgttcacctactgtgattatttatataggacagacaaaggctacagataccacaagctaaagcaagagaagctgaagagtctagcagaaaatagtgcggataaaggaggcaactactcatcacgagggaaaaagaacagata

SEQ ID NO: 3862 - DNA, 280 bp, Zea mays
  misc_feature: Incyte ID No: 700352718H1
  unsure 22, 202-203: a, t, c, g, or other
gagcggcaccatggcggtcggnaagaacaagcgcctgacgaaaggtggcaagaagggagccaagaagaaagtggttgatccattttctaagaaagactggtatgatgtgaaagctccagcaatgttcaatattaggaacatcgggaaaacactagttacaaggactcaaggaaccaaaattgcatcagatggcctcaagggnncgtgtgttcgaagtgagtcttgcagatctacagaacgatgaagttgcatttagaattcagctattactgaggatgtt

SEQ ID NO: 3863 - DNA, 277 bp, Zea mays
  misc_feature: Incyte ID No: 700352719H1
  unsure 29, 47, 136, 201, 214: a, t, c, g, or other
agaataaacgccgccgggcatgggcgaantaagctcaacaacgtganccgtcctgctggtggccctcctcctcctgagcagtggcgttcaggacgctgccgccatgccaggcacgttgaactacgacgcgattgtngccgacgagccaaacggaaagaacaaggacctgtaccgccccgtcgccaacgccaataaatacanccgcgggtgcgancccatagaacgctgcaggggcgcgcgctgatcaccaagcttatatagcacatcgatttcttat

SEQ ID NO: 3864 - DNA, 256 bp, Zea mays
  misc_feature: Incyte ID No: 700352720H1
  unsure 21-22, 36, 38: a, t, c, g, or other
cttttcagtgatggcgcaagnnagcaggcgagcgancnggccgagcggctggccacacgcgagggctaaggtaggcatgcagatggccgagaagcagggaaggattgccacgctggacatcgagtgcgccacactgaagcagaccttggagctcctccgtcaggaaactgcaagtacatttgtgaaactctgtgagaaaagattgttctacacaaagagaacagaaaccttgagtcaactacaggagcaacaggaa

SEQ ID NO: 3865 - DNA, 280 bp, Zea mays
  misc_feature: Incyte ID No: 700352723H1
  unsure 258: a, t, c, g, or other
tcagaacagacaaaggtggcaagtgctgtaagtttaattgattttagtgcagatcctgaacctgcgtccacagcaccaccacaacccacccctatgccacaacaacctccatttaacgcagcagcaccacagcctattcttgaacaagggaaaagtgttccttctgtcagtggtggtgactgggcatcttttgattcttttggccaacaacaaacactacaaacaagcagcagtgtaaatcctcttgagtctgcactnaagctgtcattctctgaagcac

SEQ ID NO: 3866 - DNA, 278 bp, Zea mays
  misc_feature: Incyte ID No: 700352724H1
  unsure 18, 218: a, t, c, g, or other
tcaagtcagacgattggnggcgggtggtggccgtgtttgtgctcggcaaggagtggcagttcaaagactggcccttcaaggaccatgtagagatcttcaacagagttattggtttctatgtgcgctttgaagatgatagtgtggaagcagccaaggtggtgaaacagtggaatgtgaaaatcatatctatgagcaaaaataaaaggctcaagacagancagctgctcttgaagtatgggagcgctggaggaattagggcacggacataattgatgtgc

SEQ ID NO: 3867 - DNA, 283 bp, Zea mays
  misc_feature: Incyte ID No: 700352726H1
  unsure 83-84, 89, 94, 152: a, t, c, g, or other
gaccttcctctccggcggcggccggcgcgcgcgcgagggagatggaccgcccttccggcacattcgtaccagcgcttcccccnngttcngatcngcgagctcaaggacgactacgccaagttcgaactccgcgacaccgacgctagcatggncaacgccctccgccgcgtcatgatcgccgaagtcccaactgtcgccatcgatctcgtagagatcgaggttaactcctccgtcctcaacgacgagttcatcgcccaccgtgggctcatcccgctcacctccg

SEQ ID NO: 3868 - DNA, 280 bp, Zea mays
  misc_feature: Incyte ID No: 700352727H1
  unsure 82: a, t, c, g, or other
cgagctttgggagccggagctcgcagcagacatgtgccatttgccttggtggcatgagatcagggcagggtcatgccttgtncactgctgaatgctcccacaagttccattttcattgcatttcttcaaatatcaagcatggcaaccttcatctgcccgatatgccgtgtaagtggaaagaatcccaggcgctcaacctgcagatgccagttatggacgagctagagttaacccattaaattggccccaggatgaagcgaggctgttgttccgcaggctt

SEQ ID NO: 3869 - DNA, 283 bp, Zea mays
  misc_feature: Incyte ID No: 700352728H1
  unsure 94, 97, 162: a, t, c, g, or other
ggcacatgaccaccgtctccgggtgggacgacgagtccgtcctcctcaatgtgatggtcattgaggccaccctcgtctatgagtcccatcgcangangcgagcctccacctgctccaacgatgacgacaccagatccaacaccaaatacggagatacagtantacagggctcctctcttccacgctgcgaaggtgacttgtaggtgtacttagcaatggtgcaaatcatgcccatccacgagatcttgggcctcaacgtgtggaagatgacgttgcaaatatt

SEQ ID NO: 3870 - DNA, 284 bp, Zea mays
  misc_feature: Incyte ID No: 700352729H1
  unsure 225: a, t, c, g, or other
catcaatcatgtctggtcgttcgtggacaataatggcgcctctcctagcgtcgatgctgcttcgtcgggctcgccgcgggctccgaggaggaggaggacggcggcggcaaaaagaagccccacgtcaaccacggcaagtttaaggcggagccgtgggacggacgggcacgcgacgtactacggcgggcgcgacgggttaactgacaccacggacagcggcgctancggctacaaggggcgagctggggaaagatacggcaactacgcggccgtgggccgtcgct

SEQ ID NO: 3871 - DNA, 282 bp, Zea mays
  misc_feature: Incyte ID No: 700352730H1
  unsure 50, 185, 218: a, t, c, g, or other
gccaatcgccaagccaagccaagccagaagcggcagcctcgcgcagggtnctggtctctcttgtgggtggtgcccttcttcgccggtggccggaaagggcagtggagtgggaccgctcaaggagaggccggcgtccccaagtctcacttccgccgtccactttccccctgtagggatcgagggangaaggaaaggaggtgcttcacaatgaaggcccncattcttgtcgggggtttcggaacccgccttcggccttagattggttcccgaaacccctcgtgg

SEQ ID NO: 3872 - DNA, 283 bp, Zea mays
  misc_feature: Incyte ID No: 700352731H1
  unsure 2: a, t, c, g, or other
cngcaagtccatcggcttggcaaaggagctcgcctgcatctgaaccaattgactaacatgcatatattatatatataatcactcttcgtaacctctctctttctcacgtactctcaagtctccaccgaatatataatccgctggtttgtattttctttcttctttggatcatcacaaaaccaaccgatgtaattattattagaccgacgcctcacaatcttggaacttattcattatgctagtgtatatctgtaatcccaccaaatgttaatgttgattgtgg

SEQ ID NO: 3873 - DNA, 283 bp, Zea mays
  misc_feature: Incyte ID No: 700352733H1
  unsure 233: a, t, c, g, or other
ggcaaattttactcagtttcattgtgaagtcggtgcacgacagtttaggtccctcccgggctgaaccagagaggaagccaagtggatcagatgaagctagtagtgaacagaccagcgtcttaggcaagaacgcttctggtcgcaaagatccagataaacaagagaaagcgacggaggttactaagggcctgaaggatacagagggattcactgtcgtttcaaaacgccgaagngcccccagccgttcatgaaccccatatggctatattctcagccgtctatt

SEQ ID NO: 3874 - DNA, 281 bp, Zea mays
  misc_feature: Incyte ID No: 700352735H1
  unsure 47, 211, 261: a, t, c, g, or other
ccccaccatatccggccagcccaacgaaaatgtcgcgcgccacagcngcggtcctcttctacatgcctcgccgtcgctgccctcagcgcggccgaggcaccggcagagtcaccgaaggcaggcagtcctgccaaggcaccggccgagtcaccgaaggcaggcagtcctgcagctcctgccaaggcacccgagtctgctgccagcagaactnccccccgctaaggcacctcaagccgcctccacccccgccgctgccgcgcnatcgtcgtcgtcgtctagga

SEQ ID NO: 3875 - DNA, 277 bp, Zea mays
  misc_feature: Incyte ID No: 700352736H1
  unsure 164, 172: a, t, c, g, or other
ggcaaaggctctcctaggtggcctatcggcgatcctcgtcgtggcggtggtcgtccggtgtggtcgcaaccgtcacgcgctccggcaagaaggccggcgacaacttcacggtcacgggggaggcttcccttgccacgtccggcaagtcggtcaagtccctgtgngcgcacancctatacaaggagtcgtgcgagaagacactgtcccaggccaccaatggcaccgagaaccccaaggaggtgttccacagcgtgcaagtggcgctggagtcggtcca

SEQ ID NO: 3876 - DNA, 275 bp, Zea mays
  misc_feature: Incyte ID No: 700352737H1
ctcgcctctctctcgcgcaagccacagtagagcaaccaaccataccaccggcccgtgtcgatctctggcctctctcgtgcaaggaattaagcaggcaagaggccaaccttcttccagcatggccaaggcgagcagcaggctgctcttctcgctctcgctcgtcgtcctgctgctcctcgtggagaccactacttctccccatggacaggctgacgccatcgactgcggcgcgagtgctcgtaccggtgcagcatcggaggcccaagatgtgcctg

SEQ ID NO: 3877 - DNA, 276 bp, Zea mays
  misc_feature: Incyte ID No: 700352738H1
  unsure 40, 89, 102, 241: a, t, c, g, or other
tcgccgtcagcccctcattcccttccgaccgcatgtggcncaatggcaaggagatctcgctattaggaggaaggtttcagagctgcctnagagaaatcaganagcgtgctcgtgactttgaggacaaggagaagggcgtcaagatcaagacagaggactgggacaagttgcatgttcacatagcctcgtacaacaacttccccactgctgctggtttggcctcttcagctgctggccttgnctgtttcgttttacctgaaagctgatgaatgcgaa

SEQ ID NO: 3878 - DNA, 284 bp, Zea mays
  misc_feature: Incyte ID No: 700352740H1
  unsure 2, 10, 40, 192-193, 224: a, t, c, g, or other
gncgcgtggnagccgctcggcatcagcgctcgcaagcgcncccgcctccgcaaggaggtggctcctcgccggcgaggactggagctacgatcctccccgcggggagatgcgtaccaagcgccaaggtgccacaagtggcgaccgcatctccgccgagaagcgagcaaatactgttgagctgatgaagaagannccccagatgctgctcgactacaagaaacgtnagtgggagaagaagatgaaagcggaggagagcggcaaatgtaccacgcggctcgtccagg

SEQ ID NO: 3879 - DNA, 279 bp, Zea mays
  misc_feature: Incyte ID No: 700352741H1
  unsure 49, 124, 130, 136-137, 198, 257: a, t, c, g, or other
gccccagtctcctaaaccctacacatctctctcggccccggtaattgcnatcgccatggccgggaggcgcccggcaccggtggccatcctccttctcctcgccgcggcattcgcccccatctcntccgcngttcgnncagtctccgacgagcacagatccgctgccgtggagcttttcgcccataccgctgacggatncttcggcgatttggagagtacgtatgaggcggtgaggatttccagatactcgggctggnaatataagagtctgtctgggaa

SEQ ID NO: 3880 - DNA, 280 bp, Zea mays
  misc_feature: Incyte ID No: 700352743H1
  unsure 83: a, t, c, g, or other
aaatgataatgtcatgaacagacatcctcaaacattgacaagaagtgcttcttatccttgtgagaacaatgaatctgaaagancgaggattagggaaaagaactctgggggatcctcaagttacaatgggtacttcaatggtagtggatggctcattgtatcatccatgtcctctgatatctctgttgaagaaagcagctttcgacaactgcagaatgctgttagtcagctggatgtgcaaaccaaattgtgcattggatggtttataccgattggcacg

SEQ ID NO: 3881 - DNA, 279 bp, Zea mays
  misc_feature: Incyte ID No: 700352744H1
  unsure 41, 265, 268: a, t, c, g, or other
gcgacatcatagaggccaccggaaacgacgctgtagcccangtcatggccgagctcaagaatgctatagaggaacagcgataccaggacgcgtcaaggttgacaaggcttgctgggaccagcttggtaggttggtgggtgggatatgctaaggacactgatgattccatcgggagaattgtacgaataagccctggtgtcgggagatatgtggcgaagagctacaacccaaggcaattggtcactgcatctcaggttcaagtatntgnaattttccttg

SEQ ID NO: 3882 - DNA, 278 bp, Zea mays
  misc_feature: Incyte ID No: 700352745H1
  unsure 167: a, t, c, g, or other
ttaatgttgccctgcttgcacagcttccgtctagatgtatcaagagggcatccgtcatggcagccaaactgcaagaggagttaagtccgcgggaggaaatcaagcttcggaggacaacggatgcacaaactgtggacggaccatctgaaagttccgcagaagttggnctgttttgtgcacatccttatcaacgattggcagaaacatgtcgcaggatactgctgaacatcacgttggctcaaagcaataatgatgtcgacacacttccttctttgaaa

SEQ ID NO: 3883 - DNA, 278 bp, Zea mays
  misc_feature: Incyte ID No: 700352746H1
ctcatctcccttaccgccactcccagccctgaggctgacaccctctcccatggagccttgagcgccagaaacagccctgtcatggtgccgcgccgcagcatgggcaacgctgctgacgccaccgggagcggccggacggaggaagctttcgtcgttcggttggggcgttatcccggcgccataaccgtgcccctctgctcgactctttcttccccgcgctcttctctcccaattcggtcgcgggtgtcggggtccaattgcactgcacggagaataca

SEQ ID NO: 3884 - DNA, 283 bp, Zea mays
  misc_feature: Incyte ID No: 700352747H1
  unsure 263: a, t, c, g, or other
gaagtccagcagtgtgctggtagacagaacatctgagatacaaaatgtgtctgagaagccgcatgatgctaaggtgatcaatcctcaggagccgcgtgcctctgataagcaggcgagtgaggctgagaaagagaatgaactacaggaaagtcattgcagcggcagtcagaaccaagaggatgcagcgaaaactgcaaccaaccatccaccaggtccaagcttgaaggcggcaggtgcggatgggaaacagcagtactggagangtcgaaaatccaaagcagca

SEQ ID NO: 3885 - DNA, 281 bp, Zea mays
  misc_feature: Incyte ID No: 700352748H1
cgaggcaaacttgatttggaatctgaaccatggccaagtatctctgatagtgctaaggatttagtccgtaagatgcttatccgcgatcctacaaagaggttcactgctcatgaggttttatgtcatccatggattgttgatgatgctgtcgcacctgataagcctattgattctgctgttttgtcaaggctgaaaaacttttctgcaatgaacaagctcaagaagatggcattgagggtgatgctgaaagtctatctagagagattgggggtttgaaggag

SEQ ID NO: 3886 - DNA, 276 bp, Zea mays
  misc_feature: Incyte ID No: 700352749H1
  unsure 253: a, t, c, g, or other
aataggcgccagttcatccgcttccattcctagttctcaccacccagaagtccacctccttgttgccttcctccaatcccaaatctcacctccttccagttccagctatcgcttctcgtgttggctcgcctcttcctccattcagtggctccttagatcggctcagggacacaccagctgatcgtgtcggcgccgaatctagtggcaatttctcgctattgttgccccggagcagtggtttggatccaagaanggcgaccttcttggttgtatatc

SEQ ID NO: 3887 - DNA, 277 bp, Zea mays
  misc_feature: Incyte ID No: 700352750H1
gcacgtcgaggacgaagaagaggacgaggaaggcaacaagcgcgtcgtcgtgcttggcccccaggtccccctcaaggaacagcttcgagctcgacaaggacgatgagagcctgaggaggtggaaggagcagctccttgggcaggtcgacaccgagcagctaggagaaactgcggagccagaggtcacggtgctggacctgacgatcctgtcgccgggcagaccggacctggtccttcccatcccgttccaggcgagaaagggctatgcgtttgctct

SEQ ID NO: 3888 - DNA, 276 bp, Zea mays
  misc_feature: Incyte ID No: 700352751H1
  unsure 26, 49, 92, 194-196: a, t, c, g, or other
ggtggtttgcttaggcgcagacgggngaagcggagccaacaggccagtngcccggagctgggtttgtcgcaaaacttatgtgaccccgcggngacccttcgagaaatctccgtctcgaccaagagctgaagctgatcggcgagtatgggctccggaacaaacgtgaggtctggagggtcaaatttaccctggcnnngatccgcaaggccgcccgggaactgctgacgcttgatgagaaggacccacggcgtctttcaaggcaacgccctgttgcgg

SEQ ID NO: 3889 - DNA, 137 bp, Zea mays
  misc_feature: Incyte ID No: 700352752H1
  unsure 34, 44, 90: a, t, c, g, or other
ccacaactgacgcgccgcactcaccgcgccagtnagccacgctncgggctcgatccggcatcgattcccccaatcccgcacccgcacacncaaactcgcaatccctagcactagcaccgccgcggcggcaggcaggt

SEQ ID NO: 3890 - DNA, 274 bp, Zea mays
  misc_feature: Incyte ID No: 700352753H1
acacgcaagaaggcaagtgccacgaccgcccatccgcagtaatgccttgatccgccgatggtgccgcgcggcggtaggcaccgctactttcttgccgcatgaactgatggatcatgccacctccgctggtcggatattaccggggtcatgcactgcacaagacaacgatgcaacaaatcctatgtcgcttgtcatcatggttgcacttccctaatccggtttgatcccgacggaggtttgcacactagaagctcttttctcgattttgatgaga

SEQ ID NO: 3891 - DNA, 278 bp, Zea mays
  misc_feature: Incyte ID No: 700352757H1
  unsure 11, 57, 92, 110-128: a, t, c, g, or other
agctagcgcanagcagcactagttttcagcagttcatcaaccggcccggcacggcgngcagagatgaggcggcgcagtgcagcatgcccttnccgctcgcggctgctgcnnnnnnnnnnnnnnnnnnntgtttcttccactacttcagcagcggctcgcctcctgccgccttctcctgtcccagctcagttggttcaccgagaaactggcgtcacggctgccgctgccgctgcatacggcggcctggcgtgcagagtggcgtgggcaaacggcgacga

SEQ ID NO: 3892 - DNA, 276 bp, Zea mays
  misc_feature: Incyte ID No: 700352760H1
  unsure 6, 88-89, 267: a, t, c, g, or other
gcgaangctagaagagctcttcccgatagccatggccaagcccccgcttcaaacggctgcgatcatcctcctcgtactcctctcggcnnccgtcgtgcctccacaccgtcgatgccgccactttagggttctgttggggcaagtgcagcgttcggtgcgcgggggcgaccgcgcggcaggcgcgagccgcgtgcatgagctcctgtggcctctgctgcgaggcatgcaatgcgtgccgcacgacatccatgatcctgctaccgcaanatgctcacc

SEQ ID NO: 3893 - DNA, 279 bp, Zea mays
  misc_feature: Incyte ID No: 700352761H1
  unsure 26, 42, 74, 170, 173, 218, 226-227, 238, 241, 245, 263, 266, 270: a, t, c, g, or other
gtgggcccttccctccggcgtccgcngccgtcaccactcgtngttttcctagttcgcacacccatccggcctcncccccgtcctcgatagtcgataccaggttctaaatggcgatggcgatgatggctatgcgacgcgcggtggcgctcggagctcgccacatccccgcngcngcagcctcttcgttccgagtcgtctccctccggcacatgagcgcngacggggnnccgcgatgggngangatncgcgccggccggtgtcangangcanggctttatc

SEQ ID NO: 3894 - DNA, 278 bp, Zea mays
  misc_feature: Incyte ID No: 700352762H1
ggcactagcacctcctcgcctccacctccgtcctcttcgatcccgtccaatcccccgcgccccggcgcccctctcccgccggcggctttgctgggtcccgcgctcctcctcctcctaggctgttctggttggggctgcggcggagggaactaggtaagggggaaggaaaggggaggtttgagggagagcgcacgacagcgggcagcagcgatgccatcgcacgcggatctggaccgccagatctcgcagctgcgggatgaattcctgcctgaggggag

SEQ ID NO: 3895 - DNA, 275 bp, Zea mays
  misc_feature: Incyte ID No: 700352765H1
  unsure 18, 38, 45, 52: a, t, c, g, or other
ctccaagtgcggcgtcanatcccctacaccatcagcanctccacngactgcncccagggtgaactaaaacctagaccacgcgcgacgaccggccgcctgatcgatcgaccaaccattccgccgtcgccgccggccggatcatcgatcgtcgtcatgatgatatctatcaatctacgcgtgatgatcgatggctacttgtctactgctatgtactactaaataaaatctctccgtgtgtgcacgtacgcttgcaggaggtagcatgtatgtacgac

SEQ ID NO: 3896 - DNA, 275 bp, Zea mays
  misc_feature: Incyte ID No: 700352766H1
ctcaggtttggggggaaaaggcctcgcgggtcgcaaaccgctctctgttgatttgggatttgggaggcgctcgagttttcaggtaaaccatagtttagtgacccatggctcgtactaagcaaactgctcgcaagtcccactggagggaaggctcctaggaagcaacttgccaccaaggctgcccgtaagtctgcacccacaactgggggagtaaagaagcctcatcgttaccgccctggaactgttgctctgtgaatccgcaagtatcagaagag

SEQ ID NO: 3897 - DNA, 278 bp, Zea mays
  misc_feature: Incyte ID No: 700352768H1
gcataccacacgcacgcacactcccccactccctctccaccctgcttccgtttccggccggcgatggcgacgaccgccgccgcatccacgtcgctccggccgctgtcaccgtccccacctcgcatcgcgagtttgccccgtcggtggtgttggggaatcccggtgcagtcctccgggaggaggcattccatgctcaacggcggaggcggagcactttattatgcgctgctgataaagctcctgaagaatccctcaaagacattgaagtggataggctt

SEQ ID NO: 3898 - DNA, 273 bp, Zea mays
  misc_feature: Incyte ID No: 700352769H1
atccgcagagactcggaagtcggaaagaatccctcctgttcttcgtcaaccctccagaacctgctctctcttcctctacgagactacgaccgtgtaaggacatggccgtcgagcgcttgaagaccgggttcgagcagttcaaggccgacgtctacgacaagaagccggagctgttcgagccactcaaggcgcaccagtcgcccaagtacatggtgttcgcctgctccgactcccgcgtgtgcccgtcggtactgggcctgcaccccggcgagg

SEQ ID NO: 3899 - DNA, 271 bp, Zea mays
  misc_feature: Incyte ID No: 700352770H1
  unsure 248: a, t, c, g, or other
cgtcatctacccctgggagacgtttcaaggactgcgagcgataggatgtggactcactgtatcattcgcgttctccatactgatcaacctcttcctcagttatcccactcagccgggatggttaccttctcctttgctgtccatccgtatagacaacatccacaagggtaagcacgggagtgattctgaaacttacgacactgaagggaggtttgatccatcaaagttcgatgctatattcagtaagngccgaacccatcctaatgctcta

SEQ ID NO: 3900 - DNA, 276 bp, Zea mays
  misc_feature: Incyte ID No: 700352771H1
  unsure 2, 253: a, t, c, g, or other
gnagcacgccgcacgagccctttccgccgccgccaaaatggtgaacgttcctaagaccaagaagacctactgacaagaacaaggagtgcaagaagcacactctccacaaggttactcagtacaagaagggtaaggatagcctgtctgcccagggaaagcgccgttatgaccgcaagcagtcaggatatggtggccagaccaagcctgtcttccacaagaaggccaagaccaccaagaaaatcgtattgaagtnaggccagagctgcaagcactact

SEQ ID NO: 3901 - DNA, 270 bp, Zea mays
  misc_feature: Incyte ID No: 700352774H1
  unsure 92, 164: a, t, c, g, or other
gagcatcagaacgcgttaccactgatgcttctctcgggaaggagagttgatcggcattgaacacgcacacgctatagtttttacccggtgantggaccatttgcattggaacgatacgtttgagttctctagtgttatttccagtggcctaagctagcaacagnctatagttgggttggcactgcaaacttctaccgttcgagttgggtattagagctagttattggttcatgttgaacttatattatctactgctgcagttatgtttgc

SEQ ID NO: 3902 - DNA, 272 bp, Zea mays
  misc_feature: Incyte ID No: 700352778H1
aattaaataagttttgcgtatatattttatccctatctataaattatgcatgtgttgtaaacaagtcgtggatgggctcatttgttctcgcgattgaaaaataacaaataaacaaagtagaaaagaggatgaaccagaagtcttgttcagcaagaaggaaggaggaatgacgatatttcccatgtgatacttgtaaatcatatgtgtaaacttcgtgggcgtgctgtaatttcatacgaagtgtacctcctcataaatagagtaacagtgtc

SEQ ID NO: 3903 - DNA, 275 bp, Zea mays
  misc_feature: Incyte ID No: 700352779H1
  unsure 18-19: a, t, c, g, or other
ccaatggaactgtcaggnnctgcacttgacactgggtgcggggtggctagctggggagcttatttgttgaagaggaatgtcttggccatgtcgtttgccccgagagattcacacgaggcacaagtgcagtttgctctggagagaggtgtccctgctgttattggcgtccttggtacaataaaacttccctatccatcgagggccttgacatggcccattgttccaggtgctgattccatggggagcaaatgagatgtacatgatggaagttgata

SEQ ID NO: 3904 - DNA, 280 bp, Zea mays
  misc_feature: Incyte ID No: 700352780H1
  unsure 2, 8, 50-51, 257, 264: a, t, c, g, or other
gnattgtnggcgagtgcgtgcgttcgtgcagccacagacaggcgtccggnnaccatgtctttcaccggcacgcaggacaagtgcacggcgtgcgacaagaccgtccacttcatcgacctcctcacggccgacggcgccatctaccataagacatgcttcaagtgcagccactgcaaaggggtcctctcgatgtgcagctactcctccatggacggtgtgctgtactgcaagacccacttcgagcagctcttcaaggnacgggancttctccaagaacttc

SEQ ID NO: 3905 - DNA, 275 bp, Zea mays
  misc_feature: Incyte ID No: 700352781H1
  unsure 55, 253, 255: a, t, c, g, or other
cgccctctcaaggaggccggccacgcctcacactcccgtccgcctccggcgattncatccacccaataaagtatccaaccctaaacgatccggatcgccttaccccgcgtcatccacgcgaattgtttcgattatcctcggatttccccgtttttttgtgggtttcctatcttcttcgatcggagtgctagggtttgggcgcgctcggtgggcggcgtactccagggtcatcgttagttggacgggctagggntnctcaccgggggaagggaagc

SEQ ID NO: 3906 - DNA, 269 bp, Zea mays
  misc_feature: Incyte ID No: 700352782H1
  unsure 196: a, t, c, g, or other
actgttcttgctacttctagatagaggaacaagagagagaaggccaccgacatcgcctcttaacccgacaagccccattgcccaggagaaccccgtgccggggagcgagccgcgcgcattccccgtcccgtgccaccggaccaggggaaggaggacacacatgtcgtcgtctctctctccagcggcggcagcgganccctggatctggacggcaactccgtcgcgcccctcaccatctgcatgattgtgcggcggttcatcggctccca

SEQ ID NO: 3907 - DNA, 270 bp, Zea mays
  misc_feature: Incyte ID No: 700352783H1
  unsure 246: a, t, c, g, or other
cgacatgatgctgtaagggatctagagaggaagcttctggagttgcaacagatattcatggacatggcagttcttgttgaggcgcaaggagacatgatcaacaacatcgagacccatgtctcgaacgccaccaaccacatacagcaaggtgtgagcgcgctccagaacgcgaagaaactgcagaggaattcgaggaagtggatgtgctacgccatcatcatactgctggtgatagtcgtggtcatngctgcagtcatccagccatggaag

SEQ ID NO: 3908 - DNA, 272 bp, Zea mays
  misc_feature: Incyte ID No: 700352785H1
  unsure 28, 84: a, t, c, g, or other
gttgggtcagccatggggacgtccctcnccggcctcccccacccgccatcgcccaaaaggagcagcgatccatccatcctatcnctgtgccaaaccctagccggctatggagcatcccgccgccacctcctcacctgatccgacgccgtagcacctctccctgtccctgtccccatctccctccgtctccctggccaagcactccacctggaagcaccctgccccgaactgcaccgcagttcgtcgacgtaggtggcccacgctctccaagg

SEQ ID NO: 3909 - DNA, 269 bp, Zea mays
  misc_feature: Incyte ID No: 700352787H1
  unsure 49: a, t, c, g, or other
gcttccttccagtcgccatgcgtgatcttaggaaatatgctcctgatgntaaagatggtggttgggaggatgttggagggctagatgaagcagtaactatcattaaagagactcttgaattgccgtcaaaatacccaaatatctttaccagggcacctgtgcggttgcggtcaaacattctcctgtatggaccacctggatgtggtaaaactcacattgtgagagctgcggctgctgcttgttcttggttcatttcagtcaagggtcca

SEQ ID NO: 3910 - DNA, 275 bp, Zea mays
  misc_feature: Incyte ID No: 700352788H1
  unsure 182, 184, 210-211, 221, 243: a, t, c, g, or other
cggaggtgcaggtcctggtgcttgatggtcgaggccatctcctgggccgcctggcggccatcgtggctaaacaggtactgctgggccggaaggtggtggtcgtacgctgtgaaggcatcaacatttctggcaattctacagaaacaagttgaagtacctgggctttcctccgcaagcggatncnacaccaacccttcccgaggcccctannactttccggngcacccagccgcatcttctggnggaccgtgaagatgctgccccaagaaaaccaa

SEQ ID NO: 3911 - DNA, 271 bp, Zea mays
  misc_feature: Incyte ID No: 700352790H1
  unsure 227: a, t, c, g, or other
ctcctcccactccacggagaagcgaaaccgacctttccccctcccccgcattccaccttcgcggagatccagtccagccctagggtttcgccagcgggagccaaactccacgagcgggggaagaggggaaagcagggacgacgagggggcagccatggggcagcagtcgctgatctacgcgttcgtggcccgtggcacggtcatactggccgagtacacggattcancggcaacttcaccaccatcgctccatgcctcatgaagtccccgc

SEQ ID NO: 3912 - DNA, 270 bp, Zea mays
  misc_feature: Incyte ID No: 700352791H1
  unsure 61, 91, 101, 111, 151-152, 225, 244, 265: a, t, c, g, or other
agcagccgcagtcccggcgatcccgccgccggtcgccctcatacttcctcgtcactgcctncgtttctctttccaacaatcaagatgagcngtggcggtancgcgggtggnggtcaaagttctctgggttacctctttggaagcggtgagnnccccaaaccagcagtggcacagctgtaagtgctccacctgctgctgcagtgctccacctgctgagaaaccacntgctgcaaagcctgatggnaccctatttgcgctggggttnacaac

SEQ ID NO: 3913 - DNA, 274 bp, Zea mays
  misc_feature: Incyte ID No: 700352794H1
acaaagaagtcactcaaggatgttgtcacagagaatgaatttgaaaaacgtcttcttccagatgtcatccctccagatgagattggtgttacctttgaggatattggagcattagaaaatgtcaaggaaactttgcaggagttagttatgcttcctttgcaaaggcctgagttgttctccaaaggacaacttatgaagccatgtaaagggatattgctttttggtccacctggcaccggtaagaccatgctgcaagctgttgcaacagaggctg

SEQ ID NO: 3914 - DNA, 274 bp, Zea mays
  misc_feature: Incyte ID No: 700352796H1
  unsure 230: a, t, c, g, or other
cggagttccgtgcggcttctcatagggttcctgctaattcggttcaattggtgctcggcggtgggcgacaagggcgcggggaaagtaggtgtggctttcccggtggtggtgagcacctggccgttccgtgaggcggtcagagcggcgtggaaggtggtttcgaccggtgaaggatggggttcggccgtcgatgctgtcgtcgctggctgctccgcctgcgaggacctccnctgcgatggtacagttggtccgtgaagtccagatgagaacgggg

SEQ ID NO: 3915 - DNA, 288 bp, Zea mays
  misc_feature: Incyte ID No: 700352802H1
  unsure 250: a, t, c, g, or other
gtggccgtggccgtggccgtgcgcaaaaaaacaaaccatcctcgattcgaccggaggggaaggagacgcgccgggagaagggggaagagacgcggcgaccatgtctccgatctgggtgttcgggtacggctcgctgatctggaacccaggcttcgcctacgacgaccgcgtctcgctttgtcagggactaccgccgcgtcttctaccaagggagcacggaccacaggggcacgccgcagttccccgggangaccgtcacgctcgagcaccagcccggagcgacttgct

SEQ ID NO: 3916 - DNA, 291 bp, Zea mays
  misc_feature: Incyte ID No: 700352804H1
  unsure 3, 84, 167, 231, 282: a, t, c, g, or other
ggnagcagatccaacaaaggttcaaatttgtggcatggattatggcttctatgagaagaaaattgaaatccgtcattcaatagngagtgaaggcattcctcatacttacatatgctgcaacttctttatgcgctatttgcttccttcactggtgcaacctgggctanatgctcctcctagagatgaaatcaaaatatttggtgaaggaaatactaaaggtgtttttgttanagagaatgatgttgctaaatttacaatatgcaccatagaggatcccagaanttgaacaag

SEQ ID NO: 3917 - DNA, 210 bp, Zea mays
  misc_feature: Incyte ID No: 700352805H1
cctctacgacttagatctagtgatgtgttcactctagatttaagtgaagacaagccttgctggcggtgcataactggcagcaggatgccaggagctggtaatcctgctggggtcggcccaccacctcgcctcgaccatgttgtcgtgagccttcctggtgggagagttctgatatttggtggttctgtggcgggtcttcactctgcttca

SEQ ID NO: 3918 - DNA, 213 bp, Zea mays
  misc_feature: Incyte ID No: 700352806H1
  unsure 2, 41, 43, 57, 75-76, 95, 124, 129, 131, 148, 151-152, 176, 178: a, t, c, g, or other
gntgcaagagaggaaagccaaacagcagcagtcgctgaaanangtcattgatgtgangtgtgcagcgtcaccganntggagagaagtccctaaangagagactggatccaacagaagttactgnggttnanactgacgtcttgaacanagnncgtttattaggcgaagcaggagananaaatggcgagaaaggaaatgatgtcgccccacagg

SEQ ID NO: 3919 - DNA, 292 bp, Zea mays
  misc_feature: Incyte ID No: 700352809H1
ggtggaaaaggccacagaaatttggaacatcatctcaaatggtggttacttatatgtttgcggtgatgccaagggaatgggctagagatgtacacaaaatgcttcatacaatagtccaagagcagggatctttggataactccaaaaccgagagctatgtaaagagcctgcagatggaaggaaggtacctccgtgatgtatggtgacacatcacctcaaataagccatagctctagcgtgtggaagtaagctggctttgcgtgtatgacatgtctatgccaacccatcgtag

SEQ ID NO: 3920 - DNA, 187 bp, Zea mays
  misc_feature: Incyte ID No: 700352810H1
ctgacttgttcgagcagaggtgtaacgaaatcgtgtggtgctgtgagaaattcgaatcccttcgcgttactgtcggtactcgctaggcgtgctgatgtattaactctgttggcgcaggtgatcatagtgtcttgaaacaatgttaaaagttacatcggtagacacgaaacaaccaacagttgtggcc

SEQ ID NO: 3921 - DNA, 297 bp, Zea mays
  misc_feature: Incyte ID No: 700352811H1
gcgccagatgaggagggacctcgcatcctccttcgctaccgccgcatcctcttcgtcggcagccgacgcgctcccggggcaaggtgggatgaacgtcaaacgagtcgccccagtggcaggacgcggccttcttctccctcgccgccgcctacgccctcgtctccgccgtcgcactgattcagctcgtcaggatccagcgccgggtgcccgagttcggatggaccacgcagaaggtcttccacctcatgaattccttgtcaaggggtccgtgctctggtattcggcttccatgtcacg

SEQ ID NO: 3922 - DNA, 293 bp, Zea mays
  misc_feature: Incyte ID No: 700352812H1
gcaggccggcgcacctgttcctggacgagctgggcgtgggctacgacgaggccgaggactacgtggtggtcaagcacgcggcgctgttcaacgtccaccgtgatgagccggctcctggcgcggcccaacgtgaagtgttcaacgccgtggcggtggaggccctgatcgtgcggcgggggcgcgtcggcggcgtggtcaccaatgggcgctcgtgtccatgaaccacgacacgcatcgtgcatggaccccaacgtgatggaggccaaggtggtggtcagctctgcggccacgac

SEQ ID NO: 3923 - DNA, 300 bp, Zea mays
  misc_feature: Incyte ID No: 700352813H1
  unsure 126: a, t, c, g, or other
ccaagatgggtgcatacaagtacatccaggagctatggagaaagaagcagtctgatgtcatgcgctttcttctgagggtccgctgctggcagtaccgccaagcttctctgctctccaacaagggcntccccgccccacccggcctgataaaccgcgccgactgggctaaaaggccaagcaaggttacgttatatataggattcgtgttcgccgtggtggccgaaaacgcccattctaaagggtgcaattacggcaagcctgtccatcatggtgttaaccagctaaagtttgctcgaagcc

SEQ ID NO: 3924 - DNA, 215 bp, Zea mays
  misc_feature: Incyte ID No: 700352815H1
  unsure 30, 65, 71, 98, 126, 136, 141, 143, 156, 172, 187, 193, 205, 212, 214: a, t, c, g, or other
cgtatttctcaatctatctatacggttcangtcgaccgaagaaggtacagagagaaacttgaagnggagangaaggagatacaggttcatgttcattncgtgtcagttcatctgattcctcagaancaaaatgctntttgnangctccatgacacnatcctgtatgcatgtncctttacgggaaaanggaggncattcctgcccnccccagncna

SEQ ID NO: 3925 - DNA, 172 bp, Zea mays
  misc_feature: Incyte ID No: 700352817H1
  unsure 2, 7, 12, 23, 26, 61, 65, 83: a, t, c, g, or other
tntctanggttntgctgctctcngancccgagctccgaaggccgcagcatcaggtcgaggncccncttcgcgtgtggaccganatggcgctgccgaatcaggggaaccgttgattaccccagcttcaagcttcgtcatcgtcggcgatggtggaactggtaaaactacattt

SEQ ID NO: 3926 - DNA, 292 bp, Zea mays
  misc_feature: Incyte ID No: 700352818H1
gtataatggacttttttggatcaatgctcccaggcgaaaatgttcgaggaaatacttcaagccagcaaccaccaatggcttccaccgagcagggagagggtagaaatcttgcaacaccagaagtgtcaggagccagtgaggaggccctacgctttgctggcatggtcagacaaattatgccatttatctcccaagttgaaacacagaatcaaagtgccccaccagacagcagcagcacacctgcacaggctgcatctgggagtgcagacagagctagggatgtcccaaaatg

SEQ ID NO: 3927 - DNA, 170 bp, Zea mays
  misc_feature: Incyte ID No: 700352820H1
  unsure 169: a, t, c, g, or other
gaggcggtctattggtagtgtcagtgtgcttctttttgtctggcgcaagcacaaaagaaggaaacaggcaagagcaaccgaatggctgcatgcgtagtgaatcttcgatgcaatcgtatagcaaagaccttgagttgggtggctctccacacattttcacttacgaggng

SEQ ID NO: 3928 - DNA, 169 bp, Zea mays
  misc_feature: Incyte ID No: 700352821H1
  unsure 34, 97, 99, 117, 144, 149, 159, 166: a, t, c, g, or other
atggaggtgcgtgtgagcagctcggaggtcagcngccgagagctcataggcaatggcaaccgcaaggaaggatcctcagaaggttgataaagtcaantnggaaacccagcgagtctngcaaaggggtagtacggcgtgaaaggnctgtnccgactctcnggatcgnaga

SEQ ID NO: 3929 - DNA, 291 bp, Zea mays
  misc_feature: Incyte ID No: 700352822H1
  unsure 194: a, t, c, g, or other
ctatgccctgcacccgcagacggggagctcgcgtcttccttcggatggtggatgcatgcatgcatggtagacacgccggccccaaccagaattgacaagtggaagcgtatgggtattaccagcaacgacgcggcccctcgtgccgtcctcctccgcttcttgtttctgctctgcataggctgcaaatgcctggnatcagaggtagaggccacccagacggcgaccctcgcggtggacgcctcgccgcagcttgctcggaagatccctgatacactgttcgggatcttcttt

SEQ ID NO: 3930 - DNA, 289 bp, Zea mays
  misc_feature: Incyte ID No: 700352823H1
tcaacttgttagtatggagttcacaattgaaacctttcttgctagagtttatcttgaacaagagatgaaaaatgtcatccattcaggaaaagggaaaacaagcatgcgcaccaatggaaacacaaagataactctttcttagtaatgtgccaatgctttcagtttactctgtcgcttactctgatcggatctaacgcagccgctcaatatgggcacgtgatacttttcaacgtgacaatgtgggggtgctacgtcaacagcctcaaagctttgtcgtccctccaggcaa

SEQ ID NO: 3931 - DNA, 173 bp, Zea mays
  misc_feature: Incyte ID No: 700352824H1
ggatttacatacctgtgatgaattggtttctaatggtcatgtgcatcatcatcgtggcaacttttaggagtaccaatgatattgcccaatgccatacggcattgctgaagttggcgtcatgatggttagcactgcactggtgactttggtgatgcttcttatatggcaaacca

SEQ ID NO: 3932 - DNA, 291 bp, Zea mays
  misc_feature: Incyte ID No: 700352825H1
  unsure 167-168, 259, 267, 271, 273, 283, 289: a, t, c, g, or other
ggagatcccagggaagtcctgcagcacttgcaaccacatttctcacctttgtgttgaatctggccttttctttgagcgttcttggttttatgattatgcatatttcacttgtttctgctaatacaacaacaattgaggcatatgagaagaagacaactccacattgnntatatgatcttggccggaagaggaattttgctcaggtttttggaaatgacagaaaatattggttcatccctgcatactcagaagaggattngagaggantccncnctaaagggcngggttncc

SEQ ID NO: 3933 - DNA, 294 bp, Zea mays
  misc_feature: Incyte ID No: 700352826H1
  unsure 253, 255, 271, 274: a, t, c, g, or other
gacgcaacgatgctcatccccaagggcgactacctggtgggccctctctacttcagtggcccgtgcatgggggacatcaccatccagcttcgatggcatcctgctgggatccaacgacctggccaagtacacggcgagttggatccaggtgtcgcacgttaacaacatcgtcatcaacggctccggcacgctcgatggccagggcaccgcagtatataccaagagcaagaccgacgtcgtcaaggcgatgccnancacactagtgttgttntangtgaccaacggcactgtttc

SEQ ID NO: 3934 - DNA, 295 bp, Zea mays
  misc_feature: Incyte ID No: 700352827H1
  unsure 39, 267: a, t, c, g, or other
gcaggtctccgtccacgcgctcgccgccggcaagaaggncatcctcttcggcgtccccggcgccttcaccccgacctgcagcaaccagcatgtgccaggcttcatcacacaggctgagcagctcaaagccaagggtgtagacgagatcctgcttatcagcgttaacgaccccttcgtcatgaaggcgtgggcgaagacctaccccgagaacaagcacgtgaattcctcgccgacggatctggagcgtacaccaaggcgctcgacctngagctcgatctcacggacaaagggctgg

SEQ ID NO: 3935 - DNA, 291 bp, Zea mays
  misc_feature: Incyte ID No: 700352828H1
ttcgctttcccgttctctctcaccttacctcacactcctctccatcgattaatctcctcccccctcaacaaccgcgagatcttcagctaccgctctctccggtcgcgtttgcatccgcattcctcagatccagattcgagccccagccccgcttcgagatccagctagctctctatcaagcatccggcggaggagcagcggggggctcggcgagagagaagatgaagcggaagacgcggaacaagatcatcgtatggacatggccctggctgcagtggcgattctggtggg

SEQ ID NO: 3936 - DNA, 214 bp, Zea mays
  misc_feature: Incyte ID No: 700352829H1
  unsure 55, 71, 123, 126, 133, 136, 197-198: a, t, c, g, or other
tggaacgtgttatagacatgtttgcagatgatgacactgttactgaacttgattnggatagcccgacaganggcttcacatcaattgcagaagcccattgaggacatacagcaaggaaaactngtngattgtngtngatgatgaatcaggggaaaatgaaggagatctgataatggctgcctccttggttaccccannggctatggcttttata

SEQ ID NO: 3937 - DNA, 281 bp, Zea mays
  misc_feature: Incyte ID No: 700352834H1
ccgaaatcccgttgcgtctctcgcgcgttaccaagctctcaagttttctcgcgccgacggcaatggatgaggtcaccgaggccgtgaacaacctcaacatctcgggcgtaggggccgcgggcgttgccggggcggaagggcacaagaagaatcgcatccaggtctccaacactaagaagcccctcttcttctatgtcaacctcgccaagaggtacatgcagctgcacaacgaatagagctgtcggccctcggcatggcattgcgacggtggtgaagtagaa

SEQ ID NO: 3938 - DNA, 284 bp, Zea mays
  misc_feature: Incyte ID No: 700352836H1
gggcagccggcctcggtctccgatccccggtgtggcgtggccagccagcgcggcccaccagcacagacttccaccggcgagccttcttctctgatcgcgattcgtttccaagctttgagaaatcgacggtcaagcttcggcgaccaaatgatcctgttcttcgagttctatgagatcgaagaccctgagcatctatttggtgaaggttgtcagcattgcaaccatgctcaggagaaggtgaagccgtggaaggagattccaggagttccaagattacgacgagt

SEQ ID NO: 3939 - DNA, 206 bp, Zea mays
  misc_feature: Incyte ID No: 700352838H1
  unsure 152: a, t, c, g, or other
gagatcccaggaagtcctgcagcacttgcaaccacatttctcacctttgtgttgaatctggccttttctttgagcgttcttggttttatgattatgcatatttcacttgtttctgctaatacaacaacaattgaggcatatgagaagaaganaactccacattggatatatgatcttggccggaagaggaattttgctcaggtttt

SEQ ID NO: 3940 - DNA, 207 bp, Zea mays
  misc_feature: Incyte ID No: 700352839H1
aacaactccttgcacgtcttgatgtttgcatgggtgggagggttgctgaagagctgatctttggggaagacaatgttacaactggggcaagaaatgaccttcacactgcaacagagcttgcccagtacatggtatcgaactgtgggatgagtgatgctatcggtcctgtgcatgtgaaagaacgaccaagcatagagatgcatccag

SEQ ID NO: 3941 - DNA, 210 bp, Zea mays
  misc_feature: Incyte ID No: 700352841H1
  unsure 84: a, t, c, g, or other
cctaaaggcgagattaaaaacctgcctaagggagccacagtggttgattatgcttatctgatccatactgaaatcggcaacaanaatgattgcagcaaaggtgaatggcaatctggtttcaccaatccatgtacttgcaaatgctgaagtggtggagattataacttatgataaattatctagtaagtatgcattccagcgtcaccagca

SEQ ID NO: 3942 - DNA, 287 bp, Zea mays
  misc_feature: Incyte ID No: 700352842H1
  unsure 24, 168, 170, 282: a, t, c, g, or other
tcctcgcgcacccggaggtcgagntcctctggtggatggactctgacgccatgttcaccgacatggcgttcgagctcccgtggggagcgcttacgggccatacaacctgatcatgcacggctgggacgagatggtctacgacgacaagaactggattgggctcaacanantcagcttcttgctgcgcaactgccagtggtcgcttgatatgctggatacctgggcgccaatggggccaaagggcctgtccgcatcgaggccggcaaggtgtgaccaatcttnaggtt

SEQ ID NO: 3943 - DNA, 293 bp, Zea mays
  misc_feature: Incyte ID No: 700352843H1
  unsure 2, 4, 6, 9: a, t, c, g, or other
ananangtngcctaattctttcgatcgaattaggcgccttcttcgtcccacgctccgtctttatttgtaatctgaagcttacaggaacatttgaggtggatcaaggacggattggtaggcctcttgaaagtccgggtggtgaggggcatcaaccttgcctaccgcgacgcaagaggcagcgatccgtatgtcgtcctacgacttggcaagaagaaacttaagacgagcgtgaagaagagatctgtgaaccccatctggcacgaggagctaactctgaccgtcacagatcccag

SEQ ID NO: 3944 - DNA, 214 bp, Zea mays
  misc_feature: Incyte ID No: 700352844H1
gggagaagctgggggttgacaaatggtgcttccatgatagggatattgcccctgatgggaaaactctcgaagaaacaaatgctaaacttggatgagatagttgagctggcaaagcagctccaagggtgagaccaatataaagccattgtggggtactgcacagctctttatgcatcctcgttacatgcacggagctgctactagcccagaggtt

SEQ ID NO: 3945 - DNA, 204 bp, Zea mays
  misc_feature: Incyte ID No: 700352845H1
  unsure 9, 39, 46-47, 50, 73, 121, 124, 132-133, 136-139, 157, 168, 180: a, t, c, g, or other
aggaaaggncggtcccgtctctcccgatacgcttccgangcggtcnncgnagcaggtcggacggtccgccagnaagatggggttgagctccatcgtcatgaaggtgaaaggggcttcttcnttnaaggagannaannnngtgatctgagcttcagancaaggttccgnggcgaaagggtnatggaccaatctcctatcatgtac

SEQ ID NO: 3946 - DNA, 210 bp, Zea mays
  misc_feature: Incyte ID No: 700352847H1
  unsure 141, 192, 201: a, t, c, g, or other
agaagggaaagcagaggtcttgggtcggtccaagtgggcagtactaccgtgagctgccttgccccagctgtaggggtagaggttacactccatgcaaggagtgtggaatagatagatcaagtttggactgccctatgtgcnatggcaaggggattccaacttgtctacaatgtagtggagatgtgtgatatngcaagatcntgttgatga

SEQ ID NO: 3947 - DNA, 279 bp, Zea mays
  misc_feature: Incyte ID No: 700352851H1
  unsure 136-138: a, t, c, g, or other
taccacttccagtaagaaaatggtaggaaaagcagcaatgcgtggttttcctaccactttccagtaagaaaatgggtgtttgaagaaatcatttgccttgtcctcacggaatctgattaagccctggcctcttgannntatagagtcattgtgtatattccagttacctagatattcccttgagattttgatacaatttgagggaggcagaagtctgcatttgaagaaaaaaaataagtctgtttgtcatatttaagtagcctgtggtatttttatact

SEQ ID NO: 3948 - DNA, 281 bp, Zea mays
  misc_feature: Incyte ID No: 700352854H1
  unsure 40: a, t, c, g, or other
cacttcgtcaagcaacaacaccggctaaaaattaaaagangcagcgcgtagcagttggtcgccaccgtcacgtactcacgctcacgtttggaggttggactccgcccccgcgctgctctttgccttgcctttctccgccggagaccccgccgcctcagctgccgcaggaggaggaggcaaccatggcggggaggtacgaccgcaatccgttcgaggaggatgacgtcaacccctttgcgggaggaatgtacctcctgcttctaattctcggatgtcagcac

SEQ ID NO: 3949 - DNA, 287 bp, Zea mays
  misc_feature: Incyte ID No: 700352855H1
  unsure 74, 209, 259: a, t, c, g, or other
gcaagttgcactggctccagctgctgcacttccacatcggctccatgatcccgacgacggggaaagtgtacganccggtgagcgagagccgctggcatctactgcaacctggtgaacgagcacggcgccaagtggttggccacgctggactgcggcggcgggctcggggtcgactacgacgggacccgttcaggcgactccgaaatgtncggtggcgtacgggatacaggagtacgcctccgccgtcgtgcaggcggtncggctcaagtgcgactacaaacggcgtc

SEQ ID NO: 3950 - DNA, 288 bp, Zea mays
  misc_feature: Incyte ID No: 700352858H1
gcggagaactaccactggcaatggacttcattcttctctgctgcttccactgcggtgtatgtttacctatactccatatattattaccacatgaagacccaagatgtctggattcttccagaccagcttctatttcggctacactctaatgttctgcctaggcttaggaacactatgcggtgccgtcgggtatcttggatcgacattgtttgtgaggaggatctacaggaacataaagtgtgactaagtgaagataatatcgccccattttgggtcagcgcagagaaa

SEQ ID NO: 3951 - DNA, 168 bp, Zea mays
  misc_feature: Incyte ID No: 700352860H1
  unsure 2, 4, 89, 104-105, 109, 123, 138, 146, 151, 162: a, t, c, g, or other
gnanaatctgtttggcattaagtgaattttaatgtttttgtttttatatccttttagctcttaagtgttgaacactgttgacagtgaanaactttcttaatggnnttcnagtataactaatanggatgtgaagctttntggctctntagtnctgagtatgcnaaactg

SEQ ID NO: 3952 - DNA, 166 bp, Zea mays
  misc_feature: Incyte ID No: 700352861H1
  unsure 26, 45, 72, 107, 125, 151: a, t, c, g, or other
ccaaacaacctggacatcaataaganacatttacaaacgcgaganagaggccatcctaccggagtttctganaaccatttgtggctttgaaatggatatgctcaagnagaagaaatggtaatccnattaagggtttatgccccggagtgtngtgcaagtaaggcta

SEQ ID NO: 3953 - DNA, 167 bp, Zea mays
  misc_feature: Incyte ID No: 700352862H1
  unsure 43-44, 90, 162: a, t, c, g, or other
gggcgagtgcgtgcgttcgtgcagccacagacaggcgtccggnnaccatgtctttcaccggcacgcaggacaagtgcacggcgtgcgacnagaccgtccacttcatcgacctcctcacggccgacggcgccatctaccataagacatgttcaagtgcaaccnactga

SEQ ID NO: 3954 - DNA, 273 bp, Zea mays
  misc_feature: Incyte ID No: 700352863H1
  unsure 4, 99, 102, 104, 148, 175, 180, 197, 221, 269: a, t, c, g, or other
aggntttcttcgttgccatgcgtacaaagaacccttaaaccctaatcctcccccgctacacgttcgcttgatctttacggccgccgctactcgttcgcnatngnggctgctcctccaggctcctaaactcactctgagctcctctttntccgctcctgccgcctcgcgtccagtncctantttccaacggcttccgntggcaaccggggtcgttcaatccntcgtttgtctgtgtcccgagttgtgatgtcgcggcgacctggcgaggngtgt

SEQ ID NO: 3955 - DNA, 277 bp, Zea mays
  misc_feature: Incyte ID No: 700352866H1
  unsure 2, 73, 248: a, t, c, g, or other
gncgctccgcgctcgaccgcctttgcctgccttcccattccccccgtctcctcttcccttccgccatggcccngcccgctttcctctcctctctccgctcccgcctcggctccgcgccgccgcccccgccgaaccatcgcctccagcccaggcgcggctaccacgtcgagcttggggctcgcgaaaaagcgcttttggaggaggatgttgctttgaagaggttcaaatcatacaaaaacagtgtgaanaggtctccaagatcgggaatgtctacttt

SEQ ID NO: 3956 - DNA, 278 bp, Zea mays
  misc_feature: Incyte ID No: 700352868H1
  unsure 97, 227, 257, 263: a, t, c, g, or other
cgtacttccgttgcggcgctacgagcttcgacgggcctcgatctccacctctgaagtgactacttgtgatctaacatctgaagctgtaagtggtcancagcttagtgtgaatcgaagatgagcgtggtggggttcgacctcggcaatgagagctgtatcgtggcggttgcgcggcagcgtggcatcgacgtggttctcaacgaggagtccaagcgcgagacacccgncatcgtttgcttcggggacaagcaccgttnatcggnaccgcggcgccgctt

SEQ ID NO: 3957 - DNA, 162 bp, Zea mays
  misc_feature: Incyte ID No: 700352873H1
  unsure 14, 46, 49-50, 52, 84: a, t, c, g, or other
gatataattgccanaaccaggcttgaggttggtgactcttgtaganttnntntcttcaggcctagatcagaaaattaagtgcancaatatccatgaattctcagaagccctttcagggagccagtgagtcatacagtatccacagttgagtcacttaaagat

SEQ ID NO: 3958 - DNA, 289 bp, Zea mays
  misc_feature: Incyte ID No: 700352874H1
  unsure 66, 168: a, t, c, g, or other
cacgtctcgcccatcccgccactgctgctctccagagtccaggcgacccaggctgcgcggtcgctncggtgttgttagtcccgaccgccgccgggccatggcatccaaacggccatcgccccaagagatgtatgtgttgttggcgttgcacgcacccctttgggtggnttccttggtgccttgtcttccttgcccgcaacaaagcttggttctatagcaattgaagctgctctgaaaagagcaaatgtggatccggccctcgtgcaggaggtctttttcggaaacgtct

SEQ ID NO: 3959 - DNA, 289 bp, Zea mays
  misc_feature: Incyte ID No: 700352875H1
  unsure 3: a, t, c, g, or other
ggncgatgaatgagtccatcgctttatcagatactgagaagcaactgcgacatgagaagcactatcggtatatctgctcacacgacgttggcctattggtcctaagagctatattcaagatttcgagagaagctgtagggaccattttaggagaaaatgttggggtattggactaggatttggatttagagtggttgcacttgaccgcaatttcaaaaagcttaccgtagattctattgttgcggattacaagaagtcaaagagcaggatcatactactagactatgat

SEQ ID NO: 3960 - DNA, 285 bp, Zea mays
  misc_feature: Incyte ID No: 700352876H1
  unsure 104, 129: a, t, c, g, or other
gcgatccgcaccccccactttcgatcggttaccaaggaggcgaggtgcctgtgcgagaggaaggaggacgatgcaggagacggcgacgtcttcgtctccgctgncgtcgctgagcaacggctaccagcngctcccgccgctgtacctggggttctggccatatgggcggcgtctggcttctcctgggccttcaccacgtggaggaaccgccattaccaccaggcgaacaacctgcagtggatcctgtccctggtgccgctgatcaaggcgctccagatggcgcct

SEQ ID NO: 3961 - DNA, 111 bp, Zea mays
  misc_feature: Incyte ID No: 700352878H1
  unsure 26: a, t, c, g, or other
cgtgcgtgggctctgtcctccccggngttccgatctggtcctcgcctcgccggaggaggagctggaggagatgaacggcaccgggggcagccaccaccagcagcagcacag

SEQ ID NO: 3962 - DNA, 280 bp, Zea mays
  misc_feature: Incyte ID No: 700352879H1
  unsure 99-122, 172, 204, 206, 244, 258: a, t, c, g, or other
agcacggctcgctcctagacaagatcaacgagaagatccacgagtacaagcactcatcgtcgtcttcctcgtcagactcagatgatgacaagaagtccnnnnnnnnnnnnnnnnnnnnnnnnctctttgggaggaaacatccattgcatcacgttcttggaggaggcaaagncgccggtcttgtgctgtggaggacaaacaggnantcgggagcatctttgcaagggtgatgtgatcttggtgngtttaaggcatcgntaccacttcttaacttcttcgc

SEQ ID NO: 3963 - DNA, 167 bp, Zea mays
  misc_feature: Incyte ID No: 700352880H1
  unsure 46-47, 95, 152, 165: a, t, c, g, or other
ttcaatcagggccaaagcaaaaggaccacgccatcaccatattttnnaaattcaaaacttttagtctgccaaattggtactctttcatgtaaganaaccctcttgccagctaagagatgaaaacattttcatgacaaaggagagaaatttcntttactagggggngc

SEQ ID NO: 3964 - DNA, 274 bp, Zea mays
  misc_feature: Incyte ID No: 700352881H1
  unsure 34, 115, 138, 189, 220, 229, 266: a, t, c, g, or other
ttgtggaaaaaggatctccagaaggtaaacccanaagcagcggagtccctggctgatcctaatgagtacccaaacttatttgaaggcctggcagattgctctgaatgtagaagcngctgttgccccgaaaagggttanctatccaccggctgaggagtacatgattcatgctgaaaggtcaaatgagantttagtggaagcttttaaaaacatgcatgtncaggaagantggtgccagatgataatgaagagtatgttcacgaggntattgaag

SEQ ID NO: 3965 - DNA, 274 bp, Zea mays
  misc_feature: Incyte ID No: 700352882H1
  unsure 125, 144, 154, 194: a, t, c, g, or other
gaaggatgagcagcagcagtcccgagggatagcactgatgcagggcatctgcgccgtggtgtaccgcaaggccgataacacgccctgccccatcaagcagcattcaataaggacgctctcaagantttgaacatcacccatatncttgatcgtngcaaagtcatggatccagtatttccagctgaatttaattncaagaagatcgaagtacttgatatcccagacatgatctgttaaagcattctgatgaatgctttggtttcatagatgaagc

SEQ ID NO: 3966 - DNA, 156 bp, Zea mays
  misc_feature: Incyte ID No: 700352884H1
  unsure 27, 140: a, t, c, g, or other
cgcacaagcctacaggaaaagattgantttattttcagggtttatgatactgactgcaacgggaaggttgcttttgatgacatcttaagcatcttgcgagatctgacaggttcatttatgacagagcaacagagacaganagtcttgactcatgtg

SEQ ID NO: 3967 - DNA, 157 bp, Zea mays
  misc_feature: Incyte ID No: 700352885H1
  unsure 6, 16, 19, 22, 24, 39, 51, 85, 111: a, t, c, g, or other
gtcgtngtctcactcnccncgncntcacgcctccctcancagataaggtcncgcccttttccgacattcacacgggggacaaganctcagcggcatggcctcgattccggngacgaccttcgccgtcatcttatccgtcctcttctgtgccgcggct

SEQ ID NO: 3968 - DNA, 276 bp, Zea mays
  misc_feature: Incyte ID No: 700352886H1
  unsure 9, 11, 18, 41, 59, 82, 107, 126, 132, 222, 270: a, t, c, g, or other
tccaaggancngatcggnagcttcttctattaccccagcancggcatgcagcgggaggngggcgcatacgggctcatcagcntccacagccgtgacctgatcccggnccccttcgacacgccggcngacganttcccggtcctcgtcggcgactggtacaccaaggaccacaccgtcctggtcaataacctggacgccggcaggggatcgggcggtccgcgnggctcgtgatcaacggcaagaacgagaaggacgcgtcgaacccgcccntgtata

SEQ ID NO: 3969 - DNA, 161 bp, Zea mays
  misc_feature: Incyte ID No: 700352888H1
gctctacccgcgtggcgcgtccagcgtctgctgcgcggtttgccaggccatcaccaccgtgccgccaccaggattggagatggctcagcttatatgtggtggctgtcgaactttgctgatgtatactcgcagtgcagacaccgtaaggtgttcatgttgca

SEQ ID NO: 3970 - DNA, 281 bp, Zea mays
  misc_feature: Incyte ID No: 700352890H1
  unsure 106: a, t, c, g, or other
ctgactatgatgctcccacacagctggtcaagcccaaggagaggaatgagaggtatgttgatgctgtcatgacaatccccaagggaacttgttccccatgtgtggnatgaaccttgccttcgacagggatctcattggccctgctatgtactttggtctcatgggtgatggccagcccatcggtcgctacgacgacatgtgggcaggatggtgtgtgaaggtcatctgcgaccacctgagcctgggagtcaagactggcctgccatacatctggcacagaa

SEQ ID NO: 3971 - DNA, 147 bp, Zea mays
  misc_feature: Incyte ID No: 700352891H1
  unsure 26-27, 33, 48, 73, 96, 134, 140, 142, 145-146: a, t, c, g, or other
gttataaccaccctaaccctaacttnngtaatnccccccatccttacnaccctcgttaaccctaacaaaaaanactcataccccccattatgtaanatccattgtggcatccacctttattatcagtctcttcnacacancnganna

SEQ ID NO: 3972 - DNA, 163 bp, Zea mays
  misc_feature: Incyte ID No: 700352892H1
aaggcaggaagagcatggtcaacacaatagatatatggatagtcatgattccaagaggtcaaggcatgactcgcattaccattcaaggagggattatgaacaaacgctattctagagacgaacatagagacagaaggcgtcactaaatgtaagcttggaagaa

SEQ ID NO: 3973 - DNA, 160 bp, Zea mays
  misc_feature: Incyte ID No: 700352893H1
  unsure 36-37, 100, 102, 125-126, 138: a, t, c, g, or other
acgaggatgagtggcaggacgggaagaagttcgatnncagtggccaccttcaagatccacggcgaggttgacattgctcaccttaattagacttagaaancncagtcagctgcttctgcgttggnngtgtgagttcgngcattttagagtgttgccgcta

SEQ ID NO: 3974 - DNA, 160 bp, Zea mays
  misc_feature: Incyte ID No: 700352895H1
  unsure 8, 45, 69, 85, 107, 135, 149, 151: a, t, c, g, or other
tcctcgtntcgtctcgtctcgcacgcacccctcactttccttgtnaatcgactcgcgatcgaatccgcnccgagtcgattccgcngcggaccgaccggttcacttcncttttctcccgagattcgaattctgagnaagtaatgggtgangngaagaaaaa

SEQ ID NO: 3975 - DNA, 228 bp, Zea mays
  misc_feature: Incyte ID No: 700352903H1
gtgagaacaatcatatatatattgttgcttaaagagaagagaagatcgacaagagattggcggtaatggactcctcggagctgcacatactggccttgcagagggtgaagcaggtggagccggagaacgcgagcaagatcctcggctgcatcctcctggaggaacccgacaaccaggatatgctgcagctcgcctacggcaacgacgccgaggtgcacgccaagatca

SEQ ID NO: 3976 - DNA, 226 bp, Zea mays
  misc_feature: Incyte ID No: 700352904H1
gcgcctcggaggcgttcagctgcttcaagatgaagctgaacatctccttcccagccactggctgccagaaactcattgaagtggacgatgaacgcaaacttcgtactttctatgagaagcgtatggccacagaagttgctgctgacgctctgggtgaagaatggaagggttatgtggtccgaatcagtggtgggaacgacaaacaaggtttccccatgaagcaggg

SEQ ID NO: 3977 - DNA, 224 bp, Zea mays
  misc_feature: Incyte ID No: 700352905H1
  unsure 174-175: a, t, c, g, or other
aattaaccccctaataaaattaattaaccactcattcatccgacctccccaccccatccaacatctccgcatgatgaaacttcggctcactccttggcgcctgcctgatcctccaaatcaccacaggactattcctagccatgcactactcaccagacgcctcaaccgcctgcnnatcaatcgcccacatcactcgagacgtaaattatggctgaatcatccgc

SEQ ID NO: 3978 - DNA, 285 bp, Zea mays
  misc_feature: Incyte ID No: 700352906H1
tgggaatattatgatatatgaagagaccagacaagtcaccttgattgactatgagtatgcgagttttaacccagttgcattcgacattgctaatcacttctgtgagatggctgctgattaccatacagcaacaccacatgtgttggattttacgaaatatcctgacactggggagcagagaagattcgttgaggcataccttagctctgcaggtgaaaagccaacggatggggaagttgaagaactgctaggtgatgcaaagtacactcttgcgagccatctctc

SEQ ID NO: 3979 - DNA, 94 bp, Zea mays
  misc_feature: Incyte ID No: 700352907H1
  unsure 5, 19, 29: a, t, c, g, or other
cggancgcggccgggagangaacgcgcancagccttgggaggcccaggcccggcagccatggcggtggaaggaggaatgaaatgtgtgaagttc

SEQ ID NO: 3980 - DNA, 223 bp, Zea mays
  misc_feature: Incyte ID No: 700352908H1
  unsure 172: a, t, c, g, or other
ccaagatgacaaagaaaagaaggaacaatggtcgtgccaaaaagggccgcggccacgtgcagcctattcgctgcactaactgtgcccgatgcgtgcccaaggacaaggccattaagaaattcgtcattcgaaacatagtggaggccgcagcagtcagggacatttctgaagngagcgtcttcgatgcctatgtgcttcccaagctgtatgtgaagctacatta

SEQ ID NO: 3981 - DNA, 281 bp, Zea mays
  misc_feature: Incyte ID No: 700352911H1
acgaggcaattggtctcaagtccatgtgttcagtgacaacaagtcatctgtcaactccattgcatgggctccgtatgaggttgggctttgccttgcctgtgcatcttcaggtggaagaatatccatcttgacgatgcgagctgatgggggttgggatactgcaaccattgagcgagcacatcctgttggtgcgactgccatatcctgggctcctgcaacagattcaatagctggcacagggagtttgtttacaagcttgtctcaggaggtttgactcggtt

SEQ ID NO: 3982 - DNA, 220 bp, Zea mays
  misc_feature: Incyte ID No: 700352912H1
  unsure 2: a, t, c, g, or other
tnagtatacattagatagtttaggtttgataatggatccaaaatatgttagcctatgcatcttcgtattacttgtattgcatggagatactactttggcagaaacttgcagggagtttgctaaatggcatccattctgctttagtgcaatgtgcaaggcaaattgttttatagaaggaaaaagctccgatggttcctatgcaaagggatatagatgtgat

SEQ ID NO: 3983 - DNA, 284 bp, Zea mays
  misc_feature: Incyte ID No: 700352913H1
gaaccgattcgtgccatcgccctgtgggctcgtcgttgtcgctgccccagtgtcgtgtcgtgaagctccacctgtgcgtggagaagtgtattgtggcctcgccgcgttgaaccgacgcccggggctcgggatttcttcaccggagaccgtgaacccactgtcctctatggccagcctctccacagactcctctggagaagaacatgtggttcaagaggagccacatcgaggagtttgatttgatctaggtggcgtctcccagttgactttctagcgccaaggac

SEQ ID NO: 3984 - DNA, 130 bp, Zea mays
  misc_feature: Incyte ID No: 700352916H1
caaagaattccctcccctagccgccgccgccgctcgtctccctgagaggtgacgggaccgaggaactggccgagttctaggtagagaatcggttttgcttgtctcagcacggggtctgctgcgtctggtg

SEQ ID NO: 3985 - DNA, 94 bp, Zea mays
  misc_feature: Incyte ID No: 700352917H1
  unsure 59, 76, 85: a, t, c, g, or other
atggtgtggtttccatgaacaacatatccagtgaggtcaatgatatgtacagtcctcangactgtgatgaatttcnattggaggngatgtctag

SEQ ID NO: 3986 - DNA, 138 bp, Zea mays
  misc_feature: Incyte ID No: 700352920H1
  unsure 70: a, t, c, g, or other
tttgcaagagcctttcaaagatccaacaaagagaaaggtaatgcatggtgcggatcgtgatataatgtgnctccagcgggacttccacatctatgtgtgcaatctttttgacacaggacaggctcaagggtcttacag

SEQ ID NO: 3987 - DNA, 219 bp, Zea mays
  misc_feature: Incyte ID No: 700352921H1
ggttctctgtccaacattcttgaacaatgcatgtattgtgcaatgggtcttggcttagtcggattggattttcgtggccttcttccaccgatctttgagaatgcggttctaaatttattctcaaagaatatgagtacggcggtcgaaaattttcaggtcattttggattcacactgttgggttccgatgccatctgttggttttgtagcaaatggtgtt

SEQ ID NO: 3988 - DNA, 282 bp, Zea mays
  misc_feature: Incyte ID No: 700352922H1
  unsure 268: a, t, c, g, or other
aacgatgcactatcaagtttcttcaaaatcttgactacatcacctgatgaaaacggcaaggtctatgtctcaactgtacaagccaataattatccaatcacttgcacgcaatggcatcctgagaaagccatttttgagtggaggaaaccaatgatcccacacagcgaagatgcagtacaggttactcaacattttgccaatcattttatcagccaagcacgcaagtctccaaacaggcctcctgccgacaaagtgctggataacttanttacaactacagtc

SEQ ID NO: 3989 - DNA, 94 bp, Zea mays
  misc_feature: Incyte ID No: 700352924H1
  unsure 39, 43, 48: a, t, c, g, or other
actcgaaggacctgtaactaggaaagttaattttgcctntggncaganccattttggaacaacgatcatatcaaaatgttcttccaagcaaaaa

SEQ ID NO: 3990 - DNA, 217 bp, Zea mays
  misc_feature: Incyte ID No: 700352927H1
  unsure 2, 4, 6, 61-83: a, t, c, g, or other
anananacgagagcggcagacaccatggggagctcgaggaccatcgttgcgtcccccctgnnnnnnnnnnnnnnnnnnnnnnnggctttcgcggccaccgccgaggcccgcgttgtccccgagctgtttggcgaggaccaattccagcggacatgcaaccaggtgcacttcaggaagatgtgccagagcttgacgaggctcccgagggtgacaacgc

SEQ ID NO: 3991 - DNA, 100 bp, Zea mays
  misc_feature: Incyte ID No: 700352928H1
  unsure 40, 42-43, 48, 56, 83, 89, 91, 96: a, t, c, g, or other
gtcgcgtgtctaggtttcctgctctcaccatagccgcccncnnctgtncgcccttncgttcaccctctcccttccctctcgtnccctgncntgccnaggg

SEQ ID NO: 3992 - DNA, 180 bp, Zea mays
  misc_feature: Incyte ID No: 700352929H1
  unsure 118: a, t, c, g, or other
gagctcagttgggccgacattgaccacctgcagacacacttccgctgccagtgctacttgggctggagtggtgagcaatgccagtgggaccataggcaggcagctggaggtgccagcnaggcctgggctgggtcccacctcaccagtctgctggctctggcagccctggcctttacctgg

SEQ ID NO: 3993 - DNA, 94 bp, Zea mays
  misc_feature: Incyte ID No: 700352932H1
  unsure 2, 46, 53, 60, 69, 90: a, t, c, g, or other
gncgaagcatggcggaggtgcaggtcctggtgcttgatggtacgangccatcntcctggnccgcctggncggccatcgtggctaaaacangtac

SEQ ID NO: 3994 - DNA, 217 bp, Zea mays
  misc_feature: Incyte ID No: 700352934H1
  unsure 72: a, t, c, g, or other
cgatgctgttgagtttgagctgcatgttcaggaaccctacttcactcaactcagagccggagtcaagaaggntgaagggagattagcgactggtaactacaaccggattacacaaggttctttgctgctatttaataaatgcctcttggttaacgttaaggcagttaggaagtacaattcattctctgagatgctgcaaggagagaaaatctcaatg

SEQ ID NO: 3995 - DNA, 216 bp, Zea mays
  misc_feature: Incyte ID No: 700352935H1
  unsure 106: a, t, c, g, or other
cagaccagagatgggcaatgtgagcggtcgagcggaagacctcgtggacgccgacattgatgacggcaacaacatgcgacgtgcctcttcctcctctgcgggctangtccggggcggtgggtcatcatcatccccgccggcgagcccgccgaggccgcattcaccgcggatgttcgtgccccagagtcctgtaactccattgcaaagagctacaga

SEQ ID NO: 3996 - DNA, 273 bp, Zea mays
  misc_feature: Incyte ID No: 700352938H1
  unsure 109-125, 152: a, t, c, g, or other
ccaatctttgctgctgccactcggcgatccgatcgttctcgagcaaggtcggtggccatggcacgctgccgccatcacctcctcctcctttccgtcttacttgccttgnnnnnnnnnnnnnnnnngcagagtcatggaaaagcctccgccgncttcatcgatgcctcgtcgcaccgctaccttcgggaccagcaagccgaccaccaggacgcttcaatgtcgttaaatgaagtttctgcggttgtttctgtctgctggtttcgcacgtcaaca

SEQ ID NO: 3997 - DNA, 224 bp, Zea mays
  misc_feature: Incyte ID No: 700352939H1
  unsure 163: a, t, c, g, or other
ggagatgatgtatacaataattgcagatgagctcaagtcaatggacaataaggacatgcgccctgaagattacttgagcttcttttgtcttggaaaccgggaagaaccaccatctaatggcagcccagaatcagagaaatctacagataaaagtgcagtgggntagctacaaaatatcgacggttcatgatctatgttcatgcaaaaggaatgattgtggatga

SEQ ID NO: 3998 - DNA, 273 bp, Zea mays
  misc_feature: Incyte ID No: 700352940H1
gtgatttgaaataattgggaataaatagttcgtgaatccctgaagcgtgcatatatatattcctgccaagataaaggtaatggagtcgtcacgcaggttccagccggccgtcatcctgcttctcctgctcattgtgtccaccgatatggcacaggcaagggaatgcgagaagtacagtgagcgatttgttggggcatgcatgatcgcagacaactgcgccaatgtgtgccgcggtgagggctcttggccggcagtgcagcaccttccgccgcc

SEQ ID NO: 3999 - DNA, 271 bp, Zea mays
  misc_feature: Incyte ID No: 700352942H1
cagctgctcctggcctctaaggtttaagcgcaatgatgttgttgtaagagcaatatcggaagagtgtggcccgcagggcttcccattgatctcagaggtaaaagggcattcattgctggagttgctgatgataatggctatggatgggcaattgcgaaggcacttgctgcggctggtgctgaaattcttgtgggtacatgggtgccggcacttaacatatttgagacaagtctgaggcgtggaaagtttgatgaatcacggaagctgccag

SEQ ID NO: 4000 - DNA, 102 bp, Zea mays
  misc_feature: Incyte ID No: 700352943H1
  unsure 93, 100: a, t, c, g, or other
gggagatgatgtgggctctagaatacgaccctgaccattttccttcgcaaccatgcgaagaaccaaggtgcagtaccataaaaataaagtttnctaaatncc

SEQ ID NO: 4001 - DNA, 212 bp, Zea mays
  misc_feature: Incyte ID No: 700352945H1
  unsure 36, 38, 43, 45-46, 50-51, 54: a, t, c, g, or other
gggatctggaagtcatgtccgcaatctggtgggccngntcagntnnccanntcntcaacggggaattaatttgtccgatgtatcatgagttgtgtactactgtaccagttccaatgactggccaatgtccaaagtcatgcagttttaacggtgactgcattgatggaacctgtgcactggcttcctggttttcatggccatgactgcagcag

SEQ ID NO: 4002 - DNA, 141 bp, Zea mays
  misc_feature: Incyte ID No: 700352947H1
  unsure 2, 4, 7, 15, 19-20, 25, 39, 43-44, 94: a, t, c, g, or other
cnanacntcaatgtnaacnnataantcaataaaattatntgannggtgtggagtatatttcttcgccaggtatttgctgtaatcctgtcccttnacgttcgtgcactgcaatgagaataaaaaaaaaataagtgtcgttca

SEQ ID NO: 4003 - DNA, 92 bp, Zea mays
  misc_feature: Incyte ID No: 700352949H1
  unsure 67, 77, 81, 90: a, t, c, g, or other
gaggagaatggggacggaggccgacgccgcagccgtggacctactccggtcgcagatcccgttccanaccgacgggngatntcgttttcncc

SEQ ID NO: 4004 - DNA, 227 bp, Zea mays
  misc_feature: Incyte ID No: 700352953H1
atccgcagagactcggaagtcggaaagaatccctcctgttcttcgtcaaccctccagaacctgctctctcttcctctacgagactacgaccgtgtaaggacatggccgtcgagcgcttgaagaccgggttcgagcagttcaaggccgacgtctacgacaagaagccggagctgttcgagccactcaaggcgcaccagtcgcccaagtacatggtgttcgcctgctcc

SEQ ID NO: 4005 - DNA, 285 bp, Zea mays
  misc_feature: Incyte ID No: 700352957H1
gcaaatggttgatgatgcacggctacctttgagccgtatcgtgccaatttcctcaaaccagctcaacctttaccgggtagtgatcattctccgtcttatcatcctgtgcgtcttctttcagtatcgtgtcagtcatccagtgcgtaatgcttatggattatggctagtatctgttatctgcgaggtctggtttgccttgtcttggcttctagatcagttcccaaaatggtatccaatcaaccgtgagacatatcttgacaggcttgcattgaggtatgatagaga

SEQ ID NO: 4006 - DNA, 220 bp, Zea mays
  misc_feature: Incyte ID No: 700352959H1
  unsure 41: a, t, c, g, or other
gctgtggcatatgacatagtggtagggccaggaagaaaggnggcgggcaggcatcaagttctgttcaatcgtgtggggccttgtgtcactgttgatgtgtgcagtgtgtgcttgatgcttctccctccactgtttattttcgaggcgacggcgatgttttggtttggtagagactcaaggacggacaaaatggcagaaagttgcctggctttgtgtgacg

SEQ ID NO: 4007 - DNA, 134 bp, Zea mays
  misc_feature: Incyte ID No: 700352960H1
  unsure 24, 48, 90: a, t, c, g, or other
gaagcagtgtttctggctaacaanacattgtgttgatagtgggctttnagtttgtgttgatggcttccagttttgctgatgatggatgcnttatactgtcttttactactttagtttgcttgaccaaactattt

SEQ ID NO: 4008 - DNA, 225 bp, Zea mays
  misc_feature: Incyte ID No: 700352961H1
gttgtgagattcctgatcccgcctctgcccatataacgtagacgcaaaaccccccaaccctcatcttaggcgccgccaaaccaccgtcaattgagcaagcatcgacgagaatagggaagaagtacatgaatcaccgcgggtccatgcggtggcatggttgggagctctgcgctgggtggattgcgtgcggacacgaggatctgaggaatcatcctggtacctgga

SEQ ID NO: 4009 - DNA, 145 bp, Zea mays
  misc_feature: Incyte ID No: 700352963H1
  unsure 49: a, t, c, g, or other
gagaaagtacacagcgtgagtgcgctgtcaaggtgtttctgcgccattngctagtgtgttctgttcttcttctaccttccgtgtttttcatttcttgcgtgtgtgagccttgagagttccaacaattggtactggaaccatttta

SEQ ID NO: 4010 - DNA, 292 bp, Zea mays
  misc_feature: Incyte ID No: 700352966H1
  unsure 82, 86: a, t, c, g, or other
gtccagagatgggaggagctccccggcgtccccgccttctactcctctcggctcgttgagattacattcagattcggatttntggnacaccctcggcaagatagagaatctggagcactcttgaatgctaatcagacaccctgcccatttctttctctgtcttagacacaaggccttctcatggccagagacttgcctcatctgcccgtaactagacggaaaatcctgcaattcaagttcctgataccgtttgttcttgttctttctgtgtctgttatgctgtcacccagta

SEQ ID NO: 4011 - DNA, 144 bp, Zea mays
  misc_feature: Incyte ID No: 700352967H1
agagaaggtaggtgaggttgctgccctacagaatcctttttaaaaatttgtcaccatcagatattctacctaatggatgcaccccaaatagatccatagcagagactcagcagagactcacatcaggtcccctgtccttctgtt

SEQ ID NO: 4012 - DNA, 228 bp, Zea mays
  misc_feature: Incyte ID No: 700352968H1
  unsure 2, 46, 132: a, t, c, g, or other
cnccaacttaacgccgaccggaggccggagagaccggctcagcctncgctccgccgccgctggcgaacatgtccatgggcggctatcttcgtcttcctcattcgtgtccgcgctgcagctgcttcgatcgcnacctcgacctcgccagaaagagcggaggacttagtgatgagcagatcaaagtgcggcttgaaatcaagcaacttctcaaggaggctgatcagttgt

SEQ ID NO: 4013 - DNA, 111 bp, Zea mays
  misc_feature: Incyte ID No: 700352969H1
agcgaggttcgcctggtgattattgtgtcagcagttctgtaaaaggacggatgaacttcgtgtcctttttcattcccaaggcagtaattggcccttgatagttttttagtt

SEQ ID NO: 4014 - DNA, 220 bp, Zea mays
  misc_feature: Incyte ID No: 700352970H1
gtcgcttgtccctaattggattgtgcacagaaagctactacaccccttccggaagcaggtgggtgggtccattttatcagccaaacttgcatttgagagaggttgggctattaatgttggtggaggatttcaccattgttcggcagatgaagggggtggattttgtgcatacgctgacatctccctctgcatccattttgcttttgtccgtctaaatatc

SEQ ID NO: 4015 - DNA, 219 bp, Zea mays
  misc_feature: Incyte ID No: 700352972H1
  unsure 42, 45, 48, 80, 92: a, t, c, g, or other
agaaacaacaagactgacagcgacgatgatgccacagctgcntanctncgtcgcgctggtcctcgtggccacggccatanccgccgctcccngcgttgggtttgtcgtcaccggccgcatctactgcgacaactgccgcgccgggttcgagacaaacgtgtcccacgccatccaaggcgcgacggtggagatggagtgccgccacttcgagtcgcagca

SEQ ID NO: 4016 - DNA, 164 bp, Zea mays
  misc_feature: Incyte ID No: 700352976H1
ggcaccaacggatgtcgtagtacttggcgaggaatcgcacaacgtacatgacatgtcatttgtcatatgcatcgcaaggtccaccccaattatttcaccagatcttctttctcatgcctcaggcaacagcaatcatgtcgaggcgttgagagtatatcttctgt

SEQ ID NO: 4017 - DNA, 174 bp, Zea mays
  misc_feature: Incyte ID No: 700352977H1
ggcaccatcatgaccatctccaaggaccgcgtgaagccgtcgccgacgcccgactcgtggaagctcaaggagatcttcgccacgggcatcgtgctagggacctacatggcgctcgccacggcgctcttcttctacctggcgcacgacaccgacttcttcaccaacgccttcggg

SEQ ID NO: 4018 - DNA, 138 bp, Zea mays
  misc_feature: Incyte ID No: 700352984H1
  unsure 20, 27-28, 38, 40, 72, 78, 101: a, t, c, g, or other
taccggacgaggaagtagtngcctgtnncgtgccgtcncnttggagggggtggcgatggagaagggcgcggncacgcngcggcggcggctggtggaaaggngatcgtatcgccttgccttcatcaccggccagacgcg

SEQ ID NO: 4019 - DNA, 194 bp, Zea mays
  misc_feature: Incyte ID No: 700352985H1
accatccccaccgccagcagatcgattcgcgaaagagacgaccgccgccgcatcggaccgtgcccgaaccccccttctcctcgctgactcggctcccctcctccgccgtcgccggaggcaagcaagtggggaccacagaagcattagctgggtgaacccactcaaagggggcagggaattgtgtgctagtttga

SEQ ID NO: 4020 - DNA, 194 bp, Zea mays
  misc_feature: Incyte ID No: 700352986H1
gccacgctgcccccgcgctcgcctccgcccccgatccagatccagggtggaatagggaacggccatacaccatggcggatttctccaaggaatcttgcccttctgtgaagaacattttacttctggattctgaaggaaagcgtgttgctgtaaagtatttctcagatgattggccgactaatgcatcaaagtta

SEQ ID NO: 4021 - DNA, 91 bp, Zea mays
  misc_feature: Incyte ID No: 700352987H1
  unsure 40-41, 83, 89: a, t, c, g, or other
tgaacaagaaggaggtggtggaggctgtgaccattggtanntgacaccacccatggtggttgtgcggcattgtgggctacgtngaaacnct

SEQ ID NO: 4022 - DNA, 215 bp, Zea mays
  misc_feature: Incyte ID No: 700352991H1
  unsure 92: a, t, c, g, or other
tttgtcttactatcgctctatccccaaaagtttggaacgttctacagcttcataagcttatgttagccatgctaaaccatgatgaaaggtcnctagagccatcgccacattcactgcagaagttgactcttcagtcagttaaagatgctgtcatgaaccagtttgtgggtagcaacatggaggtcagcattgttggtgatttcactgaagaagaa

SEQ ID NO: 4023 - DNA, 101 bp, Zea mays
  misc_feature: Incyte ID No: 700352992H1
  unsure 35: a, t, c, g, or other
gcaccaacggatgtcgtagtacttggcgaggaatncgcaccaacgtacatgacatgtgcatttgtacatatgcattcgcaaggttccaccccaattatttt

SEQ ID NO: 4024 - DNA, 180 bp, Zea mays
  misc_feature: Incyte ID No: 700352993H1
ttacttatgagacagcataatccgcaggaagcacggaaccgccttgcaagtggtttgaaaatagcgcaccaacagttgggtaacatccagttagtttctcagtatttgacaatactgggcacattggcgcttcagctacatgacgcagcacaggctaaagagatcctgaagtcttcgttg

SEQ ID NO: 4025 - DNA, 94 bp, Zea mays
  misc_feature: Incyte ID No: 700352995H1
  unsure 2, 5, 23, 38, 59, 92: a, t, c, g, or other
gnggngcagggtgggtggtgcgnccaaagtccgtcacntcacaacttcaagaccagcancaacgtcccaaagctccggggtgatgctcgtangg

SEQ ID NO: 4026 - DNA, 188 bp, Zea mays
  misc_feature: Incyte ID No: 700353002H1
ggaagtacaagttggaatgggtccaggaggtgagcttaggtatccgtcatacccaactgagaagctaaatcagccaggcagttcatctgaacttggggaatttcaatgttatgataagtttatgcaagcttcgttgagtgctcgtgcacagatttttgggttacaacagtggggcaatggcggttcaa

SEQ ID NO: 4027 - DNA, 133 bp, Zea mays
  misc_feature: Incyte ID No: 700353003H1
  unsure 57: a, t, c, g, or other
ggcaagcattattgcaggatctgctttagagcagctaaaaagctatattcatcagtncagcaaatgaaataccaaggacgattggtgaagcaattccaatgaaggcaacctttttttataacatatacaatgg

SEQ ID NO: 4028 - DNA, 186 bp, Zea mays
  misc_feature: Incyte ID No: 700353004H1
gcattgctgtcattattgatcaagtaacacatgcactgaagaatgtgatatctcccaaaggagatgatggtgcaaacttttcctatggcagcgcagagatagaaaagatggtggctactctgataggaagagtaagcagcatggctgaaagatctagcaaagacaatgttatgagttcccgatcac

SEQ ID NO: 4029 - DNA, 227 bp, Zea mays
  misc_feature: Incyte ID No: 700353005H1
  unsure 2, 4, 6, 9: a, t, c, g, or other
ananangtngcctaattctttcgatcgaattaggcgccttcttcgtcccacgctccgtctttatttgtaatctgaagcttacaggaacatttgagtggatcatggacggattggtaggcctcttgaaagtccgggtggtgaggggcatcaaccttgcctaccgcgacgcaagaggcagcgatccgtatgtcgtcctacgacttggcaagaagaaacttaagacgagc

SEQ ID NO: 4030 - DNA, 275 bp, Zea mays
  misc_feature: Incyte ID No: 700353006H1
  unsure 184: a, t, c, g, or other
gcgaagacagggactcttttggagtcttggtacatggcctgacgctgaacctgggtaaaacaggagtacgatgttgcaatgtacataccaaccatgcgctgagttggcgtgaaggatatattcattgttccactgttgtctttaaccaaacgtgctgttttcttccggttgtgatttttggtgnccctgatcatcctgacaatatctaattatacatttgggaggaaatgatgttacaatagttattgtgggtgtttgtttgggattaaaaaaaa

SEQ ID NO: 4031 - DNA, 213 bp, Zea mays
  misc_feature: Incyte ID No: 700353007H1
  unsure 85: a, t, c, g, or other
agccacaacacatacaggaaagcaagcaagaatcatcggaataatggcccgtgcatgcgtgttcctcgtcgtgctcctcctggcngccatcgcggtggcaccgttcgcgggcgccgcacgcgtggacttgtggagggtaggtccatggcatccgccgatgcaccggaggcggcggccgatgctcccgctcctagccccgactccgcctcatcc

SEQ ID NO: 4032 - DNA, 252 bp, Zea mays
  misc_feature: Incyte ID No: 700353008H1
  unsure 3, 19, 33-35, 47-48: a, t, c, g, or other
ggnctgatggctcgtccangccaaggcagtcgnnngagcaggcccgnngcaagaagatgtcgcgcgcgcaggatcggcatcctcaagtacatgctcaagatgatggaggtgtgccgcgcgcaggggtttgtgtatgggatcattccggagaagggcaagccagtgagtggtgcctccgacaacctccgtgcgtggtggaaggagaaggtccgcttcgaccgcaacggaccggccgccattgccaagtaccag

SEQ ID NO: 4033 - DNA, 130 bp, Zea mays
  misc_feature: Incyte ID No: 700353010H1
  unsure 65: a, t, c, g, or other
agcgccccaaaaacaaaaaacccagaaccccgacctagggttacgccatcgccatgggatctgtngcctccgccgctgtgccaccacctcctcctcaatcagcgctgcctcaggcgggcgcgccgcccta

SEQ ID NO: 4034 - DNA, 171 bp, Zea mays
  misc_feature: Incyte ID No: 700353011H1
gtgatttgaaataattgggaataaatagttcgtgaatccctgaagcgtgcatatatatattcctgccaagataaaggtaatggagtcgtcacgcaggttccagccggccgtcatcctgcttctcctgctcattgtgtccaccgatatggcacaggcaagggaatgcgagaa

SEQ ID NO: 4035 - DNA, 272 bp, Zea mays
  misc_feature: Incyte ID No: 700353012H1
ctcgagcggggacagttgtgagagagaggggaagggatcgagagcgcggcggaggcgatggcgagcggagggaagggactcaacgcgactggggagttcttccggcggagggacgagtggaggaggcaccctatggcggggaaccagctgcgccacgccacacccgggctcggcatcgccatcgtcgccttcgggatctacctcgtcggcgaggccgcctacaaccgcctctaccgcccctccggcgacaaccaccactagatcgccggcag

SEQ ID NO: 4036 - DNA, 218 bp, Zea mays
  misc_feature: Incyte ID No: 700353013H1
  unsure 25-27, 42, 58, 99, 113, 145: a, t, c, g, or other
cttcctccatcgcagcgtgtctcgnnnctccccccaggctcntccttcctcgctttcnctccaccccgggcgcaaaccctaaccctaccgtcgctcgcnccgcggcgtctgcnaatggcgcgccccgtgtgagtgtgcgcgaganaggggtagaccttgaggccgctacccggggaggagagcgagagatgtataaacaggggggagcggggggaggg

SEQ ID NO: 4037 - DNA, 219 bp, Zea mays
  misc_feature: Incyte ID No: 700353014H1
  unsure 117: a, t, c, g, or other
gggagggcttcaagaccattgagatgacggagaagttctactgccgctcaaaggacatatatgagatcttgatggatgagaacagatggaaagggtttacgcagagcaatgcgaggntcagcagagaggttggaggggaatttagcctcttcgacgggtccatcactggcgtcaacgaggagctgcaggaagggaagctgattgcacaaaagtggcggt

SEQ ID NO: 4038 - DNA, 129 bp, Zea mays
  misc_feature: Incyte ID No: 700353017H1
  unsure 2, 7, 24, 43: a, t, c, g, or other
cnctcangccggcatccgtcgaanctgctcgacctcgactcangccttccttgctccttgccgccgtcgagtcgtcgcaggaacgatgacccggcggaacggctgtacgatctacgtgggcaacctccc

SEQ ID NO: 4039 - DNA, 180 bp, Zea mays
  misc_feature: Incyte ID No: 700353018H1
  unsure 8, 84: a, t, c, g, or other
agcaagtnagcctcaccctctcacaccaccgccactcactcagtgctccaccccaagaaccaagcagctcacccccatggcgtnctacgacaaggccttcgaatcctacaagaaggccctcaccaccgccgcgtccgtcgctgcgtccatgatgctggtgcgcaggtcgtgaacgagttg

SEQ ID NO: 4040 - DNA, 216 bp, Zea mays
  misc_feature: Incyte ID No: 700353019H1
gtgatttgaaataattgggaataaatagttcgtgaatccctgaagcgtgcatatatatattcctgccaagataaaggtaatggagtcgtcacgcaggttccagccggccgtcatcctgcttctcctgctcaggaatgcgagaagtacagtgagcgatttgttggggcatgcatgatcgcagacaactgcgccaatgtgtgccgcggtgagggcttc

SEQ ID NO: 4041 - DNA, 265 bp, Zea mays
  misc_feature: Incyte ID No: 700353023H1
  unsure 104: a, t, c, g, or other
tcaaagccaagcaacagcagcagcttccctagcaacaccttgcccctgagctcatgggatccctgggccccacagtgagcttgagcatcatggccaggccaggnggccagcagccggcggagatggagaggaagaaggacagcggtgtcttcttcggtgggggctgcggcttccggatgccgctgcactacccgcgctacaagaaggcggactacgagagcatgccggagtggcgcgtcgactgcctgctccgcgatacggcctt

SEQ ID NO: 4042 - DNA, 267 bp, Zea mays
  misc_feature: Incyte ID No: 700353024H1
  unsure 19, 24, 56-57, 59, 62-64, 67: a, t, c, g, or other
cgtgatctcaacccaaggngtgcntccgctccggtcacccgtcgctccacgcaacnntntcnnngcngaagaccagggagcccaaggaggagaacgtcacccttggacccactgtccgtgaaggagagtatgtctttggtgtcgctcacatctttgcatccttcaatgacaccttcattcatatcactgatttgtctgggagggaaactctggttcggatcaccggtggcatgaaggtgaaggctgaccgtgacgagtcgtcacctt

SEQ ID NO: 4043 - DNA, 269 bp, Zea mays
  misc_feature: Incyte ID No: 700353028H1
  unsure 207: a, t, c, g, or other
gaatacgaacgtcgtacgagaacctttctccctcctccacctttctccttttcttgccacggcaaaacaccttcgccggcgagagcatggcgatggcgtaccgtgtcctggaggtcaccctggtgtcggcaaatgacctcaagaaagtgtcgctcttctcccggactcgcatctacgccgtggcttccatctccggattcgacctcngcatcccttcccacagcacccaagcagaccacagcaacggctgcaaccctgctggaacgccg

SEQ ID NO: 4044 - DNA, 104 bp, Zea mays
  misc_feature: Incyte ID No: 700353029H1
  unsure 26, 30, 33, 39-40, 46, 53, 76, 82, 96, 102: a, t, c, g, or other
ggcaggggcaagaggagaagacaaangganganacgagnngcacgnccgggancagccacacgtaaggcgaggtancgaccnagtcgccgccggancggaanaa

SEQ ID NO: 4045 - DNA, 94 bp, Zea mays
  misc_feature: Incyte ID No: 700353031H1
  unsure 41, 76: a, t, c, g, or other
ctatcatatagtaaaacccagcccatgacccctaacagggnccctctcagccctgcctaatgacctccggcctagnccatgtgatttcacttcg

SEQ ID NO: 4046 - DNA, 180 bp, Zea mays
  misc_feature: Incyte ID No: 700353033H1
gggatcctgaagccgttccgctatatctcaaccatcatggatggtaaggaggctgaaatgcaaattgggttcccgacggatgtaaaacacgtggcacacatcggttgggatggtcctggctccaccaacaacaataacaacaacagcaacaacaatagtggcggagcacctagctggatg

SEQ ID NO: 4047 - DNA, 264 bp, Zea mays
  misc_feature: Incyte ID No: 700353036H1
  unsure 17, 136: a, t, c, g, or other
cataaaactggcaaggncgccccgtagctccctttgatgcgcaaccgagcacgccaattctggccagatccaggcgtccttccgccgctctgatatgaataatccttttttctttcatgaaagaccaccgcacgtncatggttcatagtttaagggctgatttggataattagtcatcaacagaagtgataaaaaatggtggttcttgcagcatcaatcgtttcaaagtcgggaaaagcattgtttcaagacagtttgttgaca

SEQ ID NO: 4048 - DNA, 164 bp, Zea mays
  misc_feature: Incyte ID No: 700353039H1
  unsure 59: a, t, c, g, or other
aagaaaaccggtgttccatctctctcagttgattctagtgcacagacaaagcaaccctncagtacacccttttgacttcagtacttcaaacaaagcaatccacaccactcccctttgatttgagcacccgagcaaagcagccatcattagtttctcatgctaca

SEQ ID NO: 4049 - DNA, 262 bp, Zea mays
  misc_feature: Incyte ID No: 700353042H1
gtctcatcagcgaccctgttttctctttctggtttaaccgacatgctgatgaaggagaaggtggtgaaattgtgtttggtggaatggattctagccactacaagggtgatcacacgtttgtcccagtcactcggaagggatactggcagttcaacatgggtgatgtcctggttgatggaaagtccactgggttttgtgccggtggctgtgcagccatcgcagattctggaacttcctgcttgctggccccacagccataatt

SEQ ID NO: 4050 - DNA, 260 bp, Zea mays
  misc_feature: Incyte ID No: 700353043H1
aagacaaaaagttgatgccagttggttgaaactgaccaataaatctgtggcagaagatgttccagaatctcaaggttcaacaaaaaatattccaataattctcttggatgatgataatgatgataggggcaaggagctcgaaaattcagaggccctcgatcaagggctccatagtcaaaacaaaagaacttttgggaagattgacctgaactgtactgaattaagacaacagggacttctctgtttagatgactcaacaa

SEQ ID NO: 4051 - DNA, 177 bp, Zea mays
  misc_feature: Incyte ID No: 700353049H1
  unsure 97, 144, 169, 171: a, t, c, g, or other
ggtccaacgtgttgtggaaatattaaagcttttcaacactaggacttgccaacttgttctcggtgcaggagccatgcaggtgtctggacttaaatcnattacgtccaaacatttagctttggcgagtcaaatcattagttttangcattcttaattccagatatcaggngngggcct

SEQ ID NO: 4052 - DNA, 281 bp, Zea mays
  misc_feature: Incyte ID No: 700353052H1
  unsure 2, 14, 37: a, t, c, g, or other
cnatggcaccaganaggatgctcctccggcgtctgtnccgtgctgatggtggtcggcgtcacgaacgcggcggagggccaggtggcgtcggtcgtcgtgggcctggcgaggtgcgccgacagcacgaggaagaacatgaaggctgaggccggtttcaagggtcttcaggtggcgatcaagtgcaagaacagcaacggcgagtacgagacaaaggccgtgagtgagatccaaagctccggagccttcagcgtcccactcgccgccgacctccacggcgccga

SEQ ID NO: 4053 - DNA, 279 bp, Zea mays
  misc_feature: Incyte ID No: 700353054H1
  unsure 30, 42, 131-132: a, t, c, g, or other
ctccaaggagcgcaccgcggcaggccagcnaagatgcccggnctcacggcaccgtccgactacgcggaggagccgccgcgtcacccggccctcaagatcaactccaaggagccattcaatgctgagcctcnnccgatcagagctagtcgcatcttacatcaccccagtggatttcttctacaagaggaatcatggacccatccctaaagtcgaggacctctcaagatacgctgtttccatttctggtctcgtcaacaagtccattcagctatcgatggc

SEQ ID NO: 4054 - DNA, 217 bp, Zea mays
  misc_feature: Incyte ID No: 700353057H1
  unsure 3, 41, 45, 48, 68, 139-163, 202: a, t, c, g, or other
ggnttcctctctcaccatagcgcccgctcctgtcgccattngttncanctctccttcctctcgtcccngcctgccagggagaggggaagtcagaggcacggagtggcgcagagcagacgcccgtgaaccattgtagctnnnnnnnnnnnnnnnnnnnnnnnnnaacccacacaaggaaaggatggagaagaagccgaccaanctccatgaacaggta

SEQ ID NO: 4055 - DNA, 273 bp, Zea mays
  misc_feature: Incyte ID No: 700353058H1
gccgccgcccgtcctccgatccatcctcctgcacggcaggggcagccacacttgttggttcgtctccctctcccgtgtggcggcgggggattatcatatatgatggggtggctgcgcctccactccctcttctcccctctccggaggatgtgggtgagggcgcattccgagcgccggaaccggagggggatgcgcatcctgtacaaggacgtgcagtcctgccaggacgaggacgtgcgcgtgctctggtccatcctcatcgactcccaccgc

SEQ ID NO: 4056 - DNA, 273 bp, Zea mays
  misc_feature: Incyte ID No: 700353059H1
gacactgctgttcttctctcgggggcaacaatcgtggatcgtgctgtcattataagtcccgctgagaactatcagctgcctctggaagcacacaaacaattatcgggagcaaacgtctctactgaatcagcagtaaggaaggcagaagatgttgtgagcagcatgctggccaagggcttcgtcctcagcaaagacgctctcaacttggcgagatcattgacgagcgtcacaacatcctatccaacgccactgccactgttgcatccctagacc

SEQ ID NO: 4057 - DNA, 218 bp, Zea mays
  misc_feature: Incyte ID No: 700353062H1
  unsure 2, 65, 74, 111, 113, 198, 200: a, t, c, g, or other
gngtgcccttctcactgcacgccggtgagaattgagatcccagcaccgagacgacgacacaagtnctcacctcnatgcctcctttactcctcatcccagatccccctctcngnaccccgccgcctgccgcagatccgagggtcatcggcagccatgatctcgtccagcaagctcaagtccgtcgacttctacaggaananacctagggatttgaccga

SEQ ID NO: 4058 - DNA, 218 bp, Zea mays
  misc_feature: Incyte ID No: 700353063H1
  unsure 84: a, t, c, g, or other
cgcatccttcgtctttccccttcccagccgccctcttccccccctctcccggtcgcctctaacgtcgctggtgactcacgaagnccctccatcgacggcggtgaaactggggccgacttctggagggtttgacttgttggatacagcgccggctcttccaatcgccgggtgctctctgccactctgtcttgcggagcccccaccgcggaaacacgttg

SEQ ID NO: 4059 - DNA, 208 bp, Zea mays
  misc_feature: Incyte ID No: 700353065H1
  unsure 28, 32, 66, 79, 147: a, t, c, g, or other
atttaaggctgaatctacctcgcctgcntggncctcccctcctccccatcgcgtcctctccgctancacctcgccgatnggatcgcgacgagacgccgcgcgatccgacctaggctgacgccaacgaccactctcgccgccggggtncatggcgtacggcgaccgcgttaccaccttcgaggactcagagaaggagagcgagtacggc

SEQ ID NO: 4060 - DNA, 212 bp, Zea mays
  misc_feature: Incyte ID No: 700353066H1
  unsure 12, 20-21: a, t, c, g, or other
ggcatgcgtcanaccttccnnagctgccccattgccagaagagcaaagatcaacaccaggtccaggggcagcagcagtagcgtggcgaaggggtcaccaccaccagccttccagttccagtgcagggcgtcgactttcgcggcggacaccagcctccggctcgagctggacgagaaccccgaggcgatcatctcgggggcgtggccgggaac

SEQ ID NO: 4061 - DNA, 276 bp, Zea mays
  misc_feature: Incyte ID No: 700353067H1
  unsure 2: a, t, c, g, or other
cncacctcccggtccgctagcagatagcgggggccagagagatcgagatccggaggcgctaggccacccatcagcgtctgcggcaatggcgggcacggtgacggtcccggggtcgtcgaaaccctccacgccgctgctcaaggacgagctcgacatcgtgatcccgacgatccgcaacctcgacttcctcgagatgtggaggcccttcttccagccctaccacctcatcatcgtgcaagacggcgacccgaccaagaccatcaagtccccgagggc

SEQ ID NO: 4062 - DNA, 271 bp, Zea mays
  misc_feature: Incyte ID No: 700353069H1
  unsure 72, 126: a, t, c, g, or other
gggcatctccgcggcagacatgaagcggctcagcgccggcaagttcgcgtgcccagctaatagcgctaaggnggcgcccgccatggaggacctcaactacccgtccatcgtggtgccgtcgctgcncgcacgcagacggtgacgcgacggctgaagaacgtcggccgtccggccaagtacctcgcgtcctggcgcgcgccggttgggatcaccatggaggtgaagccgagggtgcttgagttcagcaaggtcggtgaggaaaaggattcaa

SEQ ID NO: 4063 - DNA, 271 bp, Zea mays
  misc_feature: Incyte ID No: 700353070H1
aatccgttgaggggcacccacaaccgacctccccctggcggctacatattggtaacccatcagcccccttcgtgctcgccccgtccgccagacccagtaccacccgacaatgagagatcgccgccgctatcgcacgggaggggagtgctccactgccgccggtctacggggtcaattgggggggttcaaatcgggtgttcgggccattgctgtactccggtgtttgagtttctgccgcgtcgatcaagaattagagtcagtggagcccaaa

SEQ ID NO: 4064 - DNA, 270 bp, Zea mays
  misc_feature: Incyte ID No: 700353071H1
  unsure 2: a, t, c, g, or other
cnagaagcttgctcctgagtatgaaagacttggtgcaagttttaagaaagctaaatctgtcttgattgctaaggttgattgtgatgagcacaagagtttgtgcagcaagtatggagtttccgggtatccaacaatccaatggttcccgaaaggatccttggagcccaaaaagtatgaaggacaacgcactgcagaagccctgctgaatttctcaatactgaaggaggcacaaatgtaaagctggcaaccatccttcaagtgttgtggttc

SEQ ID NO: 4065 - DNA, 273 bp, Zea mays
  misc_feature: Incyte ID No: 700353072H1
  unsure 28, 76, 123: a, t, c, g, or other
cagacgacgagatggccgatgcggaggncgccgccgccgcgcgccgacgggccgccataaccgactaccgcaagangctgctcaactgcagggagctcgagtcgcgcgtcggcaccgtgaganaaagccttaaaaatgcaaagagggattttaccaagactgaagacgacttgaaatctctgcagagcgtggggcaaataattggagaggttctccgacctcttgataatgaacgctttattgtgaaggccagcagtggtccccgatatgtgg

SEQ ID NO: 4066 - DNA, 271 bp, Zea mays
  misc_feature: Incyte ID No: 700353075H1
  unsure 2, 7, 26: a, t, c, g, or other
gncaggngcacgtggcggcgccggcnccggcggtcgaggagacgccggagaagaagcaggccagcacaaccgagctgcccgcaccctcaggctggacgaagaagcttgccccaactcgaggtggacgaggtggacgatttgaggttatttttgtttccccaactggtgaggaaattaaaagcaagagacagctgactcagtacctgaaagctcatcctggaggccctgcatcttcagagtttgattggggaaccagtgatactcccagacg

SEQ ID NO: 4067 - DNA, 231 bp, Zea mays
  misc_feature: Incyte ID No: 700353076H1
  unsure 14, 41: a, t, c, g, or other
cgtctccgcccgcncgctgcgacgcgccatggctatggctncgctccgtcgcgcacctcttctttcccatcctccttatctccaccgcgcccgccgtgcggacatcaccgacgccgccggggccccggatacctccaggaggcgtgcaacaagacgctgttccccaaggtgtgcatgcacgcgctcaaggacaacccagagtgccaggcggagacggcggtcagcgcgccg

SEQ ID NO: 4068 - DNA, 274 bp, Zea mays
  misc_feature: Incyte ID No: 700353079H1
  unsure 37: a, t, c, g, or other
cggcgttaagttttgctaaggcacgatccatgatggncaaggaaaggggtaacctgctgaaagcccttggcacacaggttgcagaacctctgagggctatggttatgggagctcctttggaggatgctcgccaccttgctcaaaggtacgacagaatgcgtcaagaagctgaagcgcaggctattgaagtttcgaagcgccaaatgaaactaagagaggcgtctggaaatagtgatatggtttcaaggctagaagcagctgagtcaaagctgca

SEQ ID NO: 4069 - DNA, 180 bp, Zea mays
  misc_feature: Incyte ID No: 700353080H1
  unsure 15: a, t, c, g, or other
gactcgtcgtcggangcgccctccagcagcagctcatccgactagccgcgcacaacgcagttcttgtgcatgatctatctagcaaataaaaagatcatatgtctcgtttgattctctggaataactaatagtatatatgctgcgcccggatgatatataaatatgtgcatgaaatgcgtg

SEQ ID NO: 4070 - DNA, 153 bp, Zea mays
  misc_feature: Incyte ID No: 700353081H1
gattctcggccaacttcaccatcccaacttggttttactgcttggcttttgtcctgaaattggatgcctgtgtatgaatacatggagaacgggagtttagaagatctacttatcaacgataaagggcagccactccattggtttcttcggttg

SEQ ID NO: 4071 - DNA, 264 bp, Zea mays
  misc_feature: Incyte ID No: 700353084H1
  unsure 24, 106: a, t, c, g, or other
ccggacgacctacaggtcgtcgtnttcacggtgactttcctcgccggggtcttccaggtctccttcggcctcttcaggctggggtttctcgtggatttcctgtcgnacgctgccatcgtggggttcatgggcggggcggccatcgtgatcgggatgcagcagctcaaggggctgcttggcctcgcccatttcaccaacagcaccgatgttgtttctgtcctcaaggctgtctgctctgcatacgacatgaccgtggcacccggg

SEQ ID NO: 4072 - DNA, 262 bp, Zea mays
  misc_feature: Incyte ID No: 700353086H1
aatcaacagaagacagagattttcaaagattcctggacaacgtgcaatacaaaacaagtgggatattacgttatgagcgtgtctttggtgaaggttttgtgagcactggtggaatcgagactacaaaggaatttgtgggcatgctcgatcttaaaccgggccagaaagtactgatgtcggatgtggaattggaggcggcgacttttacatggctgcaaactatgatgtccatgttctggtattgatcttcggtgaacaggtt

SEQ ID NO: 4073 - DNA, 266 bp, Zea mays
  misc_feature: Incyte ID No: 700353087H1
tggtcaaccgcggcagtacttctggtcgctcggcgcgcgggcgttctacttctcctgccccgtcttcctctggctattcggccccatcccgatgttcgtggcgtgcgtcgcactggtctgcgcgctctacttcctcgacgtgtgcaaggactgggaggaggaggaaggcgacggccatggccaccgctgtacgagtgatgacgagaggagggcaacaacacaagggaaggatgcagagcagcaagtgtagagatggatgtgctagg

SEQ ID NO: 4074 - DNA, 266 bp, Zea mays
  misc_feature: Incyte ID No: 700353088H1
  unsure 2: a, t, c, g, or other
gncaacccatgcatggccggtccgatggagcgagagggacgagacgcagccgagaagcccctcttggtaagggtgggcggcagcggtggtagccagggcggcagcgcctcctcttcttcggttgccgtggtggtcggctgcaccgccatcgccgtcgccggctccttcgagttcggaatgtcgatcggctactcgtcaccgactcagctgggcatcatgcgcgatctccgcctctcgttagctgagtatctgtgtttggctcgatc

SEQ ID NO: 4075 - DNA, 265 bp, Zea mays
  misc_feature: Incyte ID No: 700353089H1
cagaaaccacatcatagaggtactctcggcaaatgatctagactgtgacgatctgagctcaatctgtgaagcagacactatggttctcagcaattacatagaggagatcatcgtatcagctgtctcctaccacttgattcacaacaaggaccctgaatacaggaatggaaagctcatgctatcatctaaaagtttgtcccatggtctaagcattttccaaggtagccatggtgggaaagacactctgaagttggaagaaacgaag

SEQ ID NO: 4076 - DNA, 265 bp, Zea mays
  misc_feature: Incyte ID No: 700353090H1
atccttttctcggcacctcgcgggtctcccgtccgccccgtcccgcattcgtatcctctcctcactctcgccgccgccgcttcccctgcgccccgagccaagatgaatgttgaaaagctcaagaagatggcaggtgctgtgcgcactggggggaagggtagcatgcgcaggaagaagaaggcagtccacaagactacgaccacagatgataagaggcttcagagcaccctgaaaagaataggagtgaacaccatcctggtattga

SEQ ID NO: 4077 - DNA, 265 bp, Zea mays
  misc_feature: Incyte ID No: 700353091H1
  unsure 2: a, t, c, g, or other
gnaattccattgctcgtggacaaaagattccactgttttctgctgctgggctccctcacaatgaaattgctgctcagatttgtcgtcaggctggtcttgtgaagacattggagaaaggaaagcatgctgagggtggtgaagatgacaactttgctattgtgtttgctgctatgggagtgaacatggaaacagctcaattcttcaaacgtgattttgaagagaatggttccatggagcgggtcaccctttttctgaatctggctaa

SEQ ID NO: 4078 - DNA, 263 bp, Zea mays
  misc_feature: Incyte ID No: 700353092H1
gggaaaacccccaacattaattgagagagatgaaagcctggataagtttgacccagtaaaactaaagaaacttcgcccaagtttcaaggagaatggtggtacagttacagctggaaatgcttctagtataagtgatggagctgctgcattagttttagtgagtgggcagaaggctcaagagcttggccttcaagtcctgcaaggatcaaaggttatgctgatgcagctcaagctccggagcttttacaaccactccagcactt

SEQ ID NO: 4079 - DNA, 267 bp, Zea mays
  misc_feature: Incyte ID No: 700353093H1
  unsure 13, 53-76, 211: a, t, c, g, or other
cttcgagccccanccgacgcgacgattcctctcctccgcccgttcccaccgannnnnnnnnnnnnnnnnnnnnnnncgtcgcgtcgggtcggcgtcgccatcgccggccatgggttgcggtggctccaaggaggccgtggccaccggcaacaccagcgccggcagcaaggtcctccggaggaagccctcctccgtctccaccggcgcaagnacacatccaccacgtcgccgtcgtcctccggcgtcgtcgtcaaggacgtcgtgaag

SEQ ID NO: 4080 - DNA, 131 bp, Zea mays
  misc_feature: Incyte ID No: 700353096H1
gtctatgcaggttttggtggggtctccctgctgacagcactcttcgcctacaatttcatagttgaaacaaaaggacgttcgcttgaggaaattgagatgtccatgagcagtgctacccctggcaagcaaga

SEQ ID NO: 4081 - DNA, 282 bp, Zea mays
  misc_feature: Incyte ID No: 700353103H1
aggggatcgaagcggagagcaaggggagcggtcgagcgggtgacatcatcgtcatccagggtttctcaatcggcagcgatggcgaccagggcggcggcgaggttcctgcagcgcagtttctgtcttccggcggcaaggtcctcagcgaggaggagaaggccgccgagaacgtgtacatcaagaaagtggaacaagagaagctggagaagctcgcacgcaagggccccagcttcaggagagcaaccctcgtcaaccacaggctctgcagcaagtgatgtgaag

SEQ ID NO: 4082 - DNA, 281 bp, Zea mays
  misc_feature: Incyte ID No: 700353104H1
  unsure 12: a, t, c, g, or other
atggcagaagcngccggcggcggacccctgctccccgaggaactcattatctgggagatcctaacccgtctgccggcgaagccctacctccgatgccgcgctgtctgcctctcctggtgccgccgactcacctccgacgccaaattcctcctcgcccaccaccgtcgccagccctcgctcccgctcctcactgaaggggacaggagcaccgaggagaggaggatcgacgccctggactaccgcaccggcgagcggcgccccatcgcgcggacaacaggccg

SEQ ID NO: 4083 - DNA, 280 bp, Zea mays
  misc_feature: Incyte ID No: 700353105H1
  unsure 6: a, t, c, g, or other
cctgtnccacctcgccgccgtcatgacaacagggtcaacaccgggttcgcccccctctcaaggctctcagagaaaacgaggttctacaaaagattctgttgccttgtacgcagtgcaatgctacaagtgctacaaatggcgtactgttccaaaagaagaattcgagacactccgtgagaacttcaccaaggatccatggttctgcagcagacggccagactgctcctgcgaagacgatgctgacatcgagtacgacagcagccgtatctgggttctggac

SEQ ID NO: 4084 - DNA, 281 bp, Zea mays
  misc_feature: Incyte ID No: 700353106H1
  unsure 142, 199, 212, 216, 220: a, t, c, g, or other
ggccgccaccaggtgcagagtctttcgtcatctcttctccggcgaagaacccccagtcgcccaccagatcacttgttaaactttgttgaggggtgatggcggtttctttcgcaaacctcaactccgaggcagggcttaaaangcttgatgagtaccttctcactcgcagctacatcactggctaccaagcttccaaggntgacttggctgtntacncttncgttttcggctgctccctcgtccaagtatatcaacgtagcaaggtggtttaaccacattga

SEQ ID NO: 4085 - DNA, 283 bp, Zea mays
  misc_feature: Incyte ID No: 700353107H1
  unsure 34: a, t, c, g, or other
ccacaagcgagcgagggacccgggggcggaagangagagagaagacgtctctctcctctcggcgtccccgtttccccaaccttctcgtctgctgcctgcctgcctgcctgcctgcaaaaaggagtttgtcatggcgtctaagcgcatcctcaaggagctgaaggacctgcagaaggacccccccacatcatgcagtgcaggtcctgctggtgaggacatgtttcattggcaagcaacaattatgggaccacctgacagtccctatgctggtggtgttttttta

SEQ ID NO: 4086 - DNA, 279 bp, Zea mays
  misc_feature: Incyte ID No: 700353108H1
  unsure 28, 45, 47, 198: a, t, c, g, or other
gaagagacagacggaaagaacaccggangcggagagccacaggangnggagctcgagggacgacgaccagctgaattaggactggagggggcagacgacgtcgtctagcggcagcagcaggagaagggaagactcaaacgagggatctccgagagaggagtgtggtaggcaggaagaaagaataaggcgagccgaganccattcgcatggaggcggcgatggatctgatgcggcggatgccccacggagcgcggagacggcgctcaacgcgctgctctc

SEQ ID NO: 4087 - DNA, 220 bp, Zea mays
  misc_feature: Incyte ID No: 700353110H1
aagagaggagggccggcgtcggcgtgcctagctcgatcttgaaccatagctagccagcatggcgcccagcagcagcatagcagtactgctgctcctcgtcgtcgccgtcgtcctctccaacgtcccctcctcgggcgccctggcctcctcgtcgtcgtctctgctgcaccagtcgtctccgtctgagagtgagactgagaccgacagtagcagcggagaa

SEQ ID NO: 4088 - DNA, 280 bp, Zea mays
  misc_feature: Incyte ID No: 700353111H1
  unsure 126, 244, 277: a, t, c, g, or other
cggactcctcagttccttcgctcctctgtaacccggggcggccgacgaggcgggaaccaccgaccggcgacgatgggcggcggcgagggcaagtccaagaaacgccgctcttctacctcctcagcngaggaagaagggggggaacggaagaggcgggacaagaaggagagcaagaggaggagccgagacgacagggaggatgacgatgacagacacaagaagaaggggaaacacatcgacaggnacaaaggaaaagagagagttcgaaggataggcntcc

SEQ ID NO: 4089 - DNA, 278 bp, Zea mays
  misc_feature: Incyte ID No: 700353114H1
  unsure 69: a, t, c, g, or other
ctggcttgtatccctctctcgtctctccagcgacggcagcgggcgagggttacgcgaaggcgaacggantacgtggaagcagatgcggcagccatggccgtgatggagaagctcaagatctttgtcgttaaggagcccgtagtcgcggcctcctgcctcatcgctggattcggtctctttcttccagcagttgtccggccaatcctggattcatggcagaccgcggaacaagttcctccacctcttctaaatgatgtggttgcaggtgtcaccggcaa

SEQ ID NO: 4090 - DNA, 64 bp, Zea mays
  misc_feature: Incyte ID No: 700353115H1
  unsure 14-15, 20, 39, 43, 62: a, t, c, g, or other
caccatttcagcanntgccntgggctggagaacacaganccantgtccctttctggctaaantt

SEQ ID NO: 4091 - DNA, 279 bp, Zea mays
  misc_feature: Incyte ID No: 700353116H1
  unsure 10, 90, 93, 177, 231, 256: a, t, c, g, or other
gccgcaagcnccacagccggagaaatcctctcgtgtggtctcttcagcttctcagacggcaagacgatgctgccgccgaggtccgccgcngcngcgccgtgctcggttgcaggacttctgttccaccgattctcatcctactcgtcctcttctgtctattctgtccgccaccacgcntcgtctgctctctcctcccagccctaccacccgccccatcaccacctggtcctnttccccccatccagcagccgcaggntcagggggtttgcggctgggctt

SEQ ID NO: 4092 - DNA, 279 bp, Zea mays
  misc_feature: Incyte ID No: 700353117H1
  unsure 16, 102, 261: a, t, c, g, or other
accgctctaccatgtngtcggtggagcccattacaccgacgcacctccatagatccctaacctgtagggaggaggagaacgtctggaccgctggcgctacanctcccgactcgacggcggtgaacagtgccgccctgcaccttggcccctatgctaatagatctagatgaacacctatactgctaatcaattggacgtcacataggaactcagtgagatactagaaattatatcagcaacgtgtgctattctatctctagngtcatgtacggaatgctt

SEQ ID NO: 4093 - DNA, 282 bp, Zea mays
  misc_feature: Incyte ID No: 700353118H1
  unsure 85, 100, 118, 134, 140, 177: a, t, c, g, or other
tggctctcggtgccctagcccgcctcctccgccttgcgcccacccctcgcctcgcgcgccccttcgctgcaaaggtccgtgcgtnctcggccgcaggaanccggagcttccgtcggangacgacaacgacttcnccggcnggagcttcaccgcccccaccgagggcatcggcaagcngctcgccgaggtgctcaaagagctcgggaagagggttccggactcccttgtcaagacccgcgtcgagaataatggcttcgctatcaagtacatcccatggcacat

SEQ ID NO: 4094 - DNA, 272 bp, Zea mays
  misc_feature: Incyte ID No: 700353119H1
  unsure 30, 85: a, t, c, g, or other
gagaaggctttctttgatgactacaaagangcccacctcaagctctccgaactggggtttgctgatgcttaaatagaccctatcntggagtgatacattctgctgcctgtatggaatcatgtggtcttttgcatctggagtcaatgtgaacaagcagattgtcgtattgtctttctcgtaataaatttgtcgatgttgagccctaggctgttgttggtacattggtacttcgtcgatgctgaattgggacccttgtccgttttcctagactc

SEQ ID NO: 4095 - DNA, 60 bp, Zea mays
  misc_feature: Incyte ID No: 700353121H1
tagaagtgttctgtgaactgtctctacgaaattgaactccgactgctcgagactgtaatt

SEQ ID NO: 4096 - DNA, 277 bp, Zea mays
  misc_feature: Incyte ID No: 700353122H1
  unsure 4, 32: a, t, c, g, or other
aggngtcttagctacagcaggagccccatgcngtcgccacctgcaaaggaaaaggagcgcagtcccacacctggcggaagcaggagcccaaggagccgcagcccacaggatcaggtgatgagcccaccacctaaggataacggcgacaggaatggttcagaccgtggcgacagccccagagggagggaaaacagcaggagccgcagccgcagccgcagcccatccggtggtaaccgcagccctgcagctaatgggcgtagcgagccccagaggtgac

SEQ ID NO: 4097 - DNA, 276 bp, Zea mays
  misc_feature: Incyte ID No: 700353123H1
  unsure 10, 55: a, t, c, g, or other
cccagccgcnccgccgccgccgtgaacgagatggctgcagccttttgctccgcanttctccgcccatcggtgagccgggcacatatccaccttctttcccatgcctcctccccgacggcgctggggtctttccttttaccccgcctctactcctctgcggcaggtcaaccgccgcctctcctgttttcacgcccggcggcgtcatggacccatcccgcatccgcaacgtagcggtgatagcccacgtcgaccatgggaagacgacgctcatggacc

SEQ ID NO: 4098 - DNA, 275 bp, Zea mays
  misc_feature: Incyte ID No: 700353124H1
  unsure 118, 183: a, t, c, g, or other
cttattaatccactttaaaaacatatataattattgtgttcatattatcttggtttactggtactttgataaccttgcagattctcatcatatgcatgcaaagcaaaaaatgattgtnatgtttttcggtcacatgtgcatggatagcttatggttgatcattgatcatttgatcgttatccntattttattccttgagtttctttttgtctctcttgagtgaacaaaatattgggtctggtactgagatgattctcttgttgggcgtttgagca

SEQ ID NO: 4099 - DNA, 277 bp, Zea mays
  misc_feature: Incyte ID No: 700353127H1
  unsure 14, 61: a, t, c, g, or other
gcccagcgtcgganatctccgccgccatggagacgctggccagcgccatgcggcggagganccgccggtaccaaggccccgccctcctcctctgcttcctccgccctcgcctcgggcagggtccctctcgtcatggccttcctctcctgcctcgcctggctctacgtcgccggccgtttgtggcaggacgcgcagacccgggcgatcctgtccggcctcctcgagaagagctctaccagcgtcccgaagtgctctcggtggaggacaagcttaggaa

SEQ ID NO: 4100 - DNA, 276 bp, Zea mays
  misc_feature: Incyte ID No: 700353128H1
  unsure 17, 124, 126: a, t, c, g, or other
gtagcgaaaggcaaggnacgtaagagctcgtctaattcttggatcgaattagacgacttcttcgtcctctcttcattagcacgctaacttgtaatctgcaggatctaagcaaagacttgataananttatggacggattggtaggcctcttgaaagttcgcgtggtccggggtatcaaccttgcctaccgcgacgcaagaggcagcgatccgtatgtccgtcctacggcttggcaagaagaaactgaagacaagcgtgaagaagagatccgtgaac

SEQ ID NO: 4101 - DNA, 277 bp, Zea mays
  misc_feature: Incyte ID No: 700353129H1
  unsure 25, 29, 32, 51, 71, 87, 94, 96, 99, 105, 112, 118, 122, 124, 187-188,: a, t, c, g, or other
gaactatgcctgggcagggcgaacntctngcntcttgttttggaggtccgnagcggtcctggacgtgcaantcggtcgtccgacctnggtatangngcncaagantaaaagnagccanctantngctggttccctccgaagtttccctcaggctagctggcgctctcgccaacgcgtacgctcgacnncccgnagttttntccggtnnagcgaatgattagaggnctggggccganacgatctcaacctattctcaaactttanatgggtnagnccc

SEQ ID NO: 4102 - DNA, 224 bp, Zea mays
  misc_feature: Incyte ID No: 700353130H1
  unsure 4, 98, 104, 134-135, 143, 160, 208: a, t, c, g, or other
gggncatcggaggaggcgagggagctacacgcggcgccatggacgaggaggagcacgaggtttacggccaggaaatcctggaggacggcgacatgganggcgcngacgttgatatggctgcctccggggatganncggcgaantgcaggagctcgacganatgaagcgcaggctgaaggagagggaggaggaagccgccgccctccgnccccccccaggccaag

SEQ ID NO: 4103 - DNA, 274 bp, Zea mays
  misc_feature: Incyte ID No: 700353131H1
  unsure 81: a, t, c, g, or other
tccgtgttaacatgattcttgacaacctacctttagtcgttcctattcaaagagtggatcaagaaggtgcatatttctatncaacatggattccatgttggggccaaaggaaaatattcagggagcaaagatgaaaaatacttcatccacaaccatctatcttttacggtgaaatatcacagggatgagcaaagggatgtttccaggattgtggccttgaagtgaaaccatacagcgttaagcatgaatatgaagggcaatggaatgataagaa

SEQ ID NO: 4104 - DNA, 277 bp, Zea mays
  misc_feature: Incyte ID No: 700353132H1
  unsure 2, 5, 8, 10-11, 16, 18, 23, 30, 35, 38, 46, 66, 94, 242-246, 248: a, t, c, g, or other
gncgnacnannttctnangaggngattgcngggtnaanacaaatgntcaaggcagttgacgttcanaatagaggcgtaattacttttggtgaanctagacaaggtttaaaaagatatggtagcgaattggagaatagagaaattagtgatataatggaagtggctgataatgacaataatgtgaccatcaattatgaagaatttatcgctgcaactgtgcctcttaacaaaatagaacgtgnnnnncncacctggatggcagctttacctacttcga

SEQ ID NO: 4105 - DNA, 175 bp, Zea mays
  misc_feature: Incyte ID No: 700353133H1
  unsure 120: a, t, c, g, or other
cgtatggtcgtcgtccccttctccctccgcattgcgcgaaaccccatccgcctccgccttcttccggtctccgctgctcgcttcacccgtctcgccatgtcgaccacgccgccggggcgntaaccatatccgtcgagtatgccaagtccgggcgctcaatctgcaaggggtgcag

SEQ ID NO: 4106 - DNA, 271 bp, Zea mays
  misc_feature: Incyte ID No: 700353135H1
  unsure 8: a, t, c, g, or other
ggggagcntcgaccgattcgtcccggcctcccgtcccgccgctggcctcgcctgccccgatggcggcggtggcgatccaccagttcgccgagtgcatcacctgccacgcctggagcccggaccagtcgacatgatcagatggtttcggggatagactggagtaaatcatccaacaaaatcgtaacagtttcacatgatagaaattcatatgtttggacacaagaaggatctgattgggtacctaccctggttattctaaagttaaatcgtg

SEQ ID NO: 4107 - DNA, 277 bp, Zea mays
  misc_feature: Incyte ID No: 700353136H1
  unsure 2, 25, 31, 48, 63, 75, 93, 123, 129, 132, 138, 141, 143, 147, 153, 177,: a, t, c, g, or other
cncttttactctcctaacatcatgnccttgnggaggtggccaactcanaccacaattccctcngcgcacgagacncaaccccgcaattacacntccaccttatagacaaatacacattctatntcttcnaanttttanaananattnatccanctaaaccaaactaacatgaataanctttttcaantntntcccaaaancctctgtntgtctacccctnnacatcatactaaccttttccagcnanatcctaaaaaggtcctnataaccaatttct

SEQ ID NO: 4108 - DNA, 270 bp, Zea mays
  misc_feature: Incyte ID No: 700353137H1
  unsure 215, 242, 244: a, t, c, g, or other
ttgctcaacacattgacaaagttactgaaggaccttcagaactcaaatgaggagtcaaaagttgtcacgaaggcatctgcgatgaaagaggtaaaaaaacgcatggagaaggatgtcaatgaagtgacaaagattgcacggctggcaaaatcaaaagtagagcaactgaacaaagataatgctgtgaacagaggaaaaccaggatttggcaaggngtcgggtgtggaccgatcccggacaananccactgtcgcttgacaaagaagttga

SEQ ID NO: 4109 - DNA, 272 bp, Zea mays
  misc_feature: Incyte ID No: 700353140H1
  unsure 69-70, 165: a, t, c, g, or other
cattcgttccccttctcgcctccacgagccttcacaaattgccctctcagctcttctcctaatctcacnntagccctagccaaatcccagacccatcccagccctagcgacaccaaccagctcgccagcgaccatggggaacccggagaagctgatgaatcaganttcgacctcaagttcacctccaagtcgctgcagcggcaggcgcgcaagtgcgagaaggaggagaaggagcagaagctcaaggtcaagaaggcgatcgagaagggcaa

SEQ ID NO: 4110 - DNA, 273 bp, Zea mays
  misc_feature: Incyte ID No: 700353141H1
  unsure 226: a, t, c, g, or other
tggttgcagcatcaaagcttcgggctgttcagacgaggactgaaaattcacgcggcttgtggcagccgttgcaccgcccttgcttggggacgctcctagtgttgacgtcaagaagaatgtgattgtggccattacctctgataagggactctgtggtggtatcaattcaacctcggtgaaagttagcagggcccttcacaaactgacatctggtccagaaaaaganagcaagtatgttatattaggagaaaaaggcaaagttcagctgttgcg

SEQ ID NO: 4111 - DNA, 272 bp, Zea mays
  misc_feature: Incyte ID No: 700353142H1
  unsure 28: a, t, c, g, or other
cgaacgtcgtacgagaacctttctcccncctccacctttctccttttcttgccacggcaaaacaccttcgccggcgagagcatggcgatggcgtaccgtgtcctggaggtcaccctggtgtcggcaaatgacctcaagaaagtgtcgctcttctcccggactcgcatctacgccgtggcttccatctccggattcgacctccgcatcccttcccacagcacccaagcagaccacagcaacggctgcaacccctgctggaacgccgtggtaca

SEQ ID NO: 4112 - DNA, 271 bp, Zea mays
  misc_feature: Incyte ID No: 700353143H1
ctttaatcactcgaattcctctgccttttcaagatatggcaataaaaggatagaaccatcaggtgagattcagtttttccctctccctgcgtcattgggcaagggcatgttaatggcaagaacccagttttccaacccgatggggtgttgctgcctcccaatgaacataatacaggtgagagtacaaggcaagctcgaatttctctggacagtaggacagagggtgctgccatcctgtgttccactagtgccagggaagatgctggtgcaa

SEQ ID NO: 4113 - DNA, 272 bp, Zea mays
  misc_feature: Incyte ID No: 700353144H1
ggctgaaattgttagcaaaagcacgttactctctagcaacctttgagggggaggaaattgttattgtgtcgcaggttttggcgcacgaggtcaacattgggtatgagcacatgggcaatcaacaagtcatgaaactaaacggaaccacaataaagaatatccatcaccttgctcatcttgtggacacctgtaaagacaagttcctgacgttcgaattcgaagacgacttccttgttgttttgcatcgagaagaagcggatgctgcatcatcg

SEQ ID NO: 4114 - DNA, 276 bp, Zea mays
  misc_feature: Incyte ID No: 700353145H1
  unsure 242: a, t, c, g, or other
tacgtactgctactccggctcgtcctcctctcttctccatcgccgttggttctctcacgccacacggtcatccgatccctgtcccaccgcgttgggagcggcgcagcccatggacgacaacgagagagagaaagagaatgagaatgagaaggagaagcactacgggactgacgtcgaggatgaagaagaggacgaggaaggtaacaagcgagtccgtggtgcttggcccccaggtccccctncaaggagcagctcgagctcgacaaggatgatgag

SEQ ID NO: 4115 - DNA, 270 bp, Zea mays
  misc_feature: Incyte ID No: 700353146H1
  unsure 29, 57, 59, 111, 126, 148, 171, 223: a, t, c, g, or other
gttgaagataagctggaattaagacgganacaatttcacgttcttcttagtaccatncnttaacttcaacagacattggagaatgacgacaagctgtcagaggtggaagangactcaagaaagcgncatggaggcagaccctaagccntagatggtgacgtcgctgtccgnccgcccgcaaggaacaggcaatagctgcatgggcttcctgggttcgatttcnacttcggcatgaaatactttgctttcaaatataattcatgcctcatt

SEQ ID NO: 4116 - DNA, 270 bp, Zea mays
  misc_feature: Incyte ID No: 700353147H1
ctggaagcctcggtgtctccccaggatgcttggcgaggttcttgggttgggcgcagggtcttcgcgggcgaagaagcgatcggaggcgccatcaatttctcgccgttagtctgacgccgccgctaatccgctccccaccgttgatagccccagcgttgctacaatcggagcgcgaggacacgtatcatctgaaaagcaagttggtacctggattctcaagtgccagggcctgattttaagtaaggcgctaaagaacatgaaaaaaattga

SEQ ID NO: 4117 - DNA, 223 bp, Zea mays
  misc_feature: Incyte ID No: 700353148H1
  unsure 14, 98, 140: a, t, c, g, or other
cagcctgctcgttnctctcaatggtgctggcctttgtcctgctagtagatcacttagcacccaggccgccactacgtcaagcacaccacaacctccgnctcccccaccccctccagagaagactcactttggtggcctcnaagacgaggatcgcattttcaccaacctctatggtctgcatgacccttttctgaaaggcgcgatgaagagaggtgactggtat

SEQ ID NO: 4118 - DNA, 80 bp, Zea mays
  misc_feature: Incyte ID No: 700353149H1
  unsure 32, 76-77: a, t, c, g, or other
gggttttgttttatggcccttcctggctgtgncaagactctgttggccaaggcaattcgctaaatgaaatgcccanngct

SEQ ID NO: 4119 - DNA, 305 bp, Zea mays
  misc_feature: Incyte ID No: 700353150H1
  unsure 147, 211, 223, 247, 276: a, t, c, g, or other
tgagaatattgaggagattgctttgaagatctctcaacttcctttggcttcaggcaagcaaaagaggattgctgtgattactcaaggtgctgatccagtggttgttgctgaggatgggaaggtgaaaacgttcccgtgatccattgncccaaggagaagcttgttgacaccaacggcgcaggtgatgctttcgttggaggcttcctctcanattggttcctanggcaaagggcattgaaagactgcntgagggcaaggttgctaatgccgcaaaangttaatcaatccagcgcccgggctgtaat

SEQ ID NO: 4120 - DNA, 284 bp, Zea mays
  misc_feature: Incyte ID No: 700353151H1
  unsure 39, 234: a, t, c, g, or other
ctagtcccctgctccattctcagccgccgccaatccctnccggtgctccgcaaccgctgagtgagaagaagagatggccggcaagggcgatggcccggctatcggcatcgatctcggcacgaacgtactcttgcgtcggcgtgtggcagcacgaccgcgtcgagatcattgccaaacgaccaggtaacgcacacgcctcgtagtcgcttcaacgattcgagggctcttcgagancggcaagaaaccagttgcatgaacccataacaacggcttgatgcaaggtc

SEQ ID NO: 4121 - DNA, 73 bp, Zea mays
  misc_feature: Incyte ID No: 700353152H1
  unsure 34, 37, 43: a, t, c, g, or other
caattgcggtggccaccacttccaatccactccncgngtcaantcgccgagctgttcttgctctgtcctctct

SEQ ID NO: 4122 - DNA, 297 bp, Zea mays
  misc_feature: Incyte ID No: 700353153H1
  unsure 2, 247, 286: a, t, c, g, or other
cnaatcttttgtgagcgaataccccattgtttcgattgaagatccttttgaccaggatgactgggttcactatgctaagatgactgaagaaattggagagcaagtgcagattgttggtgatgaccttctcgtcaccaaccccactagggttgctaaggctatcaaggagaaatcatgcaatgccctctgctcaaggttaaccaatcggatctgtgactgagagtaattgaaggctgtgaagatgtcnaaacgtgcgggctggggtgtgagactagtccataggatngtgagactgaa

SEQ ID NO: 4123 - DNA, 298 bp, Zea mays
  misc_feature: Incyte ID No: 700353154H1
  unsure 2, 182, 211, 254, 266-267: a, t, c, g, or other
cngcagcatccatcgcgtgcgtacattaatctaagcgatcttcatccagccttctgctctgctcccttcgaaatggaggcgacgagcaaggcgatggcttcaggcctcctcgttctgctgcttctcatcaacacaggctttgtcctgcccgtccattccgaggactgtgggccgacacccgntccatctgcaacaaagaggcaaaactgcngggaccgacaacttgcgcggggcgcggcatgcgggagggcggntgcaattgggannttccccaacttggtgccttttgcaatggctg

SEQ ID NO: 4124 - DNA, 291 bp, Zea mays
  misc_feature: Incyte ID No: 700353155H1
  unsure 239: a, t, c, g, or other
gagtacggctcctggacacagttgctcccagctgacagccacgttatctccaccgtaaggctcgagcacgccaaggaccagcgtcacctggcagacgctgtaccctgagtggatcgacgaggaggaagagacggagataccctcttgcccgtcgctgcggagcctaacgtgccaagaagtgcgcgctttgacgtcgtcgccgtgaagttccctgcacccgtgtggcgggtggtcgaganacgtcgcgggctccatctgcagtctcggcagccaaactggtgtgggtctcga

SEQ ID NO: 4125 - DNA, 293 bp, Zea mays
  misc_feature: Incyte ID No: 700353158H1
  unsure 29: a, t, c, g, or other
taggaggagaggagggagagaaggaaganggcgaggccaaaaatcccctccccctccccaaatcctagcccaataatctcttcaatcaggggattcttaggtctgatcaagtcggaggattcggcagggcgcaccatgaaacgagaaggcgtccgtctccaaggagcttcaacgccaagcacaagaagatattggaagtcttctacggcattctgagaatagagatggcagactgcaagtcaaggggtctcgattggcaagtgtggatctaggtcttatatgcatgacatgtc

SEQ ID NO: 4126 - DNA, 290 bp, Zea mays
  misc_feature: Incyte ID No: 700353159H1
  unsure 6, 103: a, t, c, g, or other
tcaggnatgctggatacaaggggcagacatccattgggttcacgagcgagagttcaagatgaggcgacaaccgggctgggagacaaacagttgtggataccanggtgacgacggccatctttatcggggtcaagggaaaggtgaatcatttgggccaaattcacatctggtgacataattggtgctggcatcaactacttgtcacaagaattttcttcacgaaaaatggtactctggttggagccattccaaaagaaattaaagggccatatatcctaccatgcagttca

SEQ ID NO: 4127 - DNA, 290 bp, Zea mays
  misc_feature: Incyte ID No: 700353160H1
  unsure 2, 16, 71, 140, 151, 207, 211, 214: a, t, c, g, or other
cnttaatccggttgcnggacacacaagcaggaaccagcagccatgatgatcaagctgaggtactccaagangctcttcaagaggagctcctcctcgtccaagcagcaggtcggcagctcgtggcgacgacaatggcagcnacggcagcgcngcgcaggggagatcgagtgggaggtgaaggcccggcgggatgctagtgcagaaganggangangggagggcggccaggagaccgtcacgtcaaagtgttcaacggcttctctgccatcagtgtccattgagccactccc

SEQ ID NO: 4128 - DNA, 246 bp, Zea mays
  misc_feature: Incyte ID No: 700353161H1
  unsure 47, 137, 164, 216: a, t, c, g, or other
aggagaagaaggtgcaggacaacttctgctcgatcgctgtgcgaggncaggaaggggatggacctggtggtgtgcaaggagtctgcgacctctcacagcgctccaacctggtgctgtacggccggatccagtgcaanggcaaagtgcaaccgagcagaaagggnatcaccgcgccgcaagatgaaagtgtgccaagaagcgtgcgacaaagactanttgttcaaagcggctgaagtcaccaaggct

SEQ ID NO: 4129 - DNA, 78 bp, Zea mays
  misc_feature: Incyte ID No: 700353163H1
  unsure 62, 69: a, t, c, g, or other
actgtatggctacatccttgagggtaaagagctcgagttctacatgaagaagctccagaggnagaaggnccaagggtg

SEQ ID NO: 4130 - DNA, 293 bp, Zea mays
  misc_feature: Incyte ID No: 700353164H1
  unsure 246, 280, 282: a, t, c, g, or other
tgtggtctttgcgccaccgctttagggcttattcgtttctgtcggattgcaccagaatcgttccagctaatcaaagtttatataaattagagaagcaatccggtcaggaatcgttccaacccactaatccggcacaaacgaacaaggccttcggaaaattgctgctaaattgtgtgcgttaccctgtttgtgctgttgttgtaggctggttccggtgccggcgctttgctcagtgctgtgcagggnttaacacagggatccctttgtccagaagcagtcnangggccgagtgg

SEQ ID NO: 4131 - DNA, 299 bp, Zea mays
  misc_feature: Incyte ID No: 700353165H1
  unsure 3, 137, 223, 236: a, t, c, g, or other
ggngttgcccaatggatgcttcaaattcctggtgcatcaagttacataggttgcatcgggaaggataagtttggtgaggagatgaaaaaaaatgcacaagctgctggtattaatgcccattatcatgaggatgatantgctcccaacggggcacatgtgctgtttgtgttgttggtggagaaaaggtcccttattgctaacttgtctgcgggcaaactgctantaagtctgaacanctgaagaaacctgagaattggggcactgttgagaaggccaaatatattacattgctggatttt

SEQ ID NO: 4132 - DNA, 280 bp, Zea mays
  misc_feature: Incyte ID No: 700353167H1
  unsure 41, 204: a, t, c, g, or other
gtggcggttgagctctcatgtcatgtcatgtcgtgtcacgncgcgcgcatgagcgagcggtgggcgccgacgatcgggctggcacaccacctgccttcctgacgcgtgccttccctcgtgctgactgctcgctcgctcaaacaactcgacagtgcagcggatttctcgagggactacgacgggggctgctccagatgcgcagtnctacagccccgccgccatttttcctcttctcgtgaatggaggatgaagctaacggcgcgttcggtgttaagatcta

SEQ ID NO: 4133 - DNA, 297 bp, Zea mays
  misc_feature: Incyte ID No: 700353169H1
  unsure 2, 63, 192, 208, 218, 222, 228, 242, 272: a, t, c, g, or other
tnaccataccgcgcggaccggggccgggagaaacaaaactgacaaggacgatatggtgcgtancttcgttcgcgctgatccttcgtcgccacggccgtagcgccgtggccacagccgcaccctcgccggggtttgtcgtcaccggccgcgtctactgcgacaactgccgcgcccgggttcgagaccaagttntcccacgccatcgaangcgcgacggngganatggantgcgtcacttcgantcgcaggaggtccacgacaaggcggaggcnacgacggacgccggcgggtggtaaa

SEQ ID NO: 4134 - DNA, 290 bp, Zea mays
  misc_feature: Incyte ID No: 700353173H1
  unsure 28, 43, 51, 91: a, t, c, g, or other
ccgtcgagtgagtccagcgccggacggngccgatctagctcgntgcgtcantctgtccacctggcgtgcgccgctctggtgccactgccanggcaacagcacggcatggcgccggcataggtcgctaggaaaaacctgcttttgtgttcgggacttcgggttcacgtcgtgtctacgtggcgcggcgggccccgaatagtaaaggtgcgtcgttttgtgttgtggtcgaataaaataatgtgtctgtgtgccgatcccgtgtcggttagtgggcccatgtcgtgctgatg

SEQ ID NO: 4135 - DNA, 281 bp, Zea mays
  misc_feature: Incyte ID No: 700353174H1
tttctctctacatttggcaaccatttaacaactccctaaacaaaaatgttgactgcattatatagtttttgtgacttattttttatgtggataaatacaaaacaaaattacaacctatatttaaagaactatggagaactcaatttttttactctaaaagccattagcaacttcttaaatctgtgattagagagctaaaatttacataactatggagtgctctaatggtcgtgcgctccaaacaaactgcagtattagtgtcggttgtcagagagtatata

SEQ ID NO: 4136 - DNA, 94 bp, Zea mays
  misc_feature: Incyte ID No: 700353176H1
  unsure 31, 40, 79, 88: a, t, c, g, or other
ttaactaccatcgataaatgctaggccaggnacctctggngtacatgccataattgtcttgagtctgatctcgtaatanaaactgganaataat

SEQ ID NO: 4137 - DNA, 285 bp, Zea mays
  misc_feature: Incyte ID No: 700353177H1
  unsure 249, 275: a, t, c, g, or other
agtcgaggaggctcaacgtgcaataaatgctgctcatgtggaggctgtaagtgctgagaatggtataggtctgtcaagctaatgggtcggcacagtggttttattgcacattatgctactctggctagcagggacgtggattgttgcttgatcccagaatcaccgttcttttggaaggcgaaggcggactttttagatacatagaaaacgtttgaaagacaatggtcatatggttatcgtgttgctganggtgctggacagaaacttattgctgnaaccatgcag

SEQ ID NO: 4138 - DNA, 79 bp, Zea mays
  misc_feature: Incyte ID No: 700353182H1
ggagaaaagctcccaactcttcttttcctaaggcacccattgtccaggagtcccatggtgacttctggtgtcggcagta

SEQ ID NO: 4139 - DNA, 283 bp, Zea mays
  misc_feature: Incyte ID No: 700353184H1
  unsure 98, 210: a, t, c, g, or other
ggatgggtggccagcattatctatacatggtgataaagctcaagctgaacgggactatgttcttgcagagtttaagagcggcaagagccccataatgnctgccacagatgtggcacacgtggtcttgatgtgaaggacataaagtgtgtgataaattatgattttccaacaactcttgaagattatattcaccggataggtcgaactggnccgtgctggtgctagcggaactgcatttacttttttcacacacgcaatgcaaattctcaaggatctagtgaag

SEQ ID NO: 4140 - DNA, 307 bp, Zea mays
  misc_feature: Incyte ID No: 700353185H1
  unsure 192, 259, 274, 296: a, t, c, g, or other
gggtaataaaaataatataaaacgatgtggaatgtagaatattaaagataaatatgttgtagataaatggcaccattcacatatttattatctgaatctaaaatgtttgaatacaatgtttaaggtatgtttatacccttcgccttgaccaagcaataattccccgagtgatgctcttgcaaattaccagangcgtgaaccagtaaaggaataccggttccactatttataggccccaggaccaccagcctgtgagggnattaccattccatgncccttccataaaaggtttaccnaccatggactc

SEQ ID NO: 4141 - DNA, 281 bp, Zea mays
  misc_feature: Incyte ID No: 700353186H1
  unsure 2, 39, 161, 192: a, t, c, g, or other
angattcactggtgtacagtccacgcagcatcgcgaggnccacaaccaccggcatccctgtccggcgatcaaggcgtggccgtgctacgtgggccgcttatcgtgggtgcaaggccggcgggtctggcatgcgcggcgttgctcaccatgttatacattcnctacgtgctctagagcgcgacgtgtgcgtanctcaatgtggcacgccgcacgtaccgcagttgtgtctgcactacccaagggtatgtgagctcccgctcatgcacttccacgcactaacc

SEQ ID NO: 4142 - DNA, 287 bp, Zea mays
  misc_feature: Incyte ID No: 700353188H1
  unsure 27, 282: a, t, c, g, or other
gggcggcgagatgaacggcggcggggncgacgggaagcagcagccgcacctggtactggcgcacaagctgttcctcctgtcgcactccgacgtcgacgacctcgccaaggtcgacctacgcgctgacgtgttcgcggcagtcaaatccgatgacatggcagctctgtacgagtcgttggcggcggacggcgtactggagacggacgcggcgctgctggccgagatgcgcgccaggatcgacgaggagatccggaagtcgacgagaagattgctgatgcagangagaa

SEQ ID NO: 4143 - DNA, 288 bp, Zea mays
  misc_feature: Incyte ID No: 700353189H1
  unsure 35, 147, 268-269: a, t, c, g, or other
cgcaacttctcccactactcacgctactacccctnccctaggccacgtccaacagcctcccccaatccgtcctttggcttcgctggcgacggcggaggctggtgaaggcaggaattggtgagcgctccaattcggggattggcggangctggtgcgcaccaaggcaggaattggcggtggctggtgcgcgccatttcggggaatcggctgcagtcacagaggacacacgacgtgtgtttccttgccgtcggttcggacatggctacgnnccttgagaaagtgcatcat

SEQ ID NO: 4144 - DNA, 64 bp, Zea mays
  misc_feature: Incyte ID No: 700353190H1
  unsure 28: a, t, c, g, or other
gtccatccccaatccccaaaggcgaggngagaactagcaaaggggaaatggctgcttccacaaa

SEQ ID NO: 4145 - DNA, 277 bp, Zea mays
  misc_feature: Incyte ID No: 700353191H1
  unsure 2, 35, 263: a, t, c, g, or other
tngggcgatggcatggcgggcgagcctgtctcggngcctaaaggagatccgcgtcctcttctgtcagtcctccccggccagcgccgccgcccgtgagttcgtgaagaagaactatggtgacatcaaggctcgcaaccctccctccccttccttgtccgcgagtgtccggtgtcaagcccaagctctgggcgcgtacgatatgggtgtggagaatgcgtgacttggatggctgacggagcacagattgataaaaactggagaanttgcaaagccggcg

SEQ ID NO: 4146 - DNA, 64 bp, Zea mays
  misc_feature: Incyte ID No: 700353193H1
  unsure 28: a, t, c, g, or other
gtatctgagtccagtttttggacttctngctttccttcatggctgccgtgggtacgttcatata

SEQ ID NO: 4147 - DNA, 287 bp, Zea mays
  misc_feature: Incyte ID No: 700353194H1
  unsure 282: a, t, c, g, or other
caaagagaaattccacagccggggggcaaggctttaattgccccctctccctccctcgcctccttcaccatcccaccgagctttgcaacagctagtagcatgggcaagctgtgctgcagccaggaagacgacgagccggcgttcaacctcctggggctgctcgtcaccgtcgtcctcgccctgctcctgctcatgctgtgcacgccgccccgccgcaggccttgccgtcgcctactacccccgttactgctaggacaggacggacgcggtggcggtggaaangccgt

SEQ ID NO: 4148 - DNA, 284 bp, Zea mays
  misc_feature: Incyte ID No: 700353195H1
gcatatcccatcaatatccagagagtttgagagagcgagcattgcgagagcaccatccgacatggaccgcttcatcacccagaccgaggggaggagggaccgcaagcatatcccatctgtatctagagagtttgcgggagcgagcgctgcgagagcatcgcctggcatggaacgctccatcgccaagtctgaggtgaggtgggaccgctttgtcgagactggtaagggggagatggtgcaggatccatgaccacggagactgggggcaagatggagcacgactg

SEQ ID NO: 4149 - DNA, 161 bp, Zea mays
  misc_feature: Incyte ID No: 700353196H1
catatctcctgcaaaaacaacagcaaatttggaaagaaagcattcggtaaagtgacaatccagatcgacagggttgtcatgttggggtcagtcgcaggtgagtacaccctgctacccgagagcaaaagcggccccaatagaaacctggaaatcgagttcca

SEQ ID NO: 4150 - DNA, 289 bp, Zea mays
  misc_feature: Incyte ID No: 700353201H1
  unsure 9, 111, 148, 231, 265, 286: a, t, c, g, or other
caagatccnagaactcgctcgcgcgcacggacagggccggaacccagggatcgagactgaacagcagtccgagacgccatgaacgtggaggatgaggtcgggaggctcaangaggagatccataggctcggccagcagcagcccgatngctcttacaaggtcaagtttggcgttctcttcaacgacgatcggtgtgcaaatatcttgaagcactagttggcacttgaaggncgccaagaagagtagatttgactacgaaggcgantgttctgcaagtgtccagacnagt

SEQ ID NO: 4151 - DNA, 300 bp, Zea mays
  misc_feature: Incyte ID No: 700353203H1
agcttgtgttccaaccatcagaggagggctatggcggagctactacgtcttgcaagaaggtgctcttgacggcgtgtcagccatatttggcttgcatgtggacccagcacttccagtaggtgtcgtcgcatcaaggccaggaccattcactgcgacaggggtcggttctctgcaactattcgtgggaaaggtggtcatgccgcagtaccccatgaatccgtcgaccctgttgtggttgcagccatgcaatcctcagccttcagcaaatcgttgctcgtgaatggatcccctccatggtgc

SEQ ID NO: 4152 - DNA, 294 bp, Zea mays
  misc_feature: Incyte ID No: 700353204H1
  unsure 30, 60, 68, 165, 187, 251, 284: a, t, c, g, or other
catttcaaagcaagcaaaaaactactcctnatttatatgtgcaaataagggtgacacttnatccgtanctccctttgggagtaaagttttcactgatctatcttgaatcccaggctaatgaatttcatctgtacattgtactgttggctgctaaattgtggctanttttgtccaatttcatggccanattttggtgatgcttgtcatcttgaacatatactcataatgtatctgcaattcagattctaaancatgtgtgtggcacaaaacgcaggatataatcnttactactgc

SEQ ID NO: 4153 - DNA, 300 bp, Zea mays
  misc_feature: Incyte ID No: 700353206H1
  unsure 78-98: a, t, c, g, or other
gctctggttggaaggtttggagaaactccccggctcgaggagatcgtgacattgagaggacgatgggagggcgcgcgnnnnnnnnnnnnnnnnnnnnntcggcgttggtctttcagatccacgcctccgacccgctgctgtacgagccgttcgatgaggactttgaggggagatgggtcgtctccaagaaggatgaataccaaggtgtgtggaggcatgccaagagtgatggtcatgaggactaggcctcctgttatgagaaggcaaggaaatacgccataatcaaggagcttgatgagc

SEQ ID NO: 4154 - DNA, 300 bp, Zea mays
  misc_feature: Incyte ID No: 700353207H1
  unsure 47, 50-51, 162: a, t, c, g, or other
ccaatgtgctacaagactcttatttgaagttaagatgtgaggtggtnggnncctagcattgtcaaaagcgggtctggcatgtttgctgtgtattctatttccgtgaccgacgccaatggtaatagttggtccattaagaggaggtttcgtcattttgaagantgcatcggcgtctaaaagagtatgctcagtacaatcttcattacctccaaaacatttcctctcatcaggtttagaggtttctgttgttcgagagagatgcaagctgctcgacatatatctgaagaacctctgcaaatc

SEQ ID NO: 4155 - DNA, 300 bp, Zea mays
  misc_feature: Incyte ID No: 700353208H1
  unsure 126-127: a, t, c, g, or other
tagaagcactactgatggcccaaaacaagatgattgtggtggttctcctccttgccacctttcttgtggtggcaagattcgttgtgggttccagaagaaccctcaaatgcggatgacataagaggnnctgcatcgaggagtgcaccaaagaaaataaggctcctggcgacaagaagacatgcgaatgttgtgcaccaagctcacaaaaaagcctagcgaagaaggcaaacatgattgatgaagtagcactccgataatatataccctagtggatcagtggtcatcttgtagccagtctgc

SEQ ID NO: 4156 - DNA, 300 bp, Zea mays
  misc_feature: Incyte ID No: 700353210H1
  unsure 2-3, 63, 76, 101: a, t, c, g, or other
anngcgccgtgcacaagggcatgccgcacaagttctaccacggccgcaccgggagcgtctggnacgtcaccaagcnccgccattggcgtcgagatcaacangcaggttaacggtcgcatcatcaggaagcggatccatgtccgcgtggagcatgtgcagccctcccgttgcacagaggagttccgcctgaggaaagccaagaatgaccagctcaaggcggatgccaaggcccgcggtgaggtgatcagcaccaagaggcagcctgtgggacccaaacctggcttcatggtcgaggtgcta

SEQ ID NO: 4157 - DNA, 293 bp, Zea mays
  misc_feature: Incyte ID No: 700353212H1
  unsure 121: a, t, c, g, or other
gtcctcaagcagtgatgttgcaccaatatgtaaatcggaccttagaagaagcaaagtctagcagcaattcatgcaggcggtagcagcattggcgtctagaacctcatgtcccatggttganagctttgagctttttccgcttatccactaagggttctccactctgctgaataaatagctgccacatgtctaagctgaaacaagcactcgtccgcacctggaacaaagccatggagggatgttctttctgatattttcagatgactatcatagtcaggatcagagttcatttg

SEQ ID NO: 4158 - DNA, 85 bp, Zea mays
  misc_feature: Incyte ID No: 700353214H1
  unsure 3, 5, 23, 46, 66, 70-71, 80, 82-83: a, t, c, g, or other
gananccatgcataccatatagnaaacccaagcccatgaccactancaggagccctgattcagctncttnnacacacacngnnga

SEQ ID NO: 4159 - DNA, 82 bp, Zea mays
  misc_feature: Incyte ID No: 700353215H1
  unsure 25, 30, 34, 37, 41: a, t, c, g, or other
ctgtttttataagttgcatgaacancagcnaacncanacanagggctatggtcatcctggttaattgcaatcaaagccctta

SEQ ID NO: 4160 - DNA, 77 bp, Zea mays
  misc_feature: Incyte ID No: 700353217H1
  unsure 2, 39-41, 53-54, 56: a, t, c, g, or other
gnacaacttggcaaaccagcagcaagtgacttggcaaannnaagatgactggnncngtcaggtttccctttgccaag

SEQ ID NO: 4161 - DNA, 295 bp, Zea mays
  misc_feature: Incyte ID No: 700353218H1
  unsure 52: a, t, c, g, or other
aaggttggttcagaagttgctcgtcgcgctaaaggtttaggaatgcatgtgnattgcacatgatccatacgcttctgctgatcgggcccgtgcaattggagttgagctagttagtatggaggaggccatgacaactgctgacttcatctcatgcacatgcctcttacccctgcaacaaacaagatgctcaacgatgaggcctttgctaagatgaagtatggtgttcgcatataaatgttgcacgcggtggtgtgatgatgaagatgctctagtcaggctctgatcaggaatatag

SEQ ID NO: 4162 - DNA, 295 bp, Zea mays
  misc_feature: Incyte ID No: 700353219H1
  unsure 30, 80, 101, 128, 131, 169, 226: a, t, c, g, or other
cactcccactctccctttccactctcaggntcccactccccccctaccggctaccctacccatcacacacaaacagccantcctcacctcccccgtcctcnggttcatgtcctgctgctccccatgtngcnccccactcgacctcgactacataggcctctcgccggcngggctgccgcgctgcccacgacgacctgaagggtaccgagctccgccttggtctgcnggggtccggttcgccggaccgccgtgttgtggtgccaccgcaaccaccctggactgctccggctaaggg

SEQ ID NO: 4163 - DNA, 296 bp, Zea mays
  misc_feature: Incyte ID No: 700353220H1
  unsure 237: a, t, c, g, or other
gataccattctcgaggaattcgaattcgaagaagctgataaggtggcagaatgctaccctcaaggttaccatggggttgataaggaaggcaggcctgtctactttgaacggcttggacagatcgatgtgaataggctaatgcaggtcactacaatggatcgctttgtcaagaaccatgtcaaggagttcgagaagaactttgctgttaagttcccagcttgctcaatcgccgcgaanaccatattgaccagagcacaacaatctgacgtgcaaggagtggggatgaagcaatcata

SEQ ID NO: 4164 - DNA, 251 bp, Zea mays
  misc_feature: Incyte ID No: 700353222H1
ttgcgagctccccatcttcctccgttaaccatggcgacccagatcagcaagaagaagaagttcgtcagcgacggcgtgttctacgccgagctcaatgagatgctgacgcgggagtcgcggaggacggctactccggcgtggaggtgcgtgtcacaccgatgcgcacggagatcatcatccgcgcaacgcgcacgcagaacgtgctcggcgagaagggccgcaggatcagggagtcacgtctgtggtccaga

SEQ ID NO: 4165 - DNA, 292 bp, Zea mays
  misc_feature: Incyte ID No: 700353231H1
  unsure 108, 289: a, t, c, g, or other
agcaatcggaattctctgcgatttctctagatctcgactatcccccactagttttggttcctcctttcgttcgagagagcgattctggtggcaatggcgaagagcganggtccggcgatcgggatcgacctcggcaccacctactcgtgcgtcggcgtgtggcagcacgaccgggtggagatcatcgccaacgaccaggggaaccgcaccacgccgtcctatgtcggcttcaccgacaccgagcggctcatcggcgacgctgccaagaaccaggtcgcaataaccccancaa

SEQ ID NO: 4166 - DNA, 293 bp, Zea mays
  misc_feature: Incyte ID No: 700353234H1
  unsure 2, 7, 275: a, t, c, g, or other
gncaganaagtaccagagccacttcagtgcgtacattaagaagggagttgaggctgaggaaattgaagccctgtacaagaaggttcatgctgccatccgtgctgatccttcggttgttaagtcaaccaagcagccaccaaaggagcataagaggtacaaccccaagaagctgacatatgagcagaggaaggccagcctcattgaaaggctcaaccaactcaatcctccggtggtgctgatgacgacgatgaggacgacgagtaaatttagtgccntcgaatggtgctatctca

SEQ ID NO: 4167 - DNA, 293 bp, Zea mays
  misc_feature: Incyte ID No: 700353236H1
  unsure 108-127, 236: a, t, c, g, or other
cgccgtctacggcctggactacgagggccacggccgctccgacgggctgcagggctacgtgccggatttcgacgcgctggtgctggactgcgacgagtacttcacctnnnnnnnnnnnnnnnnnnnncagtcgcagtccaaggacgcccaccaacttccccggttcctgctcggggagtccatgggcggcgccgtggctctcctcctccaccgccggcgccccgagtactggagcngcgccgtgctggtggcgcccatgtgcaagatcgccgacgacatgcggctcacccgtg

SEQ ID NO: 4168 - DNA, 290 bp, Zea mays
  misc_feature: Incyte ID No: 700353239H1
gacggtggccaaggacggcagcggcgacttcaggaccatcaacgcggcgctggccaaggtgccgctgaagagcgccaccacgtacgtcatgtacgtgaaggccggcaagtacagggagtacgtgtccgtggcccggaactgacgaacctggtgatggtcggcgacggcgccaccaagacggtgatcacgggccacaagagcttcatgatgaacatcaccaccaaggacacggccacgatggaggcgatcgggaagggttcctgatgcgcggcatcggcgtgaagaacacg

SEQ ID NO: 4169 - DNA, 290 bp, Zea mays
  misc_feature: Incyte ID No: 700353241H1
  unsure 134, 218: a, t, c, g, or other
ataaaagaaaagggtaaaatcggagttctccctgcgtgtccgtcttcctctccgccgcttgtccctgtccaccctcgactgcttacgcgtgacctgagccgccgccgcctacatccgctcaaccccgtgcccgnctcaaccacgccgccaccgaccacgcataatcctgcctccccttcgcgcggattcgaggctcgtttcctttgggatcgttcgtntgcccagaccgcgtgggcgcttcttcttcgggatctcgctggaccgagcggcccaggctagggatcaggccc

SEQ ID NO: 4170 - DNA, 279 bp, Zea mays
  misc_feature: Incyte ID No: 700353242H1
  unsure 45, 171: a, t, c, g, or other
ttgcaggtacaagtgtttcaggtggaggatccggtggcgccagtncaggtaccagtgctaccgtgggtgctggtgtctccggaggtgccaaagttggtggtggcgtaggaggaaatgcaggaggaagtggcaacgtctatactggaaccggtgccgatgcaggcgtttctnctggaggatccggtggcgccgacggtggtattggagctaacatagtgctggtgtcttcggaggctcaatttggtggcggcccggaggaattgtagaggaatggcattc

SEQ ID NO: 4171 - DNA, 289 bp, Zea mays
  misc_feature: Incyte ID No: 700353243H1
  unsure 39, 95: a, t, c, g, or other
gtcggatctgagacgagacgagtcccctccccccacctncgcctcacccaaccggaacgaacaagttacaattctcatcccaaccccgcctcgancggatctcgtcggactcggatccgcccgaccaccccgcgccgccgcagatcaaagaagatggcagctgtcgacacattcctcttcacctcggagtctgtgaacgagggacaccctgacaagctctgtgaccaggtctcagatgccgttcttgacgcttgccttgctgaggaccctgacagcaaggttgcttgtg

SEQ ID NO: 4172 - DNA, 285 bp, Zea mays
  misc_feature: Incyte ID No: 700353245H1
  unsure 62-64: a, t, c, g, or other
gctaccctcgtcgtcgtctcactcaccccgccttcacgcctccctcaccaaataaggtccannncttttccgacattcacaggggggacaggaaatcagcggccatggcctcgattccggcgacgaccttcgccgtcatcttatccgtcctcttctgtgccgcggctggcaccgccgtcgacaacgacctccccgactacgtcatccagggccgcgtctattgcgacacctgccgcgccgggttcgtgaccaatgtcaccgagtacatcgcgggcgccaagtgag

SEQ ID NO: 4173 - DNA, 288 bp, Zea mays
  misc_feature: Incyte ID No: 700353246H1
  unsure 2, 14, 17, 23, 27, 44, 50, 54, 60, 66, 68, 97-98, 101, 110, 122, 127,: a, t, c, g, or other
gncgcctcaccgcntcnctcaanctgntaccgcagatccgtcgnccgatnagtnggggtnttcacnancccatggcctccggcgagcttgcctgcanntancgccgctcncatcatcagcgncgatngcatcgccatcaacngccgagaggatcnccacgatcgtgaangcggccaacntcacngtcgagtcctactngccggacctcttcgccangctcctgnagaagcgcaacgtcgaggacctcaantctccgttggatctggtggcggagtgncncanttgctg

SEQ ID NO: 4174 - DNA, 283 bp, Zea mays
  misc_feature: Incyte ID No: 700353247H1
  unsure 2: a, t, c, g, or other
anaccagagaaatcgtcgaggccctaagcagaccgagcagtgaatcaaaagaacttactttcgccacgaagtatgctcaaccattttgtgctcagtatatggcttgcctatggaagcacaacctatcgtactggaggaaccctcagtacaccgcagttagattcttctacacagttattatttcctgatgtttgggacaatttgctggaaatcggttctagaagggggacccaacatgatatattcaatgcgatgggtgccagtatgcagcggtgctgttcaa

SEQ ID NO: 4175 - DNA, 289 bp, Zea mays
  misc_feature: Incyte ID No: 700353248H1
  unsure 2, 15, 51: a, t, c, g, or other
gnggtcggagacggncactgctggggagggcgatgaggagcagcggttgcnggctgctctgcgtcacctgcaggcggaggcgggggtgctggagcgcctggtgtacaagcaccggaaccagcaccgtggcgccgcctatttccaatacctcctcaaggtgaggagggacctcaagcttctgctcggcgccggcctcgcggaggtcctcaacgccgtgttcccagttctcgcatgccgcaagccggccaacacgatctcgtccccaacaagcagactaagaagaaactgg

SEQ ID NO: 4176 - DNA, 312 bp, Zea mays
  misc_feature: Incyte ID No: 700353252H1
  unsure 43, 46, 225, 281: a, t, c, g, or other
ctgactagccacatccagtcaagcagtaaaggcgcaccatggnggnggcggcggagaataaggaggccgagcaggaggtgcagcagctaccgcacgcgcagaaggataacgcgcccgccgccgccgaggaagacgaagcggattcggaggagaccgagcgccgcaaccgcgacctcaagtccggccttcacccccttaggcacaaactacgtgctctggtacatncgccggacgcctggtgcgaggtcgcagtcgtacgaggacaacatcaagaagatcancgatttcagcacagtcgaatcttctgggttt

SEQ ID NO: 4177 - DNA, 300 bp, Zea mays
  misc_feature: Incyte ID No: 700353253H1
  unsure 43, 124, 150, 152, 158, 171, 273, 278, 293: a, t, c, g, or other
cttctgcggactggcaatgtaagcgttctccatcggagggcgncgatctacggggcggttgttggcggggtcgcgggaatggagcacgtgttcggagggaagtttaagcttgggaagaagatcnggagcggatctttcggcgagctctancncggcgncaacatacagagnggcgaggaggtggctatcaagttggaatctgtaaaatcaaggcatcctcagcttcattatgagtcgaaactatacatgcttctccaaggggaatggaatccnctttnaaatggtttagggtngatggga

SEQ ID NO: 4178 - DNA, 308 bp, Zea mays
  misc_feature: Incyte ID No: 700353255H1
  unsure 243, 247, 263, 267, 306: a, t, c, g, or other
actgcccctactacaactgcgagcacaagtacgtgtccggggtgactctcaatgacattcacttcaagaacatcaagggcacggcgacgacgccggtggcggtgttgctccggtgcggtgtgccgtgcaggggtctggtgctgcaggacgtggaccttaggtacaaggggcagggtggtacatcggccaagtgcgagaacgccaaggccaagttaccttggctaccatttcccaaaccctacncctnggtgccggtgcttatncggncgtattttagtcatctctgtccactctctggtgttcggnga

SEQ ID NO: 4179 - DNA, 250 bp, Zea mays
  misc_feature: Incyte ID No: 700353256H1
  unsure 134, 139, 223: a, t, c, g, or other
cagccacccccgtagcgagagggagggcggaagaggatgagcgcgtccaggttcataaagtgcgtcacggtcggggacggcgccgtcggcaagacctgcatgctcatctcctacacctccaacaccttccccancgacnatgttccgacagtgtttgataattcatgccaagttgtggttgatggtaatatgtcaactcggctctgggacatgcagtcaagangattacaacagactgagaccatgagta

SEQ ID NO: 4180 - DNA, 304 bp, Zea mays
  misc_feature: Incyte ID No: 700353257H1
  unsure 68-70, 76, 190, 228, 263, 295: a, t, c, g, or other
cagcagttgcttgcctccctagagcagatgcggggtagcagcggaccctccaatacagaagggactannnaggctncagctgatttagtggcacctactatggcacctagtgcggaggcgactgtggacgcggaggctgaggaaactgccgtagaactggacgatggagaggagacatcgggagcagacncttctacagaggaggctgccacacaggctgcgccacgncgtgccatcaggtatcgtcggtccctcacatgaanccttctaaacccttcgatcagcggagggttantaaacccaa

SEQ ID NO: 4181 - DNA, 306 bp, Zea mays
  misc_feature: Incyte ID No: 700353258H1
gtgacattgtggcagtggacattaaggagaagggctctgacacgtacgagcctctaaagcactcctggggtgccatctggaggaaggacagcgacaagccaatcaagggacccatcaccgtccgactcaccaccgagggaggcactaagactgtctacgacgacgtcatacccaccgactggaagcccaacaccgcctacaccaccaaataaactaaccaaataataatatgtatcaaatgactacttgatagacctttatttttattttttattcattaaaaggatataaggtgcatgacaacaa

SEQ ID NO: 4182 - DNA, 240 bp, Zea mays
  misc_feature: Incyte ID No: 700353260H1
gaaccaagccaaactgagtaagcagctatggagggatccgccgccgctccgctccgcacgcgcatctgcatcatcgggagcggtcccgctgcgcacacggcagccatctacgcggcccgcgcggagtcaagcctgtgctcttcgagggctggatggccaacgacatcgccgcgggcgggcagctcaccaccaccaccgacgtcgagaattcccgggcttccccaaggcatcatgggcgcc

SEQ ID NO: 4183 - DNA, 293 bp, Zea mays
  misc_feature: Incyte ID No: 700353262H1
  unsure 287: a, t, c, g, or other
gatgagtttgtcatccacagtccaactctcacgtccagcaaatggtggcctggtggcttggggaaagcttccacccatgcagtggtgtacgctcggttgataactgaaggaaaggactatggcatacatggtttcattgtgcaatgcgaacttagaggatcatccccacttcctggtgttaccctcggtgatattggtggaaagttcggtagtggtgcatataacagtatggataatggtgttcttcgattgaccagtgcgcatcccaaggatcaaatgttgatgangcttcc

SEQ ID NO: 4184 - DNA, 300 bp, Zea mays
  misc_feature: Incyte ID No: 700353265H1
  unsure 2: a, t, c, g, or other
cnataaagagtttgaatttgctacgcttagagtcagcagaggctatcttgtcatctactggtttcaaatctgaaaatggtcagcatactgcaattcagcctgctgttgaaggaatttctaatggtggtgtggatacgactacagaacatcatcctactgtagataattaccagacaagtaaaaatggctctgaatgggttgagctattgtcaggagatgacaaatgcttctgacatagatgatgcacgggctcgtgcgtccagagcttggaggcttggagaaatcaatgtagagcgtgcc

SEQ ID NO: 4185 - DNA, 299 bp, Zea mays
  misc_feature: Incyte ID No: 700353267H1
gtaagtgtcattgtcaagaaggtacaggaaaacaattagttgacacttcatggatgatccttgctagctctggaattggtgtttgcattgagttttggaagatcggaaaggcgatgcatattgaagtcgatagaagtggaaaaattcccatgttgaggttccgagatcgtgaatcatatgcacagaataagaccaaagagtacgatgctatgcaatgaagtacctcacctatgtcctcttcctcctgtgatcggtttctctatctatcactaaagtatgaaaagcacaagagctggtat

SEQ ID NO: 4186 - DNA, 300 bp, Zea mays
  misc_feature: Incyte ID No: 700353268H1
  unsure 2, 12, 59, 87, 118, 213, 227, 258: a, t, c, g, or other
gncgcggctgangaccccaacctccccgactacgtcatccagggccgcgtgtactgcgncacctcaccgcgccgggttcgtgaccancgtcaccgagtacatcgcgggcgccaaggtnaggctggagtgcaggcattcggcaccggcaagctcgagcgcgccatcgacggggtcaccgacgcgaccggcacctacacgatcgagctcaagganagccacgaggaggncatctgccagtggtgctggtggccagcccgngcaaggactgcgacgaagtccaggcgctcaggaccgcgccgg

SEQ ID NO: 4187 - DNA, 300 bp, Zea mays
  misc_feature: Incyte ID No: 700353269H1
  unsure 2, 164, 191: a, t, c, g, or other
gncgctgcggtcgtctgttgccatctcgcgttcggtggtgactccgggctccgggcgccctgcgccctgggatttcgaaccgagaaagaaagctgctgcccaccgtttcccaagtcccatcgccgcccaagaaccggagccacgccgcagatccgccaaaatcncacctcctagcccgtcctccgtcccantctcttctcgggccagggaggcggcgggattggtgcctgcatccgagccctagacatggatcaacctgaggaaaaccctgaattcccaagctgtgatgcctactttgaa

SEQ ID NO: 4188 - DNA, 296 bp, Zea mays
  misc_feature: Incyte ID No: 700353271H1
  unsure 19: a, t, c, g, or other
cgaaacaagcgcacaaganaaaatacctcgccgccaacaatggcctccatgtcctccatcctgctcgcaacggcgatgctggctgcgctgtttgcggttggtttgtgcaccaccccgctcaccttccaggttggcaagggatccaagcctggccacctgatcctcacccccaatgttgcaaccatatccgatgtggaaatcaaagagcaggtggcgatgattctcctttacgctcaaggagggaccgaccggcactggacgctcgacaccaaggcctcgctcaatacccctttgca

SEQ ID NO: 4189 - DNA, 295 bp, Zea mays
  misc_feature: Incyte ID No: 700353272H1
  unsure 266, 269, 274, 282: a, t, c, g, or other
gtactagttctaggggatatcatgcagtggactcctgatggatatgtcgctgttgtcacaatgtttaattatcaacaatttcggcatatcggcgcacctggttggcagcttgggtggacatgggcaaagaaggaggttatatggtcaatggttggggctcagaccactgaacagggcgactgctcaaagttcaagagcagcccaccccatgctgcaagaaagatccaacaattgtcgattacttccaggcatccatacaacatgcnaanggccnttgctgcnaagcaggattgta

SEQ ID NO: 4190 - DNA, 298 bp, Zea mays
  misc_feature: Incyte ID No: 700353273H1
  unsure 2, 22: a, t, c, g, or other
gnaagagcttcccggcgaaggntctgacggtgaggaggaggtcttcatcaacgaggaggacatcatccacgagataaccatcgacgaagaagatctccccgaccgcgacgacgaagatgacgacgtcgtcaacgggatggttgattccgaagacatcgatgattctacatacgcatttcaaggccaccaagatgaagtcttcatgtcgcctgcagtcctacagattcatcattgtggcttctggaggcaaagatgataggggattcctgtggaggattggatcagaagagggtgccct

SEQ ID NO: 4191 - DNA, 295 bp, Zea mays
  misc_feature: Incyte ID No: 700353275H1
  unsure 2, 15, 74, 226, 288, 290, 292: a, t, c, g, or other
gncacagctgcgtanctcgtcgcgctggtcctcgtggccacggccatagccgccgctcccggcgttgggtttgncgtcaccggccgcatctactgcgacaactgccgcgccgggttcgagacaaacgtgtcccacgccatccaaggcgcgacggtggagatggagtgccgccacttcgagtcgcagcaggtccacgacaaggcggaggcgacgacgggcccctgcngctggtacaggatggagatcagcggcgaccaccaggacgagatctgcgactgcgcctgctcnananccc

SEQ ID NO: 4192 - DNA, 291 bp, Zea mays
  misc_feature: Incyte ID No: 700353276H1
  unsure 2: a, t, c, g, or other
gnatcaagagggagtagctaactttgatgatatcctggcaaactctgatgcttttatggtggcaagaggtgatttaggaatggaaattcctatagagaagattttctttgcacagaaggtgatgattttcaagtgcaatattcaaggcaagcctgttgtgactgcaacccagatgttggaatctatgatcaagtctcctcgccctactcgggcagaagcaacggatgttgcaaacgcattcttgatggcacagactgtgttatgctcatggtgagactgctgctggggcta

SEQ ID NO: 4193 - DNA, 292 bp, Zea mays
  misc_feature: Incyte ID No: 700353277H1
tatgtcttacagggggcaaagaagttaataatgctatagtgagcagtatacaggacctggcaaagtcattctcaaattaccatgatgaggtcctggtgaaacgtgaagagttacttcagttcacacaaagtgccatttcaggtctaaagaggaatgctgacattgtgaggatagattctgaagctctagatttgtggaagaaactacatgagaaggaggcatcacgagctcaatcaattggcgatcctgataaagttacagaaaagacttcaactattgagtcttcaaagaa

SEQ ID NO: 4194 - DNA, 294 bp, Zea mays
  misc_feature: Incyte ID No: 700353279H1
  unsure 20, 175: a, t, c, g, or other
gtccactccactcccaagtncccaccacccccaaccccgtctctccactgcggcgcaggcttcgcttcggctccgctcggctcgagcagaagaaaatgcaacgggcagtgcagaccgtcaggtcacacggcaatgttcttaaatatgctgttctacaacacatcagcgctcccangccagcaatgcttcctgctgccttttctcgtttcatgtcagtttcatctgctcgcctagaggatcgtggatttgaaactgccatgtagcagatgtcttgaagtctaaagggaagagtgc

SEQ ID NO: 4195 - DNA, 290 bp, Zea mays
  misc_feature: Incyte ID No: 700353281H1
  unsure 2, 39, 46: a, t, c, g, or other
gntcctctttccctcctcccctccgtcttggttcttcangcctggntcttctgtcttctgttatctctgtcgtccgctccggtgaacccgcatcgttcctattccttgtgttgcttccgtcgtcagctctagtaaatcgctttgtttgccagctagagatcgtggagggctgctaaaaaatcaggtttgttttcgtcgggtttccattctggaagtgataaggtgaagtaaatatctttcctcaaaacgtatacatttggtgcatctattactatactatcctttccccc

SEQ ID NO: 4196 - DNA, 296 bp, Zea mays
  misc_feature: Incyte ID No: 700353283H1
  unsure 3, 5, 34, 104-128, 218, 265, 271: a, t, c, g, or other
gancnaaagtacgtgccgccccgcctggccctgncaaacgcatgcctgtgggtgcggtctgtggtgcgcgccatggatcggagctgctgtccacgcatgggtgnnnnnnnnnnnnnnnnnnnnnnnnncatgcgctgcgacagtcccgtccactgttctgcttctgcaggagatcatacatacgtatgggcgtgggtgctcatttcagcgagcaggancttgcggcagtgctttccacgcccgaaggggggcaccatggcgctanctaggncctggaaaacacagatgctcgctgc

SEQ ID NO: 4197 - DNA, 293 bp, Zea mays
  misc_feature: Incyte ID No: 700353284H1
  unsure 2, 12, 16: a, t, c, g, or other
anggcaccaganaggntgctccttcggcgtctgtgccgtgctgatggtggtcggcgtcacgaacgcggcggagggccaggtggcgtcggtcgtcgtgggctggcgaggtgcgccgacagcacgaggaagaacatgaaggctgaggccggtttcaagggtcttcaggtggcgatcaagtgcaagaacagcaacggcgagtacgagacaaaggccgtgagtgagatccaaagctccggagccttcagcgtcccatcgccgccgacttccacggcgccgactgccagcgcactcca

SEQ ID NO: 4198 - DNA, 289 bp, Zea mays
  misc_feature: Incyte ID No: 700353286H1
  unsure 14, 56, 142, 167-168: a, t, c, g, or other
gtgagcagcaagangtcgtggcaggcgtacgtcgatgaccacctgctgtgcgacancgaaggccagcacctcagcgccgccgccatcgtcggccacgacggcagcgtctggggcacagtccgagaacttccccgagttaaancctgaggaggttgctgggatgatannaggactttgatgaacctggaactcttgcaccaactggtcttttgttggaggtacgaatacatggtgatccaaggtgaacctggattgtcatccgaggaaagaaggcatggaggcttatatc

SEQ ID NO: 4199 - DNA, 293 bp, Zea mays
  misc_feature: Incyte ID No: 700353289H1
  unsure 87: a, t, c, g, or other
ctgacgggattggaggtcccgactgctgcctcaacacctacgaccacatgcatcttcttgcagcacggtccacagtcaagctccatnaagaacatgatccacatgtcgcagcgtaagagaatataatcctttttatttttcttcgttaggaaatcagcgtacacaagaattgatcttttatcaggaacgaaggaatctgttccccagttgctcgtgtaaaatacatccatccatgtgtgtcatcgatcagtggtcaggaaagagacgatcaggaagtacgactacggaagcga

SEQ ID NO: 4200 - DNA, 290 bp, Zea mays
  misc_feature: Incyte ID No: 700353291H1
  unsure 2, 17: a, t, c, g, or other
gntcgatcccaatcgancccaccaagccgataccctaaccctcgcccttctcgatgtcggccgccaccaccggcccagccccttcagtagccactccgatggcgccccctccgtcctacccggcctcctccacggcctcttcctccatctccgcgtccgccgaggaggaggaggacctctatggccgcctcaaatcgctccaacgccacatggagttcgtcgaaatccaggaggagtacgttaaagacgagcagaagaacctgaagcgcgaactccttcgtgcgcaggag

SEQ ID NO: 4201 - DNA, 286 bp, Zea mays
  misc_feature: Incyte ID No: 700353292H1
  unsure 270: a, t, c, g, or other
caacaactaaaggcaggcgcggcacaccgcgacaccgtaccggcctagacacttggagaaaggagaagcagcgcaggacatgggcaccagtcccgtcatccctgcgacgatgctcgtcgtcgctctccttgtcgctagtagtactgtctgcttcggcgccaccgccaccgacaccgacaccgacggcgccattcgtctccccagcagctctggtgctgttggtcgaccgtgggagtgctgtgatatgtcaccaaggagccgtttatcagncgccccggtggcgctg

SEQ ID NO: 4202 - DNA, 267 bp, Zea mays
  misc_feature: Incyte ID No: 700353294H1
  unsure 23, 147: a, t, c, g, or other
aaacagcacatcgctctctcganctcagccatggcggaggtggagcagccccaggacgcggtgaagctcttcaaccgctggaccttcgacgatgtccaggtgaacgatatctcgctgaacgactacctggctgtgactgcggcgaanacgcgacattcctgccgcactccgcggggcgctactccaagaagcggttccgcaagcgcatgcgccatcgtcgagcgcctcaccaactcgctcatgatgcagggcgcaacaaggcaagaa

SEQ ID NO: 4203 - DNA, 287 bp, Zea mays
  misc_feature: Incyte ID No: 700353295H1
  unsure 83: a, t, c, g, or other
ataaaccttctgtgtgaagtaaactgtgagtacgaagtcaatccctggaaccagaaaatgcaaaagagatctacgtgcaagangtagctctgccactactggacttcactaccacctttctctcacatcatccgatttgttctgttttccgtaaagtggtggttcgctatcagttcaagtcactggcaggccgtggctgtggatcatcaccttcacgaagagaatatcgaaagaatgttcttcttaacgatgaattcatcagctttggaaggactgatgacttctcc

SEQ ID NO: 4204 - DNA, 180 bp, Zea mays
  misc_feature: Incyte ID No: 700353409H1
  unsure 9: a, t, c, g, or other
attcaagancctcctcgccctcctccattgaccaacaattaagcctccccgaccgccacatctattaggtgcagccatgggtgcctgtgcaacgaagcctaagacgcttgtggggaaagccccagctgaggccaccatctccacacccaaggttgcacctgagaccactaccatccacat

SEQ ID NO: 4205 - DNA, 279 bp, Zea mays
  misc_feature: Incyte ID No: 700353411H1
  unsure 12, 42: a, t, c, g, or other
aggataccagangtactgcaaaagataagaaatatgttcgtncatgatgagaaggatcattctagggagaggggggctgggagggatgacaagtatggtgcttcaaaggtggcattgccggtctgggatgatgatagacatggaaggcctaatcggggtgactggaaatctgcttcttcaagggagcaaaggctggactgtggtgacagaagggattctacaagagtgaaaccaacagatcatgatgggagcaatgggggatcgggaaggtctttcagg

SEQ ID NO: 4206 - DNA, 212 bp, Zea mays
  misc_feature: Incyte ID No: 700353413H1
aaaattggcacttctttggctgaaaatgttgaatttgaacagttgctaagcattgtcttccaaactcgtggtgacaattacttaattttgtgtggtaattgggagaatagtttccagatcatatctctaagtgatggaaaaattgtgcagagcatccggcagcataaagatgtagttagttgtgtggcagtttcatctgacggaatgtgatt

SEQ ID NO: 4207 - DNA, 214 bp, Zea mays
  misc_feature: Incyte ID No: 700353417H1
  unsure 10, 37, 204: a, t, c, g, or other
ctctattgtnctttctatttggcatttggtcattgtnggaaggcttcaaggaagatggagattcggaagaattggctgaagttgaagcagagctggatgctgcctttaagagtaataaaggtgaatctaaaaataaatttaaggcgaatgatgatatgaagaaacagcaaagaccattctcatgcagttctctcaccaattttnctgaaggcat

SEQ ID NO: 4208 - DNA, 189 bp, Zea mays
  misc_feature: Incyte ID No: 700353424H1
  unsure 65: a, t, c, g, or other
gctagatctcttctccattcgtttacctgaagcacaagaataaacgcagccgggcatgggcgaantaagctcaacaacgtgatccgtcctgctggtggccctcctcctcctgagcagtggcgttcaggacgctgccgccatgccaggcacgttgaactacgacgcgattgtcgccgacgagccaaacgg

SEQ ID NO: 4209 - DNA, 285 bp, Zea mays
  misc_feature: Incyte ID No: 700353428H1
gattacggggtcagaagtggtggcagaggtggctcattacgtggagctgatgttggctaccagagggttgaccatgctggatatgctggtggtcgtggtagccgcacagcagctgctggcgcaccttcaaaatgaggggcaccatagctgttgcgcgtcttttgggagtgttgttcggtggctctaagattattttgaagttggcatagaggctcatcaattggttcagtgcgggattacaagagaagcctggatacaaattatgagggttcctgtccttgatca

SEQ ID NO: 4210 - DNA, 162 bp, Zea mays
  misc_feature: Incyte ID No: 700353430H1
ccacgacccctaccgagccgtccctatcgcttccgtcgtgtccaccattaacgagcgcagagagatttgtgtgagtgccgctgcggttagattctatcctggtcgtcggtccggcctcggagggagggcgaagggctaccggtgtgcagcgaacctggagat

SEQ ID NO: 4211 - DNA, 177 bp, Zea mays
  misc_feature: Incyte ID No: 700353431H1
  unsure 29, 124, 138: a, t, c, g, or other
gcataagccatcagtttccaccgcacgtnccgcaccccctctccggcgtgccgacggtatccatggcggcggtggtgcgcggcgtcttgaggggcatcaaggagaagggactcaccaacttcanccgcgacgtccgcnacgaaggatacttcaaatgccttctggacgggaaccttt

SEQ ID NO: 4212 - DNA, 188 bp, Zea mays
  misc_feature: Incyte ID No: 700353432H1
  unsure 136, 144, 153: a, t, c, g, or other
aagcaatcacagccggacgatccgagcagagaaggggaggtacctgctacgactagctagattccacgcgcgatggcgcccaccaggatccgcgtggccttgctgagcttggcgctggtggggctgctcatctgcnacctcgcnaccaccgcntccgccggcaagaacagaatccgcatcctcgacag

SEQ ID NO: 4213 - DNA, 137 bp, Zea mays
  misc_feature: Incyte ID No: 700353436H1
  unsure 42: a, t, c, g, or other
tgatgcttcagtttgctgatgatgatgcttatactgtctttnactactttagtttgcttgacaaactattgtgatgatggataaagtgtgatgtgatgatgaatgaaccaatttactatgcttcagtttactttgtt

SEQ ID NO: 4214 - DNA, 285 bp, Zea mays
  misc_feature: Incyte ID No: 700353442H1
  unsure 40, 186, 221, 283: a, t, c, g, or other
ctttacctggagcactgctgcggtcaaaaggactgaaccngataggaaatctgttggtgcccaatgacaactattgcaagtttgagaactggatcatgccactcttcgaccagatgctacaggagcaatctactgagaatgtttggacaccgtcgaaggtgatagcgcgccttggcaaagaaatanatgatgaaagctcctatcttattgggcatacaagnataacatccctgtatactgcccagcattgactgatggatcacttggagacatgctgttctgnca

SEQ ID NO: 4215 - DNA, 281 bp, Zea mays
  misc_feature: Incyte ID No: 700353443H1
tgaacctgctgaagctggtagtgatgacagcgatgacgatagcgatgatgatgtgatggatgtagacatggcggcaacctcttctaaaggttcaaggagtaaaaaggcagatctagcgtaaaaacatgctgctttggtgaaggagaaatgctcatcaactggaccttcaccatatgtcattgttgcatgtcgcctcatcacaccatagaaatacatctccatttctcggcatcgcaacaccgacaacaagagatctagcgtaaaaacatgctgctttggtg

SEQ ID NO: 4216 - DNA, 167 bp, Zea mays
  misc_feature: Incyte ID No: 700353445H1
  unsure 6, 68, 114, 156: a, t, c, g, or other
gagaanagctcatgttattagaggtcttagagaactaacaaaggatgttcttcactattataagggtnatatcttagatgaactacctggcttagtagacttcagtgtgttttngaagctcacacccaaacagaaagacattatttataagttggnagcacatgatc

SEQ ID NO: 4217 - DNA, 193 bp, Zea mays
  misc_feature: Incyte ID No: 700353446H1
  unsure 60-61, 106: a, t, c, g, or other
gaacctcctcgcctcctccattgaccaacaattaagcctccccgaccgctcacatctatnnggtgcagccatgggtgcctgtgcaacgaagcctaagacgcttgangggaaagccccagctgaggccaccatctccacacccaaggttgcacctgagaccactaccatccacattgaggttgcggcaaaacat

SEQ ID NO: 4218 - DNA, 300 bp, Zea mays
  misc_feature: Incyte ID No: 700353508H1
  unsure 189, 240, 245: a, t, c, g, or other
catcaaacgcactctcctccgccgccgcccgaggcaagatggttctccagaacgacatcgaccttctcaacccgccggcagagctcgagaagctcaagcacaagaagaagcgcctcgtccagtcccccaactcattcttcatggatgtcaagtgccagggatgcttcagcataaccacggttttcagcnactcccagactgttgttgtgtgcccaggctgccaaactgttctctgccagnccacnggaggaaaggcgaggctcacggagggctgctctttccgcggaaaggagactagag

SEQ ID NO: 4219 - DNA, 138 bp, Zea mays
  misc_feature: Incyte ID No: 700353509H1
  unsure 46, 70, 75: a, t, c, g, or other
gacactggcgggcctgcggtggcattgccggaccacccattccacnagaaactgggcgctgtctggccgncggcnttgcccgaccatccattccacgagaagcaggacgctgtctggccggcggcgctaccggatcac

SEQ ID NO: 4220 - DNA, 255 bp, Zea mays
  misc_feature: Incyte ID No: 700353514H1
  unsure 13, 233, 245: a, t, c, g, or other
tgcaatctttgtngttcttgccatgactttaagaagaaagcctgatgtactggtaaatgttatgccaaagataatgggaaacaataaatatctgggacaggaaaagcttcccatcattgtctgggttattgctcaggcctctcaaggtgacctagtgtctggcatgttttgctgggctcattctctatttcccacattatgtgcgaagtcaagtgggaatccccttgcaaganatttggttttgncagtgcttga

SEQ ID NO: 4221 - DNA, 117 bp, Zea mays
  misc_feature: Incyte ID No: 700353515H1
  unsure 26, 110: a, t, c, g, or other
caagaacaaacctgcaagtgcaagangcatgtagcgcacctacgtcgtagtgtcatctccctcccatttcgttccgccacaccccccatggacaatccaattccacacanggttcac

SEQ ID NO: 4222 - DNA, 246 bp, Zea mays
  misc_feature: Incyte ID No: 700353516H1
gagctcctggaactaggcttagtctgcagtgatattgtgaaaggagttcctgcaatttttggtcattttctgacctcactccctgcgatacactcgataattgtatttgtgtgtatcaggaatgtgccagttccggtggttcctcaaagtgaaaggttccttttccaacgtgtatgctcaaggggctatcacttgttccgctgtatagcgagatacgggtataaagacaagaagcagagcaccata

SEQ ID NO: 4223 - DNA, 248 bp, Zea mays
  misc_feature: Incyte ID No: 700353521H1
  unsure 208, 212, 228: a, t, c, g, or other
cacagtcgcgcaaaccggggtgatgagtggtcgccattgacgagttcgtggagatgagaaggaatcacgggcgccaatggatttgggggcgtgtgcttcatctcggtatcctggacgcagaccggtgcgcgcgcaagaccgtaccgagcgcgtactggtggccgcgggggaacagggaggacaccgggagccctcacctgacccagtngatncgccacgggccatacntcgccgtggaaggtgttcat

SEQ ID NO: 4224 - DNA, 100 bp, Zea mays
  misc_feature: Incyte ID No: 700353524H1
  unsure 32, 49, 97: a, t, c, g, or other
cacaaaggatgctggtcgcattgctggccttnatgttgaaaggatcatncaatgaacctacagcagctgctctgtcttatggaatgaacaacaaggnagg

SEQ ID NO: 4225 - DNA, 201 bp, Zea mays
  misc_feature: Incyte ID No: 700353526H1
  unsure 92: a, t, c, g, or other
atcaaagaaacaggcacacaagaacaaatacctcgccaccaacaatggcctccaggtcctccatcctacttgcaacggcgatgctggttgcnctgtttgcggttggtttgtgcaccaccccgctcaccttccaggttggcaagggatccaagcctggccacctgatcctcacccccaatgttgcaaccatatctgacgtgg

SEQ ID NO: 4226 - DNA, 180 bp, Zea mays
  misc_feature: Incyte ID No: 700353530H1
  unsure 47, 57, 90, 178-179: a, t, c, g, or other
tcagcctgtacattctctctctcctctctcggccttcttcgcgtgtntccctctttntcttaggccgccctctacacttctcgacataancatcgagagggcggtcgagagaaacgagagcggcagacaccatggggagctcgaggaccatcgttgcgtcccccctgctcctcctcgnnc

SEQ ID NO: 4227 - DNA, 294 bp, Zea mays
  misc_feature: Incyte ID No: 700353531H1
  unsure 71, 251: a, t, c, g, or other
ggaaagggaacttcatcagcaacaccatgtggaggaacatcatggggcaggccctctaccagttcctcgtncatctggtacctgcagtctagggggaaacggctcttctggatcgacgagggcgccgccgacgccgacctggtcctgaacacggtcatcttcaactgcttcgtgttctgccaggttttcaacgaggtgaactcgagggagatggagagggtgaacgtgttccgaggcatcctggacaacancgtgttcgtcatggtcctcggcagcaccgtcgtgttccagttc

SEQ ID NO: 4228 - DNA, 130 bp, Zea mays
  misc_feature: Incyte ID No: 700353532H1
caacaatcgccgagagcgatcgagagataaataaagatgaagaaagtggcatcatcgtcagccgttctcttcgtgactagccctgacgctagtttgtgccccgctgatagcagaggcaaagaagaaaaga

SEQ ID NO: 4229 - DNA, 104 bp, Zea mays
  misc_feature: Incyte ID No: 700353533H1
  unsure 43, 51, 53-54, 59, 62, 69, 80: a, t, c, g, or other
aacgtcctctcctctccgtacttcctccgcagctacccccatncacattcncnnacccntcngtcgacncctacctcctncgatgctacaccggcgatcggcgg

SEQ ID NO: 4230 - DNA, 120 bp, Zea mays
  misc_feature: Incyte ID No: 700353534H1
  unsure 11: a, t, c, g, or other
gaaagcttttntgcaacaggcggaagtaattcttgctgatgggaaattaacagaggctaaggctgaccagcttgctaagattcaaaagcaggtcggtttgcctactgaacatgcacagaa

SEQ ID NO: 4231 - DNA, 213 bp, Zea mays
  misc_feature: Incyte ID No: 700353537H1
  unsure 74, 80, 165, 182, 195, 206, 212: a, t, c, g, or other
tattacctcgtttcttccttcttgggattttgtggtttgtccgcggcagttgatctgcgattcgcttgcattcngggtcngttcttgcgaaacctaagctagaccgcaggcatggagcactgctatgtgggacagccgatctcgagggccgaggcaatgcccganaggaggtccaggttctngcagatggatgcncctcctccgcnccgggng

SEQ ID NO: 4232 - DNA, 274 bp, Zea mays
  misc_feature: Incyte ID No: 700353538H1
  unsure 76: a, t, c, g, or other
gggcctgccaccatcaaggttgggtttgcgagtttcgctctgcagaaggtcggtaggcacattggagactgggagnacttcaccctccgagtgagcaacttctcaggtcagctgtcgtctatctacttctcgcagcacagcgggggcgagtgggttgaagcttgcgatctggagttcatctctgggaacaaggcgatcatctactcgtccaggaacgggcacgcgagctacccccacccaggctgctacctgatgggttccgagacgctcggtg

SEQ ID NO: 4233 - DNA, 153 bp, Zea mays
  misc_feature: Incyte ID No: 700353539H1
  unsure 53: a, t, c, g, or other
gcgcactttcatcgccatcaagcccgacggcgtccaaagaggcctgatttctngagattgtgaaccgattcgagagaaaaggctacaagcttgttgccatcaagctgattgtcccatccaaaggattcgctgagaagcactaccatgatctca

SEQ ID NO: 4234 - DNA, 287 bp, Zea mays
  misc_feature: Incyte ID No: 700353542H1
  unsure 4: a, t, c, g, or other
aganaagttagagaagataaagcagttacttctccaggcaatgcttgtaaatatgtggctccagaagtcctgcgaaatgaagagtatgataccaaagtggatgtcttctcattcgctctgatacttcaggagatgattgaaggatgccttccttattatgataagaaaaatgatgaaattgagaaggcacataattctaaagaaaggcctccttttcgagctcctccaaagcattatgcacatgggttaagagagttgattgaacagtgctggagcgaaaattctgc

SEQ ID NO: 4235 - DNA, 93 bp, Zea mays
  misc_feature: Incyte ID No: 700353544H1
gctggatctttctttgtaattgatgatgctggacaccgtggaaagcgaatgagaaaatcattctctgatcaagaagcatcttcagaagagtca

SEQ ID NO: 4236 - DNA, 284 bp, Zea mays
  misc_feature: Incyte ID No: 700353546H1
  unsure 132, 274: a, t, c, g, or other
ttttgtttggtgagccattgactcctcttatgaccaagtttgggatgacgcctttgcttgcggcagtctatgttggagcaatgcagaacattttcagtaagagtgcaaaatacagtctgtttgatccttgcnaagagatggcatacattcctttggatgaggatatgaaggtgaaaggtaaagcggctattgatgttgtgtgcaaccccttggggaaatctggaggtgctctgatccagcagttcatgatcctgtcatcggttctctcgcgaantcgacaccgt

SEQ ID NO: 4237 - DNA, 235 bp, Zea mays
  misc_feature: Incyte ID No: 700353547H1
tcttcatcgacgcggatctcctcatcctgaggaacatcgatttcctgttcgcgctgccggagatcacggcgacggggaacaacgcgacgctcttcaactcgggagtgatggtcatcgagccttcgaactgcacgttccggctactgatggagcacatcgacgagataacgtcgtacaacggcggggaccaggggtacctgaacgagatattcacgtggtggcaccggatcccgaa

SEQ ID NO: 4238 - DNA, 96 bp, Zea mays
  misc_feature: Incyte ID No: 700353548H1
  unsure 4-5, 53, 57, 80-81, 85-86, 89, 92-93: a, t, c, g, or other
cggnntcatcgacgtcgtgcagagctccacggggatcaccatctccagctgcnactncaccaatcagaactgacgtcatnngctnntgncgnnagc

SEQ ID NO: 4239 - DNA, 112 bp, Zea mays
  misc_feature: Incyte ID No: 700353551H1
  unsure 32, 71, 80, 85, 91: a, t, c, g, or other
ctaacccaagacaaaacatggatgtgaatgtncagaaccatgtggtccgtccgatgcgggcacaggttgcnatggctgtngtgtnggtgtntcttggtgagacggcgcatgg

SEQ ID NO: 4240 - DNA, 117 bp, Zea mays
  misc_feature: Incyte ID No: 700353554H1
  unsure 54: a, t, c, g, or other
ggtattttcaagcagctgacgatggtatgtggtggcacctcatcaatgactggntttgaggataggttccagagagaagcaaatctgtctgcttcagcaatctgtccatcacttgtg

SEQ ID NO: 4241 - DNA, 113 bp, Zea mays
  misc_feature: Incyte ID No: 700353557H1
  unsure 16: a, t, c, g, or other
gaaacctcgaggaggncagcaatggtggatgtttggatcgaggtggaggctaaccagtaacaccgctggcactgaatcccatacctgcttccaggtcctcatgcagtccgatg

SEQ ID NO: 4242 - DNA, 202 bp, Zea mays
  misc_feature: Incyte ID No: 700353558H1
  unsure 190, 194, 201: a, t, c, g, or other
atttccaccagcatgcgatgcatgggcatgcaagctcttgatcctactcaaatgcaagttccttatcaacaatgccacagtaatggtttcttgcatggtggtattaattaccctggaaaccgtctccaattaggtccacgaaatccagttctcttcaccagttctgaacgtgctttggggcctccacagnatcngtctggna

SEQ ID NO: 4243 - DNA, 239 bp, Zea mays
  misc_feature: Incyte ID No: 700353560H1
  unsure 45: a, t, c, g, or other
gaggcttgtgctcgctagtgccatggctctttgcttcaagcaganaaactatgcaactgcggcacactttgctaggatgcttcttgagaacagccctcaggaggcccaagcaaagaaggcccgacaggtgctgcaagcttgccatgacaaggacgattcccaccaactgaactatgacttcagaaatccattcgttgtttgtggcgctacgtatgttcctatctatcgtggccaaaagg

SEQ ID NO: 4244 - DNA, 142 bp, Zea mays
  misc_feature: Incyte ID No: 700353561H1
  unsure 43, 56: a, t, c, g, or other
ggtctatcaagtatgtcatttgatacacctttatttttatttnttattcaataaanggatataaggtgcatgacaacaacacaaacattgtattatctatgtatctcctatgcaatcccaattttaccatgaatacatttta

SEQ ID NO: 4245 - DNA, 218 bp, Zea mays
  misc_feature: Incyte ID No: 700353564H1
cattgggtcttatgtcttgctttgtcaaggctgctgtttctgcacttcaaaaccagccaattgtcaatgctgtcattgatggtgatgacatcatatacagagactacgtagacatcagtgttgctgttggcacttccaagggccttgtggttcctgttatccgagatgctgataccatgaactttgctgacattgagaaagggataaacaaccttgca

SEQ ID NO: 4246 - DNA, 148 bp, Zea mays
  misc_feature: Incyte ID No: 700353565H1
  unsure 15, 25, 85, 88, 90, 115: a, t, c, g, or other
caagtggccgtccangtgggatgcntatctgaagatggatggtgccaaggtccactggttctcgatcatgaactcgatgatggtngtntncttcctggctggtattgtgtttgtnatattcttgaggacggttcgaagggatctaaca

SEQ ID NO: 4247 - DNA, 152 bp, Zea mays
  misc_feature: Incyte ID No: 700353567H1
  unsure 7, 33, 39, 74, 99, 128: a, t, c, g, or other
cagcgcncgaagatgcaagactgggcgccgganttcgtntcgctggacgctcttcatcctgctgtcgccgggcntgctgttccagatgccgggcaagtnccggatcatcgagttcggcaacttccagnccagcgccatctccatcctcgtcc

SEQ ID NO: 4248 - DNA, 150 bp, Zea mays
  misc_feature: Incyte ID No: 700353568H1
  unsure 2, 27, 110, 149: a, t, c, g, or other
cngcgcctgggcatgggcagcaacatngtacccgtccaccaccctgctgggcgacaacaagaccggcgagatgggcggcctgaacatcgacgagctgatcgagaaggccnacgggttcgcgggggtgttcccggagcacaagtaacgana

SEQ ID NO: 4249 - DNA, 269 bp, Zea mays
  misc_feature: Incyte ID No: 700353569H1
  unsure 15, 41, 75, 81, 106, 133, 143, 268: a, t, c, g, or other
aattctagggttttnctgctctccgaccccgagctccgaangccgcagcatcaggcgaggcccccctcgcgtgtnaccganatggcgctgccgaatcaggggaccntttgattaccccagcttcaagctcgtnatcgtcggcnatggtggaactggtaaaactacatttgtgaagaggcatctcactggagagtttgagaagaaatatgaaccaaccattggtgtggaagttcatccgttggattcaccactaactgtggtaggatcng

SEQ ID NO: 4250 - DNA, 184 bp, Zea mays
  misc_feature: Incyte ID No: 700353571H1
  unsure 20, 92, 106, 175-176: a, t, c, g, or other
ccccgggcctcgcgctcgtnctcgccgtcctgcccttcatcctgatgatcccagtgtaccattatcagcacaagcacccacacaatttcgtnttcctgggtctgtncacgttgtgcttgagcttcagcatcggcgtggcttgtgctaacacccaaggaaaaatcgttctggaggnnttagtgct

SEQ ID NO: 4251 - DNA, 222 bp, Zea mays
  misc_feature: Incyte ID No: 700353575H1
  unsure 17, 21, 175, 189, 204: a, t, c, g, or other
ctagttctaagatcgcnagcngccgggcggagaggccatgacgcgggttcacgcgcgtgctgcacttcggggaagcccgacgggtcatggacgagatccccaccttcgtcgtcgacccgcttgcccgctggcaaggaccacggatatgtggtcctaaataggccgtgggcatttntgcagtggcttcanaaagcaaagattgangaagagtatatactaatg

SEQ ID NO: 4252 - DNA, 240 bp, Zea mays
  misc_feature: Incyte ID No: 700353576H1
cgtggtgaaagtggtggacatatgtggcctgctgcaagagcatatgacaaagaagcttatgagaaacatttggatattatttataggggtattcctgatgctaagttgtggtttgtggtatgggataattgtaaccatcggtttgtggtgaaggcacaattgcatgagtgttcatgtcttgagtggcagcacactgggaagccatgtcaacatgctttggccttgataacagctcaaaag

SEQ ID NO: 4253 - DNA, 221 bp, Zea mays
  misc_feature: Incyte ID No: 700353578H1
  unsure 66: a, t, c, g, or other
cccatggatttatcagctggtgaagaatctctgaaagaagtcgtacatgtggcagaatcatttttntctaatgcaggcgttgactatatggtccataatgcagccttcgaacgtcctaaacggagggctctagaagaaagtgaggaaggtcttaaggctacattgaatgtcaatgtcttcggaactattactttaactcgccttctaagcaccttacatgc

SEQ ID NO: 4254 - DNA, 124 bp, Zea mays
  misc_feature: Incyte ID No: 700353579H1
  unsure 12, 69, 94-95, 98: a, t, c, g, or other
ccttcctctgcntgtagatcttctagagtcccgtatacggtttcgtctttcgtgtcccacttccatggnggcggcggcgcagtgcaaggatcgnntgnggccacggtggcatatcgcgggactc

SEQ ID NO: 4255 - DNA, 188 bp, Zea mays
  misc_feature: Incyte ID No: 700353580H1
cgatcgtgcacggtcagtttccaggagccacctttctaggtcagtatcaaagtctccaccagtgcatcatccctccccacttgattctccatctctggagcgtgcaagtgatgggaaatctcggtccccatcaccgtctggtggaggcaagaaaggtttggtttcctacggtgatggcactcctgatt

SEQ ID NO: 4256 - DNA, 219 bp, Zea mays
  misc_feature: Incyte ID No: 700353586H1
  unsure 22, 28, 36, 60, 64, 66, 84, 92, 115, 117, 149, 163, 218: a, t, c, g, or other
gtatggtactagagcatctgtntttatnaaaatgangaaaccagctgctgccattcgttnattncntgagagtggatttcagcnctattgcnttggtaaggtgttcaatccactncncagcaatcatgtatggtactagagcatctgtntttataaaaatgangaaaccagctgctgccattcgtgatgccaatgctgctctagagatcaacccaggnt

SEQ ID NO: 4257 - DNA, 180 bp, Zea mays
  misc_feature: Incyte ID No: 700353590H1
  unsure 76, 166, 173: a, t, c, g, or other
gaagtaccagtcctgttcagagatgatgggtttcagctgccaacaccgttccgcctccctgcgcatcttcctcgtntccgtcgtcctcctgctcaccgctcctgcggggcgttgccattgctacaagcgcatcttcagcttcggcgactctatcatcgacacgggnaacttcncgcgcag

SEQ ID NO: 4258 - DNA, 215 bp, Zea mays
  misc_feature: Incyte ID No: 700353591H1
  unsure 5: a, t, c, g, or other
gtgcngttccacactgatgctgcgcaggcgctggggaagatcccgattgatgtgaacaggatggggattgggctcatgtccttgtccggccacaagatttatggccccaagggcgtgggggccctctaccttcgtcgccgccctcgcatcagggtggaaccacagatgaatggtggtgggcaggagcgtggcatccgcagtgggactgttcctac

SEQ ID NO: 4259 - DNA, 259 bp, Zea mays
  misc_feature: Incyte ID No: 700353592H1
  unsure 19, 67, 76, 82, 87, 103, 106, 108, 176, 202, 205, 222, 257: a, t, c, g, or other
cagcaaggatgtcgtggcncgctcagctgccttggatttacaggtacccgatcattctgctctgctnacattcttngctgtncgtcnctacgctgcagaagcntgncncgcttagccttcgcggctgctttgacgaacctacgggctaatacgaagttggacttactttggagagnatgctttgcttccttcgggcaaatgnagnatgtgggcttatgagtnactgattgcctgataaatttctttgggagcccgtncg

SEQ ID NO: 4260 - DNA, 97 bp, Zea mays
  misc_feature: Incyte ID No: 700353594H1
  unsure 11, 29, 83, 96: a, t, c, g, or other
caaagcctcanatctcagtcgcctgcacngccgcttcgttcgtgtggaggggagaagacaggaaatggcggcgactgagggcntgctcttggggang

SEQ ID NO: 4261 - DNA, 200 bp, Zea mays
  misc_feature: Incyte ID No: 700353601H1
  unsure 138, 148: a, t, c, g, or other
gccatccctcactctcctccgaagccatcgtccccgtcccagcctccccggactccaggggcaaaagctgcagcgtcgagatggtgaaggggcgcacggggcagcgcgtgaggctctacgtccggggcaccgtccttngatacaagcngtccaagttcgaaccagtacgagactacgtcgtggtgcagatcgagggggtg

SEQ ID NO: 4262 - DNA, 194 bp, Zea mays
  misc_feature: Incyte ID No: 700353603H1
  unsure 19, 21-24, 143, 159, 174, 188, 190: a, t, c, g, or other
acatatgttcctatctatngnnnnccacagtatgggcaggaaacgtccttttggccacgatagataggaacatatgtagcaccacaaacaacgtttcctgcccatactgtggatcccgatttgttccttccatcgaagggcanctttgtaccatatgtnagcttggtgcggttngggcagatggcttnangtct

SEQ ID NO: 4263 - DNA, 307 bp, Zea mays
  misc_feature: Incyte ID No: 700353606H1
atctgtcagcgccacaggtgaccggaaaaccacggccggcgttcctgcttctctacccggtccgaattgctgaccggatcaacccgagaccttgcaggattatcgatctgattgcggcatgatccgcttcatcctgctgcagaaccggcaggggaagactagactggccaagtattacgtcccgctcgaggactcggaaaagcacaaggttgaatacgaggtacaccggctcgtggtcaatcgggaccctaagttcaccaacttcgtcgagtttcgcacacacaaagttatctacaggagtatgtgg

SEQ ID NO: 4264 - DNA, 309 bp, Zea mays
  misc_feature: Incyte ID No: 700353608H1
cagaagaagagctggagggcatacttgataaagttttggtcatgtttcggtttatacaaggcaaagatgtatttgaggcattctacaagaaagatctagctaagaggttgctgcttgggaagagcgcatcaatagatgctgaaaaatcgatgatcacaaaactcaaaactgagtgtggaagtcagtttaccaataagctggagggaatgttcaaggacattgaattatccaaagaaataaacgattcattcaggcaatcatctcaagctaggacaaagcttccctcaggcattgaaatgagtgttcatg

SEQ ID NO: 4265 - DNA, 192 bp, Zea mays
  misc_feature: Incyte ID No: 700353609H1
gtcaaccccaccgcagcacagcgccggcaaccgccgccatcgatcgatcgcccggaaactgacctctaccgatgtctggagccggcgaggaggataagaagcccgcggagggcggacgcccacattcaaccttaaggtcaagggacaggatggcaatgaggtgttctttcgcataaagaggtccacccagct

SEQ ID NO: 4266 - DNA, 306 bp, Zea mays
  misc_feature: Incyte ID No: 700353610H1
  unsure 55, 69: a, t, c, g, or other
gggaagagcaccaaggaccttcggcgcccgttcaggatccacatcttcccgagcnagttcttggttganctcttcccccttcggaccacctccaaggctcttggtgtagcttgccactctcaccaatcaagttttcatgtctgatctcgacattcagatcccaactgccttcgatcccttcgctgaggccaatgctggggactctggtgcggcacagggtcaaaggactacgttcacgtgcgcatccagcagcgtaatggtcgcaagagcctgactaccgtccagggatgaagaaggagttcagct

SEQ ID NO: 4267 - DNA, 307 bp, Zea mays
  misc_feature: Incyte ID No: 700353611H1
  unsure 208-209: a, t, c, g, or other
ctcgaacgcaggtctgaggcagaagcaagtcatcttcgtcaccagcaacaggaggagcggcggcggcaggaggcacggaggggcaaggagcttccaggtctcgtgctccgtcgacaagccggtggtgattggcctggcggcagactcagggtgcggcaagagcaccttcatgcgccggctcaccagcgtcttcggtggcgccgcgganncgcccaagggcgggaacccggactccaacacgctcatcagtgacaccacgacagtgatatgcctcgacgactaccattccctggacaggaacggcagg

SEQ ID NO: 4268 - DNA, 291 bp, Zea mays
  misc_feature: Incyte ID No: 700353612H1
  unsure 282-283: a, t, c, g, or other
ccggatcacccgttccacaagaagcaggacgctgtctggccggcggcattgcctgaccatccattccacaagaagcaggacactggcgggcctgcggcggcattgccggaccactcattccacaagacgaagcagggcgctgtctggccggcggcgttgcccgaccacccattccacgagaagcacgacgctgtctggccagcggcgttgcccgaccacccgttccacaagaagcaagatgttgtctgggcagtctggccggcagcgttgcccgaccatccnntccacaag

SEQ ID NO: 4269 - DNA, 278 bp, Zea mays
  misc_feature: Incyte ID No: 700353613H1
  unsure 31, 67, 107-108, 140, 245: a, t, c, g, or other
ggcttggagaaagaagaaaggcatagcagcnggcagcggcatgggcaccagccccgtcatccctgcnacgatgctcttcgtcgctcttcttgtcgctgtctgcttcnncgccaccgccgccaggtccagccacgcccgcnacaccgacgccgacgacgcgattcgtctccccagcagctttggcgctggtggtcgaacgtggaattgctgcgactccgcttatcaaggacgcctccctgccggcntggcgctgcaacgacgtggtggacaatgctccg

SEQ ID NO: 4270 - DNA, 309 bp, Zea mays
  misc_feature: Incyte ID No: 700353614H1
  unsure 31, 59, 65, 87, 119, 161, 297: a, t, c, g, or other
cgagcagtccgggaacccgcaggcgcatgcngccgtgtttctccacggcggtcccgganccggcncgtcgcccggcaacaggaggtnctttgacccgcagttctacaggatcgttctgnttgaccagaggggtgcaggcagaagcactccccatgcttgtntagagcagaacactacttgggacttggttgctgacattgagaagctcagggagcatcttggcatccctgaatggcaggtgtttggtggttcatggggaagcaccttggcacttgcctacagccaggagcaccctgntaagtcatggcc

SEQ ID NO: 4271 - DNA, 158 bp, Zea mays
  misc_feature: Incyte ID No: 700353615H1
  unsure 9, 25, 27, 60, 66, 70, 75, 77, 82, 96, 119-120, 123, 125-126, 150: a, t, c, g, or other
ctagaactngtcgaaccgagaagancncaggccgaaggaaaacaatcctgaaaccaagcnatgggnctgnaagangnatttnaggagcatgctgtntaggcaaagaccttgcctgagannacnanntatgagaacatgctgatcctatangggctcta

SEQ ID NO: 4272 - DNA, 167 bp, Zea mays
  misc_feature: Incyte ID No: 700353617H1
  unsure 24, 35, 42, 58, 101, 141: a, t, c, g, or other
ctatcatcgacacgggcaacttcncgcgcaggccncgataanggagtacccatttggnatgacctacttccaccaccctaccggccgcatcagcgacggcngtgtcctcgtcgatttctacgctcaagcgctccagctgcngctgataccaccaaatctgccggaga

SEQ ID NO: 4273 - DNA, 180 bp, Zea mays
  misc_feature: Incyte ID No: 700353618H1
  unsure 8-11, 24, 47, 53, 91, 101, 105, 113, 117, 127, 135, 152, 179: a, t, c, g, or other
acgcgatnnnngagtacgcggcanagctgagccacggggctcccgcntactcncccgtggtccccggcgtcgacgggataaggatccggcngcggcccgtnacgntgcccgcngagncactacgtgnggcccgtnccagttccgccttcganaacgaggggaacacgccgcggaacatnc

SEQ ID NO: 4274 - DNA, 300 bp, Zea mays
  misc_feature: Incyte ID No: 700353623H1
  unsure 282: a, t, c, g, or other
gggaggatacgaaatggggaggccttaaagcaggccaggtaatgtcggagccaaagccagtatttgcaaggatagaaaccgaggtggaagaggaagcccaagcaagttcaaaagcagcaaaaggtgggaagaaagcacgcaggaaaggacttgtggaggcatagtttctgttggaacagtgtatcagcatcgttaaaaggagaatatttcatcttctcttttttttggaaaaaaatctttagcctatctgttcctgaaatttgttcttgctaacgtgtcacntgtatctgtagatagcca

SEQ ID NO: 4275 - DNA, 208 bp, Zea mays
  misc_feature: Incyte ID No: 700353624H1
  unsure 198: a, t, c, g, or other
agttaaccatgctatgatcgttgagaagtcagttatgagaaactattttgtttacttattaatgggttcactgccatttttgtggctacctgtttctacgattatgctacaagcagctgcttttcgtttcgatgaatgttttttgtggaattataagtcatgaacttaatcgatgttgcctcatttcgtaaaagaggntttgtgtcac

SEQ ID NO: 4276 - DNA, 300 bp, Zea mays
  misc_feature: Incyte ID No: 700353625H1
  unsure 14, 189, 296: a, t, c, g, or other
cacacatccgtcanagaaacaagtgcacacaaataaatacctggctcgctagattgccaagagcaatggcctttaggtcatccatcttgcttgccacggtggcgctagcaacgctattcgcggtcggttcgtgcaccaccccgctcaccttccaggtcggcaagggctccaagcctggccacttggtcntcacccccaacgttgccaccatctctgacgtggagatcaaggagcacggtggcgacgacttctcctttacgctcaaggagggtccgactggcacctggacgcttganacca

SEQ ID NO: 4277 - DNA, 293 bp, Zea mays
  misc_feature: Incyte ID No: 700353626H1
  unsure 13, 77, 219, 237, 254, 282, 292: a, t, c, g, or other
gttctagatcgcnatctagaactaggagaaatggcaaaaaagcggcgcctatctgaaaatgtacgcactgatttgantaatggtggtgatgatccatttgcatttgatgatattgatcaagaaccttcaaattgggatctatttggtccaaaaaggaaatcaccacagaagcgagcgaaaagaactaatggagaagtgttggatgattgtggaactgcntaatgggaatcctaaatnatgtcaacctgaagatnttatcagtcattgcaacttctggttctnaagttgtagng

SEQ ID NO: 4278 - DNA, 300 bp, Zea mays
  misc_feature: Incyte ID No: 700353627H1
gtgctaaaaaccttggatttgctgcgatcgatgccttcccttgttgatgtggatgttccaaacggtggacattttacagtttgcggtgatgtgcatggccagtactttgatttgctcaacatatttgacctcaatggccttccatcagaagaaaatccttacctcttcaatggcgattttgtggaccgaggatctttctccgttgaagtcatactcaccctttttgctttcaagtgcctctacccaaaagctatgtaccttgcaagaggaaatcatgaaagcaagagcatgaacaaaata

SEQ ID NO: 4279 - DNA, 273 bp, Zea mays
  misc_feature: Incyte ID No: 700353629H1
  unsure 2, 80-81, 97, 219: a, t, c, g, or other
anaccattgttggacgcgttcccctcctgcacgcaacctcatctcgtcctccagatcctggatggccgtcctccttgatnnccttgcctcgcgagtnctctcggtgagctactttgttttgatttatcaggaaatccgtttgcttcatgttatgcaggctcagatctgattgctggattcggcatcttacgggcttgaatagagctaggactgggaganaacaacaaacccgcgttggatcctgtatcggttagtccttgccttcaaggttca

SEQ ID NO: 4280 - DNA, 201 bp, Zea mays
  misc_feature: Incyte ID No: 700353631H1
  unsure 17, 60, 63, 137, 197: a, t, c, g, or other
gctgtttggagccaggntgccaaagcccagttacgtgaaggtctggtcagtgaagcaggngantccttcattcgtgcagatgatcgctgcacacttccttgatgtcatccgtgcagccgaggaagctaatgtgtacnatgatttagtgaagtaccttctgatggtaaggcaaaaggcacgggaacccaaagtcgatngaga

SEQ ID NO: 4281 - DNA, 270 bp, Zea mays
  misc_feature: Incyte ID No: 700353633H1
  unsure 50, 157, 185: a, t, c, g, or other
gccatgatgctgttaggattcagaaggttgcagtatatccagggaatgtnttggctctctatatgtccaagccacctggattcaggtatcagagtgggcagtatatcttcataaaatgcagtgatgtctctccatacgaatggcacccattttcgantacatcagcaccaggagatgattatctnagtgtccacattcgcacaaggggtgatggacttcacgtcttaggactgtcttctctgaggcagccgcctccatctgatggagaag

SEQ ID NO: 4282 - DNA, 297 bp, Zea mays
  misc_feature: Incyte ID No: 700353637H1
  unsure 4, 17, 213: a, t, c, g, or other
tccncccacaccttganacctgcgttgtcacccacccatcaaggttggggccgccagcaggttcagccgttcctgttcttgctaaaacgagagaaggatggcagtgtctcagggagctgtcctattcttgtttctcctcgtcgcagcagaggtgggaaccatcgatgccaaaatgggagtagccatgcccatgcatgccttgataatggaganagcgaaacagcaggagacggagaagaaggaggagaaaagcacggagaaggaagagagtcaatgcttatcgccgagtctccagtt

SEQ ID NO: 4283 - DNA, 294 bp, Zea mays
  misc_feature: Incyte ID No: 700353642H1
  unsure 243, 266, 293: a, t, c, g, or other
gttaggtttatgtctatggtgcaaaggacaagtgcgttgaaaaagaacaaaggaaagcagatgctgtgagcctgatcaaatagattcaggtaaatggttggatgtgcctaaagagaaccgtctagctactcttgacatttttgctggctgtggaggtttatcagaagggctgcagcaagctggtgtatctttacaaaatgggcgattgaatacgaagagcctgctggtgaagcatttaataanaatcatccagaggctgtggtctntgtagataactgcaatgtgattctaang

SEQ ID NO: 4284 - DNA, 238 bp, Zea mays
  misc_feature: Incyte ID No: 700353643H1
  unsure 37, 43: a, t, c, g, or other
ctcccatcgctatcgaccgggtcctcgagcgcggganatggangatcaggagaccccagttgcagttgaggcccctaccccggtccttggggagccgatggacttgatgactgctctgcagcttgtcatgaagaagtcgggtgctcatgatggccttgttaaggtcttcgtgaggctgccaaagcaatgagaagcatgctgctcagctttgcgtgcttgcggaggactgtgaaccagc

SEQ ID NO: 4285 - DNA, 201 bp, Zea mays
  misc_feature: Incyte ID No: 700353649H1
gacctgccttcataaagaaccagatggtcaacatttggtatgtccctcagaaaaaaggccttcttgggaaatctgatgacttcctcacagcacttgataagttcattgaagaaaatgggactgacgcgctgaagaaattggcgaacaaggctggcaagccatttaaacagtctgggaaatcatctaaggatcagaaagaga

SEQ ID NO: 4286 - DNA, 197 bp, Zea mays
  misc_feature: Incyte ID No: 700353653H1
  unsure 31, 55, 96-98, 103, 126, 138, 167, 172, 182, 187: a, t, c, g, or other
gcaagagcacggcaagggcagcatggcggcnaccagccgtctcctgcctcctgtncgtttttgttttggtgctattgatctctacgacggcgacannnctgcnacgacagtttcagtcgcggcatncggggctcaccnctcgccaaagaggctctggattccgggcntggcngagggatgtnctgangccggacagg

SEQ ID NO: 4287 - DNA, 297 bp, Zea mays
  misc_feature: Incyte ID No: 700353659H1
  unsure 74-101, 185, 295: a, t, c, g, or other
acacatcgtctatcagtgctcatccaacaatccgtgcgcgaccaaggcaataatggtgtcgtcctcccgtgctnnnnnnnnnnnnnnnnnnnnnnnnnnnnccgcgtcctccctgcgccgtcgctgcctccgatggcggtgggccgacgtacgggtacacggcggggagccccgacgggccgganaactggggcaagctgagccccgcgtacaagctgtgcgggcaggggaagcagcatccccgatcgacatcgtcaccaagcaggccgtccccaacgccaacctcgacaccctnaa

SEQ ID NO: 4288 - DNA, 297 bp, Zea mays
  misc_feature: Incyte ID No: 700353660H1
gtatggacttctgaaacttggaggttcagatttccatggaagaggtggaaaagatgaatctgatgttggaacagttaagctcgctattacaactttgtgctgttttttgaagatggctaggtctatctggtcttctgctatgaaagacatcctgcttaagtttgcagaggaaccgtctgctgcaaatctaggaaacatgctcaagtttggacgtcttaccaaatttgctggtttttctccaataaacaatggtattcatgttgttgatttctgcttatcttcttggtcaagcaatga

SEQ ID NO: 4289 - DNA, 298 bp, Zea mays
  misc_feature: Incyte ID No: 700353661H1
  unsure 223: a, t, c, g, or other
attatctcaaaaaaaagtcttgagtcccccctctccttccccttcccaacgctctcgctgcagaggaaaggcgaagatggcgatgaccgtcgaagtgcttgctgcactcgcgttcatgttttccacgagtattctactgcagatactggcatgcgctttgtacaacaactggtggcccatgttagcagctctcatgtacgtccttgtaacaatgccatgcctnatttttggtggtggatccacacacttcttgaccagcagagaaggtggagggtggattaatgctgcaaaattcttg

SEQ ID NO: 4290 - DNA, 124 bp, Zea mays
  misc_feature: Incyte ID No: 700353665H1
  unsure 104: a, t, c, g, or other
acttgtccatgggtattccagagtagtactggaagttctaaagcttgctgcatccaatcgcaagctcttccgggtactatgcacagagggcaggccagacaganctggtttaaggatgtcaaat

SEQ ID NO: 4291 - DNA, 120 bp, Zea mays
  misc_feature: Incyte ID No: 700353666H1
  unsure 10, 42, 65, 69, 77: a, t, c, g, or other
cttcactgcnctcgttgtcatctacgctctcacgtccggtancgctggatacacagccacttctntctntctgcaantgggagggcacaaactgggtcaggaatctggtattaactggct

SEQ ID NO: 4292 - DNA, 293 bp, Zea mays
  misc_feature: Incyte ID No: 700353669H1
  unsure 8, 37, 254: a, t, c, g, or other
tgcttgcntggtgcatagctgttgctcagagtcttcntattatatgttctcgcaagcattacagtgttgacgttgttgttgcatggtatactgtgaatttggtcgttttctttgtggataagaagcttacagaacttcctgatcgatcagtgggatccacatcagtacttcctgtgagtgcaagggataaagataccaagttgaaagaagaaaataccagattgctgaatggtaactctatggattcagctggntcggaggccacgaacacaaatgaatggaaagccaaattg

SEQ ID NO: 4293 - DNA, 291 bp, Zea mays
  misc_feature: Incyte ID No: 700353672H1
  unsure 107, 178, 233: a, t, c, g, or other
tctttttctggcatatcaagtatgtaggtctgcaaaacctgattcaacgaaatgagcaatcatatggttcaggaaacacgccttctggtggagtggctttgccattnatcctagttcagacccgacctcatgctaccgtggaagttgagatatcagaagatatgcagctggtgcattntgacttcaatagcaccccattcgagctgcacgacgactcatacgtcctaaaaganatgcgattctgtggaagagaacaacatgacagcactcaagagtcgatatcaaatggag

SEQ ID NO: 4294 - DNA, 291 bp, Zea mays
  misc_feature: Incyte ID No: 700353673H1
gcgaccagaatcgatgcgcaacgaagttattgtctgcttatgaggaaggtgatgctgatgaaatcaaacgcatggctcaattcaagtgccttcaatcaccttgaccatgtggtaattaggcttgcacggaagctaccaacagatgatctgcaggccatcaagaaagctgacgatggcgaggaatccttggacgaggatgacctgacttaaaacgatctcccgagccaaaaggtgcatagagcaaacgtcatagtttgccataggtgggggaacgctgtaaaaagaattatg

SEQ ID NO: 4295 - DNA, 266 bp, Zea mays
  misc_feature: Incyte ID No: 700353678H1
  unsure 10, 12, 63, 65, 124: a, t, c, g, or other
ctctccccgngncagtctggatgctgcaagccaccgacgtcatgtgcgttcagtacatgaacnanacgtactggacacaaaaccccagcgtcccgacggtgaccaacgacccagactgcaaaangtggagcaacgaccagcagacgctgtgcttccagtgcgactcgtgcaaggctggcgtcctcgcggggcatcaagaagagctggcgcaaggtggccgtcctgaacatcgtggtgctgattatccttgtgatcgtctacgtcgg

SEQ ID NO: 4296 - DNA, 199 bp, Zea mays
  misc_feature: Incyte ID No: 700353685H1
ggcaccaccaccaaccgagcggctccaggctcctgctcaggaaggggagaagaggcgagccttccttgggaagtcgcaggaggagagaaggggaacaaagatggggcgcggcaagatcgagatcaagcggatcgagaactccaccaaccgccagtgaccttctccaagcgccgcaacgggatcctcaagaaggcgcggg

SEQ ID NO: 4297 - DNA, 287 bp, Zea mays
  misc_feature: Incyte ID No: 700353686H1
gcatgtggcaggtcttgatgcgctgcagcacctcagacttgtctttcctccgtccaccgagacattttatttcgaagagctagtaattttctggagcgttgccttcccacggtggctggagctactgattcagaagtgcaaaggcctgcgacggtttgagttgcagtgtggtctgtcattgctcaggagctgcctcgacggtggcaagaactggcatctcgtgcagcagatccccgaggtgcgcatcataagctgcgatggcaagagatactttcggtataacaaga

SEQ ID NO: 4298 - DNA, 286 bp, Zea mays
  misc_feature: Incyte ID No: 700353688H1
  unsure 12, 56, 240: a, t, c, g, or other
caggtacaaganacaacaagactgacagcgacgatgatgccacagctgcgtacctncgtcgcgctggtcctcgtggccacggccatagccgccgctcccggcgttgggtttgtcgtcaccggccgcatctactgcgacaactgccgcgccgggttcgagacaaacgtgtcccacgccatccaaggcgcgacggtggagatggagtgccgccacttcgagtcgcagcaggtccacgacaangcggaggcgacgacgggccccggcggctggtacaggatggagatca

SEQ ID NO: 4299 - DNA, 279 bp, Zea mays
  misc_feature: Incyte ID No: 700353690H1
agaagttcctagtgacagtggtattacattcaatgttgcacccaagatgaaggcgcttcaaattgctgagaaagctagggacgctctcctaagtggaaagtttgaccaggtacgtgtcaacctgccaaatggtgacatggttggtcacactggggatattgaggccaccgttgttgcttgcaaggcagctgatgaagctgttaagatcatctggatgctgtcgagcaattggtggtattacctgttactgccgatcaggcatgctgaggatatggtgaa

SEQ ID NO: 4300 - DNA, 289 bp, Zea mays
  misc_feature: Incyte ID No: 700353692H1
  unsure 75, 105, 107, 109, 116, 140, 178, 211, 219, 233, 242, 257, 259, 277: a, t, c, g, or other
cgacgacggaggtggccatcgaggtggtcgacacggtggcggaggctgcggagaaggtcgccggcgaggtcgccncgcgttccccggcaacgacggtctcagggnancngcctcgnagattaagacggtcgcggatgagntcgaggaagacgccgagaaagccgaggccctaatcganaaggttgacgagatcaagaaagaggttgattcnattgtggntcctataatcgacnaggttgtcnaagggacaaagaatntnagagacaggttgtgaatngaagatgtaaac

SEQ ID NO: 4301 - DNA, 189 bp, Zea mays
  misc_feature: Incyte ID No: 700353696H1
  unsure 2, 155, 184: a, t, c, g, or other
gngccatacagaaacctggagagtttgttgtaacgtttccccgagcttatcattctggtttcagccatggtttcaattgtggtgaggcagtaaattttgctacgggcgaatggtttcctctaggagcagttgccagtcaacattatgcacttctnaagaggataccagtattaccttatgaggngcttc

SEQ ID NO: 4302 - DNA, 260 bp, Zea mays
  misc_feature: Incyte ID No: 700353702H1
  unsure 27, 35, 103, 106, 111, 117, 128, 140, 155, 201, 203, 227, 230, 249: a, t, c, g, or other
gacgttggcaagagaggagggccggcntcggcgtngctagctcgatcttgaaccatagctagccagcatagcgcccagcagcagcatagcagtactgctagtnccncgtanatcgcngtcgtcctctncaacgtcccctnctcgggcgccctggnatcctcggtcgtagtctctggtgcaccagtcgtctaccgtctgagngngagactgagaccggacagtagcangcnaagatcttcttgcgtcgtngtcgtcggaaa

SEQ ID NO: 4303 - DNA, 290 bp, Zea mays
  misc_feature: Incyte ID No: 700353708H1
  unsure 30, 66, 80, 87-88, 96, 109, 129, 145, 148, 190, 197, 201-202, 215,: a, t, c, g, or other
ctcccgaatagcttggtgctggattttgtnacgaacgtccagatccgcggcatcacgctgctcaanagcaagttcgtccncctcaanntcttcgantgcaagaacgtgntgatcgacaaagttacagtnaatgcccccggcgacngcnccaacacggacggcatccacatcggcgactccagcaacgtgnccatcancatnnccaaccatcggcntctgnnacgactgnatctccatcggccccgggancaanatgatccgnatccatggcgtcaagttcggcccangcc

SEQ ID NO: 4304 - DNA, 161 bp, Zea mays
  misc_feature: Incyte ID No: 700353711H1
  unsure 19, 39, 42, 77, 83, 112, 118, 124-125, 138, 143, 150-151: a, t, c, g, or other
ctcttctccatcgccgttngttctctcacgccacacggncanccgatccctgtccaccgcgttgggagctggcgcancccatnggacgacaacgagagagggtgaagatagntgagantggagnnggagaagcactangggantgacggnnaggatgaaga

SEQ ID NO: 4305 - DNA, 297 bp, Zea mays
  misc_feature: Incyte ID No: 700353713H1
  unsure 17, 24, 35, 61, 66, 68, 134, 151, 161, 185, 187, 196, 209, 222, 234,: a, t, c, g, or other
cttcctctccgctaggncaagggncggtgccggtnaggcgataccgtcggtggtgtcggancggtntnggaagatggccgacgtgcagggagacaacgaagcagctctggaggacgacgctttccccgacgacnggcccttagatacggangaggaaggtngaggagaacccattcagcggggcnangaggaagangaggaggacgtcngatggcctccgcnagcttccttgantcngagatcctctcnnggatccaagcaaggangatcctattgaaccggcaggaagcnacngca

SEQ ID NO: 4306 - DNA, 289 bp, Zea mays
  misc_feature: Incyte ID No: 700353715H1
  unsure 6-7, 10, 43, 69, 111, 114, 121, 134, 136-137, 141, 147, 194, 198, 204,: a, t, c, g, or other
attttnntcnatttcaggttctgagtttgtggagatgtttgtnggtgtggtgcttccagagtacgtgancttttcaagactgccaaggagaacgctccttacatagtgtangtngatgaanttgatgctgttgnanngcanagaggnacaggtattggtggtggaaaatgatgatagggagcagactctaaatncganaactanactgggatggatggtnttgagggcaacnccggaatanggtattagctgccataaccantctgacatcttgnatccgctntanttt

SEQ ID NO: 4307 - DNA, 300 bp, Zea mays
  misc_feature: Incyte ID No: 700353720H1
  unsure 7, 19, 29, 54, 60, 66, 69, 84, 105, 107, 110, 114-115, 129, 153-154,: a, t, c, g, or other
cactcgnccagaggccaangaggagaggnggggagccccggacggagaagagancagaanaaaccncgnggccaccccttcctncctatatgtctctctgctgtncntgngcgnnagcgggagaccagnaccaacacctccggtttacttggnngggttctgatcggtgaagaaaaggaattaagatgannntcttcgggcttgggaagcaagaatcaggaagacgttcaggcctnagnaaggaatgcaccgtctngcaacnanggtgtgcaactnnaagaaacacntncgatgnnaagc

SEQ ID NO: 4308 - DNA, 119 bp, Zea mays
  misc_feature: Incyte ID No: 700353723H1
  unsure 2, 21, 41, 45-46, 49, 51, 57, 59, 61, 79, 99, 116-117: a, t, c, g, or other
cncacaccagggccgaggtcncggacgtctccgaagccgtncgcnngcncnccgacncncngatgctttccggcgagtnggcaatggggaagtacccgnacaaggctctcagcgtnntg

SEQ ID NO: 4309 - DNA, 238 bp, Zea mays
  misc_feature: Incyte ID No: 700353725H1
  unsure 74, 78, 86, 100, 109, 113, 116, 141, 146, 175, 183, 215, 217, 220, 222,: a, t, c, g, or other
caaagaagctccgctggtgaagtttgctgatgatgtgtacctggccgacggatgaaccacacgggacgattgangcanccttaatngagccgtcccatgncaaagctgnaganaanatgtagtcgtcatgctggtattagnctccngcttctctccccagcatccccaggcttanaatggggngtaagctgtaaggtgaggataaaactgtcgtnantcntnagcccctatgntttat

SEQ ID NO: 4310 - DNA, 210 bp, Zea mays
  misc_feature: Incyte ID No: 700353726H1
  unsure 3, 7, 32, 42, 49, 61-62, 75-76, 78, 80-81, 85, 97, 102, 124, 131-132,: a, t, c, g, or other
gcnaggnggcagggcaccggatgccggccaanaagaagagcngatatantgacgaaccctnntgttcgtgagaanncngnngcanttcagcatcggnggcgncgtttgcctcccaagaaggacntgcaccnnttcatcaagtggcccaaggtngtncgcatccagcgccagnagcgcatccttcaaacagcgctcnaaggngcctcnngc

SEQ ID NO: 4311 - DNA, 287 bp, Zea mays
  misc_feature: Incyte ID No: 700353729H1
  unsure 9, 15, 24, 83, 85, 92, 95, 113, 176, 213, 244, 262, 267-268, 279, 282: a, t, c, g, or other
gtgattgcncaccgnagtctaganactgcgccaagcaatttttccatcgtgaacccgctcggtcgtcgcttaatcctccgacnancaagccnctnaggaccccggtgttcaanaagtggataattctgagcaagaggtcgttgaaggtcgcatctgtgtgaggcatatagcttggncctcatatacttgtgaatgtgatcggtgtaagtgttnagctgaagctgacaagctgttgatgctgttnggattttttcggagcttncaagnngaccaactgtnacngtctt

SEQ ID NO: 4312 - DNA, 145 bp, Zea mays
  misc_feature: Incyte ID No: 700353741H1
  unsure 4, 10, 26, 33, 36, 47, 55, 57, 66, 68, 72-73, 85, 91, 97, 132, 138: a, t, c, g, or other
ggcnaccacnattccttccccaactntgcaggntgntcgtcgcctcnctgccacncntgacgcgcncngatnncgtatcgagggngcgtancatggngtcaaggcatatcctcaaagagttaaatgaccttnaagagngaccctc

SEQ ID NO: 4313 - DNA, 287 bp, Zea mays
  misc_feature: Incyte ID No: 700353742H1
  unsure 105-106, 149, 184, 192, 215, 220, 222, 286: a, t, c, g, or other
actaaatgccgaggtgatggaacttgacctgctctccctcgactcggtcgtaaaatttgctgatgcttggaatgctcgtatggcaccgctgcacgtgttgatcannaatggtggcatcttcgctataggagaaccccaacatttttcgnaggatggacatgaagaacacatgcaagtgaaccancttgcacntggcattactggcgatgctgctnatacntncccttctccgaggttctcccagcagaattggttaacgttgaattcaatcatgcacagtgtaggnt

SEQ ID NO: 4314 - DNA, 226 bp, Zea mays
  misc_feature: Incyte ID No: 700353744H1
  unsure 24, 31, 68, 83, 92, 124, 136, 143-144, 151, 155, 173, 178-179, 199-200,: a, t, c, g, or other
agcgaagaagccatgataccttcngtgaggntctctcctgggctgcagccttctcaggctccagcctnacgctcaaaattatngtcaattcnatccatctccagtctcaaaccctccaaatatntggtctcctcgntgaaacnnctcttgntagnaccgctagatggtccacngatgnngaggcttaagtcttggggannggcnanttnagttaccntngtttctt

SEQ ID NO: 4315 - DNA, 220 bp, Zea mays
  misc_feature: Incyte ID No: 700353748H1
  unsure 41, 50, 56, 71, 108, 110, 129, 135, 165, 167, 194, 205, 215: a, t, c, g, or other
gcaaccagtaccaaaagcatctctgatgcccctcagaagcnttcctacangttttnaatctatggtaggantggatggattggtggcctccttggagagatttgtganangcaagggataccatatggntatggnaaaggacgcttggaggagcgctctcagctntnggaggacatagaaatgtgaagccaacncatgttttcangctgccggantcact

SEQ ID NO: 4316 - DNA, 281 bp, Zea mays
  misc_feature: Incyte ID No: 700353759H1
  unsure 37, 79, 94, 119, 206, 250, 258, 271: a, t, c, g, or other
ccagcaggcttaacggacggacggacgtcatagaganactcctcatctcgcggccgattcagagccgaggcagggcgancagaggaccatgaantggagcatcgatgggttcgcctcantcctggacaaggcgacggatggacctactccagagtgttcgagctcatgggctacaactagtacctgaagctgaacccgagggacangaagagcggtgacgacggcacggataacgtctccctcgtgcttnagtggatnacctctcggtgangccgggtaat

SEQ ID NO: 4317 - DNA, 296 bp, Zea mays
  misc_feature: Incyte ID No: 700353762H1
  unsure 36, 47, 66, 96, 103, 115, 123, 132, 136, 139, 144, 148, 150, 194, 196,: a, t, c, g, or other
ctcagatactggaatcaagccagaagcttcacatantggtgtctctnatcttccttctaacaggtnagctctgaggttggcactgcaggtgctggngggggtncatggattgaanagcttggnccgatgctngcangtntactntagntnctaccactgatgcaggcaagaaagtgaaggagctgagctgatgncngtttnacctcaggtccagcangcnanttngtgacatntccaagtcttggtanaggtnattnttccacntggnggagcagtgtgnnggtnanantgntggt

SEQ ID NO: 4318 - DNA, 284 bp, Zea mays
  misc_feature: Incyte ID No: 700353763H1
  unsure 31, 70, 105, 118, 159, 166, 237, 245, 256: a, t, c, g, or other
attcactgctgatctttttctgtgggatgtntatcactgttgatggcttcaacaaaacgggcataccgancacactatgggagttagtggaaccatattcacgantcgatagtgctanaggtgttgcacttcttgctgtggtgattcttatcctgtcanacgtggnctctaatgttcctacagtcctattgcctcggtacaagagtggctgcatcagcggctgcgatttctcatggntcagagangaaagcctggntcatcctggcatgggtcagcaccgtggc

SEQ ID NO: 4319 - DNA, 286 bp, Zea mays
  misc_feature: Incyte ID No: 700353764H1
  unsure 96, 141, 199, 214-215, 223, 269, 273, 284: a, t, c, g, or other
agagggtctcttccacaatcaggcccagaaattatgcggcatacttcagccattcggagaaaaataactattcttggtactagactggatagcttngagtcattgtttggcagaattcctccaaagtcaatcactgacaangagatgcagtaaacgccaagacatgctttccagtttgaagtctaaagccaagcagatngcgacaagtttcaanntgtcaaanttacgctaacagggaggatctgcttggtcaaagtaaaatgccagtngacntgagcagagtngt

SEQ ID NO: 4320 - DNA, 279 bp, Zea mays
  misc_feature: Incyte ID No: 700353770H1
  unsure 33, 48, 68-69, 73, 86, 104, 126, 128, 146, 150, 166, 185, 197, 207, 241,: a, t, c, g, or other
ggaatggtcaagacccaaacaacaaggcctgantccaagcccaagagntggacatacaggtgcaactnncggngagaactggtacntagttgagggtggcaatnataaaagtggtgtttctgaaanantagtgctcaatatgtcanctcnggcatggtcagttganagcactgttgaagggacgngttcctcttgcnagtgagggcntgactttagtagcatagcaattacatggttatgnttaanctcgtctctnttggagganacaatggacgtgca

SEQ ID NO: 4321 - DNA, 283 bp, Zea mays
  misc_feature: Incyte ID No: 700353779H1
  unsure 13, 28, 66, 87, 94, 97, 108, 113, 117, 130, 139, 158, 161, 165, 181,: a, t, c, g, or other
gactcagcgagcnagagcagcacacacncagcttgctaggagcagcagcagagcagcggcgatggnggcctccatgatctcctcgtnagctctngcngttgcgcctcngggcntgcngcccctcggccgncgcgcctcntccttcaccgtcgtcttcnccnagangatgatcaagaccgtnaagccctacgngattggtggtggcctgancgtcganntcgaggccaacngnagttnnggtcgagggcaatggcgtgtaccanttcgtcgncaagtacngnnt

SEQ ID NO: 4322 - DNA, 151 bp, Zea mays
  misc_feature: Incyte ID No: 700353785H1
  unsure 6-7, 19, 29, 44, 51, 61, 75, 100, 111, 123-124, 127, 135, 140, 144: a, t, c, g, or other
attcanngctctagatcgncaagttttcnttggtcgggaaatanctgtttncttgctgctnagtcacgaaaaagnccagaatgaaatagcgcagcagaanctagagtaagnggttactctggnnagnaaggtcgncggtnttcntactatg

SEQ ID NO: 4323 - DNA, 136 bp, Zea mays
  misc_feature: Incyte ID No: 700353786H1
  unsure 55, 81, 83, 96, 98, 101, 106, 109, 113, 118, 128, 130-133, 135: a, t, c, g, or other
ggaaagcaatcacagccagacgatatccgagcagagaaggggagctacctgctangatagctaggttccagacgcaatggngnacagccagggtcngngtnggacntgntganatggngctggtgggncnnnnant

SEQ ID NO: 4324 - DNA, 280 bp, Zea mays
  misc_feature: Incyte ID No: 700353793H1
  unsure 17-18, 50-51, 54, 59, 73, 76, 94, 101, 114, 118, 149, 172, 174, 201,: a, t, c, g, or other
gggcgacaacatgcttnnaaggtccaccaaccttgactggtacaaaggcnngancctgnttgaggctcttgancanatccaccgagcccaaganaccttcngaaagcccctgcntctncccctgcaggatgtgtacaagattggtggtntggaactgtaccggttggtcgtntngagactggtgttcatcaagcctggtanggttgtnaccttcggtccactggcctgactactgaggtgaagtctgttgnagatgcnccacgnaggctcttcaaggang

SEQ ID NO: 4325 - DNA, 52 bp, Zea mays
  misc_feature: Incyte ID No: 700353795H1
  unsure 5-6, 12, 15, 24, 28: a, t, c, g, or other
ggganncactangcnacgcctacnctcnatgtactactagctgccttcctac

SEQ ID NO: 4326 - DNA, 278 bp, Zea mays
  misc_feature: Incyte ID No: 700353796H1
  unsure 4, 63, 99, 228: a, t, c, g, or other
aaangtggagagctcactcgtgatgaaacaactatcattacaggagctttggagctgactcanaagattgcaaaagatgccatgactcctatatctganaccttctcacttgacataaatgctaagctggacttacacacaatgggtatgataatgactagagggcatagtcgtgttcctatatactctgggattccaagcaatattattggccttatattggtaaanaacttgattacttgccgagctgaggatgaagtgcccattcgtaatgttat

SEQ ID NO: 4327 - DNA, 275 bp, Zea mays
  misc_feature: Incyte ID No: 700353801H1
  unsure 22, 72, 79, 81, 89, 145, 173, 186, 200: a, t, c, g, or other
attgctgagaatgaatcgatcngaagagaacgttacaatttcatgcagaaaatgctgcttccttgtggcctncctcctnanagagatgnagattgaggagctgttgcatagtttcagtgtttccaatgaccatttatgagattgnaacctctatggtactatgtgccatttgngttaaagctcgtntgcctttgacttgncttgcatcggtctctatcgtgatacataaacatcgtaacttgtatgcatgtaaacgaaatgctggttatgcccca

SEQ ID NO: 4328 - DNA, 293 bp, Zea mays
  misc_feature: Incyte ID No: 700353802H1
  unsure 12, 59-60, 62, 66, 71, 88, 157, 220, 222, 242, 279, 284, 287, 289-292: a, t, c, g, or other
accgagccgctncttgtggaagttgaccaaatctatcaccttgcttgccctggcttcanntnatcntctgncaaggcacgaccctgtnaagaccatcaagcacaaatgttgttggtaccctgaacatgctaggacttgcaaagagagttggagctangtcagtgttcatcatgccattgattcttccagcgcctcatgtgaaaaactcaattacagaatntntttttggattgcaggatttngtgggacatcaacctctgaagtttatggtgatccacntgaancantnnnnc

SEQ ID NO: 4329 - DNA, 147 bp, Zea mays
  misc_feature: Incyte ID No: 700353812H1
  unsure 28, 39, 54, 66, 72, 82, 100, 121, 123, 126, 129, 137, 143: a, t, c, g, or other
tctcatcctaggtaattcaacatttgtntcatggtagantggcatttgtatgcnactcctacttcntctgcnccctctctgnaatgtagtagaaaaggtngtatggttttctatttgtgtntntanttntggtacanacaatnccca

SEQ ID NO: 4330 - DNA, 106 bp, Zea mays
  misc_feature: Incyte ID No: 700353814H1
  unsure 48, 55, 58, 62, 72-73, 82, 96, 101: a, t, c, g, or other
caaggatatccaggcttcagttaaatggctgaagtcaaatggatgcanccaaggntgntgtnacgggctatnncatggagangtggctttatcaantgcangtgaa

SEQ ID NO: 4331 - DNA, 260 bp, Zea mays
  misc_feature: Incyte ID No: 700353815H1
  unsure 74, 77, 86, 88, 100, 114, 129, 133-134, 159, 196, 255: a, t, c, g, or other
acgttcctgatgagcaccacaccaagattgatacagaaataactgatcttctcatagagtgggggatgcctgcnaanaatgcgtgnantacatccgattnactttgccaaatgnttgacaaaggccatncatnntaataatggggagaagatagatagnccatcaaacggtctctctattgtaggatatctgaganctgctttcatagaggaagagtctacttgaggaacatgtgtcatggtgacaatggtggtnatcac

SEQ ID NO: 4332 - DNA, 266 bp, Zea mays
  misc_feature: Incyte ID No: 700353816H1
  unsure 74, 89, 93, 96, 111, 163, 168, 188, 223, 257-258, 263: a, t, c, g, or other
ccaatccttcccctctcatcccgggcaccggggaaaattttgcccatagaaaccctagggcgtcggatcacaanctagggcaaaatttnctgngantccggctgaaggacnctaaggcacctatgtcggacgacactggccgcactatacccaagttcggcgnatggnacgtgaacaacccggcctcngccgacgggttcacggtgatcttcagcaaggccanggatgagaagaaagccccggcccaaggccacatnnagggnaca

SEQ ID NO: 4333 - DNA, 262 bp, Zea mays
  misc_feature: Incyte ID No: 700353820H1
  unsure 4, 13, 17, 26, 34, 54, 56, 62-63, 72, 99, 115, 153, 206, 256: a, t, c, g, or other
caanccgtcagcncctntccgttacncatccgcnttcgactccaaccgcgtgcncntccaannctcctccangaaagcgagagcttctgcataagaacnacaaatcaaaagcgtnatcagctacggtgccaacaaaacctcaacaaccaagtntcatgtctgatctcgacgtccagcttccatctgcctttgatccgtttgctgangcaaatgctgaggactctggtgctggtcctggaacgaaggattatgtgcntgtgcg

SEQ ID NO: 4334 - DNA, 278 bp, Zea mays
  misc_feature: Incyte ID No: 700353822H1
  unsure 255: a, t, c, g, or other
ggaaaaaactgaagaggatctaaaatcactgcaaagtgttggtcaaattatcggtgaagtgcttcgacctttggacaaggaacgatttattgtcaaggctagcagcggaccacgttatgttgttgcctgccgaagtaaagttgacaaagaaaagttgattgctggtacacgagttgttcttgacatgacaacacttaccattatgcgcattctgccacgtgaggtcgaccctgtggtttacaacatgctacatgnagatcctggcaatgtaagttact

SEQ ID NO: 4335 - DNA, 280 bp, Zea mays
  misc_feature: Incyte ID No: 700353823H1
  unsure 8, 49, 70, 82-83, 91, 127, 130, 133, 162, 198, 224, 227, 238, 253, 268: a, t, c, g, or other
gagagagngagatggatgaggagtacgacgtgatcgtgttggggacggngctcaaggagtgacatcatcnacggcctcctcnncgtcgatngcctcaaggtccttcacatggacaggaatgactacnacngangagaatcttcgtccctgaatctaaccaanctctggaacaggttcaagggcaacgacagccctccngagcacctgggcgtcacacaagagtnacnacgtcgacatngtgcccaagttcatnatggcaaacggcgcnctggtccgcatt

SEQ ID NO: 4336 - DNA, 274 bp, Zea mays
  misc_feature: Incyte ID No: 700353828H1
  unsure 23, 58, 92, 102, 163, 173, 186, 259: a, t, c, g, or other
aatccttgcacccctcccctgcntcaccccaccatatccggccagcccaacgaaaatntacgcgcgccacagctgcggtcctcttctacatnctcgccgtcnctgcgctcagcgcggccgaggcatcggcagagtcaccgaaggcaggcagtcctgccaaggnaccggccgantcaccgaaggcangcagtcctgcagctcctgccaaggcacccgagtctgctgccacgagaactgcccccgctaaggcacctcaagncgcctccacccccgc

SEQ ID NO: 4337 - DNA, 70 bp, Zea mays
  misc_feature: Incyte ID No: 700353829H1
  unsure 8, 11, 21, 35, 45-46, 57, 68: a, t, c, g, or other
gatttctncancatgcaaggnctctcattcacatncagctgctgnnacgttcttctnggtcctctgtntg

SEQ ID NO: 4338 - DNA, 265 bp, Zea mays
  misc_feature: Incyte ID No: 700353831H1
  unsure 56-57, 76, 82, 88, 97, 107, 153, 160, 176, 182-183, 242: a, t, c, g, or other
ctccacttatgcaagctgagaaatgcacctcggtgggtcaggagaaaaatacttcnnttaagagaaatggtcgagnatgtgntattantacaagttnaagttcttcnaccagacatgtgggggcatgtttatccaataattgggattctaggnctggaantatggtgcctaaagtngatgtnntcacaagttcagcttcagctgtgcccgtggtggcttcaggtgttaaaccctctcagccngtcaataattcagttgccaagat

SEQ ID NO: 4339 - DNA, 281 bp, Zea mays
  misc_feature: Incyte ID No: 700353835H1
  unsure 53, 57, 85, 120, 128, 152, 235, 279: a, t, c, g, or other
gtctcagcccggggtctgctgcgtctggtggtggtgaaggggagaaattcgtnaganctgttccggatcaggcgtgcgaggctcnggaattcaggggtttcacacatagcttcgtcgatntgaatttnatgtactaatggagtctaagggtngcaaaaagtctagcagtagtcgttctatgatgtatgaagctccccttggctacagcattgaggacgttcgacctgccggaggngtgaagaagttccagtctgctgcttactccaactgcgcgaagangc

SEQ ID NO: 4340 - DNA, 282 bp, Zea mays
  misc_feature: Incyte ID No: 700353836H1
  unsure 41, 70, 78, 92, 99, 114, 168, 212, 215, 224, 230, 243: a, t, c, g, or other
cgactgttgacaaatttgatgagctgcatagcttgtctggnaaccttcttggctgaagtggaagaccttncagttgcnattgcaagaaaganattctgngatctcatttctgcnaaaagaagttacaaaaagcactaatgaactgctaaccactgaagagggcaacanaaattattcatctcagctaaatggtttcatggaagtggttaganagngaactgttngcagtngcggctccattcngagagtgccaatgttgtgttacactcaatttcctgtcta

SEQ ID NO: 4341 - DNA, 266 bp, Zea mays
  misc_feature: Incyte ID No: 700353837H1
  unsure 25, 65, 112, 213: a, t, c, g, or other
tgttgagaagcggactgcgcttganaacttggatttgatacttctctgcattgatgaaattgtanatgggggaatcatcctggaaacagatgcaaacaccattgctggtaangttgcaaccaatgctgttgatggttctgtgcccttttctgagcagacgatatctcaggcactagccacagctagggagcaccttgcaagatctttactganatgaacaaccagcaatatgtatgacatatatgtgtgttaaaggttgggctact

SEQ ID NO: 4342 - DNA, 277 bp, Zea mays
  misc_feature: Incyte ID No: 700353839H1
  unsure 7-8, 25-26, 28, 38, 52, 61, 64, 69, 81, 97, 99, 103, 110, 182, 190-191,: a, t, c, g, or other
gccgtcnnttcatcttcctctcctnncngcttccggcnccgctcctccccanaatcccccnaancctgncgaactggaggnccgatccgcggctccncnccgnctgatcngagcagtctactcggcccagccggggatccaagcgggatagggtacttgagctccgtgatcggccaccccancgatggannctccgtnagcggcggnagcctcagccagaatngtgganttagtgtggctatgcnagctacncctggtaaaagggcatccatggaag

SEQ ID NO: 4343 - DNA, 271 bp, Zea mays
  misc_feature: Incyte ID No: 700353842H1
  unsure 27, 33, 63, 74, 88, 120-121, 155, 175-176, 179-180, 199-200, 217,: a, t, c, g, or other
cttgatttggcacgcgaagaattctgncaagantcagaactaccttgggctagaaatccgccngaaggttttantggttttaggttgnagcttgtttggtttctggattggatgattttnncctttttgtaatgtataaatgcccggatctctgnctttgcagtttaagagagannagnnagatcacaacagttttagnnacaaagaactgggaagntcanncagcacccccccccnaannnaaggcataccgcnccctcataacgcggna

SEQ ID NO: 4344 - DNA, 271 bp, Zea mays
  misc_feature: Incyte ID No: 700353843H1
  unsure 92, 103, 224: a, t, c, g, or other
acgtcgatgagcggtgggtgagcagacagaggaaaggccgcacatctgacgccgtgcttagctgccccgcctgtttcactaccctgtacttngattgccagangcatgagaagtacgtaaaccagtaccgtgcgatgttcgttcgcaactgcaagatcaagactgaccaggtcctgcgagagggcaagagcaagaggaagaaacgcagaggaggaatgctggtnatccagctgctgcatgctgaaggcgaaagcaaagggcagtcctacca

SEQ ID NO: 4345 - DNA, 271 bp, Zea mays
  misc_feature: Incyte ID No: 700353844H1
  unsure 60, 73, 144-162, 167: a, t, c, g, or other
cttctccgatccatcaacaatcgccgagagcgatcgagagataaataaagatgaagaaantggcatcatcgtnagccgttctcttcgtgctagccctgacgctagtttgtgccccgctgatagcagaggcaaagaagaagagannnnnnnnnnnnnnnnnnnagganaagaaggtgcaggacaacttctgctcgacgctgtgcgagggcaggaaggggatggacctggtggtgtgcaaggagtcctgcgacctctcacagcgctccaacct

SEQ ID NO: 4346 - DNA, 281 bp, Zea mays
  misc_feature: Incyte ID No: 700353848H1
  unsure 4, 31, 60, 64-65, 70, 73, 108, 116, 125, 128, 131, 135, 170, 178, 269: a, t, c, g, or other
cgancagtccgggaacccgcaggcccatgcngccgtgtttctccacggcggtcccgaganccgnnacatngcncggcaataggaggttctttgacccgcagttctacnggatcgtnctgtttgancanagnggtncaggcagaagcactccccatgcttgtttagagcanaacactanttgggacttggttgctgacattgagaagctcagggagcatcttggcatccctgaatggcaggtgtttggtggttcatggggaagcaccttngcacttgcctac

SEQ ID NO: 4347 - DNA, 280 bp, Zea mays
  misc_feature: Incyte ID No: 700353849H1
  unsure 74, 272: a, t, c, g, or other
acagcattgacatcactgatggatgttgagaggaggcacggcaagttcaagccagtgatcaagaaggctatggnggaactcgatgctgcacctttcaagaaatatgcatcgttgagggatgagtgggccatcaagaacagatacatcagccctggccccatccagttcagcggccctggaagcgatgactcgaaccacaccttgatgctggaactcggtgctgagttatagagacgcgtccttcacttatttttgttcttacagttttgggnaaataaac

SEQ ID NO: 4348 - DNA, 275 bp, Zea mays
  misc_feature: Incyte ID No: 700353853H1
  unsure 80, 174, 229, 252: a, t, c, g, or other
ccgtgtcgacctccaggttgagaaggaaagcatcgcgagttcgccatacggatgggttccaaagcgcctttctgtctcangctcctcttgctgctcgccgcggcctgtggacctgctgcacatgccaacgatgctgtcttgaaggaacatatttcttcaaccaagattcctgcncgtctcaagaggggcagcggactatgctcggcctgtgaaaacttcacgagcgaanccgtccacttatctcggcaaggnacagacacaggacaggatcgtgg

SEQ ID NO: 4349 - DNA, 280 bp, Zea mays
  misc_feature: Incyte ID No: 700353855H1
  unsure 30, 44, 52, 56, 59, 63, 81, 104, 113, 122, 135, 144, 153, 162, 182, 184,: a, t, c, g, or other
caagatcgtgctcatggtgctgcccatctncttgtccaccatcntgctcaantgcngcntgangcactggtccaccttgtncggtcgagcaatcggccaccatngacacgcgngtgggcagnctcaccgtgccgncggcgtcgntgccccgtnttccctgtncacgttcatcatcatcctcncncccgtctacgancacgtcatcgtcccgttgcncgcgccgcgtgcacngggaccgagnatggggcatcacacacctccagcgtatcggcaccnggct

SEQ ID NO: 4350 - DNA, 271 bp, Zea mays
  misc_feature: Incyte ID No: 700353857H1
  unsure 35-37, 43, 54, 57, 59, 63, 88, 118, 147, 260, 267: a, t, c, g, or other
ggaaaggaggatctgaacttctcatgcaacatacnnnttctangaaagacttgngtnangcanaagtgcaactatcaattctgtattnagtgaagagaagtccaaaactgatgctttnagctcagcaaccactaatgtgcgggaaancattggggatgttgatggtgtcaagattaggatcattgatacacctggccttcgtcccaacgttatggaccaaggatcaaacagaaagattcttgctgctgtcaagaaatatnccaaganatgt

SEQ ID NO: 4351 - DNA, 271 bp, Zea mays
  misc_feature: Incyte ID No: 700353860H1
  unsure 4, 7, 11, 57, 80, 97, 106, 120, 128, 132, 146, 160, 181, 201-202, 209,: a, t, c, g, or other
gtcngcngggntgtcgacggagctccgccacaagtacaacgtgcgcgccatcccganccgcaaggaccgacgaggcagtntatcgtgcgcggcaccnacaagggcngcgaggggaaggangtgcaggnctancgccgccgctgggncatccacgttcgancggatgcacccgcgagaaggngaacggtctccaccgtgaanntgggcanccacccctccaaggngatcgtcactaagctgaagctcgacaaggaccgcaagngctcctgnt

SEQ ID NO: 4352 - DNA, 274 bp, Zea mays
  misc_feature: Incyte ID No: 700353862H1
  unsure 39, 56-57, 59, 62, 74, 76, 87, 90, 93, 104, 130, 159, 172, 224, 244, 248: a, t, c, g, or other
caaaatctgttttgaccattcgagaatattacagtgcanaagatgaaaaggaggtnntnttntgtattgaggancngaatgctccanatntcnatccatttctngtgtcactctgggtaaatgattcctntgagagaaaagacatggagagagagttgntggctaaacttcncgtcagcctttgcagtggtcgacataatttgttgagcaagcaacaactcagngatggcctttcaaatgttcntgcntcttagaagataatcgaagtgatgct

SEQ ID NO: 4353 - DNA, 273 bp, Zea mays
  misc_feature: Incyte ID No: 700353866H1
  unsure 28, 42, 46, 48, 80, 115, 202, 253: a, t, c, g, or other
gtaaataagaaagggattctagcccctncaatcaccttcggntttntngcttccaaactagaccttagattcttcagagnaagtgtagatccgttgtgcattgtggcctttggtngttgatccgtgcggtttgtttcgtttcatgttgtttcttggctagacctaattgtttagtgaacctgcgtatcacgggatgcatgtnttcccagatggtacccgtttgcgtgtgagcttgcaaaatcctgggcttggncatctttcttcatgtttctc

SEQ ID NO: 4354 - DNA, 273 bp, Zea mays
  misc_feature: Incyte ID No: 700353867H1
  unsure 41, 47, 55, 64, 73, 87, 94, 129, 135, 168, 180, 188, 193, 196, 210, 230,: a, t, c, g, or other
acaccatgcagaacgactacgactcgctggacctccacatnggccantgcctgtngttcctcgncaacgccgnccagaatcccggcnactaccngctggcggtgtccacccggttcatcaaggaggtgnacagcntcacggccgtgatccgctacaagggctccaacnccccgccgccgnccaaggtnccggnganccccagcggatggncgtggtccatcaaccagtgnagtccttcngctggaacctggacngcgagcncnggcgcggcct

SEQ ID NO: 4355 - DNA, 272 bp, Zea mays
  misc_feature: Incyte ID No: 700353868H1
  unsure 119: a, t, c, g, or other
gctcgagaagcctgcccctgccaacatagagcagaaggttgagcctgtgattatggatgaaagcatgatgaaggcatgtgcggctgttgctcgtgttagagttgaagttgataagctgnctgctaaggtgtgtgacttggagaagaatgtactaggagggagaaaggttgaggataaagaatttgttgtcttgacggagctgcttatgatgcagctgctgaaactacgatggcattgaagctgaaggagaagcaagggcacagaggaaggct

SEQ ID NO: 4356 - DNA, 268 bp, Zea mays
  misc_feature: Incyte ID No: 700353873H1
  unsure 7, 26, 29, 54, 59, 79, 105, 107, 113, 149, 160, 220, 232, 234: a, t, c, g, or other
gcaaatnagacaatgtgtggtttatngcnttgtctttctcatagttgtgttctntatanttcctctgcactgctatcgntgctgttacaaccctggaaaacctanangcgaantgcccttcctgaagccagtggtggagcaaccagcantcaagacggtnttggaggcctaccttccccagattgcactcattgtgttcctgcgcattgctacctactcntgcttatgtttntntcgaaacgagaggggatcccttcgcaggccatgc

SEQ ID NO: 4357 - DNA, 265 bp, Zea mays
  misc_feature: Incyte ID No: 700353880H1
  unsure 74, 84, 99, 153, 234: a, t, c, g, or other
accatcaaaatccaacacaaattgttacagagatgtgtggcttcatgactatcctatctgggacgtttcttctntcacaagacnaaagatatgactganagtcctggacaatgtttgtccacacggcggtcaaagcatgctagtcagaatgcntttgcaattgaagtcgtgccactaaaatgtcaagattctatagatgatgagaccttgactttgtcacttccccaggttganaatggttacctaaaggaagagcatcttcttt

SEQ ID NO: 4358 - DNA, 85 bp, Zea mays
  misc_feature: Incyte ID No: 700353881H1
  unsure 62, 64, 68, 71-72, 76, 79-80, 84: a, t, c, g, or other
gtagacagtgatgatacagtgtacacctatagcaataaactgtggcagttttattaaaaaananaaanaannaganaannggang

SEQ ID NO: 4359 - DNA, 273 bp, Zea mays
  misc_feature: Incyte ID No: 700353882H1
  unsure 23, 33, 46-47, 55, 65, 104, 122, 142, 146, 159: a, t, c, g, or other
ccctataccttctgcataatganttaactaganataactttgcaanngagagccnaagctaaganccccgaaaccagacgaggtacctaagaacagctaaaagngcacacccgtctatgtanccaaaatagtgggaagattnatangtagaggcgacanacctaccgagcctggtgatagctggttgtccaagatagaatcttagttcaactttaaatttgcccacagaaccctctaaatccccttgtaaatttaactgttagtccaaagagg

SEQ ID NO: 4360 - DNA, 268 bp, Zea mays
  misc_feature: Incyte ID No: 700353883H1
  unsure 89-112, 155: a, t, c, g, or other
gctgacgacaccaccgtgtggtcgacaaaataaaaaggagagagagagagatggctctgtcgtctcgccgtatggccgccgcaccattnnnnnnnnnnnnnnnnnnnnnnnncgtggcggcagagaggacgatgggcagggtggtggtggaaganacgctctgcttgtcgcagagccatgccttcaaaggcgtgtgcctcagcaacaccaactgcgacaacgtatgcaagacggagaagttcacaggcggcgagtgcaagatggacgg

SEQ ID NO: 4361 - DNA, 265 bp, Zea mays
  misc_feature: Incyte ID No: 700353885H1
acgagattcagtttgctggacaactccaacccaagggatgctgctacagcttggaggttccgttggggcagagtagagatgctgaatcgtcaggtcgtgaagtctgattcagcgattatcaagattccagagctcgactttgagatccctccagaagctcaacgtggaacactttctactgtggaagggattattatgcgagctgtggatgagctgcaggctcttcaagatgaacggaagaaagtggatcctcagaaggccgaag

SEQ ID NO: 4362 - DNA, 265 bp, Zea mays
  misc_feature: Incyte ID No: 700353887H1
  unsure 69, 75, 80, 87, 206: a, t, c, g, or other
tgaactatgagccaagaagggttaagtgcaagtacgactccaaggtcaccttaccaccttgaaaagggntgcggncccanctacctngcactgctggtcaagtacgtcgacggcgacggtgacattgtggcagtggacgtcaaggagaagggctccgacacgtacgagcctctgaagcactcctggggcgccatctggaggaaggncagcgacaaaccgcttaagggacccctcaccgtccgcctcataccgagggaggcaccaa

SEQ ID NO: 4363 - DNA, 266 bp, Zea mays
  misc_feature: Incyte ID No: 700353888H1
  unsure 79, 192: a, t, c, g, or other
acgagtacaaaaattgatgccttgagggaggatataagaaacatgattgagcacgatggttctggccaaagggattgtncttcagccagttcacatcattcttggatttgattcagttttccttggagaggtccggcattaaatgtgtccagttgaatggagccatgaacattaccgaaaagggaagagccntagacaccttcacccatgatgcagactgcagggtcttcttgatgagcttaaaagctggaggagtcgctctgaat

SEQ ID NO: 4364 - DNA, 265 bp, Zea mays
  misc_feature: Incyte ID No: 700353891H1
  unsure 11-13, 21, 24, 26, 32, 39, 41, 60, 75, 101-103, 114, 127-128, 156, 184,: a, t, c, g, or other
ctcagagagannncaccatgnaancngtctcntgccganangaccaacgtcgaggccgcntggggtaaggtcagncggcgcacgctgggcgagtatggtgnnnaggccctgganaggatgttcctgnncttccccaccaccaagacctacttcccnccacttcgacctgagccacggctctgcncaggttaagggccacggcaaganggtggccgacgcgctgaccaacgccgtgncgcacgtggacgacatncacaacgcgctg

SEQ ID NO: 4365 - DNA, 268 bp, Zea mays
  misc_feature: Incyte ID No: 700353894H1
  unsure 38, 47, 63, 66, 72, 80, 83-84, 87-88, 99, 101, 106, 112, 118, 126, 130,: a, t, c, g, or other
cagccctcagttccataacctatgcagtatcagatgcnacacatggntcctgggttccggtancangggagntgccaggnatnnctnnagccaacaatncntgggnagcatntacggntccagagnaganaaaggnaacgaanggtttantttcanagctgnaccnttggaccgatcagctaanttatgtnacagtagtgctggnnacttagtgatgggnccatnagtgcctcttctgatggctatacntccatgnatcacncctatc

SEQ ID NO: 4366 - DNA, 270 bp, Zea mays
  misc_feature: Incyte ID No: 700353895H1
  unsure 28, 49, 59, 61, 85, 92, 95-97, 111, 114, 118-119, 121, 123, 127, 132,: a, t, c, g, or other
aactaaagttaaaactgctagatctgtnagaacatctcagtgctatatngacttgaatnangagccaaagagagaaagattaagntcatttnaannnatcattattggatnganctanntnanattnctgcnctnccaatatcancatnttcccttaaaatgaacttantcttggaagagcagcaatctgaaatngatcaaganaataangatccattgttgagtnngnaaganggtaactnctttganntttgagctggtggaagancc

SEQ ID NO: 4367 - DNA, 265 bp, Zea mays
  misc_feature: Incyte ID No: 700353896H1
  unsure 2, 7, 57, 62, 81, 92, 111, 114, 117, 143, 169, 208-209, 214: a, t, c, g, or other
gngcggncccgttctgcggcgaactttttcttaatggtaggggcggtgaacgttgtngactngcatctgtctcctccagcnccctataagcnagagcatccgccgtccgtngcngtngctggcgtggtgttcgacgaaatgcnaatctcggcgatgtttgcatctctcnttacattagaggcaacagacaagtagtccttatattgcnntcgtntatgttgttaattgtcgggttggatgaactgcagttgtctttggaggtgca

SEQ ID NO: 4368 - DNA, 269 bp, Zea mays
  misc_feature: Incyte ID No: 700353902H1
  unsure 267: a, t, c, g, or other
gtgtggtacgagccgctgaccaagtccgtggaggacgagtacgcggcgcaccgggctcggatgttcacccttggctggttcctgcaccccatcacctacggccactacccggagacgatgcagaagatcgtcatggggaggctgcccaacttcaccttcgagcagtctgccatggtcaaaggctcagcggactacgtcgccatcaaccactacaccacgtactacgccagcaacttcgtcaacgccacagagaccacttaccgcaangt

SEQ ID NO: 4369 - DNA, 276 bp, Zea mays
  misc_feature: Incyte ID No: 700353919H1
  unsure 30, 74, 76, 78, 107, 151, 175, 262: a, t, c, g, or other
gcgacgtataggggaaacgaatcgccgcanccgcgtgggatgcgatcgccttctttcgcccaatcctgcgtgcntncngccgccgccgtggaacgggcagacggctngacgcattcgccaggcgccagtcgttcggtctttcctctctgcntgaatcggcagatcgctatctcantgatcgccacgacggcacacagttctgttcctgaatcgctgctactgctagcctgctgctggacgcctgaactggacaggctgtgtnccaaattccaatac

SEQ ID NO: 4370 - DNA, 273 bp, Zea mays
  misc_feature: Incyte ID No: 700353921H1
  unsure 20, 59, 148-149, 154, 169, 217, 232, 239: a, t, c, g, or other
gaaatgtaggactcctctanattggatcagactagaggaagacagttctttggacctanacttattcaagaggcagaagaacaagtctgtataatcggggagaacttgagggtagctcaaaccaggcaaaagagctacgctgataatnnaagangaccactggaatttnaggaaagaaatcatgtgtacctcaaggtgtcaccacttcgtggaatgnggagattcaaagttnagggcanattgtcccctcgccttattggacccttcttaatc

SEQ ID NO: 4371 - DNA, 270 bp, Zea mays
  misc_feature: Incyte ID No: 700353923H1
  unsure 148-149: a, t, c, g, or other
ggcaagttctatgtcatcggtgggaaatctgagaggcacaatgagatccttagttgtgctgaggagtttgacttggagagcagcacctggcgcttgatcccagatatggcacagggtcttaatggtggaagtggtgctccacctcttnntgctgttgtgaataatgaactttatgctgctgactatgcaacgaaggaggttaggaaatatgacaaggaaaataatgcatggatcactctggatgttacccgggagtatacatcagttcag

SEQ ID NO: 4372 - DNA, 273 bp, Zea mays
  misc_feature: Incyte ID No: 700353924H1
  unsure 75, 258-259: a, t, c, g, or other
gatgaatctgcagaacgcattaccgataagcaaattatcgagtggaagctgacattacatcaaattgggcttgangtcctacggactgatcgcaccatggtattctatgagaacaaagaaaacctttccaaattatgggatattctagccgtgtatgcatggattgacaaagatgttggttactgccaaggaatgagtgatttgtgctcaccaatgatagttctactaaacgatgaagcagatgcattttggtgcttnnagaaattgatgcgt

SEQ ID NO: 4373 - DNA, 271 bp, Zea mays
  misc_feature: Incyte ID No: 700353926H1
  unsure 263: a, t, c, g, or other
tggattgttgttccagctacctttatcagtgctgcatcgctattctgcatcgaggaagtgggtgttctaatcgaagagccgttccccatgctagctcttgatgccctgtgcaagcagctccacgacggtattaaggatgtgatggagatgcagaactcggttcactcgcgactagttgccaagactgctacggaccacaggggcagtaggcgcgagaacaatggttggcctagctccaaaagagaaggagccaagattgattnagcacgca

SEQ ID NO: 4374 - DNA, 209 bp, Zea mays
  misc_feature: Incyte ID No: 700353928H1
  unsure 36, 63, 114, 134: a, t, c, g, or other
accatgacgacgatgatgataacaatgacgacgacnaggatgacaattacaacgattgccgantggagtgcatcgaggactgcatcgactacgtgcccggcatttgttaccgcnactgcgtctcctactcctgnctctacctgccaccatatagctaccgaagagcagcttgcttccggcgatgcggccacagatgctaccaccatggc

SEQ ID NO: 4375 - DNA, 273 bp, Zea mays
  misc_feature: Incyte ID No: 700353929H1
  unsure 17, 62, 76, 107, 131, 143, 164, 188, 202, 210, 215, 231, 244, 256, 258: a, t, c, g, or other
gatcaataatccgagtngttcgaaaaacaagggaaagtctatttctttggcagtccaggcanataacaatgtccanaagagggaaggtgtaactggttctgggatgnattcaggagtacaaaaagagcatnatgagcaaagancaaaccaaccatttaggactnagtgcaatctccagagaaagaagncatcggcgtctggntctttctnccccngtccttcggcaaaatnatcaggaacaganttcgtttgtgancngaggcaggtgccact

SEQ ID NO: 4376 - DNA, 156 bp, Zea mays
  misc_feature: Incyte ID No: 700353930H1
  unsure 98, 118, 122-123, 132-135, 138, 141, 146, 154: a, t, c, g, or other
caccaacgtgtatgcttacatctcaataatcgctctaattgtttgcattccacctgcattgatctttgaagggcccaagctaatgcagcatggatttngtgatgccattgcaaaagtnggtnngacaaattnnnnagnggncgatncggggggngg

SEQ ID NO: 4377 - DNA, 277 bp, Zea mays
  misc_feature: Incyte ID No: 700353931H1
  unsure 56, 77, 80, 98, 119, 121, 127, 129, 135, 139, 143, 149, 153, 157, 186,: a, t, c, g, or other
cagaattctctcaacctcatcggcggcggcgaagagcgtgcggatcggagatggangacaagcgggtggaggagganagnggcggcgcgggcctcctngagccccgccaacggtgtacntntggctngngctagncgcngcancactgncgcncgcncaggctaagaaggatctaacgggggttanccanaaggtctacttcgatgtcgngatttangcaannccgcagtcggatttncatggggnctttttgggaaattttcctaaganancagag

SEQ ID NO: 4378 - DNA, 274 bp, Zea mays
  misc_feature: Incyte ID No: 700353935H1
  unsure 83, 109, 273: a, t, c, g, or other
gcagaggccatggagatggtgaacctgaagctctacctggagaaccggtgcatcatcgcggagaacgagaggctgcgggaganggccagcgcgctccgccgcgagaacntcgcgctgctccaggacctgtccaagacgccggccgtgccagaggcatcagcgggagctggagctgcgtgagattgcttcctcttgctgcctgctgagcatggagtagctagcttagcttgcgttccctcgctggcgcttgtgctagttgcgtgggcaggacanc

SEQ ID NO: 4379 - DNA, 273 bp, Zea mays
  misc_feature: Incyte ID No: 700353938H1
  unsure 72, 74, 101: a, t, c, g, or other
gtcggattcggaagctcagttattactgaaaagataatacagtacctatggcttctctggacgccgtgcgangngacctcgccctgctgattctgtacctnaacaaggccgaggcgcgggacaagatctgccgagcgatccagtacgggtccaagttcatcagcaacggcgagccagggcctgcgcagaacgtcgacaagtccaccagcctggcccggaaagtgttccggctctgtaagttcgtcaacgatctgcacgctttgatcagccctc

SEQ ID NO: 4380 - DNA, 272 bp, Zea mays
  misc_feature: Incyte ID No: 700353941H1
  unsure 98, 112, 141, 205, 239, 260, 265, 267: a, t, c, g, or other
gttgctgtagatggactactggaggatgcacaagacgaatgtacgatctctaatcttgaattctattctttgttcctactctatacatcctgggatanatccttttcttttncttttgaaagaagtcgttgagtaattttntttacagaaaagtttttccagcttcgggtcattaacagtcatttgtgattggttacagggaaanatgctggagggacgaacacaagatactgactttnaggatggtaattctcccccanctgantngcagt

SEQ ID NO: 4381 - DNA, 269 bp, Zea mays
  misc_feature: Incyte ID No: 700353943H1
  unsure 80, 136, 174: a, t, c, g, or other
gtcaatcaccaaagaggacctcgagaactacattgcaactcattatacagcttctagaatggttatcacagctgcagganatgttaaacatgaagacattgttgagcaggcaaagaagttgttcagcaagctatcnactgaccctacaacaacaaacatgttggtctctaagcngccagcctctttcactggttctgaggttcgaatcattgatgatgacatgcccctcgctcaatttgctgttgctttcaatggagcatcatgggtgg

SEQ ID NO: 4382 - DNA, 267 bp, Zea mays
  misc_feature: Incyte ID No: 700353945H1
  unsure 6, 23, 50, 68, 77, 81-82, 86, 90, 94, 96, 121, 126-127, 142, 162, 174,: a, t, c, g, or other
ccaagnagatcaagtcagcaganggtgtggccgcccatttcgatgtcaanaagatctacatcgttggnatcttgcanaganntcantggnactnantttacaaacttcatggagcttgctnagaanntgaggtctgattatnactgtggacacactttgcangcaagccacctnccacgtggtgatgcatctntggaggngccattgatcaggctnctgaagccntttnatgancttgttgttgacagcaggatgttgtgttgctnc

SEQ ID NO: 4383 - DNA, 54 bp, Zea mays
  misc_feature: Incyte ID No: 700353949H1
  unsure 34: a, t, c, g, or other
cagcaagaagacgacccttggtacttggtaatanatggcagcacctccgtccat

SEQ ID NO: 4384 - DNA, 269 bp, Zea mays
  misc_feature: Incyte ID No: 700353951H1
  unsure 96, 188: a, t, c, g, or other
ggctactaatgtcgagaatcctgatgttagtactcttaagttgacttctgtgtacattgcaattggaatcttctcggtgttcttcttgctatttanatcattagcagttgttgttcttggggtcaagacatcaagatccttattttctcagttactaaactcattattccgtgcaccaatgtcctttnatgattctacccctcttggaagaatacttagccgggtttcttcagatctgagtattgttggaccttgatattccgattggc

SEQ ID NO: 4385 - DNA, 270 bp, Zea mays
  misc_feature: Incyte ID No: 700353952H1
gagcaaccctatctcttccccactccgctcctcgctcaccctctcaccaaatccttctcctccgcgccgccacagccgggcgcgcctccccgatcgagatccaggagatatgcctcgttatgatgatcgccatgggaatacacgcttgtatgttggaagattggcccctcgcacccgttcccgcgacctagaatatcttttcagcaaatatggaagaatacgtgaagtggagttgaagcgtgactatgcattcattgaattcagtgaccc

SEQ ID NO: 4386 - DNA, 268 bp, Zea mays
  misc_feature: Incyte ID No: 700353953H1
  unsure 20, 23, 163, 267: a, t, c, g, or other
atgcatcttacatggtcaanaanataattcctattctgaactacttgctcgtgttgatcagttttgcctagtcccagtaccatacaaagatgttcagctggatataaacatttctccacgtctctcttctgaatacataagttatctggaaaatcctgttganttgctcaatgaagcggcaaaagctgcagagaaagatctatggaaaatcctgttgagttgctcaatgaaggcttttgcgaatcacttgaagcgttagtacttttnt

SEQ ID NO: 4387 - DNA, 271 bp, Zea mays
  misc_feature: Incyte ID No: 700353954H1
  unsure 35, 66, 71-72, 105, 116, 174, 176-177, 224, 227, 245, 260: a, t, c, g, or other
acttcaccaaggacttcaagggcagcgtgcccggnttcaaggtcgacaccgtcgacaccaccggcnccggnnacgccttcgtcggctccctcctcgtcaacgtcnccaaggacgantccatcttccacaacgaggagaagctccgcgaggctctcaagttctccaacgcctgcngnnccatctgcaccaccaagaagggcgccatcccggcgctgcccacggtngcnaccgcccaggacctcatngccaaggccaactanatggccgcacg

SEQ ID NO: 4388 - DNA, 270 bp, Zea mays
  misc_feature: Incyte ID No: 700353955H1
  unsure 171, 244, 259: a, t, c, g, or other
caaataaacaagcgcacacgaacaaatacctcgccgccaataatggcctccagatcctccattgtgctcgccacggcgatggctagctacactattcgcggttggtttgtgcaccaccccgctcaccttccaggtcggtaagggatccaagcctggccacctgatcctcancccgaacgttgccaccatatccgacgtggagatcaaagagcatggtggcgatgacttctcctttacgctgaangagggcccgaccggnacctggacatc

SEQ ID NO: 4389 - DNA, 238 bp, Zea mays
  misc_feature: Incyte ID No: 700353959H1
  unsure 151, 227: a, t, c, g, or other
ccaagggcaccgtggtggtgacggccaccaacgaggccccgccgccggtgagcgggcagaagggcgagcactttgacctcaccataccggcgttcctcaagatcgccgaggagaaggccggcatcgtgcccatcacctaccgcaagtggcntgcgagaggaaaggcggcatccggtacacgatcacagggaaccagcacttacagcgaggtgaagtgaccaacgtgngcggcgccgag

SEQ ID NO: 4390 - DNA, 268 bp, Zea mays
  misc_feature: Incyte ID No: 700353968H1
  unsure 23, 63-64, 69, 71, 73, 78-80, 110, 156, 188, 191, 228: a, t, c, g, or other
cgtgctccgcccaggcccctttnctccaccgcgggcgcaaaccctaaccctacagccgctcgnnccgcngngnctgcnnntggcgccccccgtgtgagtgtgtgtgagangcagagacctagaggccgctacccggggaggagagggagggagaangagaggctgatagatgtataagcaggggggancgngggtaggggctggtctggaccggaaacggatcagcgncgcgctagacaagcaccttgagaaggcggtcgcatcgccg

SEQ ID NO: 4391 - DNA, 60 bp, Zea mays
  misc_feature: Incyte ID No: 700353970H1
  unsure 5, 14, 17, 19, 30, 51, 58: a, t, c, g, or other
tgcgnaacgctttnatnangacggaactgnttgggcatgtcaccttggacntgctccnca

SEQ ID NO: 4392 - DNA, 92 bp, Zea mays
  misc_feature: Incyte ID No: 700353971H1
  unsure 4, 18-19, 28, 42, 44, 56, 66, 79, 85: a, t, c, g, or other
aganctggcagtaactcnnagaggaatnataacgacttggtnanacggccacagangcttagtgtntctgcttgaaggncatcgncagacag

SEQ ID NO: 4393 - DNA, 268 bp, Zea mays
  misc_feature: Incyte ID No: 700353973H1
  unsure 10, 17, 64, 117, 147, 166, 170, 175, 192, 216, 223, 233, 245: a, t, c, g, or other
gccgtgcgcngacttcntcacccacaacgaggtgccaccgatgccacccacggtacgcctgttntgatggtctcaggtcactcgtcaccaacgcgtccatctgtctatgccatatcntcaacggtaacatcaacaagctcctaccgncgcccatgatacccgtgcncatngtggngctcccccgcttttgtnttgtccgcttcccacgagccatanttgcgcnggtgtatcanagggcatttgcnaccgatgaaccctccgcctccac

SEQ ID NO: 4394 - DNA, 265 bp, Zea mays
  misc_feature: Incyte ID No: 700353974H1
  unsure 13, 19, 23, 86, 92-93, 98, 115, 122-123, 127, 129, 131, 143, 161, 170,: a, t, c, g, or other
gtgactttttccncccttnactntttcaaaatggttttgaaatggggtcttaaaggtaagcgccctacatacatgactgaaacttngtgagnngtctnatatttgaatggacccntaatganntatntngnatagaatgaagncctgtctctgtgagagancgtgcctcntcactcatttgtctctgtctgtnttcatagccatcaatatagtaacatntttnctatattcttgagtacncttgaagaaaganatccgttttcta

SEQ ID NO: 4395 - DNA, 119 bp, Zea mays
  misc_feature: Incyte ID No: 700353975H1
  unsure 7, 21, 26, 55, 67, 73-74, 92, 100-101, 105-106, 116-117: a, t, c, g, or other
gccaacnatacaacacaaccntgctnccccatctactggagttggttcttacttnaagccccatggncgccgnngcttgtaagcttggacantgggaggnngtgnnatgaggaganntt

SEQ ID NO: 4396 - DNA, 266 bp, Zea mays
  misc_feature: Incyte ID No: 700353977H1
  unsure 255: a, t, c, g, or other
aacaagcagtacggtatgatattacagcgggtactgttgtgttaggatgttgcaagcagacttcatgaagtcataacaaggcgagtggaaattcttacaagaacatgtcagtataagtaaatgatctcctgattttatgatttgaagggtgccgagtgccttttgttcttctaccgttacgtgttcagagtgttcagtatctattctacgacaacctttgatgttagtagagcttgcacctgttccaactttaanttccacgctac

SEQ ID NO: 4397 - DNA, 272 bp, Zea mays
  misc_feature: Incyte ID No: 700353980H1
  unsure 118, 124, 132, 151, 190, 193, 210, 213, 232, 238, 247, 250, 253, 256: a, t, c, g, or other
cccggtcgtcctcatcccatctccatcgaactccatccccacgcgcgcctccttggacaccatccccacgaggtccatccccacgcacgtctcctccaccgccatctccgcgagcacntccgcntccttccngaatgctcctgttgatctncgacaaggtttgcgcggggtaggcaaaaccgcctagcancantcgagccctcccccctnctnctgcgagtcgcgggaaccnaagagngggtttatnatnganttnttttagaaaaggcaat

SEQ ID NO: 4398 - DNA, 267 bp, Zea mays
  misc_feature: Incyte ID No: 700353983H1
  unsure 65, 67, 71, 181: a, t, c, g, or other
gggagacgggagaaccagggagcggaggcgtgcgtgctgcggcctgcggcctggcaggaccagananccgnggactgagctagggtctgggactgggaggcggagatgtcgacgccggctaggaagcgcctgatgcgggacttcaagcggttgcagcaggacccgcccgccggcatcagcngcgcgccgcacgacaacaacatcatgctctggaacgccgtcatattcgggccggatgacacgccgtgggacggaggcacgttcaat

SEQ ID NO: 4399 - DNA, 265 bp, Zea mays
  misc_feature: Incyte ID No: 700353986H1
  unsure 9, 90, 180-181, 192, 217: a, t, c, g, or other
gaaagcaanacacaaaagcctgttgttgcattcattgctggacttacggcacccccaggccgtcgcatggggcatgctggagctatcgtngcaggaggaaagggtactgcccaggacaaaatcaaggcactcagagaggctggtgttaccgttgtcgagtcaccagcgaagattggttcnnccatgtttganatcttcaaacagcgtggaatggtanaatagacacagtggtacagtagagagacattgagaaaccgctttttga

SEQ ID NO: 4400 - DNA, 113 bp, Zea mays
  misc_feature: Incyte ID No: 700353989H1
  unsure 112: a, t, c, g, or other
gtgtttcagccaagttgtttagcgggacatctcttgtctgatcttcctgctaaatagagttggactcctatatatagaggccttccggcacatataatatacgtcggaccant

SEQ ID NO: 4401 - DNA, 128 bp, Zea mays
  misc_feature: Incyte ID No: 700354111H1
  unsure 11, 26, 28, 38, 53-54, 60, 66, 69, 73, 82, 96, 100, 122: a, t, c, g, or other
cacaaaacatngctgtgaatgtagtnancatgtggtcntccatgcgggcacanngtgtcnatcggnttnggcntcagatgtnctacactgagagcncgcntgggtgcggtcctgcccaaagncccccc

SEQ ID NO: 4402 - DNA, 295 bp, Zea mays
  misc_feature: Incyte ID No: 700354127H1
  unsure 32, 38, 55, 72-73, 80, 90, 92, 100, 128, 138, 151, 184, 231: a, t, c, g, or other
gggcagggactggatgacctttcacattcccntaagtntgccgttggtactaganttcaagctgtgtggaanngaagganggaggatggnanaatgcaancgttgaagctttgaccaccaagtggatnctatgtaggnctacgatggctgngggaacagtgaagaggtggacccagataatgtnacgctgcttgaggaagaagcagctgatgccttgggacaagctgaaanggaagctggagctacaaaaatggcaataaagaggaaattgaacaagcagcaacatctggttttc

SEQ ID NO: 4403 - DNA, 297 bp, Zea mays
  misc_feature: Incyte ID No: 700354129H1
  unsure 33, 88, 115-116, 120, 253: a, t, c, g, or other
cacaaataaatacatcgctcactagattgccangagcaatggcctctaggtcatccattcctgcttcgtcatggtggcgctggctacnctatttcgtggttggttcgtgcaccannccgntcaccttccaggtcggcaagggctccaagcccggccacttggtcctcacccccaacgttgccaccatctctgacgtggagatcaaggagcacggtggcgacgacttctcctttacgctcaaggagggtccgantggcacttggacgcttgacaccaagaccccgctcaagtaccccc

SEQ ID NO: 4404 - DNA, 107 bp, Zea mays
  misc_feature: Incyte ID No: 700354142H1
  unsure 12, 21, 30, 63, 67, 73, 80, 90, 97, 100, 106: a, t, c, g, or other
gagggcttcaanaccattganattacgganaagttctactgccgctcaaaggacatatatgantccntgatgnctgtagnacagagggcnagggttnacncagatna

SEQ ID NO: 4405 - DNA, 292 bp, Zea mays
  misc_feature: Incyte ID No: 700354143H1
  unsure 2, 6, 13-14, 32, 47, 54, 57, 71, 82, 104-105, 109, 116, 124, 128,: a, t, c, g, or other
cnacgnagcacgnnggagcagctgtagcagtngagctcgacatcagntccattnctngctcactttgcagnacctcgccagntacactagttacactctgcagnntgcngtcgaantctctcangttnggnnatacctgctcccttccaaatcaacgcncntccactngactctactactgtgtcgtgngcgcgcttcctcntgnttccgtcgctgggtgcgtgctcagttncgtcgcgtgccaatggtcgatagaatgagcagtttggtcgtccccatctcgcngtggnta

SEQ ID NO: 4406 - DNA, 213 bp, Zea mays
  misc_feature: Incyte ID No: 700354144H1
  unsure 9, 28, 48, 59, 66, 68-69, 86, 88, 94, 105, 114, 140, 142, 187, 196: a, t, c, g, or other
atccatgcntacacacagcacggatgtnaatatgtgatatgatgagcnctcctactttngatcatngnnaattgttattcctcaancnactacnaaagtagagantgctcatcntatcacatatgcacagcctgcttacncncagcacgcacatcattatttggtagtatgtctgggaataacaagntcacaattntcaaaagttgacaattc

SEQ ID NO: 4407 - DNA, 295 bp, Zea mays
  misc_feature: Incyte ID No: 700354145H1
  unsure 19, 21, 28, 31, 49, 56, 65, 67, 84-85, 90, 98, 124, 197, 208, 249, 259: a, t, c, g, or other
gtcgaggatgctgtccgcncngcccttnagnaggacgttgcgagtgacnacgaggnccttgatgncnatagaccttgatgaatnngctcngagcatgnagtggaatatgccccagccgaacttngctgtcaaaacagttgaagccctggctgcgccacccaaagatacagaaaggcagctgtctaaaaaggagttgnaaaagaggganctagcagaacttgatgcagtattggctgagctgggactttntggggaatcnaccagcgctgcacaggatgctgagaaggaaggtgcc

SEQ ID NO: 4408 - DNA, 286 bp, Zea mays
  misc_feature: Incyte ID No: 700354191H1
  unsure 29, 34, 48, 50, 53-54, 61, 63, 65, 86, 105, 109, 114, 128, 131, 143,: a, t, c, g, or other
gtgagagctggtaagatggatcggttggnggagngaaacattaagaangnggnnaaggagntngnaggaggcgggaaaggaataanagcggcaggaggaggcggngganaggantacccaggagccgnagnaaggtcaaggantcagactctcantcnacaacggcagncgcacagcgncangtctgnaatgttgccgatgtngaacccttcagctantcccacacagcttacaattttctatggtggatcagtatgtgtgtntgactcggtgccaccagnaaagg

SEQ ID NO: 4409 - DNA, 237 bp, Zea mays
  misc_feature: Incyte ID No: 700354194H1
  unsure 9, 22, 40, 53, 57-58, 64, 77, 84, 99, 110, 113, 124, 147, 162, 173, 178,: a, t, c, g, or other
atcgccatngcacaccgactcnccgtgtcccctcattctngcccggcaccgtngggnncggtgngaacagacagacncatcacnatgcgactcggcgtngggtggccgtnagnacaagtcagcncaattccaggagtcagtcgaagnaacttccggttcatnacgttcaaganaacgncancgcncaggtagtgnngcagntngnagcgncgacactacgcgnttcaccggnncatc

SEQ ID NO: 4410 - DNA, 118 bp, Zea mays
  misc_feature: Incyte ID No: 700354206H1
  unsure 9, 41, 47, 60, 69, 75, 82, 96, 112, 114: a, t, c, g, or other
gagcgaggnaggaggccaccctgaatctcaatggccatganacaagntcagcaccaagangccatgggncctgtnctttctnccttcgggccgtgnccctccagggggaggnancctt

SEQ ID NO: 4411 - DNA, 112 bp, Zea mays
  misc_feature: Incyte ID No: 700354209H1
cgtttaagacgaactctacagctggagataccaaggagctgaccgatcccaaggtgtctggccatgatttggcctccgttgggtcgaaaaggaaaaggcaaatgattgagca

SEQ ID NO: 4412 - DNA, 113 bp, Zea mays
  misc_feature: Incyte ID No: 700354212H1
  unsure 18, 32, 40, 55, 78, 90: a, t, c, g, or other
tccccatccgcacctctntccatctccctgcncctccgcnttcttcttgatccanccaagccagggatccgcaatgtncggatccggagngagcaccacttcgaatcgaaggg

SEQ ID NO: 4413 - DNA, 114 bp, Zea mays
  misc_feature: Incyte ID No: 700354214H1
  unsure 53, 63, 65, 72-73, 77, 82: a, t, c, g, or other
gctaccctcgttcgtcgtctcactcaccccgccttcacgcctccctgcaccanataaggtccngnccttttnngganaattnacaggggggacaggagatcagcggccatggct

SEQ ID NO: 4414 - DNA, 94 bp, Zea mays
  misc_feature: Incyte ID No: 700354218H1
  unsure 60: a, t, c, g, or other
gcaaaagatggatattcaagaagcagaaacacttgtaaaacagtggcaagacataaaatnctgaagcttcttggccctgactatcaaaactgac

SEQ ID NO: 4415 - DNA, 109 bp, Zea mays
  misc_feature: Incyte ID No: 700354219H1
  unsure 47, 62, 87, 91, 98: a, t, c, g, or other
cgatcatcgacggcgactaccacgaatcggtcgaggaagccaacgcngcgtaccgccagctncagcgcctacatcgactacaaagcnagtncgagggncgtccgcggag

SEQ ID NO: 4416 - DNA, 188 bp, Zea mays
  misc_feature: Incyte ID No: 700354226H1
  unsure 100, 139: a, t, c, g, or other
gtgggaaggaggctgtcgatggcaccgctgcctcctgcacgatctgcctggggtgtcggcaagggcaatattggcttgtcagtatggcacacgaggagangaggctctcggggctccaagaggccgacggcggccggcnggcatcgtctcgtcgcggcgtcgtagatacatgccgcaccggttcttgt

SEQ ID NO: 4417 - DNA, 153 bp, Zea mays
  misc_feature: Incyte ID No: 700354228H1
  unsure 145-146: a, t, c, g, or other
gtttcgatggggcagtttgcatttaccacagcagaagcagggaactaccttgcctgcttctcaattgatggtgaaggacagagggttagtggtgaagctaaaccttgactggaaaattgggctggctagtagagactgggactcnnttgccaa

SEQ ID NO: 4418 - DNA, 104 bp, Zea mays
  misc_feature: Incyte ID No: 700354229H1
  unsure 49, 91: a, t, c, g, or other
tctcgatcacggcgacccggtcatgtacgaggagttctggcgccgcganggagacagcgcctcgatcctgatccccgcgtggcagacgaanagctacttctcca

SEQ ID NO: 4419 - DNA, 173 bp, Zea mays
  misc_feature: Incyte ID No: 700354234H1
  unsure 43, 62, 66, 70, 73, 100, 141, 148: a, t, c, g, or other
catgaagagccagcattccagaattttatgcaagaatcgatgngcacaatactggaagaganaccnatanatnaggagactttagcacacttcacttgtntctagaagtccagaattttggacctccacgtgaaagaactnttcttanctctggaactgggggctccataagg

SEQ ID NO: 4420 - DNA, 108 bp, Zea mays
  misc_feature: Incyte ID No: 700354235H1
  unsure 18, 52, 99: a, t, c, g, or other
ggaccgtatccgcaagcntgctgacaactggcaccgggcctccaggggcttncctggtctttcaatgccgttggtggtgggcactgggctctgggcctnggtttctcc

SEQ ID NO: 4421 - DNA, 97 bp, Zea mays
  misc_feature: Incyte ID No: 700354239H1
  unsure 89-90: a, t, c, g, or other
caaagccacaacacatacaggaaagcaagcaagaatcatcggaataatggcccgtgcatgcgtgttcctcgtcgtgctcctcctggccnncatcggg

SEQ ID NO: 4422 - DNA, 137 bp, Zea mays
  misc_feature: Incyte ID No: 700354244H1
actggtgatggggagtgaggggacgagcgtttcgtgtgcaggtgcccctccccgatcaagcgaagaacagaggggagtggcgcgtggtggaagggaaggagatgcgtgcagtttttttacagggggtataaaaacta

SEQ ID NO: 4423 - DNA, 194 bp, Zea mays
  misc_feature: Incyte ID No: 700354247H1
gcgatgccagaagcagcagctgccatacgtcaaccaaaggcccttccaaagcagccctccagcgatgcctctgaggcagctggtgagatgcaggtgaatggttcaagtgcatcggatgctgtgactgaggttcctgttaatggtgctactgcaagcgatgctggacgcatgagatccaagaacatcagtggcgg

SEQ ID NO: 4424 - DNA, 291 bp, Zea mays
  misc_feature: Incyte ID No: 700354250H1
  unsure 9, 22, 50, 57, 219, 223, 270, 281-283: a, t, c, g, or other
tctgccgcncctctccggaganatgtctgagcatctctttgaggacaccntcgtcgncactagactcgaccctgatggcaaaaagtttgatagagtttctcgtgttgaagctcgcagcgagcagttagatatgtatatgcagctagatgttgccacagatgtttatcctatgcatgctggcgagaaatttaacatggttatagcgcctactctgaattngganggcacccctgacactggctactagactccaggctggcaagaaaaacnctgggcagacnnnttatgagt

SEQ ID NO: 4425 - DNA, 311 bp, Zea mays
  misc_feature: Incyte ID No: 700354251H1
  unsure 27, 215-241: a, t, c, g, or other
cctatgccaacactccgaatggagagncggttggctttggactataatgacaacacctttctgcactcatgcaagactatgttatactcacatccggaggcctccagagcactttgcagatcttgtcgctggccactttcgggtgcatgggcacacgattctcgcggcatgcaagcactacatggcgggtaatgatattgggtcagtggtgccannnnnnnnnnnnnnnnnnnnnnnnnnntcatcagaacacaagagcggtgatgctggagcatcgggtagtgcaccagagctaggagtgatcaaggcaa

SEQ ID NO: 4426 - DNA, 307 bp, Zea mays
  misc_feature: Incyte ID No: 700354252H1
  unsure 150, 155, 157: a, t, c, g, or other
tacaagcctgacttcccatgttcctgagcagcagtttcctctactgcacaaccagggccagagtgagcaacaaccaagatattcttgtgagcgtgatggaaattacattttagttctctgccttcgctgtcttaagctccctgaagaatngtctncnactttgctgggatgatgagctgctgccccgagacaacaacagtcagccagaccaaaatcacttaaatagttttaacaatgtattaagttttgtcttgttacctgctgtctggcgtctgccatgttttgcctagactcggttattatcgag

SEQ ID NO: 4427 - DNA, 312 bp, Zea mays
  misc_feature: Incyte ID No: 700354254H1
  unsure 9, 12, 29, 39, 54, 60, 72, 80, 100: a, t, c, g, or other
caaataacnttntttcgtgcgcgcctgtnatcgtccggntcagagccgccacancctcgncgtcggattctntcccctcncctttcgtgcctcacgagcnacgaacgtcacgaacccctgcctgccacctcctgctactatcggcgccggagccctcctctggtctcaccgtgcaaatccccaaccccgaggcagacgcaggccagcccctgtgatggcacagaccaacggcaagaccccttcagtccccctgtttcccaagaaagggttgtgataacaaacaagcatggtgagaggcttgtggggctgctg

SEQ ID NO: 4428 - DNA, 300 bp, Zea mays
  misc_feature: Incyte ID No: 700354260H1
attgattcggctaggagccaagactcttgtggttccaggaaacctcccaattggatgcatcccagactatctgatgatattcaagagcaataaggaagaggattatgaaccacagacaggttgtcttaggtggatgaacgagttctcacagtatcacaacaaggttcttgtggagcagctcaagaagcttcgcaagcttcatcctggagcaaccatcatctatgctgattactatggagctgctatggaaattttcctttcccctgaacaatatgggatcgaatatcccctagtggcttg

SEQ ID NO: 4429 - DNA, 132 bp, Zea mays
  misc_feature: Incyte ID No: 700354261H1
  unsure 27, 32, 43, 66, 93, 114-115, 128: a, t, c, g, or other
gaaaagctctgacgtgaacatcactangcatncctgtctctantgagaaccgcccctgcttatttnactgatcagccgcggtttctttaactnctggacattcggggcacaacnnagggtcaggccanatga

SEQ ID NO: 4430 - DNA, 304 bp, Zea mays
  misc_feature: Incyte ID No: 700354263H1
  unsure 187, 240, 265, 270: a, t, c, g, or other
gagactccatatcaacaagtagcatattttttactaagaagaagagaagggaagattcatatttttctggcttgccaatctccattatcgaatcatggtaccaacgtgatggctatgtgaaatcaatggctgacctaattgaaaaagagctatctgccttttccaatcctgaagaggtaatgatatncttcagtgcacatggtgtgccacttacctatgttcaggatgctggagatcctnacagagatcagatggaggattgtanttctntgatcatgggggagctgagatccagaggaatctt

SEQ ID NO: 4431 - DNA, 178 bp, Zea mays
  misc_feature: Incyte ID No: 700354265H1
  unsure 35, 149, 174: a, t, c, g, or other
ctacaaaccacaaagacattggaacactatacctnttattcggcgcatgagctggagtcctaggcacagctctaagcctcttattcgagccgagctgggccagccaggcaaccttctaggtaacgaccacatctacaacgttatcgtcncagcccatgcatttgtaataatctncttg

SEQ ID NO: 4432 - DNA, 299 bp, Zea mays
  misc_feature: Incyte ID No: 700354271H1
  unsure 7, 82, 90, 107, 136, 157, 177, 237, 255: a, t, c, g, or other
gtatgtnccgtatgcacagcgaaaaggacaggagccaagaaggaagaatcggcggcagccctggtggtgctgctggaggcantggcgggncgttcgacatctccaanctcggcgcgaccagcgacggcaagacggnctgcacaaaggcagtccaggncgcgtggacgtcagcgttcnaacgaccggaagcgccacggtggtgatccccaaggggcgactacctggtcggccctcttnacttcactgggccatgcnagggcagcagcatcgccatccagctggatggcaacctgctggat

SEQ ID NO: 4433 - DNA, 300 bp, Zea mays
  misc_feature: Incyte ID No: 700354274H1
  unsure 44, 60, 75, 92-93, 132, 187, 210, 222, 241, 292: a, t, c, g, or other
ggcgcacggggcgaagatggcggcggacgacaggaggcgctganggagttcgtgtcggtnacgggcgccgaggangaccggggcccgcttcnntctcgagtcggccggctgggacttgcagatcgcgctagnaagcttttatgaggacggaggggatgaagacattgtgaccatttcgcaggcaacncccagttcagtgtccagaggcanagcccccagtgnataattagagtgacatccntcagagacctcattcatgaccaagatgaaggtgaaggaggaagaggaaggncagaggag

SEQ ID NO: 4434 - DNA, 295 bp, Zea mays
  misc_feature: Incyte ID No: 700354276H1
  unsure 14: a, t, c, g, or other
gccgaccgccggcnagcccctcctcctccacgacacgcgcttccccggctatcatggattcagatccatcatcacagaacccaacagatatgactgcatttgtccagaacctccttggacagatgcaaacaaggttcgagtccatgtcgcagaacattgtgtcaaagatagatgaaatgggaaccaagattgatgagctcgagcagagcatcaacgatctcaaagctgagatgggcatgagacgccggtcaagaagcctgatgagccaaagcctgctgactctgcctaacttggg

SEQ ID NO: 4435 - DNA, 296 bp, Zea mays
  misc_feature: Incyte ID No: 700354277H1
  unsure 32, 63, 163, 177, 272: a, t, c, g, or other
gagctggggcagtgaagtggatatcactgaangagataggaagccagactacactgcttacgntgccatgatccctcagtgcataaaggaggaagacaccccttcagataatgatagtggcatctgtatgagcccagagtcctatctggggtctcctcagcanagcccctctaccangggctctccaaataggagcctcccatctccaggtgttctctgtgggtctgaccgtcccaaaccttacgatcctcctggagagaagatggtagcancaaaagtaaagggtgtgaaactcg

SEQ ID NO: 4436 - DNA, 240 bp, Zea mays
  misc_feature: Incyte ID No: 700354281H1
  unsure 196, 201, 203: a, t, c, g, or other
gatttggaggacatgaaaatggagctacaggccagaagacagagggaggctgctttggaagctgctttggcagagaaggagcttctcgaagaagagtacaagaaaaagtttgacgaggcaaagaaaaaggaactatctctggagaatgatctagcaggcatgtgggttctgttgctaagttgaaaagaggagcttnagcananctgatttgatgttgacgaccgaactgttaacctagct

SEQ ID NO: 4437 - DNA, 145 bp, Zea mays
  misc_feature: Incyte ID No: 700354283H1
  unsure 43-46, 55, 102, 134: a, t, c, g, or other
aacttccatgaactttctatttcgctttgctgtaagaacaaannnntatggtgtnattggtgcatgcagtgtgctgttgcaaaagaaagaaagttgtgctcngttaatgtcatagagagggagttcgctattcncttatctgtaa

SEQ ID NO: 4438 - DNA, 293 bp, Zea mays
  misc_feature: Incyte ID No: 700354285H1
  unsure 16, 33, 40, 59, 74, 77-78, 89, 91, 103, 148, 160, 165, 175, 190, 218,: a, t, c, g, or other
gcccgggctgcctggnactgttggcactcacanacctggngcccctgggtgggtggtgnggagaggcgctggcncanncggactctctngnctcccacccgangctgctttcccctgtgggatctcaggggctgtttgaggatatatnttcactttgtgnttatntcactttagntgctgatgatttgtntttgtatttttaatgggggtagcagctngactacccacgttctcacacccaccgtccgccctgctcctccctggnctgccctngccctnaggtntgggggctg

SEQ ID NO: 4439 - DNA, 289 bp, Zea mays
  misc_feature: Incyte ID No: 700354287H1
cgaagatgttcgcaatggatgggtacttcttgaagtgcttgacaaggtgtctcatggatctgtcaattggaagttggcatcaaaacctccaattaaattgccatttagaaaactggagaattgcaatcaagttgtaaaaattgggaagcagttaaagttttctttagtaaatctagctggaaacgatattgttcagggaaacaagaaattgattgttgcacttctgtggcaatgatgagatcaatatcctccagctgttaaacaaactgagatccactcccaagggtcg

SEQ ID NO: 4440 - DNA, 292 bp, Zea mays
  misc_feature: Incyte ID No: 700354288H1
  unsure 6, 42, 111, 133, 198, 205, 243, 249, 253: a, t, c, g, or other
cttttnttagttgcttctcaagtcagaaaacttttcaggaangtttccctgtgcatttgcaccagatgaatgtttgatgctatgaaaagctttccatatcatcaaaactantttgtgtagatttttgcatganaaaaatcataaatttccctcaaaatagactgtgttgcagtacacaagttgccataatagtataanacagtgnaatgtgcttaaaaggccatccttttcatttcagagatnacatanaganctttgcatgaggtaaatctacagcatagttcatttttag

SEQ ID NO: 4441 - DNA, 83 bp, Zea mays
  misc_feature: Incyte ID No: 700354289H1
  unsure 18, 27, 72: a, t, c, g, or other
cgctctctaccgtccganaccccaagnaccagcgcggcggcgggggcggcggcgaccatgggtgtcggaaanaacaagaggtt

SEQ ID NO: 4442 - DNA, 120 bp, Zea mays
  misc_feature: Incyte ID No: 700354290H1
atcatctgtgaggaggatattttaaatactgtaaatgataacagttaatgatatacacatttagactgagttgcacactggcagggagaaccaaaaacattacttccatacttgtgtcat

SEQ ID NO: 4443 - DNA, 291 bp, Zea mays
  misc_feature: Incyte ID No: 700354291H1
  unsure 280: a, t, c, g, or other
gaccaacgacctgtagaacagattgaggacacatggacatggcggaggaggaggcggcggcaggagcaggaggctcatcgtcatcatcggggaagccggtgatggtggtgggcatcgacgacagcgaccacagctactacgcgctgaactggacgctgcagcacttcttcgtcgccgggcagccgcagcagtaccagctggtggtgctcaccgccaagcccccggcgttcctccgttcatcggcatcgccggcgtgggctccgccgagctgctgcccaangtggagaccga

SEQ ID NO: 4444 - DNA, 293 bp, Zea mays
  misc_feature: Incyte ID No: 700354293H1
  unsure 43, 80, 121, 180, 292: a, t, c, g, or other
caaagtatagcatcatcacatgcatgcaaaaccgttcaagggngcaagcaagaggccatgttcaaccccttgagcatctncatctcacaacgagcatgctcttccacaacaaaggaatcangattcaactgttagaaatttacccaactctaagtttcctgtcgaaactgcaccatggangcaacaagaaaggattgtccttactcgcaaatgccaaagggatcaaaaggagcccacggaagagaacaacctgctggcatcagtcatcagtggacatagagaagcggctcang

SEQ ID NO: 4445 - DNA, 291 bp, Zea mays
  misc_feature: Incyte ID No: 700354294H1
  unsure 78-96: a, t, c, g, or other
aagagggatcggattggaactcgatcggaaggaaggtcctgcaggccggctggccggtcgtcgattcgaggaaccaannnnnnnnnnnnnnnnnnngacgacaccaaccatgatacggaggacgacggtgtgcctaggcctgctgcttctactactggcggcgtcgactgcgacggcacatttctcgatcggcgacgtggacgagtacttgaacaggcgcacgcaggagtcccgccacaggaaccacggcggcgcgcagatcaatgacctcatctccagtgctgcgcgttc

SEQ ID NO: 4446 - DNA, 292 bp, Zea mays
  misc_feature: Incyte ID No: 700354295H1
  unsure 233: a, t, c, g, or other
ccggtacgctgtccatggctaactacgggcccgactccaatggctcccagttcttcatcaccaccgtagacgaaaaccggttgcccaagaagctggacgggcgccacgtggtgttcggcaaggtggtgaaagggatggacgtcgtgcgcaagatcgaagccgagggccagctcaccggcgtgcccaaggccaaggtcgtcatagccaacagcggccagctgccagcgcccgcngccgccggccatcgtgacctctgatcgatgacgaggagaacgatcacgatccatcaatc

SEQ ID NO: 4447 - DNA, 300 bp, Zea mays
  misc_feature: Incyte ID No: 700354296H1
  unsure 122, 216: a, t, c, g, or other
agatcatcagtagccagctcaggagccgagcctggtcagggtagccaagcccatcccggtcctctcccggcgtcttctccctccgcaccgcggcttccggcgatggcgggcgtcggctccgngctgcgtcggcttctacctctccgtctacaactgggtcgtcttcttcggatgggcgcaggtgctgtactacgcggtcctgacgctgcgtttgancgggcacaaggccgtctatgccgccgtcgagaggccgctgccattcgcgcagacagccgccatcaatggagaatcgttcatggg

SEQ ID NO: 4448 - DNA, 314 bp, Zea mays
  misc_feature: Incyte ID No: 700354301H1
  unsure 59-60, 87, 96, 289: a, t, c, g, or other
gtactgaggagcagcagaaaaagtggttaccaatggcttacaagttccaaataattggnngctatgctcagactgaactcggtcctnggctcaaangttcagggccttgaaacaactgccacatttgatccaaagactgatgagtttgtcatccacagtccaactctgacctccagcaaatggtggcctggtggcttggggaaagcttccactcatgcagtggtgtatgctcggctgataactgaaggaaaggactatggtatacaggtttcattgtgcaactgcgaanttagaggatcatcccctcttcctgg

SEQ ID NO: 4449 - DNA, 205 bp, Zea mays
  misc_feature: Incyte ID No: 700354303H1
  unsure 43, 104: a, t, c, g, or other
tcagattgggggccctcaagtttcattaaagcttgttccgttnccttgtcgagtggtaggttgcattttttttaggacaggactggctgattcatgtatatctntactgaaggccatgttttttaaaatttatgatgctgtctacatgttgatatggaaaggattaaatgtggaaaatgatatgtatacctgtgctaatttggcg

SEQ ID NO: 4450 - DNA, 273 bp, Zea mays
  misc_feature: Incyte ID No: 700354304H1
  unsure 57, 100, 107, 120, 127, 158, 171, 248, 253, 259, 267: a, t, c, g, or other
gtgaacaggacccgtcgccatgggccgtgtgatccgtggacagaggaagggcgccgngtctgtgttccgcgcgcacgtgaagcaccgtaaaggcgctgcncgatgcncgccgtggatttngctgagnggcacggctacatcaagggcatcgtcaaggncatcatccacganccgggccgcggcgcgcccctcgccaaggtggtcttccgggatccgtatcggtttaagaaacggacggagctgttcantgccngccganggattcanaagggc

SEQ ID NO: 4451 - DNA, 187 bp, Zea mays
  misc_feature: Incyte ID No: 700354305H1
  unsure 126, 135, 141, 144, 156, 162-163, 173, 175-178, 182, 185-186: a, t, c, g, or other
attagcttcaaaataatgttcccctcgcctttatttgctgttcaagtccctgtaataaccgagaacgttaattgtagcagtgtgttttttatatgattaaataagtactatgttgtataaggctanaaaaaaaanaagaanaanaaaaaggggggncccccnnttagtgaccncnnnncccnggnnt

SEQ ID NO: 4452 - DNA, 313 bp, Zea mays
  misc_feature: Incyte ID No: 700354310H1
  unsure 35-36, 43, 55, 172, 233: a, t, c, g, or other
atcccagcggcttcccccaaacaaaacctcttctnngccagantccgcgtccgcntcggccagatcaaacgaatcggcacgacgcattcggcatcgcctccgacgatcttgagacaaacaaaacccaccgctgcggcaactccgcctcccgccgacccggggatcgcctganaacaggcagcgaaaaggggcgcagggtttgcccgccaagatggaggacgtggacgtctcgnggcagctgaagcagatgacggacttcatccgccagaggccgtcgagaaggccgccgaggatcgaggccgccgccgccgag

SEQ ID NO: 4453 - DNA, 188 bp, Zea mays
  misc_feature: Incyte ID No: 700354312H1
  unsure 10, 51, 143, 160, 166, 169, 179: a, t, c, g, or other
agattctttngtgtaccatggtcaccgcgccatcaagaaaaaaatggagcncgggaagcttgggtaaccgcagttttcggcatatagcagttaggaccatagcggaaacgagctgaacttgtgttgcactggcccccagaagnggagggattttgattcnctgtgntgnatctgtagtnattcagaat

SEQ ID NO: 4454 - DNA, 307 bp, Zea mays
  misc_feature: Incyte ID No: 700354314H1
  unsure 23, 59, 193, 195, 217, 269, 271, 297, 303-304: a, t, c, g, or other
tcatgtattcgtgtgtgtaaggnagtgggtgacatcatgggcgcgatccctgtgttgcngatcgccattgagctatgcattcgacaaccggcgtcaacaattggtaccgaggctcagtgtatattctacgacagtttcgtgagcccacatcggacgtagtgacaagaaggatcctgtcgtcaaggtgatgtcnangggaacgccaagacggaaggcngactagaacatctggtgctcatgttgtccacattaatgccatgcacatcganangaggtcgctcgcgtcatgacatccangtgtgnnggt

SEQ ID NO: 4455 - DNA, 311 bp, Zea mays
  misc_feature: Incyte ID No: 700354316H1
  unsure 7, 9, 13, 25, 27, 34, 114, 119-120, 128, 191, 206, 310: a, t, c, g, or other
gggcgangnggcngccgagcgcgangngtcggtncacaccttcagctgggaggagattcagaagcataacctgcgcaccgacaggtggctggtcattgaccgcaagtttacaanatcannaaatggtncatccagcacccggggggccagcgggtcatcgggcatacgctggagaagatgcaacggatgcnttccgcgccttccancctgacctggaattcgtgggcaagttcttgaaacccctgctgattggtgaatggcccggaggagcccagccaggaccacggcaagaatcaaagatcactgaggnt

SEQ ID NO: 4456 - DNA, 307 bp, Zea mays
  misc_feature: Incyte ID No: 700354317H1
  unsure 38, 44, 61, 76, 83, 179, 233: a, t, c, g, or other
ccagtcagaagaggaaccggggagcggcagctgcagcngccganggcggagcacgcgaggnatggatagataccanagggtanagaagcctcggaatgacacgccaatcagccagaatgagatcagaatcactactcaggggaggatgaggaactatatcagctatgggatgtcgctgnctgaggaaaatggacatgatgagattagtatcaaggccatgggacgggccatanataagacagttatggttgttgaattgatcaagagaaggttggaggtcttcatcagaacactgtactgaatctgt

SEQ ID NO: 4457 - DNA, 304 bp, Zea mays
  misc_feature: Incyte ID No: 700354319H1
  unsure 46, 167: a, t, c, g, or other
gcagacttcaatcttttgaaccaagcaccagatatggcagctcgtntccattcaactcgtgtattgggaacttttggatatcatgcacctgagtatgctatgactggccagctgacacaaaaaagcgatgtctacagctttggcgtggtccttttggaacttttgantggaaggaaaccagtagatcacacaatgcctcgaggacaacaaagtttagtcacatgggctactccaaggttgagtgaagacaaggtgaagcaatgtgtagatcccagttgaagggagaatatcctccaaagggagt

SEQ ID NO: 4458 - DNA, 174 bp, Zea mays
  misc_feature: Incyte ID No: 700354321H1
  unsure 17, 44, 55, 74, 151, 158, 166, 171: a, t, c, g, or other
ttttgaaatagcaagtnaaatgtagtgaccaaattgtggaaganatttctgtcanataggaaatgtgtaagttncgtctagaagctgatggttatgtaagttgctcaggcactcagatgacagcagattctgggttctgggagtgttctgngcctctnacaggccnggaangcc

SEQ ID NO: 4459 - DNA, 306 bp, Zea mays
  misc_feature: Incyte ID No: 700354324H1
gaagtattaattccgctcaatttggatgaaatcagcattaagcttcggccgaacagcagtggcagccaaactgtccagatggcgcgtgctctactgtcagctcgccattctggtgagcggatactgcggtgctggggcggtggcactggatgggctgtggaagatactaaggacaagatcactaagctattggaggaatacaacactggtggtgacctaggagaagcctgcagatgcatccgtgatcttgggatgccctcttcaaccatgaggtggtaaagaagcatggtcatggcgatggagaac

SEQ ID NO: 4460 - DNA, 304 bp, Zea mays
  misc_feature: Incyte ID No: 700354326H1
  unsure 20, 49-50, 258, 267: a, t, c, g, or other
tcctaatccccgcgtctacnggcctcttccgattaataatgcgctcctnncttgattcctggatatttatgtgtgcgagcatgtgcatccctttccccatctagccatatttctcgggccttcatcacgatctgggcatggcagtggtgccttgagggatgaagctgccatgggcgtgcgcagagaaagccgggggccgccgcatcgaagctgggcgtggaggagagcagtgcccctgcagccgtacgtatgcccgtngggcgtgcngtcggggttgaccagcaatgattgcagcatgcttgtt

SEQ ID NO: 4461 - DNA, 173 bp, Zea mays
  misc_feature: Incyte ID No: 700354327H1
  unsure 42, 123, 168: a, t, c, g, or other
agcgcgccaaccgcaacgtcgatatcctcagggacttctgtntggagcagaacatcaagtacttctatgatatcaaggacctcagcgatttcagggctaatccagactacaagggtgtctgcnacattgcacttgctcaggaaggccactgccgaccaggcgaggttntcctg

SEQ ID NO: 4462 - DNA, 305 bp, Zea mays
  misc_feature: Incyte ID No: 700354333H1
  unsure 24-25, 60, 126, 149, 152, 286: a, t, c, g, or other
caaagggaaatatgttgtgttctnnttttaccctcttgacttcacctttgtgtgccccanggagatcattgctttcagtgatagggcagaagaatttaagaaactcaactgccaagtgattggtgnttctgtggattctcacttctgtnatntagcatgggtcaatacacctaagaaacaaggaggactgggacccatgaacattcctttggtatcagacccgaagcgcaccattgctcaggattatggggtcttaaaggctgtgaaggcatctcgttcaggggcnttttatcatgatgataagg

SEQ ID NO: 4463 - DNA, 299 bp, Zea mays
  misc_feature: Incyte ID No: 700354334H1
  unsure 6, 14, 18, 21, 24, 27, 30, 33, 36, 51, 53, 55, 61, 70, 72, 74, 78, 100,: a, t, c, g, or other
cgcacngctgcctntgcnctngcnatngcnatngcnccggcttcatgcgtntncntacacnacgcccgangnancggnggcaaggaacaggctccaggtngttnagagcncccngccccatgagctctgggggcttcccatggngagcnccatcgccgccgcctatgacggaggcttgctcccctccctctccgtggcnaacttcaaaaataccaggacgtagctctctcgattntggagagaatgactacaccactatcagtggganccgtanntaaggaannaggnggagaaatntt

SEQ ID NO: 4464 - DNA, 300 bp, Zea mays
  misc_feature: Incyte ID No: 700354335H1
  unsure 19: a, t, c, g, or other
cacggtgcacgcacctgtngacgggctcccatcgaactcgcaccctcgctacgccgatccgtctcttctcccctaatcctccttccccgatccagtcccgcagcaacgccgagggagagcgaggagagacagatacagatcgcgcgctcagatgtcgtcggactcctcgtcgtgggcgcgcgccctggtgcagatctcgccctacaccttctccgccatcggcatcgccgtctccatcggcgtctcggtcctcggcgcggcatggggtatcttcatcacggggagcagcctcatcggggc

SEQ ID NO: 4465 - DNA, 300 bp, Zea mays
  misc_feature: Incyte ID No: 700354336H1
  unsure 10, 33-34, 36-37, 117, 190, 233, 237, 244, 261-262, 284, 288, 296-297: a, t, c, g, or other
gccgcgttgncctcccccgtagcggcgcccggnngnngcggcaagggtggtaagcgcaagatcaagccatcagcggcaacccatgaggattccaacatgatcccgcgcaagcccgtnagaagcagtggtggtgggtaagggtaaggtggccaaggataccgtgtccgagtcacctgctccaagccccgcncccgtctccgccccttagttgcgtgttgggcgccgtgcccgcnggcncccggcnaccatgcgtctgtctgnncgcgcagcacgcttgaacgggnatanatatggtnncgt

SEQ ID NO: 4466 - DNA, 300 bp, Zea mays
  misc_feature: Incyte ID No: 700354337H1
  unsure 7, 18, 44, 151, 199, 267: a, t, c, g, or other
tatagancacagccagtnagccacatcactagctatctgtgcanaggcaatggcgtccaaggttgagctggtggtggaggtcaagtccccggctgacaagctgtgggcggcgctgcgtgactcgacggagctgttccccaagatcttcccngagcagtacaagagcatcgagaccgtcgagggcgacggcaagtcggcnggcaccgtccgcctcctcaagtacaccgaggcggtgccgatgctgacgttcgccaaggagaagttganacggcggacgacgagaacaagtggtgtcgtaca

SEQ ID NO: 4467 - DNA, 173 bp, Zea mays
  misc_feature: Incyte ID No: 700354338H1
  unsure 2, 23, 47, 101, 125, 134, 145, 150-151: a, t, c, g, or other
gnttcaacgagtacgtgctggangggagcgcgccggtgctcccgganacgcagcggctgttcaagaagctcgttctcgctgggcatcaagccggtgttccngacgggccgcaccgaggaccaganggccatcancgtcaccaacntccgnngccaggggtactccggctggat

SEQ ID NO: 4468 - DNA, 304 bp, Zea mays
  misc_feature: Incyte ID No: 700354340H1
  unsure 21, 23, 58, 184, 202, 227, 233-234, 249, 252, 259, 266, 269, 283: a, t, c, g, or other
gccgcagcgagctgccgtttntnaattcactgaagatgaagatgtccattcttcttangagttgcacaaatgaaccttgggattgtgatcagctacttcaatgcaaaattttttaggaacagtcttaatgtgtggtaccagttcattccccagctgatcttcttgaacagcttatttggttacntgtcctgcttattatatnaagtggtgtacggggtcaaaagcanatctannccaatgttatgatcnacnggtcctngcccaanagngagcttggtgaaancagtgtttagtggccagaaga

SEQ ID NO: 4469 - DNA, 306 bp, Zea mays
  misc_feature: Incyte ID No: 700354342H1
  unsure 19: a, t, c, g, or other
gccatcaaggccaagaacngcggcgccttccccaaggccgacaaggccgccgccgccgtggaacccaagttctaccctgccgacgacgtcaagccccgcgttcccagcacccgcaagcctaagcctaccaagctcaggtcgagcatcacgcctgggacggtgctgatcctcctcgcagggcgcttcatggggaagagagtggtgtttctcaagcagctcaagtccggcctgctccttatctctgggcctttcaagatcaatggagtaccgatccgccgtgtgaaccagacctatgtcattgctaca

SEQ ID NO: 4470 - DNA, 300 bp, Zea mays
  misc_feature: Incyte ID No: 700354350H1
  unsure 26, 30, 39, 41, 43, 46, 53, 55, 59, 63, 78, 86, 89, 98, 113, 155, 158,: a, t, c, g, or other
aaagaagacgcccccgaatccgtctncgcntcctgtcgntngntcnccctgtntnccgnacgncgacccgcagccgcngccgttcngcnatgggtttnctcgacgcgctctancgtgtggtgatgcgccgcaacgccgtctacgttaccttcgtngtngccggcgctttcgcgggcgancgggcggtggactacggcgtncacaagatctgggagatgancaacctcgggaaaaggtacgaagacatatcggttttngggcagaggccagctgaggatgatanattttggtcacaatttn

SEQ ID NO: 4471 - DNA, 300 bp, Zea mays
  misc_feature: Incyte ID No: 700354351H1
gatgatgacgagcttgcgcacataaaaaaggagtacaaggagggaaggatgttgactggtgaagtgaagcaacggcttattgcagttctatctgagattgttgctagacaccagagagctagagctcaagtgaccgaagagatggtcgatgcattcatggcagtgaggcctcttcccaatatgtttggctgagcatcacggcgacaacttgaacaaacatttttgttatcagggagaattttaagagtctttagaattgtcgtgccaccataagtatcccctgtgttttacttcttcggg

SEQ ID NO: 4472 - DNA, 155 bp, Zea mays
  misc_feature: Incyte ID No: 700354354H1
  unsure 22, 38-39, 50, 78, 135, 141, 150, 152: a, t, c, g, or other
aaggacaggaatacgtatcgantgatgagacttccagnnatacggagcanacagatagttaagcgtgctaccttttanttgggaaaatctgagaaaggagtatattgtgcgttgttttattgggcccaggatganagcganccccatttncnaag

SEQ ID NO: 4473 - DNA, 300 bp, Zea mays
  misc_feature: Incyte ID No: 700354355H1
  unsure 26, 32, 132, 178, 183, 192: a, t, c, g, or other
aggagatttgcaactgagcacaagtncatgtnagcagacgtgatccggaaagctttccaagaaactgaggagggctttctttctctagtcatcaaggaatggtctttcaagcctcagattgcatcagttggntcctgttgccttgttggtgtaatctgtgctgggactctctatgttncaaanctgggcgantcgcgtgcagttcttggaaggcttgtgaaagcaactggagaggttctggccactcagttgtcagcggacacaatgcagctatgaagaagttagacaagagtgcatcat

SEQ ID NO: 4474 - DNA, 157 bp, Zea mays
  misc_feature: Incyte ID No: 700354357H1
  unsure 4, 11, 13, 25, 27, 37-38, 50, 52, 60, 73, 82, 105, 117, 136: a, t, c, g, or other
ggcngcgttcntntcggaacgcgcngnagaaggggtnntggtgacgagtncngcgttctntccttgaatccantcgccagcncgcagccctctgcagccgcaccntgcacacccgcncctctcctgtgccaggaanttgctactaccagcaccatgc

SEQ ID NO: 4475 - DNA, 110 bp, Zea mays
  misc_feature: Incyte ID No: 700354361H1
  unsure 14-15, 42, 45, 52-53, 56, 73, 78-79, 82, 85: a, t, c, g, or other
acctccccacatanncccaatgaaaagttctatggtgtcacngtnttcaaannccncaagctgggtcaagaangcaannttnaantgcagagtgcccacctgtactacaa

SEQ ID NO: 4476 - DNA, 180 bp, Zea mays
  misc_feature: Incyte ID No: 700354365H1
  unsure 24, 36, 38, 71, 76, 89, 117, 147: a, t, c, g, or other
cagcttccttcagcagcgcaggcngtggtccctgangnccgtggaaggagtcaaacttgcgggaattttgncagtntatctggcagggntgttgtttccaagcaagacccaaagctngaaaaggaggaggaagaaactgacccgatnagtgccagaagtcattgtattcaaagaagaata

SEQ ID NO: 4477 - DNA, 300 bp, Zea mays
  misc_feature: Incyte ID No: 700354366H1
  unsure 20, 260, 264, 271: a, t, c, g, or other
ggagaggccatgagctcggngcaggatccgttctacatcgtacgggaggagatccaggagtcgttgataaattgcaaagtaacttccaccgctgggagcaaactgcttcaaacacaggagaatatgttcatctgacaaaggagcttctgaccagctgtgaaagcatcgagtggcaggtagatgagctggaaaagacaatctcagttgcatcaagggatccatcatactatggacttgatgaagttgaactttccagacgnaganactggantggttctgctcataagcaggttggtacag

SEQ ID NO: 4478 - DNA, 300 bp, Zea mays
  misc_feature: Incyte ID No: 700354367H1
  unsure 77, 98, 111-112, 122-123, 140, 153, 160, 237, 242, 259, 270, 284, 297: a, t, c, g, or other
acgtcggagccgacgcgggaggagagcgtgtacatggccaagcttgcggagcaggcggagcggtacgaggagatggncgagttcatggagcgcgtcgnggctacgccgggnntaccggcggnngggacgagctctcggtngaggagcgcaacntgctgtncgtcgcctacaagaacgtcatcggcgcccgcaggcctcgtggcggatcatctcctccatcgagcagaaggaggaagnccgcnggaacgaggcgcacgcngcatccatacncgcctaccgctccnagatcgaggccgngct

SEQ ID NO: 4479 - DNA, 296 bp, Zea mays
  misc_feature: Incyte ID No: 700354368H1
  unsure 16, 287-288, 293-294: a, t, c, g, or other
gatcacgccgtccgtngaggtaaggtcagcatggtgagggtcagtgtgctcaacgatgcgctcaagtccatgtacaacggctgagaagattggcaagaggcaggtcatgatcaggccgtcatccaaggtcatcatcaagttcctgacggtcatgcagcgccatggctacattggagagttcgagtatattgatgaccaccgatcgggcaagattgtggtcgaatcaacgggagctgaacaagtgcggcgtcatcagccctcgctttgatattggcgtgaaaaaatcnnagggnngg

SEQ ID NO: 4480 - DNA, 107 bp, Zea mays
  misc_feature: Incyte ID No: 700354370H1
  unsure 9, 99-100: a, t, c, g, or other
aaacattgncatcgtgtctggacacgatgaattgtattctggtttgggtggctatttgctagtttggtctttaggccaatgtttaagactgaaacaaannggtagcc

SEQ ID NO: 4481 - DNA, 306 bp, Zea mays
  misc_feature: Incyte ID No: 700354371H1
  unsure 2, 66, 70, 74, 85, 91, 201, 290, 298: a, t, c, g, or other
gntgcccatgaccaaggacgaggatttggcgctcacggccctggtcaggggagccgatcccatttntggnggtngcggggctggnctcgangtcttcgtccacgtggggacgtattccccgccgatctttggagaatcgggggccaggcttgccgcggccggcaggggaagggacgccgctgccgccaagtacgcgtcctnggccaggatccggaagagtttggaaaagatgaggcctcctggggtcactgagctcttgctgactaatgacggggatcacattcttgaangcgctgtnacaaactt

SEQ ID NO: 4482 - DNA, 300 bp, Zea mays
  misc_feature: Incyte ID No: 700354373H1
  unsure 39, 56, 81, 84, 90, 171, 177, 219, 284-285, 292: a, t, c, g, or other
ttgcagccagaacacaggtgtcgtgaaaactacccctanaatccagaatgggaaangaaaagactcatatgcaacattgtngtnattggncacgtagattcgggcaagtccaccactactggccatctgatctataaatgcggtggcatcgacaaaagaaccattgaaaantttganaaggaggctgctgagatgggaaagggctccttcaagtatgcntgggtcttggataaactgaaagctgagcgtgaacgtggtatcaccattgatatctccttgtggannttgagancagcaagt

SEQ ID NO: 4483 - DNA, 300 bp, Zea mays
  misc_feature: Incyte ID No: 700354374H1
  unsure 13, 23, 44, 65, 78, 85, 223, 233, 253: a, t, c, g, or other
acggtacgctgtncatggctaantacgggcccgactccaatggntcccagttcttcatcaccacngtagacgaaaacnggttgcncaagaagctggacgggcgccacgtggtgttcggcaaggtggtgaaagggatggacgtcgtgcgcaagatcgaagccgagggccagctcaccggcgtgcccaaggccaaggtcgtcatagccaacagcggccagctgcnagcgcccgcngccgccggccatcgtgaccnctgatcgatgacgaggagaacgactcacgatccatcaatccggtcga

SEQ ID NO: 4484 - DNA, 300 bp, Zea mays
  misc_feature: Incyte ID No: 700354375H1
  unsure 49, 61, 76, 198, 209, 252: a, t, c, g, or other
aggggaacaaaaaggaagggcgaggaggacagggagccgagcgcaaganctgaggcttcgncgcgaaaccccaganctcgcgccgccccttcccctccgcggcgtcgtcctcgcacgctctccgatccaagatgtataagctggggagaggaaaccgcgacaaggtgcagcagttcatgaccattaccggcgccagtnagaaggttgcncttcaggcactgaaagctagtgattggcattggaaggagcttntgacttcttctatagccaacctcaggtttctgtggtcaatatcggcat

SEQ ID NO: 4485 - DNA, 260 bp, Zea mays
  misc_feature: Incyte ID No: 700354380H1
  unsure 254, 257: a, t, c, g, or other
atccaggcaaagaaggtcaacaccttgatcaggcctgatgggaagaagaaggcttacgtgaagctgactcccgactatgatgctcttgatgtggccaacaaaatcggaatcatctaagtgctgcattaggcatctgttgtttcctagttcaatctgttgtgtcctagttctatgtgaaaccagagttttgtagctatggatctcaatcgttccattaccatgtgttatgcacacttctgaatttgatatcatcngantgg

SEQ ID NO: 4486 - DNA, 300 bp, Zea mays
  misc_feature: Incyte ID No: 700354382H1
  unsure 12, 27, 65, 75, 79, 286, 294-295: a, t, c, g, or other
accagttctgtnagagcaaatgagggnactaaactgcagaaaagcggaaaatgaaatgatctggnaagctgtgcntganagtatccaatcagatacattgagaaaaatgatggctaaagaggccaggctaaactctgtcagccttggaacagcaccaacagtgcaactaataattagctcacatatcagtaagtccaaagccgaaaactacagagctcagattctgcaggcatttgagtctgttcttcgttctgctataatacttgaattcgatatgaatcaaagnatgatgcnnaacca

SEQ ID NO: 4487 - DNA, 296 bp, Zea mays
  misc_feature: Incyte ID No: 700354383H1
  unsure 61, 74, 106, 138, 148-149, 158, 178, 245, 272, 277, 287: a, t, c, g, or other
agaggatgaacatgtcatagatggaagaacagttgaagtcaaaaggactgttccaaaagangaaatgtcatcgnaagacggtcctaagacaaaaaagatctttgtnggtggtattccaccatctcttaccgaagatanattaaaggannacttctcancgtatgggaaggtggttgancatcagattatgcttgaccatagcactggacgctcacgtggctttggattggtcacatttgaaagcnaggatgctgttgaaaggttatgtcagnggggngaatgcatgntcttcgagg

SEQ ID NO: 4488 - DNA, 216 bp, Zea mays
  misc_feature: Incyte ID No: 700354385H1
  unsure 147, 175, 187, 199: a, t, c, g, or other
gcagattaggagccactcctatcatggaacttatgattgcagcgagaaaagcagttcctgagttgcaattggtgtatggcattgctgttgacagagtctacactggcacacttatgacatcacttgatatggcaggattatctattnccattatgaagtccggcgaaagcatttngaagagacttgntgctcccactanagctgccagcttggcct

SEQ ID NO: 4489 - DNA, 155 bp, Zea mays
  misc_feature: Incyte ID No: 700354386H1
  unsure 8, 12, 35, 38, 61, 95, 120, 127: a, t, c, g, or other
cgcaacangganattgatttcatcgagcagttcantgngaagctccttggtcaagcagganaatgaaaacttccagatatgtgatgtgcggagtnctgagctaattgaagtcagtgtctncaagttnatgaccccttcagcattcatttttctgt

SEQ ID NO: 4490 - DNA, 296 bp, Zea mays
  misc_feature: Incyte ID No: 700354387H1
  unsure 14, 29, 65, 138, 186, 270, 275: a, t, c, g, or other
gttaaatacattgngtggattcttgagantgcaccgattactatttttgagaatcatgagctggncagcattgtgctggattacaaaagggagtgtgtccgcgatagtgtgctgcagtcacacacctctgtccatgangattgcaacattgagtctggagaaacaaccttgcactgtgagcatgtnctgagccttgaatcaggtccgaccatagtgaaggcacggaccatgtgggaggctaaggggaccaagcccaagaaacaccagttncatcntcatctgattgtgtcagtgtc

SEQ ID NO: 4491 - DNA, 294 bp, Zea mays
  misc_feature: Incyte ID No: 700354389H1
  unsure 216, 285, 290: a, t, c, g, or other
attaaactcttcaggcataattgatgcaactagagtcaatatgctgtatatattaatgatagctcttgggcatcgatctctgaaagctcaaatggatggaatttagtttgcgggaaagaggctttgctttgcgcatatcaggcttaggactgtgggaggctaagttgcagatgcttcttttaatgtactcttgttctgcccttgttttttgaaggntctgacttataactgctgtatcagaagaaacattttgacagtgtcttggttggagatgaacatccctantgacngtga

SEQ ID NO: 4492 - DNA, 164 bp, Zea mays
  misc_feature: Incyte ID No: 700354391H1
  unsure 22: a, t, c, g, or other
agcctctaaaacagggtcagangctaagtgctcctgagagatttgttcaagttgctgatgcgcgcaagaagcaccttgtttccattcttagggaattcttattgagaaggacaaaagaggagacaattggacatcttatgcttgggaaggaggataatattgtt

SEQ ID NO: 4493 - DNA, 282 bp, Zea mays
  misc_feature: Incyte ID No: 700354393H1
  unsure 12, 17, 31, 40, 55, 104, 124, 132, 144: a, t, c, g, or other
caagattatgcnttgtnttgtagtattcgtnttgagtcgntttgtttattaccantctattatctggtgttgaacagcagcacattgcagaacagatgatcgtngagtgaccttcatatacgcntgtaactntctctctctccntctctctcagctcagcagtttagatcgactatactcattggacatggacctatctatatatcttctttgtaaacaggacagagtcggactcctgctgcagtattatcaactcatctattaaaactctgtagtggagta

SEQ ID NO: 4494 - DNA, 142 bp, Zea mays
  misc_feature: Incyte ID No: 700354395H1
  unsure 14, 17, 22, 28, 47, 53, 70, 72-73, 78-79, 85, 92, 105: a, t, c, g, or other
aggtgacgcatgtnacnctctngcagtntgctgctgtgtccagagtncgactncagctgggctgtaactngnnttggnncccgcnttaggcnccgccagcaggcnaacagggagatgtcagactgctacacggagctggagg

SEQ ID NO: 4495 - DNA, 190 bp, Zea mays
  misc_feature: Incyte ID No: 700354402H1
  unsure 124: a, t, c, g, or other
cactgcacctccgctgcccatcgccgtccccgaccgcagcgcaggactagtatgagtgtaaggctgctgcttctgctgagcagcctaagagggcccctaagctcaatgaaaggatcctctcctntctgtccaggaggtccgtagctgctcatccatggcatgatctcgagatcggtcctggtgctcctgc

SEQ ID NO: 4496 - DNA, 150 bp, Zea mays
  misc_feature: Incyte ID No: 700354405H1
  unsure 135: a, t, c, g, or other
gaaggttagagtagaattgccagacgcatatccttacaaatccccacgcgtcagtaagatatatcacccaaatgtcgatgaaatgtctggttcagtctgtttggatgtcatcaaccagacttggagcccaatgtntgatctggtcaatgt

SEQ ID NO: 4497 - DNA, 108 bp, Zea mays
  misc_feature: Incyte ID No: 700354406H1
  unsure 47-48, 53, 70-71, 106: a, t, c, g, or other
cgaccccaagctcatcacctggtctccggtgtgtcgcaacgatgttnntgaantaaagttcctggtgggnnctgatcggtgtgcccctaacgcaggtacagccgcngt

SEQ ID NO: 4498 - DNA, 289 bp, Zea mays
  misc_feature: Incyte ID No: 700354407H1
  unsure 9, 32, 59, 128: a, t, c, g, or other
atgaacgtngtgccgacggcagccgagatctncaccctcggcgtggtgagggggcatcngcatataccacgactggtgtgaggcattctcaacttatccaagaacatacgaactcatacatgccaacngcatcttcactctctacaaggacaggtgcagaatggaggacatcctgctggagatggatcggatcctgcgcccagagggaaccgtgatcctccgcgacgacgtcgaggtcctgctcaaggtgcagaggacggtgaaggggatgcgttggaagacgctgctg

SEQ ID NO: 4499 - DNA, 279 bp, Zea mays
  misc_feature: Incyte ID No: 700354409H1
  unsure 2, 4, 19, 21, 23, 27, 31, 35, 39, 54, 68, 80, 90, 101, 110, 132-133,: a, t, c, g, or other
angncactgcttgcatctntntntctntgtntgcncgtntttatccttcactgnggtgaggtcttgcntcgcggaatggnggcgtccggngcatggctggnccgtgcganggcgacggcggtgctgggtttnntcctggcggtggcgtcantgaggcggcatcgggggacgtggagatggtgttcctcaaggccgcggtggccanaggcncatgtgcttggacggcagcccaccggtgtacctttctntcccggctccgttctggcgcaataangggtc

SEQ ID NO: 4500 - DNA, 282 bp, Zea mays
  misc_feature: Incyte ID No: 700354410H1
  unsure 49, 246, 265: a, t, c, g, or other
aagaagcctgtaccggattttagcttctatgatcgttctgctccaattngactgtatttgcctccttgcaaaggttcttgatgctgatgtgacagacagtgttattggagaagggtgtgttattaaacattgcacaatcaatcattccgtagttggactccgttcctgcatttctgaaggtgcagttatagaggactcttgctaatgggtgcagactattacgagactgagaatgataagaatgcncttctgagactggtggcancccatggtattgggaaa

SEQ ID NO: 4501 - DNA, 291 bp, Zea mays
  misc_feature: Incyte ID No: 700354413H1
  unsure 31, 51, 58, 80, 86, 111, 159, 186, 190, 201, 206-207, 266, 272, 285: a, t, c, g, or other
agcagagagggagagagagaacacacaaggngatgggtggggaagggagcnattccgnggtatcgtctcccccggcagtnaaggantagaaggaaggagagtaggagtagnaggaggaggggagaatgcgtgtcggcggcgggcgggacgacgacgacnaggtgtcccggaagcttcaagagcatngacntgggacaagcntggannacggcggcagggaggagatcccgcggcccgcgtcaataccacggctggaaggccatgcnttcatnatcgggaagaganttcgag

SEQ ID NO: 4502 - DNA, 292 bp, Zea mays
  misc_feature: Incyte ID No: 700354414H1
  unsure 24, 229, 246, 265: a, t, c, g, or other
ttattcatgcataggttaattttnatgggacccaataggtcaacctagtgtttctccttgtttacccctgaatcacttgggtagtttgtgctattgctttacatggttttgggataatcgcttattatatctatgttccaattcttttgttattctatttatgttcatgtcaagatcattaatgttaattggaacatagagcttaacttgagtaacatgtgccaccacnagggattaatgggactncccttggctgactaattangaaagctaatggaagactaccttaccc

SEQ ID NO: 4503 - DNA, 293 bp, Zea mays
  misc_feature: Incyte ID No: 700354415H1
  unsure 19, 37, 52, 214, 289: a, t, c, g, or other
gtgacaacaaggagaggcntgtttgcatccctctggntgttctggaagcagnatcttgcaaaggaaaagaagcttgagaaggacattgagaatgagaatggaggtgctggggtctattctgcaagtctcaagaaacattatattttggccaatgatgaatggaaggaggatattcttccagagatactggatggtcacaatgttgccgattttntggatccagatatccttgtaaggtgtgaagagttggaaagggaggaagggcttcgtctggaagacaagctgcaanaaga

SEQ ID NO: 4504 - DNA, 293 bp, Zea mays
  misc_feature: Incyte ID No: 700354416H1
  unsure 221, 242: a, t, c, g, or other
aattgctgagaagctgctgccagcataccggtcattccttggcagatttcaacttggcgggaagcatccagagctctacattaagttctccgttgaggaccttgagatagctgtgagcgatttctttgaaggtgttcctccttccccacataacaggaggaaatcacatggatgagggacttttacctcaggtattcaactggctgatgttgctatttatncttttattcttcacaaagaanctggttctggtatttgggctcgatttcttctgtcctgatagatgtgagtat

SEQ ID NO: 4505 - DNA, 102 bp, Zea mays
  misc_feature: Incyte ID No: 700354417H1
  unsure 9, 50: a, t, c, g, or other
gcagcagcngggacatggacctgttcagccccagccccagtggaagttgnaatattagtgcctgacgaggagacatgcaagagcagtggagagcagactttt

SEQ ID NO: 4506 - DNA, 142 bp, Zea mays
  misc_feature: Incyte ID No: 700354418H1
  unsure 118, 139: a, t, c, g, or other
cgactataaacacctctactttgaatcgggacgctggctaccgtgcaataattccaggtaactacatccctgggaattcgcgagctagcactgcccggggctgactactttggctcanaaacaaagaaaactgaacagncgt

SEQ ID NO: 4507 - DNA, 287 bp, Zea mays
  misc_feature: Incyte ID No: 700354420H1
  unsure 46, 50, 77, 244, 272: a, t, c, g, or other
tttctttgtgcgaggtgaatgtacaagaggagctgagtgccctacnctantctgaaactggggagttatctcagcangcacattaaagatcgctactatggagttaatgatccagttgcactgaaacttttgagcaaggcaggtgagatgccatccctgacaccaccagatgatgagactatagggaccctcctacattgggcggaactcgatagccagaataaccgagcaggatttgagggancattttatgcccatggtgagtcgagtcntaaggatggtacttc

SEQ ID NO: 4508 - DNA, 286 bp, Zea mays
  misc_feature: Incyte ID No: 700354421H1
  unsure 53: a, t, c, g, or other
gtcgagattgagcaggagagcagttccgtgattagccgcggtgcatggccggncaggtggcggcgcatcatggcgtggaagaaactctggattctgaggcagttacacctacaggtgcctcgctccaaagccaggtatcagagagttcccttgtgcatatggatgatggaggaattggtgctggtgtagaaagatcatgccttgaggatgctgtgtcaagtgatgagattcatggtgaacaagaagagcaggagcaagggagcaacgctaatgctgccattggttg

SEQ ID NO: 4509 - DNA, 285 bp, Zea mays
  misc_feature: Incyte ID No: 700354422H1
gcttcgagatcaagtgcgataagcctgtggagtgctccggcaagcgtggtcatcacagacatgaactatgagcctatcgcggcgtaccacttcgatttggcaggcacggcgttcggcgccatggccaagaagggtgaggaggagaagctgcgcaaggcgggcatcatcgacatgcagttccgaagggtcaagtgcaagtacggctccaaggtcaccttccatcttgaaaaggggtgcggccccaactacctggcgctgctggtcaatacgtcgacggcgacgtga

SEQ ID NO: 4510 - DNA, 286 bp, Zea mays
  misc_feature: Incyte ID No: 700354423H1
  unsure 45, 191, 205, 267, 275, 282: a, t, c, g, or other
gtcatgcaacaggaggaccaccttaatgaaatggaacatgatatnatctgtctcaaaagatgaggctgcacaagggctaagagagggtgtgcaaaagctcaaagtcttgcatggttccggtatcactgctctggatgaattagcaggtgaaatcgacatgaactcgcggacaacatttgagagattaaatncacagatacagtgnacacacatcagcccgtgagaactgtttcggaggaatcgcttcggaagcagataattgttagnatgagctnagcgcanctat

SEQ ID NO: 4511 - DNA, 288 bp, Zea mays
  misc_feature: Incyte ID No: 700354424H1
  unsure 77, 80, 103, 172, 235, 268, 275, 283: a, t, c, g, or other
caatatctttgaacctcgattatgtatcccatctttatcaagcagttgttagtggttcgaattcatttacttcagtnttnatgcattcattgcacatatattnttagcagtcatctagtgaggttacattatccagctgcatgcaacataatctcttcaatcaacatttttntgcatgtgtatcgactaatatcagtctgtaggttgtcagatatatttgcatgttactgttgcntatatgatgctttcaatttgcaagaacgcgggntgtcccnttggtcanaattg

SEQ ID NO: 4512 - DNA, 289 bp, Zea mays
  misc_feature: Incyte ID No: 700354425H1
  unsure 2, 8, 53, 126, 134, 207, 286: a, t, c, g, or other
tnggatgntacctgctccaagagcacatcaaggcgtcaggtggatcagacctnagaagggcaatggtgtgtcgaactccatgcggcatcctcctgctcttcatctaccctgtctgggccggtgtgntgcaagtnctgtaggcacccaccattgcctcagtgtttcccctgtgcggtccaggcgtccagctccgttcccgttcgtgcncgtgcaaatgctccctctatggtgatccgtgatcctgtgtcacgagtaggtgatgtttttatgtgtgcttgagttgatnagg

SEQ ID NO: 4513 - DNA, 286 bp, Zea mays
  misc_feature: Incyte ID No: 700354427H1
  unsure 116, 254, 264: a, t, c, g, or other
caccttgtcgctacagtcggcaaattcagcgtcatttggaattttacagcagcgcaaccatgagtgctaccgtgatcagcagggccttcaagagctgctactgctacaaagttgtnctcaaggatgaatcaatcgtcgacagccgcttcatgcacgagaagtttgcgacgagtgactctcctgaagctccgctcgttgtcgctacgccaatgaaagtcagctccttcagtatagcaatcgacgctgactccggnaatcttttcnccagttgtgcagaatatctgag

SEQ ID NO: 4514 - DNA, 290 bp, Zea mays
  misc_feature: Incyte ID No: 700354428H1
  unsure 37, 59, 66, 72, 82, 102, 108, 134, 165, 167, 189-190, 211, 234-235, 242,: a, t, c, g, or other
gatgattacggcggaggagaagagccccgaaaggaangaggaggagagcacccgcggangcttttntggganatcatctgcngcgtcccggcgggggaggtngaggcngcgctgtccgcttgcagcatcggccncacggccgaagtcgaggaactggtgctcaantnccgcgaatgctacaagcgtccnnaagtacgccgtcgcttcttcngctgggcggggcagtccgtgtcnnaacaccntcctacncatggaanctccttgtcgnatcctcaggcanagcnccatnt

SEQ ID NO: 4515 - DNA, 87 bp, Zea mays
  misc_feature: Incyte ID No: 700354430H1
  unsure 19, 25, 31, 55, 58, 65, 70, 72, 75, 85: a, t, c, g, or other
caacaaacatcgaagtgcntggaantggttntgcacggctaacaagtgagtctgnctnccagtgnccacncnttnccacgcattnca

SEQ ID NO: 4516 - DNA, 281 bp, Zea mays
  misc_feature: Incyte ID No: 700354434H1
  unsure 24, 48, 194, 206-207, 222, 225, 227, 238, 240: a, t, c, g, or other
tggtcttactactgaggttaagtncgttgagatgcaccatgaattcanagatcccggtgacaatgttggcttcaacgtgaagaatgttgctgtgaaggatctgaagcgtgggtatgtggcctccaactccaaggatgaacctgccaaggaggctgctagctttcacctcccaggtcatcatccatgaaccaccntggccatttggnnatggctatgccccanaanantcaatccgacntnacaagaaaatggactgattaagttgatcgagtctttatcat

SEQ ID NO: 4517 - DNA, 286 bp, Zea mays
  misc_feature: Incyte ID No: 700354435H1
  unsure 51: a, t, c, g, or other
aagcgcaactataagctgaagctgcaaggggagaaccctggagaagtacgncatgcgcaacagaggttttcgaggtcacgccttccctgtacatggttgagctgcgcaagtccaacggcgacacccttgaattccacaagttctaccacaacatctcaaatggactgaaggacgtgatgtggaagccggagagcggcatcgtggaaggcgacgaggcgcggcaaaggaggtccccgtgatggggtctgcaaccaagttttagaagtagcgctgcagataactagtc

SEQ ID NO: 4518 - DNA, 128 bp, Zea mays
  misc_feature: Incyte ID No: 700354437H1
  unsure 44, 49, 74, 125: a, t, c, g, or other
aagcatgcagcagtttgatattccagcactaaagattctggaanatcanacattgccaagaggaattttcgcangaatcattagagacacttggggactcttttctcaagtatgttacaacccancat

SEQ ID NO: 4519 - DNA, 288 bp, Zea mays
  misc_feature: Incyte ID No: 700354441H1
  unsure 11, 86, 102, 184, 192, 232, 243, 275: a, t, c, g, or other
caccatctgtnttcatcttcccgccatctgatgagcagttgaattgatgcctgttgtgtgcctgctgaataacttctatcccaganaggccagagtacagtngaaggtggataacgccctccaatcgggtaactcccaggagagtgtcacagagcaggacagcaaggacagcacctacagcctnagcagcancctgacgctgagcaaagcagactacgagaaacacagactnctacgcctgcnaatcacccatcagggcctgagctcggcccgtnaacaaagagcttc

SEQ ID NO: 4520 - DNA, 161 bp, Zea mays
  misc_feature: Incyte ID No: 700354443H1
  unsure 26, 48, 53, 65, 70, 82, 89, 100, 114, 120, 140, 143-144, 150, 159: a, t, c, g, or other
atccagcgcccagagagacaccaganaacccaccatggcccccttggntgacnggcatcctgttnttgcngtggctgatagnccccagnagggcctgcanctgtgtaccacccnattcanagacggccttctggcaattncgnntgcgtnatcagggcnaa

SEQ ID NO: 4521 - DNA, 226 bp, Zea mays
  misc_feature: Incyte ID No: 700354444H1
  unsure 20, 23, 29, 62, 89, 156, 172, 199, 203, 213, 217, 221: a, t, c, g, or other
cgcacgccatggtgtcgagnttnattccntccgtcttctatctgttagttgctcgccctcancgtcttcttccccaaccgcgctaagcncagccttccctccatcaccgagatcctgcaccgtctacagttcgctggccgagctcctccctcgcgntcggatccagccactnacgcccagccccaacgcgacgtcacanaccncttggcgaancacntgantattt

SEQ ID NO: 4522 - DNA, 289 bp, Zea mays
  misc_feature: Incyte ID No: 700354446H1
  unsure 2, 22, 26, 107, 179, 253, 266, 281: a, t, c, g, or other
anacctaatccccgcgtctacnggcntcttccgattaataatgcgcttcctatcggatatttatgtgtgcgagcatgtgcatccctttccccatctagccatatttntcgggccttcatcacgatctgggcatggcagtggtgccttgagggatgaagctgccatgggcgtgcgcaganaaagccgggggccgccgcattcgaagctgggcgtggaggagagcagtgcccctgcagccgtacgtattcccgtngggcgtgccgtcngggtgaccagcaacngattggta

SEQ ID NO: 4523 - DNA, 288 bp, Zea mays
  misc_feature: Incyte ID No: 700354447H1
  unsure 54, 230, 242, 256: a, t, c, g, or other
tttggacaaaggccaaacaaattatagattggaggatcaacatgtcagtacacngggaagacttccatggggtattcctgcagaaggaagcgttccaatgaatagagttcagagtcaagcaaaacaacacttggaaaacatggatgcaaagcaagaccataagaaattgctccctgatccaaaaaaatctccccttgacaaattcatggacacatcattgccttcaaganacatggacatgnggtcacagaggctnacttcgatgatgtcctgagtgcgaaatccttg

SEQ ID NO: 4524 - DNA, 288 bp, Zea mays
  misc_feature: Incyte ID No: 700354448H1
  unsure 43, 49, 78, 235, 277: a, t, c, g, or other
gggcaggctctccccggaggctcagccccctctgctccccatngacgcngaggcacaacctgcacctgtgtctggccnaccacccacctctggtctgtgccactttgatcctgctgctccttggcctctctggcctgggccttggcagcttcctcctcatccacaggactggcctgcgcagccctgacatcccccaggactgggtctcttttttgagatcttttggccagctganccctgtgtcccaggaatgggacagtcacagggaagtggcganggtctcacgtc

SEQ ID NO: 4525 - DNA, 208 bp, Zea mays
  misc_feature: Incyte ID No: 700354451H1
  unsure 35, 50, 53, 184, 201, 205: a, t, c, g, or other
atttgtttgatgagaagaaaaatggtgtgatcgantttgatgttatatcnaantgtcttccaccccttggcaccaattgaagacaagatcgattcatgcatttcgtatgtttcagttgcatttaggttgtatgacttgagcacaaactgggtttattgagcgtgaagaggttaagcaaatggtnattgctatattgatggnttcngct

SEQ ID NO: 4526 - DNA, 282 bp, Zea mays
  misc_feature: Incyte ID No: 700354455H1
  unsure 45, 47-48, 71, 75, 78, 100, 122, 127, 155, 176, 215, 235, 250, 271, 279: a, t, c, g, or other
ccacaatccaaggacaccgagcagcaggcggcggaagcaaccgtntnngctggagtccagttttgctcggntcgncgntgggatccgccggccggcgaanggggaagggaagaggggcgganattgnagagtacaagcaggggaagatgtcagangcgctgatcaacggcctcgcnggcaccgacggcgggatcatcgcccagtccttacctacncgctccagaccatgaacgcncggcaacagacggancggcgacccctccaagccggnttcaaagnagg

SEQ ID NO: 4527 - DNA, 280 bp, Zea mays
  misc_feature: Incyte ID No: 700354458H1
  unsure 42, 122, 147: a, t, c, g, or other
aaaaattggtgagcacgggcactgtaccgagtaaagaagatngtcaggcatctctctaaaacaatctggggagagaagtcaaaggaggctactgctgccattacgtctcaaaaaggtggtgntgtgacaaagcgtaagaaggggcangctaacaaagagaagatggatggaaatgcaaagagtggtgtggcaaaggaggctgcccatagtactgccaatcaaagtggcgattctcataaaggaagtaagaaggggcaagccagttgtcagaggcgctacc

SEQ ID NO: 4528 - DNA, 294 bp, Zea mays
  misc_feature: Incyte ID No: 700354459H1
  unsure 58: a, t, c, g, or other
tttacacgcagcatgcatacatgagaccccttggagtagttgctatggtctggtagtngagaaaaatgcccaactattcaaatgcgaccctgctggtcacttctttggacataaggcaactagtgccgggctcaaggagcaggaagcaataaattttctggagaagaaaatgaaggatgacccgaaattcacctatgacgaaactgtgcagattgcaatatctgcgttgcaatcagttctccaggaagatttcaaggccactgagatcgaagttggtgttgtgagaaaagatgt

SEQ ID NO: 4529 - DNA, 285 bp, Zea mays
  misc_feature: Incyte ID No: 700354463H1
  unsure 43, 264: a, t, c, g, or other
gtaaattgctcatagtgccttcttttaacattcatggtaaagngtagtgtttgcttcagcgatcaacatgaagccactggagcattcatcgtcaattagcagtacgacaccgtctgcaatgcctatcaagccgattagtgacaacgagttcgagaacaaactaaactattcgaggcggagacagatccagtcaaccttgttgcttattcatcatcagacctccaagcagccactggaagcttccatagtagcaggttactaggnaggggacaatcggtggtgtta

SEQ ID NO: 4530 - DNA, 280 bp, Zea mays
  misc_feature: Incyte ID No: 700354467H1
  unsure 160: a, t, c, g, or other
agcgagtatggagagatgatccttgagttgctcatatccgcagcacgcagtgtgcacttcagattggtctctgtgtatttgatggtgcccattctgtcagcaatccaattgaatctgttgttgagaaacagaagcgtggttctgatcttttctgtatgcntgtgagatggctgttgtctggatacagaatcagctccgtgagaacaggacaaaagaactcattttgaatatgctaatcagctctgtgagcgtctccctagccccaatggcgagtcaactg

SEQ ID NO: 4531 - DNA, 278 bp, Zea mays
  misc_feature: Incyte ID No: 700354470H1
  unsure 241, 243: a, t, c, g, or other
aagaagcgcaaggacgccgaggagactggagacgacgagtctgcatgacagggcctatgacactgtcatgatgcagcagctgcagtatcggaagaagggagtcacatacgggtctgttcaggtgtccaaggatatcaagtatgctgacaatcaaccagtggtgccttggggaccaagattctcccgatcaacaatgaaggacatgccgcataaatatggcatatcagcagcatttattgtntngatagctattatgggcatgcagactggaagccttg

SEQ ID NO: 4532 - DNA, 282 bp, Zea mays
  misc_feature: Incyte ID No: 700354471H1
  unsure 113, 194, 251, 267, 271: a, t, c, g, or other
aaaagaaccatttggatacataggtatggtctgagctatgacatgatctagggtttatcgtgtgagcacaccatatatttacagtaggaatagacgtagacacacgagcatanttcacctccggctaccataatcatcgctatccccaccggcgtcaaagtatttagctgactcgccacactccacggaagcantatgaaatgatctgctgcattgctctgagccctaggattcatctttgctttcacgtngtgggcctgtactggnattnattagcaaact

SEQ ID NO: 4533 - DNA, 279 bp, Zea mays
  misc_feature: Incyte ID No: 700354473H1
  unsure 42, 44, 222, 226, 244: a, t, c, g, or other
gccgcggctgctcttagtcgtcgtcgcgatcttcgtgtcatngntggcagccgtcataaacgtcaagaactacggggcccatggcaatggtgtcaatgacgacaccaagccactgatggcggcgtggaaggcagcgtgcggatcagccggcgcggcgacgatggtggtgccgccggggacgtactacatcggcccagtgcagttccacggcccctgcaaggnctcnaccttgaccttccagctncaggggacgctcaaggccgccacggacctgaaacg

SEQ ID NO: 4534 - DNA, 279 bp, Zea mays
  misc_feature: Incyte ID No: 700354474H1
  unsure 42, 44: a, t, c, g, or other
tgcaaatgacgcgtatgcgatgggcggagactatacagtgtncncattacgaccttccttaagggcattcaagcatatgctacacaaacaagctttgcccctggatgcaaggatgcttcctgtaactcaacagatttgtttggcgaactgttgaagcagctaaaagagccgatattgttgtcgtaattgctggcttgaacctgacagaagagcgtgaggacttcgacagagtgagccttctccttccaggcaagcagatgggcctcatacatgccattg

SEQ ID NO: 4535 - DNA, 55 bp, Zea mays
  misc_feature: Incyte ID No: 700354475H1
  unsure 42, 50: a, t, c, g, or other
catcattgtaaaagctgggctatcagggacaaaatgcccacntatatatncaggc

SEQ ID NO: 4536 - DNA, 278 bp, Zea mays
  misc_feature: Incyte ID No: 700354478H1
cgggaaggccgccatggacgacgaggagcacgaggtttacgcagaacctggacggcgatatggacggcgctgacgttgatatggccgccgccggggacgacgcggcgaacttcaggagcttgacgagatgaagcgcaactgaaggagatggaggaggaggccgccgccctccgcgatatgcaggccaaggtcgccaaggagatgcaaggaggtgaccctagtatatctacagtgaggcgaaggagcagtggatgccggtctgtgtatgtggaatgttg

SEQ ID NO: 4537 - DNA, 287 bp, Zea mays
  misc_feature: Incyte ID No: 700354479H1
  unsure 51, 72, 88, 102, 104, 125, 146, 198: a, t, c, g, or other
ccatcgacttcggcctctccgtgttcttcaagcctggagatcgtcacgatntggcagcgggtgttacatggntccagaggttctcaanagaagctatgggcnanagatagacgtgtggagcgctngtgtcatcctgcacatccttntctgcgggttccctccgttttggggaggctccgatgagaaaattgcacagtngatactccgtggggtaattaacttacagaaggatccatggcccaaggtctcccagagcgcaaaggatcttgtaacgaggatgcttgacc

SEQ ID NO: 4538 - DNA, 279 bp, Zea mays
  misc_feature: Incyte ID No: 700354483H1
gatcgggattgtgggcgagtgcgtgcgttcgtgcagaagcgctcggaacaccatgtctttgcaccggcacgcaggacaagtgcacggcgtgcgacaagaccgtccacttcatcgacctcctcacggccgacggcgccatctaccataagacatgcttcacgtgcagccactgcaaaggggtcctctcgatgtgcagctactcctccatggacggtgtgctgtactgcaagacccacttcgagcagctcttcaaggagaccgggagcttctccagaattc

SEQ ID NO: 4539 - DNA, 275 bp, Zea mays
  misc_feature: Incyte ID No: 700354484H1
  unsure 7, 19, 39, 42, 56, 67, 85, 89-90, 106-107, 135, 150, 164, 180, 201, 210,: a, t, c, g, or other
acggatnatgatgggcganattgttcgagatgattaatnaangctaggaggtggcnttagaagaatnaagattggatcaaagccnaaannctaactctgtacatgnncagcatggtgcacgctcacctcggcagnaattttgtgatgcancttctcttagcctnttgctagctgtagtantgcacgatttctcagatttanaaaaagganctttntnatcggtgctccaggttnacagaagtgtgatagttntgnngatctgtgaaganatngta

SEQ ID NO: 4540 - DNA, 275 bp, Zea mays
  misc_feature: Incyte ID No: 700354489H1
  unsure 254: a, t, c, g, or other
aatggtttgaatttgaaaatgaatccaggctatccaaacttttggaaaatcagagaaaggggtgtactgtgctttgcgttatccgtcaaccgtttccttttcgatttacattctcgatgaatctgacggcaaaacggagtgggataatgaagcctcactattatctcgggagtcaaggaattgacgggcctggaccctggactctacaagatatcaactataactgggacacccagtatgaagacagtatggangaaagttcgagtgggatcaga

SEQ ID NO: 4541 - DNA, 270 bp, Zea mays
  misc_feature: Incyte ID No: 700354490H1
  unsure 243: a, t, c, g, or other
actaaagaaaatggcccttagggttattgctgagagtacggagatcgcggggttaaaagaaatgttcaaaatgattgacagtgacaacagtggtcatatcacattggaggaactaaaaactggctgcagagagttggtgctaatttgatggattcggaaatcaatgctctaatggaagctgcagatatcgacaacagtggcacaattgattacggggagttcatgctgcaactttgcatatanacaaagttgaaaaggagataagctctt

SEQ ID NO: 4542 - DNA, 277 bp, Zea mays
  misc_feature: Incyte ID No: 700354491H1
  unsure 21, 25, 47, 51, 71, 95, 251, 258: a, t, c, g, or other
tcgtattccttcacgtgaacnggcncgacgtggtccggcacacttcntgtngctggaccttcggcaagagntcctacctcaaggcaacgcacgancccctcttcggcgggggcatcctcaagtccaacggcgaggcctggctgcaccagaggaaaatcatcgccccggagttcttcctggacaaggtcaagggcatggtggatctgatggtcgattctgcacagccactgttatgtcatgggaagagagantgatagnatggtgggatcacagcatt

SEQ ID NO: 4543 - DNA, 277 bp, Zea mays
  misc_feature: Incyte ID No: 700354492H1
  unsure 107: a, t, c, g, or other
gataaaagaattattggagactcgtattcgaccagctgcaagcgcgtgacattgaataccgaggattcgacccagaaacaggaacagttaagcttaaaatgcaaggngcctgcagcggctgtccaagttcgtcagtcacattgaagtctgggatagaaaacatgcttatgcactatgtgcctgaggtgaaaggagtagaacaggagttcgatggtgatgaggaagctgaagtggctggatagtcgagagagttttacaggtttgagggtcaacacag

SEQ ID NO: 4544 - DNA, 279 bp, Zea mays
  misc_feature: Incyte ID No: 700354493H1
  unsure 42-43: a, t, c, g, or other
aggaggagatcgctgcgctggagaacgagttctcagggtggnngggattttgccataacgatctccagtatgggaacatcatgatcgacgaagagacgaggctactgaccatcattgactacgagtatgcaggttttaacccagttgcttatgacatcgcaaaccatttctgtgaaatggccgcagactaccattcagaaaagcctcacatattggactacagcaaatatccagataccgatgagcggagcaatttgtgcggacatacctgagctcctc

SEQ ID NO: 4545 - DNA, 273 bp, Zea mays
  misc_feature: Incyte ID No: 700354494H1
  unsure 38, 42, 46, 49, 133, 189, 196, 233, 236, 252-253, 261, 269, 272: a, t, c, g, or other
ctatgtaacagacataattagtacagctcgtggcttgnacgnctgnttnttgcaggaagcatgtgatcagttcagggttatgaacgactacctgaaacctcatgttctccctttgtccctatctactcatcancaataaattttttgagtggtggattttagcatgtttgctgcctattttggattttnttctatnctttggtataagacattctctgattcctttgtatccnctntcattatagtagtttnnttgagctntatgacanagnt

SEQ ID NO: 4546 - DNA, 282 bp, Zea mays
  misc_feature: Incyte ID No: 700354495H1
agacggcggacgacgagaacaaggtggtgtcgtacagcggtgcgggggcggacttctacaagaacttcaagatcacgctgaaggtgactccggccaaggcggagggcgagggcggcgccgtcgtcagctgggccatggagttcgacaaggccaacgaccaggtgcctgacccggacgtcatcaaggagaccgccaccaagacgttccacgacctcgacgactacctcctcaagaactagatggagcgacaactggagatggtccagtacagtacagttccag

SEQ ID NO: 4547 - DNA, 286 bp, Zea mays
  misc_feature: Incyte ID No: 700354496H1
  unsure 18, 25, 44, 59, 63, 84, 92, 101, 103, 107, 111, 115, 223, 273, 278: a, t, c, g, or other
attcgccaaacgcatcgnatcggcntcggccaccggcgcgctgnttcttcttgtccgtngatncggagaggactttctctcgcntgctcgtnccttccgcncncgcnggcnggcnggtcctcttcccggcccactccgttccgatcgaccatggcggctaccgcccccaatggcaatcccactgtcagctccctcgcggcaaccgttccggtccaggcggttntgttcgacatcgacgggaccctgtgcgactcggatcccctccaccacgtngtttncaagagat

SEQ ID NO: 4548 - DNA, 314 bp, Zea mays
  misc_feature: Incyte ID No: 700354503H1
  unsure 2, 5-6, 66, 184, 186, 235, 240, 244, 278, 311: a, t, c, g, or other
antgnnaattaatgacttaattcgtggtgaggtcagctggaatttagacactcttggtgatttcgngattatgagaagcaatggacagcctgtgtataacttctgtgtgacagttgatgacgctaccatggcaaatatctcatgttatcagagctgaagagcatttaccaaatacattgcggcnanctttaatttataaagctctggatttgcaatgccttcatttgctcatgtntcgcntatnctggctcctgacagaagtaaactggtctaaacgngcatggagctattctgtggggcatataaagagnggg

SEQ ID NO: 4549 - DNA, 180 bp, Zea mays
  misc_feature: Incyte ID No: 700354504H1
  unsure 4, 33, 45, 50, 56, 58, 72, 90, 100, 102, 110, 126-127, 131: a, t, c, g, or other
gaanggaatgaaccttggcttcttcaggacatncttctcctgggntagcncacggncnctaggttcatgganactcttttgagaagagantttcagttcntntcggaatncgttcagagggtggcnntaanagtcaggtgatggtggaccaactcaaagggcatcagccttggcagctct

SEQ ID NO: 4550 - DNA, 314 bp, Zea mays
  misc_feature: Incyte ID No: 700354507H1
  unsure 44, 195, 262, 280, 290, 306: a, t, c, g, or other
gtagagagaatggtaaaatggttgaaggtcggtggttatatctnctttagggaatcttgcttccatcaatccggagatacagaaaggaaatttaatccaacacactatcgagaaccaaggttttataccaaggtatttaaagaatgccaaacctttaatcaggatggcacttccttcaaactttctttgattacnttcaaatgcattggagctatgtaaacatcaagaaagatcaaaaccagatatgttggctatggaaaanaagtaaatcatcagaagnggggggcttncaaagtttttggacangtgccgta

SEQ ID NO: 4551 - DNA, 179 bp, Zea mays
  misc_feature: Incyte ID No: 700354508H1
  unsure 19, 99, 107, 117, 153-154: a, t, c, g, or other
gcaggccggccatacaggnagttcctgtaagcggcgtccagggctgcaggagacgtcgatccctgcgaccggggctgcgaggaggggagtttccattcngtttgtgncggtattgtnttagtctgaatctgatggagcagtttggaatgctgnnctattgtgcctgatccaaatgaata

SEQ ID NO: 4552 - DNA, 175 bp, Zea mays
  misc_feature: Incyte ID No: 700354511H1
  unsure 17, 30, 42, 66, 105, 121, 123, 149, 161: a, t, c, g, or other
ctattattgctttcaancaataaggacaancttggaagaganaagcttgtcactgttgaagatatngtccgtcagcattgggcgacatatggtcgccattattanacacgctatgactatnanaatgtcgatgctggggctgctaaggngctgatggcaancctaataagcatgc

SEQ ID NO: 4553 - DNA, 171 bp, Zea mays
  misc_feature: Incyte ID No: 700354516H1
  unsure 4, 9, 37, 54, 56, 80, 83, 123, 145, 152, 158: a, t, c, g, or other
ccangtccnagcgaacccgcgtgcaacctgtcacgantctagccgcctcttcancncgccatggatcccaactggtcctncgncgccggtgactcctgcacctgcgcaggctcctgcaaatgnaaggagtgcaaatgcacctgcngcaaagnaaagcnggctgctcctgct

SEQ ID NO: 4554 - DNA, 179 bp, Zea mays
  misc_feature: Incyte ID No: 700354517H1
  unsure 53: a, t, c, g, or other
ctccagtccaagcaagcgaagagcacacctcgagatctctccctcaccgcgcngccatgggacgcattgactcggtagtcgacacgcttccgggagttcgccaaggacagcatccgcatcgtcaagcgctgccacaagccggaccgcaaggagttcaccaaggtcgccgcgcggactgc

SEQ ID NO: 4555 - DNA, 179 bp, Zea mays
  misc_feature: Incyte ID No: 700354518H1
  unsure 17, 32, 51, 53, 56-57, 61, 82, 170: a, t, c, g, or other
tgagaagaacacacaanatgagggttcttgtngaggaagctgttagtcctntntgnnttgnagcagcattctattcagggtncatggtcatgtctctagaatatgatcacacggcaagcatcgagtgccttggcgacccaatgaaacccttgtacgagggcggacatgtncagaacagc

SEQ ID NO: 4556 - DNA, 319 bp, Zea mays
  misc_feature: Incyte ID No: 700354519H1
  unsure 25, 40, 49, 57, 92, 105, 218, 223, 225, 231, 235, 292, 310, 312, 314,: a, t, c, g, or other
gcatagcttgttgatagcaaaactnaagaaggagattgangaatacagnatgcgaanagactccctatctgaggaaatggaggatttaaggnagcaacggcaganatttgaagaagagtgggaacaactagacgaaaagagagccctccttgtagaggaggacaaaaggttgaacattgagaggatgaatttagaacggtggcgtgacaacgaagaanaaggntnaggtgngaancaacaggcgtggatcgacgaatacaagcagcagctggcagagtcttgagcgcaaggnaaaggctttgagtgatgntnangaanc

SEQ ID NO: 4557 - DNA, 180 bp, Zea mays
  misc_feature: Incyte ID No: 700354521H1
  unsure 27, 42, 82, 116-117, 120, 128, 133, 139, 149-150, 152-153: a, t, c, g, or other
cgccaaggctcaggagctctccaacgngcagccgcagcaggngcctcctgctccgacggaggatgccgcagcgacgccgccncctacctttctactccggccaatgctcccacgcnngtngaggtggntagcnaagggnattgccagcnngnncgctaagaagtggctaagcagcacagg

SEQ ID NO: 4558 - DNA, 175 bp, Zea mays
  misc_feature: Incyte ID No: 700354523H1
  unsure 17, 28, 34, 84, 90, 128, 133: a, t, c, g, or other
cggaaccgccatcttcnagtaattcgcnaaaatngcgaacacaaagggaaagaggagaggcacccgatatatgttctctaggcntttagnaaacatggagttgttcctttggccactatatgcgaatnctatnagaaaggtgctattgtagacatcacgggaatgggtactgttc

SEQ ID NO: 4559 - DNA, 173 bp, Zea mays
  misc_feature: Incyte ID No: 700354534H1
  unsure 18, 29, 39, 52, 79, 127, 158: a, t, c, g, or other
tctccgctagggcacagncggtgccggtnaaggcgatcngtaggtggtgtcngagcggtgaaggaggatggacgacgtncagggagacaacgaagcagttctggaggacgacgctttccccgacgangggcccttagatacggaggagggaggtggangagaaccctcagcgg

SEQ ID NO: 4560 - DNA, 175 bp, Zea mays
  misc_feature: Incyte ID No: 700354536H1
  unsure 8, 43, 68, 77, 123-124, 139, 148: a, t, c, g, or other
ggagagangagaggcgcagagcatcgacgatggcgagcggcancatgaagagggagatcagcgagacncacgacacnctccgcttcggcctcaatgccggcgtcaaggccgacctcgcgccgnngcacccgctccagtncagcatccnatcggaggccaagttctgggcggacaa

SEQ ID NO: 4561 - DNA, 171 bp, Zea mays
  misc_feature: Incyte ID No: 700354541H1
  unsure 11, 64, 101: a, t, c, g, or other
caaggcctctncggttgtgggctgtgccatgactccaggccaacatgtaattatatcgccgtgngtaacgaggtgagcgccggcgacgccgcggagatgcngctcgcctgctccgtatcatcctggctgctggccgagtgaggaggcacgggcgtgcatagaacaaagcca

SEQ ID NO: 4562 - DNA, 170 bp, Zea mays
  misc_feature: Incyte ID No: 700354544H1
  unsure 118, 151: a, t, c, g, or other
gtctgacaacaatataacagcactcccagcggagtggatttgcttgaagctaacctgcaagtgctgaaactggatggaaatccgctaagaagcataagacgaactctgttggagcgangaacgaaagcagttctcaagtacctcaaagaanaattgccgtctgaataata

SEQ ID NO: 4563 - DNA, 300 bp, Zea mays
  misc_feature: Incyte ID No: 700354547H1
  unsure 41, 44, 187, 214, 231, 276, 290: a, t, c, g, or other
cctgatgaaggggaacgctaccaacattcactcgcgcgcanacncggtcagttcctattcgcggctttctatggaaggttctcccgtacaagatgcggaagacggcgacaacgcaaccttgattccatcgacgaagctccgacgtcagggcgtcgcgatctgcatggcaacatccccgtcatgccgnaagatctggatttgacgtcctccggtncgtcgtctgatgctctnattgcggcggaacccaaagaagctattcgcggtcgcggttgaatnaggctgcatcgctnacgttcataa

SEQ ID NO: 4564 - DNA, 169 bp, Zea mays
  misc_feature: Incyte ID No: 700354548H1
  unsure 4, 47, 54, 83, 92, 96, 164: a, t, c, g, or other
ccangtcccagcgaacccgcgtgcaacctgtcccgactctagccgcntcttcanctcgccatggatcccaactggctcctgcnccgccggtnactncctgcacctgcgccggctcctgcaaatgcaaagagtgcaaatgcacctcctgcaagaaaagtgctgcncctgc

SEQ ID NO: 4565 - DNA, 195 bp, Zea mays
  misc_feature: Incyte ID No: 700354549H1
  unsure 22-23, 40, 43, 66, 69, 96, 114, 118, 125, 128, 132-133, 138, 141, 151,: a, t, c, g, or other
gccatgggcagaccgccaccgnngaatgccatcttggtgnttngatctcttgcttcgccggcgctncangcggaatgtccccatacatactccccnaaatgcacagacgggcangtangcggganccngttnntcgangtncagttctgcntggncggcaatcggctccgatggncggagcgtcgncnactgcct

SEQ ID NO: 4566 - DNA, 170 bp, Zea mays
  misc_feature: Incyte ID No: 700354558H1
  unsure 63: a, t, c, g, or other
ctcatctccaccattgtttggagccccaacgcataccaagtcggtcgtcggggtataccgaancgggtcgacaaccctacatggggggaacatcaagcaccgagataatactcgtatgagatcaatcctcataccggggccgcaagatcgcgtgtgcagcgccaccaccg

SEQ ID NO: 4567 - DNA, 304 bp, Zea mays
  misc_feature: Incyte ID No: 700354559H1
  unsure 211, 227, 284, 287: a, t, c, g, or other
taataatgtaaggagccagcttagtgcaatcaacagaaagcaaagtgggagcttagcggttcgtgatctttccaatctggtaaaaccggaggatatgatcacctcggaacatcttgtgacacttcttgcaatcgttcccaagtactcccaaaaagactggctgtcaagctatgagacacttgatacatttgtggtacctaggtcatctaanaagctctatgaagacnacgaatatgctctctacactgggacactatttgctaaggttgttgacaatttaaggnccntgctcgcgagaagggtt

SEQ ID NO: 4568 - DNA, 167 bp, Zea mays
  misc_feature: Incyte ID No: 700354561H1
cacctcctcaccattccagacttcttcacttctgcggaggcaaaggctttcattgatatcgctgagtcgatgggcttcacgcaccagggcagtttggggccactaaagggggaggcttacagagacaacgatcggatatctgtgacggatccattgcttgctcaagc

SEQ ID NO: 4569 - DNA, 171 bp, Zea mays
  misc_feature: Incyte ID No: 700354562H1
  unsure 50, 56, 76, 87, 131, 138, 152, 158, 163-164, 169: a, t, c, g, or other
cagaagctttactggatctggaggattagcgcttcacagggatcgccatntcggantcggaggagcaccacttgcnaatcgaaggcngacgccggagcgtccaagacctacccgcagcaggctggcaccgnacagtangaacggcttcattngtcatnaaganngcgcnct

SEQ ID NO: 4570 - DNA, 168 bp, Zea mays
  misc_feature: Incyte ID No: 700354565H1
  unsure 8, 22, 26, 52, 66, 70, 90, 99, 102, 118, 123, 130, 133, 141, 161,: a, t, c, g, or other
aacaaaanaacactcgtttggncacnggcacacaaggacggtagtcagcggngatcggtcggtggncganggacggaatcagctaagcantctcgcctngtnttctccggcggcgacncacangcgaccnttntatgtcgngaaataagttccccatcctncannang

SEQ ID NO: 4571 - DNA, 306 bp, Zea mays
  misc_feature: Incyte ID No: 700354566H1
  unsure 45, 65, 105, 120, 122, 124, 163, 175, 193, 213, 217, 234, 244, 251, 264,: a, t, c, g, or other
gtgataatcgtgctcgttggcaacaaaactgatcttgtcgacaanagacaagtgtccacagaagnaggagagagcaaggcaaaagatttgaatgtcatgttcatncgagaccagcgcganancnggcttcaacatcaagccgttgttccgcaagatcgctgcnaccctgccaggnatggagacattgtcaggnaaagcaggagggctggtggntgtngacctgaagtcgactcnagccagtccnaatcggnacaacaagagggnatagatgnngctgctagaagtgtattagcttcaggcanactt

SEQ ID NO: 4572 - DNA, 170 bp, Zea mays
  misc_feature: Incyte ID No: 700354568H1
  unsure 6, 79, 89, 91, 102, 118, 169: a, t, c, g, or other
ccacangcaccctgccgcgatgagccactaacggacctgagatacgcgcacaaggtcgtcggctagacggatggcgaanaggaaactgngngctgtggaganggaagcgctgaccaanttcttgacggacacggaggtggaagacgagctcgccggattcttgcactant

SEQ ID NO: 4573 - DNA, 175 bp, Zea mays
  misc_feature: Incyte ID No: 700354569H1
  unsure 13, 17, 42, 51, 54, 85, 89, 100, 111, 123: a, t, c, g, or other
gcagacacgagcnatcngatccgatccggaactgtgccggcnagccatggngantagggttttgctcaccgcactactcctcgcnttcntcctcgtcgcnacacctttcancgcccgagttgnctagagctgattcggaggaagatgctgctgcagatgaggttgttgaaggggc

SEQ ID NO: 4574 - DNA, 171 bp, Zea mays
  misc_feature: Incyte ID No: 700354570H1
  unsure 12, 31, 33, 35, 58, 96: a, t, c, g, or other
ggatgaacttgngatgatgcctttgagcagnanantgaaatcgccaaagctgtagaanatgaacttgaaaaggcaatgtctatgtatggatacgancttgtgcagactctgattgttgatattgagcctgatgagcatgtgaagagagctatgaatgagatcaatgcagct

SEQ ID NO: 4575 - DNA, 163 bp, Zea mays
  misc_feature: Incyte ID No: 700354578H1
  unsure 103, 108, 111, 120: a, t, c, g, or other
ggcatttgcagaattagcttgctggcttatagcccaatggcaatgggtatactttcaggaaagtatcacttatctgataactgtggtccgccagacgcaagantgaanctnttcaaaggnactgtgttctgaaatttttaaaaggtttatagtctggttccaa

SEQ ID NO: 4576 - DNA, 162 bp, Zea mays
  misc_feature: Incyte ID No: 700354580H1
  unsure 7, 15, 33, 52, 54, 70, 118, 132-133, 135, 144, 147, 156: a, t, c, g, or other
gttcacntcggtgtntgcagcaccctccgcttnctctcctaggcgacgagancnagtggctagaagttcnccatgtgtattctcaagatccatgccagggagatctttgactctcgcnggaatcccactgtnnangttgatctnttnactcacaangtgtct

SEQ ID NO: 4577 - DNA, 168 bp, Zea mays
  misc_feature: Incyte ID No: 700354585H1
  unsure 24, 29, 45, 63: a, t, c, g, or other
aagatcgcgaggccgaggcttgtnccgtntccgctccgctccgcncacccacggtttctggangacaattcttcgctgtctagccttcctcaaaagtaaaaagggtaaatgggatcagaagggccttcagttgtcactgtccatgttactggatttaagaagttccat

SEQ ID NO: 4578 - DNA, 160 bp, Zea mays
  misc_feature: Incyte ID No: 700354587H1
  unsure 2, 30, 82, 85, 101, 134, 144: a, t, c, g, or other
ancagggttactgaggagaataagcatgantatctcgaccgggtagcagagcatcgattgaccactcgccatcaggcctcanatnaatgccttcctggaanggttgtaatgaactcattccacgggagctgatntctatcttcnacgacaaagagcttga

SEQ ID NO: 4579 - DNA, 360 bp, Zea mays
  misc_feature: Incyte ID No: 700354588H1
  unsure 23, 45, 55, 60, 65, 70, 105, 110, 115, 136, 143, 155, 159, 162, 232,: a, t, c, g, or other
gttacacaacatcccgtgcacanagaaaacaaagtgcaacaccanaaattacagntcacntggtntgcgncttaagattgcccaagaggcaatggcctttaggtncatcnccatncttgccttagcacacgggtgngcggctnagcacacggctnattncgncgggttcgagttcagtggcaccaccaccggctgcacctttccagggttcggcaagggctccaagcctggncccacttggtccttcaccccnaacgttggccaccatgctgtgacgtngagattcaaggagcncggtggccgacgantnctcctttacgctcaaggagggtccgatggcacctggacgcttgncaccaa

SEQ ID NO: 4580 - DNA, 165 bp, Zea mays
  misc_feature: Incyte ID No: 700354590H1
  unsure 5, 17, 22, 45, 80, 93, 103, 115, 132, 139, 156, 158: a, t, c, g, or other
ctcanatgtgggaaggnttgtncatataagacaaccaaatgatgncatgagacaataaatgctataggaattatggaggnataattagctatntattttcttngttagggaaganatattattagttgtagnagtaatnactaacttctacctttntnattgtgg

SEQ ID NO: 4581 - DNA, 163 bp, Zea mays
  misc_feature: Incyte ID No: 700354593H1
  unsure 6-7, 32, 35, 67, 96, 144, 153, 159: a, t, c, g, or other
gcttcnnccacaccccaacacaaacaagaganaanacaaaaactagacgaaagagggaagaaaccangaaattggcgaatccctggcgctccccantttcaactcccatccgcttgccgttgccgcgtttgtttatcgagccantttgatcanggggcnacac

SEQ ID NO: 4582 - DNA, 175 bp, Zea mays
  misc_feature: Incyte ID No: 700354594H1
  unsure 46, 60, 70, 73, 80, 111, 119, 130, 143, 152, 163, 171-172, 174: a, t, c, g, or other
gtcttcgcgttgcgttgcttgtagatccaatcagacaggcatcgcntgattggaagaganggattaaaanagntgatggnatagcccagggactcctgtacctccacaatntctcgagngtacgcatcanccacagggacttngcagcgggnaatcatcctgntagatgcnnanc

SEQ ID NO: 4583 - DNA, 120 bp, Zea mays
  misc_feature: Incyte ID No: 700354596H1
  unsure 2, 5, 7-8, 30, 59, 62-63, 70, 73, 90-91, 111-112: a, t, c, g, or other
cnagngnnccacgggcttgagccggggtgnatctggaggggccggagccgagcacgganggnnctttcgnacncgaaccaaaccgctagnncaggacctggtctcccgagnncaggacta

SEQ ID NO: 4584 - DNA, 290 bp, Zea mays
  misc_feature: Incyte ID No: 700354602H1
  unsure 2, 88, 216, 219, 247, 283: a, t, c, g, or other
ancagtgctaagaatgcaacgaatgtagaacagtctttcatgacgatggcagctgagattaaaaagcgaatgggtcccggagcaacanctggtggtggctgagaagtccaatgttaaaattcagagcactccagtcaagcagtcaggtggaggttgctgctaaaatttgcctccatccttttctcacagcaatgaatttgcaatctgaacccaagnganaaaacaaaattgcctgaattgtactgtntgtagcgcactacaacagattcttaccgtctccacnaaggtca

SEQ ID NO: 4585 - DNA, 288 bp, Zea mays
  misc_feature: Incyte ID No: 700354603H1
  unsure 246: a, t, c, g, or other
atgggtaccaaggcggctgaggtcaccaagggcctgcaacaccacctgcgccaaggagaagcagcctctgctcagcgagaactgcaggaggtcctgcacccctcctccttcctgaacgcagagcacgcccgccggtcgtcgtcttctgcctgcttgcgtgacactgaatcactgatacatcatacatgcatgcatgggatgcgatgacgatttgatgcatgcatgcatgggtataacctaccattngatgacgacgatgtatagtttcgtcgatgcttcatacacata

SEQ ID NO: 4586 - DNA, 288 bp, Zea mays
  misc_feature: Incyte ID No: 700354604H1
  unsure 72, 163: a, t, c, g, or other
atttgtttgatgcttaaaggtctgatccgactgagaacgatagtgtagagggtctcaggccaaatgcacggngccctggtcttgttaccttcgggcccgacagagttatggagttctgcaacaacaatgacctgcagttgattgtgcgagcacacgagtgcgncgatggatggcttcgagcgtttcgctcaaggtcacctgatcactcttttctcagcgacaaattactgcggaacggcaaacaacgcaggagcgatcttagttctcggaagggatctggtcgttgtt

SEQ ID NO: 4587 - DNA, 79 bp, Zea mays
  misc_feature: Incyte ID No: 700354605H1
  unsure 8, 32, 39, 50, 56, 75, 77-78: a, t, c, g, or other
gtggtgcntaggccacgtggtcgaccccccanaaggaanagggatgatgnattcanaaagagcagttccacacancnnc

SEQ ID NO: 4588 - DNA, 289 bp, Zea mays
  misc_feature: Incyte ID No: 700354606H1
  unsure 188, 214-215, 221, 224, 235, 238, 244, 251, 254, 265, 277, 284: a, t, c, g, or other
aagataaagaaatgaaatggccgcaacggccccggcaacgcggccagccagcgtcacgtttaccctcctcccctccggtcgtcacgcgcccgtccctctcctctcctctcctgctccgatccgtacgcaaacgcaacgccgcccgccatgccgcccgcttcgccttgcatgcaatgcaccgccgttanacgcaggaacacattttttttttttnnatcgangangacttgctgtnagnatcgcnatgggcncgntcgatcatgcngtatatgcatgncataaanacatg

SEQ ID NO: 4589 - DNA, 282 bp, Zea mays
  misc_feature: Incyte ID No: 700354610H1
  unsure 36, 39, 41, 49: a, t, c, g, or other
cccaatcgtcgccgggagcctcccgatccttcttcnacncngcacggtncgtgccagggccggcacgcggacggtgcttggactgcccttgtcatggatcgcgccgagctcaccacggagcaggttctcaagcgagatattccatgggagcattacatgtcaactaagcttatctccggaacgtgccttcagcttttacggcgatatgaccacaaaccggagagccagcgagctactttacttgaggaggatggaccagcacatgtccgagtttttcctgaa

SEQ ID NO: 4590 - DNA, 273 bp, Zea mays
  misc_feature: Incyte ID No: 700354611H1
  unsure 50, 87, 153, 188, 258, 260: a, t, c, g, or other
atgatggtctacttattgatgcaaactctggaaagacagttcattccatnaaaggacatcgggactactcatttgcatcggcttggngccctgatgggcgaacatttgctaccggcaaccaagacaagacatgccgaatctgggacgtgaggnacctttcaaaatccgtccatgtgttgaggggtaancttggagccatccggtccatccgcttcacctcggatggccagttcatgtccatggctgaacctgactgantngtgcacattctaa

SEQ ID NO: 4591 - DNA, 209 bp, Zea mays
  misc_feature: Incyte ID No: 700354613H1
  unsure 5, 7, 9, 12-13, 26, 28, 30, 38, 44, 49, 55, 65, 125, 132, 134, 142, 158,: a, t, c, g, or other
tcagnancnggnnttaaatcatcacntngnggtccacnacaatnacatntatctnatacatctanagaagggtcggctgatacctgctcaagcaagtgtagcttcagatagcacagatggcaggncagtgangnagaagctngtagccgatttgctanggcggntgancaaaaananttatacagatgaagangcacttctcacanagc

SEQ ID NO: 4592 - DNA, 283 bp, Zea mays
  misc_feature: Incyte ID No: 700354615H1
  unsure 3, 202: a, t, c, g, or other
tanagttcctacagttgtaaccagagcagagcctcacaaccaggttataattcatccgactcaagcaagggtcctcactatccgggagaacgcaaggttacagggcttccccgattactaccgattgtttggcccgatcaaggagaagtacattcaagtcgggaacgcagtgactgtccctgttgcccgggcactgggctantgtctggggcaagcctacctgggtgaatctgaggggagtgaccctctgtaccagctgcctccaagtttcacctctgttgga

SEQ ID NO: 4593 - DNA, 290 bp, Zea mays
  misc_feature: Incyte ID No: 700354617H1
  unsure 17, 29-30, 37, 48, 50, 52, 54, 60, 70, 86, 103, 112, 114-115: a, t, c, g, or other
ttgggattgagatctgngaccatgtaggnnaggatcntgcgacggtcntngntncaggantggttacgantcggtctagacaagtnggatctgagatctctcnggcataagngnntttgacctatcagcagaggcgttgccttggttgatgccgccggaggaggcagacaagaggacgacgcacacgcggcaagaggcgcaggagttggaggagcgcatgacctgtctgcggttgctattcgaggacgcagcagatgacagaattctcgccagaagggagcttggagcag

SEQ ID NO: 4594 - DNA, 284 bp, Zea mays
  misc_feature: Incyte ID No: 700354619H1
gtggtgcaaacatttcagacattgttgacagtattcaggctaggaggcttgatatgctatttgtgcttggtggaaatggaacacatgctggagctaatgctatacatgatgagtgccgcaagagaaaactgcaagtatcgattgtatgtgtccccaaaactattgacaatgacatattactgatggacaagacctttggatttgatactgcagtggaagctgcacaaagagctatcaactctgcatacattgaggcacattctgcatttcatggcattggacgg

SEQ ID NO: 4595 - DNA, 163 bp, Zea mays
  misc_feature: Incyte ID No: 700354622H1
  unsure 2: a, t, c, g, or other
gntaaacactgggaacaaccttgttgagagtgccaaggagcgaaattgcttattcaaggtccccaagccattgaccgcattctttgcagaggataacctgaagactatgaaggtggaaaggcgtcctccgccagagatgaatgctcgagtactggaagagatc

SEQ ID NO: 4596 - DNA, 276 bp, Zea mays
  misc_feature: Incyte ID No: 700354623H1
  unsure 193: a, t, c, g, or other
acaagtacattgaagatattcttctcaaggtggctgctcaggtacctgacagcggcccgtgcgtcacatatattggcaaaggtggatcaggcaacttcgtcaagatggttcacaatggaattgaatatggtgacatgcaacttatcgccgaggcttatgatgttctcaagttcggtgggtaagctcacaaacngcgagctgcatcaggtgttctctgagtggaacaagggtgagctcctcagtttcttgattgagatcacggccgacatcttggta

SEQ ID NO: 4597 - DNA, 284 bp, Zea mays
  misc_feature: Incyte ID No: 700354630H1
  unsure 54, 62: a, t, c, g, or other
cctccctcccccaagatcctccacttcgatcccaaacaaaccaacaaatccatnccatcgcncatggacgcgttcttctcggcctcctccgcgtcggcgccctacggctacggcgccggcggatggagctacgactcgctcaagaacttccgccagatcacccctgccgtccagacccgcgcaattagcatttcgtatttttttaaaaatatatatcagtcgctggtttcgtgcgttccagaaattctcctgcgggttgcgtgtagctgatgcgtaattccctg

SEQ ID NO: 4598 - DNA, 281 bp, Zea mays
  misc_feature: Incyte ID No: 700354631H1
  unsure 157, 189: a, t, c, g, or other
gcaaagcatccaagggacaaagagaagctgttgcacctacttcgttgaggattgctttgagcaaatcctacccaaacagcaaattctttcaggagggacagatgaatgatgcatctgaggtactgggtgtaatctttgagtgtttgcataagtcatncacttctcgtactgtctaccatggtgtatccnacgagaaaaattctattggatcatgggattgtgcaaatatttcttgcataacacataatctttttgggatggacgtatatgaacggatgaac

SEQ ID NO: 4599 - DNA, 281 bp, Zea mays
  misc_feature: Incyte ID No: 700354632H1
  unsure 149, 188: a, t, c, g, or other
cggagctggaagaagaagatacagagcgcatgctcctgtgaacatacaccactgaacccatagaaagcagcacacagtctgcataggtgcattgttgttccggcctctcctagaggaaaggaaggtcaggactcaggaggatgcctcgngccccgaccatgaccgctttccttgtcgccgtgcttgcngccctcgttctcacgtccgagggccgcgtttctcggaaggactgggcatcgacctcggcggtggcagcggggcaggcatcgggatcggtgctg

SEQ ID NO: 4600 - DNA, 161 bp, Zea mays
  misc_feature: Incyte ID No: 700354633H1
  unsure 10, 84: a, t, c, g, or other
ttattaaganattcctgacgaatttattacaagtttaacaacctcgtggttctaccattaacaatgtcgagtaattcatatttnatattgcatgaccagctttggaaacaggctatggggcaaagccgggtacgaaaaccaaatgtatcctcatttaccaa

SEQ ID NO: 4601 - DNA, 282 bp, Zea mays
  misc_feature: Incyte ID No: 700354634H1
  unsure 29-30, 59, 89-90, 104, 106, 108, 113-114, 116, 121, 126, 135, 138-139,: a, t, c, g, or other
ccaatcagatccgatttcgtagagatgannccggcagtagaggcggaggctgacgagcnagcggcggaggagatggcacctaagaaggnngcggctgccaaganancngccgnngnagttnaagtngaggatgtngtnnacggggacgangcngtcgattgggagggcgacggtgangaggacgacgatggggaagaatcttcacatcggantcncccatngttcccctgcatcccaggccannnacggnncccgcggttgccaccttgcccgccggcanca

SEQ ID NO: 4602 - DNA, 282 bp, Zea mays
  misc_feature: Incyte ID No: 700354636H1
cgttgtgctctctctcttcattcgttcccggcctcaccccgagccagtcgtctcgctagggtttcgccgccgccgccatgcctcgccgcagctcaggaaggtctgccccacgcccagctccccgtgctgcttcactgaggaacccgccacagccagcacgccaggctcctcctccagctcctgttcgagatggtggtggctccatgtttggaggaattgggtccaccattgctcaaggtatggcgtttggcacgggtagtgccatggcacacagggctgttg

SEQ ID NO: 4603 - DNA, 280 bp, Zea mays
  misc_feature: Incyte ID No: 700354637H1
  unsure 6, 54, 77-78, 84, 122, 127, 139, 157, 159, 169, 181, 183, 189, 194, 203,: a, t, c, g, or other
cgccantctgatcatctccatgcgctgaagatcgttggtgcccgccatgcttcncgatggttgatgccacatcgtcnntgcggnaatttcaagccccatagctgcacatatactcgcacttntactncggcgacggccngggcgatgacctctttgncncggtgatgcnacctctggcccntncctgcnactgncgatgatgnttcttcgtataccgctaacnaccatgcctatctncggctacantgaagacaccgcagntgctggtggagccacagcc

SEQ ID NO: 4604 - DNA, 276 bp, Zea mays
  misc_feature: Incyte ID No: 700354638H1
  unsure 96, 210: a, t, c, g, or other
aagacaactgttctggagctgacgtacaactatggagtcacagaatacagcaagggcaatgcatatgctcaggttgcattggcaccaatgatgtgnacaagagcgccgaggcggttgatctggcgaccaaagaactaggtggcaagattttgcggcagccagggcctctacctgggatcaacactaagatcgcctcttttgttgatccanatggctggaaagtggttctggttgacaacaccgacttcctcaaggaatccactgaaggctcgggat

SEQ ID NO: 4605 - DNA, 275 bp, Zea mays
  misc_feature: Incyte ID No: 700354639H1
  unsure 154: a, t, c, g, or other
tccgagatcctaggcatgaatttcgggtgcgtcctcgcggctctgtccgacgccaagatccccgacaagggctgcctgctcccgctcatctctaagctgctcggctacgccatcgtcgccgcatccaccaccgtgaagcttccccagatactgnaaattttgaagcatggaagtgttagaggactaagtgtggcatcctttgaacttgaggttgtcggctacacaattgctttggcatattgtattcataaaggacttcccttttcagcttatgg

SEQ ID NO: 4606 - DNA, 277 bp, Zea mays
  misc_feature: Incyte ID No: 700354640H1
  unsure 47, 104, 139, 228, 247: a, t, c, g, or other
catccatgtccctcatttcagctcaagttccctgttaagccagctgntatcaagaaaagaatagagagcttgatccgaccgggagtacctggagcgcgacaggngtaacccccagatctacaactatctggactgacancgttttggtggatcgttacccatttcattactatcagaaaaaggcactgtaaattaatttattttcccggtttcttgttccttcatgcntttgctcctactgggaggnagttgtagttgtagctgctgcaacgtgttt

SEQ ID NO: 4607 - DNA, 280 bp, Zea mays
  misc_feature: Incyte ID No: 700354642H1
  unsure 235: a, t, c, g, or other
gtcaagcctgttcgaggtggaccaagagcagaaggccagcaactccgcggttcatgacccagaaaccggcgttcggcgatagtgtcaaagctggagcagatcgctgagacagagcgcttcatggtgaagaaacaggacgggctggtgaagctgcaggggtccaagcaagggaggaaggggcagctcgcgatcgacgccgagatcttcgaggtgacaccggcctttcacgttcgtncgaggtgaagaattcggcaggcgacacgctggagtatgagatgtt

SEQ ID NO: 4608 - DNA, 276 bp, Zea mays
  misc_feature: Incyte ID No: 700354643H1
attcctcctgtatcaagaactaataacagttcaacagttaatccaccagcaggattcaatcaccaaaacctcaccagacgccatcctcgaaatttatcagaggagattggtcgtctatctggagcactccgcggccatcaacccccacgcttaaggtcagggtttctgttggagcgtcagggcgatggtgtttggggcgttcctttatcaacaaggggtagagaaggaagaaggttaatggagattcggaatgcacttgaaatgattcaaaggggg

SEQ ID NO: 4609 - DNA, 156 bp, Zea mays
  misc_feature: Incyte ID No: 700354646H1
  unsure 26, 77: a, t, c, g, or other
agggggagtcggagtcggaggaggangacgacatcccctacggcctcggcttcttccacctggtgttctccatgggngcaatgtacttcgccatgatcttcgtcggctggaacgcgaacgcgagccacaccatggagaggtggacgatcgacgtcg

SEQ ID NO: 4610 - DNA, 281 bp, Zea mays
  misc_feature: Incyte ID No: 700354647H1
  unsure 186: a, t, c, g, or other
cagccagtcagccacatcactagctatctgtgcagaggcaatggcgtccaaggttgagctggtggtggaggtcaagtccccggctgacaagctgtgggcggcgctgcgtgactcgacggagctgttccccaagatcttccccgagcagtacaagagcatcgagaccgtcgagggcgacggcaagtncgccggcaccgttccgcctcctcaagtacaccgaggcggtgccgatgctgaacgttcgccaaggagaagcttgagacggcggacgacgagaacaa

SEQ ID NO: 4611 - DNA, 155 bp, Zea mays
  misc_feature: Incyte ID No: 700354648H1
gaatcaacactactcgaagaaccagagcaatttgaggacccatgctatgatccagatgcaattgcattacttgggccagtttcagaatctttagataacttccctccggacttagattgtggattctctcgagtgatgttgctaaagaaccacat

SEQ ID NO: 4612 - DNA, 288 bp, Zea mays
  misc_feature: Incyte ID No: 700354649H1
  unsure 29, 86, 138, 221: a, t, c, g, or other
cttgtcgctggcagccgattcggcgaggngcagcgacggtccttgttgcaggagtggttgcgcctcgcatctgccaagttggatcnggatctctcaggcataaagcgagtttgacctatcagcagaggcgttgccttngttgatgccgccggaggaagcagacaagaggacgacgcacacgcggcaagaggcgcaggagttggaggagcgcatgacctgtnctgcggttgctattcgaggacgcagcaggatgaccagaattcttcgccagaagggagcttggagcag

SEQ ID NO: 4613 - DNA, 280 bp, Zea mays
  misc_feature: Incyte ID No: 700354651H1
  unsure 31, 54, 62, 84, 86, 91, 94, 96-97, 107, 117, 157, 202, 219, 271-272: a, t, c, g, or other
atagatctcctatacttttcacatcaaaacnatatttccagtctttacagtttnagatgcgnatgattagactgatgttagacntnttcgnttncnntaaagagggnaagcttgtantctagattttcctgatttcataaatttatttttaaaagcngtagattattcataatgctatttttttatggtatacatattccgnaccaatgtgatcggacngatatttaagttatggtattgggaggtgatgagccaaatactagacatattnngtaccaca

SEQ ID NO: 4614 - DNA, 274 bp, Zea mays
  misc_feature: Incyte ID No: 700354655H1
  unsure 193: a, t, c, g, or other
acaagtacattgaagatattcttctcaaggtggctgctcaggtacctgacagcggcccgtgcgtcacatatattggcaaaggtggatcaggcaacttcgtcaagatggttcacaatggaattgaatatggtgacatgcaacttatcgccgaggcttatgatgttctcaagtccggtgggtaagctcacaaacngcgagctgcatcaggtgttctctgagtggaacaagggtgagctcctcagtttctgattgagatcacggccgacatcttggt

SEQ ID NO: 4615 - DNA, 275 bp, Zea mays
  misc_feature: Incyte ID No: 700354658H1
  unsure 76, 78, 112, 237: a, t, c, g, or other
acggaagacctcgtggacgccgacattgatgacggcaacaacatgcgacgtgcctcttcctcctctgccgggctangnccggggcggtgggtcatcatcatccccgccggcnagcccgccgaggccgcattcaccgcggatgttcgtgccccagagtcctgtaactccattgcaaagagctacagaagtgtctcctaccggtgttcaaccagatattgatgaatcaacagcaggagnttctgatggcccgcctcaaaagaaaattcccacgttgc

SEQ ID NO: 4616 - DNA, 277 bp, Zea mays
  misc_feature: Incyte ID No: 700354660H1
  unsure 64: a, t, c, g, or other
gggcggaccaggtaagcagcagcaggaaccctagcaccgccgcatccgcagccatgggtatcgncctcgttgccggtgggaggaacaagaagaccaagcgcacagcgccgaagtccgacgatgtttatctcaagctccttgtcaagctctaccgtttcttggtcaggaggaccaagagcaacttcaatgctgtcattctcaagaggctcttcatgagcaaaaccaatcgcccaccaatctccatgcgccgccttgttcaagttcatggaaggaaagg

SEQ ID NO: 4617 - DNA, 276 bp, Zea mays
  misc_feature: Incyte ID No: 700354662H1
  unsure 193: a, t, c, g, or other
tcgtcttcgtctccaggtttcgcgggggccaaggtttctgccggagcagtcgcggtctgcgctgcggcacggcgacgaggtggggatggagtaccgcgacaagctcgtgctggcgcccatggtccgcgtgggcaccttgccatttaggctactggctgctgaatatggtgctgatattacttatggagaagancattattgatcacaaattcttgaagtgtgagcgtgttacaaatgaatctcttgggactactgattttgtggagaaagggactg

SEQ ID NO: 4618 - DNA, 211 bp, Zea mays
  misc_feature: Incyte ID No: 700354663H1
  unsure 10, 40, 88: a, t, c, g, or other
ggcgctcggngcccatggcgtgaacgtgaagcccggggancaccacatcctcaacaggcagagcttccccccggggttcgtctttggnacggcgtcgtcggcgtaccaggtggaggggaacacgcacaggtacgggcgcgggccctgcatctgggacaccttcctcaagtatccaggcactactcctgataacgcgaccgcggacgtgaca

SEQ ID NO: 4619 - DNA, 286 bp, Zea mays
  misc_feature: Incyte ID No: 700354666H1
  unsure 9, 46, 63, 65-66, 73, 76-77, 92, 100, 167, 177, 188, 207, 258, 285: a, t, c, g, or other
gcagcagcnagcttccatcacatcctctttcccctcctcgcttcgnttcctacggcggattcntnntccatcnganngtccccgtaccccgnccacttcnggcgagcaagtagcccgagatggcaaacgcgagatcgggtgtgcgctgtgaatgacgagtgcatgcncaagttcggngagctgcagtngaagaggctggaccgcttncctaatttcaagatggacgacaagtttaaggagatcgttgtggcccaggtncggggatcgcgctaacagatacgaggna

SEQ ID NO: 4620 - DNA, 125 bp, Zea mays
  misc_feature: Incyte ID No: 700354669H1
  unsure 5, 77, 85, 97, 109, 114: a, t, c, g, or other
gcagntcgcatagtattagttgcatgcattatattgatgatgcaggtatttcgtcgagcaacaaggcgtactatcanttgttttngtaatacccaanattagtgaatanagggnaactggttatc

SEQ ID NO: 4621 - DNA, 277 bp, Zea mays
  misc_feature: Incyte ID No: 700354670H1
  unsure 42, 58, 66, 186, 228, 237, 243, 265: a, t, c, g, or other
gcgaattccattgtctgcgcttatctcaccctgtacgctccnactatctatagtgcanatcattangagcagggctaaatacagcaggctgctcttggtcgttcttgacgcggcaatgctagcactggtgactgcgggagcatctgcggcagggccattgtgtacttagcgcacaaaggcaacgtnagagcaaactggcttgcccatttgcccagcagtttgactcgntctgccgancgtatntctggatccctcattggttcgntcggagccatgg

SEQ ID NO: 4622 - DNA, 278 bp, Zea mays
  misc_feature: Incyte ID No: 700354672H1
  unsure 73, 100, 105, 115-116, 120, 128-129, 176, 207, 221, 233, 236, 239, 262,: a, t, c, g, or other
ctgcagaggggtccatacggcgttgttctggattcccgtcgtaacttaaagggaaattttcacaatgtccggngcccttgatgtcctgcaaatgaaggangaggntgtccttaanntccntgcagcannaacccacttaggcggcaccaatcttgacttcccgatggaacagtacntctatacaaggaaccgtgatggcatctatangctaaatctcaagnggactgggagangcntcngctggcagctccgtgcaattgtngcncttgaaaaccctg

SEQ ID NO: 4623 - DNA, 271 bp, Zea mays
  misc_feature: Incyte ID No: 700354674H1
  unsure 8-9, 18, 87, 226, 237, 240: a, t, c, g, or other
caccagtnntgttgttgnagcctctggtaccgctaaacccagcgaaaatgttactgcgatggaggggaatgccgctcccaatgtaantagcactatttcaaggcctatgccacagcggccttggcagcagacaggttatggaaacacctatggagggtatggtggatccaacatgtatagttcatatggtggatttggcaacacttatggtaccggtggactcggnaatagcatgtnctncgagttacggaggaggttatggtggtggcat

SEQ ID NO: 4624 - DNA, 270 bp, Zea mays
  misc_feature: Incyte ID No: 700354675H1
  unsure 3, 26, 31, 41, 51, 67, 73, 83, 85, 116, 135, 145, 164, 167, 173, 182,: a, t, c, g, or other
ggnacctggccatgatcaccgggcantggcncgtcaagacncgtgaggganacaccatcggtatcgnagtcancctccgcggnangataatgtacaacttcctggataggctcatnaaccttgggctccctaggnccatggactncctgggtgtcaaccccaanagnttcgangggcacggnaactacagccttggcctccgtgaccagggcgtgttcccggagatcccgtacgangtgggcgggaagaagaacggctggactgtccatc

SEQ ID NO: 4625 - DNA, 272 bp, Zea mays
  misc_feature: Incyte ID No: 700354676H1
  unsure 7, 17, 49, 56, 58-59, 77, 86, 117, 168, 185, 191, 196, 202-203, 207,: a, t, c, g, or other
gcaaccncatctcgtcntccagatccaggatggccgtcctccttgagancttgccncnncgagtgctctcggtgagntactttgtntcgatttatcaggaaatccgtttgcttcatnttgtgcaggctcatatgctgattgctggattcgggcaacccgcgttggatnctgtatcggttagtccngcctgnaaggntcttgnngttntgttttggtggtcgagacatcgcatgttcctgcttctggatcnagatcctggagaaatcgngang

SEQ ID NO: 4626 - DNA, 274 bp, Zea mays
  misc_feature: Incyte ID No: 700354677H1
  unsure 93-94, 122, 151-152, 190, 193, 258: a, t, c, g, or other
tccaagcacaatgatgcaaatggagaaggtggtcgtgatgggtgcaatcgacaactaacagctggcactgtggtcttgaaggagaaacaaatnnatttgaatgtgcctaagtcttcgttcanggcaaatgaagaacttccatgtggcattnntgatttcccagggtactccaatgatgctgatgggagancantctggtcacacacgttatggaaacaacaatagctatggacatgatatgcacatcaataattttcngtggggccagttggaa

SEQ ID NO: 4627 - DNA, 273 bp, Zea mays
  misc_feature: Incyte ID No: 700354678H1
  unsure 48: a, t, c, g, or other
aacaaacgacgtctgtgcgtctggcgttcggcgccatatttgcttgtntccgtagctacttttactttctggtgtgagttctagtcttgagcgctagtgagttccaacatttggtatcagagccattttatgcccaagatcctgcgctactacctcgagtcagagtccatggcgatggttccgcacggcgccggggggagttcggtctccatgtcatacccggtgctgtcgccggcgagctacacggcgtgggcgatcaaggtggagtcgatc

SEQ ID NO: 4628 - DNA, 289 bp, Zea mays
  misc_feature: Incyte ID No: 700354682H1
  unsure 5, 8, 10, 16-17, 23, 28, 31, 40-42, 67, 70-71, 85, 106, 120-121, 126,: a, t, c, g, or other
tgcgnggncnacaagnngacggncctgntcntgtgcaagnnngtcctgtgcgctactcccagcagtncannttggtgctgtacgncaggatccagtcgcaatggcnagtgcaccgagcannagcgncatcacggcgccggccatgaaggtctgccangntgantctcgacaangtgtacgtggtgaaggnngnccgangttcancnangcctncagttcacctgcggcaatgagaagaacccgcgcctcagcgagaactgcaagatgttcctgnacccctgcctncttc

SEQ ID NO: 4629 - DNA, 274 bp, Zea mays
  misc_feature: Incyte ID No: 700354685H1
  unsure 39, 53, 57, 65, 72, 80, 89, 101, 103, 116, 128, 133, 150, 154, 165, 168,: a, t, c, g, or other
aagatgacggcgcaggctgcggaggagctcgccgcccanatcgagcagcagangctncgaggagnagaagancgaggcanaagaggttntggtgcaggagnangacgaggatgatnaggatgacgatnatgangtcaaggatgatgatgnactngatggatccanaangggatgngagtggcaagttcgangcaaagcaggagtgagaagaagagccgcaaggcntgctgaagcttggcntgnaggcccatcnctggtgtcagccgggttcatt

SEQ ID NO: 4630 - DNA, 284 bp, Zea mays
  misc_feature: Incyte ID No: 700354686H1
  unsure 43-44, 65, 75, 78, 83, 90, 107, 109, 113, 128, 152, 210, 219, 221, 223,: a, t, c, g, or other
aagatacatgccttctgttcttcattttggttggtacctacgnngctgtgtgcctgaatggtggngctaacttgncantagancattatnttgaactcgcaactcangnatantaaacagctgcgcgngcgtagagaagatgcctgaccatngccagctcgtccttacaaaagtagccgaaatttgatttcaacttacctgaatcttctntggcagatngntnaagtnngctcaccctnntgggntnatttggngaacnagggncacgagggcatngcnggggt

SEQ ID NO: 4631 - DNA, 270 bp, Zea mays
  misc_feature: Incyte ID No: 700354687H1
  unsure 43, 50, 156, 160-184, 219, 265: a, t, c, g, or other
tctgatttggtcccggcttctcctccttccccctcggatcggnggcagtncccgtgccctcacagtcacaggggacgcggctcgcctttccttccccgccaatccatccgctcttctcagcggcgagaagaagagatggggagcaacgccgccggnaagnnnnnnnnnnnnnnnnnnnnnnnnntgtcgtgggagttccacgcgacggggcctcgcaanttgaccagccccggctggagggacctcatccgctccagctggaganatcca

SEQ ID NO: 4632 - DNA, 268 bp, Zea mays
  misc_feature: Incyte ID No: 700354689H1
ccattgttggacgcgttcccctcctgcacgcaacctcatctcgtcctccagatccaggatggccgtcctccttgagaccttgcctccccgagtgctctcggtgagctactttgtttcgatttatcaggaaatccgtttgcttcatgttgtgcaggctcatatctgattgctggattcggcaaacccgcgttggatcctgtatcggttagtccttgcctgcaagttcttgttgttttgttttggtggtcgagcatcgcatgttctgctt

SEQ ID NO: 4633 - DNA, 268 bp, Zea mays
  misc_feature: Incyte ID No: 700354693H1
  unsure 38, 83, 241: a, t, c, g, or other
tatgatgaagcacttgacctagaagcttttgtgagcanaatctggaagttgcaccctgatttacctgttgtccaaggattagncactgaagtcaagaagacagtgcaatcattagtttcacagcttctccagaaacttcgatcaaatattcagttacctgagtgcctacgaattgtagcacatctgcgccgaattggagttttcagcgagtcagaattgcgcttacagttcctgaggtgcngggaagcttggcttctggaattcttga

SEQ ID NO: 4634 - DNA, 300 bp, Zea mays
  misc_feature: Incyte ID No: 700354701H1
  unsure 81, 265: a, t, c, g, or other
tgcaactgtgcaaggataggcaacaagtgttcaacaatatgtctgtggatcaattgacctgcatttcagcttttagttgangatcaaaatctcgtgtcgttcagggccctcggtagagagacattaatgtgtcggcaccgtggatcgtcgcagttgtgggtcactgtaacggcactggtcacaggcaccatctgcctctgttcgtcctcctctattggcctcctcagcacctacagggtccagatggaaaagtttctataatacntatgtaacaaatacatactcctgttcaagagatcg

SEQ ID NO: 4635 - DNA, 300 bp, Zea mays
  misc_feature: Incyte ID No: 700354703H1
gggcagatgaaggaaattacgtacacaagcgccaactaaaactaaacccaagtcaattacttcatatatcactcaatagctgctagaacatatatgaatggttgttgtagactgatcgtaatcccagatagttatgatatacatctttcattttaactagctagcgtatatatgtattgtacgggtatctagatttttatctgtttattctaacattcgagatcctacatattttgttttggccgttcaccgtatgagatctttgacaatttaatgccaaattatgagaacttgagtcat

SEQ ID NO: 4636 - DNA, 299 bp, Zea mays
  misc_feature: Incyte ID No: 700354704H1
  unsure 44, 61, 94, 246: a, t, c, g, or other
tccctcccccccgcctccactaccccactcccaggcgccgcaanggtacgtcgccggcggnatgaacgacgcgcttcaagaagaaccgcaagangcgcggccacgtgtccgccgggcacggccgcatcggcaagcacaggaagcatcccggaggtcgcggtaacgccggtggcatgcaccaccaccgcatcctcttcgacaagtaccatcccggctattcggtaaggtcggcatgcgctacttccncaagctccgcaacaagttctactgccccgcggtcaacatcgagcgcctctggt

SEQ ID NO: 4637 - DNA, 296 bp, Zea mays
  misc_feature: Incyte ID No: 700354705H1
  unsure 47, 91: a, t, c, g, or other
gtaattgcagttgtgagtatactggctgcatgtgctgaatctggctnccttgcccttggtaagaggattcaccggcatgtgcgccagaggnagctgagtagatcaaccctggtatgcaatgccctgatggacatgttctgcaagtgtggatgtgttaaccgagccgactacatatttgacactgagattgttgaaaaggatttagtgtcatggaacattataattggagggtttgcaatgcatggcccaggtgaaaaggcgctggaatcttcgcacaaatgcagcagcaaggcttc

SEQ ID NO: 4638 - DNA, 299 bp, Zea mays
  misc_feature: Incyte ID No: 700354708H1
  unsure 2, 35, 44-45, 66, 73, 99, 103, 112, 125, 153, 173, 204, 263, 293: a, t, c, g, or other
anggcttcgaggtcaccaaccccttcatgcccggngcggccacnnccctgaacacgtacccgcgcnggcgaangtggctctacggtcgatctgatcgtngcgngccgccgcncgccctgaacgantaatactactagctactactcgctctgntacgtattagctagccgtgnttgcctgctgcatgtacgcatgttcttcgtntggcctgtcccacgtctctcttctagtctctgtgcactttacgctccagtgaagttacngaagtgtgcgcgcgcgatgcgtacagatcntttggg

SEQ ID NO: 4639 - DNA, 295 bp, Zea mays
  misc_feature: Incyte ID No: 700354709H1
gaccctcagacagaaggtattgttctcattggtgaaattggaggtacggctgaggaggatgctgcgacattcatccaggaaagcaaaacacaaaagcctgttgttgcattcattgctggacttacggcacccccgggccgtcgcatgggtcatgctggagctatcgtggcaggaggaaagggtactgcccaggacaaaatcaaggcactcagagaggcaggtgttaccgttgtcgagtcaccagcgaagattggctctaccatgtttgaaatcttcaagcagcgtggaatggtag

SEQ ID NO: 4640 - DNA, 296 bp, Zea mays
  misc_feature: Incyte ID No: 700354711H1
  unsure 2, 81, 160, 162, 170, 201-202, 205, 234, 236, 250, 254-255, 261, 270,: a, t, c, g, or other
gnaacaagcgcacaagatcaaataccttcgccgccaacaatgggcctccaggtcctccatcctgcttcgccatggtgatgntggctgcgctattcgttgttggtttgtgcaccacccccctcaccttccaggtcggcaagggatccaagtcctggccacntnatcctcanccccaatgttgccaccatatccgacgtggannttnaaagagcacggtggcgatgactctccttnangctgcaaggagggnccgnntggcantggacgctngacaccaaggcnccgctcaagtaccc

SEQ ID NO: 4641 - DNA, 295 bp, Zea mays
  misc_feature: Incyte ID No: 700354712H1
gcagcagccaagttatcttgcaagaagcgcctggccaaacatgtgttggatgtgacaggtgttacgattgatccaactagcctttcgatatacagattaagcgcatacatgagtacaagagacagctcctaaacatattgggagctgtttacagatacaaaaaattaaagggaatgagtgcagaagagaagcagaaggtcacaccgcgcactgtcatgataggagggaaagcgtttgcaacatacactaatgccaaaagcaatagtgaaattggtgaatgatgttggtgctgttg

SEQ ID NO: 4642 - DNA, 294 bp, Zea mays
  misc_feature: Incyte ID No: 700354713H1
  unsure 38, 82, 137: a, t, c, g, or other
aaataaagagggagaggcgaaaacaatctaacagggantctgcaaggagatctagattacgcaagcagcaagagtgcgaggngttagcccggaaggtagctgacctaacgaccgagaacagcgctctcagagcagancttgacaacctcaagaaggcttgtacaagacatggaagcagaaaattcacgtctgttgggtggggtggctgacgcccaggtaccaagtgtcacgaccacactgggaatgagcatcgagccgccgaattgcagctgcagctgcagcagcatcatgatg

SEQ ID NO: 4643 - DNA, 294 bp, Zea mays
  misc_feature: Incyte ID No: 700354714H1
  unsure 32, 85, 90, 286: a, t, c, g, or other
gttagacaagaggatgcgccttctgtgcttgngaggcatttccatgatttgcaaaagaaatacggagctgtcttagctgttgatncttgncaatacaggtggcggtgagggtcgcctccgtgaaaaatatgcaaaatctattgaacctattcttagtgaagatataagatatgtgcacttcgacttccaccgagtttgtggtcatattcactttgagcgcctttctcagctatatgatcagatcaaggactatcttcagaaacataagtacttcctataaagatanaggagaga

SEQ ID NO: 4644 - DNA, 304 bp, Zea mays
  misc_feature: Incyte ID No: 700354717H1
  unsure 58, 66, 220: a, t, c, g, or other
gaatctgattcttaaaccttatagtgtgaaatttagatcctattgtcacccctactcncacccctnccctctgtcacacccaagtgctcaatgaaatgcgtaactctaccacatgttattctaaggtgattactcccctgcaaacaaacagaatccctatctagcctagaaacaaatacagcaagttgcatctcctgaaccgtacttttttcaccctgtnccgacgctaggctcatatgcccgagccaaaaaaaaaacatccaggcaaacaggcaggctgcatcttgctaacctacttccttat

SEQ ID NO: 4645 - DNA, 298 bp, Zea mays
  misc_feature: Incyte ID No: 700354719H1
  unsure 118: a, t, c, g, or other
gggaggcaaagatgataggggattcctgtggaggattggatcagaagagggtgccctggagctgactggacataaggatactgtccggcacagtggctttcagttcagatggaaattngttggcttgtggaagttttgatgggcaaataaatgtgtggaatacagctacacgaactctcaagggaacccttgcagggttccgggtcaggttttgagtggcttaaatggcattctcggggacatttgataatcgcaggatcagaggattgtaatgtatggatgtggaatgccgaccata

SEQ ID NO: 4646 - DNA, 293 bp, Zea mays
  misc_feature: Incyte ID No: 700354721H1
atcggacccttctgaagagtttcttatgagctgcgctccgaacattgctgcaattgtgcaggctaactctaaagttgatgacgaagtgtctaaataccttcacattactccagtgggttctgatgactttgatttcgataatcttgagccagaggagaaagaatttgaaaatcagaatatctcagagaagggcctatcagatgcttaccaaaatgtcttaaataggctgcccagctacagaaacttgggaaggttggtaaaggtactgacaggaggaagcgatgaaaggagga

SEQ ID NO: 4647 - DNA, 165 bp, Zea mays
  misc_feature: Incyte ID No: 700354722H1
  unsure 5, 16, 25, 32, 41, 52, 63, 66, 69, 77, 91, 93, 103, 106, 109, 113, 124,: a, t, c, g, or other
cggcncagccgcagtnccaccgacnccgccgncggtccgcnctccatctctngccgctgcatntgnatntctatttncaataataaagatncnccgtggtggnacngcnggtnagtggtcaaanttctctgggtnctctctttggaagcggtgagccccccaaac

SEQ ID NO: 4648 - DNA, 290 bp, Zea mays
  misc_feature: Incyte ID No: 700354727H1
agctgtgccacacattgagttgaagcatgtgattgctgctacaattggtcttaagggtcttggaagcctcctttttattttgagcagctctctcggtgcttatctcctgctgctgtaccttgctttgatcactcctatcatccatgacttctacaactacgatatggagaaggcagaatttgcaggcctctttgcgaagttcacccaggatttggcgctgatcggagctctgctcttctttctgggcatgaagaactccatcccgaagcggcagggcggcaagaagaagg

SEQ ID NO: 4649 - DNA, 289 bp, Zea mays
  misc_feature: Incyte ID No: 700354729H1
  unsure 2, 8, 10, 35, 67, 76, 85, 87, 101, 105, 113, 117, 150, 179, 222, 245,: a, t, c, g, or other
gngccttncntcataaagtgcggagaaaattccantggtgtactggtgattaaggctgatctgcgantcccaggancctaaaggngncgaggtgatccgtnttgntccaagancaancagttcttgccgacttgagttttgaggaaatanaaggtgtgtttgagcaattgccagaggcngttagcttgcttgcctggcacgaacagcagatggtacaagggncagtattcaagattgtacagaanttagccagcaangtgncggcctgaaagagactgttgcaganatg

SEQ ID NO: 4650 - DNA, 292 bp, Zea mays
  misc_feature: Incyte ID No: 700354736H1
aggtcatgcgggaggaggaattcgcgccggtaaagaacgccagcggcgcaacgtatgacacccctgatagcgcgaagtcatgctgctccgcctccacagcagatgggtagtcgctgctggcggcttcttgacgcactctgtgcccttgtatatgacaggcgtcgaagtttctccgctctcctcctacgccggggagaacctggaagccatctgccgtgggcgaacgttccatgcgccgagcgagatctcgttttaggaggtagacctgttcatgggactggagtagcagttg

SEQ ID NO: 4651 - DNA, 290 bp, Zea mays
  misc_feature: Incyte ID No: 700354737H1
  unsure 23, 43-44: a, t, c, g, or other
ttttcatgctctcggaagaaganacaagtgccatctgtaaatnnactgaaggctactcaggatctgacatgaaaaacttggtgaaagatgcctcaatgggaccactaagagaggctcttcagacgggcgttgaaatcgcaaagctcagcaaggaggatatgcggccagtgatgctgaaggatttcgagaatgctatgcgggaggtaagaccttctgtttcctcaagcgagctggggacttatgaagatggaacagggcatttgggagcctatcgatctagtctgtcggca

SEQ ID NO: 4652 - DNA, 144 bp, Zea mays
  misc_feature: Incyte ID No: 700354740H1
  unsure 8, 53, 69: a, t, c, g, or other
cgccggcncaattcggataacaagctccctccgcctcgccgcgtctcctccanagccgcaggagccgcngccatccgatccggaagagggaggaggggggagggaggaggatctgtgtcccgattcgattggagctctcgtccc

SEQ ID NO: 4653 - DNA, 159 bp, Zea mays
  misc_feature: Incyte ID No: 700354741H1
  unsure 14: a, t, c, g, or other
agcgactaatgttntccgtgttaaagaggatgttcgacctatattctgggccaacagaccaaagagctatcttaaaaggacattaggttgggatcagtatccccatggacggtggggtgattctcggaacccatcatatggagcacttactgaccacca

SEQ ID NO: 4654 - DNA, 286 bp, Zea mays
  misc_feature: Incyte ID No: 700354742H1
cacaacgtatatcttagatagtttaattttgataatgggtccaagatatatcaccctatgcatcttcctagtacttgtcttacatggagatacaactttggcagaaacttgcaggcagtttgttaaatgggatccattctgctttagtgcgatgtgcaaggcaagttgttttatagagggaaaatcctccgatggttcctatgtaaaggggcacagatgtgaatcaaatggatatcacgctgtgtgtgtttgttttctgtgtaaaaattaggtatctaatgacatg

SEQ ID NO: 4655 - DNA, 193 bp, Zea mays
  misc_feature: Incyte ID No: 700354744H1
  unsure 12, 21, 25, 36, 40, 45-47, 55, 61, 66, 81, 94, 96, 109-110, 115, 132,: a, t, c, g, or other
ggaaatgtcagnttgcgctanatcncagttctcctngcangcagnnnatcaaatntttcantcatncaaaccacagttatnctgcagtggctantntggagtcagcatnncgagnggcgcacatgggcttcnctggtccctctcgttggcggaatanccctgacntcggngacagagcttancttcaacattt

SEQ ID NO: 4656 - DNA, 292 bp, Zea mays
  misc_feature: Incyte ID No: 700354745H1
  unsure 65, 82, 110, 133-134, 148, 155, 160, 166, 172, 178, 198, 205, 220, 226,: a, t, c, g, or other
gggctggtgtacgacgccggctccgacgactatgtcgccttcctctgcacgctcgggtactctcngtacgttgatctccatnttcacgcaggacgcatcggtcgccgacngctcgacgaaattcgctcgaccnngcgaccttaactancctgccntcgangacgtnttctcntcctancaagactcggtcacctaccnccgggtngtgcgcaacgtcggnagcaantccagcgcggtgtancagccgacgatcgancagcncgttacggngtggatgtcacggtgaccncga

SEQ ID NO: 4657 - DNA, 295 bp, Zea mays
  misc_feature: Incyte ID No: 700354747H1
  unsure 26, 242, 250, 260: a, t, c, g, or other
tgcacaggtccccgaggaagcaaganagcttgacaaggagctcaaacaagtcacgaaacagaagaatgaagctgttccgaagccaggattttgagaaggctggggaattgagagaccgtgaaatggaattgaaggcccagataacagccctcattgacaagagcaaggaattgagcaaagcagaggaagagtctggagagacaggacctatggtcaatgaagaagatatccaggcacatagnatcttcancgactgggcnccccgtggagaaggtttccagcgatgaatctgata

SEQ ID NO: 4658 - DNA, 228 bp, Zea mays
  misc_feature: Incyte ID No: 700354748H1
  unsure 25, 69, 84, 202: a, t, c, g, or other
gagaggacgacggcacatgattctngctgggagtcagactcctccgtagcgtcctgcccagaccacatngtcatcagaggaaancagacggcctgtcggatctctcccacggccggtaagtctaaacgcgtttgatatcatctcgttctcaaggggattcaatctgtcggggttgttcgaggagcgaggcaatgaagtgagnatcgtgtccgcacatcccatggcaaa

SEQ ID NO: 4659 - DNA, 290 bp, Zea mays
  misc_feature: Incyte ID No: 700354752H1
tctgcaatcactgttgaactcaggatcaatgatgacgaggtggagcaatggattgtgaaggcaattgcatccaagatattggattgcaaggttgaccagcttaaccagactgtcattgtcagtcggcacacagagaggatctttgggatggaacattggcatgctctgcgcacaaagctcggagcttggaggggaaacattgccagagctatcaacacaatacaagctaacaaagtcaccgaagagggggcacaagggatgcaaggcttggcgatccactgattcggggc

SEQ ID NO: 4660 - DNA, 120 bp, Zea mays
  misc_feature: Incyte ID No: 700354753H1
  unsure 25, 27, 34, 37, 47, 59, 66, 74, 76, 80, 83, 93, 105, 112: a, t, c, g, or other
gtaactgcagcgtcctcaatctgcngntaccaancanagcctaccanccactagccatngcatgtntgcgtcanancccntcngcaagggatngggacttaaatngcgcctncaggtgtc

SEQ ID NO: 4661 - DNA, 287 bp, Zea mays
  misc_feature: Incyte ID No: 700354755H1
  unsure 78, 158-159, 285: a, t, c, g, or other
gctacaaatatcatttgttcttatgatctttgtagcttatatatattattataagactgcgcaatatcataagaacanatgatatttaactatttatcaataatttagctatcatcatttgagagttttgtaaatatatgtactagtctatttgcatnnattataagagatggatatgctagataacaaatactaggctagcttatctatcaacgcactcattatataattgacataggctagtacatgtcacattttagaggtccaacaaaatagttgataggntc

SEQ ID NO: 4662 - DNA, 159 bp, Zea mays
  misc_feature: Incyte ID No: 700354757H1
  unsure 94: a, t, c, g, or other
gggagccgcaaaccaagcaggataattttctatcgagatggtgtcagtgaggggcagtttagccaggtcttgctttatgaagtggatgcaattncgaaaggcgtgtgccagcttggaagagggctaccttcctcccattacattcattgtggtgcaaaa

SEQ ID NO: 4663 - DNA, 283 bp, Zea mays
  misc_feature: Incyte ID No: 700354759H1
  unsure 14, 100: a, t, c, g, or other
cgtgaatccctgangcgtgcatatatatattcctgccaagataaaggtaatggagtcgtcacgcaggttccagccggccgtcatcctgcttctcctgctnattgtgtccaccgatatggcacaggcaagggaatgcgagaagtacagtgagcgatttgttggggcatgcatgatcgcagacaactgcgccaatgtgtgccgcggtgagggcttcttgggccggcagtgcagcaccttccgccgccgctgcatctgcactaggcagtgctaaacaagatcgctc

SEQ ID NO: 4664 - DNA, 247 bp, Zea mays
  misc_feature: Incyte ID No: 700354760H1
  unsure 119, 156: a, t, c, g, or other
cctatctgccgtgaattgtcacactgcggaggccttatagaaagccacttacgcaattaaagattcaggaaatgacatcgaagggttagcagagcgcagatggcgtgaatctgtaccantgcagccaaacacttcacagcagattttgtagctatngttgttggtagagggtttccgcttctcttgtgtaatgaaagctcgtacttatttcaatcactataccttcttgacaaaaaaaaaaaaaagg

SEQ ID NO: 4665 - DNA, 284 bp, Zea mays
  misc_feature: Incyte ID No: 700354761H1
gcgagctccggtctttggtactggttgacaggagtatgcttggttcagatggccccagttacaactactaccctggcaaaatgaaaatcccagccggacttgatctgcccagcgatgacaagaagcaacctcttcagaaccagagcggctgagcaggcctgtcttggggcttgtttggtgttcaccaccactgattcctttcttttgtcatcctattttgaaacttccctagctgtattcagtccatttttgtgaactattctgagagtactattctgaacttc

SEQ ID NO: 4666 - DNA, 78 bp, Zea mays
  misc_feature: Incyte ID No: 700354762H1
  unsure 2, 14, 31, 36, 56, 61, 69, 72, 74: a, t, c, g, or other
gntgctgcataacnctatctcttcctagttnctacnccgcggcggcgcggccttcncattncgctgttntcngntttg

SEQ ID NO: 4667 - DNA, 284 bp, Zea mays
  misc_feature: Incyte ID No: 700354769H1
atcttctcaccagcctcctccgacacgtaaattgcaccgatcgagacacagggaacaaaggcaacagccatggcgggaacccgtgccctgtacctcctcgtcgcggctgtcgcggcgctcttagccacgcctgcggccgtggacgcggccacgctggcggagatctgcaggggaaccgcgttccccgacatctgcaccagcacggtggggagcgaggcgcagagcgccggggtgttggacgccatggcggtgttgcggatgcaggtggacgcgttcaacaagcg

SEQ ID NO: 4668 - DNA, 288 bp, Zea mays
  misc_feature: Incyte ID No: 700354771H1
  unsure 8, 106, 121, 168, 182, 184, 196, 256: a, t, c, g, or other
ggtgccgngcaagtacaccggcgtcaacatcgcgttcaaggtggatcagggcgcgaacccgtactacttcgacgtgctcatcgagttcgaggacgacgacggcganctcagcgccgtgganctcatggaggccggcagcggcgtctggactctatggcgcacaatggngcgccacgtggcgntncaacaacggcangaagctcaaagcgccgttcgggctccgctcacctccgactccccgcaggtgctcgtcgcnaacaacgccatcccggccgcgtggaagcccgg

SEQ ID NO: 4669 - DNA, 285 bp, Zea mays
  misc_feature: Incyte ID No: 700354773H1
  unsure 10, 22, 42, 48, 52, 71, 77, 87-88, 103, 125, 159, 173, 189-190, 197,: a, t, c, g, or other
caattctcanggcacaccaggngcattgaccaacacagcacntcctgnggtnaatgacacaacaatcaggnaatttngagcgtatgnnacttgactcactggntgtacactacctgaaacatcancaccgccaatgtcctgccccagttacaactttgncaccactttctctnttggcaccctcatgtnngccctgngcctagtcgcagccttagtgcaccggcaaacatagctgctcgagtgggaanncgtgagatnagtaggcaatttagtgggatccagata

SEQ ID NO: 4670 - DNA, 282 bp, Zea mays
  misc_feature: Incyte ID No: 700354774H1
  unsure 124, 129, 224, 264, 274: a, t, c, g, or other
cagaagcctctcatttctaaacagttatgtgcagcaagccttggaaaatggtgcgtccccttacattccagagagtgaacgctctggtgttataagtgtcggcagctacagaagccaagaacancaggnaacatctgcccatactcttagatttgaggcctatgagatgcctaaaccttcgttgccactagcaacttcacaaaccagcatgtccacaccacctnctgatctggttccagttccagaggcaggctactacaaggnagacaatcanacatcaat

SEQ ID NO: 4671 - DNA, 286 bp, Zea mays
  misc_feature: Incyte ID No: 700354776H1
  unsure 31, 39, 55, 59, 85, 92, 100, 155, 174: a, t, c, g, or other
gccgagtgcccgattacaatcagccatcgcnaccacctncctccgcggctccgcnttcngccgcgaacacgccgctgtctgcgancccttgnacctcccnccttcagcaagatgggccgagattgagataaaaacagcacctgctgacttccggntccctacaacaaaccaaanaaggcattgttttactcgctatgtcgagtaccacaggtgtttgaatgccaaaggggatgatgctggtgtttgcgaaaaatttgccaagtactacaggtccctttgccctgga

SEQ ID NO: 4672 - DNA, 153 bp, Zea mays
  misc_feature: Incyte ID No: 700354777H1
  unsure 23, 45, 84-85, 125: a, t, c, g, or other
ttttcttctcctgcggtccttcnttcgcttccccgttcttccagnatcctgtcgagacctgaatccaccctcacccagcggtcnncatggcctccggcgaaggtgtagttgatcagctgtacgangcggctggcggcgaggcagtggccaaga

SEQ ID NO: 4673 - DNA, 283 bp, Zea mays
  misc_feature: Incyte ID No: 700354778H1
  unsure 206: a, t, c, g, or other
caccaatctattgctcaaggtttctgtcaaaggaaacaatggcaatgagtcttctgttactgttcggttgtatggaccaaatacagacttggtgattgatcggaaaagggaattgcaggcgataccgtatctctcagctgcagggttcggggctcggctgcttggaatgtttgaaaatggagtagttcagtcattcatctatgctncgaacactgtcacctgcagacatgaaagaacctaaaatagcagctgaaattgccaaggagctacgcaaatttcatca

SEQ ID NO: 4674 - DNA, 157 bp, Zea mays
  misc_feature: Incyte ID No: 700354779H1
  unsure 108-109: a, t, c, g, or other
gaaccaaaggattacattcacagagttggtcgtaccgcacgtggtgagaaaggcaaaggaagtgcattgctgttcttactaccagaagaactgaagtttctgattgannctcatattccgtcagggtaaccttggcggaatatgagttcaatcagaa

SEQ ID NO: 4675 - DNA, 168 bp, Zea mays
  misc_feature: Incyte ID No: 700354781H1
ctagtaccgccgaataagatttgctatctgcaatgtgctcatgccaccaccgtgtgtgccagttaacagtttgcacgaaacccgcttaaaatcttccctagatattttgttgtacgaatgaatgacatgtggtgtttgataaatgatgaaacgatgatggttcaaatc

SEQ ID NO: 4676 - DNA, 281 bp, Zea mays
  misc_feature: Incyte ID No: 700354785H1
  unsure 4, 15: a, t, c, g, or other
gggnaaactggaggnagttattcttataacaagcatccttattgttgcctttttcacaacattgacaaagctacatccgaagatgaagccgtatgagtatggattccgtgtgttcttgttgacattctgttacgttatggtctctgggtacaacactgggaaattcactgatacagctacaagcagatttatattgattgctattggtgctgctgtcagtcttggaatcaatgtaggcatctacccaatctgggcgggagaggatttgcataacttgatag

SEQ ID NO: 4677 - DNA, 279 bp, Zea mays
  misc_feature: Incyte ID No: 700354787H1
tccaagattcatgtgcttggttcgaactaccagagcaggcttcttgaagtaatggattcgagtgagctgccagaattccttggcggttcatgcacatgtagtgacaagggtggttgtcttggatcgaacaaagggccgtggaatgatcctatatattgaagctgatccacaatttggaagctggatgcgtgagggaaatcaaacctgtttctgagggggaagaaagaaacagctcatcctttcggttggaacagatgaaatggcagggcttgctaagtg

SEQ ID NO: 4678 - DNA, 279 bp, Zea mays
  misc_feature: Incyte ID No: 700354788H1
  unsure 3, 38, 42, 79, 81, 87, 106, 108, 111, 129, 144, 154, 158, 170, 198, 257,: a, t, c, g, or other
atntgttggggatttgtcgtatgctgatagatatgaanatantgatggcattcgttgggattctggggtcgattcgttnancaccgnaccgcataccagccatggntntgnaatactggaaaccatganatagagtacaggccngatctggganaaanttctgtattcangccatatttgcataggtacatgactccntatttagcatcaaagagcagttctcctatgtggtatgctgtcaggcgtgcatctgctcncatcatcgtgntgtccagctac

SEQ ID NO: 4679 - DNA, 278 bp, Zea mays
  misc_feature: Incyte ID No: 700354789H1
  unsure 32-33, 35, 48, 55, 60, 64, 122, 129, 158, 162, 222-223, 238, 243, 246,: a, t, c, g, or other
aattctcaaggcacaccaggagcattgaccannanagcacttcctggngtaaatnaccancaancaggaaatttggagcgtatgacacttgactcactggttgtacaatacctgaaacatcnacaccgncaatgtcctgccccagttacaagtttgcnaccnctttctcttttgcaccctcatgtttgccctgagcctagtcgcagccttagtgcaccggcnnacatagctgctcgantgggnagncgtgagataagtaggtcntttagtgggatcca

SEQ ID NO: 4680 - DNA, 279 bp, Zea mays
  misc_feature: Incyte ID No: 700354790H1
  unsure 129, 224, 264: a, t, c, g, or other
cagaagcctctcatttctaaacagttatgtgcagcaagccttggaaaatggtgcgtccccttacattccagagagtgaacgctctggtgttataagtgtcggcagctacagaagccaagaacaacaggnaacatctgcccatactcttagatttgaggcctatgagatgcctaaaccttcgttgccactagcaacttcacaaaccagcatgtccacaccacctnctgatctggttccagttccagaggcaggctactacaaggnagacaatcaaacatc

SEQ ID NO: 4681 - DNA, 283 bp, Zea mays
  misc_feature: Incyte ID No: 700354792H1
  unsure 17, 40, 49, 58, 81, 85, 94, 140, 152, 155-156, 163, 170, 174, 182, 187,: a, t, c, g, or other
gccgagtgcccgattanaatcagccatcgccaccacctcnctccgcggntccgccttnccgccgcgaacacgccgctgtcncganccccttgtnctcctccttcagcaagatgggccgagattgagataaaaacagcacntgctgatcttcnggnnccctagnacaaacnaaanaaggcatngtttnantcgctatgtcgagtaccacaggtgtttgaatgccaaaggggatgatgcggtgtttgcgaaaaatttgccaagtactacaggtccctttgcnctg

SEQ ID NO: 4682 - DNA, 281 bp, Zea mays
  misc_feature: Incyte ID No: 700354793H1
  unsure 127: a, t, c, g, or other
attttcttctcctgcggtccttccttcgcttccccgttcttccagaatcctgtcgagacctgaatccaccctcacccagcggtccccatgggcctccggcgaaggtgtagttgatcagctgtacgangcggctggcggcgaggcagtggccaagatagagggggaggccaaggtggaggcggaggccaagatgacggaggagccggtgctgtacctcgacctgacgagctaccagctgcacgatctaagcgaggtggagatcccacccacgctggaggagg

SEQ ID NO: 4683 - DNA, 280 bp, Zea mays
  misc_feature: Incyte ID No: 700354794H1
caccaatctattgctcaaggtttctgtcaaaggaaacaatggcaatgagtcttctgttactgttcggttgtatggaccaaatacagacttggtgattgatcggaaaagggaattgcaggcgataccgtatctctcagctgcagggttcggggctcggctgcttggaatgtttgaaaatggagtagttcagtcattcatctatgctcgaacactgtcacctgcagacatgaaagaacctaaaatagcagctgaaattgccaggagctacgcaaattcatca

SEQ ID NO: 4684 - DNA, 286 bp, Zea mays
  misc_feature: Incyte ID No: 700354795H1
  unsure 108, 139, 177, 181: a, t, c, g, or other
gaaccaaaggattacattcacagagttggtcgtaccgcacgtggtgagaaaggcaaaggaagtgcattgctgttcttactaccagaagaactgaagtttctgattgancctcatattccgtcagggtaaccttggcggnatatgagttcaatcagaagaatgtgccaaatttgcaancgcnccttgagaatattgtggtgagaattactttctgaaccagtctgccaaagaagcctacagatcctacgttttggcatatgactctcactctatgaaagacattttt

SEQ ID NO: 4685 - DNA, 287 bp, Zea mays
  misc_feature: Incyte ID No: 700354801H1
  unsure 91, 105, 164, 258: a, t, c, g, or other
cgaacggcttcagcgcacctgatgtcgatgacctcggggtcgtaccccttgttcaccagcgtcttggcagcctgcatcacgtggtaacctncatgcgggacacgngaggtcacgtgctcacctggccgcaccatctccgcctcctccaggcagcagctgtactncctcgtcggggattttctccttcaggttgtacaagaggacgtgctcaaacagcaccacggggttctcgctccttatggccgccttcatcaggcnctttgcgttgtaaggagtggagcaggcaa

SEQ ID NO: 4686 - DNA, 284 bp, Zea mays
  misc_feature: Incyte ID No: 700354803H1
ctgccgtgtagggaccgtagactcagcgactgcgaaggagggataaggggatggccgggatcggaccgatcaggcaggactgggagccggtcgttgtgggagagcacccaccgccgccgccaagaaggatgagaaggccgtcaacgccgcgcgccgcgccggtgcggagatcgataccatgaagaagtacaacgctggtacgaacaaggcggcatccagcggtacatccctcaacaccaagcgccttcgacgacgacaccgaaaacctcgcccatgagcgagtt

SEQ ID NO: 4687 - DNA, 252 bp, Zea mays
  misc_feature: Incyte ID No: 700354804H1
  unsure 10, 16, 25-26, 28, 35, 40, 67, 74-75, 78, 86, 88-89, 121, 130-131, 139,: a, t, c, g, or other
gctgattcangtgganatgacaganngntacctanaagangacagtcaaatggcagtgacccagagnatgatgnntcnagatctantnnaatggctttgtctaaatagccagccccagagnaacgtgggnngggtcgangcagcncggcgaggtcggcnaccaaccaaganaaaggaanttggttacgtacnatttgaagatgagagcagcnngnttgctgaacaangtgaaaccttancaggagngggagc

SEQ ID NO: 4688 - DNA, 286 bp, Zea mays
  misc_feature: Incyte ID No: 700354805H1
  unsure 19, 22, 80, 96, 103, 112, 192, 194, 227, 229, 277, 282: a, t, c, g, or other
gacaagcctatgggttggngcnacttcactgctgaaagagatgttgagttcaaagcttgctcttcattccaccgaagctnccgtcataatctctangcagtcnacaacaggnaacaagtcaaacctcaagttgtatgttagaagagtgttcatctctgatgaatttgatgaccttcttccgaagtatctcancnttttgaggggtattgttgactcagcacacactngncgctgaatgtgtcacgagaaatgctccaacaacatagccgtctgaagnctatncaag

SEQ ID NO: 4689 - DNA, 281 bp, Zea mays
  misc_feature: Incyte ID No: 700354808H1
  unsure 15, 18, 68, 73, 100-101, 119, 155: a, t, c, g, or other
aactgacctcatcanganagttcagcaccaactgtcttgtcatgcaaaatcacagatatggtatatcnccaanggcgatatcgagagaacgatgcactannatttgcaaaatcttgacnacatcacctgatgaaaacggcaaggtctatgtctcnactgtacaagccaataattatccaatcacttgcacgcaatggccatcctgaggtaatttagttgtagctgtttcaggagttccacatttagtgttcttattggttcttcctttctcttgtgcacgt

SEQ ID NO: 4690 - DNA, 280 bp, Zea mays
  misc_feature: Incyte ID No: 700354809H1
  unsure 5, 8, 22, 27, 33, 35-36, 60, 65, 78-79, 82, 85, 97, 116, 125, 151, 175,: a, t, c, g, or other
agcanaanagtgggaagatttntaggnagaggngnnaaacctaccgagccgggtgatagntggtngtccaagataggnnctnagnccaactttgatngcaaggaccctctaaatcnccttgtaantttaactgttagtccaaagaggaacngctctttggagactaggaaaaaancttntagagagagtaanaaatttaacacncatagtaggcctaanagnagccaccaattaagaaagcgttcangctgcaacacccactacctaaaaaatcncagac

SEQ ID NO: 4691 - DNA, 287 bp, Zea mays
  misc_feature: Incyte ID No: 700354811H1
  unsure 6-7, 17, 22, 39, 43, 47, 50, 67-68, 84, 90, 94, 100, 103, 107, 112, 115,: a, t, c, g, or other
cggcanngagtcacctncaccnttacatgcacatttcantccnaatnctncccatcagatattctannggaggttctgcaagcnggattntctncagaanttntacnagccncantcatgagccaattgcnatngagggnagnnntatagtagctgtggcaganacaggttnaggcaaaacactgggctatacgcctncccagggtttcttactnctgaagcgcctgnatcatcaattcaaagggaaggtgccaacatattagttttgtccccaaacnnggaattgg

SEQ ID NO: 4692 - DNA, 266 bp, Zea mays
  misc_feature: Incyte ID No: 700354814H1
  unsure 4, 38, 63-64, 68, 75, 104, 107, 134, 150, 175, 253-258, 260, 265: a, t, c, g, or other
cganaacggatttcaatgaggtaccctatgtcaagtcnatccatgataattttctaaaaagannattnaacgagntcctgcagctcgaatgatgaagtgaatgnggnaattgtgccacaaatgcatgctccttntgaatctatcgatttngtggaaagtttgattgattcagaanctcctagtccctttgatttatctaaaagtgccccgattgttcataccaaacatctaagtgaagacataagtgccctannnnnngncggtnc

SEQ ID NO: 4693 - DNA, 269 bp, Zea mays
  misc_feature: Incyte ID No: 700354816H1
  unsure 4, 21, 91, 94, 258: a, t, c, g, or other
cganatggtgaagctgaccanggcgatgtgctgggagttggtggcgaagaccagggacaccgtcgacctggtcggactcgtcatttcagancgntagacaacgtctgctatgataggaggccggagaaggagccggcactgtgcgagccctccgacgatcccaacgctgcatggaacataaagttccgggcgtgtatgcaccgtgttcccgaggaccagtcagtgcgtggcgcccggtggccggtgctctggccggcnaggctgcggaa

SEQ ID NO: 4694 - DNA, 283 bp, Zea mays
  misc_feature: Incyte ID No: 700354817H1
  unsure 31, 38-39, 53, 83, 98, 102, 108, 115-116, 129, 169, 172, 190, 203, 246,: a, t, c, g, or other
ccaattctcacgcgctcgccgcctaggagcnttcacgnnggcggcgggcggcngctcggttcctctcctccaaccgcaccttncaataatccacctcngttnttgatngctcggnngcgccatggcagntcaccgggctccaaccttccccatccggcctacagtgctncancgtccggtcgccagtgcncctccatgggccncggctgacgggtgcacgcaccggtatgcatcccttgctgctcnaattctcgacgctctagctcgtgtancagatgtgcag

SEQ ID NO: 4695 - DNA, 280 bp, Zea mays
  misc_feature: Incyte ID No: 700354818H1
  unsure 70, 113: a, t, c, g, or other
catgaagattagaaatagggtagcagattcgttttgagcggggatatatagtactagcattcaacggtgncttttcgttgtgagtccgtaataagagtcttgacattctagancaaaaaagggagctgtttatcccccccttttttgctttaacctttggtgtaggcgctgaacttctgatctcatctgccaataaatcttcactgccgatcaagcgggtggagcattcgacttgaactgccatccaacagttgtagccgaatctgcatgaactcttcgt

SEQ ID NO: 4696 - DNA, 282 bp, Zea mays
  misc_feature: Incyte ID No: 700354819H1
  unsure 101, 211: a, t, c, g, or other
aaaaaataactcggaaaagaaggagacgccgaaaattcgaaaggggagggggaaagcaaagctgatggcggaggcccaggggaaagcaaagcaaatggcgngcccgagcaagatcgaatccatgaggaagtgggtcgtcgagcacaagctccgagccgtaggttgcctctggctaggtgggatcagcagttcgattcgcctacaactggtncgcggcccaatatgaagcctagcgtcaagatcatccacgcaaggttgcatgcgcaagtctaaccctcgctg

SEQ ID NO: 4697 - DNA, 278 bp, Zea mays
  misc_feature: Incyte ID No: 700354821H1
  unsure 79, 90, 97, 106, 115, 142, 146, 249-250, 253: a, t, c, g, or other
gggattggtgcggaaatatgcatgttctgttgtagaggacagctttgagtatcttgatgcaccagtcgagaggattgcnggagctgatgngcccatnccgagtgcnaaccttganaggatggctgttccacaggtacgatgnacancgtccgggcagccaagcgtgcttgctcacagggcagcagtaccgatggcagcaaccgcctagtccagcagaaccctggcatgttgcattcttgtctattttgnngtncgtgctccagaaagactgtcgcata

SEQ ID NO: 4698 - DNA, 280 bp, Zea mays
  misc_feature: Incyte ID No: 700354822H1
  unsure 4, 8, 27, 36, 43, 54-55, 60, 73, 88, 100, 103, 105, 148, 171, 196, 199,: a, t, c, g, or other
gtgngcanaaccagttgtcagtccgtntgaagctgntggagtnaaccctaaagnnggtcngaatagagattgntacttgttcagaacnagtgtaatgganttncnattggagatgtagcagcgttccccctggcagatgtacaatagnattgctcgagtggaaaatgtggntcatgctcggaagtccgcacaccantgnatngngacgctcctaacatcccagacaaaagcgtatgactacctccataacttncnacttctgggtntttgagtacnaggg

SEQ ID NO: 4699 - DNA, 278 bp, Zea mays
  misc_feature: Incyte ID No: 700354823H1
  unsure 14, 30, 32, 62, 64, 84, 90, 96, 152, 154, 159, 207, 273: a, t, c, g, or other
agtctccttccttnctcccgtcgcctccgncntccgccttcagtttagcctgccaagcaggngngccgcgcggggtattctgtncgtcgntgaggnggtattgcaccgggggagcggagatgaagccggttgtggggatcgtggtgtcgaanangatgnagaagttcggtggtggttgcagtggaccgtgctcttccacaacaaggnatacaaccgctacgtcaagcgcaccttccaagttcatggcacacgcacgatgacgactcctgcaanattgg

SEQ ID NO: 4700 - DNA, 279 bp, Zea mays
  misc_feature: Incyte ID No: 700354824H1
  unsure 45, 97: a, t, c, g, or other
gtccgcgtccagtgtgtccgctactccgctccccctcagtcctcngttcctcacctagccggtagcgtagcgcgcgggagacgtagatggcggcttngagggagcggcggcggcaacaccggtgacgccgacagaggggacggtgatcgcgatccacagcctggaggagtggagcatccagatcgaggaggccaacagcgccaagaagctggtggtgattgacttcactgcaacatggtgtcctccgtgccgcgccatggctccaatttttgctgatat

SEQ ID NO: 4701 - DNA, 197 bp, Zea mays
  misc_feature: Incyte ID No: 700354830H1
  unsure 43, 48, 126: a, t, c, g, or other
ttcctccgtcaccagacagacggtagagagtcgaacaatcgcnggctncgacgcccctcttacccgacgccgcacgccttcactgtctcgagcgatcttccagagcggttcgacaccgtgctcgcnacggtcgacatcactgccgccgccgccggaaagttggcatcgttgtcgacctctttctccccttcttccaa

SEQ ID NO: 4702 - DNA, 274 bp, Zea mays
  misc_feature: Incyte ID No: 700354831H1
  unsure 4, 7, 10, 27, 34, 183, 225: a, t, c, g, or other
gggnatngancttctggtgtgctatgnagatgancggggtttatgtaaacacatatggaaggatccccaaggatgtagtttctacagtgggaggtgctacatgcagtagcatatattcgataccaatcagacaatgggctggggagagaaggccatagagatccgatctgtggaaactggtcncttggatggtgtgttcatgcacaaaagggctcaaagactaanattctgtgtgaacgcaatgacaaggtgttcttgcctctgttcggtctgg

SEQ ID NO: 4703 - DNA, 279 bp, Zea mays
  misc_feature: Incyte ID No: 700354833H1
tgaagatgggagttgaggtgtaccacaacctgaagagcataatcaagaagaagtcacggtcaggatgcgacaaacgttggggatgaaggtggtttgactacattccaggaaaacaaagaagggccttgaactattgaaggcagccatagaaaaggctggctacactggaaaggtggtcattggaatggatgttgctgcttctgaattctcggtgagaaagacaagacttatgatcttatttcaaggaggagaacaacgatggctcaaacaaatttcagg

SEQ ID NO: 4704 - DNA, 272 bp, Zea mays
  misc_feature: Incyte ID No: 700354835H1
  unsure 90, 98, 252, 266: a, t, c, g, or other
cgccttgcaaaagctgagcaggtgacatggacaaccctggattatagtggaagaccaaaggctattccccagaagataagcacgccagcngaacacangaccttcatacccatcttcaaagtcaaaaaaggactgggataaactggaagctgaagtaaaaaaggaggagaaggaagaaaaacttgaaggtgatgctgcattgaacaagttcttccgtgatctctacaaggatgctgatgaagatatggcggnggcctggacaatcntcagga

SEQ ID NO: 4705 - DNA, 200 bp, Zea mays
  misc_feature: Incyte ID No: 700354836H1
  unsure 93, 97, 102, 169: a, t, c, g, or other
ggatatgttgttttagcacactgataagagcaatgctttacattttggctagtattcggtaatgatggattcacatactcttggatattgacngccntgctngaaaagtggcatgatatgatgcctgcaatatcattagtttatttttagccatagtttcagattgacngcattgcccataattaggctcacatcagagg

SEQ ID NO: 4706 - DNA, 274 bp, Zea mays
  misc_feature: Incyte ID No: 700354838H1
  unsure 39, 69, 103, 105, 184, 241: a, t, c, g, or other
gtatattcttggtctgaagatggaactcaagagaaaggnattgagggatgatgtgacccgccaacaggngttggctgcttacttcacaaattgcactcgagananccatatgaggcttgtgctttctagcgccatggctctttgcttcaagcagaaaaactatgctactgcagcacactttgcnaggatgctcttgagaatagccctcaagaggctcaagcaaggaaggctcgacaggtgnctgcaagcttgttcaggataaggagatctcacc

SEQ ID NO: 4707 - DNA, 277 bp, Zea mays
  misc_feature: Incyte ID No: 700354840H1
  unsure 40-41, 51, 67-68, 95, 118, 135, 156, 170, 192-193, 222, 249, 269: a, t, c, g, or other
gcttgatggcatgaggggaggagggcaggtggcttctacnngccggtgcgnccgaattcttgcctgnncgagcttcattgggcgggccttggtancattatatgtaccggcagggtgntggcatgccaatgtcancgcacggagaagaatggaggncgccatggtccgtnccagctcatttggtgagcatgnncttggtcatgtgcccaatggggtgaatangaagggcccatggcgatgcggcttatnaccagaggattgtaataganacaaaggt

SEQ ID NO: 4708 - DNA, 275 bp, Zea mays
  misc_feature: Incyte ID No: 700354841H1
  unsure 2, 97: a, t, c, g, or other
anactagaaaaggctcctcccgaccgcaacgcccctcatctccctcgactccgacatccccgacccgatggcgcccaaggcggagaagaagcagcgntgaagccggcggccgaggagaaggcggagaagacgaccgcagggaagaagcccaaggccgagaagcggctgcccgcgtccaaatctccggcaaggagggcggcgagaagaaggggaagaagaaggccaagaagagcgtggagacctacaagatctacatcttcaaggtgctgaagcag

SEQ ID NO: 4709 - DNA, 266 bp, Zea mays
  misc_feature: Incyte ID No: 700354842H1
  unsure 6, 10, 16, 19, 29-30, 58, 61, 73, 89-90, 95-96, 114, 135, 153, 171, 219,: a, t, c, g, or other
cttgantttntttggncanctgatggagnntatgccatcagaaaaagcacctcgaggntanagatatacagtnaaaatttccaggaganntattnngccatccttttctgaagnacggatatatggtggagtgtnacttgctatgtgtcacanatgacttcattgcttctntgattgggcagaatgcagattgatacgtcgaatcgatgtcaatgtgangaatcttactgggctgncagtggtgntttagtaacantgcngtgntt

SEQ ID NO: 4710 - DNA, 101 bp, Zea mays
  misc_feature: Incyte ID No: 700354843H1
tttctttgcatgctgtcggtcttccccatcattgtgcggatgtgttcaaagcgccgtggacttgcgtgtaacctgtaactccgtcttgtgtcttgtgacgt

SEQ ID NO: 4711 - DNA, 222 bp, Zea mays
  misc_feature: Incyte ID No: 700354846H1
  unsure 4, 14, 28, 37-38, 40, 45, 47, 72, 81, 90, 103, 115, 134, 158, 168, 204,: a, t, c, g, or other
ctanatctccgtangcatggtgtgggangaggacgcnnanagggngnatacggggaagatatggcggcttcngagtcggangaggacgtncgtggtggggcanatgccgaccgtnatggtgccaaagcatatcnataagcggttccctgaagaacaangcgctgtctntaaccctcgacaagaaagcgctcagggtttcgtgangggntaccacaagcgnaa

SEQ ID NO: 4712 - DNA, 281 bp, Zea mays
  misc_feature: Incyte ID No: 700354847H1
  unsure 97, 279: a, t, c, g, or other
ggtggtccttcaatgcgtggcccatccccaatctttggcgctccttcccctcatcatatgcatgatcctcgcagaatacgaagctaccaagacctcntgctcgagacgaagtgactgtcatggactaccgaagcttgtagacttcctccagttcttgtgcatccagatacctttgtagtcaacatttttagcgcgagagaaaaacaccttgctctttctagaatcgccgcggaggaaaccccggcaggctttttgtgtcgcgaccactgagatgtcagntc

SEQ ID NO: 4713 - DNA, 203 bp, Zea mays
  misc_feature: Incyte ID No: 700354850H1
ggaaagcaatcacagccggacgatccgagcagagaaggggaggtacctgctacgactagctagattccacgcgcgatggcgcccaccaggatcccggcttgctgagcttggcgctggtggggctgctcatctgccaccttcgccaccaccgcctccgccggcaagaacagaatccgcatcctcgacagcgtcgacgacttcgg

SEQ ID NO: 4714 - DNA, 277 bp, Zea mays
  misc_feature: Incyte ID No: 700354852H1
  unsure 89, 92, 94: a, t, c, g, or other
tgggatcccagccaccgccgctagaagaagagctcggcgattcccaggtcccgcgagaatatgccgaagcagatccatgagattaaggnttntntcccgcgaggaggaaggatgcccgctcagtgaagatcaagaggagtaaggatgttgtcaagttcaaggtgcgctgctccaagtacttgtacacgcttctgcgtctttcgatgctgagaaggcaaacaagttgaagcaattctctttcccccaggtttgaccgtcgaggaggtctgattggata

SEQ ID NO: 4715 - DNA, 276 bp, Zea mays
  misc_feature: Incyte ID No: 700354853H1
  unsure 101, 130, 172-192: a, t, c, g, or other
gggtcattaaataaatctacttttctgtttcagggtaggaaatgatgtccgagagtgaagagcatggctcgctcctagacaagatcaacgcagacacgagnagatccatgagtataagcactacgtcgtncgtcctcctcctcttcggactcagacgatgacaagaagcccnnnnnnnnnnnnnnnnnnnnnctttttggaagaaaacatccattgcatcatgtcctcggaggagggcaaagccgccgaccttgtgctgtggaggaacaaacaggc

SEQ ID NO: 4716 - DNA, 277 bp, Zea mays
  misc_feature: Incyte ID No: 700354854H1
  unsure 96, 99-100, 198, 205: a, t, c, g, or other
gaaacgcgttcccgtacccgtggctcacgtcgacgctgtccctcgccgccggctccgccatcatgctccgcgtcctgggccaccaggatcgcgagnccnnacggacctcgacttctggaaggcgctcactcccgttgcgatcgcgcacacgatcgggcacgtcgcggcgacggtgagcatggccaaggtggccgtgtncgttcangcacatcatcaagagcggggagccgggcattcagcgtgctcgttctccaggttcttccttcggcgagcactt

SEQ ID NO: 4717 - DNA, 277 bp, Zea mays
  misc_feature: Incyte ID No: 700354856H1
  unsure 2, 87, 90, 93, 100-101, 119, 150, 200, 223, 262, 265, 274: a, t, c, g, or other
gnacaaatccatcaaatccctcaattgaacttagtcctgagttcaagaaggttgggagcttccttggtccgttcaagtcgatacctngcntgnggtgacnncttgaaggtttccggtgntgtttggttcggttctggaattgtattgcanggggacagtgaccatacactggcaaaacctgggcgtcaagctagaaatanccagacggagcagtgattgggantacggatattcgtggccctgcaggaccttagcataagantcngcgactccngca

SEQ ID NO: 4718 - DNA, 269 bp, Zea mays
  misc_feature: Incyte ID No: 700354859H1
  unsure 92: a, t, c, g, or other
ttgctggatctacatttgacagcagccagcttgtattgacagacttgtatgggctttcaatcagttagagaaatgggattgcaagagtaagnaagtacaggcctgaaattttaactgcaatggaggaaagatcgaaagaccgtggctcctggaaagataagaaggggttagcaaccaaactttatagctttaaacatgatccttcatacgtgtgctcaccagttaagtccaaggaagggctagatggttcaaaggtgaatggagagact

SEQ ID NO: 4719 - DNA, 196 bp, Zea mays
  misc_feature: Incyte ID No: 700354860H1
  unsure 79: a, t, c, g, or other
ccaatccgatcaatcagagtatcagagccagagtgtgtgctgctgtgtgagcacaggagagctagcagtatagggcgancttcagcatggagagaaagcagtggtagtgccagccttgtcctcggcctcctgctggccgcctccctgtcgtaccagtgccacggcgcgcgcgactccccgcggagaagcccctccg

SEQ ID NO: 4720 - DNA, 281 bp, Zea mays
  misc_feature: Incyte ID No: 700354861H1
  unsure 3, 5, 10, 40, 60, 113, 122, 128, 130, 134, 192, 209, 224, 227, 236, 239,: a, t, c, g, or other
gtngngctcnagtgagggtggctccccatcacgcgagagntttggctcggacggggacgngtctaggattgactcggagcttcgacatcttgttgtgtggtggaggccatganggtgattgnggaggnanaggngaatgggagtgttgccaacgttgtaccccctggctcctgctgagaatgggaccccagnctcagaacagtcttccngttcgtccaaggcgncgncgccggccnccnaaatccacagcttgcgncccgatgcctctgttggcntccatg

SEQ ID NO: 4721 - DNA, 283 bp, Zea mays
  misc_feature: Incyte ID No: 700354862H1
  unsure 17, 21, 60, 72, 74, 97, 100, 102, 111, 126, 141, 154, 167, 190, 194,: a, t, c, g, or other
gtctttcacgacgcaanagtngacgacgcgtgcgccttgctcgctcgctcgccgtctgcngtcgttctaggntnagagccaggtgcaccagcgctanagngnaagtccgantcagacggccgggcntctcccgttcctccnacggaccggctancgctactggaggngacgctggacggcgaccacgcanactnacagccanaccctccanctgtgtgacgattcnagggcttaggccgagccgcgcggcnaatnagcgtccgccgaccgctgcaggaatttt

SEQ ID NO: 4722 - DNA, 279 bp, Zea mays
  misc_feature: Incyte ID No: 700354864H1
  unsure 8, 22, 34, 52, 71, 227, 274: a, t, c, g, or other
ggcaaggntggcccgatcactnctcttccggacntggtgaccattccacacncccgaaggacgaggacganccgcgccctccggtcttggcacctcctggggaagtcccaactgtgtccttgaaatggcagtttgatcgggtcccagataggtttctatcttacgataaggacaatgctaagacagttggttaccttaatctttatggacagatgcatgtgttgctncgtggcattttgtttaagctaagttttgcggagacaagatactgtcnagttc

SEQ ID NO: 4723 - DNA, 271 bp, Zea mays
  misc_feature: Incyte ID No: 700354867H1
  unsure 14, 24, 29, 31, 39, 43, 45, 47, 64, 77, 83, 86, 88, 97, 108, 121, 133,: a, t, c, g, or other
ggggtggtgatatnaggcaagagntcgcnangcttaagnaggncntncacagcttaaggagtcnctttccgtgatangtctgntananttatgtatnagttggatcancaattccgattgngcgttgtcaaanacagagttaccaatatgtgncntgagaanccatttcaaatntatnaagcacgggtgtgctcaggatatttttgccatgaangatatggaatatctatggtgtangttgcggcaaatgtgtanngatgccgctnaaaaa

SEQ ID NO: 4724 - DNA, 238 bp, Zea mays
  misc_feature: Incyte ID No: 700354868H1
  unsure 56, 59, 61, 97, 137, 210: a, t, c, g, or other
cgaggcctctgcgacttccagatctccccgacgaggaggaagtctctacagcgganggngnatgtcgtacatgcggggtgacctgctgacgaggatncggaagctggtgaagggcctcgccaggcccgagccccggnggctcaaggccttggaacgggctccgccagtgacatttcctcgcccagaggggaagatcaagaatctggtgcntcctgaggatgtgtatgtcaggaagttt

SEQ ID NO: 4725 - DNA, 265 bp, Zea mays
  misc_feature: Incyte ID No: 700354870H1
  unsure 264: a, t, c, g, or other
gggcaatgagaggggtcaagcatcttcttgttcggaaaactgttccaaatgggttggtatttgttggggagcttccatttggacgaaggggtagtcctaaaatggatcacctggtgtgttttcttcctggtacccttgctcttggtgcaactaaaggtatcaccaagagaaaagctcttgagactaatttgttaactgatgaagatatagaaaatctgcagcttgctgaagatcttgccaaaacatgtgttgagatgtactcgng

SEQ ID NO: 4726 - DNA, 268 bp, Zea mays
  misc_feature: Incyte ID No: 700354872H1
  unsure 12, 26, 28, 30, 53, 66, 70-72, 94, 106, 110, 116, 123, 126, 184, 186,: a, t, c, g, or other
tgaagattttgncgacggtgtcggcnangnaccaattcttcctctggaatctnattcaactggtgntttnnnggacattgactcgatcctactntcctcgtgacgntgcnatggantcatcanttnccaattcatttgctcggaattgttcaattaatggacactccaagtttagtttctgcantnaanggaacacgtgtgnagaanggcnttcacgacaaagttgcgcgtttcttgggcccngatgtatncgaccctcctcttcant

SEQ ID NO: 4727 - DNA, 267 bp, Zea mays
  misc_feature: Incyte ID No: 700354875H1
  unsure 13, 89: a, t, c, g, or other
aatggcaccaganaggatgctcctcggcgtctgtgccgtgctgatggtggtcggcgtcacgaacgcggcggagggccaggtggcgtggntctgggcctggcgaggtgcgccgacagcacgaggaagaacatgaaggctgaggccggtttcaagggtcttcaggtggcgatcaagtgcaagaacagcaacggcgagtacgagacaaaggccgtgagtgagatccaaagctccggagcctttcagcgtcccactcgccgcgcacctcca

SEQ ID NO: 4728 - DNA, 268 bp, Zea mays
  misc_feature: Incyte ID No: 700354876H1
  unsure 10, 67: a, t, c, g, or other
aaaaatatanaaaggtgggcgtgcaactttcccttccttcgccgaagccgcgcgacggaaaccccanacccaaccttcatctctttttcgcttaccgccccctcgatcggtcggccggtcagctatgacgccgggaagctcggccgccggatccggcgtcgtcgttccctcggaacttcaggctcctagaagagcttgaacgtggagagaagggcattggagatgggacagtgagctatggaatggatgacgcagatgacatctacat

SEQ ID NO: 4729 - DNA, 274 bp, Zea mays
  misc_feature: Incyte ID No: 700354878H1
  unsure 146, 203, 223: a, t, c, g, or other
ggatcttgaagatgcaactgcaatatctgcaccagatgcccatgctgaagcctgggaaactcctaaaggttcatcatgcattttgatactggagatggggatacgtggaatttcagggatgatattggctgcaaaatatgctcgtnagaatagagttccatatcttggtatttgcttgggcatgcagatatcagtgattgagntttccagacatgtcctgggncctggaagatgcagacagtgaggagtttaacaaggatacaccgaatcatgt

SEQ ID NO: 4730 - DNA, 275 bp, Zea mays
  misc_feature: Incyte ID No: 700354879H1
  unsure 68, 103, 260: a, t, c, g, or other
cgctatctcttccctccgccctcctgctctcccgccgttgtagaaatttccctctcccacgcgtcctncccgctcccgtgcacttgtcactggccagccgctncgcttcgctcccactcccgtacccatgtatcctctcaaccgtgaccagcctgtgtcgccacgttattgcctctgcctcgtcgcgccatgtacagagcgaccccattcaacgacgggtgaagaaatgggttgtggaagcatctgcagagatccccttngcattagcgtcaaga

SEQ ID NO: 4731 - DNA, 268 bp, Zea mays
  misc_feature: Incyte ID No: 700354886H1
  unsure 80, 88, 104, 137, 145, 226, 258: a, t, c, g, or other
gctgacgacaccaccgtgtggtcgacaaaataaaaaggagagagagagagatggctctgtcgtctcgccgtatggcagcngcacattncgtgtacgtccttctngtacctcgtggcggcagagaggacgatgggcanggtggtgntggaagagacgctctgcttgtcgcagagccatgccttcaaaggcgtgtgcctcagcaacaccaactgcgacaacgtatgcnagacggagaagtttcacaggcggcgatgcaanatggcacggc

SEQ ID NO: 4732 - DNA, 272 bp, Zea mays
  misc_feature: Incyte ID No: 700354888H1
  unsure 29, 37, 73, 91-93, 100, 103, 218, 236, 241, 251, 257: a, t, c, g, or other
ccgccgggcaactacctgacgggcgggcnggagctgnagggcccctgcaagtccctcccatccatcatccgtntcgacggcaaactgtggnnnggacgtncancgcgtacccaaaggaactggatcgagatcgagaacgtcgagaacctgtaccatcaacggccacggcaccatcgacgggcagggagcctggtgtggagcaagaaccagtgcacagncattcttacaattgcacnatctncccgaatagntggtgntggattttgtgcaga

SEQ ID NO: 4733 - DNA, 265 bp, Zea mays
  misc_feature: Incyte ID No: 700354889H1
cctcatctcatgggtttgcaaacaccaacttcatcagtgtactcagctaatggaatttatgggtatgatgggagctatggaccggcctggtatggatcgcacatgtataattctggattatatggtggatggaattcactgtatgatggaaagtacagaaccagaggaagaggtaacaatgggtattatgtttatggtaatggaagcatagatggctttaatgagctgaaaagagggccaagaagtggtatgtacaaaaaccagc

SEQ ID NO: 4734 - DNA, 263 bp, Zea mays
  misc_feature: Incyte ID No: 700354891H1
  unsure 36, 65, 86, 114, 225: a, t, c, g, or other
acaggacctcaaaatctcagatccttcctgcccgcncgcccgtgcccgtcgacgcgtcgttcttnccggccgcgccccacctcggnttccctccagggggatcggatacgccanaggctgcgcgatggtgctgtgggtcttcggctacggctccctcatctggaaccccggcttcgacttcgacgacaaaatcctcggcttcatcaagggctacaagcgcacctntaatctcgcttgcattgaccacagaggcacaccggagc

SEQ ID NO: 4735 - DNA, 168 bp, Zea mays
  misc_feature: Incyte ID No: 700354892H1
  unsure 19, 27, 37, 41, 46, 48, 53, 56-57, 65, 71, 77, 112, 125, 137, 143, 146,: a, t, c, g, or other
gggcagacggcacacagantacaccanacctcctcgnttcnactcngntcgtntgnnctctcgtntcgtgnctttcncttcgaattcgggaccgacgatgagccagcgccgnggtgtcggtacgncgagaagcttcnacaagnttngtgccgaggtcgtcaagnngng

SEQ ID NO: 4736 - DNA, 267 bp, Zea mays
  misc_feature: Incyte ID No: 700354893H1
  unsure 4, 229, 253, 262: a, t, c, g, or other
gaangtccagtgtactgtactggaagtcaaggttgttgaaggccatggtactacaattgatgttgttttggtcaatggtatactcctgaagaaaaatagttgtttgtggcatgcagggacccattgtgacaactgtcagggctttgttaacaccacacccaatgagagagcttcgagttaagggcacctacatacatccataaggagatcagagctgcacaaggatcanaatatctgctcagggtctcgaacngcattgcanggaca

SEQ ID NO: 4737 - DNA, 270 bp, Zea mays
  misc_feature: Incyte ID No: 700354895H1
agtatacattagatagtttaggtttgataatggatccaaaatatgttagcctatgcatcttcgtattacttgtattgcatggagatacattgcgaacttgcagggagtttgctaaatggcatccattctgctttagtgcaatgtgcaaggcaaattgttttatagaaggaaaaagctccgatggttcctatgcaaagggatatagatgtgattcacatggatttcatctatgtgtatttgcctttgtgtaaaagttagttatcttaagac

SEQ ID NO: 4738 - DNA, 300 bp, Zea mays
  misc_feature: Incyte ID No: 700354901H1
  unsure 39: a, t, c, g, or other
ctactcaacctcagaggtgtatatgttgacagacaattntccagagttccgtgatacttggacgtttgtgaaccgcagaataaaggatgctcttgatcttcagaaaaccttccaagaggccgcatacctcgctgaagccgtgggagcaggcatgagcggtaccgtgcagggtgttctcaacagggtctccagaaccgtagtggatgaactttcttttctcaaacacgtattggatggactaattccgtctttgcacgctgcacaggataaagcacttttcccgttgaccaactggcgtat

SEQ ID NO: 4739 - DNA, 213 bp, Zea mays
  misc_feature: Incyte ID No: 700354902H1
  unsure 28, 61-78: a, t, c, g, or other
cctgaaactttcaaatttgtcgcttggncttagctcccgctcccaggtctcactattactnnnnnnnnnnnnnnnnnnaattagtagtatctctagatacgctaattcgatttgagacagtttcttgcgacttcgcgacagaaacaactcactggtgagagacataagccgaatgcagcagcgcaactacgggagggaaggattctcgcatat

SEQ ID NO: 4740 - DNA, 297 bp, Zea mays
  misc_feature: Incyte ID No: 700354904H1
  unsure 71: a, t, c, g, or other
gcgagcgagagagagtggacaagaaaggaagaaagttgtccccgcagcctatttcaccattgccgccggangctcggaccaaagccgagcctggctgttcgtcctctgagcgattggggagaggactgcgtctaacaaagactttagcgcgggatcgaccatccgatgtgagatctccctctccactggtgaatatcatggacgccggtattcgccgtgacccaaggccagtacctcggcgggacccgcgcgctatcgtcgtccggtcgcctccacggccttgtcgctggagtcccg

SEQ ID NO: 4741 - DNA, 297 bp, Zea mays
  misc_feature: Incyte ID No: 700354906H1
gaaacagttaagaattcatatataagagtgcatatatatatataatcctgccaagacaaaggtaatggagtcgtcacgcatgttccagccggccatcatcctgcttctcctgctcattgtgaccaccgatgtggcgcaggcggcgagggaatgcgagaaggacagcgagcgattccttggggcatgcatggcgtcggacaactgcgccaacgtgtgccgcggtgagggcttctccggcggcaggtgcagcaccttccgccgccgctgcatctgcactaagccgtgctaaattaacct

SEQ ID NO: 4742 - DNA, 297 bp, Zea mays
  misc_feature: Incyte ID No: 700354908H1
  unsure 4, 24, 262: a, t, c, g, or other
agancacagccagtcagccacatncactagctatctgtgcagaggcaatggcgtccaaggttgagctggtggtggaggtcaagttccccggctgacaagctgtgggcggcgctgcgtgactcgacggagctgttccccaagatcttccccgagcagtacaagagcatcgagaccgtcgagggcgacggcaagttcgccggcaccgtccgcctcctcaagtacaccgaggcggtgccgatgctgacgttcgccaaggagaagntgagacggcggacgacgagaacaagtggtgtctac

SEQ ID NO: 4743 - DNA, 232 bp, Zea mays
  misc_feature: Incyte ID No: 700354910H1
  unsure 35, 80, 180: a, t, c, g, or other
gttgaggagagtggaaatttatgaattcagccgantgaatatggtttacactcttctaagcaagcgaaagcttctttggnttgtacaaaacaagaaggtcgaagattggacagacccacgttttcccactgtccaaggcatagtacgtcggggcttgaaggttgatgcattgatacagtntatactccaacagggtgcttcaaaaaatctgaatctcatggaatgggataaa

SEQ ID NO: 4744 - DNA, 291 bp, Zea mays
  misc_feature: Incyte ID No: 700354911H1
  unsure 275: a, t, c, g, or other
gtggcggagaggaaagtccccggcggaggtgaccccgcggagtggtgctcgacgccggcttcgtcgtgccggacgccaacgccttcggcaataccttcaggtgaaacagcctactgatttgctacggtgggttcttggggatccgtacgtcgacgccaaaactcaaaggccaggcgcaagcagagaagattggggcttatctagatatgcacatatttatataatggaattaaccaatacgtgttgaggtggatttaagatgaaaactaaagtanttttacttatctacgt

SEQ ID NO: 4745 - DNA, 109 bp, Zea mays
  misc_feature: Incyte ID No: 700354912H1
  unsure 16, 35, 72, 90, 96, 98: a, t, c, g, or other
ggagcacgaacggganatcgcagtcgatctctgtntccacattccagtttgaagtctggtgctgtggcggcnaccgttgtgctttggcgnttcctntnggcgaacagtt

SEQ ID NO: 4746 - DNA, 297 bp, Zea mays
  misc_feature: Incyte ID No: 700354914H1
  unsure 5: a, t, c, g, or other
cgcanttttggtagctgccactgggttggaaggggatgatattcctgtagtaaggtttctgcgccctagtcaggtggctgctggtggaatggagatggtgagcacaagtatacttcggcgatccaatcaaggggctgctgcaattgagtccgggacccctgagctccgctttcagagggtgatacagattagccagcagcacagcattgtgaggccagcatcagcgaaccacagtcaaggggcagctagtacagatgcggataggcttgtctgggcaatccagcgcacacataactc

SEQ ID NO: 4747 - DNA, 199 bp, Zea mays
  misc_feature: Incyte ID No: 700354915H1
  unsure 25, 86, 88, 96: a, t, c, g, or other
agaagcttgataagtgtgtaaaagnacactctgctggacctctgttggacccttggtattccaactcccgaaagcaaacattaganangaagattntgtgtcaaagctgttggactcattgctgaacctcactctgcagctgaatctggggctctgatgatcagggatcaaattctaaaaaacgcaagagaggaggtga

SEQ ID NO: 4748 - DNA, 231 bp, Zea mays
  misc_feature: Incyte ID No: 700354918H1
gcaaggggagcaacatcgccatccagctggatggcaacctgctgggatcaaacgacctggacaagtacacggcgagctggatcgaattgtctcacgttaacaacatcgggatcaccggctcgggcacgctggacggccaggggaccgccgtttatagcaagagcaagaccgacaacgtgaaggcgatgcccaacacactggtgctgtttcacgtgatcaacgccactgtcg

SEQ ID NO: 4749 - DNA, 98 bp, Zea mays
  misc_feature: Incyte ID No: 700354919H1
  unsure 5, 19: a, t, c, g, or other
gcaanctcactggcatgtnccttccgggttcccaccgtggatgtgtcagttgttgacctcactgtacagaatcgagaagggggcctcttacgaggaaa

SEQ ID NO: 4750 - DNA, 289 bp, Zea mays
  misc_feature: Incyte ID No: 700354921H1
gggccatggcggagcgcaccccttctcccccctgcctcgcgcgcggcggccgagatggtgctgagcgcctgagcctgccctcctacgggctcactggcacgctctccacggccatcggtaacctcacgttcctgcgtatgctaaacctgagctccaattgattccgcggggaggtcccagcgaccatcgttcgccttgcgcatctgcaggcgctagaccttagctacaagccttctctgaatccagagctgcgatcccgaggccatggagcagcagacaatatcattgc

SEQ ID NO: 4751 - DNA, 289 bp, Zea mays
  misc_feature: Incyte ID No: 700354922H1
  unsure 47, 99, 121, 161, 200, 237, 259: a, t, c, g, or other
tccaaatgagtgacctgggacatctctccttctacctggggattgangtgcaccagggagactccgggatcacacttcgacagaccgactatgccaganccagacgcattgttgagctggntgggctcaccgactgcaacccagctctcactccgatggangagaggctgaagctgagtcgcgacagcacgacggaggangtggatgttactcagtaccggcgtcttgtggggagcntcgctacctcgtccacacaggnctgacttggcatactccgtcggctacgtta

SEQ ID NO: 4752 - DNA, 290 bp, Zea mays
  misc_feature: Incyte ID No: 700354923H1
  unsure 82: a, t, c, g, or other
taatgctgatggcaacacaacattagtcttgaagaagaatgaagctttcttcaagactaatgctgatggcaacacaacatanttccaaggaaatgacgaagctctctggtatctctgaaattatccctgagaaggagatctgtgattttgacttcgaaccctgcggctactccatgaatgcaatccatggctctgcgttctccacgatccatgtgacgcctgaggatgggttcagctacgccagttatgaggttatgggcttggatgccactgccctgtcttacggtgac

SEQ ID NO: 4753 - DNA, 286 bp, Zea mays
  misc_feature: Incyte ID No: 700354925H1
  unsure 8: a, t, c, g, or other
cgtatgtnatgtcattcgatccagatacgcttcagaggtatgcaacggtcaggtcaaaggaggcctttggtatcatcgagaaacacacagaagcgctatttgggaaagcagagattgtagtcacacctggaggcacggttggttcatccaaggatgagcacattaggataagctttgccgggatgagaaggctggtcctggaggctgttactttcggatcatcctctgggacgttgagagcttgtggatccagctaccatttgtgaccagcttagatgtcatccta

SEQ ID NO: 4754 - DNA, 240 bp, Zea mays
  misc_feature: Incyte ID No: 700354926H1
  unsure 133, 141: a, t, c, g, or other
agaaaccaccgccgagcccaaccgcacaagcgcgcgaggcaggagagagagagaggcggggagcaaaacaatggaggggaaagaggaggacgtgcgcctgggcgccaacaagttctcggagcgccagcccatncgggacgnccggcgcagggcgcgttgacgacaaggactacaaggagcccccgccggcgccgctgttcgagcccggggagtcaagtcctggtcttctaccgcgcgggc

SEQ ID NO: 4755 - DNA, 293 bp, Zea mays
  misc_feature: Incyte ID No: 700354930H1
gggttgtgagattcctgatcccgcctctgcccatataacgtagacgcaaaaccccccaaccctcatcttaggcgccgccaaaccaccgtcaattgagcaagcatcgacgagaatagggaagaagtacatgaatcaccgcgggtccatgcggtggcatggttgggagctctgcgctgggtggattgcgtgcggacacgaggatctgaggaatcatcctggtacctggaatctcaagtccaaggagaagaacaggtggttcaagaggatccacacagtgaggagttcgatttgat

SEQ ID NO: 4756 - DNA, 99 bp, Zea mays
  misc_feature: Incyte ID No: 700354933H1
  unsure 46-47, 59, 65, 79, 89, 94-95: a, t, c, g, or other
acgtattcagagtgagcagcttcatggttctggcaagtgagctgcnnactgaattttcntcgctncccaatgtccagcngtggcaaggngctcnnaata

SEQ ID NO: 4757 - DNA, 240 bp, Zea mays
  misc_feature: Incyte ID No: 700354934H1
  unsure 71, 153, 165-187: a, t, c, g, or other
gcgtccccaacgcgaatcatccttcttccgtcaccagacagacggtagagagtcgaacaatgcgccggctncgacgcccctcttcccgacgccgcacgccttcacggtcctcggccgccgatacttccagagcggttcgacaccgtgctcgcnacggtcgacatnnnnnnnnnnnnnnnnnnnnnnngaaagttggcatcgttgtcgacctctttctccccttcttccacccaggaggca

SEQ ID NO: 4758 - DNA, 284 bp, Zea mays
  misc_feature: Incyte ID No: 700354935H1
  unsure 45, 59, 198, 261: a, t, c, g, or other
cacaaacactaattggcgatcctggaagaataaggcaaatcattncaaatccttgttgnaaactctataaaattcacagagaagggtcatatctacttgacggttcatgtcgttgaagagattatgcattgtctggaggttgagacgggaactcagtatacaaataccttaagtggctacccagtggcgaacaggaancgcgttgggaaaactttcgactttttagtagggaactgaactcatccgagatgccttttgcanccatgcatcagactcataagctt

SEQ ID NO: 4759 - DNA, 228 bp, Zea mays
  misc_feature: Incyte ID No: 700354937H1
  unsure 7, 9, 117: a, t, c, g, or other
gcggganangacgaggatcttcgtgcagcgcgggaccgccggctcctacgtccagctccggccgctacggaacacgcagccagtgcagccggcagcagctgcccgggaggaggagtngccgctgcaacctacaaccacagctgccggagctattggccatagatgatacaactgataatttaaatgagggcagcgagaatatcagcaataagcctttgaggacggatg

SEQ ID NO: 4760 - DNA, 285 bp, Zea mays
  misc_feature: Incyte ID No: 700354939H1
  unsure 96, 104, 108: a, t, c, g, or other
gcaaggaagactgccactagcccaagttcaggatggcgatgaaggttcaaatttatcagctgaggaaaagcatctgtatgagacattcataaaggncagtatcnctcnctggttggcaggatctggttacattggccttgcagcaatatcgattgcaaccgtcccaatgatctttccgcagatcaagtggtaccttgtcctctcggcatacgttgttgctcccctcctcgctttctgcaactcatatggcactggactaacggactggaatctgcgtctacatat

SEQ ID NO: 4761 - DNA, 131 bp, Zea mays
  misc_feature: Incyte ID No: 700354940H1
  unsure 10, 30, 36, 42, 46, 52, 56, 85, 87, 112, 124: a, t, c, g, or other
cgttagtgtnatttattgtgcactaccgcnaccggnattgtnattnatggtncacnacctccccgtgtcaggattggggaggtanangcaataaataacaataccgggccgnagagtgtctggnaattgga

SEQ ID NO: 4762 - DNA, 222 bp, Zea mays
  misc_feature: Incyte ID No: 700354942H1
cgaccatccctgcaaattaccgcgatggctcccaagatcctagtcatccttgtgttcctcgccgtggcctcaccggcggctctggccgctttcgatgtgatagagatgctggccgacaagcccacgtactccacgttcctgaagctcctgcaggacaccaaggtcgcgggcgaggcgaatcagctccggtcggcgacgctactggtcgtccccgacaaattg

SEQ ID NO: 4763 - DNA, 284 bp, Zea mays
  misc_feature: Incyte ID No: 700354943H1
  unsure 41, 151-152: a, t, c, g, or other
tcatccccgacccccgcaccgcagcgtaaaccctagtcccnggcggcgaccttgcggcctccgctgcgctctgactggtgcgcgtttagacgaggagctgcggcggccaagaccaatcgaccatggctacccgtatccagtttgagaacannctgtgaaattggtgttttctccaagctgacaaatgcttactgtctggtagcgatggagggtcagagaacttctacagtgcctttgaggctgagcttgcagatgccatccctgtggtcaagacctctattggt

SEQ ID NO: 4764 - DNA, 150 bp, Zea mays
  misc_feature: Incyte ID No: 700354951H1
  unsure 2, 4, 6: a, t, c, g, or other
anantnttggccgtcatgaggttctcctttgtaacggcaaacctatttgcagtcatctagatagcaggctgctttcagacgaagaagaacaggagctgcagatccttcctgtgccttctgacatacacgtctgcatacatggatatgatc

SEQ ID NO: 4765 - DNA, 147 bp, Zea mays
  misc_feature: Incyte ID No: 700354952H1
  unsure 20, 29, 34, 43, 93, 128, 139: a, t, c, g, or other
ggagcaggaagatgccggcnaggcacggnctgcngtcgcgganccgcgacttgttcgcgcggccttccgcaagaaggggtacatcccgctcancacgtacctgcgcactacaagatcggcgatacgtngacgtcaaggntaacggcg

SEQ ID NO: 4766 - DNA, 213 bp, Zea mays
  misc_feature: Incyte ID No: 700354954H1
  unsure 2, 18, 29, 38, 46, 61, 142: a, t, c, g, or other
anccatttctgcattgcncgacttcaganatatgcagnatcaaganaagagatcgacagangacttgatgtacacttccagagaagaatggcagaagtactcgataagcacttatctatggtccaaagggatcatgaacaanaatcccagattgttgaacgtcgaataagagatgatgcagctcttgaagaagctaaaagaaaagagcaagct

SEQ ID NO: 4767 - DNA, 145 bp, Zea mays
  misc_feature: Incyte ID No: 700354955H1
  unsure 40, 51, 54, 129: a, t, c, g, or other
tgaagaatatgatccacagaaggacaagcgtttcagtggntctgttaagtngcnccatatcctcgtcccaagatgaaggtgtgcatgttggtgatgcccagcatgttgaggaggccgagaagatgggantgactacatggatgtt

SEQ ID NO: 4768 - DNA, 162 bp, Zea mays
  misc_feature: Incyte ID No: 700354956H1
  unsure 78: a, t, c, g, or other
gttactagttctgacactgttgtggggagagatcgaggcgtgcgtgcatgcgtgcctaacttgtaatttggtatggtnggctggggaaggattggtggacccacttgccagtgcaatgtcacctttgcgggctgattggattagttctgctcaagtagtcag

SEQ ID NO: 4769 - DNA, 134 bp, Zea mays
  misc_feature: Incyte ID No: 700354960H1
  unsure 17-20, 29-30, 52, 68: a, t, c, g, or other
cagccaaacctacatannnnccgcgcagnncccccccgcatcgtcgccaaanatgccagatctttgtnaagactctgacggggaagaccatcactttggaggtggagtcctcggacaccatcgacaatgtgaag

SEQ ID NO: 4770 - DNA, 152 bp, Zea mays
  misc_feature: Incyte ID No: 700354961H1
tagcgggcacggcgtcggtgcctggctaagaagggtgaggaggagaagttgcgcaaggcgggcatcattgacatgcaatttcgaagggtcaagtgcaagtatggatctaaggtcacttccacttggagaaggggtgcaacccaactaacctg

SEQ ID NO: 4771 - DNA, 149 bp, Zea mays
  misc_feature: Incyte ID No: 700354962H1
  unsure 32, 43-44, 57, 59, 68, 89: a, t, c, g, or other
gtgctcgcgtgacgcttggtatggcctcgganacaaggcctgnnttgttgctagtananagcactgcncttttggtaacggcgtttcangatatgtggtggactattgagagaaaggtctctctgtgactgtgactgtgaacactcacg

SEQ ID NO: 4772 - DNA, 151 bp, Zea mays
  misc_feature: Incyte ID No: 700354964H1
  unsure 65, 134: a, t, c, g, or other
gcatgccatagcgtacgtccatggcgacaagtactacggcgccaaggcgactatcaatgtgtggncgcccaagatcgaacagcccaacgagttcagttgtcccagctctggatcttgggcggtcattcggggangatctgaacagcatcga

SEQ ID NO: 4773 - DNA, 196 bp, Zea mays
  misc_feature: Incyte ID No: 700354966H1
  unsure 32, 38, 112: a, t, c, g, or other
ggctccttcttggagttgagctggtgacagancgtggngaagaaaccccagccaaagctgagatctcacgtgtcatgaaccatatgaaagatatgggagtgtggttggtaanggtggtttctacgggaacgttttaggtaacaccaccgttgtgcttcaccaaagaggattccgacttcttcattgaggtgatgga

SEQ ID NO: 4774 - DNA, 194 bp, Zea mays
  misc_feature: Incyte ID No: 700354969H1
  unsure 145: a, t, c, g, or other
cacggagcgagggccactggctgtggtcttgtttcttcaggtaaagaaaaacagttcttcctgagtgaggggtagccaagatcgacgactggcggcaggtgtacaagcgcacaaccacaagtcgtcgtcaagctctcgactcganggagaagcaactccgatcacttgttcagagttgcatgtcccgtgaactc

SEQ ID NO: 4775 - DNA, 222 bp, Zea mays
  misc_feature: Incyte ID No: 700354971H1
  unsure 3, 136: a, t, c, g, or other
ganacaagtgcacacaaataaatacatcgctcactagattgccaagagcaatggctctaggtcatccatcctgctcgtcatggtggcgctggtacgctattcgtggttggttcgtgcaccacccgctcacttccangtcggcaagggctccaagccggccacttggtcctcaccccaacgttgccaccatctctgacgtggagatcaaggagcacggtggcg

SEQ ID NO: 4776 - DNA, 188 bp, Zea mays
  misc_feature: Incyte ID No: 700354972H1
  unsure 2, 34, 57, 81, 89, 91, 114, 133, 163, 166, 175: a, t, c, g, or other
tntctctctggatgatcttgctactacgactggncacgagcttttggacatggttgncagttcgcctgttgttgcgataangagcctanangtatctgacttccaaggcgtgtntctttcaactattggcagnagtactctcgagattaatctgactgctgangtnagaatctgnagtctggtatgac

SEQ ID NO: 4777 - DNA, 387 bp, Zea mays
  misc_feature: Incyte ID No: 700354973H1
gattcactggaggtaacatggggtttgagagtgcacatttcaagctaagccacgagatgactcaattgctggatccatctggaactatgaagagtgatacatggaaccaatttctcaggttgtgtgtcaaaggatacctagcagcaaggaggcatatgaatgggattttaagtacagtcaacctaatggtggacagtggccttcctgctttagcaggggagatcctatcaataatcttcggaagcggtttcatccagagatgaatgaacgtgaggccgctaacttcatggtacgaacatgtgctgatgcttacaacaagtggactaccgcaggtatgactgatcagtactgcagcagggtatgagaaatagttgttctcgtttttaa

SEQ ID NO: 4778 - DNA, 178 bp, Zea mays
  misc_feature: Incyte ID No: 700354974H1
ttaacatgttggttcaagctggagtgagctcaataccaattgtggatgaaaacgactccctgcttgacacttactctagaagtgacatcacagccctagtaaagacaaggtctacacacatgttcgcctggatgagatgaccattcatcaggtttacagttggacaagatgccaatac

SEQ ID NO: 4779 - DNA, 165 bp, Zea mays
  misc_feature: Incyte ID No: 700354977H1
  unsure 19, 41, 58, 83, 99, 106, 125, 128, 143, 151: a, t, c, g, or other
gcaagagagcatctggcgngtctcttctcatgtgatgttgngctttatatttgggggngccgacggagtatctattattgtgnctggatgacacattcnttttgtnagccacggagaaagcaaantgnctgaagctttgaatntgtagagnggcacattgcttcc

SEQ ID NO: 4780 - DNA, 180 bp, Zea mays
  misc_feature: Incyte ID No: 700354979H1
  unsure 14, 18, 58, 60, 62, 136, 172, 174: a, t, c, g, or other
tgtatattataaanaganaacattatcgaattggtggtgaagtcacaattacattttngntngtatcagtaccgaggtttggcttgtattttcaaaacaaacacatacctattatacctactaacttagttgctanctattagtgttctctattaaataagttcgatcactntntggtca

SEQ ID NO: 4781 - DNA, 110 bp, Zea mays
  misc_feature: Incyte ID No: 700354983H1
cagcacggtcctttcttgtggtctgcgtgcgtattcctccattgtgaggctgtgtgtccagcatgttatggatgtcgtcgcgtaaaatatacggtcggccgcgcggtcgc

SEQ ID NO: 4782 - DNA, 137 bp, Zea mays
  misc_feature: Incyte ID No: 700354984H1
  unsure 3, 102, 127-128: a, t, c, g, or other
gcnccggcacgctgcgctggggcgtcatccagcccggcccgctgtggatcatcttcgcgcggtccatgatcatccagctctcgcaggagtgctcatgagcangacaagaccatcgacgggcgcggcnnaggtgcata

SEQ ID NO: 4783 - DNA, 155 bp, Zea mays
  misc_feature: Incyte ID No: 700354985H1
  unsure 9, 41, 60, 76, 101: a, t, c, g, or other
tggtctgcnattcccacgctccttcctgtgaaccacaaaantaacgcggaggccgcggcnccggccgccgggcgangtgcgcgtaactgccgtcgatcgtngccggatccatccaccatgggcggtggcaacggccagaagtcaagattgcccgc

SEQ ID NO: 4784 - DNA, 268 bp, Zea mays
  misc_feature: Incyte ID No: 700354990H1
  unsure 15, 104: a, t, c, g, or other
gttcacatatttganatatccacatacaggcctagcaatcaaagaaggaattacagagtgtctcaaagagtgggggataaaagagaagatgttactatcacatnagataatgttctaacaatctgtcagtgcgtgacttcgagaaagtgggctatttggaggcgatcttcgtattgtccaatgttgtgcacacatattgattctcttagttcaagatggaatggcaatgctcatggagcaatctataagattcgtgagctggtcagac

SEQ ID NO: 4785 - DNA, 162 bp, Zea mays
  misc_feature: Incyte ID No: 700354993H1
  unsure 7, 144, 149: a, t, c, g, or other
gcatgtnctactactatctatagctagcttccaacaagatttgcgcttcagactttttggaggtctacttgggtgacattttttcagtaaggtccatgagagaagtgtgtagcttgtggactaggtagaggacagcaacatcgncagtncagcaaatgacac

SEQ ID NO: 4786 - DNA, 188 bp, Zea mays
  misc_feature: Incyte ID No: 700355001H1
gctccgtgatctggtctggtgagatcggggatcggaccgtcgactcggcgagacatggcggactggggccccgtggtggtgggcgtggtgctgttcgtgctgctctcgccgggcctgctctgcgagctgccgggcacccaccgccacgtcgacttcggcggcttccacaccaacggcaaggccatctt

SEQ ID NO: 4787 - DNA, 113 bp, Zea mays
  misc_feature: Incyte ID No: 700355003H1
  unsure 2, 12, 39, 54-55, 59-60, 66, 68, 70-71, 75, 93: a, t, c, g, or other
gncagctaatcnttggtgtgggggtttgattcgacgganaccgtcaacaacggnngcannatggcncnanncttnaccgtagagactcatttncgtcttggaacgcgatggcc

SEQ ID NO: 4788 - DNA, 199 bp, Zea mays
  misc_feature: Incyte ID No: 700355004H1
gctggcgagagcaagatggaggaggtggactagtctggctatcgtgtcttaatttgtgtgtgtgcgtgtgtttttttttacttctgctagcctgcaaacttcttacgtttattattgtgggtataatagtgctcctgctgcccatctctgcttgctcggtcagttttatatatgccagctgctcatcgcagcattcgcc

SEQ ID NO: 4789 - DNA, 293 bp, Zea mays
  misc_feature: Incyte ID No: 700355009H1
cagccagtcagccacatcactagctatctgtgcagaggcaatggcgtccaaggttgagctggtggtggaggtcaagtccccggctgacaagctgtgggcggcgctgcgtgactcgacggagctgttccccaagatcttccccgagcagtacaagagcatcgagaccgtcgagggcgacggcaagtcggccggcaccgtccgcctcctcaagtacaccgaggcggtgccgatgctgacgttcgccaaggagaagcttgagacggcggacgacgagaacaagtggtgtcgtacag

SEQ ID NO: 4790 - DNA, 292 bp, Zea mays
  misc_feature: Incyte ID No: 700355011H1
ggtacctagacctagcagcagcaggcggttagaggacgtgaagcggccagttcctccccggcgccgacgacacctgggtgcccaaccccggcttcgaggtccccaaccccttcatgcccggcgcggccactccctgaacacgtacccgcgctggcgaaggtggctctcggtcgatctgatcgtcgagcgccgccgcccgccctgaacgaataatactactagctactctcggtctgctacgtatagctagcttagcttagctagccgtgttgcctgctgcatgtacgcatgt

SEQ ID NO: 4791 - DNA, 289 bp, Zea mays
  misc_feature: Incyte ID No: 700355012H1
  unsure 226: a, t, c, g, or other
ctcaagtccaaccacccctccatccgatgcgtcgtcctacgacatgggcgccgtcgcggcgattcgacacgagcggtctagacgcgctgtccgagctcaagaaagtcctggacaaaagaaacatcgagctggtgcttgccaacccggtggggtcggtggcggagaggatgttcaactcggcggtgggcgagagttcgggtcgggccgcctcttcttcagcgtaggnaggccgtcgcggcgggggcgtgcaaagcggcgcaccttgacgacgagacagctgatccctgag

SEQ ID NO: 4792 - DNA, 86 bp, Zea mays
  misc_feature: Incyte ID No: 700355013H1
  unsure 62, 65, 70, 72-73, 76, 84: a, t, c, g, or other
ctgccggtcgcttcctgagcctcctctggctctgtgtctctgtcctcagcttccacacaacntancattngnnaanccggcatnat

SEQ ID NO: 4793 - DNA, 232 bp, Zea mays
  misc_feature: Incyte ID No: 700355016H1
  unsure 23, 30, 72: a, t, c, g, or other
tcctcgcctcctccattgaccancaattangcctccccgaccgccacatctattaggtgcagccatgggtgnctgtgcaacgaagcctaagacgcttgaggggaaagccccagctgaggccaccatctccacacccaaggttgcacctgagaccactaccatccacattgaggttgcggcaaaacatgcagtagttgagaaggtggaggaggacaaggaggaggcactaaca

SEQ ID NO: 4794 - DNA, 105 bp, Zea mays
  misc_feature: Incyte ID No: 700355017H1
  unsure 7, 15, 32, 43, 58, 76-77, 80, 84, 87, 89, 91: a, t, c, g, or other
ggacganctcgtcantggtgtgggccgtggcngtacgccgganagtgaagcgagacgngacgacgatgcgcaagtnnggncgcnctngngnccgcgactcctcgt

SEQ ID NO: 4795 - DNA, 120 bp, Zea mays
  misc_feature: Incyte ID No: 700355020H1
  unsure 25, 27: a, t, c, g, or other
ctcctggcggcgacggctgggcgancngcgcggccccgttatcacttcccaggtcttcggcggcgacgagtttccaccaggctgaccggaacgcagtgcgtggagaaccggtgagcagct

SEQ ID NO: 4796 - DNA, 226 bp, Zea mays
  misc_feature: Incyte ID No: 700355021H1
  unsure 129: a, t, c, g, or other
ttcaaattcatcagaaccaaatgcaagtgtccgcagtgagaattatgtttctagaatgcgcaaaccacgagataactgctatattgaagtttcaagaaaagggagagcaaggtcaagtgtctgtaattnggaagggcgggaccagtccccgagtcacgaagaaccgatgacagccagttcttcgctggctcctacaggccgtccaaattcatctagaggaagcagt

SEQ ID NO: 4797 - DNA, 224 bp, Zea mays
  misc_feature: Incyte ID No: 700355022H1
cgccgctttgggttggggtttaagcgcgtgtaagggaggccggagggacgacgacggcgccggcgtcggagaagaagaagcagacaactctcgtatatgtcttcttgccccttttccgatctggtggtcgtagcgctcatcatcgccgtcttcgccgtcatcctccgcgccctcgcttgctctggccgatctatgcgcaaggggctcaacggctggaacaaatc

SEQ ID NO: 4798 - DNA, 227 bp, Zea mays
  misc_feature: Incyte ID No: 700355024H1
  unsure 2, 4, 55, 190: a, t, c, g, or other
cncngccgccccgccccgccccgccaaaggaacggaggatggaagccccgggctncgccctacgcctcctcgccggaatccgcccccaagcgtgcccctcgctccccaccgcagcagcagcctccctccgaggaaggagatgacaaggagaaaccaatacatttgaggtttctggtgtctaatgcgtcanaggatgtatcattggcaagggtggatcaactattaat

SEQ ID NO: 4799 - DNA, 289 bp, Zea mays
  misc_feature: Incyte ID No: 700355025H1
ctagcttattacctgccatctggacttatattttgtagttagcaaggccgagcattccttgccccaacagtacattcacgcgttcaaagacggacaatttacgacatctccagtgtctcattctggggcttgattgtctgcacgactgccatttcttatttccttttgtttacatcagctagcttattacctgccatctggacttatattttgtagttagcaaggtaacccactgcacaacccgctgctccgcctcgagcgcatgtgctgagagtggctcggcgtcatc

SEQ ID NO: 4800 - DNA, 224 bp, Zea mays
  misc_feature: Incyte ID No: 700355026H1
cgacggagctgttccccaagatcttccccgagcagtacaagagcatcgagaccgttcgagggcgacggcaagtcggccggcaccgtccgcctcctcaagtacaccgaggcggtgccgatgctgacgttcgccaaggagaagcttgagacggcggacgacgagaacaaggtggtgtcgtacagcgtggtggacggcgagctggcggacttctacaagaattcaag

SEQ ID NO: 4801 - DNA, 285 bp, Zea mays
  misc_feature: Incyte ID No: 700355027H1
ttatcttgcacgtttgctgttctggtgcatgctgctgggtcactacattcggggtctggagtaccggttagagcttgctcggcttctgcgaatatccagcgtgggttctttctctggtggagatgatcatgttgtttgagggtaccacgtctactgatattcctcaccgggaagaatggaaaggaaagccctggtcaagaaatgggccatatggcagagctgcagaggtgtccgttacactgctgagctatatagttgtagttcctgtatattcagaaaacagtc

SEQ ID NO: 4802 - DNA, 286 bp, Zea mays
  misc_feature: Incyte ID No: 700355028H1
  unsure 131, 267: a, t, c, g, or other
ggttcatcgtgcaggcccgcgtcggcagggagttcccctgcaagtacatgtccacgctgctggcctgcgtctccggcaccgtccaggcgctcgccatcgcggccgtcatccgcgggggcgaccgggactcntggctcctctcctgggacctgcgcctcctcaccgtcgtctactcgggggtcttcaacaccgccgccaccttctgcctcatctctgggccatcgccaggcgagggcccatctacccctccatgttcaactccctctngctcgtcgccaccaccgtg

SEQ ID NO: 4803 - DNA, 284 bp, Zea mays
  misc_feature: Incyte ID No: 700355029H1
  unsure 65: a, t, c, g, or other
caaatccgtcaacaaaacaagtgcacacaaataaatacctggctcgctagattgccaagagcaanggcctttaggtcatccatcctgctcgccatggtggcgctggctacgctattcgcggtcggttcatgcaccaccccgctcaccttccaggtcggcaagggctccaagcctggccacttggtcctcacccccaacgttgccaccatctctgacgtggagatcaaggagcacggtggtgacgacttctcctttacgctcaaggagggtccgatggcattgga

SEQ ID NO: 4804 - DNA, 287 bp, Zea mays
  misc_feature: Incyte ID No: 700355030H1
  unsure 284: a, t, c, g, or other
atggggttattcttattcctgagggccttgtggagagtattcctgaactatatgctctgcttcaggaaatccatggcctccatggcaaaggtgtttctgttgagaatatctcttctcagctttcaccttgggcatctgcactctttgagtttttgcccccttttatcaggaagcagctactactacatcctgaatctgatgattcagctcaactttcccagattgagactgaaaagctgctagcccagttagttgagactgagatcaacagacgtttgaagganggc

SEQ ID NO: 4805 - DNA, 290 bp, Zea mays
  misc_feature: Incyte ID No: 700355033H1
gtcgtatcgagctaaaacccttgctctccctgcccgcccattttcctttccccttggcattcggctccactgcttctccggcgaattggatcggcgatccatcgtcgtcggatcgcaactcctgactagcttgttgctgcaggatcgttatccgccgcgcctgctgcttgggtttgttttccctgcccacggaaatggggatggagatagacatggagacgtatcccaatcttaatacttcccctcggccgccactgcctcaggcgacgccaaggctgcgccaactgcca

SEQ ID NO: 4806 - DNA, 200 bp, Zea mays
  misc_feature: Incyte ID No: 700355035H1
  unsure 23, 57: a, t, c, g, or other
catcaaggagttcaaggaaaaanacaaggtggacaaggtagtcgtgctgtggacggncgaacaccgagaggtacagcaacgtggttgcagggcttaacgacaccatggacaagctcctggcttcgttggacaagaacgaagcagagatctcgccatccaccttgtatgcgatagcctgtgtcctcgagggtgtcccgttc

SEQ ID NO: 4807 - DNA, 221 bp, Zea mays
  misc_feature: Incyte ID No: 700355038H1
  unsure 172: a, t, c, g, or other
tcatgaaatgcccatgaaaccaaatggtagtctgcttgttgtctactaccttcggcgttatcggtatttggaggcatatgaggttgaccgtagtcttcaaaaatttgagcaaaagatattggaaaatacaactgaagagattgcttcaaaaatcagagcaattgctcgatgncagagaaagtttagttgttaaatgcctgacatgcttccggaggtccaga

SEQ ID NO: 4808 - DNA, 220 bp, Zea mays
  misc_feature: Incyte ID No: 700355040H1
  unsure 18, 124, 184: a, t, c, g, or other
cagcgtctcacccctgangccgcgcagagccactgctagcgtctctgtctctctgtctgctcgtttttctccttctgcgactcgtaggagggtgaggtcttgcttgcctcgcggaatggcggcngccggggcatggctggcccgtgcgacggcgacggcggtgctgggtttcgtcctggcggtngcgtcactgtggcggcatcgggggacgtggagatgg

SEQ ID NO: 4809 - DNA, 96 bp, Zea mays
  misc_feature: Incyte ID No: 700355041H1
  unsure 8, 18, 22, 32, 42, 48, 62, 83, 95: a, t, c, g, or other
gacttgtngtccattggnggtngatgattcanacacccaatncctgcncttcttggtgaatnactttaggtcaaggaacctgnagacctcgtgtna

SEQ ID NO: 4810 - DNA, 218 bp, Zea mays
  misc_feature: Incyte ID No: 700355045H1
gtctcgaccaacccatacgcacctaccctccgccaccgttcccccctccccatctcgcccgccgttctcgtccttgtagatctcctcgcacctcgcccattcgcttcaccaagggtttaagaccggcggcgatggcggcgaagtggacgcagtgcgcacacaggtaacgcgtgcggcggagttcgcttcgaagcacggctgctcctactacaaggagg

SEQ ID NO: 4811 - DNA, 210 bp, Zea mays
  misc_feature: Incyte ID No: 700355048H1
  unsure 4, 86, 94, 149: a, t, c, g, or other
aganggtcatcgagtctcttgggctgcagccggtccgggactccctggtggggacggtggagcagcgcggcatctccggcgggcancggaaganggtcaacgtcggcctggagatggtgatggagccgtcggtgctgatcctggacganccgacgtctggactggacagcgcatcctcgctgctcctgctccgcgccctccgccgcgaag

SEQ ID NO: 4812 - DNA, 218 bp, Zea mays
  misc_feature: Incyte ID No: 700355050H1
  unsure 49, 153, 186: a, t, c, g, or other
acaggtttggaaatcggcgctgtccgtcttcgctcttctcgccagggcnaattaaagctacaatgcaggctgcctactatgcaaaggatcttttggtttgaagtccagttgaccgaagttggaaaatacttctgatacttacagatttcacanaggcagcgattcgcacataatttaattggttcnccattgtgattacaattatgttctgtccactg

SEQ ID NO: 4813 - DNA, 225 bp, Zea mays
  misc_feature: Incyte ID No: 700355052H1
gatgactgcagttgagatgcttgatgatgaagtctacgttggggcggagaatagctataacctattcacggtgcgcaagaacagcgatgcggcgacagatgacgaaagggccaggcttgaggtggtgggagagtaccaccttggggagtttgtgaacagattccgccacggttcactggtgatgcgccttccagactcggatatagggcagatccctacggtcat

SEQ ID NO: 4814 - DNA, 287 bp, Zea mays
  misc_feature: Incyte ID No: 700355053H1
  unsure 21: a, t, c, g, or other
ctcgcctctctctcgcgcaanccacagtagagcaaccaaccataccaccggcccgtgtcgatctctggcctctctcgtgcaaggaattaagcaggcaagaggccaaccttcttccagcatggccaaggcgagcagcaggctgctcttctcgctctcgctcgtcgtcctgctgctcctcgtggagaccactacttctccccatggacaggctgacgccatcgactgcggcgcgagtgctcgtaccggtgcagcaagtcgggacggcccaagatgtgcctgagggcgtg

SEQ ID NO: 4815 - DNA, 283 bp, Zea mays
  misc_feature: Incyte ID No: 700355055H1
gcaagaagacatcgatcgagtggatgagctatttgggaaggcgctcgatgctggaattagcattcaatgcaggtccatcaccgcatacgacattgcttttctactgttatctgggcactgcattgctattgcttagtggacaaatcgaagctaaatttgccctgcatgagtgatcatgatgtacaacagcacaacgatgagcctgactacatgggacactatgtcgtaatatgtgggtatgatgctgatgattgtgaatttgagataagagatcctgccattc

SEQ ID NO: 4816 - DNA, 225 bp, Zea mays
  misc_feature: Incyte ID No: 700355060H1
  unsure 25, 44, 83, 128, 160: a, t, c, g, or other
atcgaagtgaacaagcaaggaaganccatggcgacgcgagcacncggacggggggcgaggctaagcatgaccagaagcagagnctgatggacaaggcgaaggggttcgttgtggagaagatcgcgcanatccccaagcccgaggcgacgctggacggctngacgttcaagggcctgagccgggagtgcatcacgctgcacagcagctgaacgtgtccaaccccta

SEQ ID NO: 4817 - DNA, 228 bp, Zea mays
  misc_feature: Incyte ID No: 700355062H1
  unsure 78: a, t, c, g, or other
agaagacattccgccccaagaagagcgctccatcaggtagcaagggagcacagctccgaaagcacatagatgccactnctcggcagtggaaaccttagggaagctgtgaggttgcctcctggagaggatatcaatgaatggcttgcggtgaatactgtggatttctttaaccaagttaatatgctgtatggcacactcacagaattttgcacacctgagagctgtccg

SEQ ID NO: 4818 - DNA, 119 bp, Zea mays
  misc_feature: Incyte ID No: 700355065H1
  unsure 3-4, 17, 24, 43, 95: a, t, c, g, or other
cannaacgtgtgagganggaaganggtgcagacctcagctcanctgcctgttgaacttgtctgggtcatctcggcacccccgctttgccagagcnccctggccagcatgtcttccacat

SEQ ID NO: 4819 - DNA, 210 bp, Zea mays
  misc_feature: Incyte ID No: 700355067H1
  unsure 41, 43: a, t, c, g, or other
ctctctccttccctcctctccagttccacagaaggctccgngncctagatcccgtggagaatgtgttggggatcaaggagtggttgattggatccatcccctcacgtgcttccctcatcaagtttcaaatccccatctgcgcgaggaactcctctctcaaggggaggggaaatcgctcgtaactgtgcaaacacttgttgctcgaccccc

SEQ ID NO: 4820 - DNA, 216 bp, Zea mays
  misc_feature: Incyte ID No: 700355070H1
attacttatgagacagcataatccgcagaagcacggaaccgccttgcaagtggtttgaaaatagcgcaccaacagttgggtaacatccagttagtttctcagtatttgacaatactgggcacattggcgcttcagctacatgacgcagcacaggctaaagagatcctgaagtcttcgttgaccttagctaagacgctatttgatattccaacccaa

SEQ ID NO: 4821 - DNA, 120 bp, Zea mays
  misc_feature: Incyte ID No: 700355073H1
  unsure 53: a, t, c, g, or other
caagcactcgtttatcgaggtgttcctggacgtgccgcttcaagtgtgcgaancagggaccccaaaggcctctacaagctcgcacgcgccggcaaaatcaaagggttcaccggcatcgac

SEQ ID NO: 4822 - DNA, 216 bp, Zea mays
  misc_feature: Incyte ID No: 700355075H1
  unsure 59: a, t, c, g, or other
ccaggccgacaacgccgtccctggcgccgagaacgagctcgcctcgggcgctgccagcncccattccttgcaggagctgcaggacactacgctgggctcactgctctcagcgcttatgcagcactgcgagcccccacagcggcgctacccgctacgagaagggcgttcctccaccgtggtggcctaccggcgacgaggagtggtggccggaatcgg

SEQ ID NO: 4823 - DNA, 278 bp, Zea mays
  misc_feature: Incyte ID No: 700355076H1
  unsure 79: a, t, c, g, or other
cacgaaaccagagcaaattccggcgagccggtgcggtgcggcggaggaggccgagggagacgccggcgcgagaaaccancatcaggaggaggcagcggagatggatccggactcggtgaagtcgacgctctctaacctggccttcggcaacgtcatcgccgccgccgcccgcgacctccaaaaggaaatggtggctaaagacaaggctcaatcagcacctgcaagccatgatgaattgatcttgatgagctgttggatgacccagaattgagaattgc

SEQ ID NO: 4824 - DNA, 281 bp, Zea mays
  misc_feature: Incyte ID No: 700355077H1
  unsure 27: a, t, c, g, or other
gtcagaagaggaaccggggagcggcantgcagcggccgagggcggagcacgcgaggttcaagattatccggtttaaagacatcagaagaggctgcggcatggatagataccaaagggtagagaagcctcggaatgacacgccaatcagccagaatgagatcagaatcactactcaggggaggatgaggaactatatcagctatgggatgtcgctgcttgaggaaaatggacatgatgagattagtatcaaggccatgggacgggccataaataagacatta

SEQ ID NO: 4825 - DNA, 221 bp, Zea mays
  misc_feature: Incyte ID No: 700355079H1
  unsure 17: a, t, c, g, or other
aaacaacacatgccacnacgatccaagttcgccatggtggagagagaaatgatgccgccaccatcgatctcctccgtgggtaactccccgacctcggggggtgttcttagcgcgtcgcggatgctgccgcgcgtgcgctgacctcggcaggcggggatcgcagccgtgaggtcggtgattttccgccggtgtagcagcgccgccgcgatgtggatgtgtgc

SEQ ID NO: 4826 - DNA, 200 bp, Zea mays
  misc_feature: Incyte ID No: 700355082H1
  unsure 33, 38, 41-42, 45-46: a, t, c, g, or other
aggtgccccggatctatctgctcgttagagttnacagnacnntgnnacaggagttgccttttgattgagcaaccgtcctgcggagtaaattgttgcccatttttccccgctgcccccaactgggcagctcgattgtggttgacagagttgtaaagatcatcaatttactgatatgatatgataagaaggagcactttcac

SEQ ID NO: 4827 - DNA, 279 bp, Zea mays
  misc_feature: Incyte ID No: 700355083H1
cttgtcttccagccaggagaagaaggctacggcggcgcttaccatgttctcagagaaggtgtcctggatgacgtgtctgccattttcggcttgcatgtggatccaggacttcctgtaggcaccgtttcgtccaggccagggccgtttctagcagcagcaggtagatttctggtgacggtcactggaaaaggcggacatgctgcagggccacaggatgctgtggatcccatgttgcggcatcctctgccatcgtcagccttcagcttcttgttgcccgcg

SEQ ID NO: 4828 - DNA, 276 bp, Zea mays
  misc_feature: Incyte ID No: 700355085H1
ccaaattagtagaggctgaggttgcccctggtcttggagaaaccctcgcttctggtacccgtggcactccatggagactctcatgtcacaagcttgatggcaaagtcacaactctagcttttgcgaatttcagtgaagagcttatggtgctcaactctggccctaccgatggtgaaatgagtcgtaggaccgtagactacagcaagaagccgttatctgttgatgcaacctttagggagcagtttggtcagcgccttgccgccatggacagtatct

SEQ ID NO: 4829 - DNA, 88 bp, Zea mays
  misc_feature: Incyte ID No: 700355086H1
  unsure 4, 14, 40, 54, 58, 77: a, t, c, g, or other
ggangaaccaaggncgccacacccaagagtccaccaagcnatccaacgagatcncccngtccgacactatcctcggngacattcataa

SEQ ID NO: 4830 - DNA, 276 bp, Zea mays
  misc_feature: Incyte ID No: 700355088H1
  unsure 125, 184, 187: a, t, c, g, or other
aaagaaacaggcacacaagaacaaatacctcgccaccaacaatggcctccaggtcctccatcctacttgcaacggcgatgctggttgcgctgtttgcggttggtttgtgcaccaccccgctcacnttccaggttggcaagggatccaagcctggccacctgatcctcacccccaatgttgcaantgncatctgacgtggagatcaaagagcacgggggcgatgacttctcctttacgctcaaggagggcccgaccggcacctggacgctcgacacc

SEQ ID NO: 4831 - DNA, 212 bp, Zea mays
  misc_feature: Incyte ID No: 700355089H1
  unsure 41, 85, 126, 183: a, t, c, g, or other
cgagaagagatccatcgatgtagggtcattcagttctacantctacaatccacttggctgctgggaggaggagaaaaaatgggangggagtttgtagtgcagaaatttgcgattgcttagtgcacnacttgctctgctatgtttttcttagcagcttactgctgcaggctgtagaagggacancgaaagttgacagttctctgcaggtggtc

SEQ ID NO: 4832 - DNA, 278 bp, Zea mays
  misc_feature: Incyte ID No: 700355091H1
  unsure 150: a, t, c, g, or other
gtgtgtgtgtgtgtttagtttgtcctcatttctgtagagtcctggattccgttgtctgttattgtcccctcaactgtgttgttgtaaacaacgtgcatgtactgaaagagctgcgcctgaccggataagccctctgcaggtatcattganaatctaagaatttttccctgtgcttctggaaaccaaagttgtttatcacttttatagctatgaaagagaaatagctgaaccacaacatgtgtctgtgcctcctttgtcatagctataaaagtgataaa

SEQ ID NO: 4833 - DNA, 158 bp, Zea mays
  misc_feature: Incyte ID No: 700355093H1
  unsure 16: a, t, c, g, or other
agatgatgggtttcanctgccaacaccgttccgcctccctgcgcatcttcctcgtctccgtcgtcctcctgcttcaccgctcctgcggggcgttgccattgctacaagcgcatcttcagcttcggcgactctatcatcgacacgggcaacttcgcgcg

SEQ ID NO: 4834 - DNA, 195 bp, Zea mays
  misc_feature: Incyte ID No: 700355094H1
  unsure 13-14: a, t, c, g, or other
cgccaaccagttnntacagacactggagagctgtggctgggaagctgccatcggttgcggtggcatctcgatgctggcgaacccaccgcgtacatggggaaggccttcaaagctgctggcttcgacggcgagctggacgcgagcaacatccgggaagccatcctgagggccactgggctgtgcataaacagcagc

SEQ ID NO: 4835 - DNA, 221 bp, Zea mays
  misc_feature: Incyte ID No: 700355095H1
  unsure 13: a, t, c, g, or other
gatttgttgtgcnatttaccaacaaggacatcacagcacaaatcatctctgctagtatagcaggtgatatggttcttgcttctgcttactcgcatgagttgccacgatatggtcttgaagttggtctgaccaactatgcagctgcctactgcactggccttctgttggctcgccgtgtgctcaagacccgtggtttagataaggaatatgagggcaatgtt

SEQ ID NO: 4836 - DNA, 118 bp, Zea mays
  misc_feature: Incyte ID No: 700355096H1
  unsure 56: a, t, c, g, or other
gttttgactaagcagccagcatgacaaccatccgttggcagaaagaggcttgcggntttttgcagattagttgccggggcacccctgtagttgtactcagaatttgaccattgactcg

SEQ ID NO: 4837 - DNA, 295 bp, Zea mays
  misc_feature: Incyte ID No: 700355152H1
gcacttgccaagtcaaaaagtgatgctggtgcgatgtctggtttgcaatggtgggagagggattgtgaatttgaggagaagggccatcaaggtggacgatgatgaaaagtggagccggaggagcagcattggcatgggcattagcaattccagcatcagttggtgggtggacggtgtgagaaggagcagcagggattgggccagcggggatttgtgcctaagagtggtggagcatgagcagcacaccgagcatgctggcacatctgctatgtggctctgatatggtggagaggcc

SEQ ID NO: 4838 - DNA, 300 bp, Zea mays
  misc_feature: Incyte ID No: 700355153H1
  unsure 5, 89-90, 115, 138, 140, 222, 251, 259: a, t, c, g, or other
gggangagctccgcgcggtgctgccccaggaggtggaggccgcccgcgtggcgtcgccgagggcaccgcccccgtggcgaaccggatcnnggacagcggtcgttccgctgtaacngttctgcgcgaggagctcggctncntgttcctgaccggcgagaggctcaagtcccccggcgaggagtgcaacaaggtgttcgtcggcatcagccagggcaagtcgtngaccccatgttcgagtgcctcaaggagtnggacggcnagccgctgcccatcaacgtcaagtaaagaacgccaaggaga

SEQ ID NO: 4839 - DNA, 259 bp, Zea mays
  misc_feature: Incyte ID No: 700355160H1
gagtggaccaaggtggacatctctgatgaggcccagaaggagcgtgtcaatgcgatgattgaggaccaggagcccttgagggcgaggcttgcttgacgcgaaatgcttcaagtgagtgtgcttgcctggagacagaactgtttagcccttgaatttgcctatggaagagtttgcccttttactagtgtcgatgttgatctggtataccttgctatgaactggttaaagtttgtgctggtttgggattttttgtgcactg

SEQ ID NO: 4840 - DNA, 290 bp, Zea mays
  misc_feature: Incyte ID No: 700355161H1
  unsure 119-140: a, t, c, g, or other
gccactggctttctgagtagccggagccaaacacaaaggagggtaggaatagctgtggtgactcggaagagaaagagacagtcgacgccttgttttgttgatgcttagtgtggtgaccnnnnnnnnnnnnnnnnnnnnnntcttggcacaagttacatgctggggatagctataggaggtacctgttgaggtgtgtaagacagtagctagcaaccgtatgcctggtttcctgtttgggtgcgtgactgccgactttctagctgcttctggggttttgacctcggtaagga

SEQ ID NO: 4841 - DNA, 168 bp, Zea mays
  misc_feature: Incyte ID No: 700355162H1
  unsure 15: a, t, c, g, or other
ctcatgattagtgtntattctcgctagaaccaactatatagcgtgttccatatgtattagcatgccatcgagactctagcttgctctatagatatctcgacgtatccgctcttcaagcttcgttctgtcgagttgaatgtggtctaataagtgaatatatgcaaactg

SEQ ID NO: 4842 - DNA, 298 bp, Zea mays
  misc_feature: Incyte ID No: 700355168H1
agcgaagaatgcagctggggctcccatatttgtgaggcagtcaaatttcaagttacctgctgacccatccactccgattatcatgattggtcctgggacaggctggctccttttagaggtttcttgcaggaaaggttagcactgaaacaatctggagcagaactgggcacttcaatccttttctttggatgcaggaaccgtaatatggactacatatatgaagatgagctgcaaactttccttgaggagggggcgctttctgagctaattgttgcattctctcgggaagggccaacta

SEQ ID NO: 4843 - DNA, 300 bp, Zea mays
  misc_feature: Incyte ID No: 700355169H1
cagttatcaacaatggagcaaacttgtttgaagtagatagtcagaagtgggttaggagagtgtcatattataagaaatcgcttggtgtgaaagcttggggagcaccaaacatacgcaaatgtcatggacatgaatgcattctttggaggattcgcagccgctataatatctgatcctgtatgggttatgaatgttgttcctggtcagaagccattgacacttggagttatttatgataggggcctataggggtttatcagactggtgtgaaccatctcaacgtatcctcgtacctatgat

SEQ ID NO: 4844 - DNA, 89 bp, Zea mays
  misc_feature: Incyte ID No: 700355171H1
  unsure 13, 79, 85: a, t, c, g, or other
cgacgatggcgancggcacatgaagagggagatcagcgagacccacgacaccctccgcttcggccttcaatgcccggcntcaaanccgt

SEQ ID NO: 4845 - DNA, 307 bp, Zea mays
  misc_feature: Incyte ID No: 700355173H1
  unsure 104: a, t, c, g, or other
ctctctccttccctcctctccagttccacagaaggctccgtgtcctagatcccgtggagaatgtgttggggatcaaggagtggttgattggatcatcccctcangtgcttccctcatcaagtttcaaatccccatctgcgcgaggaactcctctctcaaggggaggggaaatcgctcgtaactgtgcaaacacttgttgctcgacccccctcaatcaatcgagccgtggtgtttgttgtctctctctctttaattaagatggttgcacggaggaatccatccattattgaagaaggtagtggatctg

SEQ ID NO: 4846 - DNA, 300 bp, Zea mays
  misc_feature: Incyte ID No: 700355174H1
  unsure 7, 31, 37, 39, 45, 59-60, 62-63, 85, 92, 109, 115, 126, 128, 152, 168,: a, t, c, g, or other
cctcgancctcccgacgcggcacagcaaaancacaangnggagangagggagagaaggnngnnggcgaggccaaaaatcccctcnccttccncaaatcctaggcccatnatctcncaatcatgggntncttaggtctgatcaagtcggaggnttcggcaggcgcagcntgaacgagaaggcgtccgtctccaaggagtcaacgccaagcacaagaagatattggaaggtcttctacggcatctnngantagagaatgcgcgantgctagtcanagggtcctcgttggcagtgtgaatcta

SEQ ID NO: 4847 - DNA, 300 bp, Zea mays
  misc_feature: Incyte ID No: 700355186H1
  unsure 21, 36, 41, 44, 79, 92, 94, 107, 116, 121-122, 128, 130, 151, 153,: a, t, c, g, or other
gaaacaacaagactgacagcnacgatgatgccacanctgcntanctcgtcgcgctggtcctcgtgggccacggccatanccgctggctcccngngttgggtttgtcntcacggacngcatnnactgcnanaactgccgcgccgggttcgananaaacgtgtcccaggccatccaaggcgcgacggtggagatnnantgccgccattcgantcgcagcaggtccacgacaagnggangctacgacggggccccggncggctggtacaagatggagatcagcggngaccaccaggacgagtc

SEQ ID NO: 4848 - DNA, 127 bp, Zea mays
  misc_feature: Incyte ID No: 700355189H1
  unsure 8, 35, 42, 48, 61, 66, 74, 80, 83, 86-87, 122: a, t, c, g, or other
acctccgncatcatgggtcgcatgcacgctcccgngaagggnctgtcncagtcggcgctgncctancgccgtancgtgcncangtnnctgaaagttgaagtctgacgacgtgaaggaacaantttac

SEQ ID NO: 4849 - DNA, 271 bp, Zea mays
  misc_feature: Incyte ID No: 700355191H1
  unsure 69, 232, 236, 241, 243, 247, 253, 260, 270: a, t, c, g, or other
cagccacccccgtagcgagagggagggcggaagaggatgagcgcgtccaggttcataaagtgcgtcacngtcggggacggcgccgtcggcaagacctgcatgctcatctcctacacctccaacaccttccccaccgactatgttccgacagtgtttgataacttcagtgccaacgttgtggttgatggtaatactgtcaacctcggcctctgggacatgcagtccagaggantacnacagntnagancactgngctatcngggggcgttnt

SEQ ID NO: 4850 - DNA, 298 bp, Zea mays
  misc_feature: Incyte ID No: 700355193H1
aaggacgtggtgtagggccattgaaggatcacatttatttgcatctgaaccatctgccgcctgaggttctcaaagaaaggctccctggtatttctgaaactgctgctatttttgctggtgttgacgtcaccaaggagcccattccagttttgcctactgtgcactacaatatgggtggtatcccaacgaactaccatggggaggtagtggatatcaagggtgataatccagatgctgttatccctggtctaatggctgctggtgaagcagcctgtgcatctgtccaggtgcaaatagg

SEQ ID NO: 4851 - DNA, 199 bp, Zea mays
  misc_feature: Incyte ID No: 700355194H1
gagaaggatacttcgtagattgagggagtttgcctctagtgggtcaaagggccggaagaggaagcacccctagtgtttaagcaatattctgcgggtcaggcttggtattcctgaacaccatgctcaataaaggtatggtgacgttctgcaattctgctgctcttgtaatggaatactaacatttttaggaacaataact

SEQ ID NO: 4852 - DNA, 94 bp, Zea mays
  misc_feature: Incyte ID No: 700355195H1
  unsure 83: a, t, c, g, or other
cagcggcgaggccgacggcgaggacgcgcggctggaccgcgtgaccaagctgcagcacctgctggacctgcttcatgcaaatncggccgtacgg

SEQ ID NO: 4853 - DNA, 136 bp, Zea mays
  misc_feature: Incyte ID No: 700355201H1
gagttatgccaattccacttcatgactctaaaggttctgtttgccagtatgatcacatgacagtctctcctgatggtaaaattctggctgtaacaagtggatcaacgttgcaatggttacttgtggaaactggtgc

SEQ ID NO: 4854 - DNA, 193 bp, Zea mays
  misc_feature: Incyte ID No: 700355202H1
  unsure 73: a, t, c, g, or other
ccgaggtcagagtgcatctaaccaacggccggccccgtaccgcgcctggagctcgggagttcacgacgggttngcgtacttcgtgaggttgctggtgaagcgcttgtggccgattggggaggaataaaccactgtgtcgaccagaattcgtcgtcggtcgccggattccgccacgcatgtgggtggtctggcc

SEQ ID NO: 4855 - DNA, 226 bp, Zea mays
  misc_feature: Incyte ID No: 700355203H1
  unsure 6, 49, 67, 76, 187, 189, 196, 209, 222-223: a, t, c, g, or other
gggtancagtcgtggggtccgctcttcggcaagctcttcttcgccttcngggtgatcgttcacctgnacccgttcntccaagggtctcatgggtcggcagaaccgcaccccgaccatcgtggttgtctgggcgatcctgctggcgtctatcttctcttgcctgtgggttcgcatcgatccgttcacnanccgcgtnatggcccggatantcgaacgtgtggnntca

SEQ ID NO: 4856 - DNA, 228 bp, Zea mays
  misc_feature: Incyte ID No: 700355205H1
  unsure 138, 193: a, t, c, g, or other
taacccctagagcaatataaccaaaccaaggacgatactgactacttatggtacaccacaagctttcgcttggagtcggacgatttgccctttagaaatgacatccggcctgtgcttcaggtcaaaagtagtgcacangcatgatgggatttgctaatgatgctttcgtaggatgcgcgcgcggaaacaagcnggtgaagggtttcatgtttgaaaaaccggttgatc

SEQ ID NO: 4857 - DNA, 179 bp, Zea mays
  misc_feature: Incyte ID No: 700355210H1
  unsure 2-3, 6, 101, 156: a, t, c, g, or other
tnnagntagctattcactggatgttggcgatggggacagaattagtgggagctctatccttgttcctacagtgggttcacaggtgatagagtacaggccgntctctgaagacgaagacgaagacggcgacgacgaccagaacggggccgacgtggnagtgtcgctggacgccgttctcc

SEQ ID NO: 4858 - DNA, 134 bp, Zea mays
  misc_feature: Incyte ID No: 700355212H1
  unsure 43, 48-49, 53, 91: a, t, c, g, or other
gaacttgccaatgcgaacaacgagctggctattaggttcaaancaganngccnatggtggtgtcagaaatggtgaagagtgcggctgaggncacagacaaagatgctccagctccagaagacggtggacgagaa

SEQ ID NO: 4859 - DNA, 297 bp, Zea mays
  misc_feature: Incyte ID No: 700355213H1
  unsure 226, 231, 252, 270: a, t, c, g, or other
cgaaggttcttgcctcgttgggaagggatggcgtcggaggtggaggacgaggcggcgacgcgtggcttcgccaacggtgcagccgacgtccgccggaggagggaccaggcgaaggcaattctgtccacgcaggccgtcagatcgccaccaaggccgagcagcatgagcgcttcatctttaaggtcacacacttgctgggtgttcttggatttgggggttttgctanctctngggtgccagaccacagatgtnccatatgtgtatgctgtnctatgtcatatttgttccgctcgctgg

SEQ ID NO: 4860 - DNA, 304 bp, Zea mays
  misc_feature: Incyte ID No: 700355214H1
  unsure 42, 46, 50, 52-53, 57, 61-63, 66-67, 75, 81, 84, 90, 93-94, 115: a, t, c, g, or other
attagctagctattcactggatgttggcgatggggacagaanagtnggancnntatncttnnnccnncaatggcncacagntgntagacnagnncaccgggctctgaagacgaanaacgaagacggcgacgacgaccagaacggggccgacgtggcagtgtcgctggacgccgttctcccagacgatctcctggagaaggttctttccttgttgcccgttgcgagcgtcataaggtccgggtccgtttgcagaaggtggcatgagattgtgcatgcgcagaggcacgcgtggagcaagacggtg

SEQ ID NO: 4861 - DNA, 300 bp, Zea mays
  misc_feature: Incyte ID No: 700355215H1
gcaccatgaagtgtctaaccctagtccactactccactcgagtcactcccttcccctgaatcccttgtccccctcgacggcttaactccttttggttgggcggctggcaagcgacgaccatgacccagaccaccacgccccacacggttgtaccggcccaccgtcggcatccaccggccaccataccccatgtcagcgagagggccagtaacgacttggacacagcggcaccctgtgggcatcaccagcgccgcctaccaccgcgacatcaccggcactctgatcaggatatgggtaaat

SEQ ID NO: 4862 - DNA, 78 bp, Zea mays
  misc_feature: Incyte ID No: 700355219H1
  unsure 4, 8, 62: a, t, c, g, or other
gacncgtngccgtctactccatcggggtcctcttcaagaaggagaccttcaagtcctccgcnatgctcaacatgctct

SEQ ID NO: 4863 - DNA, 128 bp, Zea mays
  misc_feature: Incyte ID No: 700355220H1
  unsure 90: a, t, c, g, or other
aagtggtgccgtggcgctgacctgggtacacgttcacaggagtcggggccggtggacacgacgaacctgagccgcaccgaggtgcgcgcnctcatggcggactcgccgctgacttcctgggaacgcct

SEQ ID NO: 4864 - DNA, 78 bp, Zea mays
  misc_feature: Incyte ID No: 700355221H1
  unsure 40, 75: a, t, c, g, or other
gccttgggaggcatctccgttcggggttgtcctaccctangggcttcgactgttgggaccacgacatcttgaagnacg

SEQ ID NO: 4865 - DNA, 79 bp, Zea mays
  misc_feature: Incyte ID No: 700355224H1
  unsure 19, 27, 32, 37, 40-41, 43, 55: a, t, c, g, or other
ccgacttctcgcaggaacnccgctgcntccanaccgncanntncgactcaggcgntggtgaacaatctggatgacgcgc

SEQ ID NO: 4866 - DNA, 299 bp, Zea mays
  misc_feature: Incyte ID No: 700355230H1
  unsure 241-242, 254-255, 268, 271-272, 275, 279, 281, 285, 293: a, t, c, g, or other
tgaaatatttatacgatgtgttaatgtggactgctctgtataaatcgttggtacaaaatggctatggtcttcagcttcatttcctggtcactggacagtgaactgctcaagcacacttagtagatactaggcacaatcagagcttatcgaacttgtgcgatatagttcgtttcagtactccatggttatgatgttattgatcactaattgagctgaagccctacaatctgtgacaaaaaannttggataccgcnngcaaccaccgctnaanntgngcanangggntgattttnggatcc

SEQ ID NO: 4867 - DNA, 120 bp, Zea mays
  misc_feature: Incyte ID No: 700355234H1
agaaaccaagcgcttcagaaggcggtgccccagtgaggcaaagccatccagatggttccctagaaccagtactcaagaaacctgtgaaccatgaagaagagcttcgatggatatcccagg

SEQ ID NO: 4868 - DNA, 180 bp, Zea mays
  misc_feature: Incyte ID No: 700355235H1
agaagacgcaggacggcacggtgacgatcggcatctatggcaaggagaaggcgacggtgacggtgtcggacgggcggatggccaagctccccggtctcatcctgggctgctccgtcctggaggccggcggcagcgtggacgcccacgacggcgtgctgtcgctggggaacggcgacatgt

SEQ ID NO: 4869 - DNA, 294 bp, Zea mays
  misc_feature: Incyte ID No: 700355237H1
  unsure 4, 31, 34, 36, 42, 47, 75, 82, 84: a, t, c, g, or other
ggtngccggcctgcagggcgacgtcccagcnaanancccaanggcgnccccttcgtcggcggggccaagaaggtngccggangnggagagcactttcgtcggcgacggcggcaccaccaggggcatcaacgagaacaacacggtgctgagcttccacgacctcatgcggatccacatgccgccctacgacaacgccgtcatcaacggcatatcctccgtcatgatctcctactccagctggaacggggtcaagatgcacgagaacaagttctcatcaccgacacgctcaagaac

SEQ ID NO: 4870 - DNA, 291 bp, Zea mays
  misc_feature: Incyte ID No: 700355238H1
  unsure 41, 75, 273: a, t, c, g, or other
ctctccgcgcaggtcacacagtcaacggatttcactgaggntgcaaaccaggagccgtggctctcatctatgaanttggttgtgaaacctgacatgctctttgggaaacgtgggaagagtgggcttgtggccctcaacctagatcttgcccagttcgccaatttgtcaaggagcggttgggagttgaggtcgagatgggtggctgcaaagctccaattacaaccttcatagttgaaccatttgtgccacatgaccaagagtatacctttcgantgtatctgaaaggctggg

SEQ ID NO: 4871 - DNA, 228 bp, Zea mays
  misc_feature: Incyte ID No: 700355239H1
  unsure 3: a, t, c, g, or other
ggngtccgctcataacaactcaaatgaagcgactcatgctgcaagtgcatcagaacgccgcagaaatgctgcccgaaaatgctgtgcttgctaatcctaggatcaatgcgctgtttgaccacttcaagatggccctggattgtttctttgccgtctggtttgttgttggaaacgtgtggatatttggtggccgttcttctgctgctgatgcaccgaactgtacaggtg

SEQ ID NO: 4872 - DNA, 236 bp, Zea mays
  misc_feature: Incyte ID No: 700355242H1
  unsure 10-11, 29, 196: a, t, c, g, or other
catggcaggnnaaatcaagaacagttgangttgaagaggaggaagaatcaaaaggtgaagaggctactgaagaatcaaaaagtgaagaggctactgagggtgaaaagcagaaaaagaagaaaaccataactgagaagtactgggactgggaattggctaatgaaacgaagcccatatggatgaggaatccaaaggnagttgagaaaactgagtacatgattctacaagaagacttt

SEQ ID NO: 4873 - DNA, 237 bp, Zea mays
  misc_feature: Incyte ID No: 700355244H1
ggcagacgcagatcggcggcgggataggctagcaatgatccccaattccgacttcctctagactgcctggcggtcgaattccgattcgattggagtagggaacgagaagggaacaaatacaccggcaccaccaccagaccagacagcacgtgcctccatactatggtttacgccccgtgccgctcatcgacgccgccgtcttcctcgccgatgctccacaagaacctccgcgccctc

SEQ ID NO: 4874 - DNA, 179 bp, Zea mays
  misc_feature: Incyte ID No: 700355246H1
  unsure 165: a, t, c, g, or other
ggaggtgctatgaaagtgctcatgaacctttgtgtctccgtaaattaaagacctcttcctgtgcgccactcacaagtatagtcagacgagagctttgagacaacaggcattcactatggttcaacctgtccgctctggaccataggaaccagtcaagcacagatncactcccagaacaa

SEQ ID NO: 4875 - DNA, 72 bp, Zea mays
  misc_feature: Incyte ID No: 700355248H1
  unsure 38, 44: a, t, c, g, or other
ctttcaatagatcgcagcgagggagctgctctgctacntacganaccccgacccagaagcaggtcgtctacg

SEQ ID NO: 4876 - DNA, 201 bp, Zea mays
  misc_feature: Incyte ID No: 700355249H1
cattcaagcacctcctcctcccccgccggccaacaactcagccgccgcaaccgccacatcagccatgggcgcctgcgcaaccaagcccaagacgcttgaggggcaggccccagctgaggccgccgtctccacacccaaggttgcgcccgaggccactccaatctccgttgaggttgcggctgatgaacaggtagtgagaag

SEQ ID NO: 4877 - DNA, 87 bp, Zea mays
  misc_feature: Incyte ID No: 700355258H1
  unsure 24, 38, 40, 55, 60: a, t, c, g, or other
ctggggcgatgatggatacttcangatcataacgggcnangatgaatgtggcatngaggngggcgttgttgctggaatgccatccac

SEQ ID NO: 4878 - DNA, 308 bp, Zea mays
  misc_feature: Incyte ID No: 700355261H1
  unsure 132, 210-211, 296: a, t, c, g, or other
ggatttgtcaggaatcgatggtccacagtctgtcggagtgtttaaatcatcaacactgcttgcccaccgtgattgtgtaacaggattagctgttggaggtgggttctgtttagctcttcttatgataaaacnatcaatgtgtggtcactgcaggacttctctcatgtgcattgtttgaagggtcatgaacacaaaatcacagcaatagtnnttgttgacaatgatagccattctctttgtataagtggagacagtggcagcggaatttttgtttggcgtgtggattccacttgaangaagaaccttga

SEQ ID NO: 4879 - DNA, 170 bp, Zea mays
  misc_feature: Incyte ID No: 700355265H1
  unsure 21, 33, 105, 120, 130: a, t, c, g, or other
tccgcgtccagtgtgtccgcnactccgctcccnctctgtcctcagttcctcacctagcggtaggttgcgcgcgggagacgtagatggcggcttcggaggcggcancggcggcggcaacancggtgacgcngacagaggggacggtgatcgcgatccacagcctggaggag

SEQ ID NO: 4880 - DNA, 97 bp, Zea mays
  misc_feature: Incyte ID No: 700355267H1
  unsure 42, 58, 86: a, t, c, g, or other
ctgagctccttcgaagaagtggaaactctgttgaactccttnatgtttctagcgagcnacctgaaattggttcggcgtcctgggcntagcacttggg

SEQ ID NO: 4881 - DNA, 100 bp, Zea mays
  misc_feature: Incyte ID No: 700355270H1
gactcgccttaattagttcgctttgcttttgaggttgactcgaccattttggctgtagcgtgaaattgcatggacatgcaacggctcccaatggcccttt

SEQ ID NO: 4882 - DNA, 289 bp, Zea mays
  misc_feature: Incyte ID No: 700355272H1
  unsure 32, 255, 270, 278: a, t, c, g, or other
agattagctaccacggcaccgccagcccgganggctataaagacgaggcccatctcgaaatcgacggcgatgaagaagaccagttcccctctcctgatcgtcctgttcctcacagcagcagccatggcggccgagccggagaagcaggcggcccccgcggcacaggagacggccgtgacatcgtgtacgttgacgccccgaggacgccgacctgaggattcacatcggacctcaccccgtctcggaagcgacaanaggcaggagatgttntacaatanaagaagcgcag

SEQ ID NO: 4883 - DNA, 87 bp, Zea mays
  misc_feature: Incyte ID No: 700355274H1
  unsure 32, 35, 37, 42-43, 52, 57, 69, 79, 81: a, t, c, g, or other
gtggagctgacgttcggcgaggtcgagcgagntcnanatagnnttcatgggnaactnccagcggactcnccccacgttncntcaaca

SEQ ID NO: 4884 - DNA, 179 bp, Zea mays
  misc_feature: Incyte ID No: 700355275H1
  unsure 25, 48, 53, 96, 114, 119: a, t, c, g, or other
ccaaggtcggatctacgctgctgcnggtcagcaacaaaaagcgcactnggttntacgtttgcagtgttgctgtatcactctgcgtctctgcaagtnctaaaccagtcactttanggacngtggttcctgtggtctcgagggagcgtcggtagtgacatctactaccagcactggtattc

SEQ ID NO: 4885 - DNA, 300 bp, Zea mays
  misc_feature: Incyte ID No: 700355277H1
  unsure 27, 51, 88, 234, 243: a, t, c, g, or other
tagcgccaccgcttgatcccgcccgcncctccccagatctcctcgccattnccgccgccctgccaggattcgcgccctactcgcccanatccgaccgcggctctgattctccaaccgacgcaggagcggtgggtctgaccgggcgcgacccgtcttctcatgggcgatacagcgtgatccctgcggctcgattgtaaattcgtgatctttcggggcattcctggtttgtctgtngtgccggtngtgctgcgtttggaaggccgcggagatgggcgtcggcggggagaattccactgggga

SEQ ID NO: 4886 - DNA, 128 bp, Zea mays
  misc_feature: Incyte ID No: 700355278H1
  unsure 2, 16, 18-19, 126: a, t, c, g, or other
gnggttcttgagattntnntttgtggattgccgatgggttggtttaccggtttattagagcgcatcatctggccgtcggattggactgcggacggccgggtgcagaaaggaagtgctgcgatagantt

SEQ ID NO: 4887 - DNA, 82 bp, Zea mays
  misc_feature: Incyte ID No: 700355280H1
aacgattctacccggcgttgtcatcaacggggaggcctcacccacccctgtctcctgcgatgcgaaactacgcatcggcggc

SEQ ID NO: 4888 - DNA, 291 bp, Zea mays
  misc_feature: Incyte ID No: 700355285H1
  unsure 175, 182, 189, 193, 197, 199, 202, 204, 216, 223, 237, 261, 288: a, t, c, g, or other
tcccggcgatcgcgaccgagttcctgctgctcatggtggcgctggacaagctctacttcacgccgctaggaagttcatggatgagcgggacgccaagatccgcggtgagctcggcgatgtcaagggcgcctccgaggaggtgaagcagctggaggaccaggcggcggccatcatnaaggcgncgccccngaantccngnggncntaacaagattanaaggganaccaccgcgactgnaggccaactggacgagggcgcacntgtggaggccgactcgtaaagcgcccncaa

SEQ ID NO: 4889 - DNA, 91 bp, Zea mays
  misc_feature: Incyte ID No: 700355286H1
gccaactgaactcaacatcaacggtgaatagtgggtaggagtcgacgcccgcaacctgaagattgttcacactactgcgacagcccaggtg

SEQ ID NO: 4890 - DNA, 74 bp, Zea mays
  misc_feature: Incyte ID No: 700355287H1
  unsure 5, 7, 10, 13, 15, 17, 26, 55: a, t, c, g, or other
tggangnganagntnancacgtctangaagcatctcgaactctcggtgccgctcnatttgtacccccaatcccc

SEQ ID NO: 4891 - DNA, 149 bp, Zea mays
  misc_feature: Incyte ID No: 700355290H1
tctactcgagcgggccgcttctcccatccagccgcgcacggcgtcgccggaaccggagaaaggaagggagggagcgcgagatggacaaagccaataagctcagcaccggagcgggggagaaggcgaccaagagcaggagccacgggtcc

SEQ ID NO: 4892 - DNA, 245 bp, Zea mays
  misc_feature: Incyte ID No: 700355291H1
acttttttggagattttaagtatatcattggtggatgtgcttattcactgtcagcaatccaaaatggcattctacgtggcaaccaaaggccaccgtacaacattgccaaacctttcgggcagaaagaccgaagatccaaggtggcccttccataccatgaacctcttgttcactttgctttggtatgtggcaccaaatctggacctgcattaggtgttactcaccaggggatatcgataaagaat

SEQ ID NO: 4893 - DNA, 125 bp, Zea mays
  misc_feature: Incyte ID No: 700355296H1
  unsure 41, 64, 77: a, t, c, g, or other
ggttaatcggagagttgttcaaaaagaaaatgttgacaganaggattatgcatgagtgcattanaaaattgtttggnaattgtgatgatcccgatgaggagaacattgaagcactatgcaaattg

SEQ ID NO: 4894 - DNA, 101 bp, Zea mays
  misc_feature: Incyte ID No: 700355303H1
acactcctgagctgctggccaagcgcgcgacagagtgtggaatcgacgtgagcactatcttcggcctacattgaatccttcagctatggcgtgccgccaca

SEQ ID NO: 4895 - DNA, 297 bp, Zea mays
  misc_feature: Incyte ID No: 700355304H1
gaaaagttatggaagatgttgcttccatattccgagtagcagacaaggataactctggcactttaaccgtgaagaaaataaaagatgtccttggggacatatatgagagatacccacaagtggaattgtatcttaaatccaaccaaatgaagagcttccacgagctacttaaagactcagatggtaactccaaggagttgaaagaactgaacatcgaacagttcaaaaaggccctgctcaagtggactctcaagtcaagatgctcccagcaacggctcaggttgctgcacaagaggg

SEQ ID NO: 4896 - DNA, 296 bp, Zea mays
  misc_feature: Incyte ID No: 700355305H1
  unsure 51: a, t, c, g, or other
ggacaaaggagcggcggcgaggtctatggcgtcgacggcggggtacctggngcggcgggcggcgcagaaggagcgggtgcgcctgctctaccgcaggcgctcaaggacacgctcaactgggccgtccaccgccacctcttctaccaggacgcgtcggatctccgggacaagttcgaggccaaccgacacgtggataacctggacgtggtcgataggctcatcgacgatgcggaggctcagtacaggaacttccagcaccccgatccctacattgttccatgggcaccaggcggcac

SEQ ID NO: 4897 - DNA, 298 bp, Zea mays
  misc_feature: Incyte ID No: 700355306H1
ggcacggcgttcggcgccatggccaagaagggcgaggaggagaagctgcgcaaggcgggcatcatcgacatgcagttccgaagggttaagtgcaagtacgactccaaggtcaccttccaccttgaaaaggggtgcggccccaactacctggcgctgctggtcaagtacgtcgatggcgacggtgacattgtggcagtggacgtcaaggagaagggctctgacacgtacgagcccctgaagcactcctggggcgccatctggaggaaggacagcgacaaaccgcttaagggacccctca

SEQ ID NO: 4898 - DNA, 298 bp, Zea mays
  misc_feature: Incyte ID No: 700355307H1
gaggagggaggaaggagatcgcgagcagccggagccggaggccgagaggatgaagacgttcgacccgtggccggtcttcttccgccgggagtggaagcgcaactggccctttctcacggggttcgccatcaccggcttcatcatcaccaagatgacggccaacttcaccgaggaagacctcaagaactccaagttcgtccaggaacacaagaagcgctgaccaaccgggtggagtcgtccgaatcgcctgcggatgaaatttgcccccctatttttcttgtcttttttttatctagag

SEQ ID NO: 4899 - DNA, 218 bp, Zea mays
  misc_feature: Incyte ID No: 700355308H1
  unsure 63: a, t, c, g, or other
atggcatgacgggaccaagcagttttcgaccttgacgaaagagcggctccttccgttgcccangtgcccattctttgtattgttgtgtccatgctccatgccataagatcttgtccccatttggatgcgatcgaatgaccgacgacggctcatcaactgaccagcgtacataccgtctgcctggaaactcttgtggtgttgtaggtttagttattttt

SEQ ID NO: 4900 - DNA, 292 bp, Zea mays
  misc_feature: Incyte ID No: 700355311H1
  unsure 176, 178, 183, 216: a, t, c, g, or other
cttcccggtgtggatgttgccaacgtcgagcgcctcaacctactagaccttgcccccggtggccaccttgggcgctttgtgatctggacccagagcgcgttcaataagctcgaggaggtgtatgggagctatgacgccccgtcgcagaagaagaagggcttcgtgctgcccaggtnancattngacatcttaggcctcggcagcacgaagcctaanatgtccaacgctgactgggcaggatcatcaactctgacgaggtggcagttctgtggtgaagccattcaacaaggaa

SEQ ID NO: 4901 - DNA, 295 bp, Zea mays
  misc_feature: Incyte ID No: 700355312H1
gcagctcctaatctttcattgaagggaacaccatactggatggctcctgaggttgttcgggctacactcgataaaagtgcaggttatgatcttgctgttgatatttggagccttggctgcacaatcattgagatgtttacaggaaagccaccttggagtggtcttgaagggccggctgcaatgtttaaggtgttgcgcacggacccaccaattccagataacctgtcccctgaagggaaggattttctgagatgctgcttcaagagaaaccctactgagcgaccaacagcaaaca

SEQ ID NO: 4902 - DNA, 298 bp, Zea mays
  misc_feature: Incyte ID No: 700355315H1
  unsure 11, 17, 77, 82, 103, 107-109, 122-123, 125, 221, 262, 266, 285, 293: a, t, c, g, or other
ggtcgtcgcancgcgcncgtactctgtgtccatcatggagatcagcgagcccattttgccggccgcgttgccctccnccgtngcggcgcccggccgacgcggnaacnnntggtaagcgctanntntgcccatcagcggcaacccatgaggattccaacatgatcccgcgcaacccgtcgaagcagtggtggtgggtaagggtaaggtggccaaggataaantgtccgagtcacctgctccaagccccgcccccgtctccgcncttngttgcgtgttgggcgccgntgcccgcnggccc

SEQ ID NO: 4903 - DNA, 78 bp, Zea mays
  misc_feature: Incyte ID No: 700355316H1
  unsure 64, 70-73, 75: a, t, c, g, or other
catcgatctccccccagcggcgaggagagccggcggccacaggaaggagaaatggcttccgcancacaannnncncgc

SEQ ID NO: 4904 - DNA, 294 bp, Zea mays
  misc_feature: Incyte ID No: 700355317H1
  unsure 63, 227, 266-267, 274-275: a, t, c, g, or other
cagcaattgatagaaagacgggtcatctagagagtgtcgtaaacaagctaaaagatatagatnagaaaattacagatttagttaccaaacagcagcaaatggatgctgaacgtgatcatgcgaagtcagagttggaacaatttaaggctgacattgccagggctatgaagcaaagggggtcacttgagaaagccctgtcaagaaggaaaaatcacttaacaacatcngcaaccaattgagcaagtccagtctagcttgcatgaagnntgatganntgggcacagagcttattga

SEQ ID NO: 4905 - DNA, 142 bp, Zea mays
  misc_feature: Incyte ID No: 700355318H1
ttcaagaagggtattgctgttgaccgattagttgggtttcaagatctcagaagtaaagacgattttaccgacaagagcgttggaaaatattctcaagacgaaagggataattgatgagaagaagaaagatgacgacgatgac

SEQ ID NO: 4906 - DNA, 141 bp, Zea mays
  misc_feature: Incyte ID No: 700355319H1
  unsure 38, 46, 61, 63, 68, 75: a, t, c, g, or other
gtctctctcgctccgagccctctccccacgtgctcgtntctctgcngccctccctttcgcntncccantcgtttnaggcgggtacgggacctgggcggcgacttcaatctcgtccgcgggaaggttgagacggcgggggct

SEQ ID NO: 4907 - DNA, 288 bp, Zea mays
  misc_feature: Incyte ID No: 700355321H1
  unsure 36: a, t, c, g, or other
gagaaatggtgggagaaatatgatgccaaaggttgncacagaaaaaggtgctcacaaatatggaagattgaatgagcagtcctggtgggagagatggggtgaacattatgatggccgtggatttgttttgaaatggacagataagtgggcagagacagactaggcaccaaatggggggacaagtgggaggagaaattctttgcaggaattggttctcgacaaggggagacatggcatgtatgtccggcggtgaacgttggtcaagaacctggggagaagaacacttgg

SEQ ID NO: 4908 - DNA, 289 bp, Zea mays
  misc_feature: Incyte ID No: 700355322H1
aggttgtggttcacatgcccagccttgtcactggagatgagcctgatcatgaccgtgatggtgaggatgaggacacggcgggagatgacaatgacgaagatgaaggccagaagcctgaacagtcaagcattcctctcacagttcactatatccaagggtgacggtcctgttctgaattcacctgcactgcctatcctgacgaggtcatcatcgactccatgtctgtgacacaacaatcaggggatgatgaacgtgacatgattgcatatgagggtcctgatttcatgac

SEQ ID NO: 4909 - DNA, 213 bp, Zea mays
  misc_feature: Incyte ID No: 700355324H1
ctcccgctccgctcctgcttggtcgagatcacttcgccgacgccgctttcgagatctccgggtggagcaagcgagcaaaggcagcagccatgtcgctccggtgctgaaccctaacgccgaggtgctcaacaagtcggcagcgctgcacatgaacatcaacgccgccaagggcctccaggacgtgctcaagaccaacctcggccccaagggcac

SEQ ID NO: 4910 - DNA, 237 bp, Zea mays
  misc_feature: Incyte ID No: 700355325H1
  unsure 39, 153, 218: a, t, c, g, or other
ctgaacaacaagcttcgacaagaattcttctcctccatngtcctctgcaaagcgagggatttgagaggacgatggcgctgtataaactaccttcaacttcacttcatccactatattgcctgaatctttggtaaacatgtctccagtgacttnagtcggcatggtctccttggccacgatggcgctctgcacaaggaatttgtccttgcaatgcagtncggtggcgcgtcccgctgc

SEQ ID NO: 4911 - DNA, 290 bp, Zea mays
  misc_feature: Incyte ID No: 700355327H1
  unsure 21, 55: a, t, c, g, or other
gagatcgtgacagagatggtnatcgtaggcatcgctcccgctccccttctaagantcgtgaccgtgaccgcagatctagatctcgttcacgctctcgatcaaagagcaagcgcgtgagtggttttgaccaagcacctccacaacatgcacttcctattgttgctgctggtgctatccctggtcagcttcctggtatcactgctcctattcccggggttggggtgcttccgaacttgtataatttggctgcaggacagttcaacccccttgttattcagccacaagccatg

SEQ ID NO: 4912 - DNA, 284 bp, Zea mays
  misc_feature: Incyte ID No: 700355329H1
  unsure 231, 276: a, t, c, g, or other
cagcagtggagtagactatgatgatgagattggagagccagaggaggctccgcgtggatatcgtggcagagggaggggccgtggagggcgtggatcttttgcagttggaaggggctatggtggtgataattatgcgatggaagaagctggtagatatgatgatgatggatataacgcaccacctatgcaacgatatgaaggtggcagaggaaggggcagagggctggacgngtctgggcgggaaggcaaggccatggacctcctccgcaccatagntggttggc

SEQ ID NO: 4913 - DNA, 292 bp, Zea mays
  misc_feature: Incyte ID No: 700355331H1
agaccaactaccgcaacgattggaatgcaaagatttcgtatgagcgagatggtgtgcccattggcaaaagggcgtactcggactggctttacgtcgttccatgggggctctacaaggctctgatttggaccaaggagaagttcaacagccctgtgatgctcatcggagagaacggaattgaccagcctggaaatgagaccttgccgttcgctctgtacgacaattcaggatagactattcgagaagtacctgtacgagctccagtggcgccatacgcgacggtgcaaacgtc

SEQ ID NO: 4914 - DNA, 213 bp, Zea mays
  misc_feature: Incyte ID No: 700355332H1
  unsure 37, 95-96, 123: a, t, c, g, or other
atccagtccgcaccatcgctcaagttcaccgcctctntcgcgtcccaggatccgctccaggtccaggtccaggtccccgtctcgctccagccggnnccaatcgagatcgaggtcccggtcganggagcgcaggcgccgctccaggtctagggagagggaccgcaggcatcctgtagacgctctaggtcgcgggggtcgagatcgcttctcgcc

SEQ ID NO: 4915 - DNA, 67 bp, Zea mays
  misc_feature: Incyte ID No: 700355333H1
  unsure 47, 64: a, t, c, g, or other
tgcaaaattcatggcttcagacaccggcaagcagctcattcagatcnatgtgagctccgatacngtg

SEQ ID NO: 4916 - DNA, 77 bp, Zea mays
  misc_feature: Incyte ID No: 700355334H1
atacagtctgttcagcacgctgatttaagtatttgggtcaagatgttcatataatcctgtggtatccagagatatta

SEQ ID NO: 4917 - DNA, 284 bp, Zea mays
  misc_feature: Incyte ID No: 700355335H1
  unsure 224: a, t, c, g, or other
cggttccgaattccgacacgacatcgccaaattcctggaggccaaaacgcgatggaactcccagatgaaagagtacaagtagatgcactggagagacacttactagctggtttatcttcaaacgactataatggaagttttgaggatgaggtcctctatgatgcatcatttgcagaaatggaagataattttgtcaagtatcaaattgctcagtggactttatnatctctattactaatcgtagcttggggagtaggtgtgctcatgctactttacttacctat

SEQ ID NO: 4918 - DNA, 286 bp, Zea mays
  misc_feature: Incyte ID No: 700355336H1
ataaaaagagaatctttcaaagatggcgtccaagaagatggtcctcgccgtggcggcactgctgctagtcacgctcgcactgcaggtcgcccctcctgcgatcgccatggactgcaaggccgggtgtgccgagatcaagaactccccactcggcataagcatcgaggagtgtctgaagaggtgcgaggggatcgccaccgagcagggacctagggacccttacaaggataacaaacttgacatcccataaacacttatgccttgctgatatatttgtgcctatcca

SEQ ID NO: 4919 - DNA, 287 bp, Zea mays
  misc_feature: Incyte ID No: 700355338H1
  unsure 275: a, t, c, g, or other
aaagctctcgatctcaccgacaccgaggaagaagagatcagtggcgtccgagcagggagtcgtgatcgcgtgccacagcaaggctgagtttgacgcccacatgaccaaggcccaggaagccggcaagctggtggtcatcgacttcactgccgactggtgcggtccatgccgcgccatcgccccactgttcgtcgaacacgccaagaagttcacttcaggtcgtcttcctgaaggtggacgtggacgaatgaaggaatcaccgcggcctacgaggncaagcgaatgcg

SEQ ID NO: 4920 - DNA, 204 bp, Zea mays
  misc_feature: Incyte ID No: 700355340H1
tccgacaactagcctcttgatcgaacacggtatacccccatggtaaatgcggtcctgtgctctggttgttagaggacgggatcgacgtgcgacatatgtattgtgtgagcccactcgtgtcaacactgcaaacaattgtggtcatgtcaccttgtatgttctggtcacttttcaaacaattgtaagtacctcatatcgttttgc

SEQ ID NO: 4921 - DNA, 288 bp, Zea mays
  misc_feature: Incyte ID No: 700355341H1
  unsure 3, 30: a, t, c, g, or other
ggnatggcgtcggaggtggaggacgaggcngcgacgcgctggctcgccaacggtgcagccgacgtccgccggaggagggaccaggcgaaggcaattcacgtccacgcaggccgtcaggatcgccaccaaggccgagcagcatgagcgcttcatctttaaggtcacacacttgctgggtgttcttagatttgggggattttgctatctcttgggtgccagaccacaggatgtgccatatgtgtactgcctgttctatgtcatatttgttccgctccgctggatttacta

SEQ ID NO: 4922 - DNA, 284 bp, Zea mays
  misc_feature: Incyte ID No: 700355344H1
atgccatgttcgaggccctgtacctgggcacgtgcaaggacctcctcccgctgatggccagccgattcccggagctgggcgtcaaacaggaggactgcaacgagatgccgtggatccagtccgtggccttcatccccatgggcaagtcggccaccgtgatggacctcctcaaccggacgtccaacatcaaggccttcggcaagtacaagtctgactacgtgaaggaccccatcccgagggacgtgtgggagaagatctacacctggctcgccaagccggggccg

SEQ ID NO: 4923 - DNA, 287 bp, Zea mays
  misc_feature: Incyte ID No: 700355345H1
  unsure 65: a, t, c, g, or other
atgccatgttcgaggccctgtacctgggcacgtgcaaggacctcctcccgctgatggccagccgntcccggagctgggcgtcaaacaggaggactgcaacgagatgccgtggatccagtccgtggccttcatccccatgggcaagtccggccaccgtgatggacctcctcaaccggacgtccaacatcaaggccttcggcaagtacaagtctgactacgtgaaggaccccatcccgagggacgtgtgggagaagatctacacctggctcgccaagcccggggccggg

SEQ ID NO: 4924 - DNA, 288 bp, Zea mays
  misc_feature: Incyte ID No: 700355346H1
  unsure 47, 95, 107, 114, 133: a, t, c, g, or other
gtcccacatcgtctccttcctcctcgtccacccattcctccgctctnccttaattcctcatttcctccacgtacgcgtgcatacttctgcgagtncaggagattttnttccccntcttcacgatactctcgangagagtgtctccatggccggaaaaggagacgggccggcgatcggcatcgacctcggtacgacctactcgtgcgtcgggtgtggcagcatgaccgagtcgagatcatcgccaacgaccagggcaaccgtacaacgccgtcttatgtcgcgttcacc

SEQ ID NO: 4925 - DNA, 211 bp, Zea mays
  misc_feature: Incyte ID No: 700355348H1
gtccaaggagcatgctatgcggttccctttagttggaagcgctatgcttttatcactgttccttctattcaagtttctctcaaaagatttggtcaacgctgtgctcactgcctactttttcattctaggcattgttgctctctccgcaacactgcttccttctataaaacgttttcttccaaaagagtggaatgataatctcatcgtctgg

SEQ ID NO: 4926 - DNA, 305 bp, Zea mays
  misc_feature: Incyte ID No: 700355401H1
  unsure 2, 4-5, 10, 16, 18, 35, 45-46, 61, 63, 86, 88, 92, 100, 154, 172, 177,: a, t, c, g, or other
cngnntcgcngtatgncntcgcagctaagacaagnaagcccaagnnggcaacctggacgtntnatttggaccttactcatccagtngnaganggaatttntgattctggaattttggagcaatttctacgggagaaggttatagtccaatggcnaaactgtgaatctcgggnatgtngtgcacattgaacgcttcaagaatagnatcncagttgtttctgagaaanagttctcnanaaggtatttgaaatacctnaccaagaaataccttaagaagaaccatcntcgtgattangctcgagtggg

SEQ ID NO: 4927 - DNA, 299 bp, Zea mays
  misc_feature: Incyte ID No: 700355402H1
  unsure 57, 189, 266, 284: a, t, c, g, or other
ctcaaggcggccatggccatcaacgccgacgtcatcgcggagatggagatccccgangagtatatcgagtccctgccgaagaacggaaggtccattcttggagactccatgtacaagatcataaccgacgacgtcttcgaccccaacgagctcctgcagtccgtggacctgtcgacggagcacaagatncgtggacctcaaggaccggatcgaggcctccgtcgtcatctggcaccggaagatcagcaacaagctctcgtggggcnccgccggcgtcagctggnagaagcgggaggatt

SEQ ID NO: 4928 - DNA, 295 bp, Zea mays
  misc_feature: Incyte ID No: 700355405H1
  unsure 53, 84, 158, 207, 235, 254, 284, 287, 292: a, t, c, g, or other
acacgacagggtggagcaggctgagattttatttaaggaacaagaccacccanagcataggtcttttacattcagacattgttngcatgtgttgagaaaccaacccaaatggcttgacaaactgtgtcaattggcggaggtaaaagcaagtaacaaanaacagaagaccaccaagaatttcaagccctggaattgttgatcttaccnatcaggatggccattataaagaccctcnagagattgtcaactcatcnatggatgcaccaaagagaccactggtaagnagnaggcnaaa

SEQ ID NO: 4929 - DNA, 300 bp, Zea mays
  misc_feature: Incyte ID No: 700355407H1
  unsure 39, 119, 140, 166, 176, 209, 216, 221, 244, 251, 253, 264, 291, 294: a, t, c, g, or other
attttccagttcaatggttccagctcatgcattcaaganagagcaaaagctcttgaagttgtacagtatattcaaagtactttccatgagggcaagtgcgaagttgcaggggttgaggntggaaaattgatggcggccgnggacactggtgaattttgggctttgnttggtggttntgctccccttccaagaaagggcaccttcttgangatgaanggcgnagacacagaaaagtggtcatcanattgagnantgcctcaaacnaagggaaatttgggagccaattaattntgnatcttg

SEQ ID NO: 4930 - DNA, 103 bp, Zea mays
  misc_feature: Incyte ID No: 700355408H1
  unsure 32-37, 40, 44, 48, 83: a, t, c, g, or other
ccttaaaacctcctctcccctcgttctcctcnnnnnnctnctcncagntcgccacacgggcacacctgcctccccgtcgccgnggacccactcccatggcaaa

SEQ ID NO: 4931 - DNA, 288 bp, Zea mays
  misc_feature: Incyte ID No: 700355409H1
  unsure 8, 10, 15, 33-34, 41, 44, 63, 74, 87, 113, 130, 173, 196, 201, 217, 224,: a, t, c, g, or other
ggcgagantncgtgngtgcagccacaggcacgnntcggcancangtctactttcaccggcacncaggacaagtncgcggagtgcgancaagaccgtccacttcatcgacctcntcacggccgacggcgtnacctaccataagaggtgcttcaagtgcagccatgcaaagggtncctctcgatgtgcagacactctnccatngacggtgtgctgtacngcaaganccattngagcagctctntcaaggagaccgggagttctcnnagaattnacgccagtgggngtcnt

SEQ ID NO: 4932 - DNA, 285 bp, Zea mays
  misc_feature: Incyte ID No: 700355412H1
gaaggacttgcagccttggattgctagagatgacgaacaaggtcagaagatgtggagagtcaaccagcgtatagtgaagcttatagctgagcttatgaggaaccatgacagccctgaagcgttggtgatactcgctagtgcctccgaccttctacttcgtgctaccgatggaatgctcgtcgatggtgaagcttgtactttgccacagcttgagcttctggaagtgaccgctcgggctgtccatctatcatcgaatggggagatcaggtttatcagttgcagatg

SEQ ID NO: 4933 - DNA, 236 bp, Zea mays
  misc_feature: Incyte ID No: 700355414H1
  unsure 72: a, t, c, g, or other
gatggcggcctccatgatctcctcgtcagctctggcggtggcgcctcagggcctgccgcccctgcggccgcngcgcctcctccttcgccgtcgtctgctccaagaagaagatcaagaccgacaagccctacgggattgggggtggcctgaccgttcgacgtcgacgccaacgggagaaagggcaagggcaagggcgtgtaccagttcgtcgacaagtacggcgcgaacgtcgacgg

SEQ ID NO: 4934 - DNA, 293 bp, Zea mays
  misc_feature: Incyte ID No: 700355415H1
  unsure 25, 51-71, 128, 222: a, t, c, g, or other
ctaccagcgactcagcgagcgagancagcacacactgcacgaagctagctnnnnnnnnnnnnnnnnnnnnngatggcggcctccatgatctcctcgtcagctctggcggtggcgcctcagggcctgcngcccctcggccgccgcgccttcctcattcgccgtcgtctgctccaagaagaagatcaagaccgacaagccctacgggattgggggtggcctgancgtcgacgtcgacgccaacgggagaaagggcaagggcaagggcgtgtaccagttcgtcgacaagtacggcg

SEQ ID NO: 4935 - DNA, 298 bp, Zea mays
  misc_feature: Incyte ID No: 700355417H1
  unsure 11, 22, 48, 59, 62, 72-73, 80, 168, 241, 249, 256, 275: a, t, c, g, or other
ctcagaattanactaaaatctngagaagactccgttcaactcatatanctgcttctagnttncaaagagctnncattgcnataagtattcatactgaaggtgctttttatgcaaggagagccattgcaaatatgcagggaggatgcaaaccaatggcaggacttgcanacctattgcttggtgttgcactttctaatcaggactagaagtgcaatatctgatacagatagagcttcttggncagtgcgngatgganagcccttgggaatgctganaaaatatacatggggaagattct

SEQ ID NO: 4936 - DNA, 297 bp, Zea mays
  misc_feature: Incyte ID No: 700355418H1
  unsure 4-6, 12, 15, 19, 35, 41, 54, 64, 72, 81, 87, 96, 104, 106, 121, 124,: a, t, c, g, or other
tctnnngtgggnganagtnagatttcttttgaggncatatnaagatgaggaggntgaagacatngcctatanccttacacncacggncacacttgncgctggtnanataaaggcaaatcanttnanggccggatgctggcggggtcgcattcgcccgtttnngttcgntcgagttttctttgtatggtggcncacaantctaacaaggaggcaacaacnttnatgtgctntataaagcaaggtttggttgagnacagacccagagggnggcacttgntaggtcaggatcaatnanca

SEQ ID NO: 4937 - DNA, 290 bp, Zea mays
  misc_feature: Incyte ID No: 700355421H1
  unsure 38, 43, 51, 54, 70, 146, 161-162, 170, 186-187, 201, 208, 218, 229, 237,: a, t, c, g, or other
caggaccaggtcaaaatcattggggagggcattgatgnaatanagaaaganagncaggctgtaagatctnagattaaggtcctggaggatgagctaaaacttgttgatgctgagattgcatcgcttcaagaagatttagatgcagncaactgccagaaagnncaaggcanatgaattgttgcaagnnttgagagcaggtcncgatgcnagaaacgcancctccctgcanaatcgtanagttttagccaaagcnagggntatncntganggaaatgctatcngaactgcaa

SEQ ID NO: 4938 - DNA, 124 bp, Zea mays
  misc_feature: Incyte ID No: 700355422H1
  unsure 118: a, t, c, g, or other
attagcttcaaaataatgttcccctcgcctttatttgctgttcaagtccctgtaataaccgagaacgttaattgtagcagtgtgttttttatatgattaaataagtactatgttgtanaaggct

SEQ ID NO: 4939 - DNA, 286 bp, Zea mays
  misc_feature: Incyte ID No: 700355426H1
  unsure 3, 36, 42, 45, 59, 65, 72, 74, 76, 78-79, 82, 110, 128, 157, 173-174,: a, t, c, g, or other
aanactctcggaattggctcattcgggaaggtgaanattgcnganatatcagcactggncacaangtggcantncnanntcnctcaaccgccgtaaaatcgaggcatggngatggaagagaaagttanaagagagattaagatattgcggttatttntggcatccacatcttnnccgcctnctatgaggttatngacacaccggctgatntttatgttgttntggagtntgtnaantgtggggaattcttngnttacttgtttagaaggtaggctgcaggnggact

SEQ ID NO: 4940 - DNA, 283 bp, Zea mays
  misc_feature: Incyte ID No: 700355428H1
  unsure 48: a, t, c, g, or other
gtccgactggcattggacgcttgacaccaagaccccgctcaagtatcncctctgcatccgcttcgctgtcaagtctggtggctaccgcatcgccgacgacgtcatcccctccaatttcaaggccggcaccacctacaagaccaccctcagcatctgattagcctcttatgacgaataatattttgagagagctcatctggaccatgtgccagcgagctaatatttaatttttttcttggttatattgaggcaccacacgagccaagaaaaaagttatgctaca

SEQ ID NO: 4941 - DNA, 284 bp, Zea mays
  misc_feature: Incyte ID No: 700355429H1
  unsure 2, 18, 24, 47, 181: a, t, c, g, or other
ancgaccgacgggcgaangggganggaggcgatggcggcggcttggnggcagaaggccctgggggctctgccgcagctggtgaagtcgctgcggagtgatcccgtctccggcagcgcacgacacaggcgccttccgtctctcaggaggaccttctcgttgtacgaacagatcaacctcatncacagcgtcccggaagacgagctccgattccagtcgtatgatgacactggattcaaaattaacaatgtaaaatatgaaggcagtgtattgattgtagagaaca

SEQ ID NO: 4942 - DNA, 285 bp, Zea mays
  misc_feature: Incyte ID No: 700355431H1
cacaaatccgtcaacaaaacaagtgcacacaaataaatacctggctcgctagattgccaagagcaatggcctttaggtcatccatcctgctcgccatggtggcgctggctacgctattcgcggtcggttcatgcaccaccccgctcaccttccaggtcggcaagggtccaagcctggccacttggtcctcacccccaacgttgccaccatctctgacgtggagatcaaggagcacggtggtgacgattctcctttacgctcaaggagggtccgactggcattgga

SEQ ID NO: 4943 - DNA, 296 bp, Zea mays
  misc_feature: Incyte ID No: 700355433H1
  unsure 3, 5, 27, 31, 45, 73, 106, 109, 113, 126, 212, 219, 221, 224, 229, 245,: a, t, c, g, or other
aanantcatgatgctccggctgctcanttcnctcctccttgtggncgttgcctgcaggctatggcccaccttncctctcactcttccaggccgcgttgtccatggngangatncggtcccctacanctggccctgagcaggtttccctgcagtatgagaaaagtggaagcttctaccacacgtgtggcggtagactgcatcgcacccggttnggttgtnantgncggcnaagcatctcgatgganctgncctacgaggtggngttnggtgagtacaaccttgatgtgaaggagggc

SEQ ID NO: 4944 - DNA, 289 bp, Zea mays
  misc_feature: Incyte ID No: 700355434H1
  unsure 43, 146, 182, 189-190, 197, 216, 272: a, t, c, g, or other
catgaagagccagcattccagaattttatgcaagaatcgatgngcacaatactggaagagaaacaataaataggagacttagcacacttcacttgtttctagaagtccagaattttggacctccacgtgaaagaactgttcttacntctgaactgggggctcccataagggataattttccncatgtannaaggttnctcttattagagaaatctngtgactcaggatgaaggcagggatagaagaccctggacctggcaggttaatgctgntatcctggcctttcctt

SEQ ID NO: 4945 - DNA, 286 bp, Zea mays
  misc_feature: Incyte ID No: 700355437H1
  unsure 250: a, t, c, g, or other
catggtttcccagcacggggtgactgcccctgccgggatccacaacctgttctccttgataagcaagaggatagcgatgaaggggttcatccagagcgattacgtgcacctgttcccgcagttcgtcgatgacatcaccaggcattacagagacgggaagatcgtgtatgtggaagacatgagcgttgggctggagagtgggccggcttccttcgtcggtctgttcagcggtaaaaatgttggcaagcangtcgtctgtgtgtcgcgggatgaaaggctggatttt

SEQ ID NO: 4946 - DNA, 290 bp, Zea mays
  misc_feature: Incyte ID No: 700355438H1
  unsure 53, 61, 116, 147-148, 152, 188, 196, 206, 209, 222, 231, 236, 247, 251,: a, t, c, g, or other
cagagcagcagtctagggggtgtttgggaacaaagtttttctgcagttttggnagaatacnaatactgcagtattcgcaaatactgcagtattctcaaatactgcagtattatatncataatggtgtttggcaagctgggtaaaatnnatgnttttcacaactgcaagtattgcaaatactatagttngttttaanggcattctanccntagctctgggccncagttttcnaaacnggcggtatatnaacnacggtnntggtctaggaaannnctnggngagtngnnnat

SEQ ID NO: 4947 - DNA, 284 bp, Zea mays
  misc_feature: Incyte ID No: 700355442H1
tgcagatcaagtagcggcatcaccggtatctgttcgacgactggagagaggcacacgaagaaggcgtcgtcttttgcccgactgtggagatcatcaaacggcgacggcgggaggaaaacagggtccgagttactgaaacggtaggctctcaagcagcaggatgcccgatgccgctctttcccctgatctcaagaacggtgaggcgtgccaagtctcaccgggtgttggggaatggatccggacctgctgaaccctcatgtggtccgcgctatgaaagggcgcgt

SEQ ID NO: 4948 - DNA, 287 bp, Zea mays
  misc_feature: Incyte ID No: 700355443H1
  unsure 29, 42, 46, 71, 74, 100, 104-105, 136, 141, 156, 160-161, 173, 176, 193,: a, t, c, g, or other
gggcacaaaggatggcagcgccaaggttngtggaaaggatgncgcnaaagaaggcggcgcggcagacccancanaacggcgccaagcagcctgctgaganccannaaaccaccgccaatggcccctcggatgcggngacanagcagcctgcaggcntctnngtgaccggaaangcngtctttattaaggcatncgcaagagcntnaantgtcagtagatgggggcgtgntttatntcaganatttccagacccgtctttcccgcgctgctggatctttttgtagagt

SEQ ID NO: 4949 - DNA, 155 bp, Zea mays
  misc_feature: Incyte ID No: 700355444H1
  unsure 7-8, 14, 16, 18-19, 39, 42, 70, 77, 102, 108-109, 125, 127, 133, 146: a, t, c, g, or other
cggctgnntataantngnnggtggtggtggtggactggnaanggggagtcaggggacgagcgtttcgtgngcaggtnccctccccgatcaagcgaagaacanaggggnntggcgcgtggtggaangnaacganatgcgtgcagttnttttacagg

SEQ ID NO: 4950 - DNA, 286 bp, Zea mays
  misc_feature: Incyte ID No: 700355446H1
  unsure 3: a, t, c, g, or other
ggnagcgtccgtccaacatctgggagaggcagtacctcggcgagcagctgtacgtgagcgtcatctcgccggagcggtcgctcagggacgagtacaacatgccggagaccagcctccgctgcggcaaggtcgttcggcctgccgatgccaccgtcctaccgcgccgtctagagcgtcgaccgatcgcgcacggtgctgtacacaactaaaggagagcgagaggggactttttctcgcgtttccttctctagccagccttgtctgtcccctcctcgtttattctctc

SEQ ID NO: 4951 - DNA, 285 bp, Zea mays
  misc_feature: Incyte ID No: 700355447H1
  unsure 41, 48, 210, 213, 240: a, t, c, g, or other
cgatgccagaagcagcagctgccatacgtcaaccaaaggcncttccanagcagccctccagcgatgcctctgaggcagctggtgagatgcaggtgaatggttcaagtgcatcggatgctgtgactgaggttcctgttaatggtgctactgcaagcgatgctggacgcatgagatccaagaacaatcagtggcggcctaagtgaaaccaanacnagctaagaactgggaagcaatctaagngagattcaggatctctagtacatctggggggtttgtcatacatct

SEQ ID NO: 4952 - DNA, 288 bp, Zea mays
  misc_feature: Incyte ID No: 700355451H1
  unsure 278: a, t, c, g, or other
gtggaggtcagcctcatcaactgaccctgtgagatctgtacgggttgttgatcatttcaccatcgaaagaacaagaaccccagatatggagccctcttcctgattgtgcagcccttactattataaggagttgctactgctgctagaaaaattaacaataactagcttcaacacacagtattgtttttgtttccacatccagccaataggtggaccgaggtgatctgcccttgtcggcgtccccgctttactgacctcacctgcagcatgtaatctgnatagaaagaa

SEQ ID NO: 4953 - DNA, 288 bp, Zea mays
  misc_feature: Incyte ID No: 700355452H1
  unsure 80: a, t, c, g, or other
gagaggttagctatagcttgcacatctatttaactaactaactaactggctagctagctcgatccgcagagcaaagcganaagcagcaagaagcaaagcaatggagaaccctgcgagtgtgctagttctaccagcgcagttcaccaaactcaccttcggaaacctgtacatccgccgggccgggccgggcagcagggagataaccgaggagggcaggtgcgacctggacaagagatacgtgagtgacttccccgtctacgacggccgcgggcccgacgccagccttgt

SEQ ID NO: 4954 - DNA, 109 bp, Zea mays
  misc_feature: Incyte ID No: 700355453H1
  unsure 3, 19, 21-22, 26, 31, 38, 40, 48, 50, 62, 66, 108: a, t, c, g, or other
ctntcagtctgctcgatananncacncattnacccatntncttcagtnanacggaagcagcngcgnttggactgcttatattgcggtgcagaacttcggtcaagcggna

SEQ ID NO: 4955 - DNA, 279 bp, Zea mays
  misc_feature: Incyte ID No: 700355455H1
  unsure 48, 244, 246: a, t, c, g, or other
gctcggcgaacgcgatctgttccccaacctccgcagccgctccaccgncctccactccggctgccgaatcgacccgccccgatccagatcaggagctgagggatggacgcgaacaggcgccagagtgggatccagcagttgctggctgcggacaggaggctcagcaaattgtgaatgccgctagagctgccaagtcagcgaggctcaggcaagcaaaagaggaggctgagcgggaatagccgananccgtgcccagatggaggtgagtttcagaggaag

SEQ ID NO: 4956 - DNA, 284 bp, Zea mays
  misc_feature: Incyte ID No: 700355456H1
  unsure 27, 164, 173, 190, 251: a, t, c, g, or other
gagaagatgacccaaatcatgtttganactttcaatgttcctgccatgtatgtcgccatccaggctgtgctttccctgtacgccagtggacgtacaactggtattgtattggactctggtgatggtgtcagccacacagtgccaatctatgaaggttatgcccntcctcatgnccatcctacgccttgancttgctgggcgtgacctgactgacagcctgatgaagatcctccactgagagaggttactcnttcaccacctctgctgaacgcgaaattgtaaga

SEQ ID NO: 4957 - DNA, 278 bp, Zea mays
  misc_feature: Incyte ID No: 700355457H1
  unsure 204, 210: a, t, c, g, or other
ctactgagggtctaagtccgggcagccgaagagtgtggtaggtaacggtcctcagcgcaagggtcatttcgtcgctgggaagggacggccctcgcccgcggtgatggtggttagcaagatgaacaaagatgcgcagatgagagcagcgattaaccaaaagttgatagaaactggagaaagagaacgcctcaaagagttgctganagctanattaatgaatgtggctggaagatcagttgaaggcacactgtaaagaggtattaaagaaaaaggactaa

SEQ ID NO: 4958 - DNA, 280 bp, Zea mays
  misc_feature: Incyte ID No: 700355460H1
tttcctcgttcccaatcatcttgccgcgcgccgcacgtagctagggtttcgtcctgtcgttgcacccgcattactagcattcaatccacgccaatggctgagaagaagatggttacgctcaggagctccgaccacgaggagttcgaggttgaggaggcggtggcgatgaagtcagagatcatccgtctcttgatcgaggacgactgcgccgacaacgccatcccgcttcccaacgtggattccaagactctcgccctggtcatcgagtactgcaacaagc

SEQ ID NO: 4959 - DNA, 286 bp, Zea mays
  misc_feature: Incyte ID No: 700355462H1
  unsure 26, 263-264, 266, 273, 285: a, t, c, g, or other
aaaacaatccttgcacccctcccctncgtcaccccaccacatccggccagcccaacgaaaatgtcgcgcgccacagctgcggtcctcttctacatcctcgccgtcgctgccctcagcgcggccgaggcaccggcagagtcaccgaaggcaggcagtcctgccaaggcaccggccgagtcaccgaaggcaggcagtcctgcagctcctgccaaggcacccgagtctgctgccacgagaactgcccccgctaaggcacctcaagnngnctccagncccgccgttgcng

SEQ ID NO: 4960 - DNA, 290 bp, Zea mays
  misc_feature: Incyte ID No: 700355466H1
  unsure 153-222, 257: a, t, c, g, or other
ggcagagggggaaggagagcggcaggagggtcattaaataaatctacttttctgtttcagggtaggaaatgatgtccgagagtgaagagcatggctcgctcctagacaagatcaacgacaagatcaacgagaagatccatgagtacaagcacnnnnnnnnnnnnnnnnnnnnnnnnnnnnnnnnnnnnnnnnnnnnnnnnnnnnnnnnnnnnnnnnnnnnnnctttttggaagaaaacacccattgcatcatgttcntcggaggaggcaaagccgccgacttgtgctgtg

SEQ ID NO: 4961 - DNA, 281 bp, Zea mays
  misc_feature: Incyte ID No: 700355467H1
  unsure 25: a, t, c, g, or other
atcatcctgctgatttatacgactnccatgtctataatgattctaagactttgttcaacatgaagagcacatttgacagaacatctcgtagtggacccaaggcttttgtaagtgagtacgctgtttggagaggtgatgcaggtagaggaagtctcttgcttcattggcagaagctgctttcctactggactggagaagaatagtgacattgtttccatggcaagttacgcgccactattcgtaaacgacaatgaccagacgtggaacccagacgcaatcgt

SEQ ID NO: 4962 - DNA, 283 bp, Zea mays
  misc_feature: Incyte ID No: 700355468H1
  unsure 246, 250: a, t, c, g, or other
tcaataacagctgcgtatttggcattggcttcatcaaagttgccactatcaaagttaacacgacgctagaaacactgtttgtcaggaagatgaacatcttcaacgaggccaaagtttacacttggaaaatcgaggatttctctgctctgaagaacccgtcccactcaccggagtttgagatcgctggatacacatggtgataaataatcttttcagcttgcagtacttgacatgtactccacatgnctgnacgttgatatcataatctggattccttgcaatg

SEQ ID NO: 4963 - DNA, 296 bp, Zea mays
  misc_feature: Incyte ID No: 700355471H1
  unsure 49, 51, 72, 113, 125, 136, 191, 256, 270-271, 276, 286: a, t, c, g, or other
gaagcctttgaatgtgatgactgacctgacagaatgcacaagagagaananaggagaagaaaaggagaaggnaagaagactgaggggcagcagctgcttggagtttgcgtccntcccgttccacncagtgcaggtncccagtgctgcagtgtgctggcgtgagcatacctccagctgactcattcgtttgnaaaaccgttgttttatttaaatatgccacagtgggtaggggcacacactggaagtttggcctttncaacccagcactgnnatgtnatccatccanggacatggcg

SEQ ID NO: 4964 - DNA, 284 bp, Zea mays
  misc_feature: Incyte ID No: 700355472H1
  unsure 34, 43, 194-195, 210, 231-232, 235, 253, 265: a, t, c, g, or other
ctctccttcgtcaccatcacatccagccagccancaaaaatgncgcgcgtcacagctgcggtgctcttctacatcctacgccgttgctgccctcagcgcggccgaggccccggcagagtcaccgaaggaaggcagtgctgccaaggcacctgagtctgccaagagaactgctgcccccgtgaagcacccgaagnngcatccacccccgtncgccgccgctgccccatcggnngtngtctaggaagtctggtcnagctaccgcgcnaaccaaccgccttacaccc

SEQ ID NO: 4965 - DNA, 276 bp, Zea mays
  misc_feature: Incyte ID No: 700355473H1
  unsure 6, 74, 120, 155, 263: a, t, c, g, or other
caagtncaagatcaaggctggcaaaacattaagtgctcggaaatggcaggctgcatttagtcccgatggctgtnttgatattgcctcagtcctaagccggatacaaagaggaggtgtccncccgacagtcagaggagaggtctgggaatcttacntggttgtttcgatcccagaagtacctttgatgaaagggaagagatcaggcaaatacggaggtacatatgacagatggaaggaagattgtcgacagatggattcgcatnttggtagcggtaa

SEQ ID NO: 4966 - DNA, 282 bp, Zea mays
  misc_feature: Incyte ID No: 700355474H1
  unsure 67, 75, 78, 160, 175, 189, 196, 198-199, 201-202, 205, 207, 214,: a, t, c, g, or other
attaggcttcctgatcctatgaaatcattgaagttgaactttccttctgctgcctccttccttggangatttgancgnctgcagatggcagccctctacatcctattgtcgtgtcaagggctaatattcctgggtccccagaagttgatgtgtatttganaaacttgaatggagnatctcctccccatngtttggncnntnnagnantctcatncgcatgcnnaccgtcatggtcatgangtctcgacnagtcaaattcagcgaaaaacaaatngttcggtt

SEQ ID NO: 4967 - DNA, 279 bp, Zea mays
  misc_feature: Incyte ID No: 700355475H1
  unsure 6, 34, 41, 45, 50, 52, 59, 73, 143: a, t, c, g, or other
actgcntccccacttcgcaccgccaccgtctccngaccgcnacgncggcnanctccgcnccgcatcgctccanccgatcgttccgagatttgttgatcaaagaaccatggaaggatcgttccagttgtatcccaacgccagtncctttcatacctggattgctgggttcatctgcacaaaaagccccagaaaaacaaggagggtcatcatcaaagggagagccttctggtagcaccttgatccttctgagtatgaggaaaatgacatggatgaacttgc

SEQ ID NO: 4968 - DNA, 278 bp, Zea mays
  misc_feature: Incyte ID No: 700355479H1
  unsure 18, 24, 37-38, 41, 44, 46, 50, 53-55, 104, 108, 138, 193, 207, 219, 222,: a, t, c, g, or other
ttctagatcgcagctacncgtgantctcctattttgnnaangtnantgcnttnnnagttcattctatattactatattatatttgtggaatattcagtctcgtntaantgctttcagacttaatgttaggtaattgtntacattttctacgattcagtctggactaattgccttgggactaatgttggagatntccatatgtatctncgtctaagcaanttncattngtactnannatgatttggcaananggttacatgggtcgngtngtcngtnag

SEQ ID NO: 4969 - DNA, 287 bp, Zea mays
  misc_feature: Incyte ID No: 700355480H1
  unsure 63, 79, 93-94, 96-97, 127, 139, 158, 161, 186, 251-252, 263, 285: a, t, c, g, or other
cgtcgtcgtcatctccggggaggtcatcgccggcacgcacatcgacggcattctgcaggatanatcccttcttcatggnctcgggatcaaatnngnncttgttcctggaacacatatccagattganaagcctcttggntgagagagggaagaaggcnaantatgctggtcgctaccgcattactnattcagattcattagatgctgcaatggaggcagctggccgaatacggctaactatagaagcgaanngtctcctggancaccaatgttaaatctccgtangc

SEQ ID NO: 4970 - DNA, 283 bp, Zea mays
  misc_feature: Incyte ID No: 700355482H1
  unsure 154, 156: a, t, c, g, or other
ctgggcaagtcaaaactatagaagagttgcctcctgtctctcgaatcttccagagatatcacttaattgttaacagcttttgtgttaatccccttcagcccctagctcttttattctaccacggctggagagttgatacctgcagtcagcctgncntgactcttagtgtctgtttctgacttatttttcctgtctctgtcttccaacccccaataatatttccaccggggatgcatcattttactcccaatattctgtagagagggagtcaggatgctgtctt

SEQ ID NO: 4971 - DNA, 281 bp, Zea mays
  misc_feature: Incyte ID No: 700355484H1
  unsure 2, 5-6, 19: a, t, c, g, or other
gnagnngcagccgccgttnctgctgccgcgtccacagaatggggggtttcgtgaagacccataagaccaatgcgtatttacaaacgtttccaagtgaaattcaagagaaggcgggctggcaagacagactacagggccaggataaggctgattaaccaagacaaaaacaagtacaacacacccaaatacagatttgttgtgcgatttaccaacaaggacatcatgcacaaatctatctgcttatatagcgggtgatatggttctgcttctgcctactctca

SEQ ID NO: 4972 - DNA, 278 bp, Zea mays
  misc_feature: Incyte ID No: 700355485H1
  unsure 266: a, t, c, g, or other
ctgaagtgaagaaaatccagaatggtgaaagtctctatatagggaacatgaattatcaccacaagccattacgtgatgggaaatgggctgttacttacgaggaatggccagaagaggattatcccatctatgcaaatggtcctggatatgttatatcctctgatattgcaggttccattctatcggaatttttaaagcataaattaaggctttcaaaatggaggatgtgagcagggcatgtgggtagagcggttccacaacaccangacttgttaaat

SEQ ID NO: 4973 - DNA, 276 bp, Zea mays
  misc_feature: Incyte ID No: 700355487H1
gccagagctggcatagactatgattcatcctatgggaaggctcgcccaaatgataccattctgaagcttcaaaggacagcaccatattacaagaggaacagagctcatgtttgcagtttctttgtgcgaggtgaatgtacaagaggagctgagtgccctatcgtcatgagatgccgaaactggggagttatctcagcagaacattaaagatcgctactatggagttaatgatccgttgcactgaaacttttgagcaaggcagtggagatgccatcc

SEQ ID NO: 4974 - DNA, 281 bp, Zea mays
  misc_feature: Incyte ID No: 700355488H1
  unsure 38, 107, 176, 189: a, t, c, g, or other
gcacgccaccgcccaccagcgccgccgaggggcaaggncgaaccctcctccgttcgccgaggcggagcaccgcccttccaggccagcttccaccggagcaagagctnagtcgcctcgaattcttcccagctagtagcgtgtgccgtaccccgtcgctcaaccgggatggcgtcgantggggatccgccncggatctgctgatgagaagaaaactccaatatccgaaggtcttccgacgaacgtcaagggcttcctccagcaggcttttcaaatccttttga

SEQ ID NO: 4975 - DNA, 276 bp, Zea mays
  misc_feature: Incyte ID No: 700355491H1
catcaaccgttgagggaagcagttccagatagcgagtttgaggttacagatgcaggaaataactttctatttggggcaaatattgatggccatatggagcctcttaacgaagacgatttgcttggaactgccttcgaagctgacaagtacatggaacagatgccaggaaacggcatctctaactacatttcattcaaaggattctcagccaagagttatcatcttcaatgatctcacatccattggcgttgctgatatcgcgttcaattccataga

SEQ ID NO: 4976 - DNA, 278 bp, Zea mays
  misc_feature: Incyte ID No: 700355494H1
  unsure 2: a, t, c, g, or other
anggcaagttccaagccccagcagagggtactcacaacctcacctctttttgtttgtgcgacgcttggataggctgtgacacgaagaccagcttcaagctcaaggtcctgaagcgcaccgtgctggaacaagaggccatgtgcctgaagaagggccagtggctgctgcagaggatggtattgaggaggaagaggaggaagaggaagaggagtatgatgactatgagagcgatacagtgatgacgaggaggacgcgaagaacaagggggaagggaaggg

SEQ ID NO: 4977 - DNA, 84 bp, Zea mays
  misc_feature: Incyte ID No: 700355495H1
  unsure 2, 24, 26, 37, 44, 48, 52, 54, 64, 69: a, t, c, g, or other
cnggtacgctgtccatggctaacnancggggcccggntccaatnagcncccnantccttcatanaacancgtagacgaacaccg

SEQ ID NO: 4978 - DNA, 132 bp, Zea mays
  misc_feature: Incyte ID No: 700355496H1
acgtggctagcaggtttcttttacaagccgtgtaattacgaactatttgtcaagcaatcactaaacatggaaatggctattattatggcaagggatgctggaatggattggatcatccacctcgatactgat

SEQ ID NO: 4979 - DNA, 317 bp, Zea mays
  misc_feature: Incyte ID No: 700355501H1
  unsure 42, 58, 94, 114, 125, 136, 143, 173, 188, 190, 195-196, 201, 208, 227,: a, t, c, g, or other
cacaccttctacaacgagctccgcgtggctcccgaggagcancccgtcctcctcaccnaggcgcccctgaaccccaaggctaacagggagaagntgacacagatcatgtacganaccttcaacanccccgctatgntacgtantccatccaggccgtgctctctctgtatgcnagtggccgtaaccanangtatnntggtncgaatcnggagatgggtgtgagcaanacgnnccccatctannagggannacgcctgcncaaacgcatccttcgtcttgaactnggcggtcgcgantnnaccgnatnnctgatgaat

SEQ ID NO: 4980 - DNA, 297 bp, Zea mays
  misc_feature: Incyte ID No: 700355505H1
ctgaacttaagaaggaatgcgttgaagcaatggagactcaactcaagagggaggagtttcaagatgaggagatgcctgatgtcaggaaattggacatcagaaacttcctgtaggcctgatcgacgataatctttgaggcccaacgcacctctggttttggtttcaagttgatcggtgctccacacctatgaatgctgctgcttccctttttgtaataaaagaaactgcacggttgggtatgagttggattaaatcttgccttctgttgctctggactcttgtggctgcagcaacaag

SEQ ID NO: 4981 - DNA, 304 bp, Zea mays
  misc_feature: Incyte ID No: 700355507H1
  unsure 8, 22, 28, 60, 73, 78, 109, 127, 148, 160, 165, 177, 197, 224, 238, 268,: a, t, c, g, or other
tcctcgancatccctgcaaatnaccgcnatggctcccaaggtcctagtcatccttgtgtncctcgccgtggcntcacnggctgctctggccgccttcgatgtgataganatgctggccgacaagccnacgtactccacgttcctgaanctcctgcagganaccanaggtcgcgggcnaagcgaatcaggctccggtncggcgacgctactggtacgtccccganaaacttgccaagcntctggcgttcgctgcccgccgataaggtgncggccggaggtggagaaccagtcntctcnagttatt

SEQ ID NO: 4982 - DNA, 93 bp, Zea mays
  misc_feature: Incyte ID No: 700355512H1
  unsure 7, 36, 39, 84: a, t, c, g, or other
cttgtcngtataagaagctggcctttccatagagangcnctggagtctaaaattatgagaacaattaatttatttgtgtcttcnattatgatc

SEQ ID NO: 4983 - DNA, 287 bp, Zea mays
  misc_feature: Incyte ID No: 700355513H1
ggttacgcgaaggcgaacggagtagtggaagcagaggcggcagccatggccgtgatggagaagctcaagatctttgtcgttaaggagcccgtagtcgcggcctcctgcctcatcgctggattcggtctctttcttccagcagttgtccggccaatcctggattcatggcagaccgcggaacaagttcctccacctcttctaaatgatgtggttgcaggtgtcaccggcaagaaaaagtagtgaacttgcattgttttctcatgccaatgttgccccacattttcttc

SEQ ID NO: 4984 - DNA, 286 bp, Zea mays
  misc_feature: Incyte ID No: 700355514H1
cagtggcaatgcaaaggaagaacctggtgcaatagtttgtcgtgtagcaccgtcttttttacgttttggttcgtatcagatacacgcttcaaggggcaaagaggacattgagattgttcgtcgtttggcagactacacgatacatcatcactttccacatcttgaaaatatgaaaaagagtgaaggtttgtcattcgagacagctataggagattccccaacaatagatctcacatcaaacaaatatgcagctgggcagttgaggtggcggagaggactgcttact

SEQ ID NO: 4985 - DNA, 216 bp, Zea mays
  misc_feature: Incyte ID No: 700355515H1
  unsure 9, 24, 28, 34-35, 46, 49, 58, 68, 71, 81, 97, 101, 108, 130, 138, 142,: a, t, c, g, or other
tcatcatantctcaagggcagggnaganagggannagctacctganganatgcttgtngaaatcctgngcngacttcccgnccagcagcctagcggncgtnacgctgngtactccaagcacttgtgctcnatcgtggncgcncgaagtctcctgcgcaccggnnaccnnctgnccttttccgtattcgacgccnnctactgcatcagcctggcctc

SEQ ID NO: 4986 - DNA, 293 bp, Zea mays
  misc_feature: Incyte ID No: 700355518H1
  unsure 216: a, t, c, g, or other
gagctcctggactaggcttagtctgcagtgatattgtgaaaggagttcctgcaatttttggtcattttctgacctcactccctgcgatacactcgataattgtatttgtgtgtatcaggaatgtgccagttccggtggttcctcaaagtgaaaggttccttttccaacgtgtatgctcaaggggctatcacttgttccgctgtatagcgagatacnggtataaagacaagaagcaggagcaccatagcgtatttgagcgtctctgatgaaggtctgagaattcatacaaagag

SEQ ID NO: 4987 - DNA, 305 bp, Zea mays
  misc_feature: Incyte ID No: 700355519H1
  unsure 58, 79, 111, 124, 161, 193, 218, 294, 297-298: a, t, c, g, or other
gtgagccacaccgtccccatctacgagggatacgccctcccccacgccatccttcgcnttgatctggccggtcgcgacntcaccgactacctgatgaagatcctgactgancgcggctactccntcaccaccaccgctgagcgggaaatcgtgaggggacntgaaggagaagctcgcctacatcgccctggtnctacgaccaggagatggagaccgcnaaggaccagctcttccgtggagaagagctacgagctccccgacggaccaggtcatcaccatcggccgcccgagcgnttnncgctgcc

SEQ ID NO: 4988 - DNA, 298 bp, Zea mays
  misc_feature: Incyte ID No: 700355520H1
  unsure 147: a, t, c, g, or other
aagaaacaagcgcacaagatcaaatacctcgccgccaacaatggcctccaggtcctccatcctgctcgccatggtgatgctggctgcgctattcgttgttggtttgtgcaccacccccctcaccttccaggtcggcaagggatccangcctggccacctgatcctcacccccaatgttgccaccatatccgacgtggagatcaaagagcacggtggcgatgattctcctttacgctcaaggagggcccgactggcactgggacgctcgacaccaaggccccgctcaagtacccctttg

SEQ ID NO: 4989 - DNA, 296 bp, Zea mays
  misc_feature: Incyte ID No: 700355523H1
  unsure 14, 21, 227: a, t, c, g, or other
atggctcagcgaantgccatncaatcggaagaagagctgggccgggagcatctcgatgttcatttctggtttcctgctgtccgcgatgatgatgctctacttctcaagcctgggttacattgatgttatctgggaagaggcacttggtaagctggcgcttgttgcactagcagcgacagtagtggagtggcgttcctgtgaccgaagttgtagatgacaacatatcngttcctttggccaccatggctggtagcttttctcttgtttagctccaaccgcacaatagttaattaaat

SEQ ID NO: 4990 - DNA, 298 bp, Zea mays
  misc_feature: Incyte ID No: 700355525H1
caggaaattggcatgaagaaaaagaaagaagaagatccaaagaagaaaaagccaaagaggaagcctctttttgtgaagaacggtgcaattgttgtttgccgcattcaggtgaataacttgatatgcatagagaagttctctgatttccctcagcttggaaggtttacacttagaactgaaggaaagacggtagctgtaggcaaagttgttgatattccgcctgctggtagcccaacattctgagcttaagtcaattttgaacaggatggataatcatgaagcagtgcgttcgctaaga

SEQ ID NO: 4991 - DNA, 255 bp, Zea mays
  misc_feature: Incyte ID No: 700355527H1
  unsure 53, 207: a, t, c, g, or other
gtgatttgaagtacctctgttcatagtttcctggtataaagttggttaaaatntcatctgttaatagatcattaggtaatataatgtatgggttttctattggttttttgcagacagtagagggagattttgtaacaagggcttgttacacagtgatatggtaatgataaaattgcaatttatcactccttttcatgttaataattngaggactggataaaaggtttcaagattaaaattgatgttcaaacctta

SEQ ID NO: 4992 - DNA, 258 bp, Zea mays
  misc_feature: Incyte ID No: 700355530H1
  unsure 97, 215: a, t, c, g, or other
gtttttggttcattttgttgcatagaagaaaatagagtgtgctgttgcactgcaaaaagacattcgaagcgataccatatcatgcatgataaatttngcagccgatggaatcggctgcccgtgtaagtcactggtgtgatgtaaggattactattgtttattgttactatttgttggctggctcaacgtctggacaggcgaggaaatgtaacgtnggggggtatgttaataaatgcctcatctgctactttgtcggaa

SEQ ID NO: 4993 - DNA, 293 bp, Zea mays
  misc_feature: Incyte ID No: 700355531H1
  unsure 2, 38, 156-157, 213, 283: a, t, c, g, or other
tnatgcaccagttcaaaaggcttgttcccagatgatgnagagtgcggttcgacaacaacgataccggctcaagaaaaagtactttgatccttttccgctacatctagtggcaaaaaaatctccaatcagatctatgactgatgaagagtagaatgnncttgtggagtattggaagagtccaaaaaaagtggagacatctcaaaaaaacaaagngaattcgatccaaagttaaattccatcaaacaactggctctcgtagctacatggttcatgtagaaatttnggagataaat

SEQ ID NO: 4994 - DNA, 300 bp, Zea mays
  misc_feature: Incyte ID No: 700355533H1
  unsure 29, 36, 256: a, t, c, g, or other
caggagatgccaccaggaacctctcccancagtgcntgaacgcgcttgctaatgttgtgcctggtcttattggaggcagtgctgatcttgcatcctccaacatgactctgctgaagatgtttggtgacttccagaaggatacagctgaagagcgcaatgtccgctttggagtcagagagcacggaatgggcgccatttgcaaggcattggctctgccacagcccagggtttgttccgtactgtgctacatctttgncttcactgattacatgagaggtgccatgaggatctcggcccgtc

SEQ ID NO: 4995 - DNA, 294 bp, Zea mays
  misc_feature: Incyte ID No: 700355537H1
  unsure 34, 277: a, t, c, g, or other
ctggtcctcctcaagagagttcctcctaaggganaaaacttgcttgtcgttggaacaacaagcgaggttggcttcctagaatctgttggaatgtgtgacgtgttctctgtgacctaccatgttcccaaactgaaaaaggaggatgccacaaaggtattgcatcatcttgatgtgttcgatgacggagatcttgacgcagcagcagaagcactggacgatatgccaatcaagaagttgtacacacttgttgagatggcgctcaggggccaaccggagnaagtgctgaagcgattt

SEQ ID NO: 4996 - DNA, 306 bp, Zea mays
  misc_feature: Incyte ID No: 700355539H1
  unsure 19, 48, 65, 71, 74, 76, 109, 121, 139, 147, 150-152, 155, 176, 181, 184,: a, t, c, g, or other
ggacaccgcatccccgganatctttcgtcagcgacgaggccggctacntagacgccgaccccggncacggnttncnaggacattccgggagcagatcttcggctccgcngaccaactccgnggtgccgagcccaatgtncggattcnccnnnaangcgcgaggcatagggcctcgncatgncgnagaaacntcatgagcggcttcaagccccnacgccgtccnncanctacggcctcnctnngcngacgattcgccgtgttcgaccgctgantcgatccgtgacnaccttccacgcagcncaaacg

SEQ ID NO: 4997 - DNA, 300 bp, Zea mays
  misc_feature: Incyte ID No: 700355540H1
  unsure 81, 145: a, t, c, g, or other
gctcggtgctgaccttgtcaggatcgacgcccactccatgtgctcgcccggcttctcctgcgactccgcctaccaggtcanctacatcgtgcgcggcagtggccgcgtccaggttgttgggatcgacggcacgcgagtgctcganacccgcgccgagggaggctgcctcttcatcgtgccaaggttcttcgttgtctcaaagatcgccgacgaaaccggcatggagtggttctccatcatcaccacccccaacccaatctttagccacttggcggggccggacatcggtgtggaaggcaa

SEQ ID NO: 4998 - DNA, 298 bp, Zea mays
  misc_feature: Incyte ID No: 700355541H1
cgttgccgcaggataggggaggatgggattgtgccgccatatttaatctccatggagggccgccggttcagtactcggtgaccggtccagaaggaagaggagcgagtagggtagacgtgaggtggaagctttgggctcgggatcatgcgaatcgatgggaattcggcgccggagtaaaagcaccgccatggttccacctcgtatcgtggttggcattgcccctgcctccataaacgcggcgagaacacgtgtcacctgaagagcaagttggtacctggaatctcatgtgtcaggtcaa

SEQ ID NO: 4999 - DNA, 245 bp, Zea mays
  misc_feature: Incyte ID No: 700355542H1
gcacattattccccacaacttgttgagcgataaacttatgtgagctcacccttgctatactcacattctccgaggtcaagaacaggtactgcaggataaggagcatgaaggatgtcgtaatgcgttcgtgagaggtctaggctgttgcccccagtaaactaaggttgcgggtatcgttgtcttcaaatggtataattatttagctattttgtacagaacccctattatataataaagatgtgaca

SEQ ID NO: 5000 - DNA, 237 bp, Zea mays
  misc_feature: Incyte ID No: 700355543H1
  unsure 111, 146, 218: a, t, c, g, or other
accagaagtatgtccgacaagcctggcagaaggcagacatcaatacaaaatgggcagccacacgatgggccaagaagattgaagccagagaaaggaaagccaagatgacanattttgatcgttttaaagttatgaaggcaaagaanatgaggacacagaataatcacgaatgaagttaagaagcttcaaaaggcagctctcctgaaagcttctcccanaaaagcacctggtactaag

SEQ ID NO: 5001 - DNA, 300 bp, Zea mays
  misc_feature: Incyte ID No: 700355545H1
  unsure 31, 158, 194, 224, 235, 243-244, 253, 262, 267, 274, 284: a, t, c, g, or other
gtaagaacatgtctcttgtcaaggaaatggnggtacacatgggcttcaatgactgaattgatgttcagagaagatgattttgctttaggcaatggtaatgaagacggtgacagcgacagatttgtttacttcgtcataacgtttctctccctccatgntggccctattttgaagtttgaaatgaatgcttcggngggttcacagttttctcctggaggacacanccacaggaggntgcgtatnntgtactatnccaggcaanttacnagcttcngaggagttangctgtccatcagagcg

SEQ ID NO: 5002 - DNA, 304 bp, Zea mays
  misc_feature: Incyte ID No: 700355546H1
  unsure 82, 95, 109, 113, 119, 124, 131, 133, 145, 147, 152, 161, 163-164, 167,: a, t, c, g, or other
ctcatgtattcgtgtgtgtaagggcgtgggtgacatcatgggcgcgatccctgtgttgccgatcgccattgagctatgcagncgacaaccggcgnccaacaattggtancgangctcantgtanattcgangntagtttcgtaancncacancggacgtantnncgncagaangatccgannggaagggtnanantcaagggaacgcccaaganggaaggcngagnagancancnggtgctcatgtngtccacaattaatgtnangcacatngagacgaggtcgctcgaacgtcatgacatcca

SEQ ID NO: 5003 - DNA, 297 bp, Zea mays
  misc_feature: Incyte ID No: 700355547H1
  unsure 7, 41: a, t, c, g, or other
ctatagnccacagccagtcagccacatcactagctatctgngcagaggcaatggcgtccaaggttgagctggtggtggaggtcaagtccccggctgacaagctgtgggcggcgctgcgtgactcgacggagctgttccccaagatcttccccgagcagtacaagagcatcgagaccgtcgagggcgacggcaagtcggccggcaccgtccgcctcctcaagtacaccgaggccgtgccgatgctgacgttcgccaaggagaagttgagacgcggacgacgagaacaagtggtgtcta

SEQ ID NO: 5004 - DNA, 300 bp, Zea mays
  misc_feature: Incyte ID No: 700355548H1
  unsure 30, 113, 120, 141, 146, 164, 167, 186, 197, 206, 208, 217, 228, 238,: a, t, c, g, or other
caaaacatccaatcagaacattacattttntcctgttagccatgttacaatacttgaaaagattagcaacatatatcctgagaaagagtggtttgttctttctcttaattgtnttggtgntagcttccggaatcttagtcncgatntcagttggccggggttanacngtccgcgccaagttccttnattatgctaanttcgtgtangnggtggattnatctggtgtgncggcagctanggtangatgcattanttaaagctagccngcnagnaagngggttcttcgatgctgcagttcat

SEQ ID NO: 5005 - DNA, 100 bp, Zea mays
  misc_feature: Incyte ID No: 700355552H1
  unsure 12-13, 20, 26, 44, 48, 67, 72, 81, 87, 90, 94: a, t, c, g, or other
gggaaattcctnngtctcangttccnaacactgggagcatctcnattntctagcttctgcacatcanatggntctctgaanacagangtnctancaacaa

SEQ ID NO: 5006 - DNA, 296 bp, Zea mays
  misc_feature: Incyte ID No: 700355553H1
  unsure 19, 21-22, 39, 44, 53, 79, 81, 85, 99, 115, 122, 141, 150, 152, 160,: a, t, c, g, or other
aatttattgttcatgattntnntatggaaaaactatcangaganacaccaatnttcattgtgtcagcaggcagcgagcnanaatnttttactagattcntcaattgggactctgnaaaatcncatatgcatggcggttcanacccgaggnancttgctanaccaaaagggtggattacctccatcactanagaaaccanngcgacgggacaccagcatttacgggaagaggttttggcacaagataaanctccggcggtcaagaanctgtccnacttagtccggatcgtncngtgt

SEQ ID NO: 5007 - DNA, 213 bp, Zea mays
  misc_feature: Incyte ID No: 700355554H1
  unsure 12, 22, 30, 32, 36, 60, 125, 138, 142, 186, 212: a, t, c, g, or other
caagcacaagantatgttcggncgcaagtngnagtnattaacgtacagctttaatccgantctggacgagcagacgtatatatatacactggagtccagaatgctaagttatgctattttgattnggatcgcaatgcncgangttgttagggttgtgggaagtaacgtactgacggctgcctgtangctttgttggagcggtcttgccctant

SEQ ID NO: 5008 - DNA, 292 bp, Zea mays
  misc_feature: Incyte ID No: 700355556H1
  unsure 103, 193, 222, 261, 277, 288: a, t, c, g, or other
aaatgggcggtggtaaacttttctgcacgatgcaatgtcagggatcttgtccgggatctcatcaagtgtggaggcatgaagggcattatggttgatgctcctnttggctgtatttgatgagaatccttcaatgagacggtcacctgctataagaagggttgaagacatgtttgaacaagtgaaaactaagctncctggagcaccaaagtttctttgtgtgtnctagctgaaaggaagaatctgctcattatgggcctggangaagaaatgccttgcngaatttgggancgtt

SEQ ID NO: 5009 - DNA, 294 bp, Zea mays
  misc_feature: Incyte ID No: 700355557H1
  unsure 175, 204, 210, 260, 274, 283: a, t, c, g, or other
ccgctcatcgcctcctccgacgaccaccgtccaccggcgacaaggacagcgacgatgcagtcggcggcgtggaggcgtcacctcctcgaccaccacctctccccttcaacctcggctgccatcgccgccttcagatccggctcccagcccgggctcgctccccaagggttgtttngagcggatggcgcaagatgcatgtctgcnagggcnccggcggttcaaggggttccgggcatctcgtccgcaaggcaccggaggangtcttctgtgagtngattgtagncacggtgtttg

SEQ ID NO: 5010 - DNA, 299 bp, Zea mays
  misc_feature: Incyte ID No: 700355558H1
  unsure 14, 16, 20, 49, 110, 115, 123, 186, 228, 241, 256, 279: a, t, c, g, or other
acaatccttgcacncntccnctgcgtcacaccaccatatccggccagcncaacgaaaatgtcgcgcgccacagctgcggtcctcttctacatcctcgccgtcgctgcccncagcncggccgangcaccggcagagtcaccgaagcagggcagtcctgccaaggcaccggccgagtcaccgaaggcnggcagtcctgcagctcctgccaaggcacccgagtctgctgcnacgagaactgcgnccgctaaggcacctncaagccgcctccacccccgccgntgccgtgccccatcgtcgtc

SEQ ID NO: 5011 - DNA, 164 bp, Zea mays
  misc_feature: Incyte ID No: 700355559H1
  unsure 2, 4, 6, 20, 76-77, 86, 89, 102, 119-120, 141, 147, 150, 154: a, t, c, g, or other
cncnangtatgaaaaccatnggaatactatgcctcagtcactgaaagcacaggagattgcaaaggggagaggatannctgatgtcnttnatttggatgctgntcatgacagatgtgctnnagaagtctcttcctgcaatanttttgntgngcanagacaatgtt

SEQ ID NO: 5012 - DNA, 297 bp, Zea mays
  misc_feature: Incyte ID No: 700355561H1
  unsure 2, 4, 13, 16, 46, 133, 175-176, 187, 224: a, t, c, g, or other
ananaagactgcnganaagggaagacatggccgtgacggcggaagngcggcagagatggtgttggagcggcgggcgtacgcgcgggtggggctcctcggcaaccccagcgacgtgtacagcggcagggccctntccttcgccatcgccgacttttccgcgaccgtccacctccgnncttcgcccganctgctcatccagccgcatccgcaccacgacctcgtcnccttcccctctctccctcaacttcgtgagccgtttgcaaagtgaaggatattatggaggcgtccggctgctga

SEQ ID NO: 5013 - DNA, 296 bp, Zea mays
  misc_feature: Incyte ID No: 700355573H1
  unsure 93, 136: a, t, c, g, or other
ctgctggacccgtcggcggagcacgggcgtcactaagttctccgacctcacgccggcagagttccgccggacctacctcggcctccgcaagtnccggcgcgctctcctcagagaactcggggagtcggcgcacgangcgcccgtgctccccaccgatggtctccccgacgatttcgactggagggaccacggcgccgtcggccccgtcaagaaccagggttcgtgcgggtcgtgctggtcgttcagcgcgtctggagcgctggagggtgcgcactacctcgcaactggcaagctgg

SEQ ID NO: 5014 - DNA, 295 bp, Zea mays
  misc_feature: Incyte ID No: 700355577H1
  unsure 150-151: a, t, c, g, or other
aaatgacagacacttcactcccactatgtgactcaagaagtgtctcgttaactgaactggatgaatgtacttctgaacttctaagaagtgttgtctctacagaggacattatcctctccatgtctggaagaaagaacccacttggcttcnngctcacttgtgcctcgaaaagtaagtcacataaaagtgaattttggggatgaaggtcctctaggacaggtgaagtacactgtgatttgttactatgccaaacaatttgatgctctgaggagattatgctgtccatcagagcgtg

SEQ ID NO: 5015 - DNA, 299 bp, Zea mays
  misc_feature: Incyte ID No: 700355579H1
  unsure 165, 238-239, 252, 269, 280, 293-294, 298: a, t, c, g, or other
caaagggagccagagttagtcccggcgccgtgtcgcgagcggaaggagaaggactgaaggaggcgacgatgcaggtgaagcagaaggtctacgagttctacaaaggcacggtggagcgggtcacggccccgcgcaccgtctccggcgttcctcgagaagggcgtnctctccgtccccgagttcattctcgccggcgacaacctcgtcgccaagtgccccacctggtcctgggaagcgnncgatccaagcaanaggtaagccgtatctcnccgccaataangcattcctcgtcnnccgna

SEQ ID NO: 5016 - DNA, 308 bp, Zea mays
  misc_feature: Incyte ID No: 700355582H1
  unsure 122, 204, 266, 305: a, t, c, g, or other
cacatccgcgttaccccctctcccttggtttcctctcccaccaccaacccccatcccggttatctccgccgccgcccgctttgggaaggcgcgacgaaggcaggcgagaggctccagccggnacgaggaggaaagaggagcagcagggccggaggagagatgttcctgtgggactggttctacggggtgctggcctccctcggnctgtggcagaaaggaggcgaagatcctcttcctcggcctcgacaacgccggcaagaccacgngctccacatgtcaaggacgagcggttggtgcagcaccanccg

SEQ ID NO: 5017 - DNA, 306 bp, Zea mays
  misc_feature: Incyte ID No: 700355583H1
gcgcaacaagtcaaaaaggttgatgaggaaactctccgtgaggttttaggtatgggatatgacaagaacctgttggtggaatcaatccaaaaaaggctgcaaaatgaggcaactgttgcatattacttactcttggacaataggctccgtacaaccagtggctatcttggagctgaatgtcaagaagctatggactcctcattctcaaacatcgcatcatatgaaacaccaagttcagcacgtgggaatagacagcaaatatttatggagtctccagttggcttgagaccacatcttccagctgag

SEQ ID NO: 5018 - DNA, 309 bp, Zea mays
  misc_feature: Incyte ID No: 700355587H1
  unsure 4, 21, 35, 38-39, 44, 50, 63, 71, 82, 95, 99, 106, 122, 129, 150, 152,: a, t, c, g, or other
aggnaatttgacttggtagantggtcaagaaatcngtnnaagcnccagangacacttcacatngtgcaaangagtgatagtntagctcaagccantagnaaaggantgggtcggggcattgnttctaanactgaaatgaataatgggaananccttcaanatngaccagctgtactgccttccagaggaaggtacnattgtnatgganttggtgtatgncacggtaattctggtacncaaagaagcnctaaaggtgtnccanactgccanctggcanagtanacatancccnantattntcagangaca

SEQ ID NO: 5019 - DNA, 259 bp, Zea mays
  misc_feature: Incyte ID No: 700355588H1
  unsure 9, 40, 61, 66, 80, 137, 145-146, 167, 176, 191, 197, 212, 215: a, t, c, g, or other
ctcgagagnccctcctaagccaaaccccgaatcctccgtngcacagcagccgccggtgacnggaangctgggcaatgggnactgaggtagcaaccgtagtggatctccgggcgctgacacagtcggatctcgtggcnctagtgcnncatcgcctacgccgtcgatcncgccggggngggcgggcgcgatanagttcncttccccgagatgangcncgtttcacgagaggcagttccgcaagaactttccgtgcggtgca

SEQ ID NO: 5020 - DNA, 290 bp, Zea mays
  misc_feature: Incyte ID No: 700355589H1
  unsure 22, 33, 37, 103, 144: a, t, c, g, or other
ggcaatcttctacaattccacnagctactgggnctcngtttgtgtggggtggtgcgtggatgtactttgccacagggaacaattcatacctcacggttgccantgccccaggaatggcaaagcatgctggagcctactggtttngaagtccaaactatggagtatttacctgggatgacaaacttccaggagctcaggttcttctcagcaggttgcgactcttcctaagtccagggtacccttacgaagaaatactgaggacattccacaaccaaaccgacaatgttatt

SEQ ID NO: 5021 - DNA, 286 bp, Zea mays
  misc_feature: Incyte ID No: 700355590H1
  unsure 8, 26, 57, 117, 124, 216, 248, 260: a, t, c, g, or other
agagaganagatggatgaggagtacnacgtgatcgtgttggggacggggctcaaggngtgcatcatcagcggcctcctctccgtcgatggcctcaaggtccttcacatggacaggantgactantacggaggagaatcttcgtccctgaatctaaccaagctctggaacaggttcaagggcaacgacagccctcccgagcacctgggcgtcacaangagtacaagtcgacatggtgcgcaattcatgntggcaaacggcncctggtccgcgtctgatccgcaacag

SEQ ID NO: 5022 - DNA, 290 bp, Zea mays
  misc_feature: Incyte ID No: 700355594H1
gctcgatcttaaaccgggccagaaagtacttgatgtcggatgtggaattggaggcggcgacttttacatggctgcaaactatgatgtccatgttcttggtattgatctttcggtgaacatggtttcatttgcaattgaacgtgccattggacgcaagtgctctgttgaattcgaagttgctgattgcaccacaaaggattacccagaaaatagttttgacgtcatctacagccgtgacaccatccttcacatacaagacaagcctgctctgttcagaagctctcaaatgg

SEQ ID NO: 5023 - DNA, 120 bp, Zea mays
  misc_feature: Incyte ID No: 700355596H1
  unsure 24, 28-29, 33, 49, 61, 63, 70, 84: a, t, c, g, or other
gtttatagaatgatggagatttgnattnngtantctggatccaagccanccggaatcctcnantaattcngtacctggaaaccnaacagtgccaagtaacttttacggagcgttatgtgc

SEQ ID NO: 5024 - DNA, 252 bp, Zea mays
  misc_feature: Incyte ID No: 700355609H1
  unsure 25, 32, 35, 37-38, 41, 81, 105, 107, 112, 116, 129, 141, 144, 148,: a, t, c, g, or other
agcagacagtacagcgtcacactcnctctacnagnanncangcaagcatgagctcagcctcctcctctctcgccgatctcnaccacacgctagcagcgactgacngncggcnagcncgcggcggagaangagtcgtcgagncanccanttctnngcagnagggagaggcggcggacagatgcntcgancgagattggacggagatgagcantgagagtgccatactgccgagcgagtaagcgttggagcagc

SEQ ID NO: 5025 - DNA, 276 bp, Zea mays
  misc_feature: Incyte ID No: 700355611H1
  unsure 3, 27, 38, 59, 67, 132-133, 151, 154, 176, 198, 225, 238, 240, 252, 255: a, t, c, g, or other
tcnagtctcaagcttcatacgcaacanatcttaaggcncatatgcatgctctgaagacnagcgagangaaagacaagaagaagactgcagatgctgagaaggcaattgagaccgcacccaagaagcagaagnncgcatctcatagatatcntcngggtccagtcctaagccgctcncagaactcgtgtgcctctcctntatgttgttaccgccagactaattagngtgtcgtgaagtntnacttatctggtntantcgaattcgtgtctggaagat

SEQ ID NO: 5026 - DNA, 261 bp, Zea mays
  misc_feature: Incyte ID No: 700355623H1
  unsure 43, 73, 116, 139, 148, 157, 185, 246: a, t, c, g, or other
gcgctctggcagcaggaacaagatgtccaatagggccacacantcgtgttatgcctgtcggcggccaattcgnctccgtgggcaggatatcgtatgcgccaactgcaatgatggtntatcaaggaaattagtgagatgngtcgcatantgaacactnatggctaattgaacccgactttgaggancgtcagctagaagattcggaatgatggtgccatgtctccttatgcggcaacggatggaganatgggagagatggtt

SEQ ID NO: 5027 - DNA, 267 bp, Zea mays
  misc_feature: Incyte ID No: 700355625H1
  unsure 7, 74, 172, 178-179, 219, 266: a, t, c, g, or other
tttggancagtttcattgaactcttcttcatcctcacctccatctggctgcaccagttctactacatatttggnttcctcttccttgtgtttgtgatcctgatcatcactgcgccgagatcacaatcgtgctctgtatttccagtctgcagtgaggatacatgtggtgttgnaggccnnccttacctcaggatctccggcctgtatctcttcctgtacntggtttctattcttcacgaactgcagatcataagctggtgtctgganc

SEQ ID NO: 5028 - DNA, 261 bp, Zea mays
  misc_feature: Incyte ID No: 700355627H1
  unsure 3, 9, 18, 24, 31, 33, 37, 39, 55, 80, 89, 107, 110, 113-114, 153, 169,: a, t, c, g, or other
ggngagtcntcagacacnatcganacggtcnanggcnangatcccacgacaaggngagcattctaccagaccagcagcgnctcatcttngctggatagcagcttgangangcnngcacgttgccgactacaacatccagtaggagagcacccnccagttgatgctgagntaggngagnanganatcncgtanggacgctgacggaagcntatagngtcgcgngnatcatagacatcatcgacaatgtnanctnagatcagg

SEQ ID NO: 5029 - DNA, 277 bp, Zea mays
  misc_feature: Incyte ID No: 700355629H1
  unsure 84, 131, 139, 161, 176, 225, 231, 256: a, t, c, g, or other
catgttccctggcatcgtgacaggatgagcaaggagatcactgcttggctcccagcagcatgaagatcaaggtggtcgctcctncagagaggaagtacagtgtctggatcggaggatccatcctggcatcnctcagcancttccagcagatgttgatcgcnaaggcgagtacgacnagtccggcccatccatcgtccacaggagatgcttctaattctctgggcncgaganatgcaagccgtgggcgagcgttacngccgccagctctcctgcgccg

SEQ ID NO: 5030 - DNA, 75 bp, Zea mays
  misc_feature: Incyte ID No: 700355630H1
  unsure 4, 11, 51, 66: a, t, c, g, or other
atcncgattcnaggcctgatcggcaggatcggatgccaaggccgcggatgnaacagtcgtctagtngttcgacgg

SEQ ID NO: 5031 - DNA, 259 bp, Zea mays
  misc_feature: Incyte ID No: 700355634H1
  unsure 34, 54-55, 88-89, 107-109, 136-137, 155, 160, 172, 187, 192, 196, 211,: a, t, c, g, or other
gcggctgcagtgcaggccatcatgtcgtgccacnagtgcggcggcaacgtcggnnacgtcgtcaacatcacgatctcgcatgcgtgcnngacgtcggcataagcaannncgacatcttctacaccaaccggagtgnngtgacgaacatcgagtanctcangttgagtggacnaccagcttctcttcnatggnagantgcattcagtgtatntgattacatgaanncttnnngagacatggcgattctggtgctggtgtc

SEQ ID NO: 5032 - DNA, 265 bp, Zea mays
  misc_feature: Incyte ID No: 700355635H1
  unsure 2, 83, 86, 116, 134: a, t, c, g, or other
tngaggtggctaagcagcaacaatacaggagtcagctggtcgtgcactgcttgctctgtataccttgaagtctaataggaagngtntgtcagggatgagaagagtataacaatatntgtgcggatgttgatccncggttcaggagactgataagaagtatccactctcgatcttctagtcctgccatgggtgccgggacccgggacacgacgacgacttgttgatctggtcttgtcagcatctacagaactggctgatctgatgt

SEQ ID NO: 5033 - DNA, 131 bp, Zea mays
  misc_feature: Incyte ID No: 700355643H1
  unsure 58, 75, 125: a, t, c, g, or other
tcctctcactatgactccatattgcacatattgtaagacatctctgtgcacggaatanacctgtagtgttattancatgaatccatatggcacatattgtaaagacatctctttgcatagaatanagtcta

SEQ ID NO: 5034 - DNA, 135 bp, Zea mays
  misc_feature: Incyte ID No: 700355644H1
  unsure 14-16, 19, 48, 89, 94, 101, 103, 107, 111, 121-123, 127, 133: a, t, c, g, or other
ccgagaagactccnnntcnagcttagtatcaccactacatctcgaggngcacattgacatccgagtgatgtgcagtgatcaagactggngacanagtggcncnaganaagnacgctgctgnnntgcncagtcnca

SEQ ID NO: 5035 - DNA, 254 bp, Zea mays
  misc_feature: Incyte ID No: 700355649H1
  unsure 19, 30, 52, 142-143, 151, 162, 175, 250: a, t, c, g, or other
taggtttgtgtctccgacncgagctccganggcgcagcatcaggcgcggccnctcgcgtgtgacgagatggcgctgccgaatcaggggaccgttgattacacagcttcaagctcgtcatcgtcggcgatggtggaatggtannactacatntgtgaagaggntctcactggagantttgagagaatatgaaccaaccattgttgtggagttcatccgttggtttcacataatgtggtaagatcaggtctnctgc

SEQ ID NO: 5036 - DNA, 254 bp, Zea mays
  misc_feature: Incyte ID No: 700355651H1
  unsure 28, 54, 136, 147, 164-165, 167, 179, 185-186, 199: a, t, c, g, or other
caacaagcatagagacaccaagcgtcanacttgccaagcagctagcaaccaacncaagaaagctagacaccatacccatggctcgcgtagtcgtcttcgtcattgtactctcctcttcgtcgccatggttgtggancgatggccgangcaagtccgtgatgccnntncgccgacggcgncggccnncgctgtgacgacntccgtggacctagcggacggcggtgaactgtcccaggcgtcgaggttatcggcaa

SEQ ID NO: 5037 - DNA, 251 bp, Zea mays
  misc_feature: Incyte ID No: 700355654H1
  unsure 17, 19, 44, 53, 76, 84, 150, 176-177, 180, 191, 201: a, t, c, g, or other
gagagcagtgttcagtncngtgcaagagaagaagagcagcagtnctttgctgngttattcctagacttcttgaganttcatcanatctgaaggctgtggaactcttatggtgcttcagtgtgctgtccaggattatcctctgcagtgganacctggctgtcacttgtgaactatgnntancacctcacatnatcttcagcnggttgttctccttaaagcatagatgggtatgaaccttgatgttggcagcc

SEQ ID NO: 5038 - DNA, 252 bp, Zea mays
  misc_feature: Incyte ID No: 700355656H1
  unsure 50, 124, 162, 170, 175, 216, 225, 229, 238: a, t, c, g, or other
gcccacccactattctcctgcggcgcagctataaccctaatctcatcgcntcctcttccttctccagttctcgaaggcacagcagacaacagcactcttcttctcagccatgtcggaggacgangcgaacgtgctgctgcgccggaagagggacagaatggnggcggaangggancacgacaagccaagccgtgggacgaggacccaaccatcgancgtggaagncganaattcgacnctgcctggaagagg

SEQ ID NO: 5039 - DNA, 185 bp, Zea mays
  misc_feature: Incyte ID No: 700355661H1
  unsure 57, 174-175, 183: a, t, c, g, or other
tatgtagtccagttgtatcagtgaatcaagttatgtcagaaggtgcatatatgcttntctacatgaggtctttcccccgaccaccaagaatatacatcgagaaggggccgactgttccatccgcgaagccacacatcaaagtattccaagggctctaaacacgagcgcgagagnnagagttantc

SEQ ID NO: 5040 - DNA, 187 bp, Zea mays
  misc_feature: Incyte ID No: 700355662H1
  unsure 50, 84, 117, 125, 144, 152-153, 161, 171: a, t, c, g, or other
ccgacggagcacgacgcacgcagaccgcagagatccgtcacactgcaatnttgaaaactgaactgtaagatggcatcagcagantttcccgtgaggacaaatgtgtacatggcgaantcgccganaggcagagaggtacgaggnaatgggtnnttcttgangaagtacccnaaaatgttgactcggg

SEQ ID NO: 5041 - DNA, 187 bp, Zea mays
  misc_feature: Incyte ID No: 700355663H1
  unsure 50, 157, 176, 183-184: a, t, c, g, or other
gcagctgcgcaagagttccatgttgctgctcagaactgtgggtgaagaanggaggtgcttcactggtgaagtcagtgctgagatgctcgtcaaccttggtgttccctgggtcatcttggacactctgaaaggagagctctgtgggagaatccaatgnaattgttgaagacaaggtnccgtatnnccc

SEQ ID NO: 5042 - DNA, 259 bp, Zea mays
  misc_feature: Incyte ID No: 700355666H1
  unsure 6, 191, 226: a, t, c, g, or other
gcagangtgcttcggacgaggcagccagtgcatggttagccaggttgctggtttgtaaccctgtgagagtcttccatgatcttccaagacatgcagaaaacccctgtgccgatactaatggggagcatgtgacacttccagaggaaaacagaacattttcaggtggagatggaacacatttacccaccatnatcaatctcagagcactggctggacatttttggtnggacatatgaacttaaatgagccaaaagttacg

SEQ ID NO: 5043 - DNA, 261 bp, Zea mays
  misc_feature: Incyte ID No: 700355668H1
  unsure 38, 43-44, 134, 139, 156, 168, 178, 180, 189, 191: a, t, c, g, or other
tgatgatgctctcctcgaggctctctttgacggtgtgngcaanntgatttgcaaaggaggtcgtgaagaacaagaagtacttgcagttgtgtgccagatgagggtgcccagacctgctggttcaagccatcgangcttntggcagcaagtgcaacncgaggcgctgangaacgtccantngtcctgaancnctgtacgacggagatatcctggaggaggaaaccgttgtggatggtacaacgctgctgtcgcagctggaag

SEQ ID NO: 5044 - DNA, 258 bp, Zea mays
  misc_feature: Incyte ID No: 700355673H1
  unsure 2, 4, 6, 24, 36, 51, 61, 87, 165, 185, 241, 253, 256: a, t, c, g, or other
anancncgactacgagcagagccnggccatctctgngaatccaccggctcncgttgattcnctctcggaattctctgacctatcatngcgaagagatatggagcaaagccggacatagacaccttggacatcctgaacactacagctactcagaaggatatcgtngtggttgtgaaatcctgtgngtgatccgcgtgagaagctctgtcaagttatccatgatacacgctgagtgttggtnataggagcaggngcntg

SEQ ID NO: 5045 - DNA, 127 bp, Zea mays
  misc_feature: Incyte ID No: 700355676H1
  unsure 8, 123: a, t, c, g, or other
agtttggncatggaaatacaggggatcctgctcaggcctgatggatcccctgtatttccatgtccaaactagcctaaggcaggaatccccttgttatttataattaagggttgttcggcaaantaaa

SEQ ID NO: 5046 - DNA, 262 bp, Zea mays
  misc_feature: Incyte ID No: 700355677H1
  unsure 33, 56, 74, 84, 107-108, 176, 200, 237, 246, 259: a, t, c, g, or other
cagcagtgagcttatcatcgactcgatcgagtnctcgtacgctggccctgacagcnagtaccgcaccgcaggcncttggtgtgntcatggaggagacaacagctctnntcagctagtggttcagagttccttacaggtgtgtctgggtcaatcggcacattaacggcaatcaaacntctaacgcctctgacgttcgtcancaacgctcgtagctacgggccgtttgaagaggcgagnacatcttcnacatcccatgagngca

SEQ ID NO: 5047 - DNA, 246 bp, Zea mays
  misc_feature: Incyte ID No: 700355680H1
  unsure 13, 17, 95, 121, 124, 132, 137, 140, 146, 149, 151-152, 155, 159, 216,: a, t, c, g, or other
acggcactcacanctcnctacagcgcggcagtgacgcgagccgaacgaccgagcatccacttcacagtgtgtgttgtgtccgcctggcgcctgcnacataactatctgccaacaatccgcngangatcaacnagcgnaanccggcntgncnncgngagntgagcgtcgatgtctcgtcggctgtgccaacctcgcttcggaggtgagcgcatggtngctangcgccgatgntacatatggacatct

SEQ ID NO: 5048 - DNA, 193 bp, Zea mays
  misc_feature: Incyte ID No: 700355684H1
  unsure 44, 56, 82-83, 129: a, t, c, g, or other
ctcgctttgttcgaatcttctgtatagccagcaaggaggctctncatctcctccgngaaggctgtgcagcaatggagaagtnncacagcaagactcagttagcaccttgagagataccccatttgtctncgtggtgtctggtagttcaagctcataccttgagcaagccagggctacacgtcttccctctagc

SEQ ID NO: 5049 - DNA, 256 bp, Zea mays
  misc_feature: Incyte ID No: 700355689H1
  unsure 41-42, 52, 125, 230: a, t, c, g, or other
tgcatcatctctccatcaccaccaccaagctcaacaacagnnagctcgcganataatgaagagccgcagcatggcatcatcggccgcgtcttggtgctagccctcgcgctatggcggccaccgcnccacaggtagcggaggcaaagaagaagagagcgccgagagcggcgagccggcggaggcgaagaagatccaggacgatttgtcgacgctgtggagggcaagaaggngacggacctggtcgtgtgaaggagtc

SEQ ID NO: 5050 - DNA, 255 bp, Zea mays
  misc_feature: Incyte ID No: 700355693H1
  unsure 6, 32, 37, 50, 61, 79, 81, 83, 88, 144-145, 151, 188, 206, 210, 253-254: a, t, c, g, or other
gaggangagatcgctgcgctggagaacgagtnctcangcgagtgcgagcncgtaggatctnccataacgatctccagtntncncaagncatgatcgacgaagagacgaggctactgaccatcattgactacgagtatgcaggtnntaaccngttgcctatgacaacgcaaaccattccgtgaatggcngcagactaccattcaganaacntcacatatggatacagcaatatcagtacgctgagcggagcatnng

SEQ ID NO: 5051 - DNA, 124 bp, Zea mays
  misc_feature: Incyte ID No: 700355694H1
  unsure 13, 20, 24, 63, 105-106: a, t, c, g, or other
cctaacctacagncgctcgnccgngcgcctgcaatggcgcccccgtgtgagtgtgtgtgagangcagagactagaggccgtacccggggaggagagggagggagnngagaggtgatagatgtat

SEQ ID NO: 5052 - DNA, 266 bp, Zea mays
  misc_feature: Incyte ID No: 700355695H1
  unsure 140, 167, 175, 178, 185, 190, 193, 259: a, t, c, g, or other
agacggcggacgacgagaacaaggtggtgtcgtacagcgtggtggacggcgagctggcggacttctacaagaacttcaagatcacgctgaaggtgactccggccaaggcggagggcgagggcggcgcgtcgtcagctggngcatggagttcgacaaagcaacgaacnagttgccntanccggacntcatnagnagaccgcaccaagacttccacgacctcgacgatacttctcaagaactagattgacgacaattgganatgtcat

SEQ ID NO: 5053 - DNA, 236 bp, Zea mays
  misc_feature: Incyte ID No: 700355696H1
  unsure 151-152, 154, 157, 172, 180, 210, 232, 234: a, t, c, g, or other
ccagcacccgatgatctcaaggcgtggaagaagcgtgcgaggcgacggggtacagaagatcgtcatcccgccgggcaactacctgacgggcgggctggagttgaagggcccctgcaagtcctccatcatcatccgtctcgacggcaaactnntnggnaacggtgagcttcancgcgtacnaaaggaactggatcgagatcgataacgtcnagaactgtccatcaacggccangnac

SEQ ID NO: 5054 - DNA, 292 bp, Zea mays
  misc_feature: Incyte ID No: 700355703H1
  unsure 2, 14, 27, 37, 71-72, 127, 141, 154, 191, 193, 197, 220, 235, 247, 255,: a, t, c, g, or other
cncagatccggggnctctcttccagcntccgaccgcnctccgatttcctctccgcttgcaacctccgggannatcttctcgggcatctcctgcttctgggacctgccagcaccgtttttgtggttanctccttcttgccanccaaccatgagcncccagattcgtcagaatattccaccgcacgtggaggnancgtnaacagccctggtcaatttgttanctgcaggcctcctancacctaactctntctgggcntctattcgnacgcgatgatgtggccnctggaaggcgt

SEQ ID NO: 5055 - DNA, 228 bp, Zea mays
  misc_feature: Incyte ID No: 700355708H1
  unsure 194: a, t, c, g, or other
gcaggccggccatacaggaagttcctgtaagcggcgtccagggctgcaggagacgtcgatccctcgaccggggctgcgaggaggggagtttccattcagtttgtgtcggtattgttttagtctgaatctgatggagcagtttggaatgctgaactattgtgcctgatccaaatgaataaggtgtaatgactcgncttttcaattactgaaactgaacatgtttgaatt

SEQ ID NO: 5056 - DNA, 286 bp, Zea mays
  misc_feature: Incyte ID No: 700355710H1
caaacgtttccaagtgaaattcaagagaaggcgggctggcaagacagactacagggccaggataaggctgattaaccaagacaaaaacaagtacaacacacccaaatacagatttgttgtgcgatttaccaacaaggacatcactgcccaaatcatatctgctagtatagcgggtgatatggttcttgcttctgcctactcgcatgagttgccacgatatggtcttgaagttggtctgaccaactatgcagctgcctactgcactggccttctgttggctcgcgtg

SEQ ID NO: 5057 - DNA, 291 bp, Zea mays
  misc_feature: Incyte ID No: 700355711H1
  unsure 186, 204-206, 209, 216, 220, 222, 226-227, 232, 262, 272, 285: a, t, c, g, or other
gtctacgccgcgcccaccatgcccttcaccccaggaatggaagccgttggcgtcgtcaccgctgttgggcctggcctcactggcaggaaggtgggcgatgttgttgcatatgccggcaaccccatgggctcctatgctcaggagcagatccttccagcggctgtcgctgttcctgttcaactttcngttattcataagcaagcnnnttnctgtgangccnangggnntaacncgcccatgttctgcttcgcccgggtattcnaaggtttganagtggccatacantcctgg

SEQ ID NO: 5058 - DNA, 272 bp, Zea mays
  misc_feature: Incyte ID No: 700355714H1
  unsure 181, 187, 193, 210, 226, 232, 237, 243, 246, 250, 254, 258, 270: a, t, c, g, or other
gcaggacccaatcttgtactttagggatcaggtgatgttcgactcgacgtcgacgatgcggcgtgactcgatggtggcaggggtggacccaggaatgacctcggtgtgccagatggagcagcaagcccccagcgtggactgggcagcaggcgtacacgtcggcggagttcttctccacgcngatccngtcaangcctaccccttagatgntcagatgcagaacganatggcnaaagngttacntcnccgntggngcanccaaagaaaaanaa

SEQ ID NO: 5059 - DNA, 274 bp, Zea mays
  misc_feature: Incyte ID No: 700355716H1
  unsure 80, 248: a, t, c, g, or other
gcaaatatggttctatttgtcgcttcaatcatcctgatcggtcagttgtggatatagcttttatggctccagttcaagcnactcttccttttccagcacccattgtccctgcagtggcgttaaatccggctgcaaattttctgcaaagctttgatttccatgcaactcacgtgccggttgagcctatgccaatgatctatcctcaaagacctggagaaattgtttgtgatttttacatgaagacaggncctggcaagtatgctcagaattgcaa

SEQ ID NO: 5060 - DNA, 284 bp, Zea mays
  misc_feature: Incyte ID No: 700355718H1
  unsure 165, 168, 173, 228, 230, 237, 247, 259, 280, 283: a, t, c, g, or other
atcattaggaccagtagctgcttgatttgtgtctcggtgatctagctttgggtagtttgtgcagttggaaggagacagtttgttggttgtattgtattgcagcgcacagctagcaagtgttgttgtagccatcaggtacgtgttgtgtagtgaatccaggtccanggncaganctgttcctctgtatggtggaccctgacccttgttttgtgcccaggggccttccgngntgtgctnacatgagctngaagcgcttaanaaaaaaaaatagggagggccncgnt

SEQ ID NO: 5061 - DNA, 285 bp, Zea mays
  misc_feature: Incyte ID No: 700355719H1
  unsure 83, 257, 263, 278: a, t, c, g, or other
gctgacactgatttaagtgttgtcgttgctgagaagtctggagagaaatcaaatgatgaagtgaaaagtcagctatctcatanccttccaacttctcgccggatcatgcagttttcaaatgggcaggctccttcgccaggtgctcgtgttgtctatgtagatggcacatttgatcttttccacgctggccatgttgagttcctcaggagtgccagacaacttggtgacttcctcttgtgggtatctatggacgacgnatcgantcagggatagaagangctgtcg

SEQ ID NO: 5062 - DNA, 290 bp, Zea mays
  misc_feature: Incyte ID No: 700355721H1
  unsure 216, 219, 237, 240, 252, 264, 267, 269, 274: a, t, c, g, or other
caaccgcgaaaagcggagggagggggaagggacgtgggaccgatccaatcatcaatccactagcttcactgggaaacgaagaaagaacataggactgatccggtcggtgggacttcctctcgaatcgccccgatcgagaccctagttgccccacgaaccgaggatccaagatgagtttctgttcgggaagcggaagacgcccgcccgagctgtttnaanagaaaacaagagaatgcnggntcgatccatcangggaattgaacngananaggcnaaggattgcaggccca

SEQ ID NO: 5063 - DNA, 293 bp, Zea mays
  misc_feature: Incyte ID No: 700355722H1
  unsure 17, 79, 240, 245, 255, 258: a, t, c, g, or other
cgttgtcgcggcgtgangaagcgagaggggaaaacccaaaaccctagcacccccgccccgtcgccgacggccgccggantagagagatggcggtggacgaggtgaactcggtctacgtcggcggccttccctacgaggccaacgaggagatgcttcgcgaacgccttcgggtactacggcaaccatccgttctccgtcaaggtgattaatgatcatgctgttcaaaggccaagtgttatngtttngttactttcnacncaaccccagagctgctgagcaagcaattgcgggca

SEQ ID NO: 5064 - DNA, 286 bp, Zea mays
  misc_feature: Incyte ID No: 700355723H1
  unsure 64, 160, 165, 176, 181, 212, 246, 281: a, t, c, g, or other
ccggaaccgccatcttccagtaattcgccaaaatgacgaacacaaagggaaagaggagaggcanccgatatatgttctctaggccttttagaaaacatggagttgttcctttggccacatatatgcgaatctataagaaaggtgatattgtagacatcangggantgggtactgtncaaanaggaatgcctcagaagtgttaccatggcaanactggaagagtctacaatgttaccccagcatgcngttggcattgttgtaaaccaaacaagttaagggcnagatt

SEQ ID NO: 5065 - DNA, 111 bp, Zea mays
  misc_feature: Incyte ID No: 700355727H1
  unsure 86, 90: a, t, c, g, or other
cgacttcctccctttcctgccgcaccacgcaatcaccggggcggaggcggctgacggcgagcacttgggcgtctccggccaccgcntgcntacgttgtggctccccgttga

SEQ ID NO: 5066 - DNA, 282 bp, Zea mays
  misc_feature: Incyte ID No: 700355728H1
  unsure 154-155, 157, 160, 165, 171-172, 174, 183, 185, 189, 192, 205, 219, 228,: a, t, c, g, or other
catgtcttcaatctaaagataaatgtgggatcgactgcaaatgataaacctatacctgctccagatcctgaagtttcgcatataagcccccctctttcgttcattaagggtgtgttgccgaaatatttccactctgagtggtcagtagctcagnncncgntccangggggnnanatggtgctntnggcnatnaggacaataccgngtcaattgttggtncggatgganacttcnacagatgtcaatttgacccagtttnatggaggagaaatggntgncngc

SEQ ID NO: 5067 - DNA, 219 bp, Zea mays
  misc_feature: Incyte ID No: 700355731H1
  unsure 54, 79, 116, 124, 167, 171, 183, 188, 200, 211, 214, 217-218: a, t, c, g, or other
tcgaattccgtctcttgtccctgtcgtcctcgcccggtttccccggtttttganaggggaaagaggaggcggaggaganggatggggagggacgagaggttcccggtgtgggaagncgcgctcngcgccggaatcgccgccgcttcgccgctgatcgtcgtgttacntcangcggatcgatanactcncaattgcagaancgaggatcaanccnatnnt

SEQ ID NO: 5068 - DNA, 274 bp, Zea mays
  misc_feature: Incyte ID No: 700355732H1
  unsure 23, 59, 68, 147, 194, 213, 218, 230-232: a, t, c, g, or other
cggagtagggcgaaccgcgaggngagcaagctatgggcgcgccgaagcagaagtggacntcggaagangaggatgcgctccgccgtggcgttcgcaagcacggcgccggcaaatggcggaccatccagaaggacccccagttcagcncgatcctctcctcccgctccaatatcgacctcaaggacaaatggagnaatttaatttcagtgcaantggangggatcgagtannntacgggttccaaagataactggatcctcatcttcaccatcat

SEQ ID NO: 5069 - DNA, 215 bp, Zea mays
  misc_feature: Incyte ID No: 700355733H1
  unsure 7, 135, 139, 144, 148, 150, 173, 175, 183-184, 191-192, 204: a, t, c, g, or other
atttgtngttggactgggggataaagtgtctccaactggacatcgaggaagggatgagggtcggtgttgatcgcaacaagtaccagattcaaatccctcttccaccaaaaattgacccaagtgttaccatgctgnccgnggcgntaangnccagatgtgacgtacaatgagcntngtggctannaggagcnnattgagaaaatncctcatgtttt

SEQ ID NO: 5070 - DNA, 293 bp, Zea mays
  misc_feature: Incyte ID No: 700355735H1
  unsure 6, 10, 129, 148, 151, 177, 190, 196, 240, 246-247, 257, 262, 266, 270,: a, t, c, g, or other
cctcgncgcntcactccctctgcagaggttcgcagatccgtccggttagacgaagccgcccgcacccatggcctccggtgagctcgcctgcacctacgccgcactcatcctcagcgacgacggcatcgncatcaccgccgagaagatncgncaccatcgtgaaggcggccaacatcnaggtccgagtccnactggncggcgctcttcgctaagctcctggagaagcgcaggtttgagggntctaanncctctccgtnggatntgtnggtngcgctggttcagttggctgnttc

SEQ ID NO: 5071 - DNA, 280 bp, Zea mays
  misc_feature: Incyte ID No: 700355737H1
  unsure 247: a, t, c, g, or other
caagctcatggaaaatatcctggagaaacaagagtgagtttttcttgcaagaataagcgtggcacaaggttcactcctatggtccaatggcccgataagtctgtttcattaggagttactcaagccttggcatggaaaagatctggcctatggtgagacccagcatacaagtcagtgtgtgcccttacgtttggaggaagtgatccggggtacgtgcagagttgtccattcattgaagaggaattgnaatctgatgtgtggcctccctgctcacagcgcc

SEQ ID NO: 5072 - DNA, 283 bp, Zea mays
  misc_feature: Incyte ID No: 700355738H1
  unsure 41-45, 47, 141, 189, 213, 248, 278: a, t, c, g, or other
gtgatttgaaataattgggaataaatagttcgtgaatcccnnnnncntacatatatatattcctgccaagataaaggtaatggagtcgtcacgcaggttccagccggccgtcatcctgcttctcctgctcattgtgtccancgatatggcacaggcaagggaatgcgagaagtacagtgagcgatttgntgggggcatgcatgatcgcagacnaatgcgccaatgtgtgccgcggtgagggcttcttngccggcaggtgcagcacttccggccgccgngcatt

SEQ ID NO: 5073 - DNA, 278 bp, Zea mays
  misc_feature: Incyte ID No: 700355741H1
  unsure 20, 95, 152, 216: a, t, c, g, or other
ataatgaatccaaagaccanaaacatccgattgtatgtcaaaagagtgttcatatcagatgattttgatggcgagctgtttcccagatacttganctttgtgaaaggtgtagttgactcaaatgatctccctctcaatgtttctcgtgaganccttcaagaaagtagaattgtcagaattatgcgtaagagactgttaggaagacatttgacatgnttcaagagattgccgagaagatggcaaagaggactacaacaaattctgggagagcttggcaa

SEQ ID NO: 5074 - DNA, 279 bp, Zea mays
  misc_feature: Incyte ID No: 700355742H1
  unsure 274, 276: a, t, c, g, or other
cccaacttggggcaggattgagtgctgcagcagggcccattggcaggaccagtgaaaagggatctgggatatgctacacttacagctgcagcaaaggtgccttcgttggtgtttcactggaagggaatgtggtgacaactagaatggaaaccaatctccgcttctacggtgatgcataccagacggcaacccatatcctgtttgggagggtggagcggccccgagctgctcagcccttgtttgctagccgatttagggcttcttaaggggatgnantat

SEQ ID NO: 5075 - DNA, 289 bp, Zea mays
  misc_feature: Incyte ID No: 700355743H1
  unsure 9, 12, 14-15, 22, 44, 54, 59, 67, 75, 90, 98, 137, 166, 170, 172, 175,: a, t, c, g, or other
tgccctcgnagngnngcatcgncggacggggttcggatgcagtncgaccacggnccgcnaccagatngcgctctngttcaaccggaagcngagcctgnaggtggtcaagctgtaccgggaaatactcgcggcgtcancatcttctacgtgcgacctctactccgtnctcncngangtggtccagngtacaaggctctcgggttcaangaagggaaagaaanntnntcaggtnnancggactgtcngntngggnccaantctgnaacatcgggcatncgttacctttccc

SEQ ID NO: 5076 - DNA, 96 bp, Zea mays
  misc_feature: Incyte ID No: 700355745H1
  unsure 63, 70: a, t, c, g, or other
agctgtaactatagttcttgatctgccaccacctcagcctggttcaatgtctggactcacttnctgttgntatggtatctgcctctgatccgaaat

SEQ ID NO: 5077 - DNA, 105 bp, Zea mays
  misc_feature: Incyte ID No: 700355746H1
  unsure 89: a, t, c, g, or other
atggactggtccttcgctagcaagcccggcgccgccccgggttgatgtcgttccggtcagcttcgttcccccagttctcctccttcganggcgccaagaacccgg

SEQ ID NO: 5078 - DNA, 156 bp, Zea mays
  misc_feature: Incyte ID No: 700355749H1
  unsure 2, 106, 146: a, t, c, g, or other
gncatggcagccgccaccgcgaatgccatcttgctcttggctctcttcttcgccggcgctcacgcgaatgtcccatgcatactccccgtatgcaagacggtgggtngcgggagccggttcttcgacgtgcagttgtgcctggcggnacttcggctc

SEQ ID NO: 5079 - DNA, 287 bp, Zea mays
  misc_feature: Incyte ID No: 700355750H1
  unsure 188, 248, 276, 280: a, t, c, g, or other
cgcctccgctgcccatcgccgtccccgaccgcagcgcaggtgaggatccaaccccaacaaacttccaggcgacggactgaggatgagtgaagaggataaggctgctgcttctgctgagcagcctaagagggcccctaagctcaatgaaaggatcctctcctcttctgtccaggaggtccgtagctggntcatccatggcatgatctcgagatcggtcctggtgcttcctgctgtattcaatgttgttnttgagatcacaaagggaagcaaagtcanatangagcttt

SEQ ID NO: 5080 - DNA, 146 bp, Zea mays
  misc_feature: Incyte ID No: 700355751H1
  unsure 22, 36, 49, 54-55, 68, 77, 79-80, 103, 107, 110, 128, 139, 142-144: a, t, c, g, or other
ctaggctcagcatccgaaagangggccatggtcggnttccttcctcacnccagnngcggccatctatncgaaaatangnngcacctcgtccgctttgctcctngttnatncttcacctgctaatggcngcaacggacgnggnnntc

SEQ ID NO: 5081 - DNA, 281 bp, Zea mays
  misc_feature: Incyte ID No: 700355754H1
  unsure 178, 205, 215: a, t, c, g, or other
gactagttctagatcgcggcgtaccacttcgatttggcaggcacggcgttcggcgccatggccaagaagggtgaggaggagaagctgcgcaaggcgggcatcatcgacatgcagttccgaagggtcaagtgcaagtacggctccaaggtcaccttccatcttgaaaaggggtgcggcnccaactacctggcgctgctggtcaaantacgtcgacngcgacggtgacattgtggcggtggacatcaaggagaagggctccgacacgtacgagccctgaaagc

SEQ ID NO: 5082 - DNA, 276 bp, Zea mays
  misc_feature: Incyte ID No: 700355756H1
  unsure 64, 150, 155, 166, 239, 261, 265, 275: a, t, c, g, or other
ttgtgttctgattcacctgctccaatggctgttctttctgctgctgatgcttccccggtctcanctatcgggtttgagggctatgagaagcgccttgagatcacattctctgaggcacctgtcttgtggaccctcatgggcgtggtttgngtgcnctctccagggnccagattgactctgttctggatcttgcacggtgcacaatgtgtccgagctctccaacaaggatttcgactcanatgtcctcctctgagtcaagcntgtntatctatccnc

SEQ ID NO: 5083 - DNA, 286 bp, Zea mays
  misc_feature: Incyte ID No: 700355757H1
  unsure 217-218, 225, 228, 232, 246, 250-252, 261, 268-269, 278: a, t, c, g, or other
gaaaactgagagtgtgacaagtaagacacaagtccatcaaggattcaacagctcaagtactgaacggagtgaaaggagggatccaagtgtgtaccccagggttgcagtacagcgctcttcgtctaaagctgagcagattgaatctccgatggagagagggaagccacaaggagctgaaatgagaagcaccttatttcgaggaaatgaagaggacccnngaaaacntcntccnggaattccaaaggnaagnnncccccaaanaaccccnnacatgttcntcccagct

SEQ ID NO: 5084 - DNA, 276 bp, Zea mays
  misc_feature: Incyte ID No: 700355758H1
  unsure 151, 155, 162, 171, 174, 186, 189, 195, 201, 203, 211, 220, 223-224,: a, t, c, g, or other
ctcatctccaccattgtttggagccccaacgcataccaagtcggtcgtcggggtataccgaacgggtcgacaaccctacatggggggaacatcaagcaccgagataatactcgtatgagatcaatcctcataccggggccgcaagatcgcntgtncagcgcnacaacggtnacnaacccggttcangancaggtnccgcangntgaggatnatggatgangcnntgagttttnatggtntangcnggcnnntgcatcnattnaatgtnggntcgtt

SEQ ID NO: 5085 - DNA, 282 bp, Zea mays
  misc_feature: Incyte ID No: 700355762H1
  unsure 31, 150, 159, 181, 211, 218, 221, 227, 240-241, 245, 251, 278: a, t, c, g, or other
ctcgacggctacgccttcttcggcgtcgggntggggcctggaccgtggtcgccggagatgaggaagacgtacaacctactggacacggtgagccggcacacgatccaggtgtacccgcggtcatggacggcgatcatgctgacattcganaacgcgggnatgtggagcgtccggtccaacntctgggagcggtactaccttcggggagcanttctacnatnagcttnatctcgccggcanngtcntgcgcnacgagtacatcagcccagaaaaccccnccct

SEQ ID NO: 5086 - DNA, 133 bp, Zea mays
  misc_feature: Incyte ID No: 700355763H1
  unsure 37-38, 45-46, 50-53, 59, 68, 94: a, t, c, g, or other
cctaacatcacggactatgctacggaatgactttggnngcttctnntcgnnnngctgcnaaagccatncctaacatcacggactatgctacggnatgagctttggcagcttgtcgaggataagctttgaggtt

SEQ ID NO: 5087 - DNA, 95 bp, Zea mays
  misc_feature: Incyte ID No: 700355765H1
  unsure 15, 84: a, t, c, g, or other
cgaccttggcaagcnttgcgccaagtactacgaggcaggtgcccgctttgccaagtggcgcgctgttctcaagattggccctanatgagccattc

SEQ ID NO: 5088 - DNA, 282 bp, Zea mays
  misc_feature: Incyte ID No: 700355766H1
  unsure 2, 14, 21, 41, 64, 76, 89, 109, 133, 142, 190, 193, 207, 215, 218, 234,: a, t, c, g, or other
gngcgtcctccgcngccgcantaaaccctactccatgtacncaggtctgcgtcgggcccttgcnggcgatgagaanccgtcagttccanagatggctcgtcgtggattnatggaacaggacttcagcaaactngctgtgacnaagcttcaccccctgtcactgaagttatctcatgccaagcaacaatcnctnatgggtagcttggncatatggntcntggaaagtccactgtnatttaagctatatccggtgtncnagatggttcggttcaagaatncntt

SEQ ID NO: 5089 - DNA, 279 bp, Zea mays
  misc_feature: Incyte ID No: 700355767H1
  unsure 192, 221, 232, 246, 255, 276: a, t, c, g, or other
ctcttggtggagacactatatctgtaacaaaaggcgttgtgtcgcgcattgaggtcactccatatgcacatggaacatcagatgcttcttggcattcaaattgacgcagccataaatcctggaaacagtgggggaccagcctttaatgatcaaggggagtgcattggtgtggcatttcaggtgtacaggtcngatgaagctgaaaatattggatatgttantccaactacanttgtatcccattcntaaatgganatcagaaaattggaaagtacncgg

SEQ ID NO: 5090 - DNA, 276 bp, Zea mays
  misc_feature: Incyte ID No: 700355768H1
  unsure 45, 268: a, t, c, g, or other
ggagattgttgccaacgtcgctcctcgtcttagccattgtttggngcccgcggtgtggacaagggcgttcgcacgaaagcatcgatcgagtacaaggaaccgtcgggcgcatggtcaatcagagtgccaagaattcctcaccggcgtgaatcaccgccaccgaatccgccttgcgccgcggctatgcatctctacacctccatctttgttctgccaggaatgtggaagaagtccctgcgtatatatccgtggaaatgcccccattgantcgtgggg

SEQ ID NO: 5091 - DNA, 286 bp, Zea mays
  misc_feature: Incyte ID No: 700355769H1
  unsure 8, 14-15, 31, 44, 55, 60, 94-95, 125, 141-142, 144, 216, 228, 230, 239,: a, t, c, g, or other
cgcggggnacaggnncgcctcctgcgccgancgttccgttcgtntttgtgcctgnctgtnccttcggttgttcctctgagccgacggacgagtnngcgaccgaggtggggttccgagcgccccancccgtggtggaatcgnntngtctggttattgccgggggaccacagacgcattagctgggtgaactctttccaaagggggcagtgcggctantttgaaaggccngnaacaaaagnttcagaccttntnngganccaccctgnctggncccaaaaacatncat

SEQ ID NO: 5092 - DNA, 279 bp, Zea mays
  misc_feature: Incyte ID No: 700355770H1
  unsure 190, 232, 260-261: a, t, c, g, or other
caagacaactgttctggagctgacgtacaactatggagtcacagaatacagcaagggcaatgcatatgctcaggttgccattggcaccaatgatgtgtacaagagcgccgaggcggttgatctggcgaccaaagaactaggtggcaagattttgcggcagccagggcctctacctgggatcaacactaanatcgcctcttttgttgatccagatggctggaaagtggttctngttgacaacaccgacttccctcaagganntccactgaaggctcggga

SEQ ID NO: 5093 - DNA, 281 bp, Zea mays
  misc_feature: Incyte ID No: 700355772H1
  unsure 55-56, 236, 250: a, t, c, g, or other
actgggtccacgcagctgttccaggccgtgctatacgcgatctcgcctgcaagtnnacggcacgcccatcgacgtcgtctcgccggcgccttactactcgtgttacccagttgcgtcgagctttctaaactctgggctctaccgttggggtggtgacgccaatacatttgccggcgacgacaccagctgtgttgaggtcgtctgctcgcccaaacaaccctgacggtggcatccgnacatgccgtcgtcnagtccaaatccaagcaaaggcgatctatgaa

SEQ ID NO: 5094 - DNA, 274 bp, Zea mays
  misc_feature: Incyte ID No: 700355773H1
  unsure 104: a, t, c, g, or other
aggaggatcaagaattaggccacaaaagttgtcaccgatcaggaaaaggaatgcttgaagtattatgtgtcgtgttgttagctgaattttaggcctcaattggngttcctacttcatctcactactggaatgctagctgttttggtggtttcagtaattaggccacaaggtgaacgcctgctatgttgagatgaagtaggaacacctgctgttttgctgttttgtttgcctaagctagctgttttgttactgcaaactgtgtctgtgtttcacc

SEQ ID NO: 5095 - DNA, 274 bp, Zea mays
  misc_feature: Incyte ID No: 700355774H1
  unsure 223, 227, 233, 235, 245, 256, 266: a, t, c, g, or other
aggaggaagcgcatgtgaacatttgtgcatttgtcggacgttcagatctggactcacgatgctttcggtaaaacttgcctctgctctgatccacctccaccttcaacgacttggcaccctcgaagaccaatcctgcaagcaattctttgttccaagaagacattgaggccctcacaaagaagacacaagatggtgggacaaaagtggttgaggcaaaggttgnaaangggctngnaattggcctntggcaaattanaacatatgancgttgtcc

SEQ ID NO: 5096 - DNA, 94 bp, Zea mays
  misc_feature: Incyte ID No: 700355776H1
  unsure 30, 34, 38, 65, 73, 86: a, t, c, g, or other
cgccgccaacatggtgttcaggcgcttcgnggangttngccgaggtggctatgtctcctttgganctcatgcncggaaaattggtncgcgattt

SEQ ID NO: 5097 - DNA, 130 bp, Zea mays
  misc_feature: Incyte ID No: 700355777H1
  unsure 20, 105, 121-122, 124-125: a, t, c, g, or other
atgattgacatgtggaaganaaataagatgaacacttttggaattatctacagctggtttcttgcaaaggttgctagccaacttgaggtgttacctggagctganttccgggtggcatttnngnnagcaa

SEQ ID NO: 5098 - DNA, 280 bp, Zea mays
  misc_feature: Incyte ID No: 700355778H1
  unsure 160, 191, 195, 198, 201, 204, 206, 210, 213, 218, 220, 222, 234, 242,: a, t, c, g, or other
gatccacttgcctccagttcatgggaaagggttggcgaggagaagactttaattacccctgtgcagtgcaaaaatttgtggaggcaattcaaggctgaaactgaatatacagtgactcaagccttagctgctcaggaagcaaataagaggaacaacaacnggctaccacctccatgggcacttgctgcaanggcnatnctnggntncaanganttcangncnttactgggggcncccgcttnacccgttncnaatangtgagatttctcgcgtggaaaac

SEQ ID NO: 5099 - DNA, 282 bp, Zea mays
  misc_feature: Incyte ID No: 700355779H1
  unsure 186-187, 189, 192-194, 196, 227, 230, 241, 243, 247, 249, 256, 258, 261: a, t, c, g, or other
tttgagtggatcatggacggattggtaggcctcttgaaagtccgggtggtgaggggcatcaaccttgcctaccgcgacgcaagaggcagcgatccgtatgtcgtcctacgacttggcaagaagaaacttaagacgagcgtgaagaagagatctgtgaaccccatctggcacgaggagttacttctnncngtnnnanttcccagcctagctctgaagcttggaagtgntcnaccaaggaccngntcancnggggacnanccnttgggggacccgaaatcgacg

SEQ ID NO: 5100 - DNA, 283 bp, Zea mays
  misc_feature: Incyte ID No: 700355780H1
  unsure 4, 57, 126, 187, 193, 196, 220, 227, 239, 243, 247, 258, 260, 263-264,: a, t, c, g, or other
ccangtcccagcgaacccgcgtgcaacctgtcccgactctagccgcctcttcagctncgccatggatcccaactgctcctgcgccgccggtgactcctgcacctgcgccggctcctgcaaatgcanagagtgcaaatgcacctcctgcaagaaaagctgctgctcctgctgcctgtggctgtgcaantgttgnccnagggctgcaaatgccaaagggggngtggganaggtgcagctcntggnaccngattctgggananccnntccccaattnnaanaancc

SEQ ID NO: 5101 - DNA, 279 bp, Zea mays
  misc_feature: Incyte ID No: 700355781H1
aacagcatcactcaaagccaagcaacagcagcagcttccctagcaacaccttgcccctgagctcatgggatccctgggccccacagtgagcttgagcatcatggccaggccaggcggccagcagccggcggagatggagaggaagaaggacagcggtgtcttcttcggtgggggctgcggcttccggatgccgctgcactacccgcgctacaagaaggcggactacgagagcatgccggagtggcgcgtcgatgcctgctccgcgagtacggcttcccg

SEQ ID NO: 5102 - DNA, 280 bp, Zea mays
  misc_feature: Incyte ID No: 700355783H1
  unsure 7, 168, 220, 223, 232: a, t, c, g, or other
cggaggngccagcagcacacagccccatcccaatcctagtcgatcttcttcccctcctcaaggaagaaaagaagctgaaccatggggaagagaaagtcagctgctaagccacctcctaagaagcggatggacaagcttgacactgtcttttcctgcccattctgcaancacgggagtagtgttgagtgccgaattgacatgaagaatctgattggcgaanatncttgtagantctgtcaggaaaaatttcagcacaactgttaatgcatcactgagccta

SEQ ID NO: 5103 - DNA, 279 bp, Zea mays
  misc_feature: Incyte ID No: 700355786H1
  unsure 30, 106, 147, 199, 227, 236, 242: a, t, c, g, or other
gggccgttcgtgcgtgccgtgagggagagngggaggtgctcgcgccgccgccgtcgcaggcggcaaattcctgtcgttccgggtcccagggtggggtcgcgaatgnccatcaacctgcgtggactacgtgcgcgcgagcccttcganccgagaacctttggagctacgcaaacagggagcacccgacctcggcgcctgngccattcattgccaccgttgacctgcgnattcgctgncgatgncaactcggtgggagttccagatggggcggcaaactat

SEQ ID NO: 5104 - DNA, 277 bp, Zea mays
  misc_feature: Incyte ID No: 700355787H1
  unsure 7, 32, 75, 82, 127, 182, 231, 260, 264: a, t, c, g, or other
gcgagantaaccaatttgctgcatcacgagtncccaatgattggggaattgagaggcatggagcagatgccagtncaagtcntaggtttgacatgccatcccaccaacagaccttggaagaacttgngatggagtttaaaaaagaagctacacaattagctagagctccgtgaccaagaggnggatgcagagaactataggcatcgagagtccgctgagagtgattagagnaaattacatggagagagtgattaccttgnggantgtgcatgcaaag

SEQ ID NO: 5105 - DNA, 275 bp, Zea mays
  misc_feature: Incyte ID No: 700355788H1
  unsure 171, 185, 249, 262: a, t, c, g, or other
acacacatccgtcaaagaaacaagtgcacacaaataaatacctggctcgctagattgccaagagcaatggcctttaggtcatccatcttgcttgccacggtggcgctagcaaggctattcgcggtcggttcgtgcaccaccccgctcagcttccaggtcggcaagggctcnaagcctggccactnggtcctcacccccaacgttgccaccatctctgacgtggagatcaaggagcacggtggcgacganttctcctttacgntcaaggagggtcc

SEQ ID NO: 5106 - DNA, 127 bp, Zea mays
  misc_feature: Incyte ID No: 700355789H1
  unsure 11, 17, 24, 48, 57, 86, 102, 104, 120-121: a, t, c, g, or other
ccatatagcangcaggnaagacancaactactgagcgcgttctgtatnacactggantgaactacaagattggcgacgttcatganggaacagctagcaatngnactggatggaacaagnncaagag

SEQ ID NO: 5107 - DNA, 286 bp, Zea mays
  misc_feature: Incyte ID No: 700355791H1
  unsure 102, 164, 174, 177, 193, 197, 207, 211, 234-235, 239, 243, 256-258, 260,: a, t, c, g, or other
gagtacataagctgccggttataaatagcagcaatgacttaaagacagctctacaaaagatgggtgccataccatcaagcaaaatactggcagtcgaggtcntgtggactccgcaaaatgagaatgacacattgtccgagcgagagctcccttgaagattaccncgctcttganggncttctgtagataaaanttangttacagacnggcncaagcaagaacacgccgtcaagnngcantttnagcggtggtcttnnntngtntaatnacnngcgtttgtataata

SEQ ID NO: 5108 - DNA, 148 bp, Zea mays
  misc_feature: Incyte ID No: 700355792H1
  unsure 134, 138, 141: a, t, c, g, or other
ccgtggagcaccagccaagctcctcccctgcggctcgcctccctcacggcgccgcctgctctccattgctgacctccactccagcacctgagcaagcgctcctgaggtcatcttccccatcttcctctagtgcnggcngcnaggtcgt

SEQ ID NO: 5109 - DNA, 306 bp, Zea mays
  misc_feature: Incyte ID No: 700355803H1
  unsure 46, 123: a, t, c, g, or other
gaatcccggctcctccgccgcctcgcgtccacccttcctcttggcncgctccgatccaagagatggcggtgccgctgctgacaaagaagatcgtgaagaagcgggtcaagcagttcaagaggncccatctcgaccgctataagtgccttaagccaagctggcgcaggccaaagggtattgactcccgtgtcaggaggaagttcaagggatgcaccttgatgcccaacattggttacggctctgacaaatcaaccaggcatactccccaataagttcaagaagtttgtggtgcacaatgtctctgag

SEQ ID NO: 5110 - DNA, 300 bp, Zea mays
  misc_feature: Incyte ID No: 700355805H1
  unsure 223-227: a, t, c, g, or other
caagcacctaagctaccatcagaaattgttggcaaaaatgttgaggagattattagggactggaacaatgagcttcaagaccgtactgcaaaattcaggaaacatgccaccgcaatagctgaatgggataagagaattctgcaaaacagaaatgttcttattaggctgaggctgaggtggctaaagttgttgaaacacaaacaggctggagcgtcaacttgannnnntagaaactcatcaacgagaggtagacaaggctctacagagtatggaggaggaagctgaacgcgtattccagga

SEQ ID NO: 5111 - DNA, 300 bp, Zea mays
  misc_feature: Incyte ID No: 700355806H1
  unsure 54, 60, 76, 117, 129, 156, 205: a, t, c, g, or other
ggccacgaatatctcggtcgccaattgctgtatactcttaccttcgccttcgcngccgcngccgtacagtctaganagaaccggcacagccgccgcagtccgcagatgtcgatcgtngtggcatcggangtcgcgaccgctctcgcgagccgcggngcgtacgtcgccctcgagtccaccatcatctgccacggtatgccgtacncgaagaatctccagatggccatggaggtggaggccatcatcagggacaacggggctatccctgcaaccatagccgtcctggacgatccctcacgt

SEQ ID NO: 5112 - DNA, 307 bp, Zea mays
  misc_feature: Incyte ID No: 700355810H1
  unsure 46, 73, 88, 98-99, 113, 132, 137, 167, 184, 206, 233, 237, 255, 268,: a, t, c, g, or other
cgcgcgatcgagaagccaggaccaggacgacgatggcccggccgcncctcctccctgcaccttcatgctcgcngcggcggccgtgctnaccacggtgnnggcgtcgcgctcgncaagtcgaagctcgccaanaagancgacgacgtctgaacgggccccttcctgancgagaagatccaggtgnagaagacgctgatcgtggggcnggacgaggagttcaagaccgtgcagtncgcnatcgacgcggtgcccgcnggcaacgccgagngggtcatcgtncactccgtctggcntgganatgggcaaa

SEQ ID NO: 5113 - DNA, 307 bp, Zea mays
  misc_feature: Incyte ID No: 700355811H1
  unsure 55, 129: a, t, c, g, or other
aggaaaccgagaaggctccggataccaacagcggatgcgtcaagcaggacgacgncgagaagaagacggtcggaaccgaagcagttcattctcctcccaagagggaggtctccaacccgatactctcgnctcacaaacctccctgcaacatctaccataccggccagttaagctccgggcttcttatcactgaccggccttcgacgagggtgcgctgtgcaccaggaggggcgtcgtcgctcgggtttctgttcggtgaggagcatgagaaataacagacggtctcagtctaaaatctagaagacgg

SEQ ID NO: 5114 - DNA, 305 bp, Zea mays
  misc_feature: Incyte ID No: 700355814H1
  unsure 4, 152: a, t, c, g, or other
aganaagtagatgcacgtcatatggtgcaccaaacagattcaagcaaccaaagacatcagatatctgtggatgtgttggcacattctgccagtaagcctgcatggagaaatgattttcagcatgatattgtttcagatgatggaattgactngtcttctaatcaaaatttgataaaccagacatcattgaaacctgtggatctccctatttgttcttttgctgctgctggtaattgtccttatggggaagggtgccctcaaatgcatggagatctgtgtgcacctgtggaaaactgtgcttgcat

SEQ ID NO: 5115 - DNA, 309 bp, Zea mays
  misc_feature: Incyte ID No: 700355815H1
gactagttctagctctcttcttagttggagaaatcgggggcaatgactacaacggacctcttctttctggagttcccttccgaggaaattcgcgccatcactccgagtgttgttgcgaaaatttcttctacaatcagcgaattgattcagctaggagccaagactcttgtggttccaggaaaccttcctattggatgtgtcccaaaatatctgatgatattcaagagcaataagaaagaggattatgatccacagacaggttgtcttagatggatgaacgagttctcacagtaccacaacaagcttctt

SEQ ID NO: 5116 - DNA, 310 bp, Zea mays
  misc_feature: Incyte ID No: 700355816H1
  unsure 2, 20, 39, 45, 48, 72-73, 95, 120, 142, 146, 247, 273, 292, 309: a, t, c, g, or other
anatgtaaaagcacagcggnttaacattctacatcatanaccgtnacntcaagtgattggaaacaacatcannattcattttataattcttgagntatagaaatcgccgctcaattaagngggatccgcaataagttaagtnagtnatgcaatgagctcaattcaaattccttcaaattctctaacaccccgtttggatcatttgaattgaattacattctaataatagttatttaggcatatatcnattaagataattcgattttatataanatatattgtatactatcanagcaagatatcggagana

SEQ ID NO: 5117 - DNA, 263 bp, Zea mays
  misc_feature: Incyte ID No: 700355817H1
  unsure 148: a, t, c, g, or other
cagcaacggctaccactacatggagggcgagacgatgagggtgcagttcgagcgctggatcgtcgccgccaaggccgacctcgtcgtcgccggccacgtccacgcgtacgagcgcagccaccgcgtgtccaacgtcgcctacgataanttcaacgcccggtgcacgcccgtccggacaagggacgcgcccgtctacgtcacggtaggcgatggcggcaacatcgagggcatcgcggacaacttcacgcagccgcagccgagtt

SEQ ID NO: 5118 - DNA, 300 bp, Zea mays
  misc_feature: Incyte ID No: 700355822H1
gtcgaggtgttgttttcaagtgcttcctcataaggaggttagtgagttcaagaaggccatcactgactgctcgaagttcttgtagcagttgaactttgctaattgaagctgcaaaaggaacttcgatagatcagcattacgaggcacaacaacaagttgttgtaattgaagcgggtcaagacatagcatttgcaaagatttagttcattctgatcactctgcaatatttcggaatgatcagatgctcgacaaaggcatggtggtgatgggagctcctcaaggccaacaaaatggtttcaa

SEQ ID NO: 5119 - DNA, 300 bp, Zea mays
  misc_feature: Incyte ID No: 700355824H1
  unsure 52, 80, 104: a, t, c, g, or other
tcatcaaggacctggtggtcgacatgaccaacttctacaaccagtacaaganccgtcgagccgtggctcaagcgcaaggncccgccgccgcagctaggcaaggnggtcccgcagaccaaggccgaccgcgccaagctcgacggcatgtacgagtgcatcctctgcgcctgctgctaccacctcctgcccatcctactggtggaaccccgaggagtacctcggcccagccgcgctgctccacgccaataggtggatacaggacagccgtgaccagttcaccaaggagcgcctggacgccat

SEQ ID NO: 5120 - DNA, 306 bp, Zea mays
  misc_feature: Incyte ID No: 700355826H1
  unsure 53, 110: a, t, c, g, or other
caccgatccaccccccctcggcctcggcctccctccggccatggaggtgttcnactacgtcgtgttcggcgcgctggccgccgtcgtggcggggctcgagctcggcaagngcggcaaggaccgcgtccgccaccaccttccgcattcaactccttcaagaacaactacgtcctcgtctactccctcatgatgtccggggactggctgcagggcccctacgtctactacctctacagccagtacggcttcgacaagggcgacatcggccgcctcttcatcgccggcttcggatcctccatgctcttc

SEQ ID NO: 5121 - DNA, 102 bp, Zea mays
  misc_feature: Incyte ID No: 700355829H1
  unsure 52: a, t, c, g, or other
cgaattcgatggcggccaacttcgggaacaagatccgcaacgccaagctggntcttcttggagatgtaggcgctgggcaaatctagcttggttcttcggttt

SEQ ID NO: 5122 - DNA, 300 bp, Zea mays
  misc_feature: Incyte ID No: 700355830H1
  unsure 6, 11: a, t, c, g, or other
cggcanaaggnggacgccaacaggcgcctcgagtgggccaccttgaacctggagcgcggcgtacgtcgtgagcgagacgacgaagggcgacggcaatggcaatgcaggccggaaggcgccgataagcatcgtccggctcttcttggcctgcatggtctccggcggcatccagtacggctgggcgctgcagctctccctcctctcgccctactctcagactcttgggatctcgcacagctacgtgtctctgacatggatctgcgggcctatcgccggatttgtggtgcaaccatcgtgggc

SEQ ID NO: 5123 - DNA, 307 bp, Zea mays
  misc_feature: Incyte ID No: 700355831H1
  unsure 30, 50, 161, 253, 273, 306: a, t, c, g, or other
gttcccaacttaagtaacaccatgaaacangtcatatagatgtgacactnagtcttgtcacatcaagttgtggagtctcaatttatggtctcttggacacacattttcctaacctgttagtcatattacagatggtctggcgctaagtcacacagcatcanaccatcagtagggtactactatttatcaggttctgcaagtttgagttacccctccctaatcacacttattaatgaaaggggttgcatttagncccgaccagttgcctccaancgcacaagtgcatgattagacacatatatttgnt

SEQ ID NO: 5124 - DNA, 300 bp, Zea mays
  misc_feature: Incyte ID No: 700355835H1
  unsure 42, 120: a, t, c, g, or other
atggcattctcaggcagaacctgctggtgttttaggcctcgnagcctcaaggatggagaggatgcgcacatatgctgagcagaccaagcagctggaagattactacaagaagcagaggancattgtggaactgaagacatctgctcgcccggtggagacatggcaggggctcgtagccgccctgcacctccagcatctggactcgcccccgacaccgcacaaactcaccgcgtaaatatcattattaattttgctactccgagtagagagtctaaaggtcagaatccgatctgcctgcag

SEQ ID NO: 5125 - DNA, 300 bp, Zea mays
  misc_feature: Incyte ID No: 700355839H1
  unsure 30, 72, 99, 120-121, 123, 143, 155-156, 254, 274-276: a, t, c, g, or other
gcttctcgttggatcgaacagctagggttncccaagatgttcgggcgcgcgccgaagaagagcgacaacacnccggtactacgagatcctcggggtctnccaaggacgcgtcccaggatnncntcaagaaagcctaccgcaangccgccatcaannaccaccccgacaagggcggcgatcccgagaagttcaaggagctagctcaggcttatgaggtcctcagtgatcctgaaaagacgggagatttatgatcnatatggtgaggatgccctcnnngaaggaatgggaggtggtggaggg

SEQ ID NO: 5126 - DNA, 299 bp, Zea mays
  misc_feature: Incyte ID No: 700355840H1
  unsure 118: a, t, c, g, or other
agcggcccattcgacctccctcgacccaccccctcgtctcgtctcgtctcgtctcgtccacctccccagcggcgcgtgcgcgtgaagcttgaggcaatccccgctccgtctagcggcnctgcgcaatcagtcagggttccatggccaacagcaacctcccgcgccgaatcatcaaggagacgcagcggctcctcagcgaaccagcgccggggattagcgcgtcgccgtcggaagagaacatgcggtacttcaatgtcatgatccttggccccgcacagtcaccctatgaaggtggagtt

SEQ ID NO: 5127 - DNA, 304 bp, Zea mays
  misc_feature: Incyte ID No: 700355841H1
  unsure 24, 27, 43, 58, 61, 64-66, 80, 92, 104, 124, 293: a, t, c, g, or other
ctaaacatccgatccgaccatggnggnacacgcacttcggggncttctccccggcgtntantannngctgatggtaatcnccgtcacaagcnccgcctccagcnacgcatcctcggtggtcgtncggcctcgccaaatgcgccgactgcaccaggaagaacttgaaagccgaggcggcattcaagggtcttgaggtggcgatcaagtgcaagaacagcaaaggcgagtacgagagcaaggccatgggcaagcttgatggcttcggcgccttcagcatcccacttagcacggantccacggcgct

SEQ ID NO: 5128 - DNA, 300 bp, Zea mays
  misc_feature: Incyte ID No: 700355842H1
agatctttcccccgtcctccctcgccttcgccttcgccggcaggagatttccaccaccaccgccgaaccgccccgaccctcctcccctctcgcgctatggcccagactgttgtgctcaaggttggcatgtcctgtgagggctgtgttggagctgtcaagcgggtcctcggcaagatggaaggcgtcgagtcctacgacgtagacatcatggaacagaaggtcaccgtgaagggcaatgtgacacctgacgccgtcctgcaaactgtttccaagactggcaagaagacttcgttctgggag

SEQ ID NO: 5129 - DNA, 300 bp, Zea mays
  misc_feature: Incyte ID No: 700355843H1
  unsure 10, 86, 243: a, t, c, g, or other
gtttgtcgantcgactggcattgctgaacgaggcaaatgcgccttcatctcctcaacgccgcacacatgtttggtttcgccactgntttggagtaagcgtgattgtgttatgtaaagtggattcagatccaatccaatgcgcgcaacattccatgccactgcccacaggaatccaattgtaagtttcgtcatactaattttacgaagcccgttaatcgcgataccagcaatccaaaaagctcnccaaccccacccttcttcttcctccgccatcgttgcctccgttcaaaagatttcaga

SEQ ID NO: 5130 - DNA, 299 bp, Zea mays
  misc_feature: Incyte ID No: 700355844H1
  unsure 150: a, t, c, g, or other
cggcaagctcatggccgagcggcatatcaccgtggaggcggtcttccaagccaccatgatcctggtcaccaccgggcgcgtgatagcggatgcgtgtagcatgacgacggacatcgccaaaggcgctgaggccgtctcgtcggtgttcgnaatcctcgaccgccagacgaagatcgacccggacagccctgaggggtacaagccggagaagctcatcggagaggtggaagctgtaggggttgatttcgcgtacccatccaggccagacgtgatcatcttcagaggattctccttgagca

SEQ ID NO: 5131 - DNA, 306 bp, Zea mays
  misc_feature: Incyte ID No: 700355845H1
  unsure 110, 155, 200: a, t, c, g, or other
gaacgaacacgcgagtagagaatttctcctgcctgctcacgaccgccctctacgccggtcgccggttcgccgcttcgcaacgcaagtcggaagaggaatctctccaagcnccaatcctccgatcctgccccaacccaagtcccctccaccaggangcacacctccgccgcccggcgcgaccttgcatccaccagcctgcnctctccttcgcgtgaggcggccccggcgaccgcgtcggcagtgcaagaccagaccgaggcttctcccgttggaaggttccagccatggcgagcgccgatctgctgc

SEQ ID NO: 5132 - DNA, 306 bp, Zea mays
  misc_feature: Incyte ID No: 700355848H1
  unsure 14-15, 42: a, t, c, g, or other
caagtttgccaggnnagacaggagacatccaaacgctttcanatgttgatataaagattattgctttggcttacatgttagaagctgagatccatgggactagccatttgcgagagcaccctcctcctctgcatgaggtgaatgtcagaaagctgtcagaagctcaaatgcctggttggggctctaatgtgcctaacctgaaagagtgggaagagttggatcagatgtctgaagctggtggcgatatcaattctcgaatacttcctctgaaggatattgagagtcaagatatcctgatgtgtgata

SEQ ID NO: 5133 - DNA, 236 bp, Zea mays
  misc_feature: Incyte ID No: 700355849H1
  unsure 31, 43, 48, 55-56, 59, 67, 76, 80, 85, 92, 94, 97, 100, 102, 109, 114,: a, t, c, g, or other
cgcatcgcacgagctacggatctgcggcccnacgactacgacnacggngatgtannggncgaatcantgcaagcancgangtcanaactaangnggncgntncatcctncagcntccgatcctatncgatgacatggtctaattcgcntgcctggtgcagctccntntgatcnggtggtnaacgtccaccttanntaatcganctcatcatcatcaaggtgtatccgctatnttna

SEQ ID NO: 5134 - DNA, 293 bp, Zea mays
  misc_feature: Incyte ID No: 700355854H1
aacaaaggcaaccttctacaactgcacaattgaaggtggacaaggcgccctgtatgaccagatggggctgcactacttcaagttcctgcaccatcaggggcaccatcgacttcatctttggctctgccaagtccttttacgaggactgcgccattgtttccgtgaacaacatggaggagatcatgaccttgcctgtggcaccacctcaacttgacattcacgacaatccaatcaaggttgccccagggaagggaggcttctccttcaagacatgtaccatcaccggggaaggg

SEQ ID NO: 5135 - DNA, 292 bp, Zea mays
  misc_feature: Incyte ID No: 700355855H1
  unsure 27: a, t, c, g, or other
gcgcgaggagaaggagcggcggcgcangagcgcgaggcgcgggtgatcccggacacggacgccggcctcgtcgagttcttcctcgacaccgacgcgcgcgagatcgagatcgagatcggcaggctgcggcccaggctcagccaggacttcttcggccacgtctcgcgcgagatagcgcagatcaaatttgcagtcaccaggacagcggagatggaagacagactgatcgagctggaggcgatgcagaaggttcttctcgagggagttgaggcgtacgacaattgcagaacga

SEQ ID NO: 5136 - DNA, 293 bp, Zea mays
  misc_feature: Incyte ID No: 700355856H1
ggaaaccctagccgccatatctcacgatccactcgagcaccaagccgagggaaggtgaggagcgatggcgcgcggcgtggtgtcggcgaagggcggcgcggtcgcgggcaagaagaaggggtcggtttccttcacgatcgactgcaccaagccagtggaggacaagatcatggaggtcgcctcgctcgagaagttcctgcaggagcgcatcaaggtcgccggcggcaaggctggcaacctcggcgactccgtcaccatctctcgcgagaagaccaaggtcaccgtcactctga

SEQ ID NO: 5137 - DNA, 297 bp, Zea mays
  misc_feature: Incyte ID No: 700355860H1
ctagaaataaagcagctcctccgcggggcggcgaactgctactcatcgccaaaaccctagccccgatccggtcgaggagcactacttcttggcatggcgggcacccctagccaggcaagcctcctgctccagaagcagctcaaggatcttgcgaagaaccccgtggatgggttctccgcaggcttgtagacgatagcaacgtcttcgagtggcaggtcaccatcatcggcccgcccgacaccctatatgatggaggctacttcaatgcaataatgacccttccccagaactatccca

SEQ ID NO: 5138 - DNA, 298 bp, Zea mays
  misc_feature: Incyte ID No: 700355861H1
gccgcggagaaggatgagcagcagcagtcccgagggatagcactgatgcagggcatctgcgccgtggtgtaccgcaaggccgataacacgccctgccccatcaagcagggtctctacttgggatctgttggagcagcattcaataaggacgctctcaagagtttgaacatcacccatatcttgatcgttgcaaagtcactggatccagtatttccagctgaatttaattacaagaagatcgaagatgaagctataagctctggaggcaatgttttggtccatgctttgctgggcggtc

SEQ ID NO: 5139 - DNA, 205 bp, Zea mays
  misc_feature: Incyte ID No: 700355863H1
  unsure 90, 169: a, t, c, g, or other
ccatcctttagttgccaatttaaaggaatagtagaagtaataccgatttgatggcccaaaacaagcagatcattgttgtggtggctctcntttttcttgtggtggcaacatcatcatcagtgtgggttgcagaaggagccgatgacttaaaagttgcttgcgttaaggngtgcacccaaaattttaacactcccgagggaaagaa

SEQ ID NO: 5140 - DNA, 299 bp, Zea mays
  misc_feature: Incyte ID No: 700355866H1
  unsure 2, 24, 26, 28: a, t, c, g, or other
ancgcccctaaaagaggagcgaangntngtctatgtcgaagacgggtcaggccgcggagaaggatgagcagcagcagtcccgagggatagcactgatgcagggcatctgcgccgtggtgtaccgcaaggccgataacacgccctgccccatcaagcagggtctctacttgggatctgttggagcagcattcaataaggacgctctcaagagtttgaacatcacccatatcttgatcgttgcaaagtcactggatccagtatttccagctgaatttattacaagaagatcgaagtacttg

SEQ ID NO: 5141 - DNA, 298 bp, Zea mays
  misc_feature: Incyte ID No: 700355870H1
tgatgatgtcactaagacaagcccggaatgatgctcgccatttgatgctgtcatttctttgggccggtctttgtattggcatctcacattttgtcagagccaacggccgcacgttcactaaccgacctaggtttcacaagtcacgccattgatggatgcaagatgaccgtttgctcgtcaagcgacgtcatagattgtcatcattcatcgaactgttgacacaaattggtttgcatgaagtgttgcatttttttggcaggtacttgcccttgtaataagttttctccattcgtaacta

SEQ ID NO: 5142 - DNA, 304 bp, Zea mays
  misc_feature: Incyte ID No: 700355871H1
agctcaggcaacatagtttttggtggcagcgggaattctgtagggcaaacgaaaagcaaccaaatgagctggtcaaacacgtctaatctaatgggcacgaactcaactgacagctatttgaatcagagcattgcagctctaggtttcggaaatccaaatggaggattgagcacaggtctctccaatccaagtagttccagtacaggcctgagcatgatgcaaccaaaatctgattctggatcactgtcgacgtcggtcaacaatgccgcacatgggctgctaagacttgcccctcctccatcca

SEQ ID NO: 5143 - DNA, 300 bp, Zea mays
  misc_feature: Incyte ID No: 700355872H1
  unsure 96: a, t, c, g, or other
ataagaggtaggccggcacaactggtttgccaggtcctctaacttcctgatgagctgaaaaccacttgctttgtgcagagtgtctaaaatgtctanaatgaaaaaccctcggacttttgaggagcaaacagaatgcatcatgaatactctactcacagacttcttgaccccaacattccaggctgctaacaggaaccttcctgatgcagacgaaccatgttcaggagaggatactcttttgatgtggctatcgttgctggccgacttcgaatgctgggtgacaagttcaacggagagctg

SEQ ID NO: 5144 - DNA, 165 bp, Zea mays
  misc_feature: Incyte ID No: 700355875H1
  unsure 28, 102, 106, 110-111, 113, 116-117, 119-120, 123, 130, 138, 144, 150,: a, t, c, g, or other
gtgacatatatatgcctgaccaattgtnattatttgctattcatatatgttactgggtgtatttaatagctctcaatttatgcagttatgtttgcagttganaaanaaannanaannannaanaaaaaanaaaaaaanaaaaanaaaaanancnccaaaacaaaa

SEQ ID NO: 5145 - DNA, 294 bp, Zea mays
  misc_feature: Incyte ID No: 700355876H1
gtacgtgttctgctgctcctacgcccacaacgtcgcgcccaaaggcaagttcatcgccttcgtctccaccgaggccgagaccgacaagcctgagatcgagctcaagcccgggatcgacctgcttggccctgtagaggagaccttcttcgacatctacgacagatatgaacccgtcaacaaccctgacgacgactgctgtttcctcacaaatagctatgactccaccacccattttgagacgacggtcaaggatgtgctcgccttgtacaacaagatcacgggaaaggagcttga

SEQ ID NO: 5146 - DNA, 293 bp, Zea mays
  misc_feature: Incyte ID No: 700355877H1
  unsure 120, 205: a, t, c, g, or other
tggagggcgcactcagccaggcactgtaaaacctgaagaaggagaccgccacccttattcggtgttagattgtgcgtcacagcgtgaagcaattttgcctttcgtactctatatccaganaacattgcgcaggaggccttttttaataaagaatcttgaaaatgttatgcgtaaattcctgcaatccttggagttctttgagganaatgagaggaagaaactcgccatattcacagccctgcattttctcagaagctatcagggcttcctcctgagactgtgttccagccatg

SEQ ID NO: 5147 - DNA, 295 bp, Zea mays
  misc_feature: Incyte ID No: 700355878H1
  unsure 10, 13-14, 38, 41, 54, 69, 83, 88, 95, 104, 162, 175, 201, 207, 244,: a, t, c, g, or other
gtcatcaccnaanncgtcatcccggcgaactggagacncgntgccgtctacacntccaacgtccacttnctactagactttgnattcncttcgantcatccggnacagcgggctatggaccttcagcagcaagctaattaagttgggaggatgcagcgctanccttatatactantgagactccaaattctagtagatgtngtcctnttgttcgggttcatgatcgaattccaaagcgtggaanacaancannaggntatatatacatgccattttggaggcanttttttncnaa

SEQ ID NO: 5148 - DNA, 290 bp, Zea mays
  misc_feature: Incyte ID No: 700355879H1
  unsure 268: a, t, c, g, or other
gcaagaggcggacacagcttcaggaagaatgggactcatgggttgccaagtggaagcagatgcatgaggaggagcgtgcttacaggagggagctcagggatggggaggccagcgacgacgaggaagagtatgaggccaaggaagttgaggtggaggaagtcgttgatgtccgtcaagaagttctgcattcgacctagatcaggagtgaaaacacttattatagaatctgttgattcttcctgttggtgttaaagttcatggggtcgcntgcataataggcctagtgatca

SEQ ID NO: 5149 - DNA, 118 bp, Zea mays
  misc_feature: Incyte ID No: 700355882H1
  unsure 21-23, 29-30, 79-81, 87, 106, 109-110, 112, 114: a, t, c, g, or other
ccatttttgatgacttctaannntattannatgttgtaagaggaagaagaaagtgttaaaaaggaacgtcaaggtcgtnnntaatanaaggcagttccacacaacntannangntttg

SEQ ID NO: 5150 - DNA, 305 bp, Zea mays
  misc_feature: Incyte ID No: 700355884H1
gcttaattgccattgtgtctgggctattcgcgaaccttcttgctgagaacttgggttttggtcccgtggctccatttgatgccgctgcatgctttctggcgattggcatggctgtcataatgtcctcatggagtgagaactatggagacccatctgatagtaaggacctgatggcccagttcaaggttgcagctaaggcaattgcttcagatgaaaagattgcattactgggagccatacagtcatgtttgagggctcgatgtacacatttgtcttcctatggactccagcgttgagcccaaatg

SEQ ID NO: 5151 - DNA, 308 bp, Zea mays
  misc_feature: Incyte ID No: 700355885H1
gaccatccattccacaagaagcaggacactggcgggcctgcggcggcattgccggaccactcattccacaagacgaagcagggcgctgtctggccggcggcgttgcccgaccacccattccacgagaagcacgacgctgtctggccagcggcgttgcccgaccacccgttccacaagaagcaagatgttgtctgggcagtctggccggcagcgttgcccgaccatccattccacaagaagcaggacatggcgggcctacggcagcattgccggaccactcattccacaagacgaagcagggcgctgtc

SEQ ID NO: 5152 - DNA, 209 bp, Zea mays
  misc_feature: Incyte ID No: 700355886H1
  unsure 4, 6, 21, 33, 39-40, 56, 60, 63, 67, 92, 95, 105, 124, 133, 141, 144,: a, t, c, g, or other
gtgngnttgaggaagggagtnaattggatgtangagaannaggtttaggttaagtngatnttnatgnaagttggtgaaatagttgttaatgntangatagtaggntagttgtttaagagtaatnaagtgatgnaagttgtnaanagaatantggnggananaggaggttgnaganaaaatgnaggaatttagtaaagagatgagaaagg

SEQ ID NO: 5153 - DNA, 306 bp, Zea mays
  misc_feature: Incyte ID No: 700355887H1
  unsure 6, 14, 102, 274: a, t, c, g, or other
gacttnttccaggntggactaagcccatctgcattggaaggcatgccttcggtgatcaataccgagctaccgatgcagttctgaaggggcctgggaagctgnagctagtttttgagggaaaagaagaacagattgatctggaggtattcaacttcactggtgctggaggagttgccttgtctatgtacaacaccgacgagtcaatccgagcttttgctgaggcttctatgacaactgcttatgagaagaaatggccactctaccttagcaccanaaacacaatcctgaaaaaatatgatggcaggt

SEQ ID NO: 5154 - DNA, 300 bp, Zea mays
  misc_feature: Incyte ID No: 700355888H1
  unsure 20, 38, 63, 65, 68, 70, 73, 75, 89, 140, 175, 209: a, t, c, g, or other
gggaaaccctagccgccatntctcacgatccactcgancaccaagccgagggaaggtgaggancnatngngcncngcgtggtgtcggcnaagggcggcgcggtcgcgggcaagaagaaggggtcggtttccttcacgatncgactgcaccaagccagtggaggacaagatcatgngaggtcgcctcgctcgagaagttcctgcaggagncgcatcaaggtcgccggcggcaaggctggccaacctgcggcgactccgtcaccatcttctcgcgagaagaccaaggtcaccgtcacctctg

SEQ ID NO: 5155 - DNA, 295 bp, Zea mays
  misc_feature: Incyte ID No: 700355889H1
  unsure 12: a, t, c, g, or other
gaattccctgcnattcctctcccctcgcctcctcgtctccccctaggggatcgtcggagaggaatcgcaaagagggccgtctcatccgagttaaggaagccatggagcacaaggaggctgggtgccaggcccccgagggacccatcctctgcatcaataactgtggcttcttcggcagcgcggcgaccatgaacatgtgctccaagtgccacaaggagatgataacgaagcaggatcaggccaagctggctgcctcctctatcgacagcatcgtgaacggcagcgacgccgtcat

SEQ ID NO: 5156 - DNA, 137 bp, Zea mays
  misc_feature: Incyte ID No: 700355892H1
  unsure 10, 17, 30, 43, 53, 56, 64, 69, 72, 74, 93, 120, 131, 136: a, t, c, g, or other
ggcagcaatnctggttnattccccatggcnaccggggccgaantggtgcccantcntgcaaccnttccngcnanacccaggccgtgggcagcnaccctccgagacacctgggccgggggnagggtctcagnaaaanc

SEQ ID NO: 5157 - DNA, 294 bp, Zea mays
  misc_feature: Incyte ID No: 700355893H1
  unsure 108: a, t, c, g, or other
ggagagaggagaggcgcagagcatcgacgatggcgagcggcagcatgaagagggagatcagcgagacccacgacaccctccgcttcggcctcaatgccggcgtcaagnccgacctcgcgccgccgcacccgctccagtccagcatccaatcggaggccaagttctgggcggacaagaagaagtttgggacagaggccatctacggatccgccttgaacatccgcaaggatctcgatgcccaaatcctctcaaggttccaaaggccccctggtgctttgccatcatctctgcttg

SEQ ID NO: 5158 - DNA, 294 bp, Zea mays
  misc_feature: Incyte ID No: 700355895H1
  unsure 51: a, t, c, g, or other
aagaaatttgccgcttgatgtgtggatccgccgtggctgccgtcaggatangacaccaagaaccggacctcggtggtggatcatcggggtcgcggaggtctactggatggggtctagaagtatccgggcaagtcgtctctgggaaccctgcttattgctcgccgatatgttttcaggcgtcgcgatgcagctgtgtgccgtggctgggtctcattgccgtcttcaatcgaggtgaggccacgaggatctgaagaatcaccctggtaactggaatctcaagtgccaggtgtgaca

SEQ ID NO: 5159 - DNA, 297 bp, Zea mays
  misc_feature: Incyte ID No: 700355901H1
  unsure 252, 267, 271, 287, 293: a, t, c, g, or other
acagatatgtgatcaagaacagtactactggggaaattattataaaacatctgaacaaagagcaggaagctgaccagagcaatttccgtgacccatctaccaatactgatctcgaagttcaggaaaaaatgtctctcctggaatggtttgccaatgaatacaagaagtttggttgctcgctggagtttgtgacaacaagtctcaggaggggtcccagtctgtagaggattggtggcatggtggcatgttgcncaaacagctggatanccgntctttgatgagcttcngatgangacg

SEQ ID NO: 5160 - DNA, 135 bp, Zea mays
  misc_feature: Incyte ID No: 700355903H1
  unsure 5, 22, 40, 43, 57-59, 64-65, 67, 74, 82, 91, 112, 128: a, t, c, g, or other
gatgncgtggctggaagagganggattgccggagggggangcnaagggcgattggannngaganngngcaggancccttcgncgtgcccanttctcggcgccttctatatcncacgatgaccggtttnaagagga

SEQ ID NO: 5161 - DNA, 293 bp, Zea mays
  misc_feature: Incyte ID No: 700355905H1
  unsure 200: a, t, c, g, or other
ggagacgagaggaggaggggaggtgcgccaccggaagcggaaacctcgggtgtcgtcgaccaacctcgtcgatccggttgcgacgcggtgtgctagaataactaccgaccatggtagaggaggagatcaccgagggcttgaagaacctcaccgtcaccggagacgcggcggcttcgggcggagaagggcagaggagggcncggcggcataagcagcaaccgcatccaggtgtccaacaccaagaagcccctcttcttctacgtaaacctcgccaagaggtatatgcagcagca

SEQ ID NO: 5162 - DNA, 291 bp, Zea mays
  misc_feature: Incyte ID No: 700355906H1
ctgacatacacgtctgcatacatggatatgatcaccgtcatcttcgtagcaatgctcttctctggggacttcgtatcagtctgctgtgcagttgggttcttcaccctatggactttgtgctgcctgcaatggcacttatcaagacaaacgatgactgataacctagggttgcagtgtgctgtgaagatgctccgctctgctgtcgcaatcttcttcttggtcataggtgcccttgcatgcatcggcgtcaaaacctgcaagttcttccatgatatgtgatgtgatgaactg

SEQ ID NO: 5163 - DNA, 292 bp, Zea mays
  misc_feature: Incyte ID No: 700355913H1
  unsure 64, 87: a, t, c, g, or other
ggcttctccttctagggattcatcttcctctcgtcttccctcttcctctccgaggatacaaggngccgtcccagctgtaggcttggngttgctgctcgattcgcgcctcctgtctagatccaggggcaatcccccttatcaattacaactgggactggtagaggtagggtcgccaccatgctggaggagctgctcatcttcacccggggcggcctcatcctgtggtcgtcctgccgggcgctcggcgcgcagccctcaagggctcccccatcgacgccctcatccgctcctg

SEQ ID NO: 5164 - DNA, 286 bp, Zea mays
  misc_feature: Incyte ID No: 700355918H1
  unsure 245, 254: a, t, c, g, or other
gttccttcaatttttaatcgaacaaaggcaacttgttttgcttatgggcaaactggcagtggaaagacatataccatgcgtccccttcctcttaaggctcccaagatatcttgaggttaatgcaccatgcatatcgaaatcaaggatttcaattgcatgttagcttcttgagatatatggtggcaattatttgacctctcaatgataggaggcaaatttgcatgagagaggatgcaaagcaaaangtttgtatngttggtttgcaagagtatagagtgtcgttgta

SEQ ID NO: 5165 - DNA, 292 bp, Zea mays
  misc_feature: Incyte ID No: 700355919H1
  unsure 49, 51, 205, 266: a, t, c, g, or other
gcagtttagcacctctatctagttcttctctcttcagcctcggatccangngagcaccatacccctgcaaataataaggttaccagcttgcaggcagccacaggcacggtacttcagagcaatacactattacttcctctgccaggattcaggcacagtattgtatttggaattattgaacagtgtatttctcgtacaattcgcntcataagttttttaagattcatcacagggcttcaactacaacttggctagagaaattttanaagaaggtatgtagctggtttgttta

SEQ ID NO: 5166 - DNA, 287 bp, Zea mays
  misc_feature: Incyte ID No: 700355920H1
  unsure 66, 82, 203, 258, 280: a, t, c, g, or other
caggaataggtgcctcaggaatataggtagtcggagaaaaaaacgcacacatagagagagagagangagaaggggaggggangcatcgaaactccgaatccctacctcgccgctcccaccaccatcgcggattgcgtcccgttcgattgcgcaggagtttctgttccaggatgagcaccgagtcaggggagctgctcgggatngaccccgtcgagctccggttcccatcgagttaaataagcagatctcctgcacgcngcagctgacgaacaagacaganaagcagt

SEQ ID NO: 5167 - DNA, 286 bp, Zea mays
  misc_feature: Incyte ID No: 700355921H1
ggaagctgacatggatttattccttgggaacctgcaacatcaatgctaagtttgatgctaaacctattgaacttattgttacaacatatcaggctgcattgctactactgtttaatggatctgacaggctagttattctgagattgtaacacaattaaacctgtcagatgatgatgtagtgcgtttgctccattctcttcttgtgcgaagtacaagatccttaacaaggaaccggctagtagatccatctctcccaatgatgtttttgagttcaattcaaagttta

SEQ ID NO: 5168 - DNA, 289 bp, Zea mays
  misc_feature: Incyte ID No: 700355922H1
  unsure 7, 10, 13, 21-22, 25, 29, 36, 39, 42, 63-64, 75-76, 80, 95, 130, 134,: a, t, c, g, or other
ggagcgncgnggnatgtaccnnacnacanaggagcnganccntcatccagataacttatacanncccaagaaagnncagnccagatggaaggtgntcagggaaaggagggctgccttttccccttgtccntatntagcgatgccgccgggcattnaacacccacntgganttnaacagaanggtccggggcgancnagacatgggacggtcacccagcagtgcngggntgggcnctgnggtgcggtccacgggagagcaggcctccagctggaaaggccaggcctggag

SEQ ID NO: 5169 - DNA, 288 bp, Zea mays
  misc_feature: Incyte ID No: 700355923H1
  unsure 144: a, t, c, g, or other
ctgaaagtatggcggcgtcgaaggtgaagcaggacatgcccccaccagggggctacggccccattcgactacaagcggaacctgccccgccggggactgtcgggatacagcatgtttgctttgggcatcggggccttgatcttnggctactggagaataatgaggtggaaccgggagcgtaggcgcctgctgatcgaggattggaggccaggatcgccctcatgccactcctccaggcagagaaggaccgcaggaccctgcagattcttcgggagaacctggaggagg

SEQ ID NO: 5170 - DNA, 286 bp, Zea mays
  misc_feature: Incyte ID No: 700355924H1
gtagatccacggttcgatgtgattgcgaggcagtaccacgagattgtaaagaaactggagggcatgcagtggacaattcaccaggtggagatggacctgaaacctcaccatgaccacgcagctgtttaagtccacatctgttggaggccatgtttattacctgaatgcagcgggtgcgagttaggggggttgcagtggatttgatttgagtcagagggtttctgtttgtgcatgtttttttttgtgtatatccatgttggataatagcaccatcaatgcttgctta

SEQ ID NO: 5171 - DNA, 290 bp, Zea mays
  misc_feature: Incyte ID No: 700355925H1
  unsure 286: a, t, c, g, or other
tccgtcaacaaaacaagtgcacacaaataaatacctggctcgctagattgccaagagcaatggcctttaggtcatccatcctgcttcgccatggtggcgctggctacgctattcgcggtcggttcatgcaccaccccgctcaccttccaggtcggcaagggctccaagcctggccacttggtcctcacccccaacgttgccaccatctctgacgtggagatcaaggagcacggtggtgacgacttctcctttacgctcaaggagggtccgactggcacttggacgntgac

SEQ ID NO: 5172 - DNA, 287 bp, Zea mays
  misc_feature: Incyte ID No: 700355931H1
ctttctaaaagaggggaaacaggcatcctgtggcaacatctgcatcacatttctggtgtcaatggcagtttgctggccctgtatcaatggagcgcttatctgaagcttagcaggcataggctcaaagaaagtctagtccaccatgacttcttctcgatggaaggtaatgagggtggtgtggatgaaaaaccattgttcgatggctgtcaactgtggcattgcttcgtgatgataattctgagccacattgagaaacaaaggtattactcaagctgtttcatctcatc

SEQ ID NO: 5173 - DNA, 284 bp, Zea mays
  misc_feature: Incyte ID No: 700355936H1
  unsure 77, 97, 116, 244, 251-252, 254, 258, 278: a, t, c, g, or other
aggtcatgcgggaggaggaattcgcgccggtaaagaacgccagcggcgcaacgtatgacacccctgatagcgcgaantacatgctgctccgcctccncagcagatgggtagtcgcngctggcggcttcttgacgcactctgtgcccttgtatatgacaggcgtcgaagtttctccgctctcctcctacgccggggagaactggaagccatctgccgtgggcgaacgttccatgcgccgtgcgantctcgtnncncgangtagacctgttcatgggatngagtag

SEQ ID NO: 5174 - DNA, 285 bp, Zea mays
  misc_feature: Incyte ID No: 700355937H1
attctgtatgaggacaactttgagtgacaatgccataacaaatgccatagatatacacagatcgataagtggaagcctgcacattacagtatctaacaacgattgtggtgttcgtgaatatgatatggagagatatcagctcgtgaaccactaccgatataactggccggttaatcacacatccgtgagcccagataagaaacttttggctgtggttggagatgatcgagatgctcttcttgtggattcacgaaatggaaaggtaacctctaccctagttggcca

SEQ ID NO: 5175 - DNA, 286 bp, Zea mays
  misc_feature: Incyte ID No: 700355938H1
  unsure 19, 40, 42, 69, 152, 160, 163, 168, 195, 284-285: a, t, c, g, or other
attcctccctgtctccgcnctcttctgactcccgtaggcngnggtgccgccgccgactgctgggactgnccaacaccaagtgcccaggtcatcttcgggccattcgccggcgacgagcaccaccaggtgtgcaaggttgaccgagatatggncagcctgnggnatctnggggacgagctccgcgggcagcccaangtggtgaaggaccgccagtggtctctcatgacgtccaagctggcggagatcaccaggtccaagggcgagaggatgaacaccgtccctgnng

SEQ ID NO: 5176 - DNA, 285 bp, Zea mays
  misc_feature: Incyte ID No: 700355939H1
  unsure 150, 252: a, t, c, g, or other
ccccaactcgtccagagttagttgtagctatagacctggttgttgtagcgcacgcagtagccataggaaatacggctgcttgctgccaagatgagtggcggcgccaaggcctacgccgccgtcgtcctgatcaggatcatgtactccggnatgcacgtcatgagcaaggtggccctggatcagggcatgaacccgctggtgttcctgttctaccggcataccactgccgcgctcgttctcatccctgtcacnttgttgtcgagaggcggaaagctaagccggtta

SEQ ID NO: 5177 - DNA, 91 bp, Zea mays
  misc_feature: Incyte ID No: 700355943H1
  unsure 63, 79-81, 84-86, 89-90: a, t, c, g, or other
ggggcgccttcgtgctggtcctgtacgacgagctcaagaaggtgatctaagggccgcggcctncttccacacaacatannngcnnnccnnc

SEQ ID NO: 5178 - DNA, 286 bp, Zea mays
  misc_feature: Incyte ID No: 700355944H1
  unsure 149-170, 269: a, t, c, g, or other
cgacgtggtcaaaatatcgaccaccgaggcagccgtcgacaaggggaataatggcggtgacgaacctgacggtacaccatacatggcggcgatcgaggagaacgacgacgaggctgcgtcgtcgaccgaggacgtcggcgacgccttcnnnnnnnnnnnnnnnnnnnnnntagacgacggcagcgtcacgttcccggtctccatggtggcagaggaggacggcagcgtcaccttcaaggtacgagtcaatgacgccgaggccaaggacnccgacgggagcgttaat

SEQ ID NO: 5179 - DNA, 286 bp, Zea mays
  misc_feature: Incyte ID No: 700355947H1
  unsure 2: a, t, c, g, or other
gnaacaagcgcccacgaacaactacctcgccaccaacaatggcctccaggtcctccattgtactcgccacggtgatgttggctgcgctgttcgcggttggtttctgcaccaccccgctcaccttccaggtcggcaagggatccaagcctggccacctgatcctcacccccaacgttgccaccatatccgatgtggagatcaaagagcacggtggtgatgacttctcctttacgctcaaggagggcccgactggcacgtggacgctcgacaccaaggccccactcaa

SEQ ID NO: 5180 - DNA, 285 bp, Zea mays
  misc_feature: Incyte ID No: 700355948H1
  unsure 39, 81, 97, 108, 119, 138, 141: a, t, c, g, or other
cacaggaaacacatgagggagttactgaagatggcattnaagatgcctttgaggttcttggtgagattcaggaaattgtgnaaacagggctttgggnaggcgattgcntcatttacacnagttctgtgaacagattanatnattatgttggaggagaaatagtcaccattgcccacttggacaggacgacgtatctcctaggctacattcctaaagacaacaggcttatctgggggataaagaattgaacatcattagctattccctgctggtatcagtcctgga

SEQ ID NO: 5181 - DNA, 290 bp, Zea mays
  misc_feature: Incyte ID No: 700355950H1
aatttgttgaagacctacgaggtcatggtaaagaagttccagtcccagatccagactagagacactgagataacccatttacagcagcaaattgatgaagctaaacttcggaaatcaaagctagagaagaaactgaaacagaggggcctacttaacagggagtcagaggaatctgacgaagaagagaactacttttccattgaattgacgccaagtttgtttacatctgctgtccgataatggcataccagtccatacatgaatttcaaagcctttgatcaacatgatga

SEQ ID NO: 5182 - DNA, 284 bp, Zea mays
  misc_feature: Incyte ID No: 700355954H1
  unsure 17, 21, 28, 31, 33, 84, 101, 135, 164, 219, 275: a, t, c, g, or other
ctgcggcgcatcgaganacanggctgcngcngntgcttcttccacctctccggccatccggcggtccatcgttccgtgccggcngcctcccctcctacgcncctgccgattcttcaatcttcaccaacgtctgcncgtagagggctagcagtcggcacggcttnctcagatctgccggacgacttgctgttcgtcaccgactcaccagcaaccaacgtnagccatcagccggcagcaggggaagctgggcggagggtcattgcggcacggcgtcnaggcgtaca

SEQ ID NO: 5183 - DNA, 284 bp, Zea mays
  misc_feature: Incyte ID No: 700355955H1
  unsure 50, 56, 96, 120, 168, 222, 229, 244: a, t, c, g, or other
attttaataatcaacaccctcctagccttactactaataattattacatnttgacnaccacaactcaacggctacatagaaaaatccaccccttangagtgcggcttcgaccctatatcncccgcctgcgtccctttctccataaaattctcttagtagctattaccntctattatttgatctagaaattggccctcgttttacccctaccatgagccctanaaacaantaacctgccactagnagttatgtcatccctcttattaatcatcatcctagcccta

SEQ ID NO: 5184 - DNA, 276 bp, Zea mays
  misc_feature: Incyte ID No: 700355956H1
  unsure 52, 67: a, t, c, g, or other
gttcggcggagacggcctggtgttcctgcagaagatcaacttctacccgccntgcccgcagccgganctcacgctcggcgtcgcgccgcacaccgacatgagcacgctcaccgtcctcgtgcccaacgaggtgcaggggctccaggtcttcaaagatggtcaatggtacgaggccaagtacgtgcccgacgcactcatcgtccatatcggcgatcagatcgagattttcagcaacggggcatacaaggcggtgctgcaccgtacgacggtgaacaa

SEQ ID NO: 5185 - DNA, 283 bp, Zea mays
  misc_feature: Incyte ID No: 700355961H1
  unsure 9, 133-155: a, t, c, g, or other
gtgctcggntcgcccacggcactggacatccttcctccgcacaaagtacccgaaaaacgccccttaaacacaaataaaaggtaatttaacacgagaacggtcacccatttttactatggtttggtgttcgaannnnnnnnnnnnnnnnnnnnnnnaaaaaaggaatgcaacacgaggattcccaggaggtcacccatcctagtactactatcgcccaagcacgcttaacttcggagttctgatgggatccggtgctttagtgctggtatgatcgcatccgtca

SEQ ID NO: 5186 - DNA, 288 bp, Zea mays
  misc_feature: Incyte ID No: 700355963H1
  unsure 12-13, 56: a, t, c, g, or other
gaaattccctgnnattcctctcccctcgcctcctacgtctccccctaggggatcgnccggagaggaatcgcaaagagggccgtctcatccgagttaaggaagccatggagcacaaggaggctgggtgccaggcccccgagggacccatcctctgcatcaataactgtggcttcttcggcagcgcggcgaccatgaacatgtgctccaagtgccacaaggagatgataacgaagcaggatcaggccaagctggctgcctcctctatcgacagcatcgtgaacggcagcg

SEQ ID NO: 5187 - DNA, 283 bp, Zea mays
  misc_feature: Incyte ID No: 700355964H1
  unsure 88, 110: a, t, c, g, or other
atgggagaagggtcagacctcagataagtacctaacttgctatttcctatttttttatcacttttattgatgcccaattgcatctaancgcgttgtccacttctattgcngcagtgcttgaggattcagtgatcagcagatctgcaaggacaaaaggaccaaaggagtgagctggtttttatattttaactgatgcacctggatgcttattgagcggtgtctatgaaatgagttggatggaagattgtcgtgttttggacaatgccaacctttgtttccgctg

SEQ ID NO: 5188 - DNA, 282 bp, Zea mays
  misc_feature: Incyte ID No: 700355966H1
  unsure 60, 62, 64, 91, 102: a, t, c, g, or other
cccgttcacagttcaccccacttgctctctttctccccagtagcaacgaccgcgcgtccncngncgccgcactaaaccctactccatgtanccaggtctgcntcgggcccttgccggcgatgagaacccgtcagttccaaagatggctcgtcgtggattgatggaacaggacttaagcaaactggatgtgacgaagcttcaccccctgtcacctgaagttatctcacgccaagcaacaatcaatatgggtacattggccagtggctcatggaagtccatgtt

SEQ ID NO: 5189 - DNA, 278 bp, Zea mays
  misc_feature: Incyte ID No: 700355969H1
  unsure 9, 84, 151, 265: a, t, c, g, or other
acatcctantttcgtcctcacgagtgaccgataatccgccggcgctaagatgttggtttatcaagatctcctatctggcgacgngctcctgtcggattcattcacctacaaggagctcgagaacggcgtcctgtgggaggtcgagggaaantgggtcacccaaggtcctgttgatgtagacattggtgccaatccatccgccgagggtggtgaggacgaaagcgttgatgacacagccgtgaaggtggttgatattgttgacacntccgtctacagga

SEQ ID NO: 5190 - DNA, 283 bp, Zea mays
  misc_feature: Incyte ID No: 700355971H1
  unsure 27, 63, 72-74, 77, 92, 97, 107, 118, 120, 126, 128, 130, 132-133, 135,: a, t, c, g, or other
gagcacgccgcacgagccctttccgcngccgccaaaatggtgaacgttcctaagaccaagaanacctactgnnngancaaggagtgcaagangggcnctactcgacnaggttactcantncaagancngnanngntagcctgtctgcccanggaaagcgccgttntgaccgcaagcagtcangtntatggtggnccagaccaagcctgncttccanaagaaggccaagancaccannaaaatcgtattgaagctgcatgccagagctgcaagcactatcacag

SEQ ID NO: 5191 - DNA, 277 bp, Zea mays
  misc_feature: Incyte ID No: 700355972H1
  unsure 63, 71-72, 74, 93, 107, 119, 125-126, 131, 150, 155, 180, 185-186, 194,: a, t, c, g, or other
aactcccgtgtattcattgggaatctcaacactcttgtggtcaagaaatctgatgtggaggcnatctttcnnantatggcaaaattgtgggcngctctgttcataanggctttgccttnggtcannatgtnaatgagagaaatgcccggnccgcngtagcaggagaggatggcagaatgnttgcnngccaggtnttagatatnaancnggctncagagccnnaagtgnaccgaggaaaagcaggtgtgaaacgatctgcancgganatgtacggctc

SEQ ID NO: 5192 - DNA, 280 bp, Zea mays
  misc_feature: Incyte ID No: 700355973H1
gatggccgtgtcattatttggaaggaggatgcacgaggcaattggtctcaagtccacgtcttcagtgacaacaagtcatctgtcaactccattgcttgggctccgtatgaggttggcctctgccttgcctgtgcatcttctggtggaagaatatccatcttgacgatgcaagctgacgggggttgggatactgcaaccattgagcgagcacatcctgtcggtgcgactgccatatcctgggcccctgcaacagcgtcactagctggtgcaggggagcttg

SEQ ID NO: 5193 - DNA, 282 bp, Zea mays
  misc_feature: Incyte ID No: 700355974H1
  unsure 3, 160, 163-164, 168: a, t, c, g, or other
ggnaggagttcagcatcgagaagctgcagctggtggagtcggaaaaacggagggtgcggcaggagtacgagcgcaaggagaagcaggtggacgtccgcaggaagatcgagtactcgacggagctgaacgcggcgcgcatcaagctgctgcgggcgcaggncgnnggantgaccgggatgaaggagagcgccggcgacgcgctgctccgcgtcaccaaggacgccaacgcctacaagagggtcctcaagggcctcatcgtgcagagctgcttcgcctgaggga

SEQ ID NO: 5194 - DNA, 280 bp, Zea mays
  misc_feature: Incyte ID No: 700355976H1
aacagatccagcaatacagtacaaggcataccctgattacgcgttggatatggggttaattacaaaaacacaatttaacaggatcaataaaatagttccaacttgtgaattcgctgtcaagctttgtggtacttctggaaccgtaacttgccttgctgcgtactttgcctgcaatacaatattcagtgccatcaggacaatcataggcaataaaaattattatgacatcaggaaaccatgcatcggaagcctatgctatgatttctctaatttggagaaa

SEQ ID NO: 5195 - DNA, 280 bp, Zea mays
  misc_feature: Incyte ID No: 700355978H1
  unsure 2, 60, 83: a, t, c, g, or other
gngttctgggacgaccagaactcgcagatgcagtgggtgaagcccctcaaccttgcgcanttcaaggcagccatgcagaagcngctcaagtccgtcgtgtcacgctacgccggcaaggtcatccactgggacgtggtgaacgagaacctgcacttcaacttcttcgagacgaagctgggccccatggcgtcggcacagatctaccagcaggtggggcagctggaccgcaatgccatcctattcatgaacgaattcaacacgctggagcagcccggcgatc

SEQ ID NO: 5196 - DNA, 279 bp, Zea mays
  misc_feature: Incyte ID No: 700355979H1
  unsure 6, 22, 25, 37, 128: a, t, c, g, or other
tttgangtgacttgtatccatnganatttcatatgtnatgaagacatgcttattttgatggcttttgtgaatcaagtcatatcatgctgcattttcttgactagtgatctgtcaaggtaatgaagaantagcaggtacttttttttttcaaaagccatcaaaataagcatgtcttcataacatatgaaatgtcgatggatacaagtcacttcaaacattcaggacggtaaggaagatctgagaatcagcaaggagcttgggaccttaggctcgccatac

SEQ ID NO: 5197 - DNA, 284 bp, Zea mays
  misc_feature: Incyte ID No: 700355982H1
gcctcagcgcatcgcccgccgcgacctcatcgatcaccttcagctttcaatcatggcggacgtcgatgtcgaaccggaggttgccgccggagctcccaagaagaggacgttccgcaagtacagctaccgcggcgtcgacctagatgcgcttctcgacatgtccacggacgaccttgtccagcttttccccgcgcgcgccaggagaaggttccagaggggtctgaagaggaagcccatggcgctcatcaagaagctgcgcaaggcgaaaaaggatgctcctgctg

SEQ ID NO: 5198 - DNA, 240 bp, Zea mays
  misc_feature: Incyte ID No: 700355983H1
  unsure 22, 57, 70, 92, 95, 98, 102, 105-106, 112, 118, 129, 133, 139, 141, 144,: a, t, c, g, or other
gtacacatacccaagatgccancccattgactcttggccaagaattcagtggctacnctacacaggtcanatatgcgaattgaccgcattanttntanattnccnnggatgnaccagnttgctcaaggngganctgcantnggnactggcttgaacaccaagaaagganttgatancgtanatagntgctgcagnggctnnggnaacaaacctanccttgtganagcagagannaatttg

SEQ ID NO: 5199 - DNA, 154 bp, Zea mays
  misc_feature: Incyte ID No: 700355984H1
  unsure 17, 32-35, 40, 42, 45, 56, 76, 91, 97, 116, 123, 128, 132: a, t, c, g, or other
taacagatcagaatgtncacactggttaatcnnnntttancnatnagcatgaaggnagcagaagctggtgagtttncagatggttcttctngaccanactcctttttcagtgttgncaagcgnggccngggntgcactggacaacaggctgagg

SEQ ID NO: 5200 - DNA, 289 bp, Zea mays
  misc_feature: Incyte ID No: 700355988H1
  unsure 12, 26, 44, 55, 59, 62-64, 70, 73, 87, 95, 123, 175, 205, 213, 217: a, t, c, g, or other
tcgagcaggttnggaggagacgcctngtgttcctgcagaagatnaacttctaccngccntgnnngcagcnggntcttcacgatcggngtcgcgcngcacaccgacatgagcacgctcaccgtnctcgtgcccaacgaggtgcaggggctccaggtcttcaaagatggtcaatgcncacgaggccaagtacgtgcccgacgcactncatcgtcnatangggcgatcagatcgagattttcagcaacggggcataacaaggcggtgctgcaccgtacgacggtgaacaagg

SEQ ID NO: 5201 - DNA, 278 bp, Zea mays
  misc_feature: Incyte ID No: 700355989H1
  unsure 8, 223: a, t, c, g, or other
ccgctganaggcaagagcacggcaagggcagcatggcggcgaccagccgtctcctgcctcctgttcgtttttgttttggtgctattgatctctacgacggcgacagcgacggctacgacagttcagtcgcggcaggcggggctcacctctcgccaaagaggctctggattccgggcgtggcggagggatgtgctgaggccggacaggacggccggcgaacttnggcgccgccggcgccaaaggccaacagcaacgtcccaggagggcccttcggtcgt

SEQ ID NO: 5202 - DNA, 280 bp, Zea mays
  misc_feature: Incyte ID No: 700355991H1
  unsure 9, 59, 62: a, t, c, g, or other
gtaaggggncaaaacatcataggtcctctttgcgcgacggccgccgcctcctctttgtnctntcattccgccgccgccgctccccgctctctcctctgcttgcggactgcgtggagcaccagcggcggccagcgggcaggaggagctccctccccaaacagagaggggtggggtatcagtgcgtgcgctcctggaggagggcgtggaagagcagagcaggcggcaagcaggggtttgggaggatggtttcgctctcgacttggttccgctatgccgcaca

SEQ ID NO: 5203 - DNA, 278 bp, Zea mays
  misc_feature: Incyte ID No: 700355994H1
gaaaaatcaaggataggctggaactggaaaaacatgcatcaaaagataggaggtgtagctggtggactctgctttggtttctcggttactggagtagcaagtgccgaggttcctatcattagagtcaaagacaatgccgagacttcgtcatcatctaccagttcaactcatggaaaggaagtgtacacagattattctgtcacaggtattcctggagatggaaggtgtttattccgctccgtggtgcatggtgcatgcattagatcagggagaccaat

SEQ ID NO: 5204 - DNA, 271 bp, Zea mays
  misc_feature: Incyte ID No: 700355996H1
  unsure 27, 74, 76, 120, 135, 144, 146, 148, 155, 166, 204, 209: a, t, c, g, or other
cgaaaacccacgtctaaaacaggtggnccaccaacgattcacttccccgatcccagggggcggcgatcggaatnancaacttctcccacgcggcgaacacggcagagatgatgagctccngggccggatccatcntcctccgcnangncggctcncgtctcttcancgcagcggcgatctctccggcggcggcctcgaggccantgctngccggcggcaatggtgttccggcagtcatgctacggcttatgtccacgtcctcccccgccgc

SEQ ID NO: 5205 - DNA, 296 bp, Zea mays
  misc_feature: Incyte ID No: 700356001H1
  unsure 39, 288: a, t, c, g, or other
gtctacaaaggctattctctgcgtaaagaaactgaggtnatatcttgctgcacgtgggttcaggaacgctgtctgttccattggtgcagcggatgcaagtgacgaattgtttggcgatctggttccctgcccttttcagcaacctgatgagaacacacaatctattttgaaaatgtcacagggacaggagatggaaacaagatcatcagagcatcccaaagttgctgatctggaaccattaccagatagcgaatctcttgtattcttgaattgatggagcttgtaaangaaatccc

SEQ ID NO: 5206 - DNA, 292 bp, Zea mays
  misc_feature: Incyte ID No: 700356002H1
  unsure 213: a, t, c, g, or other
agcgttgtttgctcttaaagtttgtgacaagctgttcacgagctccactgcttggattcaagtacttgcaaccttctttcacaattcataaggttccatgtgatgtaacactttgggcatcaattggaggccaagatgtagatcgtcttccatctgcttccacatgctacaatacgctcaagcttcctacatacaagcggtcaagcacgctanggagcaagctgctttacgccataagctcaaatactggattgaactctcgtagagtatatcagtggttttgtaaccctgc

SEQ ID NO: 5207 - DNA, 295 bp, Zea mays
  misc_feature: Incyte ID No: 700356006H1
  unsure 44, 67, 101, 181: a, t, c, g, or other
gggccaggcggccgaacacatccttgacgaccgacgccgccctncctcgcagcttcctgggtttcancggatcctctgctagcgacgagcaccccctacancaggccgttacttgggcgccggtgccatgcccggcgggtcttcgggtccagatggtgaagtggatgcaggatttgcgaantccagggagaggatttcgagtattacatgcaaacgtactccatcatgctgggacgcaacagcaagaaatcaacagtggatgtggatctctcgagcctcggtgggggaatgaaca

SEQ ID NO: 5208 - DNA, 289 bp, Zea mays
  misc_feature: Incyte ID No: 700356010H1
  unsure 97: a, t, c, g, or other
gtctttataggatcagaaggcccatgaagctattttgaaggtgttagaccttcagtgcgcgagtaaagttgctcgagaaccccaattgtctgaatgnactgaaagagtcagcagatgtgacagattgaaatctccggttaggattgcaatggttggaaagtatactggcctgtcagactcctacctatctgttataaaggctctttgcatgcgtcggttgctttggacaggaaacttgtggtggactgggttcctcctgtgatcttgaagatctacagcaaaagagact

SEQ ID NO: 5209 - DNA, 287 bp, Zea mays
  misc_feature: Incyte ID No: 700356011H1
  unsure 192, 254, 262-263, 265, 270: a, t, c, g, or other
gaaccattagcaccctgtcggagcgatttgtcgtgagcagtggcgacgcaggttgtggccatcatcgaagacctcttggcgccgctgttggggcctcggtgttgagttgtggcgtcaccttgaacctctggggacatatctgtgaccttggcgggagttgcggtgcatcgtgaccgagttaattcctcgccnccatcacaccgccgccgcggatccgcccactgtcgtggtccgctaaatctccggcatatacngaggaatnntnagacnaaaagttcaatgtggag

SEQ ID NO: 5210 - DNA, 295 bp, Zea mays
  misc_feature: Incyte ID No: 700356014H1
  unsure 50, 123, 153, 171-172: a, t, c, g, or other
gcatatcccatcaatatccagagagtttgagagagcgagcattgcgagancaccatccgacatggaccgcttcatcacccagaccgaggggaggagggaccgcaagcatatcccatctgtatntagagagtttgcgggagcgagcgctgcganagcatcgcctggcatggnncgctccatcgccaagtctgaggtgaggtgggaccgctttgtcgagactggtaagggggagatggtgcaggatccactgaccacggagactgggggcaagatggagcacgacctgctcatgtac

SEQ ID NO: 5211 - DNA, 299 bp, Zea mays
  misc_feature: Incyte ID No: 700356015H1
  unsure 34: a, t, c, g, or other
ctcggccaaagctgactacagcctacaagcgaangcttagaagagctcttcccgatagccatggccaagcccccgcttcaaacggctgcgatcatcctcctcgtactcctctcggccgcgtcgtgcctccacaccgtcgatgccgccactttagggttctgttggggcaagtgcagcgttcggtgcgcgggggcgaccgcgcggcaggcgcgagccgcgtgcatgagctcctgtggcctctgctgcgaggcatgcaactgcgtgccgcacgacatccatgactgcccctgctaccgcaa

SEQ ID NO: 5212 - DNA, 292 bp, Zea mays
  misc_feature: Incyte ID No: 700356017H1
  unsure 4-5, 7, 12, 22-23, 25-26: a, t, c, g, or other
gggnnanggaanggcggtctgnngnnttattgaatagagcagtgtgtattcggctgcctgcctgcccgcctgcttgctctctggctgtgctcctgcttaaagaaatcagtccttcctttccgacttagtcctcgggaagaagtttcagactacaaggtatcattggaacatttcaagatcatcaaatcaaattccacagggattggtgaccaaccagaaggctcagacatctgattgctgacctgtccagacatcatctggtctccctgaacctgaaatcacaccatggatg

SEQ ID NO: 5213 - DNA, 290 bp, Zea mays
  misc_feature: Incyte ID No: 700356019H1
ggcaagcacgggcggtcggggcgccagcaccaccactggctcggccgtctccacgacgccgtagtccaagcggacggagacgaaagcggtcgcgaaccaggcagccagccagaggactggttaccgaaccggaggagattttacacacccacctaccccgtggtagatcgacgacggccagaacatgttgaattggggatggggagggtacagattcccactgttttgctaggaaataggagtatcgttggcaggcgtcggatggatggcatcaatgccgctgcccctac

SEQ ID NO: 5214 - DNA, 289 bp, Zea mays
  misc_feature: Incyte ID No: 700356020H1
aacaaagccacaacacatacaggaaagcaagcaagaatcatcggaataatggcccgtgcatgcgtgttcctcgtcgtgctcctcctggccgccatcgcggtggcaccgttcgcgggcgccgcacgcgtggacgttgtggagggtaggtccatggcatccgccgatgcaccggaggcggcggccgatgctcccgctcctagccccgactccgcctcatccccagactcgtcatcggaggcgccctctagcagcagttcctccgactagacgcaaaaacctcttcatctct

SEQ ID NO: 5215 - DNA, 291 bp, Zea mays
  misc_feature: Incyte ID No: 700356022H1
  unsure 28, 32, 40, 67, 70-71, 73, 93, 105, 120, 151-175, 178, 192, 195, 212,: a, t, c, g, or other
gtcgcgtgtctaggtttcctctctcacnatancgcccgcnactgtcgcccttcgttcacctctcctnccnncncgtccctgcctgccaggganaggggaagtcanaggcacggagtggcncagagcagacgcccgtgaaccattgtagctnnnnnnnnnnnnnnnnnnnnnnnnnaanccacacaaggaaangangagaagaagccgaccancctcatgaacangtacgagctcgggcncacgctcgggcagggcacttcgccaangtgtaccacggccggaacctngcgt

SEQ ID NO: 5216 - DNA, 290 bp, Zea mays
  misc_feature: Incyte ID No: 700356023H1
gtgagaagaacacacaaaatgagggttcttgtagagaagctgttagtctctgtgtttttagcagcattctattcagggtgcatggtcgtgtctctagaatatgatcacacggcaagcatcgagtgccttggcgacccaatgaaacccttgtacaagggcggcattgtccagaacagcgagttcaacagcggactgatgggctggtcgacacaccggaacgtcaaggccggcgtgagcagatcgccgtccggcaacaagtttgcagtggtgcatggggcgggaagctacgt

SEQ ID NO: 5217 - DNA, 291 bp, Zea mays
  misc_feature: Incyte ID No: 700356025H1
  unsure 39, 61, 66, 91-92, 107, 109, 114-115, 122, 133, 147, 211-212, 257, 260,: a, t, c, g, or other
tcggatgctacctgctccaagagcacatcaaggcgtctngtggattcaggaacgccttcangaagngcaatggtgtgtcgaaatccatcgnnatcctcctgctcttncntctannctgtctnggccggtgtgntgcaagtcctgtangcacccaccattgcctcagtgtttcccctgtgcggtccaggcgtccagctccgttcccgttcgnncccgtgcaaatgctccctctatggtgatcagtgatcctgtgtcangantaagngangctttangtnngnnnngagttga

SEQ ID NO: 5218 - DNA, 271 bp, Zea mays
  misc_feature: Incyte ID No: 700356026H1
ccaaaagtgatgtctagcccaggtgtaacaacaagaagcatgtcttctgcttctccaactagtccaggtcctacaacaaggaggaaggcatccatctcaccaggaggaattaatcggaggctcattattagctagatatagtagttgtcattctctattttgtgtgtgggcatggctgtgcaactattttgtgtaactatttttccgctatgcaacactatgtctgatggtggtgctctatattctgaatgcaagaactcattaaagttgc

SEQ ID NO: 5219 - DNA, 185 bp, Zea mays
  misc_feature: Incyte ID No: 700356027H1
  unsure 37, 39, 94, 165, 184: a, t, c, g, or other
tagctgacgacaccaccgtgtggtcgacaaaataaanangagagagagagagatggctctgtcgtctcgccgtatggccgccgcaccattcttngtcgtcgtccttctcgtcctcgtggcggcagagaggacgatgggcagggtggtggtggaagagacgctccncttgtcgcaaaaaccaccnc

SEQ ID NO: 5220 - DNA, 290 bp, Zea mays
  misc_feature: Incyte ID No: 700356029H1
aataatactgcttctgatattcttcatcgaatggcatcagtatttgagaggatgcatgcatctattgcatcaaattctgctataggaacaactttgcttcagggtgaagagaacattggccagtttctatacctcgagggcatcgagtattatatgtggaacacatatgatgttcatttttatgcatcattttcactgatcatgttgtttccaaagcttcaactcagcgtccagagagactttgctgctgctgttatgatgcatgatcctgaaaagctgaggatcttgca

SEQ ID NO: 5221 - DNA, 298 bp, Zea mays
  misc_feature: Incyte ID No: 700356032H1
  unsure 13, 105, 113: a, t, c, g, or other
cggggcggaagangagagagaagacgtctctctcctctcggcgtccccgttccccaacctctcgtactgctgcctgcctgcctgcctgcctgcaaaaaggagttnctcatggncgtctaagcgcatcctcaaggagctgaaggacctgcagaaagacccccccacatcatgcagtgcaggtcctgctggtgaggacatgtttcattggcaagcaacaattatgggaccacctgacagtccctatgctggtggtgttttcttagtgaacatcattcccgccagattaccccttcaaacc

SEQ ID NO: 5222 - DNA, 292 bp, Zea mays
  misc_feature: Incyte ID No: 700356033H1
  unsure 242: a, t, c, g, or other
cacaagcgcactctagcaatggcttctgaggttgtccgccctagcgacgccgagctactaaaggcacaagccgacatatggcggctcagcctctcctacctcacgcccctgtcactgaggtgcgccgtggagcttggcatccccacggcgatctaccgccatggcggggctgcctcagccgctgagctggtcacggcgctgtctctcccctccactaagctgccgttcctccgccgcctgcngcggctcctcgccgcgtcgggcgtgttcaccgtcgacaagcagagcacgg

SEQ ID NO: 5223 - DNA, 282 bp, Zea mays
  misc_feature: Incyte ID No: 700356038H1
  unsure 62, 74: a, t, c, g, or other
aatctaacgaattcatttctactcaaggaccacttgccaatacaattgaggatttttggcanatggtatatganaaccactgtcctgtgattgttatgctcaccaaatttgatggtcttaagtgtgatgagtatctaccattgagcaagggacaggctgtttttggaaaatttaccattaagatcacaaagttcaggaaagatggtcagttattgttgcgtggtgtggagattcgacaggatgaggtgaatatatataagtcagatgaatgcgatctctctc

SEQ ID NO: 5224 - DNA, 286 bp, Zea mays
  misc_feature: Incyte ID No: 700356041H1
  unsure 50, 94, 104, 108, 113, 141, 173, 184, 202, 204, 212, 226, 241, 243: a, t, c, g, or other
cgaccgcgattgctctcagaaggcactagcacgcaaaaaccccacgaganagacgaatcttccgaatctctcggtggcgatggcgctctccgancgctcccgcnagtngctcntcccgagcttcctctacgcctcctcggngcgctctttcgctgccacaggagccgccgcgngcctccctgtntcctccccagcgcctgcnanggctggancaggaggcggcgtnccgttctcgatccangngccaaaggagaacatcgagatgtatcgccggccttctatgccg

SEQ ID NO: 5225 - DNA, 285 bp, Zea mays
  misc_feature: Incyte ID No: 700356045H1
  unsure 264: a, t, c, g, or other
atgaattcttttcctcaacctggaagtggtgggggtatttctggtgatgaaattagttggggaagccttacttctgctcatgggatgagcaacatttcaagccttggatcgggaaaccttggccgtggaaccggagataacaactttggcttgccttctggaaactatgttaggagcaactcaactggtacaattggtgagccatttctgcatcagccaatgcatatgaatcgaacaatccaggtgcatatggcagcagctctnttatggtgactcaacctggag

SEQ ID NO: 5226 - DNA, 289 bp, Zea mays
  misc_feature: Incyte ID No: 700356047H1
  unsure 222, 227: a, t, c, g, or other
gatttttttctcggttgcaatgaagagttatccgtgggcgggggcccgccctcttgccgtcgtgcagctcctcctcttcctcgcccacctcgtcgaccgcggcggtgctgccggtggaggcagcaagggcagctcggtgtacccggcggctgtcgtctacccgcatcactcccgccagatctcctgcaaacccagggtgttcctgtatcagcacttcctcancgacncgaggctaaccacctgatctccctcgcgagagggactcaagaggtcagcggtcgccgataat

SEQ ID NO: 5227 - DNA, 286 bp, Zea mays
  misc_feature: Incyte ID No: 700356050H1
tccactttccacattccagttccactccgcctccgctgccggtcgccgactccgaaactccgacagtccgaccacaaggtcttgtgcgggatccacagaaggatgagtgaagaggataagactgctgcttctgctgagcagccgaagagggcccctaagctcaatgaaaggatcctctcttctctgtccaggaggtccgtagctgctcatccatggcatgatcttgagatcggtcctgatgctcctgctgttttcaatgttgttgttgagatcacaaagggaagca

SEQ ID NO: 5228 - DNA, 284 bp, Zea mays
  misc_feature: Incyte ID No: 700356052H1
  unsure 67, 77, 87, 98, 102, 104, 113, 150-151, 174, 178, 186, 206, 224, 257,: a, t, c, g, or other
cgtcggatcggagcgagctcattctcaactcgactcaagagctctgcctcctccatcttcccttctntttctggacnttgagggatncggggccacgntgananatggaggcnaatccgaagaacaccttcacgatcaaagtggaggacnngaagcccgggaaggacggccggntggnggtcggancggtgttccggagcgttctngccaaggatgggttcccncagcttgagcctgacatgaagacatcatgggangtgtncagggtagnannagtcaagtnt

SEQ ID NO: 5229 - DNA, 286 bp, Zea mays
  misc_feature: Incyte ID No: 700356053H1
  unsure 36, 44, 81, 89, 92: a, t, c, g, or other
ccacgggtggtgatcatgctcgtcaaggccggcgcnccagttgnccagaccatcgcgacgctcgcagctcacttggagcanggcgactncgncatcgatggggggaacgagtggtacgagaacacggagaggagggagaaggccatggaggagcgcggcctcctgtatcttggcatgggtgtctctggaggagaggagggtgcccgcaacggcccgtccttgatgcccggaggctcgttcgaggcttacaagtacgtcgaagacattgtcctcaaggtggctgctc

SEQ ID NO: 5230 - DNA, 284 bp, Zea mays
  misc_feature: Incyte ID No: 700356057H1
  unsure 29, 162: a, t, c, g, or other
caaacacaagtcgtcgtaggcagcgagcntctctccctctcccacgcatcgcgccaaggaagagagagagatcgccgctccccttctcggcgtcggtggtgcgggtgccctccctcctcgagcgagatctgtctggtcacagatctatctgacaaaatggtnaagatctgctgcatcggtgctggctatgtcggtggcccaaccatggccgtcatgccctcaagtgcccagacattgaggtcgtcgtcgttgacatctccaagccccgcattgaggctggaaca

SEQ ID NO: 5231 - DNA, 289 bp, Zea mays
  misc_feature: Incyte ID No: 700356062H1
agtccccaccacccccaaccccgtctctccactgcggcgcaggcttcgcttcggctccgctcggctcgagcagaaaatgcaacgggcagtgcaggccgtcaggtcacacggcaatgttcttaaatatgctgttctacaacacatcagcgctcccaagccagcaatgcttcctgctgccttttctcgtttcatgtcagtttcatctgctcgcctagaggatcgtggattgaaactgccactgtagcagatgtcttgaagtctaaagggaagagtgctgatggatcttggc

SEQ ID NO: 5232 - DNA, 287 bp, Zea mays
  misc_feature: Incyte ID No: 700356066H1
  unsure 20, 85: a, t, c, g, or other
tgagaagaacacacaaaatncagggttcttgtagagaagctgttagtctctgtgtttttagcagcattctattcagggtgcatgnccgtgtctctagaatatgatcacacggcaagcatcgagtgccttggcgacccaatgaaacccttgtacaagggcggcattgtccagaacagcgagttcaacagcggactgatgggctggtcgacacaccggaacgtcaaggccggcgtgagcagatcgccgtccggcaacaagtttgcagtggtgcatggggcgggaagcta

SEQ ID NO: 5233 - DNA, 283 bp, Zea mays
  misc_feature: Incyte ID No: 700356067H1
cctagttagtccagtccgcctgctgcctgcctcaacggatcgacgcgacaggagggagggaggaaggagacggtcgatcagagtctgagacggaggccgatccaccaccgcagcgacgagcgggaggagatgaagatcatcattgacacggatcccggcatcgatgacagcgtggccatcctgatggcattccagatgccgggcgtccaggtcctagggctcaccaccatcttcggaaatgcaccacagagcatgccacacgcaacgccttgatcctgtgcga

(The sequence listing continues in the following parts.)

What is claimed is:

1. A purified corn tassel-derived polynucleotide comprising a nucleic acid sequence selected from the Sequence Listing or a complement of the nucleic acid sequence.

2. A composition for the detection of altered expression of corn tassel-derived polynucleotides comprising at least one of the nucleic acid sequences of claim 1.

3. A corn tassel-derived polynucleotide selected from the following nucleic acid sequences of claim 1: SEQ ID NO: 1615 (700344704H1), SEQ ID NO: 2691 (700346502H1), SEQ ID NO: 2813 (700346702H1), SEQ ID NO: 3616 (700380601H1), SEQ ID NO: 3681 (700380774H1), SEQ ID NO: 233 (700342388H1), SEQ ID NO: 2060 (700345470H1), SEQ ID NO: 964 (700343568H1), SEQ ID NO: 2811 (700346695H1), SEQ ID NO: 2519 (700346233H1), SEQ ID NO: 2083 (700345510H1), SEQ ID NO: 1101 (700343780H1), SEQ ID NO: 1847 (700345052H1), SEQ ID NO: 1777 (700344946H1), SEQ ID NO: 1780 (700344949H1), SEQ ID NO: 1733 (700344870H1), SEQ ID NO: 3018 (700347036H1), SEQ ID NO: 3158 (700347281H1), SEQ ID NO: 2220 (700345749H1), SEQ ID NO: 165 (700342268H1), SEQ ID NO: 139 (700342223H1), SEQ ID NO: 2823 (700346721H1), SEQ ID NO: 2065 (700345477H1), SEQ ID NO: 605 (700343040H1), SEQ ID NO: 3618 (700380603H1), SEQ ID NO: 1537 (700344525H1), SEQ ID NO: 469 (700342790H1), SEQ ID NO: 3344 (700379867H1), SEQ ID NO: 180 (700342291H1), SEQ ID NO: 303 (700342521H1), SEQ ID NO: 1249 (700344013H1), SEQ ID NO: 1036 (700343679H1), SEQ ID NO: 2920 (700346877H1), SEQ ID NO: 3619 (700380604H1), SEQ ID NO: 1061 (700343721H1), SEQ ID NO: 1589 (700344654H1), SEQ ID NO: 3100 (700347193H1), SEQ ID NO: 2182 (700345675H1), SEQ ID NO: 2218 (700345743H1), SEQ ID NO: 398 (700342679H1), SEQ ID NO: 175 (700342283H1), SEQ ID NO: 3533 (700380411H1), SEQ ID NO: 3615 (700380596H1), SEQ ID NO: 89 (700281941H2), SEQ ID NO: 3530 (700380405H1), SEQ ID NO: 3023 (700347043H1), SEQ ID NO: 3185 (700347339H1), SEQ ID NO: 3062 (700347112H1), SEQ ID NO: 1082 (700343752H1), SEQ ID NO: 55 (700281888H2), SEQ ID NO: 2955 (700346930H1), SEQ ID NO: 1032 (700343674H1), SEQ ID NO: 163 (700342263H1), SEQ ID NO: 2864 (700346807H1), SEQ ID NO: 1286 (700344069H1), SEQ ID NO: 2560 (700346291H1), SEQ ID NO: 742 (700343247H1), SEQ ID NO: 1731 (700344866H1), SEQ ID NO: 370 (700342630H1), SEQ ID NO: 1167 (700343872H1), SEQ ID NO: 715 (700343202H1), SEQ ID NO: 3314 (700379793H1), SEQ ID NO: 2156 (700345638H1), SEQ ID NO: 624 (700343071H1), SEQ ID NO: 545 (700342924H1), SEQ ID NO: 2855 (700346794H1), SEQ ID NO: 850 (700343408H1), SEQ ID NO: 1557 (700344614H1), SEQ ID NO: 1872 (700345114H1), SEQ ID NO: 1000 (700343626H1), SEQ ID NO: 1045 (700343695H1), SEQ ID NO: 2753 (700346604H1), SEQ ID NO: 70 (700281910H1), SEQ ID NO: 1235 (700343988H1), SEQ ID NO: 389 (700342664H1), SEQ ID NO: 486 (700342817H1), SEQ ID NO: 766 (700343281H1), SEQ ID NO: 1310 (700344105H1), SEQ ID NO: 3202 (700347368H1), SEQ ID NO: 1941 (700345253H1), SEQ ID NO: 6 (700281814H2), SEQ ID NO: 1884 (700345138H1), SEQ ID NO: 2316 (700345916H1), SEQ ID NO: 1948 (700345263H1), SEQ ID NO: 2277 (700345849H1), SEQ ID NO: 2019 (700345394H1), SEQ ID NO: 1696 (700344820H1), SEQ ID NO: 226 (700342373H1), SEQ ID NO: 262 (700342448H1), SEQ ID NO: 1377 (700344208H1), SEQ ID NO: 1279 (700344059H1), SEQ ID NO: 1770 (700344935H1), SEQ ID NO: 532 (700342903H1), SEQ ID NO: 843 (700343396H1), SEQ ID NO: 360 (700342616H1), SEQ ID NO: 540 (700342915H1), SEQ ID NO: 413 (700342708H1), SEQ ID NO: 1252 (700344017H1), SEQ ID NO: 1560 (700344618H1), SEQ ID NO: 3541 (700380432H1), SEQ ID NO: 243 (700342413H1), SEQ ID NO: 1938 (700345249H1), SEQ ID NO: 1127 (700343816H1), SEQ ID NO: 1545 (700344541H1), SEQ ID NO: 1946 (700345258H1), SEQ ID NO: 298 (700342510H1), SEQ ID NO: 2906 (700346860H1), SEQ ID NO: 783 (700343310H1), SEQ ID NO: 616 (700343060H1), SEQ ID NO: 2097 (700345529H1), SEQ ID NO: 2393 (700346036H1), SEQ ID NO: 860 (700343420H1), SEQ ID NO: 2196 (700345705H1), SEQ ID NO: 2403 (700346049H1), SEQ ID NO: 2309 (700345906H1), SEQ ID NO: 1963 (700345289H1), SEQ ID NO: 1383 (700344218H1), SEQ ID NO: 3201 (700347367H1), SEQ ID NO: 3589 (700380530H1), SEQ ID NO: 660 (700343124H1), SEQ ID NO: 2254 (700345807H1), SEQ ID NO: 2689 (700346496H1), SEQ ID NO: 3166 (700347296H1), SEQ ID NO: 2023 (700345404H1), SEQ ID NO: 726 (700343218H1), SEQ ID NO: 363 (700342620H1), SEQ ID NO: 2968 (700346951H1), SEQ ID NO: 2214 (700345737H1), SEQ ID NO: 989 (700343607H1), SEQ ID NO: 2642 (700346426H1), SEQ ID NO: 2741 (700346581H1), SEQ ID NO: 1321 (700344122H1), SEQ ID NO: 1255 (700344022H1), SEQ ID NO: 2311 (700345908H1), SEQ ID NO: 1857 (700345075H1), SEQ ID NO: 2571 (700346316H1), SEQ ID NO: 3063 (700347116H1), SEQ ID NO: 1649 (700344750H1), SEQ ID NO: 1653 (700344754H1), SEQ ID NO: 1762 (700344924H1), SEQ ID NO: 1985 (700345329H1), SEQ ID NO: 2382 (700346023H1), SEQ ID NO: 2468 (700346152H1), SEQ ID NO: 1567 (700344628H1), SEQ ID NO: 991 (700343609H1), SEQ ID NO: 2124 (700345577H1), SEQ ID NO: 829 (700343377H1), SEQ ID NO: 3623 (700380616H1), SEQ ID NO: 725 (700343216H1), SEQ ID NO: 1676 (700344785H1), SEQ ID NO: 399 (700342680H1), SEQ ID NO: 2790 (700346658H1), SEQ ID NO: 2284 (700345859H1), SEQ ID NO: 2838 (700346745H1), SEQ ID NO: 757 (700343266H1), SEQ ID NO: 1251 (700344016H1), SEQ ID NO: 207 (700342338H1), SEQ ID NO: 3515 (700380270H1), SEQ ID NO: 3224 (700379610H1), SEQ ID NO: 2958 (700346935H1), SEQ ID NO: 1861 (700345079H1), SEQ ID NO: 3052 (700347092H1), SEQ ID NO: 2542 (700346264H1), SEQ ID NO: 3602 (700380571H1), SEQ ID NO: 2788 (700346656H1), SEQ ID NO: 1966 (700345293H1), SEQ ID NO: 1813 (700345004H1), SEQ ID NO: 573 (700342986H1), SEQ ID NO: 3572 (700380488H1), SEQ ID NO: 1368 (700344191H1), SEQ ID NO: 774 (700343291H1), SEQ ID NO: 443 (700342747H1), SEQ ID NO: 1083 (700343755H1), SEQ ID NO: 110 (700281973H1), SEQ ID NO: 118 (700281986H2), SEQ ID NO: 2088 (700345516H1), SEQ ID NO: 2932 (700346894H1), SEQ ID NO: 2815 (700346704H1), SEQ ID NO: 1112 (700343793H1), SEQ ID NO: 3131 (700347236H1), SEQ ID NO: 682 (700343154H1), SEQ ID NO: 1965 (700345291H1), SEQ ID NO: 1866 (700345094H1), SEQ ID NO: 898 (700343475H1), SEQ ID NO: 3582 (700380514H1), SEQ ID NO: 916 (700343509H1), SEQ ID NO: 188 (700342309H1), SEQ ID NO: 1364 (700344186H1), SEQ ID NO: 1421 (700344295H1), SEQ ID NO: 3685 (700380786H1), SEQ ID NO: 2404 (700346050H1), SEQ ID NO: 3246 (700379650H1), SEQ ID NO: 1673 (700344782H1), SEQ ID NO: 953 (700343552H1), SEQ ID NO: 2216 (700345739H1), SEQ ID NO: 1232 (700343985H1), SEQ ID NO: 775 (700343292H1), SEQ ID NO: 869 (700343431H1), SEQ ID NO: 145 (700342231H1), SEQ ID NO: 2927 (700346887H1), SEQ ID NO: 1820 (700345013H1), SEQ ID NO: 2244 (700345785H1), SEQ ID NO: 1078 (700343746H1), SEQ ID NO: 2965 (700346943H1), SEQ ID NO: 1085 (700343757H1), SEQ ID NO: 730 (700343225H1), SEQ ID NO: 792 (700343325H1), SEQ ID NO: 3218 (700347395H1), SEQ ID NO: 3033 (700347064H1), SEQ ID NO: 1058 (700343715H1), SEQ ID NO: 302 (700342515H1), SEQ ID NO: 2384 (700346026H1), SEQ ID NO: 1220 (700343965H1), SEQ ID NO: 1883 (700345136H1), SEQ ID NO: 1928 (700345235H1), SEQ ID NO: 2598 (700346351H1), SEQ ID NO: 315 (700342543H1), SEQ ID NO: 1405 (700344265H1), SEQ ID NO: 3128 (700347232H1), SEQ ID NO: 942 (700343540H1), SEQ ID NO: 1109 (700343790H1), SEQ ID NO: 1490 (700344425H1), SEQ ID NO: 3040 (700347072H1), SEQ ID NO: 2411 (700346060H1), SEQ ID NO: 2477 (700346167H1), SEQ ID NO: 446 (700342755H1), SEQ ID NO: 3026 (700347050H1), SEQ ID NO: 3554 (700380452H1), SEQ ID NO: 3465 (700380146H1), SEQ ID NO: 143 (700342228H1), SEQ ID NO: 867 (700343428H1), SEQ ID NO: 1139 (700343832H1), SEQ ID NO: 3067 (700347126H1), SEQ ID NO: 799 (700343333H1), SEQ ID NO: 2059 (700345469H1), SEQ ID NO: 2120 (700345571H1), SEQ ID NO: 2179 (700345671H1), SEQ ID NO: 2707 (700346525H1), SEQ ID NO: 967 (700343572H1), SEQ ID NO: 1356 (700344174H1), SEQ ID NO: 2896 (700346848H1), SEQ ID NO: 304 (700342523H1), SEQ ID NO: 1063 (700343723H1), SEQ ID NO: 560 (700342959H1), SEQ ID NO: 2625 (700346389H1), SEQ ID NO: 2501 (700346210H1), SEQ ID NO: 319 (700342551H1), SEQ ID NO: 3173 (700347308H1), SEQ ID NO: 2313 (700345910H1), SEQ ID NO: 2022 (700345403H1), SEQ ID NO: 1076 (700343742H1), SEQ ID NO: 3025 (700347049H1), SEQ ID NO: 1719 (700344849H1), SEQ ID NO: 3342 (700379862H1), SEQ ID NO: 643 (700343103H1), SEQ ID NO: 3649 (700380682H1), SEQ ID NO: 3613 (700380589H1), SEQ ID NO: 807 (700343342H1), SEQ ID NO: 1760 (700344920H1), SEQ ID NO: 2558 (700346288H1), SEQ ID NO: 492 (700342832H1), SEQ ID NO: 504 (700342846H1), SEQ ID NO: 172 (700342278H1), SEQ ID NO: 1738 (700344878H1), SEQ ID NO: 2014 (700345384H1), SEQ ID NO: 390 (700342666H1), SEQ ID NO: 401 (700342682H1), SEQ ID NO: 3512 (700380263H1), SEQ ID NO: 3441 (700380096H1), SEQ ID NO: 2370 (700346008H1), SEQ ID NO: 1323 (700344124H1), SEQ ID NO: 634 (700343087H1), SEQ ID NO: 1986 (700345330H1), SEQ ID NO: 238 (700342403H1), SEQ ID NO: 987 (700343603H1), SEQ ID NO: 273 (700342463H1), SEQ ID NO: 208 (700342340H1), SEQ ID NO: 2674 (700346475H1), SEQ ID NO: 3119 (700347222H1), SEQ ID NO: 2203 (700345716H1), SEQ ID NO: 2186 (700345686H1), SEQ ID NO: 1307 (700344096H1), SEQ ID NO: 1372 (700344196H1), SEQ ID NO: 3053 (700347093H1), SEQ ID NO: 2507 (700346218H1), SEQ ID NO: 1049 (700343703H1), SEQ ID NO: 391 (700342667H1), SEQ ID NO: 3092 (700347176H1), SEQ ID NO: 3389 (700379975H1), SEQ ID NO: 326 (700342560H1), SEQ ID NO: 3605 (700380575H1), SEQ ID NO: 2946 (700346918H1), SEQ ID NO: 907 (700343487H1), SEQ ID NO: 3366 (700379925H1), SEQ ID NO: 1237 (700343991H1), SEQ ID NO: 3610 (700380584H1), SEQ ID NO: 2464 (700346146H1), SEQ ID NO: 3650 (700380683H1), SEQ ID NO: 2024 (700345405H1), SEQ ID NO: 1145 (700343841H1), SEQ ID NO: 1590 (700344655H1), SEQ ID NO: 2219 (700345747H1), SEQ ID NO: 224 (700342363H1), SEQ ID NO: 1108 (700343789H1), SEQ ID NO: 344 (700342589H1), SEQ ID NO: 2995 (700346996H1), SEQ ID NO: 3282 (700379719H1), SEQ ID NO: 1826 (700345020H1), SEQ ID NO: 1443 (700344334H1), SEQ ID NO: 3021 (700347040H1), SEQ ID NO: 558 (700342952H1), SEQ ID NO: 2292 (700345873H1), SEQ ID NO: 2030 (700345412H1), SEQ ID NO: 1005 (700343632H1), SEQ ID NO: 254 (700342432H1), SEQ ID NO: 1506 (700344454H1), SEQ ID NO: 1146 (700343842H1), SEQ ID NO: 1756 (700344911H1), SEQ ID NO: 2471 (700346157H1), SEQ ID NO: 1170 (700343875H1), SEQ ID NO: 1765 (700344928H1), SEQ ID NO: 1585 (700344649H1), SEQ ID NO: 495 (700342835H1), SEQ ID NO: 392 (700342670H1), SEQ ID NO: 5179 (700355947H1), SEQ ID NO: 4225 (700353526H1), SEQ ID NO: 5639 (700382063H1), SEQ ID NO: 3797 (700352605H1), SEQ ID NO: 4188 (700353271H1), SEQ ID NO: 5940 (700382691H1), SEQ ID NO: 4388 (700353955H1), SEQ ID NO: 5962 (700382739H1), SEQ ID NO: 6034 (700382890H1), SEQ ID NO: 4988 (700355520H1), SEQ ID NO: 5105 (700355788H1), SEQ ID NO: 5943 (700382702H1), SEQ ID NO: 4276 (700353625H1), SEQ ID NO: 5267 (700356140H1), SEQ ID NO: 3698 (700282414H2), SEQ ID NO: 4942 (700355431H1), SEQ ID NO: 4803 (700355029H1), SEQ ID NO: 5171 (700355925H1), SEQ ID NO: 5366 (700356466H1), SEQ ID NO: 4940 (700355428H1), SEQ ID NO: 5895 (700382605H1), SEQ ID NO: 4403 (700354129H1), SEQ ID NO: 4830 (700355088H1), SEQ ID NO: 5695 (700382183H1), SEQ ID NO: 5440 (700356708H1), SEQ ID NO: 5526 (700357108H1), SEQ ID NO: 5529 (700357122H1), SEQ ID NO: 5371 (700356474H1), SEQ ID NO: 4029 (700353005H1), SEQ ID NO: 5099 (700355779H1), SEQ ID NO: 4100 (700353128H1), SEQ ID NO: 3790 (700282575H2), SEQ ID NO: 3835 (700352675H1), SEQ ID NO: 3943 (700352843H1), SEQ ID NO: 3856 (700352709H1), SEQ ID NO: 3874 (700352735H1), SEQ ID NO: 4959 (700355462H1), SEQ ID NO: 5010 (700355558H1), SEQ ID NO: 4336 (700353828H1), SEQ ID NO: 5420 (700356627H1), SEQ ID NO: 5751 (700382275H1), SEQ ID NO: 5301 (700356219H1), SEQ ID NO: 6184 (700383158H1), SEQ ID NO: 5003 (700355547H1), SEQ ID NO: 4800 (700355026H1), SEQ ID NO: 4610 (700354647H1), SEQ ID NO: 4789 (700355009H1), SEQ ID NO: 4466 (700354337H1), SEQ ID NO: 5278 (700356158H1), SEQ ID NO: 4742 (700354908H1), SEQ ID NO: 5260 (700356129H1), SEQ ID NO: 5661 (700382106H1), SEQ ID NO: 3806 (700352616H1), SEQ ID NO: 4555 (700354518H1), SEQ ID NO: 5232 (700356066H1), SEQ ID NO: 5216 (700356023H1), SEQ ID NO: 6002 (700382827H1), SEQ ID NO: 4217 (700353446H1), SEQ ID NO: 4793 (700355016H1), SEQ ID NO: 4204 (700353409H1), SEQ ID NO: 6178 (700383149H1), SEQ ID NO: 6083 (700382979H1), SEQ ID NO: 4876 (700355249H1), SEQ ID NO: 4031 (700353007H1), SEQ ID NO: 6098 (700383013H1), SEQ ID NO: 6102 (700383021H1), SEQ ID NO: 4421 (700354239H1), SEQ ID NO: 5946 (700382708H1), SEQ ID NO: 5214 (700356020H1), SEQ ID NO: 5703 (700382195H1), SEQ ID NO: 3750 (700282503H2), SEQ ID NO: 4212 (700353432H1), SEQ ID NO: 6090 (700382995H1), SEQ ID NO: 4713 (700354850H1), SEQ ID NO: 4197 (700353284H1), SEQ ID NO: 5692 (700382179H1), SEQ ID NO: 4727 (700354875H1), SEQ ID NO: 5924 (700382668H1), SEQ ID NO: 4052 (700353052H1), SEQ ID NO: 4111 (700353142H1), SEQ ID NO: 4043 (700353028H1), SEQ ID NO: 5723 (700382229H1), SEQ ID NO: 5560 (700357402H1), SEQ ID NO: 5603 (700357489H1), SEQ ID NO: 5700 (70038219151), SEQ ID NO: 5875 (700382543H1), SEQ ID NO: 3811 (700352625H1), SEQ ID NO: 6081 (700382975H1), SEQ ID NO: 5186 (700355963H1), SEQ ID NO: 5813 (700382392H1), SEQ ID NO: 5155 (700355889H1), SEQ ID NO: 4632 (700354689H1), SEQ ID NO: 5674 (700382139H1), SEQ ID NO: 4279 (700353629H1), SEQ ID NO: 4625 (700354676H1), SEQ ID NO: 5586 (700357445H1), SEQ ID NO: 4054 (700353057H1), SEQ ID NO: 5724 (700382230H1), SEQ ID NO: 5699 (700382190H1), SEQ ID NO: 6181 (700383154H1), SEQ ID NO: 3982 (700352912H1), SEQ ID NO: 4654 (700354742H1), SEQ ID NO: 4737 (700354895H1), SEQ ID NO: 4321 (700353779H1), SEQ ID NO: 4934 (700355415H1), SEQ ID NO: 5543 (700357160H1), SEQ ID NO: 4933 (700355414H1), SEQ ID NO: 3713 (700282435H1), SEQ ID NO: 3787 (700282569H2), SEQ ID NO: 3789 (700282571H2), SEQ ID NO: 4814 (700355053H1), SEQ ID NO: 5555 (700357189H1), SEQ ID NO: 3876 (700352737H1), SEQ ID NO: 4208 (700353424H1), SEQ ID NO: 3827 (700352654H1), SEQ ID NO: 3863 (700352719H1), SEQ ID NO: 6130 (700383062H1), SEQ ID NO: 4041 (700353023H1), SEQ ID NO: 5101 (700355781H1), SEQ ID NO: 5792 (700382353H1), SEQ ID NO: 4983 (700355513H1), SEQ ID NO: 4089 (700353114H1), SEQ ID NO: 4348 (700353853H1), SEQ ID NO: 6182 (700383155H1), SEQ ID NO: 5716 (700382218H1), SEQ ID NO: 5102 (700355783H1), SEQ ID NO: 5859 (700382507H1), SEQ ID NO: 5442 (700356725H1), SEQ ID NO: 5998 (700382817H1), SEQ ID NO: 4037 (700353014H1), SEQ ID NO: 4404 (700354142H1), SEQ ID NO: 5734 (700382245H1), SEQ ID NO: 5392 (700356534H1), SEQ ID NO: 5675 (700382140H1), SEQ ID NO: 5746 (700382267H1), SEQ ID NO: 4102 (700353130H1), SEQ ID NO: 4536 (700354478H1), SEQ ID NO: 4219 (700353509H1), SEQ ID NO: 5151 (700355885H1), SEQ ID NO: 4268 (700353612H1), SEQ ID NO: 3774 (700282549H2), SEQ ID NO: 3772 (700282547H2), SEQ ID NO: 5283 (700356171H1), SEQ ID NO: 5647 (700382075H1), SEQ ID NO: 5778 (700382330H1), SEQ ID NO: 5014 (700355577H1), SEQ ID NO: 5825 (700382426H1), SEQ ID NO: 5866 (700382525H1), SEQ ID NO: 4556 (700354519H1), SEQ ID NO: 3821 (700352645H1), SEQ ID NO: 4762 (700354942H1), SEQ ID NO: 4981 (700355507H1), SEQ ID NO: 5540 (700357155H1), SEQ ID NO: 5476 (700356835H1), SEQ ID NO: 5650 (700382078H1), SEQ ID NO: 5750 (700382273H1), SEQ ID NO: 5100 (700355780H1), SEQ ID NO: 4553 (700354516H1), SEQ ID NO: 4923 (700355345H1), SEQ ID NO: 4922 (700355344H1), SEQ ID NO: 3773 (700282548H2), SEQ ID NO: 3715 (700282438H2), SEQ ID NO: 5022 (700355594H1), SEQ ID NO: 5516 (700356974H1), SEQ ID NO: 4451 (700354305H1), SEQ ID NO: 4938 (700355422H1), SEQ ID NO: 5436 (700356695H1), SEQ ID NO: 5742 (700382260H1), SEQ ID NO: 5242 (700356081H1), SEQ ID NO: 4766 (700354954H1), SEQ ID NO: 3792 (700282584H2), SEQ ID NO: 3795 (700282592H2), SEQ ID NO: 5569 (700357415H1), SEQ ID NO: 5142 (700355871H1), SEQ ID NO: 4305 (700353713H1), SEQ ID NO: 4559 (700354534H1), SEQ ID NO: 5188 (700355966H1), SEQ ID NO: 5088 (700355766H1), SEQ ID NO: 5286 (700356177H1), SEQ ID NO: 5294 (700356193H1), SEQ ID NO: 3995 (700352935H1), SEQ ID NO: 4615 (700354658H1), SEQ ID NO: 5453 (700356767H1), SEQ ID NO: 4667 (700354769H1), SEQ ID NO: 5832 (700382439H1), SEQ ID NO: 5839 (700382450H1), SEQ ID NO: 6101 (700383019H1), SEQ ID NO: 6097 (700383011H1), SEQ ID NO: 4951 (700355447H1), SEQ ID NO: 4423 (700354247H1), SEQ ID NO: 4672 (700354777H1), SEQ ID NO: 4682 (700354793H1), SEQ ID NO: 5395 (700356541H1), SEQ ID NO: 5311 (700356241H1), SEQ ID NO: 4522 (700354446H1), SEQ ID NO: 4460 (700354326H1), SEQ ID NO: 5493 (700356901H1), SEQ ID NO: 5507 (700356933H1), SEQ ID NO: 4512 (700354425H1), SEQ ID NO: 5217 (700356025H1), SEQ ID NO: 4159 (700353215H1), SEQ ID NO: 5480 (700356847H1), SEQ ID NO: 6123 (700383051H1), SEQ ID NO: 4452 (700354310H1), SEQ ID NO: 4499 (700354409H1), SEQ ID NO: 4808 (700355040H1), SEQ ID NO: 5800 (700382365H1), SEQ ID NO: 5710 (700382210H1), SEQ ID NO: 6030 (700382882H1), SEQ ID NO: 5461 (700356796H1), SEQ ID NO: 5548 (700357173H1), SEQ ID NO: 4790 (700355011H1), SEQ ID NO: 5201 (700355989H1), SEQ ID NO: 4286 (700353653H1), SEQ ID NO: 6103 (700383023H1), SEQ ID NO: 6099 (700383015H1), SEQ ID NO: 5317 (700356252H1), SEQ ID NO: 5399 (700356551H1), SEQ ID NO: 5667 (700382123H1), SEQ ID NO: 6176 (700383147H1), SEQ ID NO: 5084 (700355758H1), SEQ ID NO: 4566 (700354558H1), SEQ ID NO: 4845 (700355173H1), SEQ ID NO: 4819 (700355067H1), SEQ ID NO: 3775 (700282550H2), SEQ ID NO: 5273 (700356152H1), SEQ ID NO: 6111 (700383037H1), SEQ ID NO: 3984 (700352916H1), SEQ ID NO: 5481 (700356848H1), SEQ ID NO: 5309 (700356236H1), SEQ ID NO: 4456 (700354317H1), SEQ ID NO: 4824 (700355077H1), SEQ ID NO: 5240 (700356076H1), SEQ ID NO: 5121 (700355829H1), SEQ ID NO: 5418 (700356624H1), SEQ ID NO: 4603 (700354637H1), SEQ ID NO: 5718 (700382220H1), SEQ ID NO: 5747 (700382268H1), SEQ ID NO: 6189 (700383166H1), SEQ ID NO: 6129 (700383061H1), SEQ ID NO: 5494 (700356903H1), SEQ ID NO: 5508 (700356935H1), SEQ ID NO: 4797 (700355022H1), SEQ ID NO: 5691 (700382176H1), SEQ ID NO: 5862 (700382513H1), SEQ ID NO: 5917 (700382654H1), SEQ ID NO: 5328 (700356273H1), SEQ ID NO: 3971 (700352891H1), SEQ ID NO: 5463 (700356802H1), SEQ ID NO: 4588 (700354606H1), SEQ ID NO: 4342 (700353839H1), SEQ ID NO: 5376 (700356483H1), SEQ ID NO: 5136 (700355856H1), SEQ ID NO: 5154 (700355888H1), SEQ ID NO: 5916 (700382649H1), SEQ ID NO: 5869 (700382537H1), SEQ ID NO: 5231 (700356062H1), SEQ ID NO: 4194 (700353279H1), SEQ ID NO: 4978 (700355496H1), SEQ ID NO: 5923 (700382665H1), SEQ ID NO: 4755 (700354930H1), SEQ ID NO: 4008 (700352961H1), SEQ ID NO: 5424 (700356644H1), SEQ ID NO: 4035 (700353012H1), SEQ ID NO: 5323 (700356265H1), SEQ ID NO: 4818 (700355065H1), SEQ ID NO: 5367 (700356468H1), SEQ ID NO: 5888 (700382579H1), SEQ ID NO: 3690 (700282401H2), SEQ ID NO: 3794 (700282591H2), SEQ ID NO: 3764 (700282522H2), SEQ ID NO: 3758 (700282514H2), SEQ ID NO: 5128 (700355842H1), SEQ ID NO: 3818 (700352636H1), SEQ ID NO: 3781 (700282561H2), SEQ ID NO: 3782 (700282562H2), SEQ ID NO: 4889 (700355286H1), SEQ ID NO: 6104 (700383026H1), SEQ ID NO: 5138 (700355861H1), SEQ ID NO: 5140 (700355866H1), SEQ ID NO: 6006 (700382834H1), SEQ ID NO: 5880 (700382554H1), SEQ ID NO: 6116 (700383043H1), SEQ ID NO: 5774 (700382324H1), SEQ ID NO: 4024 (700352993H1), SEQ ID NO: 4820 (700355070H1), SEQ ID NO: 5438 (700356702H1), SEQ ID NO: 4150 (700353201H1), SEQ ID NO: 5909 (700382636H1), SEQ ID NO: 5551 (700357183H1), SEQ ID NO: 5055 (700355708H1), SEQ ID NO: 4551 (700354508H1), SEQ ID NO: 3975 (700352903H1), SEQ ID NO: 5793 (700382354H1), SEQ ID NO: 5823 (700382424H1), SEQ ID NO: 3915 (700352802H1), SEQ ID NO: 5146 (700355877H1), SEQ ID NO: 5879 (700382550H1), SEQ ID NO: 5627 (700382041H1), SEQ ID NO: 4211 (700353431H1), SEQ ID NO: 5894 (700382604H1), SEQ ID NO: 5806 (700382377H1), SEQ ID NO: 5558 (700357194H1), SEQ ID NO: 5396 (700356542H1), SEQ ID NO: 3892 (700352760H1), SEQ ID NO: 5211 (700356015H1), SEQ ID NO: 4011 (700352967H1), SEQ ID NO: 5282 (700356167H1), SEQ ID NO: 5978 (700382773H1), SEQ ID NO: 4898 (700355307H1), SEQ ID NO: 5522 (700356984H1), SEQ ID NO: 5226 (700356047H1), SEQ ID NO: 3777 (700282554H2), SEQ ID NO: 3776 (700282553H2), SEQ ID NO: 5817 (700382401H1), SEQ ID NO: 5858 (700382494H1), SEQ ID NO: 4627 (700354678H1), SEQ ID NO: 5411 (700356591H1), SEQ ID NO: 4257 (700353590H1), SEQ ID NO: 4833 (700355093H1), SEQ ID NO: 4148 (700353195H1), SEQ ID NO: 5210 (700356014H1), SEQ ID NO: 4422 (700354244H1), SEQ ID NO: 4949 (700355444H1), SEQ ID NO: 4481 (700354371H1), SEQ ID NO: 6095 (700383009H1), SEQ ID NO: 4670 (700354774H1), SEQ ID NO: 4680 (700354790H1).

4. A nucleic acid sequence complementary to at least a fragment of at least one corn tassel-derived polynucleotide of claim 1.

5. A method for detecting a polynucleotide in a biological sample, the method comprising the steps of:
a) providing a biological sample containing nucleic acids,
b) hybridizing a polynucleotide of claim 4 to nucleic acids in the biological sample, thereby forming a hybridization complex; and
c) detecting the hybridization complex, wherein the presence of the hybridization complex correlates with the presence of the polynucleotide in the sample.

6. The method of claim 5 wherein the nucleic acids of the biological sample are amplified prior to hybridization.

7. A method for using oligomers and amplification to recover a regulatory element from a DNA library, the method comprising the steps of:
a) designing oligomers to at least one of the sequences of Claim
b) combining the oligomers with a DNA library under appropriate conditions to amplify the sequence of step a);
c) comparing the nucleic acid sequence of step a) with the amplified sequence to identify overlapping areas;
d) identifying additional sequence beyond the overlapping areas, and
e) repeating steps a) through d) until the regulatory element is recovered.

8. A tassel-specific regulatory element which regulates the expression of at least one of the sequences of claim 1.

9. An expression vector containing the regulatory element of claim 8.

10. A plant containing the expression vector of claim 9.

11. An expression vector containing the corn tassel-derived polynucleotide of claim 1.

12. A host cell containing the expression vector of claim 11.

13. A method for producing a corn tassel-derived polypeptide, said method comprising the steps of:
a) culturing the host cells of claim 12 under conditions suitable for the expression of the corn tassel-derived polypeptide; and
b) recovering the corn tassel-derived polypeptide from the cell culture.

14. A purified corn tassel-derived polypeptide (CDP) encoded by at least one of the corn tassel-derived polynucleotides of claim 1.

15. An anti-CDP antibody specifically binding the purified corn tassel-derived polypeptide of claim 14.

16. A method of identifying a test compound which specifically binds to the polypeptide of claim 14, the method comprising the steps of:
a) providing a test compound;
b) combining the polypeptide with the test compound for a sufficient time and under suitable conditions for binding; and
c) detecting binding of the polypeptide to the test compound, thereby identifying the compound which specifically binds the polypeptide.

17. A method of screening a plurality of molecules for specific binding to the polynucleotide of claim 1, the method comprising the steps of:
a) providing the plurality of molecules;
b) combining the polynucleotide with each of the plurality of molecules for a time sufficient to allow binding under suitable conditions; and
c) detecting binding of the polynucleotide to each of the plurality of molecules, thereby identifying the molecules which specifically bind the polynucleotide.
